United States Patent Application Publication US 2026/0209739 A1 - sequence listing, part 4

SEQ ID NO: 55774 - RNA, 27 nt, synthetic construct
  misc_feature 1..27: note = DNA dC-dU-editing enzyme APOBEC-3D (26-34)
  source 1..27: mol_type = other RNA
atcctgtacggcagaagctatacctgg

SEQ ID NO: 55775 - RNA, 45 nt, synthetic construct
  misc_feature 1..45: note = Vesicle-associated membrane protein 3 (28-42)
  source 1..45: mol_type = other RNA
atcatgagagtgaacgtcgacaaggttctggagagggatcagaaa

SEQ ID NO: 55776 - RNA, 39 nt, synthetic construct
  misc_feature 1..39: note = Receptor-type tyrosine-protein phosphatase alpha (79-91)
  source 1..39: mol_type = other RNA
atcaacagaaggatggccgacgataataagctgttccgg

SEQ ID NO: 55777 - RNA, 42 nt, synthetic construct
  misc_feature 1..42: note = Protocadherin-9 (157-170)
  source 1..42: mol_type = other RNA
atcaacagcagattccccattccttccgccaccgacccagat

SEQ ID NO: 55778 - RNA, 48 nt, synthetic construct
  misc_feature 1..48: note = Ras GTPase-activating-like protein IQGAP1 (232-247)
  source 1..48: mol_type = other RNA
atccccgccgacaccttcgctgcactgaagaaccctaatgccatgctc

SEQ ID NO: 55779 - RNA, 36 nt, synthetic construct
  misc_feature 1..36: note = Platelet endothelial cell adhesion molecule (96-107)
  source 1..36: mol_type = other RNA
atccccgaggtgagaatttacgacagcggcacctat

SEQ ID NO: 55780 - RNA, 27 nt, synthetic construct
  misc_feature 1..27: note = NACHT, LRR and PYD domains-containing protein 2 (193-201)
  source 1..27: mol_type = other RNA
atccccttcagcaaccctagagtgctg

SEQ ID NO: 55781 - RNA, 42 nt, synthetic construct
  misc_feature 1..42: note = Fibromodulin (308-321)
  source 1..42: mol_type = other RNA
atcccccctgtgaacaccaatctggagaacctctaccttcag

SEQ ID NO: 55782 - RNA, 24 nt, synthetic construct
  misc_feature 1..24: note = Eukaryotic translation initiation factor 6 (46-53)
  source 1..24: mol_type = other RNA
atccccgtggtccacgccagcatt

SEQ ID NO: 55783 - RNA, 27 nt, synthetic construct
  misc_feature 1..27: note = Monoglyceride lipase (24-32)
  source 1..27: mol_type = other RNA
atcccctaccaggacctgcctcacctc

SEQ ID NO: 55784 - RNA, 27 nt, synthetic construct
  misc_feature 1..27: note = Methyltransferase-like protein 7A (225-233)
  source 1..27: mol_type = other RNA
atccaggcccccctgagctgggagctc

SEQ ID NO: 55785 - RNA, 27 nt, synthetic construct
  misc_feature 1..27: note = Cyclin-dependent kinase 14 (264-272)
  source 1..27: mol_type = other RNA
atcagcgacaccggcgagctgaagctc

SEQ ID NO: 55786 - RNA, 27 nt, synthetic construct
  misc_feature 1..27: note = Probable ATP-dependent RNA helicase DDX46 (331-339)
  source 1..27: mol_type = other RNA
atcagcatgaagattctgaactccctc

SEQ ID NO: 55787 - RNA, 48 nt, synthetic construct
  misc_feature 1..48: note = Low affinity immunoglobulin epsilon Fc receptor (10-25)
  source 1..48: mol_type = other RNA
atcagccaggagctggaagagctcagagccgaacaacagaggcttaag

SEQ ID NO: 55788 - RNA, 42 nt, synthetic construct
  misc_feature 1..42: note = Golgi apparatus protein 1 (553-566)
  source 1..42: mol_type = other RNA
atcagcagagactggaagctggatcccgtgctctacaggaaa

SEQ ID NO: 55789 - RNA, 24 nt, synthetic construct
  misc_feature 1..24: note = B-lymphocyte antigen CD19 (274-281)
  source 1..24: mol_type = other RNA
atcaccgccagacccgtgctgtgg

SEQ ID NO: 55790 - RNA, 27 nt, synthetic construct
  misc_feature 1..27: note = Zinc finger protein 107 (139-147)
  source 1..27: mol_type = other RNA
aaggccttcaactggtttagcaccctg

SEQ ID NO: 55791 - RNA, 45 nt, synthetic construct
  misc_feature 1..45: note = Interleukin-4 receptor subunit alpha (303-317)
  source 1..45: mol_type = other RNA
aaggccttcagctccctgctcgcttcttcagcagtgagtcccgag

SEQ ID NO: 55792 - RNA, 42 nt, synthetic construct
  misc_feature 1..42: note = Platelet endothelial cell adhesion molecule (274-287)
  source 1..42: mol_type = other RNA
aaggacaaagccatcgtggctcacaacagacatggcaataag

SEQ ID NO: 55793 - RNA, 45 nt, synthetic construct
  misc_feature 1..45: note = Platelet endothelial cell adhesion molecule (274-288)
  source 1..45: mol_type = other RNA
aaggacaaagccatcgtggctcacaacagacatggcaataaggca

SEQ ID NO: 55794 - RNA, 27 nt, synthetic construct
  misc_feature 1..27: note = Endoplasmic reticulum resident protein 44 (336-344)
  source 1..27: mol_type = other RNA
aaggacgtgctgatccccggcaaactc

SEQ ID NO: 55795 - RNA, 27 nt, synthetic construct
  misc_feature 1..27: note = Cytoskeleton-associated protein 4 (71-79)
  source 1..27: mol_type = other RNA
aaggaggccgctgacaccgaaagactg

SEQ ID NO: 55796 - RNA, 33 nt, synthetic construct
  misc_feature 1..33: note = Uncharacterized protein CXorf21 (31-41)
  source 1..33: mol_type = other RNA
aaggaggaagagaccaacagcgtggccacactg

SEQ ID NO: 55797 - RNA, 24 nt, synthetic construct
  misc_feature 1..24: note = Negative elongation factor E (373-380)
  source 1..24: mol_type = other RNA
aaggagaacctggtggacggcttc

SEQ ID NO: 55798 - RNA, 27 nt, synthetic construct
  misc_feature 1..27: note = Cell division cycle-associated 7-like protein (280-288)
  source 1..27: mol_type = other RNA
aagttcgccgaggaattttacagcttc

SEQ ID NO: 55799 - RNA, 42 nt, synthetic construct
  misc_feature 1..42: note = IgG receptor FcRn large subunit p51 (132-145)
  source 1..42: mol_type = other RNA
aagttcgccctgaacggcgaggaatttatgaatttcgacctc

SEQ ID NO: 55800 - RNA, 36 nt, synthetic construct
  misc_feature 1..36: note = Heterogeneous nuclear ribonucleoprotein A1-like 2 (124-135)
  source 1..36: mol_type = other RNA
aagggcgggaacttcggaggtagaagctccggcccc

SEQ ID NO: 55801 - RNA, 39 nt, synthetic construct
  misc_feature 1..39: note = Heterogeneous nuclear ribonucleoprotein A3 (158-170)
  source 1..39: mol_type = other RNA
aagggcgggagcttcggaggtagatcctctggctcaccc

SEQ ID NO: 55802 - RNA, 36 nt, synthetic construct
  misc_feature 1..36: note = Low affinity immunoglobulin epsilon Fc receptor (101-112)
  source 1..36: mol_type = other RNA
aagggcaccaaacagtgggtgcacgccagatacgct

SEQ ID NO: 55803 - RNA, 42 nt, synthetic construct
  misc_feature 1..42: note = Perilipin-3 (65-78)
  source 1..42: mol_type = other RNA
aagggcgtgagaaccctgacagccgctgcagtcagcggggcc

SEQ ID NO: 55804 - RNA, 45 nt, synthetic construct
  misc_feature 1..45: note = Perilipin-3 (65-79)
  source 1..45: mol_type = other RNA
aagggcgtgagaaccctgacagccgctgcagtcagcggggcccag

SEQ ID NO: 55805 - RNA, 30 nt, synthetic construct
  misc_feature 1..30: note = B-cell linker protein (6-15)
  source 1..30: mol_type = other RNA
aagatcaccgtgcccgccagccagaaactg

SEQ ID NO: 55806 - RNA, 27 nt, synthetic construct
  misc_feature 1..27: note = Afadin- and alpha-actinin-binding protein (328-336)
  source 1..27: mol_type = other RNA
aagctggacaaccaggtgagcaaagtc

SEQ ID NO: 55807 - RNA, 30 nt, synthetic construct
  misc_feature 1..30: note = B-lymphocyte antigen CD19 (150-159)
  source 1..30: mol_type = other RNA
aagctgatgagccccaaactctacgtgtgg

SEQ ID NO: 55808 - RNA, 54 nt, synthetic construct
  misc_feature 1..54: note = Ragulator complex protein LAMTOR3 (12-29)
  source 1..54: mol_type = other RNA
aagctgcccagcgtggagggcctccacgccatcgtcgtttccgacagagatggg

SEQ ID NO: 55809 - RNA, 30 nt, synthetic construct
  misc_feature 1..30: note = RNA polymerase II subunit A C-terminal domain phosphatase (238-247)
  source 1..30: mol_type = other RNA
aagctgtacgagctccacgtgttcaccttt

SEQ ID NO: 55810 - RNA, 27 nt, synthetic construct
  misc_feature 1..27: note = Ubiquitin-like protein 7 (100-108)
  source 1..27: mol_type = other RNA
aagcccgagcctgtggacaaagtcgcc

SEQ ID NO: 55811 - RNA, 45 nt, synthetic construct
  misc_feature 1..45: note = B- and T-lymphocyte attenuator (252-266)
  source 1..45: mol_type = other RNA
aagcccggcatcgtgtacgccagcctgaaccactccgtcattggg

SEQ ID NO: 55812 - RNA, 27 nt, synthetic construct
  misc_feature 1..27: note = hematopoietic SH2 domain-containing protein isoform X7 (112-120)
  source 1..27: mol_type = other RNA
aagcccatcgagcctagaagggaactg

SEQ ID NO: 55813 - RNA, 27 nt, synthetic construct
  misc_feature 1..27: note = Dynamin-binding protein (183-191)
  source 1..27: mol_type = other RNA
aagcccagacagagctcccctcaactg

SEQ ID NO: 55814 - RNA, 27 nt, synthetic construct
  misc_feature 1..27: note = AT-rich interactive domain-containing protein 5B (518-526)
  source 1..27: mol_type = other RNA
aagcccagcgaggaaagaaaaaccatc

SEQ ID NO: 55815 - RNA, 27 nt, synthetic construct
  misc_feature 1..27: note = Plateletoprotein 4 (394-402)
  source 1..27: mol_type = other RNA
aagcccagcgagaaaatccaggtgctg

SEQ ID NO: 55816 - RNA, 27 nt, synthetic construct
  misc_feature 1..27: note = Zinc finger protein 638 (538-546)
  source 1..27: mol_type = other RNA
aagcccaccagcgccagatccggcctg

SEQ ID NO: 55817 - RNA, 27 nt, synthetic construct
  misc_feature 1..27: note = Dynamin-binding protein (531-539)
  source 1..27: mol_type = other RNA
aagcagctgctcgccgctcttgagatc

SEQ ID NO: 55818 - RNA, 27 nt, synthetic construct
  misc_feature 1..27: note = AT-rich interactive domain-containing protein 5B (171-179)
  source 1..27: mol_type = other RNA
aagcagacccccaaagtgctggtcgtt

SEQ ID NO: 55819 - RNA, 27 nt, synthetic construct
  misc_feature 1..27: note = Dystrophin (152-160)
  source 1..27: mol_type = other RNA
aagcaggtggccagctccaccggcttc

SEQ ID NO: 55820 - RNA, 39 nt, synthetic construct
  misc_feature 1..39: note = Endoplasmin (72-84)
  source 1..39: mol_type = other RNA
aagagcgagaaattcgcctttcaggctgaagtgaacaga

SEQ ID NO: 55821 - RNA, 30 nt, synthetic construct
  misc_feature 1..30: note = Probable ATP-dependent RNA helicase DDX46 (374-383)
  source 1..30: mol_type = other RNA
aagaccatcgccttcctgctccccatgttt

SEQ ID NO: 55822 - RNA, 27 nt, synthetic construct
  misc_feature 1..27: note = T-cell activation Rho GTPase-activating protein (56-64)
  source 1..27: mol_type = other RNA
aaggtgctgagctggcccttcctcatg

SEQ ID NO: 55823 - RNA, 30 nt, synthetic construct
  misc_feature 1..30: note = Cyclin-dependent kinase 14 (155-164)
  source 1..30: mol_type = other RNA
aaggtgaacggcaaactggtcgccctcaag

SEQ ID NO: 55824 - RNA, 27 nt, synthetic construct
  misc_feature 1..27: note = DmX-like protein 1 (194-202)
  source 1..27: mol_type = other RNA
aaggtgtggtacaacgtcgagaattgg

SEQ ID NO: 55825 - RNA, 30 nt, synthetic construct
  misc_feature 1..30: note = Zinc finger protein 638 (730-739)
  source 1..30: mol_type = other RNA
aagtacatcgagaccacacccctgactatt

SEQ ID NO: 55826 - RNA, 42 nt, synthetic construct
  misc_feature 1..42: note = Alpha-1B-glycoprotein (204-217)
  source 1..42: mol_type = other RNA
ctggcccccctcgagggcgctagattcgcacttgtgagggaa

SEQ ID NO: 55827 - RNA, 45 nt, synthetic construct
  misc_feature 1..45: note = Alpha-1B-glycoprotein (204-218)
  source 1..45: mol_type = other RNA
ctggcccccctcgagggcgctagattcgcacttgtgagggaagac

SEQ ID NO: 55828 - RNA, 45 nt, synthetic construct
  misc_feature 1..45: note = Transmembrane protein C16orf54 (117-131)
  source 1..45: mol_type = other RNA
ctggaggccagagctaccgcaccccctgccccaagcgcgccgaac

SEQ ID NO: 55829 - RNA, 27 nt, synthetic construct
  misc_feature 1..27: note = T-cell activation Rho GTPase-activating protein (66-74)
  source 1..27: mol_type = other RNA
ctggagaacgaccagagcctctccttc

SEQ ID NO: 55830 - RNA, 39 nt, synthetic construct
  misc_feature 1..39: note = Polypeptide N-acetylgalactosaminyltransferase 1 (355-367)
  source 1..39: mol_type = other RNA
ctggagaacatctaccccgacagccagattcctagacac

SEQ ID NO: 55831 - RNA, 42 nt, synthetic construct
  misc_feature 1..42: note = Polypeptide N-acetylgalactosaminyltransferase 1 (355-368)
  source 1..42: mol_type = other RNA
ctggagaacatctaccccgacagccagattcctagacactat

SEQ ID NO: 55832 - RNA, 27 nt, synthetic construct
  misc_feature 1..27: note = Uncharacterized protein CXorf21 (214-222)
  source 1..27: mol_type = other RNA
ctggagcagaaggtggtcgaactctac

SEQ ID NO: 55833 - RNA, 30 nt, synthetic construct
  misc_feature 1..30: note = Cadherin EGF LAG seven-pass G-type receptor 1 (2401-2410)
  source 1..30: mol_type = other RNA
ctggaggtggaagagagaaccaagcccgtc

SEQ ID NO: 55834 - RNA, 39 nt, synthetic construct
  misc_feature 1..39: note = Cation-independent mannose-6-phosphate receptor (2073-2085)
  source 1..39: mol_type = other RNA
ctgggcgacatctacttcaagctctttagagccagcggg

SEQ ID NO: 55835 - RNA, 42 nt, synthetic construct
  misc_feature 1..42: note = Ragulator complex protein LAMTOR3 (19-32)
  source 1..42: mol_type = other RNA
ctgcacgccatcgtggtcagcgacagagatggcgttcccgtg

SEQ ID NO: 55836 - RNA, 45 nt, synthetic construct
  misc_feature 1..45: note = Ragulator complex protein LAMTOR3 (19-33)
  source 1..45: mol_type = other RNA
ctgcacgccatcgtggtcagcgacagagatggcgttcccgtgatt

SEQ ID NO: 55837 - RNA, 48 nt, synthetic construct
  misc_feature 1..48: note = Ragulator complex protein LAMTOR3 (19-34)
  source 1..48: mol_type = other RNA
ctgcacgccatcgtggtcagcgacagagatggcgttcccgtgattaag

SEQ ID NO: 55838 - RNA, 39 nt, synthetic construct
  misc_feature 1..39: note = Golgi apparatus protein 1 (361-373)
  source 1..39: mol_type = other RNA
ctgatcgcccaggactacaaggtgagctattccctcgct

SEQ ID NO: 55839 - RNA, 45 nt, synthetic construct
  misc_feature 1..45: note = Ras GTPase-activating-like protein IQGAP1 (347-361)
  source 1..45: mol_type = other RNA
ctgaagcagctccttagcgacaaacaacagaagagacagtccggc

SEQ ID NO: 55840 - RNA, 48 nt, synthetic construct
  misc_feature 1..48: note = Ras GTPase-activating-like protein IQGAP1 (347-362)
  source 1..48: mol_type = other RNA
ctgaagcagctccttagcgacaaacaacagaagagacagtccggccag

SEQ ID NO: 55841 - RNA, 30 nt, synthetic construct
  misc_feature 1..30: note = NACHT, LRR and PYD domains-containing protein 2 (823-832)
  source 1..30: mol_type = other RNA
ctgctcgacgagggcgccaagcttctgtac

SEQ ID NO: 55842 - RNA, 39 nt, synthetic construct
  misc_feature 1..39: note = Beta-1,4-galactosyltransferase 1 (112-124)
  source 1..39: mol_type = other RNA
ctgaacagcctcacctaccaggtgcttgacgtccaaaga

SEQ ID NO: 55843 - RNA, 45 nt, synthetic construct
  misc_feature 1..45: note = Beta-1,4-galactosyltransferase 1 (112-126)
  source 1..45: mol_type = other RNA
ctgaacagcctcacctaccaggtgcttgacgtccaaagatatccc

SEQ ID NO: 55844 - RNA, 48 nt, synthetic construct
  misc_feature 1..48: note = Beta-1,4-galactosyltransferase 1 (112-127)
  source 1..48: mol_type = other RNA
ctgaacagcctcacctaccaggtgcttgacgtccaaagatatcccctg

SEQ ID NO: 55845 - RNA, 45 nt, synthetic construct
  misc_feature 1..45: note = Fas apoptotic inhibitory molecule 3 (120-134)
  source 1..45: mol_type = other RNA
ctgaacgtgcacagcgagtacgaaccctcctgggaggaacagcct

SEQ ID NO: 55846 - RNA, 45 nt, synthetic construct
  misc_feature 1..45: note = Phosphoinositide-3-kinase-interacting protein 1 (137-151)
  source 1..45: mol_type = other RNA
ctgcccgccagaagcgaggctgcagccgtgcagcctgtcatcggc

SEQ ID NO: 55847 - RNA, 27 nt, synthetic construct
  misc_feature 1..27: note = DmX-like protein 1 (1557-1565)
  source 1..27: mol_type = other RNA
ctgcccgcctacagagctcagctcctt

SEQ ID NO: 55848 - RNA, 42 nt, synthetic construct
  misc_feature 1..42: note = Putative endoplasmin-like protein (219-232)
  source 1..42: mol_type = other RNA
ctgcccgagttcgacggcaagagatttcagaacgtggccaaa

SEQ ID NO: 55849 - RNA, 36 nt, synthetic construct
  misc_feature 1..36: note = Cullin-associated NEDD8-dissociated protein 1 (297-308)
  source 1..36: mol_type = other RNA
ctgcccgagttctacaagaccgtgagccctgccctc

SEQ ID NO: 55850 - RNA, 27 nt, synthetic construct
  misc_feature 1..27: note = TBC1 domain family member 22A (121-129)
  source 1..27: mol_type = other RNA
ctgccccacagcgccaccgtgacactc

SEQ ID NO: 55851 - RNA, 36 nt, synthetic construct
  misc_feature 1..36: note = Glycosyltransferase 8 domain-containing protein 1 (157-168)
  source 1..36: mol_type = other RNA
ctgcccatcctcgtgcctagcgccaagaaagctatt

SEQ ID NO: 55852 - RNA, 39 nt, synthetic construct
  misc_feature 1..39: note = Glycosyltransferase 8 domain-containing protein 1 (157-169)
  source 1..39: mol_type = other RNA
ctgcccatcctcgtgcctagcgccaagaaagctatttac

SEQ ID NO: 55853 - RNA, 42 nt, synthetic construct
  misc_feature 1..42: note = Glycosyltransferase 8 domain-containing protein 1 (157-170)
  source 1..42: mol_type = other RNA
ctgcccatcctcgtgcctagcgccaagaaagctatttacatg

SEQ ID NO: 55854 - RNA, 45 nt, synthetic construct
  misc_feature 1..45: note = Glycosyltransferase 8 domain-containing protein 1 (157-171)
  source 1..45: mol_type = other RNA
ctgcccatcctcgtgcctagcgccaagaaagctatttacatggac

SEQ ID NO: 55855 - RNA, 48 nt, synthetic construct
  misc_feature 1..48: note = Glycosyltransferase 8 domain-containing protein 1 (157-172)
  source 1..48: mol_type = other RNA
ctgcccatcctcgtgcctagcgccaagaaagctatttacatggacgat

SEQ ID NO: 55856 - RNA, 27 nt, synthetic construct
  misc_feature 1..27: note = ATP-binding cassette sub-family A member 6 (899-907)
  source 1..27: mol_type = other RNA
ctgccccaggagcctagaaccagcctc

SEQ ID NO: 55857 - RNA, 39 nt, synthetic construct
  misc_feature 1..39: note = Beta-1,4-galactosyltransferase 1 (50-62)
  source 1..39: mol_type = other RNA
ctgccccagctcgtgggcgtcagcacccctcttcaaggg

SEQ ID NO: 55858 - RNA, 42 nt, synthetic construct
  misc_feature 1..42: note = Beta-1,4-galactosyltransferase 1 (50-63)
  source 1..42: mol_type = other RNA
ctgccccagctcgtgggcgtcagcacccctcttcaaggggga

SEQ ID NO: 55859 - RNA, 45 nt, synthetic construct
  misc_feature 1..45: note = Beta-1,4-galactosyltransferase 1 (50-64)
  source 1..45: mol_type = other RNA
ctgccccagctcgtgggcgtcagcacccctcttcaagggggatcc

SEQ ID NO: 55860 - RNA, 27 nt, synthetic construct
  misc_feature 1..27: note = Proline and serine-rich protein 2 (219-227)
  source 1..27: mol_type = other RNA
ctgcccagacctcagggcatcaccgtg

SEQ ID NO: 55861 - RNA, 42 nt, synthetic construct
  misc_feature 1..42: note = Pro-cathepsin H (48-61)
  source 1..42: mol_type = other RNA
ctgcccagccaggccttcgagtacatcctctataacaagggc

SEQ ID NO: 55862 - RNA, 45 nt, synthetic construct
  misc_feature 1..45: note = Pro-cathepsin H (48-62)
  source 1..45: mol_type = other RNA
ctgcccagccaggccttcgagtacatcctctataacaagggcatt

SEQ ID NO: 55863 - RNA, 48 nt, synthetic construct
  misc_feature 1..48: note = Pro-cathepsin H (48-63)
  source 1..48: mol_type = other RNA
ctgcccagccaggccttcgagtacatcctctataacaagggcattatg

SEQ ID NO: 55864 - RNA, 51 nt, synthetic construct
  misc_feature 1..51: note = Pro-cathepsin H (48-64)
  source 1..51: mol_type = other RNA
ctgcccagccaggccttcgagtacatcctctataacaagggcattatgggg

SEQ ID NO: 55865 - RNA, 45 nt, synthetic construct
  misc_feature 1..45: note = Ragulator complex protein LAMTOR3 (13-27)
  source 1..45: mol_type = other RNA
ctgcccagcgtggagggcctccacgccatcgtcgtttccgacaga

SEQ ID NO: 55866 - RNA, 42 nt, synthetic construct
  misc_feature 1..42: note = Fas apoptotic inhibitory molecule 3 (32-45)
  source 1..42: mol_type = other RNA
ctgccctacctcttccagatgcctgcctatgctagctcctct

SEQ ID NO: 55867 - RNA, 45 nt, synthetic construct
  misc_feature 1..45: note = Fas apoptotic inhibitory molecule 3 (32-46)
  source 1..45: mol_type = other RNA
ctgccctacctcttccagatgcctgcctatgctagctcctctaag

SEQ ID NO: 55868 - RNA, 39 nt, synthetic construct
  misc_feature 1..39: note = Fibromodulin (27-39)
  source 1..39: mol_type = other RNA
ctgcaggtgctcagacttgacggcaacgagatcaagagg

SEQ ID NO: 55869 - RNA, 42 nt, synthetic construct
  misc_feature 1..42: note = Fibromodulin (27-40)
  source 1..42: mol_type = other RNA
ctgcaggtgctcagacttgacggcaacgagatcaagaggagc

SEQ ID NO: 55870 - RNA, 45 nt, synthetic construct
  misc_feature 1..45: note = Fibromodulin (27-41)
  source 1..45: mol_type = other RNA
ctgcaggtgctcagacttgacggcaacgagatcaagaggagcgcc

SEQ ID NO: 55871 - RNA, 48 nt, synthetic construct
  misc_feature 1..48: note = Fibromodulin (178-193)
  source 1..48: mol_type = other RNA
ctgagagagctccaccttgaccataaccagatcagcagggtgcccaat

SEQ ID NO: 55872 - RNA, 27 nt, synthetic construct
  misc_feature 1..27: note = DmX-like protein 1 (2001-2009)
  source 1..27: mol_type = other RNA
ctgagcgagcagacctccgtgcccctc

SEQ ID NO: 55873 - RNA, 24 nt, synthetic construct
  misc_feature 1..24: note = Transcription regulator protein BACH2 (709-716)
  source 1..24: mol_type = other RNA
ctgagccaggaggtgtgcagagac

SEQ ID NO: 55874 - RNA, 36 nt, synthetic construct
  misc_feature 1..36: note = Testican-2 (45-56)
  source 1..36: mol_type = other RNA
ctgagctccatctctcagtactcaggcaagattaaa

SEQ ID NO: 55875 - RNA, 24 nt, synthetic construct
  misc_feature 1..24: note = Baculoviral IAP repeat-containing protein 5 (96-103)
  source 1..24: mol_type = other RNA
ctgaccctcggcgagttccttaag

SEQ ID NO: 55876 - RNA, 27 nt, synthetic construct
  misc_feature 1..27: note = Baculoviral IAP repeat-containing protein 5 (96-104)
  source 1..27: mol_type = other RNA
ctgaccctcggcgagttccttaagctg

SEQ ID NO: 55877 - RNA, 24 nt, synthetic construct
  misc_feature 1..24: note = ATP-binding cassette sub-family A member 6 (1544-1551)
  source 1..24: mol_type = other RNA
ctgacctacaagctccccgtggcc

SEQ ID NO: 55878 - RNA, 24 nt, synthetic construct
  misc_feature 1..24: note = A-kinase anchor protein 2 (561-568)
  source 1..24: mol_type = other RNA
ctggtggacgatcccctcgagtac

SEQ ID NO: 55879 - RNA, 27 nt, synthetic construct
  misc_feature 1..27: note = RNA polymerase II subunit A C-terminal domain phosphatase (239-247)
  source 1..27: mol_type = other RNA
ctgtacgagctccacgtgttcaccttt

SEQ ID NO: 55880 - RNA, 42 nt, synthetic construct
  misc_feature 1..42: note = Fibromodulin (271-284)
  source 1..42: mol_type = other RNA
ctgtacgtgagactcagccacaactcccttaccaataacggc

SEQ ID NO: 55881 - RNA, 45 nt, synthetic construct
  misc_feature 1..45: note = 60S ribosomal protein L3 (237-251)
  source 1..45: mol_type = other RNA
atgggccccctgaagaaagacagaatcgccaaggaggaaggggct

SEQ ID NO: 55882 - RNA, 39 nt, synthetic construct
  misc_feature 1..39: note = Pro-cathepsin H (222-234)
  source 1..39: mol_type = other RNA
atgaacggctacttcctgatcgagagagggaagaatatg

SEQ ID NO: 55883 - RNA, 27 nt, synthetic construct
  misc_feature 1..27: note = Ras-specific guanine nucleotide-releasing factor 1 (773-781)
  source 1..27: mol_type = other RNA
atgagccccttctccaaggccaccctg

SEQ ID NO: 55884 - RNA, 30 nt, synthetic construct
  misc_feature 1..30: note = Perilipin-2 (62-71)
  source 1..30: mol_type = other RNA
atgaccagcgccctgcccatcattcagaag

SEQ ID NO: 55885 - RNA, 27 nt, synthetic construct
  misc_feature 1..27: note = RUN and FYVE domain-containing protein 1 (291-299)
  source 1..27: mol_type = other RNA
atgtacagcgacgtgtggaagcagctg

SEQ ID NO: 55886 - RNA, 45 nt, synthetic construct
  misc_feature 1..45: note = Heterogeneous nuclear ribonucleoprotein A1-like 2 (108-122)
  source 1..45: mol_type = other RNA
aacgacttcggcaattacaacaatcagagctccaactttgggccc

SEQ ID NO: 55887 - RNA, 36 nt, synthetic construct
  misc_feature 1..36: note = SLAM family member 6 (192-203)
  source 1..36: mol_type = other RNA
aacgacaccatcacaatttacagcactataaatcac

SEQ ID NO: 55888 - RNA, 39 nt, synthetic construct
  misc_feature 1..39: note = SLAM family member 6 (192-204)
  source 1..39: mol_type = other RNA
aacgacaccatcacaatttacagcactataaatcactcc

SEQ ID NO: 55889 - RNA, 42 nt, synthetic construct
  misc_feature 1..42: note = SLAM family member 6 (192-205)
  source 1..42: mol_type = other RNA
aacgacaccatcacaatttacagcactataaatcactccaag

SEQ ID NO: 55890 - RNA, 48 nt, synthetic construct
  misc_feature 1..48: note = Glutathione peroxidase 1 (100-115)
  source 1..48: mol_type = other RNA
aacgacgtggcctggaatttcgagaagtttctggtcggccccgatggg

SEQ ID NO: 55891 - RNA, 30 nt, synthetic construct
  misc_feature 1..30: note = ATP-binding cassette sub-family A member 6 (811-820)
  source 1..30: mol_type = other RNA
aacgagatggaactggcccacagctccttc

SEQ ID NO: 55892 - RNA, 24 nt, synthetic construct
  misc_feature 1..24: note = Ribonucleoside-diphosphate reductase subunit M2 B (50-57)
  source 1..24: mol_type = other RNA
aacgagaatctggtggaaagattc

SEQ ID NO: 55893 - RNA, 36 nt, synthetic construct
  misc_feature 1..36: note = C-C chemokine receptor type 7 (192-203)
  source 1..36: mol_type = other RNA
aacttcgagagaaataaggccatcaaagtgattata

SEQ ID NO: 55894 - RNA, 39 nt, synthetic construct
  misc_feature 1..39: note = C-C chemokine receptor type 7 (192-204)
  source 1..39: mol_type = other RNA
aacttcgagagaaataaggccatcaaagtgattatagct

SEQ ID NO: 55895 - RNA, 36 nt, synthetic construct
  misc_feature 1..36: note = Fas apoptotic inhibitory molecule 3 (66-77)
  source 1..36: mol_type = other RNA
aacttcatcaaggccgagtacaaaggcagagtgacc

SEQ ID NO: 55896 - RNA, 42 nt, synthetic construct
  misc_feature 1..42: note = Platelet endothelial cell adhesion molecule (187-200)
  source 1..42: mol_type = other RNA
aacttcgtgatcctggagtttcccgtcgaagagcaggacaga

SEQ ID NO: 55897 - RNA, 45 nt, synthetic construct
  misc_feature 1..45: note = Phosphoinositide-3-kinase-interacting protein 1 (29-43)
  source 1..45: mol_type = other RNA
aacggccacctgtacagagaggaccagaccagccccgcccctggg

SEQ ID NO: 55898 - RNA, 48 nt, synthetic construct
  misc_feature 1..48: note = Phosphoinositide-3-kinase-interacting protein 1 (29-44)
  source 1..48: mol_type = other RNA
aacggccacctgtacagagaggaccagaccagccccgcccctgggctc

SEQ ID NO: 55899 - RNA, 51 nt, synthetic construct
  misc_feature 1..51: note = Phosphoinositide-3-kinase-interacting protein 1 (29-45)
  source 1..51: mol_type = other RNA
aacggccacctgtacagagaggaccagaccagccccgcccctgggctcagg

SEQ ID NO: 55900 - RNA, 42 nt, synthetic construct
  misc_feature 1..42: note = CD44 antigen (16-29)
  source 1..42: mol_type = other RNA
aacggcagatacagcatctccaggaccgaggccgctgacctg

SEQ ID NO: 55901 - RNA, 36 nt, synthetic construct
  misc_feature 1..36: note = Pro-cathepsin H (223-234)
  source 1..36: mol_type = other RNA
aacggctacttcctgatcgagagagggaagaatatg

SEQ ID NO: 55902 - RNA, 30 nt, synthetic construct
  misc_feature 1..30: note = Thymidylate synthase (260-269)
  source 1..30: mol_type = other RNA
aaccacatcgagcccctgaagattcagctc

SEQ ID NO: 55903 - RNA, 48 nt, synthetic construct
  misc_feature 1..48: note = B- and T-lymphocyte attenuator (251-266)
  source 1..48: mol_type = other RNA
aacaagcccggcatcgtgtacgccagcctgaatcactccgtcattggg

SEQ ID NO: 55904 - RNA, 39 nt, synthetic construct
  misc_feature 1..39: note = E3 ubiquitin-protein ligase CHIP (44-56)
  source 1..39: mol_type = other RNA
aacctgcagagagcctacagcctcgctaaggagcaaagg

SEQ ID NO: 55905 - RNA, 42 nt, synthetic construct
  misc_feature 1..42: note = Alpha-mannosidase 2 (65-78)
  source 1..42: mol_type = other RNA
aacaatgagatcattagcaacataagagactccgtgatcaat

SEQ ID NO: 55906 - RNA, 39 nt, synthetic construct
  misc_feature 1..39: note = Neurofibromin (66-78)
  source 1..39: mol_type = other RNA
aacaatatgagaatcttcggcgaggccgctgaaaagaac

SEQ ID NO: 55907 - RNA, 39 nt, synthetic construct
  misc_feature 1..39: note = Interleukin-4 receptor subunit alpha (193-205)
  source 1..39: mol_type = other RNA
aaccccgcctacagaagcttctccaattctctgtcacag

SEQ ID NO: 55908 - RNA, 51 nt, synthetic construct
  misc_feature 1..51: note = Transferrin receptor protein 1 (215-231)
  source 1..51: mol_type = other RNA
aaccccggcgggtacgtggcctatagcaaggctgcaaccgtcacaggaaaa

SEQ ID NO: 55909 - RNA, 33 nt, synthetic construct
  misc_feature 1..33: note = Uncharacterized protein CXorf21 (203-213)
  source 1..33: mol_type = other RNA
aaccccatcagcaatgccgtgctgaacgagtac

SEQ ID NO: 55910 - RNA, 51 nt, synthetic construct
  misc_feature 1..51: note = Kynureninase (429-445)
  source 1..51: mol_type = other RNA
aaccccaatggcatcagagtggcccctgtcccactgtacaacagcttccac

SEQ ID NO: 55911 - RNA, 48 nt, synthetic construct
  misc_feature 1..48: note = MyoD family inhibitor domain-containing protein (64-79)
  source 1..48: mol_type = other RNA
aaccccagcgacggcgagctgatcagaacccagcctcaaaggctccca

SEQ ID NO: 55912 - RNA, 51 nt, synthetic construct
  misc_feature 1..51: note = MyoD family inhibitor domain-containing protein (64-80)
  source 1..51: mol_type = other RNA
aaccccagcgacggcgagctgatcagaacccagcctcaaaggctcccacag

SEQ ID NO: 55913 - RNA, 54 nt, synthetic construct
  misc_feature 1..54: note = MyoD family inhibitor domain-containing protein (64-81)
  source 1..54: mol_type = other RNA
aaccccagcgacggcgagctgatcagaacccagcctcaaaggctcccacagctt

SEQ ID NO: 55914 - RNA, 39 nt, synthetic construct
  misc_feature 1..39: note = Polypeptide N-acetylgalactosaminyltransferase 1 (405-417)
  source 1..39: mol_type = other RNA
aaccaggtgttcagctacaccgccaataaggagatcaga

SEQ ID NO: 55915 - RNA, 42 nt, synthetic construct
  misc_feature 1..42: note = Polypeptide N-acetylgalactosaminyltransferase 1 (405-418)
  source 1..42: mol_type = other RNA
aaccaggtgttcagctacaccgccaataaggagatcagaaca

SEQ ID NO: 55916 - RNA, 48 nt, synthetic construct
  misc_feature 1..48: note = Polypeptide N-acetylgalactosaminyltransferase 1 (405-420)
  source 1..48: mol_type = other RNA
aaccaggtgttcagctacaccgccaataaggagatcagaacagacgat

SEQ ID NO: 55917 - RNA, 27 nt, synthetic construct
  misc_feature 1..27: note = Cyclin-dependent kinase 14 (406-414)
  source 1..27: mol_type = other RNA
aacagactgagcgcccaggctgcactc

SEQ ID NO: 55918 - RNA, 36 nt, synthetic construct
  misc_feature 1..36: note = Transferrin receptor protein 1 (198-209)
  source 1..36: mol_type = other RNA
aacagcgtgatcattgtcgacaagaatggcagactg

SEQ ID NO: 55919 - RNA, 39 nt, synthetic construct
  misc_feature 1..39: note = Transferrin receptor protein 1 (198-210)
  source 1..39: mol_type = other RNA
aacagcgtgatcattgtcgacaagaatggcagactggtt

SEQ ID NO: 55920 - RNA, 42 nt, synthetic construct
  misc_feature 1..42: note = Transferrin receptor protein 1 (198-211)
  source 1..42: mol_type = other RNA
aacagcgtgatcattgtcgacaagaatggcagactggtttac

SEQ ID NO: 55921 - RNA, 42 nt, synthetic construct
  misc_feature 1..42: note = Glucose-6-phosphate isomerase (108-121)
  source 1..42: mol_type = other RNA
aacacccccatcctggtggacggcaaggatgtcatgcctgag

SEQ ID NO: 55922 - RNA, 45 nt, synthetic construct
  misc_feature 1..45: note = Glucose-6-phosphate isomerase (108-122)
  source 1..45: mol_type = other RNA
aacacccccatcctggtggacggcaaggatgtcatgcctgaggtt

SEQ ID NO: 55923 - RNA, 48 nt, synthetic construct
  misc_feature 1..48: note = Glucose-6-phosphate isomerase (108-123)
  source 1..48: mol_type = other RNA
aacacccccatcctggtggacggcaaggatgtcatgcctgaggttaat

SEQ ID NO: 55924 - RNA, 42 nt, synthetic construct
  misc_feature 1..42: note = Pericentriolar material 1 protein (1457-1470)
  source 1..42: mol_type = other RNA
aacaccgtgatccacctggaccaggccctcgctagaatgagg

SEQ ID NO: 55925 - RNA, 45 nt, synthetic construct
  misc_feature 1..45: note = Pericentriolar material 1 protein (1457-1471)
  source 1..45: mol_type = other RNA
aacaccgtgatccacctggaccaggccctcgctagaatgagggag

SEQ ID NO: 55926 - RNA, 39 nt, synthetic construct
  misc_feature 1..39: note = SLAM family member 6 (50-62)
  source 1..39: mol_type = other RNA
aacgtgagcttcagatgggaggccctgggcaataccctc

SEQ ID NO: 55927 - RNA, 51 nt, synthetic construct
  misc_feature 1..51: note = Peroxiredoxin-1 (108-124)
  source 1..51: mol_type = other RNA
cccaagagaaccatcgcccaggactacggcgtgctgaaagctgatgagggg

SEQ ID NO: 55928 - RNA, 39 nt, synthetic construct
  misc_feature 1..39: note = Calsyntenin-1 (57-69)
  source 1..39: mol_type = other RNA
ccccctctgatcgccctcgacaaggatgctccacttaga

SEQ ID NO: 55929 - RNA, 39 nt, synthetic construct
  misc_feature 1..39: note = Pro-cathepsin H (49-61)
  source 1..39: mol_type = other RNA
cccagccaggccttcgagtacatcctgtataacaagggc

SEQ ID NO: 55930 - RNA, 42 nt, synthetic construct
  misc_feature 1..42: note = Pro-cathepsin H (49-62)
  source 1..42: mol_type = other RNA
cccagccaggccttcgagtacatcctgtataacaagggcatt

SEQ ID NO: 55931 - RNA, 45 nt, synthetic construct
  misc_feature 1..45: note = Pro-cathepsin H (49-63)
  source 1..45: mol_type = other RNA
cccagccaggccttcgagtacatcctgtataacaagggcattatg

SEQ ID NO: 55932 - RNA, 45 nt, synthetic construct
  misc_feature 1..45: note = Low affinity immunoglobulin epsilon Fc receptor (39-53)
  source 1..45: mol_type = other RNA
caggccgacctgagctccttcaagtctcaagagctcaacgaaaga

SEQ ID NO: 55933 - RNA, 33 nt, synthetic construct
  misc_feature 1..33: note = Ras-specific guanine nucleotide-releasing factor 1 (993-1003)
  source 1..33: mol_type = other RNA
caggaggaccccggcgataaccaaatcaccctg

SEQ ID NO: 55934 - RNA, 30 nt, synthetic construct
  misc_feature 1..30: note = ATP synthase F(0) complex subunit C1, mitochondrial (106-115)
  source 1..30: mol_type = other RNA
cagctgttcagctacgccatcctcggcttt

SEQ ID NO: 55935 - RNA, 27 nt, synthetic construct
  misc_feature 1..27: note = Transmembrane emp24 domain-containing protein 4 (162-170)
  source 1..27: mol_type = other RNA
cagctgctcgaccaagtggagcagatc

SEQ ID NO: 55936 - RNA, 39 nt, synthetic construct
  misc_feature 1..39: note = Glutathione peroxidase 1 (12-24)
  source 1..39: mol_type = other RNA
cagagcgtgtacgccttctccgctagacccctggcaggc

SEQ ID NO: 55937 - RNA, 51 nt, synthetic construct
  misc_feature 1..51: note = Glutathione peroxidase 1 (12-28)
  source 1..51: mol_type = other RNA
cagagcgtgtacgccttctccgctagacccctggcaggcggggagcctgtc

SEQ ID NO: 55938 - RNA, 45 nt, synthetic construct
  misc_feature 1..45: note = Lipolysis-stimulated lipoprotein receptor (423-437)
  source 1..45: mol_type = other RNA
agagacgatctgtacgaccaggatgacagcagggatttcccccgg

SEQ ID NO: 55939 - RNA, 33 nt, synthetic construct
  misc_feature 1..33: note = Dystrophin (314-324)
  source 1..33: mol_type = other RNA
agagacttcggccccgccagccagcactttctg

SEQ ID NO: 55940 - RNA, 27 nt, synthetic construct
  misc_feature 1..27: note = Transcription regulator protein BACH2 (715-723)
  source 1..27: mol_type = other RNA
agagacatccagagccccgagcaaatt

SEQ ID NO: 55941 - RNA, 24 nt, synthetic construct
  misc_feature 1..24: note = Elongation factor Tu, mitochondrial (53-60)
  source 1..24: mol_type = other RNA
agagacaagccccacgtgaacgtc

SEQ ID NO: 55942 - RNA, 33 nt, synthetic construct
  misc_feature 1..33: note = TRAF3-interacting JNK-activating modulator (92-102)
  source 1..33: mol_type = other RNA
agagacctgcagatgaaccaagccctcaggttc

SEQ ID NO: 55943 - RNA, 24 nt, synthetic construct
  misc_feature 1..24: note = Probable ATP-dependent RNA helicase DDX46 (658-665)
  source 1..24: mol_type = other RNA
agagacagcatcattaacgatttc

SEQ ID NO: 55944 - RNA, 27 nt, synthetic construct
  misc_feature 1..27: note = Eukaryotic translation initiation factor 6 (237-245)
  source 1..27: mol_type = other RNA
agagacagcctgatcgattccctcacc

SEQ ID NO: 55945 - RNA, 33 nt, synthetic construct
  misc_feature 1..33: note = Cadherin EGF LAG seven-pass G-type receptor 1 (380-390)
  source 1..33: mol_type = other RNA
agagacagccccatcaacgccaatctgaggtac

SEQ ID NO: 55946 - RNA, 27 nt, synthetic construct
  misc_feature 1..27: note = Transcription regulator protein BACH2 (258-266)
  source 1..27: mol_type = other RNA
agagaggacaacagctccaattctctg

SEQ ID NO: 55947 - RNA, 30 nt, synthetic construct
  misc_feature 1..30: note = ATP-binding cassette sub-family A member 6 (1183-1192)
  source 1..30: mol_type = other RNA
agagagttccccgaagccaactttgagctg

SEQ ID NO: 55948 - RNA, 48 nt, synthetic construct
  misc_feature 1..48: note = Alpha-1B-glycoprotein (123-138)
  source 1..48: mol_type = other RNA
agaggcgagaaggaactgctcgtgcccaggagctccacctctcctgac

SEQ ID NO: 55949 - RNA, 39 nt, synthetic construct
  misc_feature 1..39: note = Peroxiredoxin-1 (128-140)
  source 1..39: mol_type = other RNA
agaggcctgttcatcattgacgataaggggatactcagg

SEQ ID NO: 55950 - RNA, 42 nt, synthetic construct
  misc_feature 1..42: note = Peroxiredoxin-1 (128-141)
  source 1..42: mol_type = other RNA
agaggcctgttcatcattgacgataaggggatactcaggcag

SEQ ID NO: 55951 - RNA, 48 nt, synthetic construct
  misc_feature 1..48: note = Peroxiredoxin-1 (128-143)
  source 1..48: mol_type = other RNA
agaggcctgttcatcattgacgataaggggatactcaggcagatcacc

SEQ ID NO: 55952 - RNA, 27 nt, synthetic construct
  misc_feature 1..27: note = DNA dC-dU-editing enzyme APOBEC-3D (306-314)
  source 1..27: mol_type = other RNA
agacacagcaacgtgaatctgaccatc

SEQ ID NO: 55953 - RNA, 30 nt, synthetic construct
  misc_feature 1..30: note = Zinc finger protein 107 (152-161)
  source 1..30: mol_type = other RNA
agaatccacaccggcgagaagccctacaaa

SEQ ID NO: 55954 - RNA, 30 nt, synthetic construct
  misc_feature 1..30: note = Fibromodulin (324-333)
  source 1..30: mol_type = other RNA
agaatcaacgagttcagcatttcctctttt

SEQ ID NO: 55955 - RNA, 27 nt, synthetic construct
  misc_feature 1..27: note = Cytoskeleton-associated protein 4 (199-207)
  source 1..27: mol_type = other RNA
agaatcagcgaggtgctgcagaagctc

SEQ ID NO: 55956 - RNA, 42 nt, synthetic construct
  misc_feature 1..42: note = Leukosialin (349-362)
  source 1..42: mol_type = other RNA
agaaagagcaggcagggctccctggccatggaggaactcaaa

SEQ ID NO: 55957 - RNA, 48 nt, synthetic construct
  misc_feature 1..48: note = Beta-1,4-galactosyltransferase 1 (49-64)
  source 1..48: mol_type = other RNA
agactgccccagctcgtgggcgtcagcacccctcttcaagggggatcc

SEQ ID NO: 55958 - RNA, 36 nt, synthetic construct
  misc_feature 1..36: note = Proline-rich protein 12 (1113-1124)
  source 1..36: mol_type = other RNA
agacccgccggcgagccttacaacaggaagaccctg

SEQ ID NO: 55959 - RNA, 24 nt, synthetic construct
  misc_feature 1..24: note = Cadherin EGF LAG seven-pass G-type receptor 1 (2237-2244)
  source 1..24: mol_type = other RNA
agacccttcgtgatcgtcaccgcc

SEQ ID NO: 55960 - RNA, 27 nt, synthetic construct
  misc_feature 1..27: note = Cadherin EGF LAG seven-pass G-type receptor 1 (2367-2375)
  source 1..27: mol_type = other RNA
agacccatcattaacacccctatggtg

SEQ ID NO: 55961 - RNA, 27 nt, synthetic construct
  misc_feature 1..27: note = A-kinase anchor protein 2 (800-808)
  source 1..27: mol_type = other RNA
agacccaagaacctgatgcagaccctc

SEQ ID NO: 55962 - RNA, 24 nt, synthetic construct
  misc_feature 1..24: note = B-lymphocyte antigen CD20 (222-229)
  source 1..24: mol_type = other RNA
agacccaagagcaacatcgtgctg

SEQ ID NO: 55963 - RNA, 27 nt, synthetic construct
  misc_feature 1..27: note = Arrestin domain-containing protein 4 (148-156)
  source 1..27: mol_type = other RNA
agacccaaggtgcctgaccagagcgtc

SEQ ID NO: 55964 - RNA, 27 nt, synthetic construct
  misc_feature 1..27: note = A-kinase anchor protein 2 (109-117)
  source 1..27: mol_type = other RNA
agacaggccccccctcacatcgagctg

SEQ ID NO: 55965 - RNA, 42 nt, synthetic construct
  misc_feature 1..42: note = Golgi apparatus protein 1 (358-371)
  source 1..42: mol_type = other RNA
agacagaagctgatcgcccaagactacaaagtgagctattcc

SEQ ID NO: 55966 - RNA, 45 nt, synthetic construct
  misc_feature 1..45: note = Golgi apparatus protein 1 (358-372)
  source 1..45: mol_type = other RNA
agacagaagctgatcgcccaagactacaaagtgagctattccctc

SEQ ID NO: 55967 - RNA, 48 nt, synthetic construct
  misc_feature 1..48: note = Golgi apparatus protein 1 (358-373)
  source 1..48: mol_type = other RNA
agacagaagctgatcgcccaagactacaaagtgagctattccctcgct

SEQ ID NO: 55968 - RNA, 51 nt, synthetic construct
  misc_feature 1..51: note = Golgi apparatus protein 1 (358-374)
  source 1..51: mol_type = other RNA
agacagaagctgatcgcccaagactacaaagtgagctattccctcgctaag

SEQ ID NO: 55969 - RNA, 27 nt, synthetic construct
  misc_feature 1..27: note = Dystrophin (178-186)
  source 1..27: mol_type = other RNA
agacagctgggcgaggtggccagcttc

SEQ ID NO: 55970 - RNA, 24 nt, synthetic construct
  misc_feature 1..24: note = Cordon-bleu protein-like 1 (1082-1089)
  source 1..24: mol_type = other RNA
agacagagcctgctcaccgccatc

SEQ ID NO: 55971 - RNA, 27 nt, synthetic construct
  misc_feature 1..27: note = Dynamin-binding protein (661-669)
  source 1..27: mol_type = other RNA
agaaggaaggacctggtgctcaaatac

SEQ ID NO: 55972 - RNA, 45 nt, synthetic construct
  misc_feature 1..45: note = Leukosialin (348-362)
  source 1..45: mol_type = other RNA
agaaggaagagccggcagggctccctggccatggaggaactcaaa

SEQ ID NO: 55973 - RNA, 36 nt, synthetic construct
  misc_feature 1..36: note = Ras-related protein Rab-11A (51-62)
  source 1..36: mol_type = other RNA
agaagcatccaggtggacggcaagaccattaaagcc

SEQ ID NO: 55974 - RNA, 39 nt, synthetic construct
  misc_feature 1..39: note = Ras-related protein Rab-11A (51-63)
  source 1..39: mol_type = other RNA
agaagcatccaggtggacggcaagaccattaaagcccaa

SEQ ID NO: 55975 - RNA, 42 nt, synthetic construct
  misc_feature 1..42: note = Ras-related protein Rab-11A (51-64)
  source 1..42: mol_type = other RNA
agaagcatccaggtggacggcaagaccattaaagcccaaata

SEQ ID NO: 55976 - RNA, 33 nt, synthetic construct
  misc_feature 1..33: note = TP53-target gene 5 protein (40-50)
  source 1..33: mol_type = other RNA
agaaccgtgctgaagaacctcagccttctgaaa

SEQ ID NO: 55977 - RNA, 42 nt, synthetic construct
  misc_feature 1..42: note = Golgi apparatus protein 1 (995-1008)
  source 1..42: mol_type = other RNA
agcgccctggactacagactcgatccccagcttcaactgcac

SEQ ID NO: 55978 - RNA, 33 nt, synthetic construct
  misc_feature 1..33: note = AN1-type zinc finger protein 5 (63-73)
  source 1..33: mol_type = other RNA
agcgcctccgtgcagagagctgacacctctctg

SEQ ID NO: 55979 - RNA, 42 nt, synthetic construct
  misc_feature 1..42: note = IgG receptor FcRn large subunit p51 (253-266)
  source 1..42: mol_type = other RNA
agcgacggctccttccacgcctcttcaagtctgaccgtgaag

SEQ ID NO: 55980 - RNA, 42 nt, synthetic construct
  misc_feature 1..42: note = Plasma membrane calcium-transporting ATPase 1 (256-269)
  source 1..42: mol_type = other RNA
agcgacggctcctacagaatcttctctaagggggcctcagag

SEQ ID NO: 55981 - RNA, 27 nt, synthetic construct
  misc_feature 1..27: note = Probable ribonuclease ZC3H12D (505-513)
  source 1..27: mol_type = other RNA
agcgacctggccagactcatccttctg

SEQ ID NO: 55982 - RNA, 45 nt, synthetic construct
  misc_feature 1..45: note = ATP synthase subunit alpha, mitochondrial (348-362)
  source 1..45: mol_type = other RNA
agcgacctggatgccgctacccagcaactcctttccagaggcgtg

SEQ ID NO: 55983 - RNA, 27 nt, synthetic construct
  misc_feature 1..27: note = TRAF3-interacting JNK-activating modulator (138-146)
  source 1..27: mol_type = other RNA
agcgaggccgaaaagctgaccctcgtg

SEQ ID NO: 55984 - RNA, 30 nt, synthetic construct
  misc_feature 1..30: note = Lysine-specific demethylase 2B (477-486)
  source 1..30: mol_type = other RNA
agcgaggaatccgtgaagtctaccacactg

SEQ ID NO: 55985 - RNA, 27 nt, synthetic construct
  misc_feature 1..27: note = Elongator complex protein 3 (338-346)
  source 1..27: mol_type = other RNA
agcgaggaaaccttcagatttgagctg

SEQ ID NO: 55986 - RNA, 27 nt, synthetic construct
  misc_feature 1..27: note = Zinc finger protein 638 (865-873)
  source 1..27: mol_type = other RNA
agcgagatcaagacctccattgaagtg

SEQ ID NO: 55987 - RNA, 27 nt, synthetic construct
  misc_feature 1..27: note = Ribonucleoside-diphosphate reductase subunit M2 B (275-283)
  source 1..27: mol_type = other RNA
agcgagtaccagagattcgccgtgatg

SEQ ID NO: 55988 - RNA, 57 nt, synthetic construct
  misc_feature 1..57: note = DnaJ homolog subfamily C member 5 (12-30)
  source 1..57: mol_type = other RNA
agcggcgagtccctgtaccacgtgctcgggcttgacaagaacgccacctctgatgac

SEQ ID NO: 55989 - RNA, 42 nt, synthetic construct
  misc_feature 1..42: note = Heterogeneous nuclear ribonucleoprotein A1-like 2 (133-146)
  source 1..42: mol_type = other RNA
agcggcccctacgggggaggtggccagtatttcgccaagcct

SEQ ID NO: 55990 - RNA, 75 nt, synthetic construct
  misc_feature 1..75: note = Heterogeneous nuclear ribonucleoprotein A3 (147-171)
  source 1..75: mol_type = other RNA
agcggccagcaacagtccaactacgggcccatgaagggaggttctttcggcgggagatcaagtggaagcccttat

SEQ ID NO: 55991 - RNA, 69 nt, synthetic construct
  misc_feature 1..69: note = Heterogeneous nuclear ribonucleoprotein A3 (167-189)
  source 1..69: mol_type = other RNA
agcggctccccctacgggggaggttatggctctgggggaggctcaggtgggtacggaagtagaaggttc

SEQ ID NO: 55992 - RNA, 45 nt, synthetic construct
  misc_feature 1..45: note = Carbohydrate sulfotransferase 2 (175-189)
  source 1..45: mol_type = other RNA
agcggctcctctttctttggggagctgttcaaccagaatcccgaa

SEQ ID NO: 55993 - RNA, 39 nt, synthetic construct
  misc_feature 1..39: note = Ceramide glucosyltransferase (192-204)
  source 1..39: mol_type = other RNA
agccaccccagatactatatctccgccaacgtgaccggc

SEQ ID NO: 55994 - RNA, 45 nt, synthetic construct
  misc_feature 1..45: note = Ceramide glucosyltransferase (192-206)
  source 1..45: mol_type = other RNA
agccaccccagatactatatctccgccaacgtgaccggcttcaag

SEQ ID NO: 55995 - RNA, 27 nt, synthetic construct
  misc_feature 1..27: note = Hematopoietic SH2 domain-containing protein (61-69)
  source 1..27: mol_type = other RNA
agccactcccatgtgggctacaccctg

SEQ ID NO: 55996 - RNA, 45 nt, synthetic construct
  misc_feature 1..45: note = Serine incorporator 3 (252-266)
  source 1..45: mol_type = other RNA
agcatcatttccatacaccccaagatccaggagcatcaacctaga

SEQ ID NO: 55997 - RNA, 24 nt, synthetic construct
  misc_feature 1..24: note = Uncharacterized protein CXorf21 (192-199)
  source 1..24: mol_type = other RNA
agcatcaaggagaaatcctctctg

SEQ ID NO: 55998 - RNA, 27 nt, synthetic construct
  misc_feature 1..27: note = Protein asunder homolog (394-402)
  source 1..27: mol_type = other RNA
agcatcctggaggaccccccttccatt

SEQ ID NO: 55999 - RNA, 42 nt, synthetic construct
  misc_feature 1..42: note = Golgi apparatus protein 1 (1057-1070)
  source 1..42: mol_type = other RNA
agcaaggccgacatcttcgtggatcccgtcctgcacaccgct

SEQ ID NO: 56000 - RNA, 36 nt, synthetic construct
  misc_feature 1..36: note = Perilipin-2 (369-380)
  source 1..36: mol_type = other RNA
agcctgctcacctcctctaagggccagcttcaaaaa

SEQ ID NO: 56001 - RNA, 27 nt, synthetic construct
  misc_feature 1..27: note = DmX-like protein 1 (607-615)
  source 1..27: mol_type = other RNA
agcctgaaccagtggctcgtgtccttc

SEQ ID NO: 56002 - RNA, 27 nt, synthetic construct
  misc_feature 1..27: note = DmX-like protein 1 (1285-1293)
  source 1..27: mol_type = other RNA
agcatgacctccctggcccagaagatc

SEQ ID NO: 56003 - RNA, 42 nt, synthetic construct
  misc_feature 1..42: note = Cystatin-C (64-77)
  source 1..42: mol_type = other RNA
agcaacgacatgtaccactccagagccctgcaggtggtcagg

SEQ ID NO: 56004 - RNA, 42 nt, synthetic construct
  misc_feature 1..42: note = Vitamin D-binding protein (234-247)
  source 1..42: mol_type = other RNA
agcaacctgatcaagctcgcccagaaagtgcccaccgctgac

SEQ ID NO: 56005 - RNA, 45 nt, synthetic construct
  misc_feature 1..45: note = Glucose-6-phosphate isomerase (107-121)
  source 1..45: mol_type = other RNA
agcaacacccccatcctggtggacggcaaggatgtcatgcctgag

SEQ ID NO: 56006 - RNA, 51 nt, synthetic construct
  misc_feature 1..51: note = Glucose-6-phosphate isomerase (107-123)
  source 1..51: mol_type = other RNA
agcaacacccccatcctggtggacggcaaggatgtcatgcctgaggttaat

SEQ ID NO: 56007 - RNA, 27 nt, synthetic construct
  misc_feature 1..27: note = NACHT, LRR and PYD domains-containing protein 2 (739-747)
  source 1..27: mol_type = other RNA
agccccgccgacgctcacagaaacctg

SEQ ID NO: 56008 - RNA, 36 nt, synthetic construct
  misc_feature 1..36: note = Calcium and integrin-binding protein 1 (80-91)
  source 1..36: mol_type = other RNA
agccccgccaaggactccctgtctttcgaggatttt

SEQ ID NO: 56009 - RNA, 45 nt, synthetic construct
  misc_feature 1..45: note = Calcium and integrin-binding protein 1 (80-94)
  source 1..45: mol_type = other RNA
agccccgccaaggactccctgtctttcgaggattttctcgacctt

SEQ ID NO: 56010 - RNA, 24 nt, synthetic construct
  misc_feature 1..24: note = Tumor necrosis factor receptor superfamily member 13C (50-57)
  source 1..24: mol_type = other RNA
agccccgcccctagaaccgctctg

SEQ ID NO: 56011 - RNA, 27 nt, synthetic construct
  misc_feature 1..27: note = Cordon-bleu protein-like 1 (911-919)
  source 1..27: mol_type = other RNA
agccccgagcagaccctgtcccctctc

SEQ ID NO: 56012 - RNA, 45 nt, synthetic construct
  misc_feature 1..45: note = Transferrin receptor protein 1 (695-709)
  source 1..45: mol_type = other RNA
agccccttcagacacgtgttttggggctccgggtctcataccctg

SEQ ID NO: 56013 - RNA, 24 nt, synthetic construct
  misc_feature 1..24: note = Ras-specific guanine nucleotide-releasing factor 1 (774-781)
  source 1..24: mol_type = other RNA
agccccttctccaaggccaccctg

SEQ ID NO: 56014 - RNA, 42 nt, synthetic construct
  misc_feature 1..42: note = Beta-1,4-galactosyltransferase 1 (174-187)
  source 1..42: mol_type = other RNA
agcccccacaaggtggccatcattatacctttcagaaacagg

SEQ ID NO: 56015 - RNA, 48 nt, synthetic construct
  misc_feature 1..48: note = Beta-1,4-galactosyltransferase 1 (174-189)
  source 1..48: mol_type = other RNA
agcccccacaaggtggccatcattatacctttcagaaacaggcaggag

SEQ ID NO: 56016 - RNA, 51 nt, synthetic construct
  misc_feature 1..51: note = Beta-1,4-galactosyltransferase 1 (174-190)
  source 1..51: mol_type = other RNA
agcccccacaaggtggccatcattatacctttcagaaacaggcaggagcat

SEQ ID NO: 56017 - RNA, 39 nt, synthetic construct
  misc_feature 1..39: note = Phosphate-regulating neutral endopeptidase (424-436)
  source 1..39: mol_type = other RNA
agcccccctcagttcagagtgaacggcgccatctccaat

SEQ ID NO: 56018 - RNA, 45 nt, synthetic construct
  misc_feature 1..45: note = Phosphate-regulating neutral endopeptidase (424-438)
  source 1..45: mol_type = other RNA
agcccccctcagttcagagtgaacggcgccatctccaattttgag

SEQ ID NO: 56019 - RNA, 48 nt, synthetic construct
  misc_feature 1..48: note = Phosphate-regulating neutral endopeptidase (424-439)
  source 1..48: mol_type = other RNA
agcccccctcagttcagagtgaacggcgccatctccaattttgaggaa

SEQ ID NO: 56020 - RNA, 51 nt, synthetic construct
  misc_feature 1..51: note = Phosphate-regulating neutral endopeptidase (424-440)
  source 1..51: mol_type = other RNA
agcccccctcagttcagagtgaacggcgccatctccaattttgaggaattc

SEQ ID NO: 56021 - RNA, 27 nt, synthetic construct
  misc_feature 1..27: note = Zinc finger protein 296 (218-226)
  source 1..27: mol_type = other RNA
agccccagagcctccggctctgggctg

SEQ ID NO: 56022 - RNA, 30 nt, synthetic construct
  misc_feature 1..30: note = Lysine-specific demethylase 2B (832-841)
  source 1..30: mol_type = other RNA
agccccagacctccactgggctcctctctc

SEQ ID NO: 56023 - RNA, 45 nt, synthetic construct
  misc_feature 1..45: note = Golgi apparatus protein 1 (1141-1155)
  source 1..45: mol_type = other RNA
agcccctccaagaactacatcctgtctgtgatttcaggcagtata

SEQ ID NO: 56024 - RNA, 24 nt, synthetic construct
  misc_feature 1..24: note = T-cell activation Rho GTPase-activating protein (149-156)
  source 1..24: mol_type = other RNA
agcccctccagacagcctcaagtg

SEQ ID NO: 56025 - RNA, 54 nt, synthetic construct
  misc_feature 1..54: note = SLAM family member 6 (167-184)
  source 1..54: mol_type = other RNA
agccccaccaacaatacagtgtacgcctccgtcactcactctaacagagagacg

SEQ ID NO: 56026 - RNA, 30 nt, synthetic construct
  misc_feature 1..30: note = Cadherin EGF LAG seven-pass G-type receptor 1 (2960-2969)
  source 1..30: mol_type = other RNA
agccccacctcctctagaacatcaagtctg

SEQ ID NO: 56027 - RNA, 42 nt, synthetic construct
  misc_feature 1..42: note = Alpha-mannosidase 2 (670-683)
  source 1..42: mol_type = other RNA
agccccaccgtgcaggtcttctccgcctctggcaagcctgtt

SEQ ID NO: 56028 - RNA, 33 nt, synthetic construct
  misc_feature 1..33: note = ATP synthase F(0) complex subunit C1, mitochondrial (32-42)
  source 1..33: mol_type = other RNA
agccccgtgaactcctctaagcagccttcatac

SEQ ID NO: 56029 - RNA, 24 nt, synthetic construct
  misc_feature 1..24: note = Lysine-specific demethylase 2B (842-849)
  source 1..24: mol_type = other RNA
agcccctggtggagatcctctctg

SEQ ID NO: 56030 - RNA, 63 nt, synthetic construct
  misc_feature 1..63: note = Heterogeneous nuclear ribonucleoprotein A3 (169-189)
  source 1..63: mol_type = other RNA
agcccctacggcgggggatatggttccggcgggggatctggcggttacgggtcaagaaggttc

SEQ ID NO: 56031 - RNA, 27 nt, synthetic construct
  misc_feature 1..27: note = Melanoma antigen preferentially expressed in tumors (406-414)
  source 1..27: mol_type = other RNA
agccagctgaccacactctccttctac

SEQ ID NO: 56032 - RNA, 45 nt, synthetic construct
  misc_feature 1..45: note = Platelet endothelial cell adhesion molecule (409-423)
  source 1..45: mol_type = other RNA
agccagcccagaatctcctacgacgcccaattcgaggtgattaag

SEQ ID NO: 56033 - RNA, 48 nt, synthetic construct
  misc_feature 1..48: note = Platelet endothelial cell adhesion molecule (409-424)
  source 1..48: mol_type = other RNA
agccagcccagaatctcctacgacgcccaattcgaggtgattaagggc

SEQ ID NO: 56034 - RNA, 27 nt, synthetic construct
  misc_feature 1..27: note = Tumor protein p53-inducible protein 11 (14-22)
  source 1..27: mol_type = other RNA
agccagaccgacctggtgtccagactc

SEQ ID NO: 56035 - RNA, 45 nt, synthetic construct
  misc_feature 1..45: note = Interleukin-4 receptor subunit alpha (90-104)
  source 1..45: mol_type = other RNA
agcagagacgatttccaggagggcagggaagggatcgtggcccgg

SEQ ID NO: 56036 - RNA, 27 nt, synthetic construct
  misc_feature 1..27: note = T-cell activation Rho GTPase-activating protein (308-316)
  source 1..27: mol_type = other RNA
agcagacaccagtccttcaccacaaag

SEQ ID NO: 56037 - RNA, 27 nt, synthetic construct
  misc_feature 1..27: note = T-cell activation Rho GTPase-activating protein (5-13)
  source 1..27: mol_type = other RNA
agctcccacaacgcctctaagaccctg

SEQ ID NO: 56038 - RNA, 45 nt, synthetic construct
  misc_feature 1..45: note = Ragulator complex protein LAMTOR1 (55-69)
  source 1..45: mol_type = other RNA
agctccatcctggccaagaccgcttctaacattatagacgtgtca

SEQ ID NO: 56039 - RNA, 39 nt, synthetic construct
  misc_feature 1..39: note = Serine incorporator 3 (351-363)
  source 1..39: mol_type = other RNA
agctccatcagaacctctacaaactcacaggtggacaag

SEQ ID NO: 56040 - RNA, 48 nt, synthetic construct
  misc_feature 1..48: note = Alpha-mannosidase 2 (669-684)
  source 1..48: mol_type = other RNA
agctcccccaccgtgcaggtcttctctgcctcaggcaagcctgttgag

SEQ ID NO: 56041 - RNA, 27 nt, synthetic construct
  misc_feature 1..27: note = DmX-like protein 1 (1271-1279)
  source 1..27: mol_type = other RNA
agctcctctggcctgcacccccctaag

SEQ ID NO: 56042 - RNA, 39 nt, synthetic construct
  misc_feature 1..39: note = Interleukin-4 receptor subunit alpha (490-502)
  source 1..39: mol_type = other RNA
agctcctcttcattccaccccgcccctggcaacgctcag

SEQ ID NO: 56043 - RNA, 27 nt, synthetic construct
  misc_feature 1..27: note = Interleukin-1 beta (84-92)
  source 1..27: mol_type = other RNA
agcgtggaccccaagaactaccctaaa

SEQ ID NO: 56044 - RNA, 39 nt, synthetic construct
  misc_feature 1..39: note = 15 kDa selenoprotein (150-162)
  source 1..39: mol_type = other RNA
agcgtggaggaattcctgtccgagaagctcgaaagaatc

SEQ ID NO: 56045 - RNA, 36 nt, synthetic construct
  misc_feature 1..36: note = Transferrin receptor protein 1 (199-210)
  source 1..36: mol_type = other RNA
agcgtgatcattgtcgacaagaacggcagactggtt

SEQ ID NO: 56046 - RNA, 27 nt, synthetic construct
  misc_feature 1..27: note = AT-rich interactive domain-containing protein 5B (278-286)
  source 1..27: mol_type = other RNA
agcgtgatccagcacgtccaatccttc

SEQ ID NO: 56047 - RNA, 30 nt, synthetic construct
  misc_feature 1..30: note = Probable ATP-dependent RNA helicase DDX46 (198-207)
  source 1..30: mol_type = other RNA
agcgtgaagggcgggggaggtaacgagaaa

SEQ ID NO: 56048 - RNA, 42 nt, synthetic construct
  misc_feature 1..42: note = Plasma membrane calcium-transporting ATPase 1 (110-123)
  source 1..42: mol_type = other RNA
agcgtgaagaaaatgatgaaggacaacaatctggtcagacac

SEQ ID NO: 56049 - RNA, 27 nt, synthetic construct
  misc_feature 1..27: note = Zinc finger protein 638 (619-627)
  source 1..27: mol_type = other RNA
agcgtgaagcccacctccgccacaaaa

SEQ ID NO: 56050 - RNA, 33 nt, synthetic construct
  misc_feature 1..33: note = Interleukin-17 receptor A (789-799)
  source 1..33: mol_type = other RNA
agcgtgcagtccgaccaaggctacatctctaga

SEQ ID NO: 56051 - RNA, 45 nt, synthetic construct
  misc_feature 1..45: note = Low affinity immunoglobulin epsilon Fc receptor (32-46)
  source 1..45: mol_type = other RNA
agctggaacctgaatggcctccaggccgacctttcctctttcaag

SEQ ID NO: 56052 - RNA, 45 nt, synthetic construct
  misc_feature 1..45: note = Receptor-type tyrosine-protein phosphatase alpha (182-196)
  source 1..45: mol_type = other RNA
accgccacaatcgtgatggtcactaacctgaaggagagaaaagaa

SEQ ID NO: 56053 - RNA, 30 nt, synthetic construct
  misc_feature 1..30: note = Dystrophin (30-39)
  source 1..30: mol_type = other RNA
accgaggccgaaacaactgctaacgtgctg

SEQ ID NO: 56054 - RNA, 24 nt, synthetic construct
  misc_feature 1..24: note = Transcription regulator protein BACH2 (559-566)
  source 1..24: mol_type = other RNA
accgagcaccaggaacccggcctg

SEQ ID NO: 56055 - RNA, 27 nt, synthetic construct
  misc_feature 1..27: note = Cordon-bleu protein-like 1 (804-812)
  source 1..27: mol_type = other RNA
accgagcaccaggtgcccagctccgtc

SEQ ID NO: 56056 - RNA, 33 nt, synthetic construct
  misc_feature 1..33: note = Uncharacterized protein CXorf21 (281-291)
  source 1..33: mol_type = other RNA
accgagatcacagaaattagcactccctccctg

SEQ ID NO: 56057 - RNA, 27 nt, synthetic construct
  misc_feature 1..27: note = Ribonucleoside-diphosphate reductase subunit M2 B (128-136)
  source 1..27: mol_type = other RNA
accttcggcgagagagtggtcgccttt

SEQ ID NO: 56058 - RNA, 45 nt, synthetic construct
  misc_feature 1..45: note = Cation-independent mannose-6-phosphate receptor (1446-1460)
  source 1..45: mol_type = other RNA
accggccacctgttcgacctcagctccctttctgggagagccgga

SEQ ID NO: 56059 - RNA, 42 nt, synthetic construct
  misc_feature 1..42: note = Low affinity immunoglobulin epsilon Fc receptor (139-152)
  source 1..42: mol_type = other RNA
accggcagctggatcgggctgagaaacctcgaccttaaggga

SEQ ID NO: 56060 - RNA, 45 nt, synthetic construct
  misc_feature 1..45: note = SLAM family member 6 (104-118)
  source 1..45: mol_type = other RNA
accggcagctacagagcccagatctccacaaagacttctgctaaa

SEQ ID NO: 56061 - RNA, 27 nt, synthetic construct
  misc_feature 1..27: note = ATP-binding cassette sub-family A member 6 (728-736)
  source 1..27: mol_type = other RNA
acccaccatatccccgacgccaagctg

SEQ ID NO: 56062 - RNA, 27 nt, synthetic construct
  misc_feature 1..27: note = Transcription regulator protein BACH2 (70-78)
  source 1..27: mol_type = other RNA
accaagaacgacctggtggtcagcctc

SEQ ID NO: 56063 - RNA, 24 nt, synthetic construct
  misc_feature 1..24: note = Baculoviral IAP repeat-containing protein 5 (97-104)
  source 1..24: mol_type = other RNA
accctgggcgagttcctcaagctt

SEQ ID NO: 56064 - RNA, 39 nt, synthetic construct
  misc_feature 1..39: note = Fas apoptotic inhibitory molecule 3 (65-77)
  source 1..39: mol_type = other RNA
accaacttcatcaaggccgagtacaaaggcagagtgaca

SEQ ID NO: 56065 - RNA, 42 nt, synthetic construct
  misc_feature 1..42: note = Calsyntenin-1 (140-153)
  source 1..42: mol_type = other RNA
accaacgtgaagaaaagccacaaggccacagtccatatccag

SEQ ID NO: 56066 - RNA, 27 nt, synthetic construct
  misc_feature 1..27: note = Interferon regulatory factor 9 (382-390)
  source 1..27: mol_type = other RNA
acccccgagcagcaagccgctatcctg

SEQ ID NO: 56067 - RNA, 27 nt, synthetic construct
  misc_feature 1..27: note = Cyclin-dependent kinase 14 (174-182)
  source 1..27: mol_type = other RNA
acccccttcacagccatcagagaggct

SEQ ID NO: 56068 - RNA, 27 nt, synthetic construct
  misc_feature 1..27: note = AT-rich interactive domain-containing protein 5B (36-44)
  source 1..27: mol_type = other RNA
acccccatcgagagaattccttacctg

SEQ ID NO: 56069 - RNA, 36 nt, synthetic construct
  misc_feature 1..36: note = Glucose-6-phosphate isomerase (109-120)
  source 1..36: mol_type = other RNA
acccccatcctggtggacggcaaggatgtcatgcct

SEQ ID NO: 56070 - RNA, 39 nt, synthetic construct
  misc_feature 1..39: note = Glucose-6-phosphate isomerase (109-121)
  source 1..39: mol_type = other RNA
acccccatcctggtggacggcaaggatgtcatgcctgag

SEQ ID NO: 56071 - RNA, 42 nt, synthetic construct
  misc_feature 1..42: note = Glucose-6-phosphate isomerase (109-122)
  source 1..42: mol_type = other RNA
acccccatcctggtggacggcaaggatgtcatgcctgaggtt

SEQ ID NO: 56072 - RNA, 45 nt, synthetic construct
  misc_feature 1..45: note = Glucose-6-phosphate isomerase (109-123)
  source 1..45: mol_type = other RNA
acccccatcctggtggacggcaaggatgtcatgcctgaggttaac

SEQ ID NO: 56073 - RNA, 27 nt, synthetic construct
  misc_feature 1..27: note = Probable ribonuclease ZC3H12D (145-153)
  source 1..27: mol_type = other RNA
acccccatcagagagcagcacgtgctg

SEQ ID NO: 56074 - RNA, 48 nt, synthetic construct
  misc_feature 1..48: note = Protein CDV3 homolog (80-95)
  source 1..48: mol_type = other RNA
accccccagggccctccagagatctacagcgacacacaattcccgtcc

SEQ ID NO: 56075 - RNA, 54 nt, synthetic construct
  misc_feature 1..54: note = Protein CDV3 homolog (80-97)
  source 1..54: mol_type = other RNA
accccccagggccctccagagatctacagcgacacacaattcccgtccctgcag

SEQ ID NO: 56076 - RNA, 60 nt, synthetic construct
  misc_feature 1..60: note = Protein CDV3 homolog (80-99)
  source 1..60: mol_type = other RNA
accccccagggccctccagagatctacagcgacacacaattcccgtccctgcagtctact

SEQ ID NO: 56077 - RNA, 54 nt, synthetic construct
  misc_feature 1..54: note = SLAM family member 6 (188-205)
  source 1..54: mol_type = other RNA
acccccagagagaacgacacaatcactatttacagcacgataaatcactccaag

SEQ ID NO: 56078 - RNA, 69 nt, synthetic construct
  misc_feature 1..69: note = SLAM family member 6 (188-210)
  source 1..69: mol_type = other RNA
acccccagagagaacgacacaatcactatttacagcacgataaatcactccaaggaatctaaacctacc

SEQ ID NO: 56079 - RNA, 27 nt, synthetic construct
  misc_feature 1..27: note = Protein asunder homolog (320-328)
  source 1..27: mol_type = other RNA
acccccagaacaaacaatatcgagctg

SEQ ID NO: 56080 - RNA, 45 nt, synthetic construct
  misc_feature 1..45: note = E3 ubiquitin-protein ligase CHIP (246-260)
  source 1..45: mol_type = other RNA
acccccagcggcatcacatacgacagaaaggatattgaggaacac

SEQ ID NO: 56081 - RNA, 36 nt, synthetic construct
  misc_feature 1..36: note = Putative heat shock 70 kDa protein 7 (40-51)
  source 1..36: mol_type = other RNA
acccccagctacgtggccttcacagacactgagaga

SEQ ID NO: 56082 - RNA, 39 nt, synthetic construct
  misc_feature 1..39: note = Putative heat shock 70 kDa protein 7 (40-52)
  source 1..39: mol_type = other RNA
acccccagctacgtggccttcacagacactgagagactg

SEQ ID NO: 56083 - RNA, 27 nt, synthetic construct
  misc_feature 1..27: note = Zinc finger protein 107 (512-520)
  source 1..27: mol_type = other RNA
accagacacaagatcgtgcatacaaaa

SEQ ID NO: 56084 - RNA, 42 nt, synthetic construct
  misc_feature 1..42: note = Cytochrome b ascorbate-dependent protein 3 (187-200)
  source 1..42: mol_type = other RNA
accagaccctaccacagcctgccttccgaggccgtgttcgct

SEQ ID NO: 56085 - RNA, 45 nt, synthetic construct
  misc_feature 1..45: note = Cytochrome b ascorbate-dependent protein 3 (187-201)
  source 1..45: mol_type = other RNA
accagaccctaccacagcctgccttccgaggccgtgttcgctaac

SEQ ID NO: 56086 - RNA, 42 nt, synthetic construct
  misc_feature 1..42: note = Ras-related protein Rab-11A (50-63)
  source 1..42: mol_type = other RNA
accagaagcatccaggtggacggcaagacaattaaagcccaa

SEQ ID NO: 56087 - RNA, 42 nt, synthetic construct
  misc_feature 1..42: note = Ceramide glucosyltransferase (191-204)
  source 1..42: mol_type = other RNA
accagccaccccagatactatatctccgccaacgtgacaggc

SEQ ID NO: 56088 - RNA, 48 nt, synthetic construct
  misc_feature 1..48: note = Ceramide glucosyltransferase (191-206)
  source 1..48: mol_type = other RNA
accagccaccccagatactatatctccgccaacgtgacaggcttcaag

SEQ ID NO: 56089 - RNA, 48 nt, synthetic construct
  misc_feature 1..48: note = B- and T-lymphocyte attenuator (128-143)
  source 1..48: mol_type = other RNA
accacactgtacgtgactgacgtcaagagcgcctccgagagaccctct

SEQ ID NO: 56090 - RNA, 42 nt, synthetic construct
  misc_feature 1..42: note = Fas apoptotic inhibitory molecule 3 (64-77)
  source 1..42: mol_type = other RNA
accacaaacttcatcaaggccgagtacaaaggcagagtgact

SEQ ID NO: 56091 - RNA, 42 nt, synthetic construct
  misc_feature 1..42: note = DnaJ homolog subfamily C member 5 (181-194)
  source 1..42: mol_type = other RNA
accacacagctgactgccgacagccacccctcctaccatacg

SEQ ID NO: 56092 - RNA, 45 nt, synthetic construct
  misc_feature 1..45: note = DnaJ homolog subfamily C member 5 (181-195)
  source 1..45: mol_type = other RNA
accacacagctgactgccgacagccacccctcctaccatacggat

SEQ ID NO: 56093 - RNA, 48 nt, synthetic construct
  misc_feature 1..48: note = DnaJ homolog subfamily C member 5 (181-196)
  source 1..48: mol_type = other RNA
accacacagctgactgccgacagccacccctcctaccatacggatggc

SEQ ID NO: 56094 - RNA, 27 nt, synthetic construct
  misc_feature 1..27: note = Cordon-bleu protein-like 1 (732-740)
  source 1..27: mol_type = other RNA
accacatacaagatcgtgccccctaaa

SEQ ID NO: 56095 - RNA, 33 nt, synthetic construct
  misc_feature 1..33: note = Eukaryotic translation initiation factor 6 (141-151)
  source 1..33: mol_type = other RNA
accgtggccgaccaggtcctggttggcagctac

SEQ ID NO: 56096 - RNA, 27 nt, synthetic construct
  misc_feature 1..27: note = ATP-binding cassette sub-family A member 6 (572-580)
  source 1..27: mol_type = other RNA
accgtgaaggagaacctgagcctcttc

SEQ ID NO: 56097 - RNA, 36 nt, synthetic construct
  misc_feature 1..36: note = C-C chemokine receptor type 7 (93-104)
  source 1..36: mol_type = other RNA
gtggccatcgtccaggctgttagcgcacacagacat

SEQ ID NO: 56098 - RNA, 39 nt, synthetic construct
  misc_feature 1..39: note = C-C chemokine receptor type 7 (93-105)
  source 1..39: mol_type = other RNA
gtggccatcgtccaggctgttagcgcacacagacatagg

SEQ ID NO: 56099 - RNA, 42 nt, synthetic construct
  misc_feature 1..42: note = C-C chemokine receptor type 7 (93-106)
  source 1..42: mol_type = other RNA
gtggccatcgtccaggctgttagcgcacacagacatagggcc

SEQ ID NO: 56100 - RNA, 45 nt, synthetic construct
  misc_feature 1..45: note = C-C chemokine receptor type 7 (93-107)
  source 1..45: mol_type = other RNA
gtggccatcgtccaggctgttagcgcacacagacatagggcccgg

SEQ ID NO: 56101 - RNA, 36 nt, synthetic construct
  misc_feature 1..36: note = Interleukin-4 receptor subunit alpha (102-113)
  source 1..36: mol_type = other RNA
gtggccagactgaccgagagcctcttccttgacctg

SEQ ID NO: 56102 - RNA, 42 nt, synthetic construct
  misc_feature 1..42: note = Interleukin-4 receptor subunit alpha (102-115)
  source 1..42: mol_type = other RNA
gtggccagactgaccgagagcctcttccttgacctgttgggc

SEQ ID NO: 56103 - RNA, 36 nt, synthetic construct
  misc_feature 1..36: note = Cytochrome b ascorbate-dependent protein 3 (99-110)
  source 1..36: mol_type = other RNA
gtggccgtcttcacctttcacaaccatggcagaaca

SEQ ID NO: 56104 - RNA, 39 nt, synthetic construct
  misc_feature 1..39: note = Cytochrome b ascorbate-dependent protein 3 (99-111)
  source 1..39: mol_type = other RNA
gtggccgtcttcacctttcacaaccatggcagaacagct

SEQ ID NO: 56105 - RNA, 45 nt, synthetic construct
  misc_feature 1..45: note = Cytochrome b ascorbate-dependent protein 3 (99-113)
  source 1..45: mol_type = other RNA
gtggccgtcttcacctttcacaaccatggcagaacagctaatctg

SEQ ID NO: 56106 - RNA, 39 nt, synthetic construct
  misc_feature 1..39: note = Vesicle-associated membrane protein 1 (52-64)
  source 1..39: mol_type = other RNA
gtggacaaggtcctggagagagatcagaaactcagcgaa

SEQ ID NO: 56107 - RNA, 45 nt, synthetic construct
  misc_feature 1..45: note = Vesicle-associated membrane protein 3 (33-47)
  source 1..45: mol_type = other RNA
gtggacaaggtcctggagagagatcagaaactcagcgaacttgac

SEQ ID NO: 56108 - RNA, 48 nt, synthetic construct
  misc_feature 1..48: note = Vesicle-associated membrane protein 3 (33-48)
  source 1..48: mol_type = other RNA
gtggacaaggtcctggagagagatcagaaactcagcgaacttgacgat

SEQ ID NO: 56109 - RNA, 51 nt, synthetic construct
  misc_feature 1..51: note = Vesicle-associated membrane protein 1 (52-68)
  source 1..51: mol_type = other RNA
gtggacaaggtcctggagagagatcagaaactcagcgaacttgacgatagg

SEQ ID NO: 56110 - RNA, 45 nt, synthetic construct
  misc_feature 1..45: note = T-complex protein 1 subunit beta (408-422)
  source 1..45: mol_type = other RNA
gtggacaacatcattaaggccgctcccagaaaaagggtccctgat

SEQ ID NO: 56111 - RNA, 36 nt, synthetic construct
  misc_feature 1..36: note = 15 kDa selenoprotein (151-162)
  source 1..36: mol_type = other RNA
gtggaggaattcctgagcgagaagctcgaaagaatc

SEQ ID NO: 56112 - RNA, 45 nt, synthetic construct
  misc_feature 1..45: note = Glycosyltransferase 8 domain-containing protein 1 (270-284)
  source 1..45: mol_type = other RNA
gtggaggaaggcctgtacagcagaaccctcgccgggtccatcaca

SEQ ID NO: 56113 - RNA, 30 nt, synthetic construct
  misc_feature 1..30: note = B-lymphocyte antigen CD19 (115-124)
  source 1..30: mol_type = other RNA
gtggagggcagcggggaactgttcagatgg

SEQ ID NO: 56114 - RNA, 27 nt, synthetic construct
  misc_feature 1..27: note = Interferon regulatory factor 9 (320-328)
  source 1..27: mol_type = other RNA
gtggagctgttcagaaccgcctacttt

SEQ ID NO: 56115 - RNA, 39 nt, synthetic construct
  misc_feature 1..39: note = Transferrin receptor protein 1 (681-693)
  source 1..39: mol_type = other RNA
gtggagtaccacttcctgagcccctatgtctcccctaag

SEQ ID NO: 56116 - RNA, 42 nt, synthetic construct
  misc_feature 1..42: note = Transferrin receptor protein 1 (681-694)
  source 1..42: mol_type = other RNA
gtggagtaccacttcctgagcccctatgtctcccctaaggaa

SEQ ID NO: 56117 - RNA, 45 nt, synthetic construct
  misc_feature 1..45: note = Phosphoinositide-3-kinase-interacting protein 1 (130-144)
  source 1..45: mol_type = other RNA
gtgttcgcccccgctaacgcactgcctgccagaagcgaggcggct

SEQ ID NO: 56118 - RNA, 27 nt, synthetic construct
  misc_feature 1..27: note = HLA class II histocompatibility antigen, DM alpha chain (12-20)
  source 1..27: mol_type = other RNA
gtgttcaccctgaagcccctcgagttt

SEQ ID NO: 56119 - RNA, 39 nt, synthetic construct
  misc_feature 1..39: note = Cystatin-C (57-69)
  source 1..39: mol_type = other RNA
gtgggcgagtacaacaaggccagcaatgacatgtatcac

SEQ ID NO: 56120 - RNA, 45 nt, synthetic construct
  misc_feature 1..45: note = Phosphate-regulating neutral endopeptidase (131-145)
  source 1..45: mol_type = other RNA
gtgggcaagatgttcgtcgacgtttactttcaggaggataaaaag

SEQ ID NO: 56121 - RNA, 48 nt, synthetic construct
  misc_feature 1..48: note = Phosphate-regulating neutral endopeptidase (131-146)
  source 1..48: mol_type = other RNA
gtgggcaagatgttcgtcgacgtttactttcaggaggataaaaaggaa

SEQ ID NO: 56122 - RNA, 42 nt, synthetic construct; identical to SEQ ID NO: 31895
  misc_feature 1..42: note = HLA class II histocompatibility antigen, DO beta chain (70-83)
  source 1..42: mol_type = other RNA

SEQ ID NO: 56123 - RNA, 51 nt, synthetic construct
  misc_feature 1..51: note = Perilipin-3 (406-422)
  source 1..51: mol_type = other RNA
gtgggccccttcgcccctgggatcaccgagaaggctccagaagagaaaaag

SEQ ID NO: 56124 - RNA, 42 nt, synthetic construct
  misc_feature 1..42: note = Cullin-associated NEDD8-dissociated protein 1 (747-760)
  source 1..42: mol_type = other RNA
gtgggccagttcatccaagacgtcaagaacagcagatccacc

SEQ ID NO: 56125 - RNA, 45 nt, synthetic construct
  misc_feature 1..45: note = Cullin-associated NEDD8-dissociated protein 1 (747-761)
  source 1..45: mol_type = other RNA
gtgggccagttcatccaagacgtcaagaacagcagatccaccgat

SEQ ID NO: 56126 - RNA, 36 nt, synthetic construct
  misc_feature 1..36: note = Ceruloplasmin (107-118)
  source 1..36: mol_type = other RNA
gtgcacctgaagaacctcgccagcagaccctacacc

SEQ ID NO: 56127 - RNA, 45 nt, synthetic construct
  misc_feature 1..45: note = Polypeptide N-acetylgalactosaminyltransferase 1 (76-90)
  source 1..45: mol_type = other RNA
gtgcacagcgtcatcaacagatcccccaggcatatgattgaggaa

SEQ ID NO: 56128 - RNA, 39 nt, synthetic construct
  misc_feature 1..39: note = Interleukin-4 receptor subunit alpha (189-201)
  source 1..39: mol_type = other RNA
gtgatcgccggcaaccccgcttacagaagcttctccaat

SEQ ID NO: 56129 - RNA, 30 nt, synthetic construct; identical to SEQ ID NO: 31902
  misc_feature 1..30: note = Methyltransferase-like protein 7A (45-54)
  source 1..30: mol_type = other RNA

SEQ ID NO: 56130 - RNA, 39 nt, synthetic construct
  misc_feature 1..39: note = Plasma membrane calcium-transporting ATPase 1 (111-123)
  source 1..39: mol_type = other RNA
gtgaagaaaatgatgaaggacaacaatctggtcagacac

SEQ ID NO: 56131 - RNA, 42 nt, synthetic construct
  misc_feature 1..42: note = Vesicle-associated membrane protein 1 (55-68)
  source 1..42: mol_type = other RNA
gtgctggagagagaccagaagctcagcgaacttgatgacagg

SEQ ID NO: 56132 - RNA, 24 nt, synthetic construct
  misc_feature 1..24: note = ATP-binding cassette sub-family A member 6 (320-327)
  source 1..24: mol_type = other RNA
gtgctgctcaagaaagccgtcctt

SEQ ID NO: 56133 - RNA, 27 nt, synthetic construct
  misc_feature 1..27: note = Methyltransferase-like protein 7A (163-171)
  source 1..27: mol_type = other RNA
gtgctgagacccggcggggccttctac

SEQ ID NO: 56134 - RNA, 36 nt, synthetic construct
  misc_feature 1..36: note = Serine incorporator 3 (91-102)
  source 1..36: mol_type = other RNA
gtgctggtcggctacaaggccgtttatagaatcagc

SEQ ID NO: 56135 - RNA, 27 nt, synthetic construct
  misc_feature 1..27: note = Ras GTPase-activating protein nGAP (848-856)
  source 1..27: mol_type = other RNA
gtgatgctggacgtccccatcagactc

SEQ ID NO: 56136 - RNA, 30 nt, synthetic construct
  misc_feature 1..30: note = B-cell linker protein (9-18)
  source 1..30: mol_type = other RNA
gtgcccgccagccagaagctgagacaactc

SEQ ID NO: 56137 - RNA, 27 nt, synthetic construct
  misc_feature 1..27: note = Endoplasmic reticulum resident protein 44 (242-250)
  source 1..27: mol_type = other RNA
gtgcccctggtcagagagatcaccttc

SEQ ID NO: 56138 - RNA, 27 nt, synthetic construct
  misc_feature 1..27: note = BRCA2 and CDKN1A-interacting protein (285-293)
  source 1..27: mol_type = other RNA
gtgcccatgacccctctgagaacagtc

SEQ ID NO: 56139 - RNA, 57 nt, synthetic construct
  misc_feature 1..57: note = Interleukin-4 receptor subunit alpha (241-259)
  source 1..57: mol_type = other RNA
gtgccccagcctgagccagaaacctgggagcaaatcctgagaaggaacgtcctccag

SEQ ID NO: 56140 - RNA, 48 nt, synthetic construct
  misc_feature 1..48: note = Cation-independent mannose-6-phosphate receptor (1001-1016)
  source 1..48: mol_type = other RNA
gtgcccagccctgtcgactgccaggttaccgatctggccggcaacgag

SEQ ID NO: 56141 - RNA, 42 nt, synthetic construct
  misc_feature 1..42: note = Fibromodulin (103-116)
  source 1..42: mol_type = other RNA
gtgcccagcagaatgaagtacgtctatttccagaacaatcaa

SEQ ID NO: 56142 - RNA, 48 nt, synthetic construct
  misc_feature 1..48: note = Fibromodulin (103-118)
  source 1..48: mol_type = other RNA
gtgcccagcagaatgaagtacgtctatttccagaacaatcaaatcacc

SEQ ID NO: 56143 - RNA, 51 nt, synthetic construct
  misc_feature 1..51: note = Fibromodulin (103-119)
  source 1..51: mol_type = other RNA
gtgcccagcagaatgaagtacgtctatttccagaacaatcaaatcacctcc

SEQ ID NO: 56144 - RNA, 39 nt, synthetic construct
  misc_feature 1..39: note = Ragulator complex protein LAMTOR3 (30-42)
  source 1..39: mol_type = other RNA
gtgcccgtcatcaaggttgccaacgacaatgctcctgag

SEQ ID NO: 56145 - RNA, 27 nt, synthetic construct
  misc_feature 1..27: note = Beta-1,4-galactosyltransferase 1 (117-125)
  source 1..27: mol_type = other RNA
gtgcccgtccctcacaccacagccctg

SEQ ID NO: 56146 - RNA, 27 nt, synthetic construct
  misc_feature 1..27: note = Plateletoprotein 4 (96-104)
  source 1..27: mol_type = other RNA
gtgccctaccctgtcaccacaactgtt

SEQ ID NO: 56147 - RNA, 42 nt, synthetic construct
  misc_feature 1..42: note = Protocadherin-9 (176-189)
  source 1..42: mol_type = other RNA
gtgcagcactacgagctgctcaacggccaaagcgtcttcggg

SEQ ID NO: 56148 - RNA, 45 nt, synthetic construct
  misc_feature 1..45: note = Phosphoinositide-3-kinase-interacting protein 1 (128-142)
  source 1..45: mol_type = other RNA
gtgcaggtcttcgcccccgctaacgcactgcctgccagaagcgag

SEQ ID NO: 56149 - RNA, 39 nt, synthetic construct
  misc_feature 1..39: note = Cystatin-C (76-88)
  source 1..39: mol_type = other RNA
gtgagagccaggaagcagatcgtcgctggcgttaactac

SEQ ID NO: 56150 - RNA, 27 nt, synthetic construct
  misc_feature 1..27: note = Perilipin-2 (218-226)
  source 1..27: mol_type = other RNA
gtgagactgggcagcctctccaccaag

SEQ ID NO: 56151 - RNA, 54 nt, synthetic construct
  misc_feature 1..54: note = Cystatin-C (49-66)
  source 1..54: mol_type = other RNA
gtgagaagggccctggacttcgctgtcggcgagtacaacaaggcaagcaatgat

SEQ ID NO: 56152 - RNA, 36 nt, synthetic construct
  misc_feature 1..36: note = SLAM family member 6 (51-62)
  source 1..36: mol_type = other RNA
gtgagcttcagatgggaggccctgggcaacaccctc

SEQ ID NO: 56153 - RNA, 42 nt, synthetic construct
  misc_feature 1..42: note = Rab GTPase-activating protein 1 (17-30)
  source 1..42: mol_type = other RNA
gtgagcaccctgaactccgaggacttcgtcctcgtttctaga

SEQ ID NO: 56154 - RNA, 45 nt, synthetic construct
  misc_feature 1..45: note = Rab GTPase-activating protein 1 (17-31)
  source 1..45: mol_type = other RNA
gtgagcaccctgaactccgaggacttcgtcctcgtttctagacag

SEQ ID NO: 56155 - RNA, 48 nt, synthetic construct
  misc_feature 1..48: note = Rab GTPase-activating protein 1 (17-32)
  source 1..48: mol_type = other RNA
gtgagcaccctgaactccgaggacttcgtcctcgtttctagacagggc

SEQ ID NO: 56156 - RNA, 39 nt, synthetic construct
  misc_feature 1..39: note = HLA class II histocompatibility antigen, DM alpha chain (200-212)
  source 1..39: mol_type = other RNA
gtgacccacgagatcgacagatacacagccattgcttat

SEQ ID NO: 56157 - RNA, 51 nt, synthetic construct
  misc_feature 1..51: note = Fas apoptotic inhibitory molecule 3 (118-134)
  source 1..51: mol_type = other RNA
gtgaccctgaacgtccacagcgagtacgaaccctcctgggaggaacagcct

SEQ ID NO: 56158 - RNA, 27 nt, synthetic construct
  misc_feature 1..27: note = Zinc finger protein 296 (209-217)
  source 1..27: mol_type = other RNA
gtggtcggccccgccgctgaggcaaag

SEQ ID NO: 56159 - RNA, 42 nt, synthetic construct
  misc_feature 1..42: note = Cullin-associated NEDD8-dissociated protein 1 (746-759)
  source 1..42: mol_type = other RNA
gtggtcggccagttcatccaagacgttaagaacagcagatcc

SEQ ID NO: 56160 - RNA, 45 nt, synthetic construct
  misc_feature 1..45: note = Cullin-associated NEDD8-dissociated protein 1 (746-760)
  source 1..45: mol_type = other RNA
gtggtcggccagttcatccaagacgttaagaacagcagatccacc

SEQ ID NO: 56161 - RNA, 48 nt, synthetic construct
  misc_feature 1..48: note = Cullin-associated NEDD8-dissociated protein 1 (746-761)
  source 1..48: mol_type = other RNA
gtggtcggccagttcatccaagacgttaagaacagcagatccaccgat

SEQ ID NO: 56162 - RNA, 51 nt, synthetic construct
  misc_feature 1..51: note = Cullin-associated NEDD8-dissociated protein 1 (746-762)
  source 1..51: mol_type = other RNA
gtggtcggccagttcatccaagacgttaagaacagcagatccaccgattct

SEQ ID NO: 56163 - RNA, 39 nt, synthetic construct
  misc_feature 1..39: note = Cystatin-C (75-87)
  source 1..39: mol_type = other RNA
gtggtcagagccaggaagcagatcgttgctggcgtgaac

SEQ ID NO: 56164 - RNA, 42 nt, synthetic construct
  misc_feature 1..42: note = Cystatin-C (75-88)
  source 1..42: mol_type = other RNA
gtggtcagagccaggaagcagatcgttgctggcgtgaactac

SEQ ID NO: 56165 - RNA, 30 nt, synthetic construct; identical to SEQ ID NO: 31938
  misc_feature 1..30: note = Negative elongation factor E (371-380)
  source 1..30: mol_type = other RNA

SEQ ID NO: 56166 - RNA, 30 nt, synthetic construct
  misc_feature 1..30: note = Lysine-specific demethylase 2B (316-325)
  source 1..30: mol_type = other RNA
gtgtacacccccgtcgacagcctggttttc

SEQ ID NO: 56167 - RNA, 39 nt, synthetic construct
  misc_feature 1..39: note = Ceruloplasmin (105-117)
  source 1..39: mol_type = other RNA
gtgtacgtccacctgaagaacctcgccagcagaccctat

SEQ ID NO: 56168 - RNA, 42 nt, synthetic construct
  misc_feature 1..42: note = Ceruloplasmin (105-118)
  source 1..42: mol_type = other RNA
gtgtacgtccacctgaagaacctcgccagcagaccctatacc

SEQ ID NO: 56169 - RNA, 48 nt, synthetic construct
  misc_feature 1..48: note = Ceruloplasmin (105-120)
  source 1..48: mol_type = other RNA
gtgtacgtccacctgaagaacctcgccagcagaccctataccttccat

SEQ ID NO: 56170 - RNA, 42 nt, synthetic construct
  misc_feature 1..42: note = Glycosyltransferase 8 domain-containing protein 1 (346-359)
  source 1..42: mol_type = other RNA
tgggagaagtggtacatccccgaccctaccggcaaattcaac

SEQ ID NO: 56171 - RNA, 36 nt, synthetic construct
  misc_feature 1..36: note = Fibromodulin (133-144)
  source 1..36: mol_type = other RNA
tggatcgccctgcacggcaaccagattaccagcgac

SEQ ID NO: 56172 - RNA, 39 nt, synthetic construct
  misc_feature 1..39: note = Fibromodulin (133-145)
  source 1..39: mol_type = other RNA
tggatcgccctgcacggcaaccagattaccagcgacaag

SEQ ID NO: 56173 - RNA, 36 nt, synthetic construct
  misc_feature 1..36: note = Glutathione peroxidase 1 (104-115)
  source 1..36: mol_type = other RNA
tggaacttcgagaagtttctggtgggccccgacggg

SEQ ID NO: 56174 - RNA, 42 nt, synthetic construct
  misc_feature 1..42: note = Platelet endothelial cell adhesion molecule (415-428)
  source 1..42: mol_type = other RNA
tacgacgcccagttcgaggtgatcaagggccaaaccattgaa

SEQ ID NO: 56175 - RNA, 36 nt, synthetic construct
  misc_feature 1..36: note = Vitamin D-binding protein (84-95)
  source 1..36: mol_type = other RNA
tacgacaccagaacaagcgccctgtccgctaagtct

SEQ ID NO: 56176 - RNA, 57 nt, synthetic construct
  misc_feature 1..57: note = Heterogeneous nuclear ribonucleoprotein A3 (171-189)
  source 1..57: mol_type = other RNA
tacggcgggggatatggtagcggcgggggatccggcggttacgggtctagaaggttc

SEQ ID NO: 56177 - RNA, 42 nt, synthetic construct
  misc_feature 1..42: note = Interleukin-4 receptor subunit alpha (302-315)
  source 1..42: mol_type = other RNA
tacaaggccttcagctccctgctcgcttcttcagcagtgagt

SEQ ID NO: 56178 - RNA, 45 nt, synthetic construct
  misc_feature 1..45: note = Interleukin-4 receptor subunit alpha (302-316)
  source 1..45: mol_type = other RNA
tacaaggccttcagctccctgctcgcttcttcagcagtgagtccc

SEQ ID NO: 56179 - RNA, 48 nt, synthetic construct
  misc_feature 1..48: note = Interleukin-4 receptor subunit alpha (302-317)
  source 1..48: mol_type = other RNA
tacaaggccttcagctccctgctcgcttcttcagcagtgagtcccgag

SEQ ID NO: 56180 - RNA, 36 nt, synthetic construct
  misc_feature 1..36: note = Glycosyltransferase 8 domain-containing protein 1 (123-134)
  source 1..36: mol_type = other RNA
tacaagatcgtgaacttcgaccccaaactgctcgag

SEQ ID NO: 56181 - RNA, 39 nt, synthetic construct
  misc_feature 1..39: note = Glycosyltransferase 8 domain-containing protein 1 (123-135)
  source 1..39: mol_type = other RNA
tacaagatcgtgaacttcgaccccaaactgctcgagggc

SEQ ID NO: 56182 - RNA, 45 nt, synthetic construct
  misc_feature 1..45: note = Glycosyltransferase 8 domain-containing protein 1 (123-137)
  source 1..45: mol_type = other RNA
tacaagatcgtgaacttcgaccccaaactgctcgagggcaaggtc

SEQ ID NO: 56183 - RNA, 39 nt, synthetic construct
  misc_feature 1..39: note = Ragulator complex protein LAMTOR3 (68-80)
  source 1..39: mol_type = other RNA
tacaacacctatcaggtggtccaattcaatagactgccc

SEQ ID NO: 56184 - RNA, 42 nt, synthetic construct
  misc_feature 1..42: note = Ragulator complex protein LAMTOR3 (68-81)
  source 1..42: mol_type = other RNA
tacaacacctatcaggtggtccaattcaatagactgcccctc

SEQ ID NO: 56185 - RNA, 45 nt, synthetic construct
  misc_feature 1..45: note = Ragulator complex protein LAMTOR3 (68-82)
  source 1..45: mol_type = other RNA
tacaacacctatcaggtggtccaattcaatagactgcccctcgtt

SEQ ID NO: 56186 - RNA, 48 nt, synthetic construct
  misc_feature 1..48: note = Ragulator complex protein LAMTOR3 (68-83)
  source 1..48: mol_type = other RNA
tacaacacctatcaggtggtccaattcaatagactgcccctcgttgtg

SEQ ID NO: 56187 - RNA, 27 nt, synthetic construct
  misc_feature 1..27: note = Zinc finger protein 638 (459-467)
  source 1..27: mol_type = other RNA
taccccaacaagggcgtggggcaggcc

SEQ ID NO: 56188 - RNA, 57 nt, synthetic construct
  misc_feature 1..57: note = Fas apoptotic inhibitory molecule 3 (81-99)
  source 1..57: mol_type = other RNA
taccccagaaagaacctgttcctcgtggaggtcacccagcttacagaaagcgactcc

SEQ ID NO: 56189 - RNA, 60 nt, synthetic construct
  misc_feature 1..60: note = Fas apoptotic inhibitory molecule 3 (81-100)
  source 1..60: mol_type = other RNA
taccccagaaagaacctgttcctcgtggaggtcacccagcttacagaaagcgactccggc

SEQ ID NO: 56190 - RNA, 27 nt, synthetic construct
  misc_feature 1..27: note = Beta-1,4-galactosyltransferase 1 (117-125)
  source 1..27: mol_type = other RNA
taccaggtgctggacgtccaaagatat

SEQ ID NO: 56191 - RNA, 42 nt, synthetic construct
  misc_feature 1..42: note = Serine incorporator 3 (350-363)
  source 1..42: mol_type = other RNA
tacagctccatcagaacctctacaaactcacaggtggacaag

SEQ ID NO: 56192 - RNA, 27 nt, synthetic construct
  misc_feature 1..27: note = E3 ubiquitin-protein ligase Mdm2 (48-56)
  source 1..27: mol_type = other RNA
tacaccatgaaggaggtgctgttctat

SEQ ID NO: 56193 - RNA, 36 nt, synthetic construct
  misc_feature 1..36: note = Ceruloplasmin (106-117)
  source 1..36: mol_type = other RNA
tacgtgcacctgaagaacctcgccagcagaccctat

SEQ ID NO: 56194 - RNA, 39 nt, synthetic construct
  misc_feature 1..39: note = Ceruloplasmin (106-118)
  source 1..39: mol_type = other RNA
tacgtgcacctgaagaacctcgccagcagaccctatacc

SEQ ID NO: 56195 - RNA, 45 nt, synthetic construct
  misc_feature 1..45: note = Ceruloplasmin (106-120)
  source 1..45: mol_type = other RNA
tacgtgcacctgaagaacctcgccagcagaccctataccttccat

SEQ ID NO: 56196 - RNA, 24 nt, synthetic construct
  misc_feature 1..24: note = HLA class II histocompatibility antigen, DM alpha chain (116-123)
  source 1..24: mol_type = other RNA
tactgggtgcccagaaacgccctg

SEQ ID NO: 56197 - RNA, 42 nt, synthetic construct
  misc_feature 1..42: note = Ragulator complex protein LAMTOR3 (67-80)
  source 1..42: mol_type = other RNA
tactataacacctaccaggtggtccaattcaatagactgccc

SEQ ID NO: 56198 - RNA, 45 nt, synthetic construct
  misc_feature 1..45: note = Ragulator complex protein LAMTOR3 (67-81)
  source 1..45: mol_type = other RNA
tactataacacctaccaggtggtccaattcaatagactgcccctc

SEQ ID NO: 56199 - RNA, 48 nt, synthetic construct
  misc_feature 1..48: note = Ragulator complex protein LAMTOR3 (67-82)
  source 1..48: mol_type = other RNA
tactataacacctaccaggtggtccaattcaatagactgcccctcgtt

SEQ ID NO: 56200 - RNA, 30 nt, synthetic construct
  misc_feature 1..30: note = Melanoma-associated antigen C2 (191-200)
  source 1..30: mol_type = other RNA
ctgctcttcggccttgccctgatcgaggtg

SEQ ID NO: 56201 - RNA, 42 nt, synthetic construct
  misc_feature 1..42: note = C-C motif chemokine 3 (59-72)
  source 1..42: mol_type = other RNA
aagcccggcgtgatcttcctgaccaaaagaagcaggcaggtc

SEQ ID NO: 56202 - RNA, 15 nt, synthetic construct
  misc_feature 1..15: note = Ig gamma-1 chain C region (91-95)
  source 1..15: mol_type = other RNA
agcgccgtgtactat

SEQ ID NO: 56203 - RNA, 27 nt, synthetic construct
  misc_feature 1..27: note = Serum albumin (444-452)
  source 1..27: mol_type = other RNA
acccccacactggtggaggtcagcaga

SEQ ID NO: 56204 - RNA, 36 nt, synthetic construct
  misc_feature 1..36: note = DNA topoisomerase 2-alpha (978-989)
  source 1..36: mol_type = other RNA
gccgaggctgaaagagtgggcctgcacaaggtcttc

SEQ ID NO: 56205 - RNA, 36 nt, synthetic construct
  misc_feature 1..36: note = Basement membrane-specific heparan sulfate proteoglycan core protein (1484-1495)
  source 1..36: mol_type = other RNA
gccctggctgacctcgatgagcttctgatcagagca

SEQ ID NO: 56206 - RNA, 36 nt, synthetic construct
  misc_feature 1..36: note = Protein phosphatase 1M (122-133)
  source 1..36: mol_type = other RNA
gccctgttcgacggccacgggggacccgctgcagcc

SEQ ID NO: 56207 - RNA, 39 nt, synthetic construct
  misc_feature 1..39: note = Sequestosome-1 (53-65)
  source 1..39: mol_type = other RNA
gccctgttccccgctctcagacctggcgggtttcaggca

SEQ ID NO: 56208 - RNA, 36 nt, synthetic construct
  misc_feature 1..36: note = UPF0585 protein C16orf13 (153-164)
  source 1..36: mol_type = other RNA
gccctgctcgaggaccttggcaaggctagcgggctg

SEQ ID NO: 56209 - RNA, 39 nt, synthetic construct
  misc_feature 1..39: note = Signal transducer and activator of transcription 1-alpha/beta (589-601)
  source 1..39: mol_type = other RNA
gccctgctcaaggaccagcaacccggcaccttccttctg

SEQ ID NO: 56210 - RNA, 51 nt, synthetic construct
  misc_feature 1..51: note = Glyceraldehyde-3-phosphate dehydrogenase (202-218)
  source 1..51: mol_type = other RNA
gccctgcagaacatcattcccgctagcaccggcgcagccaaggcggtgggg

SEQ ID NO: 56211 - RNA, 36 nt, synthetic construct
  misc_feature 1..36: note = Guanine nucleotide-binding protein G(I)/G(S)/G(T) subunit beta-1 (74-85)
  source 1..36: mol_type = other RNA
gccctgtgggacatcgagaccggccagcaaacaact

SEQ ID NO: 56212 - RNA, 36 nt, synthetic construct
  misc_feature 1..36: note = 26S protease regulatory subunit 7 (76-87)
  source 1..36: mol_type = other RNA
gccctgtgggacctcgctgcagataagcagaccctt

SEQ ID NO: 56213 - RNA, 36 nt, synthetic construct
  misc_feature 1..36: note = Peroxisomal multifunctional enzyme type 2 (193-204)
  source 1..36: mol_type = other RNA
gcccccaacgctggcagcagaatgacccagacagtg

SEQ ID NO: 56214 - RNA, 39 nt, synthetic construct
  misc_feature 1..39: note = 60S ribosomal protein L13 (47-59)
  source 1..39: mol_type = other RNA
gcccccagacctgctagcggcccaatcaggccgattgtg

SEQ ID NO: 56215 - RNA, 39 nt, synthetic construct
  misc_feature 1..39: note = HLA class I histocompatibility antigen, A-23 alpha chain (5-17)
  source 1..39: mol_type = other RNA
gcccccagaaccctggtgctccttctgagcggcgctttg

SEQ ID NO: 56216 - RNA, 48 nt, synthetic construct
  misc_feature 1..48: note = HLA class II histocompatibility antigen, DR alpha chain (51-66)
  source 1..48: mol_type = other RNA
gcccagggcgctctggcaaacatcgccgtggacaaggcgaatctcgag

SEQ ID NO: 56217 - RNA, 36 nt, synthetic construct
  misc_feature 1..36: note = Actin, cytoplasmic 2 (19-30)
  source 1..36: mol_type = other RNA
gccaccgctgcaagctcctcttcactggagaagagt

SEQ ID NO: 56218 - RNA, 48 nt, synthetic construct
  misc_feature 1..48: note = Annexin A2 (52-67)
  source 1..48: mol_type = other RNA
gacgaggtgaccatcgtcaacattctgacaaatagaagcaacgcccag

SEQ ID NO: 56219 - RNA, 39 nt, synthetic construct
  misc_feature 1..39: note = Interferon-induced transmembrane protein 1 (71-83)
  source 1..39: mol_type = other RNA
gacgtgaccggcgcccaggcttacgcaagcacagccaag

SEQ ID NO: 56220 - RNA, 39 nt, synthetic construct
  misc_feature 1..39: note = HLA class II histocompatibility antigen, DR alpha chain (50-62)
  source 1..39: mol_type = other RNA
gaggcccagggcgctctggcaaacatcgccgtggacaag

SEQ ID NO: 56221 - RNA, 51 nt, synthetic construct
  misc_feature 1..51: note = HLA class I histocompatibility antigen, Cw-7 alpha chain (152-168)
  source 1..51: mol_type = other RNA
gaggacctgagaagctggaccgccgctgatacagcagcccagatcactcaa

SEQ ID NO: 56222 - RNA, 48 nt, synthetic construct
  misc_feature 1..48: note = Myosin-9 (1232-1247)
  source 1..48: mol_type = other RNA
gaggaagtggacggcaaggccgatggggctgaggcaaaacccgccgaa

SEQ ID NO: 56223 - RNA, 51 nt, synthetic construct
  misc_feature 1..51: note = Heat shock cognate 71 kDa protein (444-460)
  source 1..51: mol_type = other RNA
gagggcgaaagagccatgaccaaggacaacaatctgctcgggaaattcgag

SEQ ID NO: 56224 - RNA, 48 nt, synthetic construct
  misc_feature 1..48: note = Actin, cytoplasmic 2 (15-30)
  source 1..48: mol_type = other RNA
gagcaggaaatggccaccgctgcaagctcctcttcactggagaagagt

SEQ ID NO: 56225 - RNA, 36 nt, synthetic construct
  misc_feature 1..36: note = Zinc finger protein ZPR1 (349-360)
  source 1..36: mol_type = other RNA
ttcatcatggacgatcccgccggcaacagctacctg

SEQ ID NO: 56226 - RNA, 36 nt, synthetic construct
  misc_feature 1..36: note = Sorting nexin-14 (234-245)
  source 1..36: mol_type = other RNA
ttcctggccgaccccgataccgtgaaccacctcctt

SEQ ID NO: 56227 - RNA, 36 nt, synthetic construct
  misc_feature 1..36: note = Cytochrome c oxidase assembly factor 3 homolog, mitochondrial (84-95)
  source 1..36: mol_type = other RNA
ttcctggacgagctcgaagatgaggccaaggctgca

SEQ ID NO: 56228 - RNA, 36 nt, synthetic construct
  misc_feature 1..36: note = Heterogeneous nuclear ribonucleoprotein U (198-209)
  source 1..36: mol_type = other RNA
ttcctgtgggccggcgggagagctagctacggagtg

SEQ ID NO: 56229 - RNA, 36 nt, synthetic construct
  misc_feature 1..36: note = Arf-GAP with Rho-GAP domain, ANK repeat and PH domain-containing protein 1 (1183-1194)
  source 1..36: mol_type = other RNA
ttcaccgccgaccccctgagcctccttagaaacgtg

SEQ ID NO: 56230 - RNA, 36 nt, synthetic construct
  misc_feature 1..36: note = Nucleolin (630-641)
  source 1..36: mol_type = other RNA
ggcgagatcgacgggaacaaggtgaccctggattgg

SEQ ID NO: 56231 - RNA, 48 nt, synthetic construct
  misc_feature 1..48: note = Heat shock cognate 71 kDa protein (445-460)
  source 1..48: mol_type = other RNA
ggcgagagagccatgaccaaggacaacaatctgctcgggaaattcgaa

SEQ ID NO: 56232 - RNA, 51 nt, synthetic construct
  misc_feature 1..51: note = Keratin, type I cytoskeletal 9 (15-31)
  source 1..51: mol_type = other RNA
ggcgggggaggtggcgggggactgggcagcggtgggtccatcagatcttca

SEQ ID NO: 56233 - RNA, 36 nt, synthetic construct
  misc_feature 1..36: note = Putative RNA-binding protein 15 (1399-1410)
  source 1..36: mol_type = other RNA
ggcctggcccccgctgaggtggtcgttgcaaccgtg

SEQ ID NO: 56234 - RNA, 36 nt, synthetic construct; identical to SEQ ID NO: 32007
  misc_feature 1..36: note = ERI1 exoribonuclease 3 (154-165)
  source 1..36: mol_type = other RNA

SEQ ID NO: 56235 - RNA, 39 nt, synthetic construct
  misc_feature 1..39: note = Anion exchange protein 2 (714-726)
  source 1..39: mol_type = other RNA
ggcctgctcggggagaagacccaggaccttatcggagtg

SEQ ID NO: 56236 - RNA, 48 nt, synthetic construct
  misc_feature 1..48: note = Phosphoglycerate kinase 1 (338-353)
  source 1..48: mol_type = other RNA
ggccccgtgggggtcttcgagtgggaagcctttgctagaggaaccaag

SEQ ID NO: 56237 - RNA, 51 nt, synthetic construct
  misc_feature 1..51: note = Phosphoglycerate kinase 1 (338-354)
  source 1..51: mol_type = other RNA
ggccccgtgggggtcttcgagtgggaagcctttgctagaggaaccaaggca

SEQ ID NO: 56238 - RNA, 45 nt, synthetic construct
  misc_feature 1..45: note = Calmodulin (135-149)
  source 1..45: mol_type = other RNA
ggccaggtgaactacgaggaattcgtccaaatgatgaccgccaag

SEQ ID NO: 56239 - RNA, 57 nt, synthetic construct
  misc_feature 1..57: note = Keratin, type II cytoskeletal 1 (560-578)
  source 1..57: mol_type = other RNA
ggcagcgggggaggttcctacggctctgggggaggcggtgggggacacggctcatat

SEQ ID NO: 56240 - RNA, 48 nt, synthetic construct
  misc_feature 1..48: note = HLA class I histocompatibility antigen, B-39 alpha chain (25-40)
  source 1..48: mol_type = other RNA
ggcagccactccatgagatacttctatacctctgtgtcaaggcccggg

SEQ ID NO: 56241 - RNA, 39 nt, synthetic construct
  misc_feature 1..39: note = Tumor susceptibility gene 101 protein (219-231)
  source 1..39: mol_type = other RNA
ggcaccatcagcgaggacacaattagagcctccctgata

SEQ ID NO: 56242 - RNA, 36 nt, synthetic construct
  misc_feature 1..36: note = A-kinase anchor protein 1, mitochondrial (608-619)
  source 1..36: mol_type = other RNA
atcatttgggagatagaagtgcccaagcacctggtc

SEQ ID NO: 56243 - RNA, 36 nt, synthetic construct
  misc_feature 1..36: note = Cirhin (454-465)
  source 1..36: mol_type = other RNA
atcctgttcagcgaggactccaccaagctctttgtg

SEQ ID NO: 56244 - RNA, 36 nt, synthetic construct
  misc_feature 1..36: note = 4-hydroxyphenylpyruvate dioxygenase-like protein (312-323)
  source 1..36: mol_type = other RNA
atcctgctcgacggcgataaggggaaattccttctg

SEQ ID NO: 56245 - RNA, 39 nt, synthetic construct
  misc_feature 1..39: note = Nucleosome-remodeling factor subunit BPTF (1571-1583)
  source 1..39: mol_type = other RNA
aagatcattcccgagaacgacataaaaagcctgaccgtg

SEQ ID NO: 56246 - RNA, 39 nt, synthetic construct
  misc_feature 1..39: note = Centrin-3 (108-120)
  source 1..39: mol_type = other RNA
aagctgttcgacgatgacgatagcggcaaaatctccctc

SEQ ID NO: 56247 - RNA, 36 nt, synthetic construct
  misc_feature 1..36: note = Uridine-cytidine kinase 2 (2-13)
  source 1..36: mol_type = other RNA
aagctgttcgtggacaccgatgccgacacaagactc

SEQ ID NO: 56248 - RNA, 36 nt, synthetic construct
  misc_feature 1..36: note = Retinoic acid receptor RXR-gamma (441-452)
  source 1..36: mol_type = other RNA
aagctgatcggcgacacccccattgatacattcctc

SEQ ID NO: 56249 - RNA, 39 nt, synthetic construct
  misc_feature 1..39: note = 40S ribosomal protein S17 (107-119)
  source 1..39: mol_type = other RNA
aagctgctcgacttcggcagcctttccaacctgcaggtg

SEQ ID NO: 56250 - RNA, 36 nt, synthetic construct
  misc_feature 1..36: note = Golgin subfamily A member 4 (849-860)
  source 1..36: mol_type = other RNA
aagctgctcgaccttgagaccgaaagaatcctgttg

SEQ ID NO: 56251 - RNA, 36 nt, synthetic construct
  misc_feature 1..36: note = Utrophin (226-237)
  source 1..36: mol_type = other RNA
aagctgctcgaccccgaggatgtggccgtccagctt

SEQ ID NO: 56252 - RNA, 36 nt, synthetic construct
  misc_feature 1..36: note = Prelamin-A/C (297-308)
  source 1..36: mol_type = other RNA
aagctgctcgagggcgaagaggaaagacttaggctg

SEQ ID NO: 56253 - RNA, 36 nt, synthetic construct
  misc_feature 1..36: note = Vimentin (236-247)
  source 1..36: mol_type = other RNA
aagctgctcgagggcgaagagagcagaatctccctt

SEQ ID NO: 56254 - RNA, 42 nt, synthetic construct
  misc_feature 1..42: note = V-type proton ATPase subunit H (396-409)
  source 1..42: mol_type = other RNA
aagctgctcgaggtgagcgacgatccccaggtccttgccgtt

SEQ ID NO: 56255 - RNA, 39 nt, synthetic construct
  misc_feature 1..39: note = Methionine aminopeptidase 1 (15-27)
  source 1..39: mol_type = other RNA
aagctgctcagctccgaggacatcgaaggcatgagactt

SEQ ID NO: 56256 - RNA, 36 nt, synthetic construct
  misc_feature 1..36: note = Isovaleryl-CoA dehydrogenase, mitochondrial (398-409)
  source 1..36: mol_type = other RNA
aagctgtacgagatcggcgccgggaccagcgaagtg

SEQ ID NO: 56257 - RNA, 36 nt, synthetic construct
  misc_feature 1..36: note = Eukaryotic translation initiation factor 3 subunit C-like protein (765-776)
  source 1..36: mol_type = other RNA
aaggtgtgggacctgttccccgaggccgataaagtc

SEQ ID NO: 56258 - RNA, 45 nt, synthetic construct
  misc_feature 1..45: note = HLA class I histocompatibility antigen, Cw-7 alpha chain (154-168)
  source 1..45: mol_type = other RNA
ctgagaagctggaccgccgctgacacagcagcccagatcactcaa

SEQ ID NO: 56259 - RNA, 42 nt, synthetic construct
  misc_feature 1..42: note = Mitochondrial import receptor subunit TOM5 homolog (38-51)
  source 1..42: mol_type = other RNA
ctgagagtgacccccttcatcctcaagaaacttgacagcatt

SEQ ID NO: 56260 - RNA, 39 nt, synthetic construct
  misc_feature 1..39: note = Beta-2-microglobulin (89-101)
  source 1..39: mol_type = other RNA
ctgagccagcccaagatcgtgaaatgggacagagatatg

SEQ ID NO: 56261 - RNA, 39 nt, synthetic construct
  misc_feature 1..39: note = Actin, cytoplasmic 2 (18-30)
  source 1..39: mol_type = other RNA
atggccaccgctgcaagctcctcttcactggagaagagt

SEQ ID NO: 56262 - RNA, 57 nt, synthetic construct
  misc_feature 1..57: note = HLA class I histocompatibility antigen, Cw-7 alpha chain (151-169)
  source 1..57: mol_type = other RNA
aacgaggacctgagaagctggaccgccgctgatacagcagcccagatcactcaaagg

SEQ ID NO: 56263 - RNA, 36 nt, synthetic construct
  misc_feature 1..36: note = Alkyldihydroxyacetonephosphate synthase, peroxisomal (324-335)
  source 1..36: mol_type = other RNA
aacatctacggcaatattgaggacctggtggtccac

SEQ ID NO: 56264 - RNA, 36 nt, synthetic construct
  misc_feature 1..36: note = Poly(U)-binding-splicing factor PUF60 (270-281)
  source 1..36: mol_type = other RNA
aacctgttcgacctcggcgggcagtaccttagagtg

SEQ ID NO: 56265 - RNA, 36 nt, synthetic construct
  misc_feature 1..36: note = Inosine-5'-monophosphate dehydrogenase 2 (312-323)
  source 1..36: mol_type = other RNA
aacctgatcgacgccggcgtggatgctctcagagtc

SEQ ID NO: 56266 - RNA, 36 nt, synthetic construct
  misc_feature 1..36: note = Cyclin-dependent kinase 1 (133-144)
  source 1..36: mol_type = other RNA
aacctgctcatcgacgataagggcaccattaaactt

SEQ ID NO: 56267 - RNA, 42 nt, synthetic construct
  misc_feature 1..42: note = Protein ERGIC-53 (162-175)
  source 1..42: mol_type = other RNA
aaccccgccatcgtgattataggcaataacgggcagatccac

SEQ ID NO: 56268 - RNA, 51 nt, synthetic construct
  misc_feature 1..51: note = Heat shock 70 kDa protein 1-like (170-186)
  source 1..51: mol_type = other RNA
aacgtgctgagaatcattaatgagcccaccgccgctgcaatagcctacggc

SEQ ID NO: 56269 - RNA, 51 nt, synthetic construct
  misc_feature 1..51: note = Hsp90 co-chaperone Cdc37 (362-378)
  source 1..51: mol_type = other RNA
cccctgctcgaggccgtgcctaagaccggcgacgaaaaagatgtcagcgtt

SEQ ID NO: 56270 - RNA, 36 nt, synthetic construct
  misc_feature 1..36: note = Nucleolar RNA helicase 2 (109-120)
  source 1..36: mol_type = other RNA
caggagatccccgtggaacaaaaggagggcgccttc

SEQ ID NO: 56271 - RNA, 36 nt, synthetic construct
  misc_feature 1..36: note = Signal recognition particle 54 kDa protein (385-396)
  source 1..36: mol_type = other RNA
caggagctggacagcaccgatggcgccaaggtgttc

SEQ ID NO: 56272 - RNA, 48 nt, synthetic construct
  misc_feature 1..48: note = Septin-2 (381-396)
  source 1..48: mol_type = other RNA
cagatgcaaggcggggacggagatggtggcgccctggggcaccatgtg

SEQ ID NO: 56273 - RNA, 36 nt, synthetic construct
  misc_feature 1..36: note = Polyadenylate-binding protein 4 (179-190)
  source 1..36: mol_type = other RNA
agagaggccgaactgggcgctaaggcaaaagagttc

SEQ ID NO: 56274 - RNA, 36 nt, synthetic construct
  misc_feature 1..36: note = Polyadenylate-binding protein 3 (179-190)
  source 1..36: mol_type = other RNA
agagaggccgaactgggcgctagggcaaaggagttc

SEQ ID NO: 56275 - RNA, 36 nt, synthetic construct
  misc_feature 1..36: note = Bromodomain adjacent to zinc finger domain protein 2B (1684-1695)
  source 1..36: mol_type = other RNA
agaatcattgaccccgaggatctgaaggccctcctt

SEQ ID NO: 56276 - RNA, 36 nt, synthetic construct
  misc_feature 1..36: note = Nucleolar complex protein 2 homolog (10-21)
  source 1..36: mol_type = other RNA
agactggccgagctcaccgtggacgaattccttgct

SEQ ID NO: 56277 - RNA, 36 nt, synthetic construct
  misc_feature 1..36: note = Protein unc-45 homolog A (202-213)
  source 1..36: mol_type = other RNA
agactgctcgacatgggcgagaccgatcttatgctg

SEQ ID NO: 56278 - RNA, 36 nt, synthetic construct
  misc_feature 1..36: note = Iron-sulfur cluster assembly 2 homolog, mitochondrial (59-70)
  source 1..36: mol_type = other RNA
agactgctcgagatcaccgaaggcagcgagttcctt

SEQ ID NO: 56279 - RNA, 36 nt, synthetic construct
  misc_feature 1..36: note = Cytoskeleton-associated protein 5 (1718-1729)
  source 1..36: mol_type = other RNA
agactgctccccgacaccatcaacagcattaatctt

SEQ ID NO: 56280 - RNA, 39 nt, synthetic construct
  misc_feature 1..39: note = ATP-dependent RNA helicase DHX36 (643-655)
  source 1..39: mol_type = other RNA
agactgatggacccccctagcaacgaggccgtgctcctt

SEQ ID NO: 56281 - RNA, 36 nt, synthetic construct
  misc_feature 1..36: note = Multidrug resistance protein 1 (378-389)
  source 1..36: mol_type = other RNA
agactgtacgaccccaccgagggcatggtgagcgtc

SEQ ID NO: 56282 - RNA, 42 nt, synthetic construct
  misc_feature 1..42: note = WD repeat-containing protein 11 (918-931)
  source 1..42: mol_type = other RNA
agactgtacggcgacgagagcgaactccacttctggaccgtg

SEQ ID NO: 56283 - RNA, 36 nt, synthetic construct
  misc_feature 1..36: note = Transmembrane emp24 domain-containing protein 9 (11-22)
  source 1..36: mol_type = other RNA
agacccaggcctggcaccgggctgggacgggtgatg

SEQ ID NO: 56284 - RNA, 36 nt, synthetic construct
  misc_feature 1..36: note = Serine-rich coiled-coil domain-containing protein 2 (24-35)
  source 1..36: mol_type = other RNA
agaccctacgccgctggcgggaagaaactggcactc

SEQ ID NO: 56285 - RNA, 36 nt, synthetic construct
  misc_feature 1..36: note = Anaphase-promoting complex subunit 2 (163-174)
  source 1..36: mol_type = other RNA
agagtgctggaccccagcatggtcatcctcgaggtt

SEQ ID NO: 56286 - RNA, 42 nt, synthetic construct
  misc_feature 1..42: note = HLA class I histocompatibility antigen, A-23 alpha chain (352-365)
  source 1..42: mol_type = other RNA
agcgcccagggctccgacgtgtctctgaccgcttgcaaggtc

SEQ ID NO: 56287 - RNA, 36 nt, synthetic construct
  misc_feature 1..36: note = Protein KRI1 homolog (456-467)
  source 1..36: mol_type = other RNA
agcgagcaggaagagctgagagacaagagggcctac

SEQ ID NO: 56288 - RNA, 48 nt, synthetic construct
  misc_feature 1..48: note = Keratin, type I cytoskeletal 9 (13-28)
  source 1..48: mol_type = other RNA
agcggcgggggaggtggcgggggactgggctccggtgggtctatcaga

SEQ ID NO: 56289 - RNA, 36 nt, synthetic construct
  misc_feature 1..36: note = Stress-70 protein, mitochondrial (253-264)
  source 1..36: mol_type = other RNA
agcatcctggagattcagaagggcgtgttcgaagtc

SEQ ID NO: 56290 - RNA, 36 nt, synthetic construct
  misc_feature 1..36: note = Centrosomal protein of 192 kDa (19-30)
  source 1..36: mol_type = other RNA
agcctgttcggcaactccgggatcctcgagaatgtg

SEQ ID NO: 56291 - RNA, 36 nt, synthetic construct
  misc_feature 1..36: note = DNA-dependent protein kinase catalytic subunit (3305-3316)
  source 1..36: mol_type = other RNA
agcctgctcgacgagaacaatgtgtcctcttacctt

SEQ ID NO: 56292 - RNA, 36 nt, synthetic construct
  misc_feature 1..36: note = Zinc finger protein 829 (85-96)
  source 1..36: mol_type = other RNA
agcctgctcgagcagggcaaggaaccctggatggtg

SEQ ID NO: 56293 - RNA, 42 nt, synthetic construct
  misc_feature 1..42: note = Renin receptor (241-254)
  source 1..42: mol_type = other RNA
agcctgtacggcgggaacgccgtggtcgagctcgttaccgtg

SEQ ID NO: 56294 - RNA, 39 nt, synthetic construct
  misc_feature 1..39: note = Protein kinase C-binding protein 1 (470-482)
  source 1..39: mol_type = other RNA
agccccgcctccaccaagacaggccaggctgggtctctg

SEQ ID NO: 56295 - RNA, 42 nt, synthetic construct
  misc_feature 1..42: note = AT-rich interactive domain-containing protein 1A (233-246)
  source 1..42: mol_type = other RNA
agccccagaggcgggacccctggatccggtgccgctgcagcc

SEQ ID NO: 56296 - RNA, 36 nt, synthetic construct
  misc_feature 1..36: note = E3 ubiquitin-protein ligase TRIP12 (1954-1965)
  source 1..36: mol_type = other RNA
agccccagactgcctgtgggcgggttcaggtccctc

SEQ ID NO: 56297 - RNA, 36 nt, synthetic construct
  misc_feature 1..36: note = Msx2-interacting protein (1024-1035)
  source 1..36: mol_type = other RNA
agccccagaccttccggcccagggccgtcttcattc

SEQ ID NO: 56298 - RNA, 36 nt, synthetic construct
  misc_feature 1..36: note = Long-chain-fatty-acid-CoA ligase 1 (687-698)
  source 1..36: mol_type = other RNA
agccagatcgacgatctgtactccaccattaaggtg

SEQ ID NO: 56299 - RNA, 54 nt, synthetic construct
  misc_feature 1..54: note = Keratin, type I cytoskeletal 9 (12-29)
  source 1..54: mol_type = other RNA
agcagatccggcgggggaggtggcgggggactgggctctggtgggtcaatcagg

SEQ ID NO: 56300 - RNA, 60 nt, synthetic construct
  misc_feature 1..60: note = Keratin, type I cytoskeletal 9 (12-31)
  source 1..60: mol_type = other RNA
agcagatccggcgggggaggtggcgggggactgggctctggtgggtcaatcaggagtagc

SEQ ID NO: 56301 - RNA, 63 nt, synthetic construct
  misc_feature 1..63: note = Keratin, type I cytoskeletal 9 (12-32)
  source 1..63: mol_type = other RNA
agcagatccggcgggggaggtggcgggggactgggctctggtgggtcaatcaggagtagctac

SEQ ID NO: 56302 - RNA, 60 nt, synthetic construct
  misc_feature 1..60: note = Cytochrome c oxidase subunit 6A1, mitochondrial (2-21)
  source 1..60: mol_type = other RNA
agctccggcgcccacggggaggaaggatctgctagaatgtggaagaccctgacattcttt

SEQ ID NO: 56303 - RNA, 42 nt, synthetic construct
  misc_feature 1..42: note = Glyceraldehyde-3-phosphate dehydrogenase (2-15)
  source 1..42: mol_type = other RNA
agcaccttcgacgccggcgctgggatcgcactgaacgatcac

SEQ ID NO: 56304 - RNA, 36 nt, synthetic construct
  misc_feature 1..36: note = HLA class I histocompatibility antigen, B-15 alpha chain (158-169)
  source 1..36: mol_type = other RNA
accgccgctgacacagcagcccagatcactcaaaga

SEQ ID NO: 56305 - RNA, 36 nt, synthetic construct
  misc_feature 1..36: note = Intercellular adhesion molecule 3 (536-547)
  source 1..36: mol_type = other RNA
accgaggccatgggcgaagagcccagcagagctgaa

SEQ ID NO: 56306 - RNA, 36 nt, synthetic construct; identical to SEQ ID NO: 32079
  misc_feature 1..36: note = Ragulator complex protein LAMTOR5 (36-47)
  source 1..36: mol_type = other RNA

SEQ ID NO: 56307 - RNA, 36 nt, synthetic construct
  misc_feature 1..36: note = Treacle protein (102-113)
  source 1..36: mol_type = other RNA
acccccagactggccagcacaaactcctctgtgctc

SEQ ID NO: 56308 - RNA, 36 nt, synthetic construct
  misc_feature 1..36: note = Neuropilin-2 (234-245)
  source 1..36: mol_type = other RNA
acccccagcgagctgagatcctctacaggcatcctc

SEQ ID NO: 56309 - RNA, 66 nt, synthetic construct
  misc_feature 1..66: note = Cytochrome c oxidase subunit 7A2, mitochondrial (62-83)
  source 1..66: mol_type = other RNA
accgtgggcgggacagcctacgctatctatgagctggcagtcgccagcttccccaagaaacaggaa

SEQ ID NO: 56310 - RNA, 51 nt, synthetic construct
  misc_feature 1..51: note = HLA class I histocompatibility antigen, Cw-5 alpha chain (52-68)
  source 1..51: mol_type = other RNA
gtggacgatacccagttcgtccaatttgacagcgatgccgcttcccccaga

SEQ ID NO: 56311 - RNA, 51 nt, synthetic construct
  misc_feature 1..51: note = HLA class I histocompatibility antigen, alpha chain E (49-65)
  source 1..51: mol_type = other RNA
gtggacgatacccagttcgtcagatttgacaacgatgccgctagccccagg

SEQ ID NO: 56312 - RNA, 57 nt, synthetic construct
  misc_feature 1..57: note = HLA class I histocompatibility antigen, B-55 alpha chain (52-70)
  source 1..57: mol_type = other RNA
gtggacgatacccagttcgtcagatttgacagcgatgccgcttcccccagggaggaa

SEQ ID NO: 56313 - RNA, 60 nt, synthetic construct
  misc_feature 1..60: note = HLA class I histocompatibility antigen, B-55 alpha chain (52-71)
  source 1..60: mol_type = other RNA
gtggacgatacccagttcgtcagatttgacagcgatgccgcttcccccagggaggaacct

SEQ ID NO: 56314 - RNA, 39 nt, synthetic construct
  misc_feature 1..39: note = butyrophilin subfamily 3 member A3 secreted isoform (174-186)
  source 1..39: mol_type = other RNA
gtgatcctggaccccgataccgccaacgctattctcctt

SEQ ID NO: 56315 - RNA, 39 nt, synthetic construct
  misc_feature 1..39: note = Dihydropyrimidinase-related protein 2 (374-386)
  source 1..39: mol_type = other RNA
gtgatctgggaccccgatagcgtcaagaccatttccgcc

SEQ ID NO: 56316 - RNA, 36 nt, synthetic construct
  misc_feature 1..36: note = Exocyst complex component 4 (203-214)
  source 1..36: mol_type = other RNA
gtgctggccgagatcaacaaggaaattgagggcgtc

SEQ ID NO: 56317 - RNA, 36 nt, synthetic construct
  misc_feature 1..36: note = Deoxyuridine 5'-triphosphate nucleotidohydrolase, mitochondrial (112-123)
  source 1..36: mol_type = other RNA
gtgctgttcaactttggcaaggagaaattcgaagtc

SEQ ID NO: 56318 - RNA, 42 nt, synthetic construct
  misc_feature 1..42: note = Translocon-associated protein subunit alpha (19-32)
  source 1..42: mol_type = other RNA
gtgctgttcagaggcgggcccaggggactccttgccgtcgct

SEQ ID NO: 56319 - RNA, 48 nt, synthetic construct
  misc_feature 1..48: note = Heat shock 70 kDa protein 1-like (171-186)
  source 1..48: mol_type = other RNA
gtgctgagaatcattaacgagcccaccgccgctgcaatagcctacggc

SEQ ID NO: 56320 - RNA, 39 nt, synthetic construct
  misc_feature 1..39: note = G2/mitotic-specific cyclin-B1 (388-400)
  source 1..39: mol_type = other RNA
gtgatggtcaaccagggcctgaccaagcacatgacagtt

SEQ ID NO: 56321 - RNA, 39 nt, synthetic construct
  misc_feature 1..39: note = Endoplasmic reticulum resident protein 29 (5-17)
  source 1..39: mol_type = other RNA
gtgcccagagccgctttcctgagccctctccttccactg

SEQ ID NO: 56322 - RNA, 36 nt, synthetic construct
  misc_feature 1..36: note = Lysosomal alpha-glucosidase (38-49)
  source 1..36: mol_type = other RNA
gtgcccagagagctgagcggctcctctcctgtcctc

SEQ ID NO: 56323 - RNA, 42 nt, synthetic construct
  misc_feature 1..42: note = HLA class I histocompatibility antigen, B-15 alpha chain (241-254)
  source 1..42: mol_type = other RNA
tggcagagagacggcgaggatcaaacccaggacacagaactg

SEQ ID NO: 56324 - RNA, 39 nt, synthetic construct
  misc_feature 1..39: note = V-type proton ATPase subunit S1 (77-89)
  source 1..39: mol_type = other RNA
tacctggaccccgccctcgagcttggccctagaaacgtg

SEQ ID NO: 56325 - RNA, 36 nt, synthetic construct
  misc_feature 1..36: note = Armadillo repeat-containing protein 8 (306-317)
  source 1..36: mol_type = other RNA
tacctgatcgagcccgacgtggaactccagagaatt

SEQ ID NO: 56326 - RNA, 36 nt, synthetic construct
  misc_feature 1..36: note = F-actin-capping protein subunit beta (120-131)
  source 1..36: mol_type = other RNA
tacctgtgggacctcgatcacggcttcgccggggtg

SEQ ID NO: 56327 - RNA, 36 nt, synthetic construct
  misc_feature 1..36: note = 40S ribosomal protein S8 (188-199)
  source 1..36: mol_type = other RNA
tacgtgctggagggcaaggaactcgagttctatctt

SEQ ID NO: 56328 - RNA, 45 nt, synthetic construct
  misc_feature 1..45: note = DnaJ homolog subfamily C member 3 (3-17)
  source 1..45: mol_type = other RNA
gcccccggcagcgtgacctccagactggggtctgtcttccctttt

SEQ ID NO: 56329 - RNA, 27 nt, synthetic construct
  misc_feature 1..27: note = Pre-rRNA-processing protein TSR1 homolog (480-488)
  source 1..27: mol_type = other RNA
gccagaatcttccagtttcaaaacttc

SEQ ID NO: 56330 - RNA, 27 nt, synthetic construct
  misc_feature 1..27: note = Protein FAM98B (250-258)
  source 1..27: mol_type = other RNA
gccagaatctaccagcccaagaggtat

SEQ ID NO: 56331 - RNA, 27 nt, synthetic construct
  misc_feature 1..27: note = Acyl-CoA desaturase (130-138)
  source 1..27: mol_type = other RNA
gccagactgcccctcaggcttttcctg

SEQ ID NO: 56332 - RNA, 27 nt, synthetic construct
  misc_feature 1..27: note = Serine/arginine-rich splicing factor 3 (42-50)
  source 1..27: mol_type = other RNA
gccagaaacccccctggcttcgctttt

SEQ ID NO: 56333 - RNA, 33 nt, synthetic construct
  misc_feature 1..33: note = ATP synthase F(0) complex subunit C1, mitochondrial (62-72)
  source 1..33: mol_type = other RNA
gccagaaaccccagcctgaagcagcaactcttc

SEQ ID NO: 56334 - RNA, 27 nt, synthetic construct
  misc_feature 1..27: note = 40S ribosomal protein S28 (12-20)
  source 1..27: mol_type = other RNA
gccagagtgaccaaggtcctgggcagg

SEQ ID NO: 56335 - RNA, 27 nt, synthetic construct
  misc_feature 1..27: note = Rab GDP dissociation inhibitor alpha (217-225)
  source 1..27: mol_type = other RNA
gccagatacggcaagagcccctatctg

SEQ ID NO: 56336 - RNA, 27 nt, synthetic construct
  misc_feature 1..27: note = Vacuolar fusion protein CCZ1 homolog (167-175)
  source 1..27: mol_type = other RNA
gagagactggaaaagttctttcacagg

SEQ ID NO: 56337 - RNA, 27 nt, synthetic construct
  misc_feature 1..27: note = Mitochondrial import receptor subunit TOM5 homolog (2-10)
  source 1..27: mol_type = other RNA
ttcagaatcgagggcctggcccccaag

SEQ ID NO: 56338 - RNA, 33 nt, synthetic construct
  misc_feature 1..33: note = Lysosome-associated membraneoprotein 2 (4-14)
  source 1..33: mol_type = other RNA
ttcagactgtttcccgtgcctggcagcgggctc

SEQ ID NO: 56339 - RNA, 30 nt, synthetic construct
  misc_feature 1..30: note = 60S ribosomal protein L28 (38-47)
  source 1..30: mol_type = other RNA
ttcagatacaacggcctgatccacaggaag

SEQ ID NO: 56340 - RNA, 30 nt, synthetic construct
  misc_feature 1..30: note = Menin (410-419)
  source 1..30: mol_type = other RNA
ggcagattcgaggggcaggtgaggcaaaag

SEQ ID NO: 56341 - RNA, 36 nt, synthetic construct
  misc_feature 1..36: note = Myelin basic protein (43-54)
  source 1..36: mol_type = other RNA
ggcagattctttgggggagacaggggtgcccccaag

SEQ ID NO: 56342 - RNA, 27 nt, synthetic construct
  misc_feature 1..27: note = Rho guanine nucleotide exchange factor 2 (459-467)
  source 1..27: mol_type = other RNA
ggcagattcaaggacgtgctggtcctc

SEQ ID NO: 56343 - RNA, 27 nt, synthetic construct
  misc_feature 1..27: note = Protein OS-9 (125-133)
  source 1..27: mol_type = other RNA
ggcagacacatccagcaataccatatg

SEQ ID NO: 56344 - RNA, 27 nt, synthetic construct
  misc_feature 1..27: note = 26S protease regulatory subunit 4 (345-353)
  source 1..27: mol_type = other RNA
ggcagaatcgacaggaagattgagttc

SEQ ID NO: 56345 - RNA, 27 nt, synthetic construct
  misc_feature 1..27: note = Uncharacterized protein C1orf131 (262-270)
  source 1..27: mol_type = other RNA
ggcagaatcgggcaggtgggaaagttc

SEQ ID NO: 56346 - RNA, 27 nt, synthetic construct
  misc_feature 1..27: note = Glyceraldehyde-3-phosphate dehydrogenase (12-20)
  source 1..27: mol_type = other RNA
ggcagaatcgggaggctggtgacccgg

SEQ ID NO: 56347 - RNA, 27 nt, synthetic construct
  misc_feature 1..27: note = Induced myeloid leukemia cell differentiation protein Mcl-1 (109-117)
  source 1..27: mol_type = other RNA
ggcagaatcgtgaccctgattagcttc

SEQ ID NO: 56348 - RNA, 33 nt, synthetic construct
  misc_feature 1..33: note = 60S ribosomal protein L13a (139-149)
  source 1..33: mol_type = other RNA
ggcagactggcccacgaggtggggtggaagtac

SEQ ID NO: 56349 - RNA, 27 nt, synthetic construct
  misc_feature 1..27: note = Protein MON2 homolog (593-601)
  source 1..27: mol_type = other RNA
ggcagactggggctcgtgaccagcagg

SEQ ID NO: 56350 - RNA, 27 nt, synthetic construct
  misc_feature 1..27: note = Protein transport protein Sec23B (152-160)
  source 1..27: mol_type = other RNA
ggcagaatggtgcaggtccacgagctg

SEQ ID NO: 56351 - RNA, 27 nt, synthetic construct
  misc_feature 1..27: note = Major facilitator superfamily domain-containing protein 10 (356-364)
  source 1..27: mol_type = other RNA
ggcagaagcctgcccgtgctcgggctt

SEQ ID NO: 56352 - RNA, 27 nt, synthetic construct
  misc_feature 1..27: note = Unconventional myosin-Ic (676-684)
  source 1..27: mol_type = other RNA
ggcagaaccaagatcttcattaggttt

SEQ ID NO: 56353 - RNA, 27 nt, synthetic construct
  misc_feature 1..27: note = Protein CNPPD1 (197-205)
  source 1..27: mol_type = other RNA
ggcagatggagggggtggtacacctat

SEQ ID NO: 56354 - RNA, 27 nt, synthetic construct
  misc_feature 1..27: note = E3 ubiquitin-protein ligase MYCBP2 (3264-3272)
  source 1..27: mol_type = other RNA
ggcagatacgccgggggacagggttat

SEQ ID NO: 56355 - RNA, 27 nt, synthetic construct
  misc_feature 1..27: note = NEDD4 family-interacting protein 1 (145-153)
  source 1..27: mol_type = other RNA
ggcagatacggggccatcagcggattc

SEQ ID NO: 56356 - RNA, 33 nt, synthetic construct
  misc_feature 1..33: note = NEDD4 family-interacting protein 1 (145-155)
  source 1..33: mol_type = other RNA
ggcagatacggggccatcagcggattcggtctg

SEQ ID NO: 56357 - RNA, 27 nt, synthetic construct
  misc_feature 1..27: note = Inositol hexakisphosphate kinase 2 (296-304)
  source 1..27: mol_type = other RNA
ggcagatacctgaggcgggagctcctt

SEQ ID NO: 56358 - RNA, 27 nt, synthetic construct
  misc_feature 1..27: note = Translocon-associated protein subunit delta (84-92)
  source 1..27: mol_type = other RNA
ggcagataccaggtgagctggtccctg

SEQ ID NO: 56359 - RNA, 27 nt, synthetic construct
  misc_feature 1..27: note = Cleavage and polyadenylation specificity factor subunit 5 (89-97)
  source 1..27: mol_type = other RNA
cacagactgccccatgtgctccttctg

SEQ ID NO: 56360 - RNA, 27 nt, synthetic construct
  misc_feature 1..27: note = Zinc finger protein 281 (55-63)
  source 1..27: mol_type = other RNA
cacagactgccccctgtgaccagcttc

SEQ ID NO: 56361 - RNA, 30 nt, synthetic construct
  misc_feature 1..30: note = Calpain-1 catalytic subunit (132-141)
  source 1..30: mol_type = other RNA
cacagagtggtcccccatggccagagcttc

SEQ ID NO: 56362 - RNA, 30 nt, synthetic construct
  misc_feature 1..30: note = X-ray repair cross-complementing protein 6 (338-347)
  source 1..30: mol_type = other RNA
aagagattcgacgatcccggcctgatgctc

SEQ ID NO: 56363 - RNA, 30 nt, synthetic construct
  misc_feature 1..30: note = Copine-1 (190-199)
  source 1..30: mol_type = other RNA
aagagattcagcgtgcccgtccagcacttt

SEQ ID NO: 56364 - RNA, 27 nt, synthetic construct
  misc_feature 1..27: note = Ornithine decarboxylase antizyme 1 (58-66)
  source 1..27: mol_type = other RNA
aagagaatcaactggaggaccgtgctg

SEQ ID NO: 56365 - RNA, 27 nt, synthetic construct
  misc_feature 1..27: note = Bax inhibitor 1 (129-137)
  source 1..27: mol_type = other RNA
aagagactgggcctccttgccgggttc

SEQ ID NO: 56366 - RNA, 27 nt, synthetic construct
  misc_feature 1..27: note = Pre-rRNA-processing protein TSR1 homolog (726-734)
  source 1..27: mol_type = other RNA
aagagagtgttccccaaatggacctac

SEQ ID NO: 56367 - RNA, 30 nt, synthetic construct
  misc_feature 1..30: note = Pre-mRNA-processing-splicing factor 8 (85-94)
  source 1..30: mol_type = other RNA
aagagagtgtacctgggcgccctcaaatat

SEQ ID NO: 56368 - RNA, 30 nt, synthetic construct
  misc_feature 1..30: note = ER degradation-enhancing alpha-mannosidase-like protein 1 (467-476)
  source 1..30: mol_type = other RNA
aagagatacggcgccctgcccgagaggtat

SEQ ID NO: 56369 - RNA, 27 nt, synthetic construct
  misc_feature 1..27: note = Mitochondrial import receptor subunit TOM5 homolog (38-46)
  source 1..27: mol_type = other RNA
ctgagagtgacccccttcatcctcaag

SEQ ID NO: 56370 - RNA, 27 nt, synthetic construct
  misc_feature 1..27: note = Interferon alpha-inducible protein 6 (1-9)
  source 1..27: mol_type = other RNA
atgagacagaaggccgtgagcctgttc

SEQ ID NO: 56371 - RNA, 30 nt, synthetic construct
  misc_feature 1..30: note = Interferon alpha-inducible protein 6 (1-10)
  source 1..30: mol_type = other RNA
atgagacagaaggccgtgagcctgttcctc

SEQ ID NO: 56372 - RNA, 27 nt, synthetic construct
  misc_feature 1..27: note = Double-strand-break repair protein rad21 homolog (383-391)
  source 1..27: mol_type = other RNA
aacagactgctcaagcttttcaccagg

SEQ ID NO: 56373 - RNA, 27 nt, synthetic construct
  misc_feature 1..27: note = ER degradation-enhancing alpha-mannosidase-like protein 1 (35-43)
  source 1..27: mol_type = other RNA
cagagattccccctgagctttggcttc

SEQ ID NO: 56374 - RNA, 27 nt, synthetic construct
  misc_feature 1..27: note = B-cell receptor-associated protein 31 (100-108)
  source 1..27: mol_type = other RNA
cagagaaacctgtacatcgccggcttc

SEQ ID NO: 56375 - RNA, 33 nt, synthetic construct
  misc_feature 1..33: note = Chondroitin sulfate glucuronyltransferase (434-444)
  source 1..33: mol_type = other RNA
agaaggttcgaccccgcccggggcatggagtac

SEQ ID NO: 56376 - RNA, 27 nt, synthetic construct
  misc_feature 1..27: note = Nuclear envelope integral membrane protein 1 (157-165)
  source 1..27: mol_type = other RNA
agaaggttcgaccccaagctgtttctc

SEQ ID NO: 56377 - RNA, 27 nt, synthetic construct
  misc_feature 1..27: note = ER membrane protein complex subunit 4 (13-21)
  source 1..27: mol_type = other RNA
agaaggttcaagtgggccatcgagctg

SEQ ID NO: 56378 - RNA, 27 nt, synthetic construct
  misc_feature 1..27: note = Ras GTPase-activating protein-binding protein 1 (106-114)
  source 1..27: mol_type = other RNA
agaaggttcatgcagacctttgtgctg

SEQ ID NO: 56379 - RNA, 27 nt, synthetic construct
  misc_feature 1..27: note = Cullin-7 (439-447)
  source 1..27: mol_type = other RNA
agaaggttccggccccgcagcgagttt

SEQ ID NO: 56380 - RNA, 27 nt, synthetic construct
  misc_feature 1..27: note = Ubiquitin carboxyl-terminal hydrolase 22 (367-375)
  source 1..27: mol_type = other RNA
agaaggttcacccggcccgagcacctg

SEQ ID NO: 56381 - RNA, 27 nt, synthetic construct
  misc_feature 1..27: note = Cytochrome c oxidase subunit 7C, mitochondrial (7-15)
  source 1..27: mol_type = other RNA
agaaggttcaccacaagcgtggtccgg

SEQ ID NO: 56382 - RNA, 33 nt, synthetic construct
  misc_feature 1..33: note = 40S ribosomal protein S30 (114-124)
  source 1..33: mol_type = other RNA
agaaggttcgtgaacgtcgttcccacctttggc

SEQ ID NO: 56383 - RNA, 27 nt, synthetic construct
  misc_feature 1..27: note = Acyl-CoA desaturase (174-182)
  source 1..27: mol_type = other RNA
agaaggggcttctttttcagccacgtg

SEQ ID NO: 56384 - RNA, 27 nt, synthetic construct
  misc_feature 1..27: note = Store-operated calcium entry-associated regulatory factor (56-64)
  source 1..27: mol_type = other RNA
agaaggctggaccccatccctcagctc

SEQ ID NO: 56385 - RNA, 30 nt, synthetic construct
  misc_feature 1..30: note = Melanoma-associated antigen F1 (195-204)
  source 1..30: mol_type = other RNA
agaaggctgggcgtgcagcccagcaagtac

SEQ ID NO: 56386 - RNA, 27 nt, synthetic construct
  misc_feature 1..27: note = Transformation/transcription domain-associated protein (2920-2928)
  source 1..27: mol_type = other RNA
agaaggctgccccacgtggtcagccat

SEQ ID NO: 56387 - RNA, 27 nt, synthetic construct
  misc_feature 1..27: note = Heat shock protein HSP 90-beta (375-383)
  source 1..27: mol_type = other RNA
agaaggctgagcgagctccttcggtac

SEQ ID NO: 56388 - RNA, 27 nt, synthetic construct
  misc_feature 1..27: note = DNA-directed RNA polymerase II subunit RPB1 (1052-1060)
  source 1..27: mol_type = other RNA
agaaggatggccgaggaattccggctg

SEQ ID NO: 56389 - RNA, 30 nt, synthetic construct
  misc_feature 1..30: note = Signal-induced proliferation-associated 1-like protein 2 (954-963)
  source 1..30: mol_type = other RNA
agaaggaacggcctggggcagctcggattc

SEQ ID NO: 56390 - RNA, 27 nt, synthetic construct
  misc_feature 1..27: note = NADH dehydrogenase (ubiquinone) 1 subunit C2 (4-12)
  source 1..27: mol_type = other RNA
agaaggaaccccgagcctctgcggttc

SEQ ID NO: 56391 - RNA, 30 nt, synthetic construct
  misc_feature 1..30: note = Elongation factor 2 (341-350)
  source 1..30: mol_type = other RNA
agaaggtggctgcccgccggcgacgctctc

SEQ ID NO: 56392 - RNA, 27 nt, synthetic construct
  misc_feature 1..27: note = Eukaryotic initiation factor 4A-I (168-176)
  source 1..27: mol_type = other RNA
agaaggtacctgagccccaagtatatc

SEQ ID NO: 56393 - RNA, 27 nt, synthetic construct
  misc_feature 1..27: note = 60S ribosomal protein L17 (61-69)
  source 1..27: mol_type = other RNA
agaaggtacaacggcggggtgggacgg

SEQ ID NO: 56394 - RNA, 30 nt, synthetic construct
  misc_feature 1..30: note = Eukaryotic translation initiation factor 3 subunit L (327-336)
  source 1..30: mol_type = other RNA
agaaggtaccaggacgccatccgggtgttc

SEQ ID NO: 56395 - RNA, 27 nt, synthetic construct
  misc_feature 1..27: note = Charged multivesicular body protein 2a (70-78)
  source 1..27: mol_type = other RNA
agaaggtacgtgcggaagttcgtcctg

SEQ ID NO: 56396 - RNA, 27 nt, synthetic construct
  misc_feature 1..27: note = Histone H2A type 1-A (20-28)
  source 1..27: mol_type = other RNA
agcagagccggcctgcagttccccgtg

SEQ ID NO: 56397 - RNA, 27 nt, synthetic construct
  misc_feature 1..27: note = Pre-mRNA cleavage complex 2 protein Pcf11 (1103-1111)
  source 1..27: mol_type = other RNA
agcagattcgacatccccctgggcctc

SEQ ID NO: 56398 - RNA, 27 nt, synthetic construct
  misc_feature 1..27: note = Pericentrin (1289-1297)
  source 1..27: mol_type = other RNA
agcagattcgagaaggaattttccttc

SEQ ID NO: 56399 - RNA, 27 nt, synthetic construct
  misc_feature 1..27: note = Myosin-7 (242-250)
  source 1..27: mol_type = other RNA
agcagattcggcaagtttatcaggatt

SEQ ID NO: 56400 - RNA, 27 nt, synthetic construct
  misc_feature 1..27: note = Pre-mRNA-processing-splicing factor 8 (538-546)
  source 1..27: mol_type = other RNA
agcagattcggcaacgcctttcacctg

SEQ ID NO: 56401 - RNA, 33 nt, synthetic construct
  misc_feature 1..33: note = EH domain-containing protein 4 (129-139)
  source 1..33: mol_type = other RNA
agcagattcggcaacgcctttctgaataggttc

SEQ ID NO: 56402 - RNA, 27 nt, synthetic construct
  misc_feature 1..27: note = DNA replication licensing factor MCM7 (227-235)
  source 1..27: mol_type = other RNA
agcagattcatcaagtttcaggagatg

SEQ ID NO: 56403 - RNA, 27 nt, synthetic construct
  misc_feature 1..27: note = ATP-dependent RNA helicase DDX3X (591-599)
  source 1..27: mol_type = other RNA
agcagattctccggcgggtttggagcc

SEQ ID NO: 56404 - RNA, 30 nt, synthetic construct
  misc_feature 1..30: note = NADH dehydrogenase (ubiquinone) 1 beta subcomplex subunit 5, mitochondrial (60-69)
  source 1..30: mol_type = other RNA
agcagattctacgacaggcggtttctgaag

SEQ ID NO: 56405 - RNA, 27 nt, synthetic construct
  misc_feature 1..27: note = Hypoxia-inducible factor 1-alpha (268-276)
  source 1..27: mol_type = other RNA
agcagacactccctggacatgaagttc

SEQ ID NO: 56406 - RNA, 33 nt, synthetic construct
  misc_feature 1..33: note = Ubiquitin fusion degradation protein 1 homolog (57-67)
  source 1..33: mol_type = other RNA
agcagactgaacatcacctaccccatgctcttc

SEQ ID NO: 56407 - RNA, 27 nt, synthetic construct
  misc_feature 1..27: note = Protein diaphanous homolog 3 (854-862)
  source 1..27: mol_type = other RNA
agcagaaacgcccagaccttcggcttt

SEQ ID NO: 56408 - RNA, 27 nt, synthetic construct
  misc_feature 1..27: note = Cytochrome b-c1 complex subunit 8 (9-17)
  source 1..27: mol_type = other RNA
accagaatgaggcacgtgatcagctac

SEQ ID NO: 56409 - RNA, 27 nt, synthetic construct
  misc_feature 1..27: note = WD repeat-containing protein 36 (383-391)
  source 1..27: mol_type = other RNA
gtgagactgccccctatcaccaagttc

SEQ ID NO: 56410 - RNA, 42 nt, synthetic construct
  misc_feature 1..42: note = POTE ankyrin domain family member F (791-804)
  source 1..42: mol_type = other RNA
tacaacgagctgagagtggcccccgaagagcaccctgtcctc

SEQ ID NO: 56411 - RNA, 27 nt, synthetic construct
  misc_feature 1..27: note = Dystonin (7305-7313)
  source 1..27: mol_type = other RNA
tacagattctttctgggcaaccagttc

SEQ ID NO: 56412 - RNA, 27 nt, synthetic construct
  misc_feature 1..27: note = BTB/POZ domain-containing protein KCTD20 (192-200)
  source 1..27: mol_type = other RNA
ggcagaagcgaggtgatctacaactat

SEQ ID NO: 56413 - RNA, 27 nt, synthetic construct
  misc_feature 1..27: note = Filamin-B (2069-2077)
  source 1..27: mol_type = other RNA
ggcagagtgaaggagagcatcaccagg

SEQ ID NO: 56414 - RNA, 27 nt, synthetic construct
  misc_feature 1..27: note = Intron-binding protein aquarius (896-904)
  source 1..27: mol_type = other RNA
ggcagagtgaactacgtcctggccagg

SEQ ID NO: 56415 - RNA, 33 nt, synthetic construct
  misc_feature 1..33: note = Integrin-linked protein kinase (149-159)
  source 1..33: mol_type = other RNA
ggcagatggcaggggaacgacatcgtggtcaag

SEQ ID NO: 56416 - RNA, 27 nt, synthetic construct
  misc_feature 1..27: note = Serine/threonine-protein kinase 38 (446-454)
  source 1..27: mol_type = other RNA
aagagattcgagggcctgaccgccagg

SEQ ID NO: 56417 - RNA, 27 nt, synthetic construct
  misc_feature 1..27: note = 39S ribosomal protein L43, mitochondrial (27-35)
  source 1..27: mol_type = other RNA
cagagactgagcttctccgtgtctagg

SEQ ID NO: 56418 - RNA, 27 nt, synthetic construct
  misc_feature 1..27: note = Protein diaphanous homolog 1 (967-975)
  source 1..27: mol_type = other RNA
agcagaaacgccggcgctttcgggttt

SEQ ID NO: 56419 - RNA, 30 nt, synthetic construct
  misc_feature 1..30: note = WD repeat-containing protein 1 (55-64)
  source 1..30: mol_type = other RNA
gtgagattcagccccgacggcaacaggttt

SEQ ID NO: 56420 - RNA, 39 nt, synthetic construct
  misc_feature 1..39: note = Elongation factor 1-beta (213-225)
  source 1..39: mol_type = other RNA
tacgtgcagagcatggacgtcgccgctttcaacaagatc

SEQ ID NO: 56421 - RNA, 27 nt, synthetic construct
  misc_feature 1..27: note = T-complex protein 1 subunit zeta (2-10)
  source 1..27: mol_type = other RNA
gccgctgtgaagaccctgaaccccaaa

SEQ ID NO: 56422 - RNA, 33 nt, synthetic construct
  misc_feature 1..33: note = 40S ribosomal protein S21 (73-83)
  source 1..33: mol_type = other RNA
gccaaggctgacggcatcgtgagcaaaaacttc

SEQ ID NO: 56423 - RNA, 33 nt, synthetic construct
  misc_feature 1..33: note = Alpha-enolase (13-23)
  source 1..33: mol_type = other RNA
gacagcagaggcaaccccaccgtggaggtcgat

SEQ ID NO: 56424 - RNA, 27 nt, synthetic construct
  misc_feature 1..27: note = Triosephosphate isomerase (159-167)
  source 1..27: mol_type = other RNA
ttcgtggacatcattaacgccaagcag

SEQ ID NO: 56425 - RNA, 27 nt, synthetic construct
  misc_feature 1..27: note = 60S ribosomal protein L37 (76-84)
  source 1..27: mol_type = other RNA
cacggcttcagagaggggaccacaccc

SEQ ID NO: 56426 - RNA, 27 nt, synthetic construct
  misc_feature 1..27: note = Store-operated calcium entry-associated regulatory factor (103-111)
  source 1..27: mol_type = other RNA
atcgcctacaagttcggcaaaaccgtg

SEQ ID NO: 56427 - RNA, 27 nt, synthetic construct
  misc_feature 1..27: note = Ubiquitin-60S ribosomal protein L40 (48-56)
  source 1..27: mol_type = other RNA
atcattgagcccagcctgagacagctc

SEQ ID NO: 56428 - RNA, 27 nt, synthetic construct
  misc_feature 1..27: note = Eukaryotic translation initiation factor 4 gamma 1 (1452-1460)
  source 1..27: mol_type = other RNA
atcattttcgagacccccctgagagtg

SEQ ID NO: 56429 - RNA, 27 nt, synthetic construct
  misc_feature 1..27: note = Vacuolar protein sorting-associated protein 4A (144-152)
  source 1..27: mol_type = other RNA
atcctgcccattaagttccctcacctc

SEQ ID NO: 56430 - RNA, 30 nt, synthetic construct
  misc_feature 1..30: note = 40S ribosomal protein S21 (74-83)
  source 1..30: mol_type = other RNA
aaggccgacggcatcgtgagcaaaaacttc

SEQ ID NO: 56431 - RNA, 27 nt, synthetic construct
  misc_feature 1..27: note = COMM domain-containing protein 3 (187-195)
  source 1..27: mol_type = other RNA
aagagcctggagagagccacccagctc

SEQ ID NO: 56432 - RNA, 27 nt, synthetic construct
  misc_feature 1..27: note = POTE ankyrin domain family member E (805-813)
  source 1..27: mol_type = other RNA
ctgaccgaggcccccctcaaccctaag

SEQ ID NO: 56433 - RNA, 27 nt, synthetic construct
  misc_feature 1..27: note = DNA-dependent protein kinase catalytic subunit (1340-1348)
  source 1..27: mol_type = other RNA
agaatcatggagttcaccacaactctg

SEQ ID NO: 56434 - RNA, 33 nt, synthetic construct
  misc_feature 1..33: note = TAR DNA-binding protein 43 (248-258)
  source 1..33: mol_type = other RNA
agcatggactccaagtcttcaggctgggggatg

SEQ ID NO: 56435 - RNA, 33 nt, synthetic construct
  misc_feature 1..33: note = Vimentin (2-12)
  source 1..33: mol_type = other RNA
agcaccagatccgtgtcttcaagtagctacagg

SEQ ID NO: 56436 - RNA, 42 nt, synthetic construct
  misc_feature 1..42: note = Vimentin (446-459)
  source 1..42: mol_type = other RNA
accgtggagacaagagacggccaggtcatcaacgaaactagc

SEQ ID NO: 56437 - RNA, 30 nt, synthetic construct
  misc_feature 1..30: note = 60S ribosomal protein L31(106-115)
  source 1..30: mol_type = other RNA
gtgacctacgtccccgttacaactttcaag

SEQ ID NO: 56438 - RNA, 27 nt, synthetic construct
  misc_feature 1..27: note = Hemoglobin subunit delta (34-42)
  source 1..27: mol_type = other RNA
gtggtctacccctggacccagagattc

SEQ ID NO: 56439 - RNA, 27 nt, synthetic construct
  misc_feature 1..27: note = Guanine nucleotide-binding protein subunit beta-2-like 1 (192-200)
  source 1..27: mol_type = other RNA
accggctacctgaacacagtgactgtc

SEQ ID NO: 56440 - RNA, 24 nt, synthetic construct
  misc_feature 1..24: note = Ubiquitin-conjugating enzyme E2 D2 (59-66)
  source 1..24: mol_type = other RNA
taccccttcaagcctccaaaagtg

SEQ ID NO: 56441 - RNA, 57 nt, synthetic construct
  misc_feature 1..57: note = Histone H2B type 2-E (83-101)
  source 1..57: mol_type = other RNA
gccaagcacgctgtgagcgagggcaccaaagcagtcacaaagtacacttcctctaaa

SEQ ID NO: 56442 - RNA, 30 nt, synthetic construct
  misc_feature 1..30: note = HLA class II histocompatibility antigen, DP beta 1 chain (9-18)
  source 1..30: mol_type = other RNA
gcccccagaaccgtggctctgacagcactc

SEQ ID NO: 56443 - RNA, 27 nt, synthetic construct
  misc_feature 1..27: note = SWI/SNF-related matrix-associated actin-dependent regulator of chromatin subfamily E member 1 (114-122)
  source 1..27: mol_type = other RNA
gcctaccacaacagccccgcttatctg

SEQ ID NO: 56444 - RNA, 27 nt, synthetic construct
  misc_feature 1..27: note = Chloride intracellular channel protein 4 (243-251)
  source 1..27: mol_type = other RNA
gcctacagcgacgtggctaagagactg

SEQ ID NO: 56445 - RNA, 27 nt, synthetic construct
  misc_feature 1..27: note = CDK5 regulatory subunit-associated protein 1 (381-389)
  source 1..27: mol_type = other RNA
gcctacgtggagctggtccaccatatc

SEQ ID NO: 56446 - RNA, 30 nt, synthetic construct; identical to SEQ ID NO: 32219
  misc_feature 1..30: note = Exocyst complex component 2 (85-94)
  source 1..30: mol_type = other RNA

SEQ ID NO: 56447 - RNA, 27 nt, synthetic construct
  misc_feature 1..27: note = 60S ribosomal protein L23a (148-156)
  source 1..27: mol_type = other RNA
gacgtggccaacaagatcggcattata

SEQ ID NO: 56448 - RNA, 27 nt, synthetic construct
  misc_feature 1..27: note = Spectrin beta chain, non-erythrocytic 1 (1643-1651)
  source 1..27: mol_type = other RNA
gactacgccgagaccgtgcaccagctg

SEQ ID NO: 56449 - RNA, 27 nt, synthetic construct
  misc_feature 1..27: note = Nuclear export mediator factor NEMF (234-242)
  source 1..27: mol_type = other RNA
gactacatgaagaccacaagcaacttc

SEQ ID NO: 56450 - RNA, 27 nt, synthetic construct
  misc_feature 1..27: note = Formin-binding protein 1 (189-197)
  source 1..27: mol_type = other RNA
gactacagctccatcctgcagaagttc

SEQ ID NO: 56451 - RNA, 27 nt, synthetic construct
  misc_feature 1..27: note = Myosin light polypeptide 6 (94-102)
  source 1..27: mol_type = other RNA
gactacgtggagggcctgagagtcttc

SEQ ID NO: 56452 - RNA, 27 nt, synthetic construct
  misc_feature 1..27: note = Sterol regulatory element-binding protein 2 (839-847)
  source 1..27: mol_type = other RNA
gagtacctgaagctccttcacagcttc

SEQ ID NO: 56453 - RNA, 27 nt, synthetic construct
  misc_feature 1..27: note = Clathrin heavy chain 1 (1605-1613)
  source 1..27: mol_type = other RNA
gagtacctgaccaaggtggacaaactc

SEQ ID NO: 56454 - RNA, 30 nt, synthetic construct
  misc_feature 1..30: note = Tubulin beta chain (158-167)
  source 1..30: mol_type = other RNA
gagtaccccgacagaatcatgaacaccttc

SEQ ID NO: 56455 - RNA, 27 nt, synthetic construct
  misc_feature 1..27: note = Histone deacetylase 1 (86-94)
  source 1..27: mol_type = other RNA
gagtacagcaagcagatgcaaagattc

SEQ ID NO: 56456 - RNA, 27 nt, synthetic construct
  misc_feature 1..27: note = DNA repair protein RAD50 (1281-1289)
  source 1..27: mol_type = other RNA
gagtacgtggaaaagttctatagaatc

SEQ ID NO: 56457 - RNA, 30 nt, synthetic construct
  misc_feature 1..30: note = V-type proton ATPase catalytic subunit A (463-472)
  source 1..30: mol_type = other RNA
gagtactatgacaagcacttcaccgaattt

SEQ ID NO: 56458 - RNA, 27 nt, synthetic construct
  misc_feature 1..27: note = Exostosin-2 (609-617)
  source 1..27: mol_type = other RNA
ttctaccacaagtattttaactacctg

SEQ ID NO: 56459 - RNA, 27 nt, synthetic construct
  misc_feature 1..27: note = Late secretory pathway protein AVL9 homolog (280-288)
  source 1..27: mol_type = other RNA
ttctacatcagccccgtgaacaagctg

SEQ ID NO: 56460 - RNA, 33 nt, synthetic construct
  misc_feature 1..33: note = 60S ribosomal protein L7 (81-91)
  source 1..33: mol_type = other RNA
ttctacgtgcccgccgagcctaagctggctttt

SEQ ID NO: 56461 - RNA, 48 nt, synthetic construct
  misc_feature 1..48: note = Elongation factor 1-beta (2-17)
  source 1..48: mol_type = other RNA
ggcttcggggacctgaagagccccgccggactccaggtgcttaacgat

SEQ ID NO: 56462 - RNA, 36 nt, synthetic construct
  misc_feature 1..36: note = 60S ribosomal protein L5 (2-13)
  source 1..36: mol_type = other RNA
ggcttcgtgaaggtcgttaaaaacaaggcctacttt

SEQ ID NO: 56463 - RNA, 27 nt, synthetic construct
  misc_feature 1..27: note = Poly(A) RNA polymerase GLD2 (252-260)
  source 1..27: mol_type = other RNA
ggctacatcgagagaccccagctgatt

SEQ ID NO: 56464 - RNA, 27 nt, synthetic construct
  misc_feature 1..27: note = Mannose-1-phosphate guanyltransferase alpha (166-174)
  source 1..27: mol_type = other RNA
cactacgtggagaagcccagcaccttc

SEQ ID NO: 56465 - RNA, 27 nt, synthetic construct
  misc_feature 1..27: note = Little elongation complex subunit 2 (341-349)
  source 1..27: mol_type = other RNA
atcttccacgaggtgcccctgaagttt

SEQ ID NO: 56466 - RNA, 33 nt, synthetic construct
  misc_feature 1..33: note = Modulator of apoptosis 1 (92-102)
  source 1..33: mol_type = other RNA
atcttcaagccccctgacccagataacaccttt

SEQ ID NO: 56467 - RNA, 30 nt, synthetic construct
  misc_feature 1..30: note = DNA replication licensing factor MCM7 (276-285)
  source 1..30: mol_type = other RNA
atcttcctgcccattctcagaaccggcttt

SEQ ID NO: 56468 - RNA, 27 nt, synthetic construct
  misc_feature 1..27: note = Putative eukaryotic translation initiation factor 2 subunit 3-like protein (314-322)
  source 1..27: mol_type = other RNA
atcttcagcaagattgtgtccctgttt

SEQ ID NO: 56469 - RNA, 27 nt, synthetic construct
  misc_feature 1..27: note = X-ray repair cross-complementing protein 5 (134-142)
  source 1..27: mol_type = other RNA
atcttcaccgacctgagctccagattt

SEQ ID NO: 56470 - RNA, 27 nt, synthetic construct
  misc_feature 1..27: note = A-kinase anchor protein 11 (638-646)
  source 1..27: mol_type = other RNA
atcttcaccaacacagtggccagattt

SEQ ID NO: 56471 - RNA, 27 nt, synthetic construct
  misc_feature 1..27: note = Zinc finger protein 24 (103-111)
  source 1..27: mol_type = other RNA
atcctgcccaaggagctccagacctgg

SEQ ID NO: 56472 - RNA, 30 nt, synthetic construct; identical to SEQ ID NO: 32245
  misc_feature 1..30: note = DNA polymerase epsilon catalytic subunit A (1791-1800)
  source 1..30: mol_type = other RNA

SEQ ID NO: 56473 - RNA, 27 nt, synthetic construct
  misc_feature 1..27: note = G1/S-specific cyclin-E2 (202-210)
  source 1..27: mol_type = other RNA
atctacgcccccaagctgcaggagttc

SEQ ID NO: 56474 - RNA, 27 nt, synthetic construct
  misc_feature 1..27: note = A-kinase anchor protein 1, mitochondrial (683-691)
  source 1..27: mol_type = other RNA
atctacgccccccctctgccaagcctc

SEQ ID NO: 56475 - RNA, 27 nt, synthetic construct
  misc_feature 1..27: note = Signal peptidase complex subunit 1 (37-45)
  source 1..27: mol_type = other RNA
atctacggctatgtggccgagcagttc

SEQ ID NO: 56476 - RNA, 30 nt, synthetic construct
  misc_feature 1..30: note = Lon protease homolog, mitochondrial (188-197)
  source 1..30: mol_type = other RNA
atctaccacaccggcacattcgcccagatt

SEQ ID NO: 56477 - RNA, 27 nt, synthetic construct
  misc_feature 1..27: note = Heterogeneous nuclear ribonucleoprotein L (145-153)
  source 1..27: mol_type = other RNA
atctacattgccggccaccccgctttc

SEQ ID NO: 56478 - RNA, 27 nt, synthetic construct
  misc_feature 1..27: note = Tuftelin-interacting protein 11 (168-176)
  source 1..27: mol_type = other RNA
atctacattgacagaggcgtggtcttc

SEQ ID NO: 56479 - RNA, 36 nt, synthetic construct
  misc_feature 1..36: note = Clathrin heavy chain 1 (882-893)
  source 1..36: mol_type = other RNA
atctacattgacagcaacaataaccccgagagattc

SEQ ID NO: 56480 - RNA, 27 nt, synthetic construct
  misc_feature 1..27: note = Deoxynucleotidyltransferase terminal-interacting protein 1 (232-240)
  source 1..27: mol_type = other RNA
atctacattaagcacccccatctgttc

SEQ ID NO: 56481 - RNA, 27 nt, synthetic construct
  misc_feature 1..27: note = Retinoblastoma-like protein 2 (1012-1020)
  source 1..27: mol_type = other RNA
atctacattaagcagataaaaaccttc

SEQ ID NO: 56482 - RNA, 30 nt, synthetic construct
  misc_feature 1..30: note = Activator of 90 kDa heat shock protein ATPase homolog 1 (74-83)
  source 1..30: mol_type = other RNA
atctacattagcaccctgaagacagagttc

SEQ ID NO: 56483 - RNA, 33 nt, synthetic construct
  misc_feature 1..33: note = Ras-related GTP-binding protein C (99-109)
  source 1..33: mol_type = other RNA
atctacaaggacgatattagcaactcctctttc

SEQ ID NO: 56484 - RNA, 27 nt, synthetic construct
  misc_feature 1..27: note = Leucine-rich PPR motif-containing protein, mitochondrial (1129-1137)
  source 1..27: mol_type = other RNA
atctacaagcccgtgaccgacttcttt

SEQ ID NO: 56485 - RNA, 30 nt, synthetic construct
  misc_feature 1..30: note = DNA-directed RNA polymerases I, II, and III subunit RPABC3 (11-20)
  source 1..30: mol_type = other RNA
atctaccccgtggacctgggcgataagttc

SEQ ID NO: 56486 - RNA, 30 nt, synthetic construct
  misc_feature 1..30: note = Cullin-4B (362-371)
  source 1..30: mol_type = other RNA
atctaccaggacagcttcgagcaaagattt

SEQ ID NO: 56487 - RNA, 27 nt, synthetic construct
  misc_feature 1..27: note = Transmembrane protein 209 (509-517)
  source 1..27: mol_type = other RNA
atctaccagagacacgtgtataacctg

SEQ ID NO: 56488 - RNA, 27 nt, synthetic construct
  misc_feature 1..27: note = Coatomer subunit beta' (535-543)
  source 1..27: mol_type = other RNA
atctacaccagctccgtgaacagactg

SEQ ID NO: 56489 - RNA, 27 nt, synthetic construct
  misc_feature 1..27: note = Retinoblastoma-like protein 1 (804-812)
  source 1..27: mol_type = other RNA
atctacgtgggcagagtcaagagcttc

SEQ ID NO: 56490 - RNA, 27 nt, synthetic construct
  misc_feature 1..27: note = Vam6/Vps39-like protein (97-105)
  source 1..27: mol_type = other RNA
atctacgtgcacgacctgctcaccttc

SEQ ID NO: 56491 - RNA, 33 nt, synthetic construct
  misc_feature 1..33: note = DDB1- and CUL4-associated factor 8 (337-347)
  source 1..33: mol_type = other RNA
atctacgtgaaccccgccaatacccaccagttc

SEQ ID NO: 56492 - RNA, 27 nt, synthetic construct
  misc_feature 1..27: note = 60S ribosomal protein L3 (361-369)
  source 1..27: mol_type = other RNA
aagttcatcgacaccacaagcaaattt

SEQ ID NO: 56493 - RNA, 27 nt, synthetic construct
  misc_feature 1..27: note = Zyxin (193-201)
  source 1..27: mol_type = other RNA
aagttcacccccgtggccagcaaattt

SEQ ID NO: 56494 - RNA, 27 nt, synthetic construct
  misc_feature 1..27: note = Protein SDA1 homolog (8-16)
  source 1..27: mol_type = other RNA
aagctgcccagcaacctccctcagctt

SEQ ID NO: 56495 - RNA, 27 nt, synthetic construct
  misc_feature 1..27: note = Protein sel-1 homolog 1 (504-512)
  source 1..27: mol_type = other RNA
aagcaggccctgaaatacttcaacctc

SEQ ID NO: 56496 - RNA, 27 nt, synthetic construct
  misc_feature 1..27: note = Muscleblind-like protein 3 (180-188)
  source 1..27: mol_type = other RNA
aagtacttccacccccctgcccatctg

SEQ ID NO: 56497 - RNA, 27 nt, synthetic construct
  misc_feature 1..27: note = Nardilysin (660-668)
  source 1..27: mol_type = other RNA
aagtacatcgccaccgacttcacactg

SEQ ID NO: 56498 - RNA, 27 nt, synthetic construct
  misc_feature 1..27: note = U6 snRNA-associated Sm-like protein LSm7 (17-25)
  source 1..27: mol_type = other RNA
aagtacatcgacaaaaccattagagtg

SEQ ID NO: 56499 - RNA, 30 nt, synthetic construct
  misc_feature 1..30: note = RuvB-like 1 (285-294)
  source 1..30: mol_type = other RNA
aagtacatcgaccagggcattgccgagctg

SEQ ID NO: 56500 - RNA, 27 nt, synthetic construct
  misc_feature 1..27: note = Short transient receptor potential channel 4-associated protein (594-602)
  source 1..27: mol_type = other RNA
aagtacatcaacaccgacgccaaattc

SEQ ID NO: 56501 - RNA, 27 nt, synthetic construct
  misc_feature 1..27: note = Interferon-induced GTP-binding protein Mx2 (223-231)
  source 1..27: mol_type = other RNA
aagtacatccagagacaacagaccatt

SEQ ID NO: 56502 - RNA, 27 nt, synthetic construct
  misc_feature 1..27: note = Centromere protein F (1270-1278)
  source 1..27: mol_type = other RNA
aagtacatcagcggcccccacgagctg

SEQ ID NO: 56503 - RNA, 27 nt, synthetic construct
  misc_feature 1..27: note = Calcium-binding protein 39-like (247-255)
  source 1..27: mol_type = other RNA
aagtacatcagcaaacccgagaacctg

SEQ ID NO: 56504 - RNA, 27 nt, synthetic construct
  misc_feature 1..27: note = Small subunit processome component 20 homolog (1425-1433)
  source 1..27: mol_type = other RNA
aagtacatcaccgacgtggtcaaactg

SEQ ID NO: 56505 - RNA, 30 nt, synthetic construct
  misc_feature 1..30: note = Poly(A)-specific ribonuclease PARN (21-30)
  source 1..30: mol_type = other RNA
aagtacatcaccaaaagcttcaacttttat

SEQ ID NO: 56506 - RNA, 33 nt, synthetic construct
  misc_feature 1..33: note = Elongation of very long chain fatty acids protein 5 (200-210)
  source 1..33: mol_type = other RNA
aagtacatcacccagggccaactgctccagttc

SEQ ID NO: 56507 - RNA, 27 nt, synthetic construct
  misc_feature 1..27: note = Phosphate carrier protein, mitochondrial (97-105)
  source 1..27: mol_type = other RNA
aagtacaaaggcatcttcaacgggttt

SEQ ID NO: 56508 - RNA, 33 nt, synthetic construct
  misc_feature 1..33: note = S-adenosylmethionine synthase isoform type-2 (234-244)
  source 1..33: mol_type = other RNA
aagtacctggacgaggataccatctatcacctc

SEQ ID NO: 56509 - RNA, 27 nt, synthetic construct
  misc_feature 1..27: note = Mitochondrial-processing peptidase subunit alpha (106-114)
  source 1..27: mol_type = other RNA
aagtacctgagcggcatcgcccacttc

SEQ ID NO: 56510 - RNA, 27 nt, synthetic construct
  misc_feature 1..27: note = DNA ligase 1 (566-574)
  source 1..27: mol_type = other RNA
aagtaccccgacatcattagcagaata

SEQ ID NO: 56511 - RNA, 27 nt, synthetic construct
  misc_feature 1..27: note = Gamma-aminobutyric acid receptor-associated protein-like 1 (24-32)
  source 1..27: mol_type = other RNA
aagtaccccgacagagtgcctgtcatc

SEQ ID NO: 56512 - RNA, 27 nt, synthetic construct
  misc_feature 1..27: note = Rho guanine nucleotide exchange factor 2 (366-374)
  source 1..27: mol_type = other RNA
aagtaccccctgctcatcagcagaatt

SEQ ID NO: 56513 - RNA, 24 nt, synthetic construct
  misc_feature 1..24: note = ATP-dependent RNA helicase A (169-176)
  source 1..24: mol_type = other RNA
aagtaccccagccctttctttgtg

SEQ ID NO: 56514 - RNA, 27 nt, synthetic construct
  misc_feature 1..27: note = Translocating chain-associated membrane protein 1 (245-253)
  source 1..27: mol_type = other RNA
aagtaccagaaaggcttcagcctgtgg

SEQ ID NO: 56515 - RNA, 27 nt, synthetic construct
  misc_feature 1..27: note = NADH dehydrogenase (ubiquinone) iron-sulfur protein 5 (91-99)
  source 1..27: mol_type = other RNA
aagtacaccccccctccacaccatatc

SEQ ID NO: 56516 - RNA, 27 nt, synthetic construct
  misc_feature 1..27: note = Heme oxygenase 2 (124-132)
  source 1..27: mol_type = other RNA
aagtacgtggagagaatccactatatt

SEQ ID NO: 56517 - RNA, 27 nt, synthetic construct
  misc_feature 1..27: note = WD repeat-containing protein 35 (371-379)
  source 1..27: mol_type = other RNA
aagtacgtgaaaggcctgatcagcatt

SEQ ID NO: 56518 - RNA, 27 nt, synthetic construct
  misc_feature 1..27: note = Zinc finger protein 195 (148-156)
  source 1..27: mol_type = other RNA
aagtacgtgaaaatcttcgacaacttt

SEQ ID NO: 56519 - RNA, 30 nt, synthetic construct
  misc_feature 1..30: note = NADH dehydrogenase (ubiquinone) 1 alpha subcomplex subunit 12 (47-56)
  source 1..30: mol_type = other RNA
aagtactatgaggacaacaaacagttcttt

SEQ ID NO: 56520 - RNA, 45 nt, synthetic construct
  misc_feature 1..45: note = Phosphoglycerate kinase 1 (403-417)
  source 1..45: mol_type = other RNA
ctggagggcaaggtgctccccggggtcgacgcccttagcaacatc

SEQ ID NO: 56521 - RNA, 24 nt, synthetic construct
  misc_feature 1..24: note = Superkiller viralicidic activity 2-like 2 (586-593)
  source 1..24: mol_type = other RNA
ctggagaagagcttctaccagttt

SEQ ID NO: 56522 - RNA, 33 nt, synthetic construct
  misc_feature 1..33: note = Gamma-interferon-inducible lysosomal thiol reductase (15-25)
  source 1..33: mol_type = other RNA
ctgctccttgacgtgcccaccgccgctgtccag

SEQ ID NO: 56523 - RNA, 45 nt, synthetic construct
  misc_feature 1..45: note = Polypyrimidine tract-binding protein 1 (359-373)
  source 1..45: mol_type = other RNA
ctggtgagcaacctcaatcccgagagagtcacccctcagtccctt

SEQ ID NO: 56524 - RNA, 30 nt, synthetic construct; identical to SEQ ID NO: 32297
  misc_feature 1..30: note = Translocon-associated protein subunit delta (66-75)
  source 1..30: mol_type = other RNA

SEQ ID NO: 56525 - RNA, 27 nt, synthetic construct
  misc_feature 1..27: note = Nuclear factor erythroid 2-related factor 3 (413-421)
  source 1..27: mol_type = other RNA
ctgtaccacgacatcttcagcagactc

SEQ ID NO: 56526 - RNA, 27 nt, synthetic construct
  misc_feature 1..27: note = Rho GTPase-activating protein 1 (181-189)
  source 1..27: mol_type = other RNA
ctgtacatcgtgcaccccaccatgttc

SEQ ID NO: 56527 - RNA, 30 nt, synthetic construct
  misc_feature 1..30: note = 60S ribosomal protein L19 (104-113)
  source 1..30: mol_type = other RNA
ctgtacctcaaggtgaaaggcaacgtcttc

SEQ ID NO: 56528 - RNA, 33 nt, synthetic construct
  misc_feature 1..33: note = Signal transducer and activator of transcription 1-alpha/beta (667-677)
  source 1..33: mol_type = other RNA
ctgtaccccaacatcgacaaggatcacgccttc

SEQ ID NO: 56529 - RNA, 27 nt, synthetic construct
  misc_feature 1..27: note = BTB/POZ domain-containing protein KCTD20 (142-150)
  source 1..27: mol_type = other RNA
ctgtacagctccaagctctatagattc

SEQ ID NO: 56530 - RNA, 27 nt, synthetic construct
  misc_feature 1..27: note = Alpha-taxilin (389-397)
  source 1..27: mol_type = other RNA
ctgtacaccgagaagttcgaagagttt

SEQ ID NO: 56531 - RNA, 27 nt, synthetic construct
  misc_feature 1..27: note = 40S ribosomal protein S29 (6-14)
  source 1..27: mol_type = other RNA
ctgtactggagccaccccagaaagttc

SEQ ID NO: 56532 - RNA, 42 nt, synthetic construct
  misc_feature 1..42: note = Calmodulin (125-138)
  source 1..42: mol_type = other RNA
atgatcagagaggccgacattgatggcgacgggcaggtgaac

SEQ ID NO: 56533 - RNA, 27 nt, synthetic construct
  misc_feature 1..27: note = Tubulin alpha-1C chain (172-180)
  source 1..27: mol_type = other RNA
aactacgccagaggccactataccatc

SEQ ID NO: 56534 - RNA, 27 nt, synthetic construct
  misc_feature 1..27: note = Sorting nexin-4 (257-265)
  source 1..27: mol_type = other RNA
aactacggcagagtgttcagcgagtgg

SEQ ID NO: 56535 - RNA, 27 nt, synthetic construct
  misc_feature 1..27: note = Abl interactor 1 (434-442)
  source 1..27: mol_type = other RNA
aactacatcgagaaggtggtcgccatt

SEQ ID NO: 56536 - RNA, 27 nt, synthetic construct
  misc_feature 1..27: note = Unconventional myosin-Id (229-237)
  source 1..27: mol_type = other RNA
aactacatccacgtgggcgcccagctg

SEQ ID NO: 56537 - RNA, 27 nt, synthetic construct
  misc_feature 1..27: note = CTD small phosphatase-like protein 2 (385-393)
  source 1..27: mol_type = other RNA
aactacatcaaggacctgaatattctc

SEQ ID NO: 56538 - RNA, 27 nt, synthetic construct
  misc_feature 1..27: note = CWF19-like protein 1 (409-417)
  source 1..27: mol_type = other RNA
aactacaagagccaccatctgcagctc

SEQ ID NO: 56539 - RNA, 27 nt, synthetic construct
  misc_feature 1..27: note = Polyadenylate-binding protein-interacting protein 1 (111-119)
  source 1..27: mol_type = other RNA
aactacctgagccaccatctcaccatc

SEQ ID NO: 56540 - RNA, 27 nt, synthetic construct
  misc_feature 1..27: note = Methionine-tRNA ligase, cytoplasmic (152-160)
  source 1..27: mol_type = other RNA
aactacaccctggtgagccacctcatc

SEQ ID NO: 56541 - RNA, 27 nt, synthetic construct
  misc_feature 1..27: note = Ribosomal RNA processing protein 1 homolog B (648-656)
  source 1..27: mol_type = other RNA
cccttcctgcctaagccactctttttc

SEQ ID NO: 56542 - RNA, 27 nt, synthetic construct
  misc_feature 1..27: note = Ribosome biogenesis protein BRX1 homolog (200-208)
  source 1..27: mol_type = other RNA
cccttcgtggaccacgtctttaccttc

SEQ ID NO: 56543 - RNA, 36 nt, synthetic construct
  misc_feature 1..36: note = 40S ribosomal protein S19 (2-13)
  source 1..36: mol_type = other RNA
cccggcgtgaccgtcaaggacgttaaccagcaagag

SEQ ID NO: 56544 - RNA, 51 nt, synthetic construct
  misc_feature 1..51: note = Nuclease-sensitive element-binding protein 1 (304-320)
  source 1..51: mol_type = other RNA
ccccctgccgagaacagctccgctccagaagcagagcagggcggggccgaa

SEQ ID NO: 56545 - RNA, 27 nt, synthetic construct
  misc_feature 1..27: note = Protein AATF (255-263)
  source 1..27: mol_type = other RNA
ccccagcctgacgtgttcccactgttt

SEQ ID NO: 56546 - RNA, 30 nt, synthetic construct
  misc_feature 1..30: note = pre-mRNA 3' end processing protein WDR33 (495-504)
  source 1..30: mol_type = other RNA
ccctacgccaagcctatcccagctcagttc

SEQ ID NO: 56547 - RNA, 27 nt, synthetic construct
  misc_feature 1..27: note = Fatty acid desaturase 2 (227-235)
  source 1..27: mol_type = other RNA
ccctacaaccaccagcatgagtatttc

SEQ ID NO: 56548 - RNA, 27 nt, synthetic construct
  misc_feature 1..27: note = Methionine-tRNA ligase, cytoplasmic (273-281)
  source 1..27: mol_type = other RNA
ccctacgtgaacaatgtccctcacctg

SEQ ID NO: 56549 - RNA, 27 nt, synthetic construct
  misc_feature 1..27: note = Surfeit locus protein 4 (23-31)
  source 1..27: mol_type = other RNA
cagtacctgccccacgtggccagactc

SEQ ID NO: 56550 - RNA, 33 nt, synthetic construct
  misc_feature 1..33: note = Moesin (48-58)
  source 1..33: mol_type = other RNA
cagtaccaagacaccaagggcttcagcacatgg

SEQ ID NO: 56551 - RNA, 27 nt, synthetic construct
  misc_feature 1..27: note = Protein BIVM-ERCC5 (1290-1298)
  source 1..27: mol_type = other RNA
cagtacgtggacttccacaaccaactg

SEQ ID NO: 56552 - RNA, 30 nt, synthetic construct
  misc_feature 1..30: note = Elongation factor 1-gamma (245-254)
  source 1..30: mol_type = other RNA
agattccccgaggaactgacccagacattt

SEQ ID NO: 56553 - RNA, 27 nt, synthetic construct
  misc_feature 1..27: note = 60S ribosomal protein L17 (82-90)
  source 1..27: mol_type = other RNA
agatggcccaagaaaagcgccgagttc

SEQ ID NO: 56554 - RNA, 30 nt, synthetic construct
  misc_feature 1..30: note = Elongation factor 2 (264-273)
  source 1..30: mol_type = other RNA
agatacttcgaccccgccaacggcaagttt

SEQ ID NO: 56555 - RNA, 27 nt, synthetic construct
  misc_feature 1..27: note = Casein kinase II subunit alpha (195-203)
  source 1..27: mol_type = other RNA
agatacttcaagggccccgagctgctc

SEQ ID NO: 56556 - RNA, 27 nt, synthetic construct
  misc_feature 1..27: note = Interferon-induced helicase C domain-containing protein 1 (806-814)
  source 1..27: mol_type = other RNA
agatacggcctggtgaccaacgagatc

SEQ ID NO: 56557 - RNA, 27 nt, synthetic construct
  misc_feature 1..27: note = Pre-mRNA-processing-splicing factor 8 (1090-1098)
  source 1..27: mol_type = other RNA
agatacatcgacaggattcacatattc

SEQ ID NO: 56558 - RNA, 33 nt, synthetic construct
  misc_feature 1..33: note = Alpha-enolase (99-109)
  source 1..33: mol_type = other RNA
agatacatcagccccgaccagctggccgatctc

SEQ ID NO: 56559 - RNA, 30 nt, synthetic construct
  misc_feature 1..30: note = E3 ubiquitin-protein ligase MGRN1 (24-33)
  source 1..30: mol_type = other RNA
agatacccccctaagagcggcaactatttc

SEQ ID NO: 56560 - RNA, 27 nt, synthetic construct
  misc_feature 1..27: note = Mitotic checkpoint protein BUB3 (274-282)
  source 1..27: mol_type = other RNA
agataccccaccagcatcgcctccctg

SEQ ID NO: 56561 - RNA, 33 nt, synthetic construct
  misc_feature 1..33: note = Mitotic checkpoint protein BUB3 (274-284)
  source 1..33: mol_type = other RNA
agataccccaccagcatcgcctccctggctttc

SEQ ID NO: 56562 - RNA, 27 nt, synthetic construct
  misc_feature 1..27: note = Tyrosine-protein kinase BAZ1B (609-617)
  source 1..27: mol_type = other RNA
agataccaggacatcattcacagcata

SEQ ID NO: 56563 - RNA, 27 nt, synthetic construct
  misc_feature 1..27: note = Histone H3.1 (54-62)
  source 1..27: mol_type = other RNA
agataccagaagagcaccgagctgctc

SEQ ID NO: 56564 - RNA, 27 nt, synthetic construct
  misc_feature 1..27: note = Thioredoxin-related transmembrane protein 2 (198-206)
  source 1..27: mol_type = other RNA
agatacaccgacgtgagcacaaggtat

SEQ ID NO: 56565 - RNA, 30 nt, synthetic construct
  misc_feature 1..30: note = Suppressor of fused homolog (146-155)
  source 1..30: mol_type = other RNA
agatacgtgttccagagcgagaacaccttt

SEQ ID NO: 56566 - RNA, 27 nt, synthetic construct
  misc_feature 1..27: note = WD repeat-containing protein 36 (350-358)
  source 1..27: mol_type = other RNA
agcttctccaccgtgcacgagaagttt

SEQ ID NO: 56567 - RNA, 27 nt, synthetic construct
  misc_feature 1..27: note = Astrocytic phosphoprotein PEA-15 (61-69)
  source 1..27: mol_type = other RNA
agctacatcgagcacattttcgaaata

SEQ ID NO: 56568 - RNA, 27 nt, synthetic construct
  misc_feature 1..27: note = Protein ELYS (236-244)
  source 1..27: mol_type = other RNA
agctacatctccagaaccaaccagctg

SEQ ID NO: 56569 - RNA, 27 nt, synthetic construct
  misc_feature 1..27: note = Solute carrier family 23 member 2 (617-625)
  source 1..27: mol_type = other RNA
agctacctgcccatctcccctaccttc

SEQ ID NO: 56570 - RNA, 27 nt, synthetic construct
  misc_feature 1..27: note = Splicing factor 3B subunit 5 (42-50)
  source 1..27: mol_type = other RNA
agctacatgggccacttcgacctgctc

SEQ ID NO: 56571 - RNA, 27 nt, synthetic construct
  misc_feature 1..27: note = Lymphokine-activated killer T-cell-originated protein kinase (300-308)
  source 1..27: mol_type = other RNA
agctaccagaaggtgatcgagctgttc

SEQ ID NO: 56572 - RNA, 27 nt, synthetic construct
  misc_feature 1..27: note = Heterogeneous nuclear ribonucleoprotein F (193-201)
  source 1..27: mol_type = other RNA
agctactccgacccccctctgaagttc

SEQ ID NO: 56573 - RNA, 24 nt, synthetic construct
  misc_feature 1..24: note = Signal transducer and activator of transcription 2 (259-266)
  source 1..24: mol_type = other RNA
accgccggcgctaagctgctcttc

SEQ ID NO: 56574 - RNA, 27 nt, synthetic construct
  misc_feature 1..27: note = Zinc finger protein 280C (189-197)
  source 1..27: mol_type = other RNA
accttcagcgacgtggaggcccacttt

SEQ ID NO: 56575 - RNA, 27 nt, synthetic construct
  misc_feature 1..27: note = NADH dehydrogenase (ubiquinone) 1 subunit C2 (107-115)
  source 1..27: mol_type = other RNA
acctacggcgagatcttcgaaaagttt

SEQ ID NO: 56576 - RNA, 27 nt, synthetic construct
  misc_feature 1..27: note = Peroxisomal acyl-coenzyme A oxidase 3 (142-150)
  source 1..27: mol_type = other RNA
acctacatccagaagattttcagaatg

SEQ ID NO: 56577 - RNA, 27 nt, synthetic construct
  misc_feature 1..27: note = Oxidative stress-induced growth inhibitor 2 (326-334)
  source 1..27: mol_type = other RNA
acctacatcacaagcgtgtccagactg

SEQ ID NO: 56578 - RNA, 27 nt, synthetic construct
  misc_feature 1..27: note = Ubiquitin carboxyl-terminal hydrolase 7 (1092-1100)
  source 1..27: mol_type = other RNA
acctacctggagaaggccatcaaaatt

SEQ ID NO: 56579 - RNA, 27 nt, synthetic construct
  misc_feature 1..27: note = Iron-responsive element-binding protein 2 (410-418)
  source 1..27: mol_type = other RNA
acctacctgaaggccgtgaaactcttc

SEQ ID NO: 56580 - RNA, 30 nt, synthetic construct; identical to SEQ ID NO: 32353
  misc_feature 1..30: note = Cellular tumor antigen p53 (125-134)
  source 1..30: mol_type = other RNA

SEQ ID NO: 56581 - RNA, 30 nt, synthetic construct
  misc_feature 1..30: note = StAR-related lipid transfer protein 7, mitochondrial (95-104)
  source 1..30: mol_type = other RNA
acctacacagacgtgactcccagacagttc

SEQ ID NO: 56582 - RNA, 33 nt, synthetic construct
  misc_feature 1..33: note = StAR-related lipid transfer protein 7, mitochondrial (95-105)
  source 1..33: mol_type = other RNA
acctacacagacgtgactcccagacagttcttt

SEQ ID NO: 56583 - RNA, 27 nt, synthetic construct
  misc_feature 1..27: note = Nesprin-2 (590-598)
  source 1..27: mol_type = other RNA
acctacgtggagaacctgagactcctt

SEQ ID NO: 56584 - RNA, 27 nt, synthetic construct
  misc_feature 1..27: note = Choline/ethanolaminephosphotransferase 1 (200-208)
  source 1..27: mol_type = other RNA
acctacgtgagcggcacactgagattc

SEQ ID NO: 56585 - RNA, 33 nt, synthetic construct
  misc_feature 1..33: note = Bifunctional glutamate/proline-tRNA ligase (557-567)
  source 1..33: mol_type = other RNA
gtgttcatcgagggcgccgacgctgaaaccttt

SEQ ID NO: 56586 - RNA, 27 nt, synthetic construct
  misc_feature 1..27: note = F-actin-capping protein subunit alpha-2 (30-38)
  source 1..27: mol_type = other RNA
gtgttcaacgacgtcagactgctcctt

SEQ ID NO: 56587 - RNA, 27 nt, synthetic construct
  misc_feature 1..27: note = Nucleolysin TIAR (236-244)
  source 1..27: mol_type = other RNA
gtgttccccgagaagggctacagcttt

SEQ ID NO: 56588 - RNA, 27 nt, synthetic construct
  misc_feature 1..27: note = 3-hydroxy-3-methylglutaryl-coenzyme A reductase (105-113)
  source 1..27: mol_type = other RNA
gtgttcagcaccgtcgttatccacttt

SEQ ID NO: 56589 - RNA, 33 nt, synthetic construct
  misc_feature 1..33: note = H/ACA ribonucleoprotein complex subunit 3 (54-64)
  source 1..33: mol_type = other RNA
gtgctgatgacccagcaacccagacctgtcctc

SEQ ID NO: 56590 - RNA, 27 nt, synthetic construct
  misc_feature 1..27: note = 40S ribosomal protein S26 (63-71)
  source 1..27: mol_type = other RNA
gtgctgcccaagctctacgtcaaactt

SEQ ID NO: 56591 - RNA, 36 nt, synthetic construct
  misc_feature 1..36: note = 60S ribosomal protein L31 (106-117)
  source 1..36: mol_type = other RNA
gtgacctacgtccccgttacaactttcaagaacctg

SEQ ID NO: 56592 - RNA, 27 nt, synthetic construct
  misc_feature 1..27: note = Mitochondrial folate transporter/carrier (299-307)
  source 1..27: mol_type = other RNA
gtgtacgagaacgtcagccacttcctg

SEQ ID NO: 56593 - RNA, 27 nt, synthetic construct
  misc_feature 1..27: note = Protein-lysine N-methyltransferase METTL10 (41-49)
  source 1..27: mol_type = other RNA
gtgtacgagagagaactgcagaccttc

SEQ ID NO: 56594 - RNA, 39 nt, synthetic construct
  misc_feature 1..39: note = Nuclear pore complex protein Nup153 (381-393)
  source 1..39: mol_type = other RNA
gtgtacttcaagcccagcctgaccccttccggcgagttt

SEQ ID NO: 56595 - RNA, 27 nt, synthetic construct
  misc_feature 1..27: note = Cytochrome c oxidase subunit 4 isoform 1, mitochondrial (125-133)
  source 1..27: mol_type = other RNA
gtgtacggccccctgcctcagagcttc

SEQ ID NO: 56596 - RNA, 27 nt, synthetic construct
  misc_feature 1..27: note = 26S proteasome non-ATPase regulatory subunit 8 (131-139)
  source 1..27: mol_type = other RNA
gtgtacatcaagcaccccgtcagcctg

SEQ ID NO: 56597 - RNA, 30 nt, synthetic construct
  misc_feature 1..30: note = DNA replication licensing factor MCM3 (192-201)
  source 1..30: mol_type = other RNA
gtgtacaaggaccaccagaccatcacaatt

SEQ ID NO: 56598 - RNA, 30 nt, synthetic construct; identical to SEQ ID NO: 32371
  misc_feature 1..30: note = Afadin (161-170)
  source 1..30: mol_type = other RNA

SEQ ID NO: 56599 - RNA, 27 nt, synthetic construct
  misc_feature 1..27: note = Guanine nucleotide-binding protein-like 3-like protein (293-301)
  source 1..27: mol_type = other RNA
gtgtacctggacaagttcatcagactc

SEQ ID NO: 56600 - RNA, 27 nt, synthetic construct
  misc_feature 1..27: note = Rho-related BTB domain-containing protein 1 (526-534)
  source 1..27: mol_type = other RNA
gtgtacctgcccaacatcaataagatt

SEQ ID NO: 56601 - RNA, 30 nt, synthetic construct
  misc_feature 1..30: note = Pre-mRNA-splicing factor SPF27 (137-146)
  source 1..30: mol_type = other RNA
gtgtacaacgagaatctggtccacatgatc

SEQ ID NO: 56602 - RNA, 27 nt, synthetic construct
  misc_feature 1..27: note = Splicing factor 3B subunit 3 (519-527)
  source 1..27: mol_type = other RNA
gtgtaccccgacggcatcagacacatt

SEQ ID NO: 56603 - RNA, 30 nt, synthetic construct
  misc_feature 1..30: note = Proteasome-associated protein ECM29 homolog (682-691)
  source 1..30: mol_type = other RNA
gtgtaccccgagaagctggccaccaaattc

SEQ ID NO: 56604 - RNA, 27 nt, synthetic construct
  misc_feature 1..27: note = AP-5 complex subunit zeta-1 (388-396)
  source 1..27: mol_type = other RNA
gtgtaccagcacctgttcaccagaatc

SEQ ID NO: 56605 - RNA, 33 nt, synthetic construct
  misc_feature 1..33: note = Serine/arginine-rich splicing factor 1 (152-162)
  source 1..33: mol_type = other RNA
gtgtacagagacggcaccggggtcgttgagttc

SEQ ID NO: 56606 - RNA, 27 nt, synthetic construct
  misc_feature 1..27: note = Dynamin-2 (124-132)
  source 1..27: mol_type = other RNA
gtgtacagcccccacgtcctgaacctc

SEQ ID NO: 56607 - RNA, 33 nt, synthetic construct
  misc_feature 1..33: note = Dynamin-2 (124-134)
  source 1..33: mol_type = other RNA
gtgtacagcccccacgtcctgaacctcaccctt

SEQ ID NO: 56608 - RNA, 33 nt, synthetic construct
  misc_feature 1..33: note = E3 ubiquitin-protein ligase UBR5 (1809-1819)
  source 1..33: mol_type = other RNA
gtgtacagccagatccccgccgctgtcaagctg

SEQ ID NO: 56609 - RNA, 33 nt, synthetic construct
  misc_feature 1..33: note = Ribosome biogenesis protein BMS1 homolog (352-362)
  source 1..33: mol_type = other RNA
gtgtacgtcgacctgggcgggagccacgttttc

SEQ ID NO: 56610 - RNA, 27 nt, synthetic construct
  misc_feature 1..27: note = BRCA1-associated protein (237-245)
  source 1..27: mol_type = other RNA
gtgtacgtcgagagagccgaagttctg

SEQ ID NO: 56611 - RNA, 27 nt, synthetic construct
  misc_feature 1..27: note = AP-3 complex subunit mu-1 (274-282)
  source 1..27: mol_type = other RNA
gtgtacgtcaagcacagcatctccttc

SEQ ID NO: 56612 - RNA, 27 nt, synthetic construct
  misc_feature 1..27: note = Lipopolysaccharide-induced tumor necrosis factor-alpha factor (79-87)
  source 1..27: mol_type = other RNA
gtgtacgtccagcaccccatcaccttc

SEQ ID NO: 56613 - RNA, 27 nt, synthetic construct
  misc_feature 1..27: note = AP-3 complex subunit delta-1 (521-529)
  source 1..27: mol_type = other RNA
gtgtacgtccagaacgttgtgaagctg

SEQ ID NO: 56614 - RNA, 27 nt, synthetic construct
  misc_feature 1..27: note = Signal transducer and activator of transcription 2 (828-836)
  source 1..27: mol_type = other RNA
gtgtacgtcagcagaccctcccacttc

SEQ ID NO: 56615 - RNA, 27 nt, synthetic construct
  misc_feature 1..27: note = TraB domain-containing protein (75-83)
  source 1..27: mol_type = other RNA
gtgtacgtcgttggcaccgcccacttc

SEQ ID NO: 56616 - RNA, 24 nt, synthetic construct
  misc_feature 1..24: note = Dystonin (673-680)
  source 1..24: mol_type = other RNA
tacgccgagaagctgcacagactc

SEQ ID NO: 56617 - RNA, 24 nt, synthetic construct
  misc_feature 1..24: note = Histone deacetylase 1 (87-94)
  source 1..24: mol_type = other RNA
tacagcaagcagatgcaaagattc

SEQ ID NO: 56618 - RNA, 30 nt, synthetic construct
  misc_feature 1..30: note = Activator of 90 kDa heat shock protein ATPase homolog 1 (246-255)
  source 1..30: mol_type = other RNA
tactatttcgagggcatcaagcagaccttt

SEQ ID NO: 56619 - RNA, 30 nt, synthetic construct
  misc_feature 1..30: note = Phosphatidylinositol 4-kinase alpha (328-337)
  source 1..30: mol_type = other RNA
tactatatgaaggacctgcccaccagcttc

SEQ ID NO: 56620 - RNA, 27 nt, synthetic construct
  misc_feature 1..27: note = Eukaryotic translation initiation factor 3 subunit A (275-283)
  source 1..27: mol_type = other RNA
tactataacaaggtgagcaccgtcttc

SEQ ID NO: 56621 - RNA, 30 nt, synthetic construct
  misc_feature 1..30: note = Eukaryotic translation initiation factor 4 gamma 1 (169-178)
  source 1..30: mol_type = other RNA
tactatcccgcccagggcgtgcaacagttc

SEQ ID NO: 56622 - RNA, 27 nt, synthetic construct
  misc_feature 1..27: note = 40S ribosomal protein S17 (20-28)
  source 1..27: mol_type = other RNA
tactataccagactgggcaacgacttc

SEQ ID NO: 56623 - RNA, 27 nt, synthetic construct
  misc_feature 1..27: note = Transmembrane protein 43 (102-110)
  source 1..27: mol_type = other RNA
ggcagattctttctgagctccgggctc

SEQ ID NO: 56624 - RNA, 30 nt, synthetic construct
  misc_feature 1..30: note = Microsomal glutathione S-transferase 3 (82-91)
  source 1..30: mol_type = other RNA
caccccagaatcgccagcggcctggggctc

SEQ ID NO: 56625 - RNA, 27 nt, synthetic construct
  misc_feature 1..27: note = Non-specific lipid-transfer protein (373-381)
  source 1..27: mol_type = other RNA
aagatcggcgggattttcgcctttaaa

SEQ ID NO: 56626 - RNA, 24 nt, synthetic construct
  misc_feature 1..24: note = Cyclin-dependent kinase 11B (590-597)
  source 1..24: mol_type = other RNA
tacagagcccccgagctgctcctt

SEQ ID NO: 56627 - RNA, 27 nt, synthetic construct
  misc_feature 1..27: note = Spectrin beta chain, non-erythrocytic 1 (1663-1671)
  source 1..27: mol_type = other RNA
caccccgagagcgaaagaatctccatg

SEQ ID NO: 56628 - RNA, 27 nt, synthetic construct
  misc_feature 1..27: note = Mitochondrial import receptor subunit TOM7 homolog (44-52)
  source 1..27: mol_type = other RNA
atgcccgagcctaccgtgctgagcctc

SEQ ID NO: 56629 - RNA, 27 nt, synthetic construct
  misc_feature 1..27: note = Histidine triad nucleotide-binding protein 1 (8-16)
  source 1..27: mol_type = other RNA
agcccccaggcccctacccacttcctg

SEQ ID NO: 56630 - RNA, 27 nt, synthetic construct
  misc_feature 1..27: note = Prolyl endopeptidase (534-542)
  source 1..27: mol_type = other RNA
gccgagtacctgatcaaggaaggctat

SEQ ID NO: 56631 - RNA, 30 nt, synthetic construct
  misc_feature 1..30: note = Tuftelin-interacting protein 11 (216-225)
  source 1..30: mol_type = other RNA
gaggaattccagaaggagctgagccaatgg

SEQ ID NO: 56632 - RNA, 30 nt, synthetic construct
  misc_feature 1..30: note = Protein unc-93 homolog B1 (315-324)
  source 1..30: mol_type = other RNA
gaggaaatcgacctgagaagcgtgggctgg

SEQ ID NO: 56633 - RNA, 27 nt, synthetic construct
  misc_feature 1..27: note = Spatacsin (901-909)
  source 1..27: mol_type = other RNA
ggcgagttccagacccaacacagctac

SEQ ID NO: 56634 - RNA, 30 nt, synthetic construct; identical to SEQ ID NO: 32407
  misc_feature 1..30: note = HLA class I histocompatibility antigen, alpha chain E (109-118)
  source 1..30: mol_type = other RNA

SEQ ID NO: 56635 - RNA, 27 nt, synthetic construct
  misc_feature 1..27: note = Vacuolar protein sorting-associated protein 41 homolog (103-111)
  source 1..27: mol_type = other RNA
agcgaggacggcaaggtgcaggtcttc

SEQ ID NO: 56636 - RNA, 36 nt, synthetic construct
  misc_feature 1..36: note = Plastin-3 (65-76)
  source 1..36: mol_type = other RNA
agcgagctgtcctctgaaggcacccagcactcatac

SEQ ID NO: 56637 - RNA, 21 nt, synthetic construct
  misc_feature 1..21: note = GTPase-activating protein and VPS9 domain-containing protein 1 (36-42)
  source 1..21: mol_type = other RNA
gccttcagcatcctgtttaag

SEQ ID NO: 56638 - RNA, 33 nt, synthetic construct
  misc_feature 1..33: note = 40S ribosomal protein S3 (42-52)
  source 1..33: mol_type = other RNA
gccatcgctcaggcagagagcctgagatacaag

SEQ ID NO: 56639 - RNA, 27 nt, synthetic construct
  misc_feature 1..27: note = 26S proteasome non-ATPase regulatory subunit 4 (282-290)
  source 1..27: mol_type = other RNA
gccatcagaaacgctatgggcagcctg

SEQ ID NO: 56640 - RNA, 33 nt, synthetic construct
  misc_feature 1..33: note = Exportin-2 (374-384)
  source 1..33: mol_type = other RNA
gccatctacctggtgaccagcctcgcttccaag

SEQ ID NO: 56641 - RNA, 27 nt, synthetic construct
  misc_feature 1..27: note = DNA-dependent protein kinase catalytic subunit (28-36)
  source 1..27: mol_type = other RNA
gccctggctggccaccagctcatcaga

SEQ ID NO: 56642 - RNA, 27 nt, synthetic construct
  misc_feature 1..27: note = Coatomer subunit beta (905-913)
  source 1..27: mol_type = other RNA
gccctggctaacgtgagcatcgagaag

SEQ ID NO: 56643 - RNA, 30 nt, synthetic construct
  misc_feature 1..30: note = Protein SDE2 homolog (346-355)
  source 1..30: mol_type = other RNA
gccctgttcgctaagcccctcaaaggcaag

SEQ ID NO: 56644 - RNA, 27 nt, synthetic construct
  misc_feature 1..27: note = Cytochrome c oxidase subunit 2 (41-49)
  source 1..27: mol_type = other RNA
gccctgttcctcacccttacaactaag

SEQ ID NO: 56645 - RNA, 27 nt, synthetic construct
  misc_feature 1..27: note = ADP-ribosylation factor 5 (7-15)
  source 1..27: mol_type = other RNA
gccctgttcagcagaatctttggcaag

SEQ ID NO: 56646 - RNA, 27 nt, synthetic construct
  misc_feature 1..27: note = Similar to 60S ribosomal protein L7 (172-180)
  source 1..27: mol_type = other RNA
gccctgatcgctagaagcctcggcaag

SEQ ID NO: 56647 - RNA, 30 nt, synthetic construct
  misc_feature 1..30: note = Regulation of nuclear pre-mRNA domain-containing protein 2 (166-175)
  source 1..30: mol_type = other RNA
gccctgatcgaggaactccttctgtacaag

SEQ ID NO: 56648 - RNA, 33 nt, synthetic construct
  misc_feature 1..33: note = Mitochondrial import receptor subunit TOM5 homolog (36-46)
  source 1..33: mol_type = other RNA
gccctgctcagagtgacccccttcatccttaag

SEQ ID NO: 56649 - RNA, 27 nt, synthetic construct
  misc_feature 1..27: note = ADP/ATP translocase 3 (38-46)
  source 1..27: mol_type = other RNA
gccctgaacttcgcttttaaggacaaa

SEQ ID NO: 56650 - RNA, 42 nt, synthetic construct
  misc_feature 1..42: note = Heat shock protein HSP 90-beta (536-549)
  source 1..42: mol_type = other RNA
gccctgagagacaacagcaccatgggctacatgatggctaag

SEQ ID NO: 56651 - RNA, 33 nt, synthetic construct
  misc_feature 1..33: note = Vimentin (43-53)
  source 1..33: mol_type = other RNA
gccctgagacccagcacctccaggtctctctac

SEQ ID NO: 56652 - RNA, 36 nt, synthetic construct
  misc_feature 1..36: note = 60S ribosomal protein L36 (2-13)
  source 1..36: mol_type = other RNA
gccctgagataccccatggctgtgggcctcaacaag

SEQ ID NO: 56653 - RNA, 27 nt, synthetic construct
  misc_feature 1..27: note = Heterogeneous nuclear ribonucleoprotein U-like protein 1 (367-375)
  source 1..27: mol_type = other RNA
gccctgtacccccacgtgctcgtcaag

SEQ ID NO: 56654 - RNA, 30 nt, synthetic construct
  misc_feature 1..30: note = 60S ribosomal protein L6 (61-70)
  source 1..30: mol_type = other RNA
gccatgtacagcagaaaggctatgtataaa

SEQ ID NO: 56655 - RNA, 27 nt, synthetic construct
  misc_feature 1..27: note = HCG15392, isoform CRA_b (43-51)
  source 1..27: mol_type = other RNA
gcccccgctcctccaaaggcagaggcc

SEQ ID NO: 56656 - RNA, 33 nt, synthetic construct
  misc_feature 1..33: note = Myotrophin (63-73)
  source 1..33: mol_type = other RNA
gcccccgacaagcaccatatcacccctctgctc

SEQ ID NO: 56657 - RNA, 24 nt, synthetic construct
  misc_feature 1..24: note = Actin, cytoplasmic 1 (14-21)
  source 1..24: mol_type = other RNA
gcccccgaggaacaccctgtgctg

SEQ ID NO: 56658 - RNA, 27 nt, synthetic construct
  misc_feature 1..27: note = CCR4-NOT transcription complex subunit 1 (239-247)
  source 1..27: mol_type = other RNA
gcccccttcctgagaaacgtggagctc

SEQ ID NO: 56659 - RNA, 30 nt, synthetic construct
  misc_feature 1..30: note = Protein PRRC2A (692-701)
  source 1..30: mol_type = other RNA
gccccccaggctcctccaccgccccctaag

SEQ ID NO: 56660 - RNA, 33 nt, synthetic construct
  misc_feature 1..33: note = 60S ribosomal protein L13 (47-57)
  source 1..33: mol_type = other RNA
gcccccagacctgctagcggcccaatcaggccg

SEQ ID NO: 56661 - RNA, 30 nt, synthetic construct
  misc_feature 1..30: note = NSFL1 cofactor p47 (66-75)
  source 1..30: mol_type = other RNA
gcccccagcgacaacagagtgacctccttc

SEQ ID NO: 56662 - RNA, 27 nt, synthetic construct
  misc_feature 1..27: note = 60S ribosomal protein L13 (2-10)
  source 1..27: mol_type = other RNA
gcccccagcagaaacggcatggtgctg

SEQ ID NO: 56663 - RNA, 48 nt, synthetic construct
  misc_feature 1..48: note = Heat shock protein HSP 90-beta (534-549)
  source 1..48: mol_type = other RNA
gcccaggctctgagagacaacagcaccatgggctacatgatggcaaag

SEQ ID NO: 56664 - RNA, 24 nt, synthetic construct
  misc_feature 1..24: note = DNA-directed RNA polymerase II subunit RPB2 (365-372)
  source 1..24: mol_type = other RNA
gccagaggccccatccagattctg

SEQ ID NO: 56665 - RNA, 24 nt, synthetic construct
  misc_feature 1..24: note = Interferon regulatory factor 2-binding protein 1 (263-270)
  source 1..24: mol_type = other RNA
gccagaccccctggctacgagttc

SEQ ID NO: 56666 - RNA, 27 nt, synthetic construct
  misc_feature 1..27: note = Serine/threonine-protein kinase 4 (270-278)
  source 1..27: mol_type = other RNA
gccaccgctacacagctgctccaacac

SEQ ID NO: 56667 - RNA, 27 nt, synthetic construct
  misc_feature 1..27: note = DNA-dependent protein kinase catalytic subunit (4080-4088)
  source 1..27: mol_type = other RNA
gccaccgaccccaacatcctgggcaga

SEQ ID NO: 56668 - RNA, 30 nt, synthetic construct
  misc_feature 1..30: note = S-formylglutathione hydrolase (124-133)
  source 1..30: mol_type = other RNA
gccaccgaggacccctggaagacaaactac

SEQ ID NO: 56669 - RNA, 27 nt, synthetic construct
  misc_feature 1..27: note = Probable ATP-dependent RNA helicase DDX6 (267-275)
  source 1..27: mol_type = other RNA
gccaccttccccctgagcgtgcagaag

SEQ ID NO: 56670 - RNA, 30 nt, synthetic construct
  misc_feature 1..30: note = General transcription factor II-I repeat domain-containing protein 2B (163-172)
  source 1..30: mol_type = other RNA
gccaccctgaagtggatcctcgagaacaaa

SEQ ID NO: 56671 - RNA, 30 nt, synthetic construct
  misc_feature 1..30: note = Phosphatidylinositol-binding clathrin assembly protein (29-38)
  source 1..30: mol_type = other RNA
gccaccacacacgagatcatgggccccaag

SEQ ID NO: 56672 - RNA, 33 nt, synthetic construct
  misc_feature 1..33: note = Tubulin alpha-1C chain (340-350)
  source 1..33: mol_type = other RNA
gccacctacgctcccgtgatcagcgcagagaag

SEQ ID NO: 56673 - RNA, 33 nt, synthetic construct
  misc_feature 1..33: note = E3 ubiquitin/ISG15 ligase TRIM25 (592-602)
  source 1..33: mol_type = other RNA
gccgtggctgacaaggtccacctgatgtacaaa

SEQ ID NO: 56674 - RNA, 36 nt, synthetic construct
  misc_feature 1..36: note = Omega-amidase NIT2 (98-109)
  source 1..36: mol_type = other RNA
gccgtgttcggccccgacgggaccctgctcgctaag

SEQ ID NO: 56675 - RNA, 27 nt, synthetic construct
  misc_feature 1..27: note = Farnesyl pyrophosphate synthase (332-340)
  source 1..27: mol_type = other RNA
gccgtgttcctgggcctcgctagaaag

SEQ ID NO: 56676 - RNA, 33 nt, synthetic construct
  misc_feature 1..33: note = COP9 signalosome complex subunit 8 (4-14)
  source 1..33: mol_type = other RNA
gccgtgatggctgagagcgcattctcctttaag

SEQ ID NO: 56677 - RNA, 33 nt, synthetic construct; identical to SEQ ID NO: 32450
  misc_feature 1..33: note = Asparagine-tRNA ligase, cytoplasmic (180-190)
  source 1..33: mol_type = other RNA

SEQ ID NO: 56678 - RNA, 33 nt, synthetic construct
  misc_feature 1..33: note = Ras GTPase-activating protein-binding protein 2 (54-64)
  source 1..33: mol_type = other RNA
gccgtgtacggccagaacgacatccaccataag

SEQ ID NO: 56679 - RNA, 30 nt, synthetic construct
  misc_feature 1..30: note = ATP-dependent RNA helicase DHX8 (1045-1054)
  source 1..30: mol_type = other RNA
gccgtgtacaacagctggaagaataacaaa

SEQ ID NO: 56680 - RNA, 33 nt, synthetic construct
  misc_feature 1..33: note = E3 ubiquitin/ISG15 ligase TRIM25 (55-65)
  source 1..33: mol_type = other RNA
gccgtgtaccaggctagaccccaactgcacaag

SEQ ID NO: 56681 - RNA, 33 nt, synthetic construct; identical to SEQ ID NO: 32454
  misc_feature 1..33: note = DNA damage-binding protein 1 (869-879)
  source 1..33: mol_type = other RNA

SEQ ID NO: 56682 - RNA, 27 nt, synthetic construct
  misc_feature 1..27: note = Glucose-6-phosphate 1-dehydrogenase (246-254)
  source 1..27: mol_type = other RNA
gccgtgtacaccaagatgatgacaaaa

SEQ ID NO: 56683 - RNA, 30 nt, synthetic construct
  misc_feature 1..30: note = Glucose-6-phosphate 1-dehydrogenase (246-255)
  source 1..30: mol_type = other RNA
gccgtgtacaccaagatgatgacaaaaaag

SEQ ID NO: 56684 - RNA, 27 nt, synthetic construct
  misc_feature 1..27: note = COP9 signalosome complex subunit 3 (239-247)
  source 1..27: mol_type = other RNA
gcctaccacgagctggctcaggtgtat

SEQ ID NO: 56685 - RNA, 90 nt, synthetic construct
  misc_feature 1..90: note = 60 kDa heat shock protein, mitochondrial (315-344)
  source 1..90: mol_type = other RNA
gacatggccatcgctaccggcggggcagtgttcggagaggaaggtctgacactcaaccttgaggatgtccagccccacgacctgggcaag

SEQ ID NO: 56686 - RNA, 24 nt, synthetic construct
  misc_feature 1..24: note = Protein FAM136A (11-18)
  source 1..24: mol_type = other RNA
gaggccgtggaaagcatggtcaag

SEQ ID NO: 56687 - RNA, 27 nt, synthetic construct
  misc_feature 1..27: note = 60S ribosomal protein L4 (213-221)
  source 1..27: mol_type = other RNA
gaggacaacggcatcattaaggccttc

SEQ ID NO: 56688 - RNA, 33 nt, synthetic construct
  misc_feature 1..33: note = Basic leucine zipper and W2 domain-containing protein 2 (51-61)
  source 1..33: mol_type = other RNA
ttcctggacagcaccggctccagactcgattac

SEQ ID NO: 56689 - RNA, 30 nt, synthetic construct
  misc_feature 1..30: note = Rab GDP dissociation inhibitor beta (29-38)
  source 1..30: mol_type = other RNA
ttcgtgtacaagggcgggaaaatctataag

SEQ ID NO: 56690 - RNA, 27 nt, synthetic construct
  misc_feature 1..27: note = Protein PRRC2C (2390-2398)
  source 1..27: mol_type = other RNA
ttctacatggacaccagccacctgttt

SEQ ID NO: 56691 - RNA, 24 nt, synthetic construct
  misc_feature 1..24: note = Probable ATP-dependent RNA helicase DDX5 (58-65)
  source 1..24: mol_type = other RNA
ttctaccaggagcaccccgacctg

SEQ ID NO: 56692 - RNA, 36 nt, synthetic construct
  misc_feature 1..36: note = Peroxisomal multifunctional enzyme type 2 (235-246)
  source 1..36: mol_type = other RNA
ggcctgttcgaggtgggggccggatggatcggtaag

SEQ ID NO: 56693 - RNA, 27 nt, synthetic construct
  misc_feature 1..27: note = RNA cytidine acetyltransferase (821-829)
  source 1..27: mol_type = other RNA
ggcctgttcaacagaatcattaggaag

SEQ ID NO: 56694 - RNA, 36 nt, synthetic construct
  misc_feature 1..36: note = Transgelin-2 (142-153)
  source 1..36: mol_type = other RNA
ggcctgttcagcggggaccccaactggtttcctaag

SEQ ID NO: 56695 - RNA, 27 nt, synthetic construct
  misc_feature 1..27: note = Heterogeneous nuclear ribonucleoprotein Q (269-277)
  source 1..27: mol_type = other RNA
ggcctgaccgacgtgatcctctaccac

SEQ ID NO: 56696 - RNA, 27 nt, synthetic construct
  misc_feature 1..27: note = Malignant T-cell-amplified sequence 1 (174-182)
  source 1..27: mol_type = other RNA
ggcctgtggcacatgaagacctacaaa

SEQ ID NO: 56697 - RNA, 30 nt, synthetic construct; identical to SEQ ID NO: 32470
  misc_feature 1..30: note = Synaptic vesicle membrane protein VAT-1 homolog (282-291)
  source 1..30: mol_type = other RNA

SEQ ID NO: 56698 - RNA, 27 nt, synthetic construct
  misc_feature 1..27: note = Reticulocalbin-2 (4-12)
  source 1..27: mol_type = other RNA
ggccccagaaccgccgctctggggctc

SEQ ID NO: 56699 - RNA, 30 nt, synthetic construct
  misc_feature 1..30: note = Superkiller viralicidic activity 2-like 2 (368-377)
  source 1..30: mol_type = other RNA
ggcaccaaggggcccagcaacgtgttcaaa

SEQ ID NO: 56700 - RNA, 30 nt, synthetic construct; identical to SEQ ID NO: 32473
  misc_feature 1..30: note = Calnexin (78-87)
  source 1..30: mol_type = other RNA

SEQ ID NO: 56701 - RNA, 27 nt, synthetic construct
  misc_feature 1..27: note = Parafibromin (313-321)
  source 1..27: mol_type = other RNA
ggcacctaccacgggatgacactgaag

SEQ ID NO: 56702 - RNA, 27 nt, synthetic construct
  misc_feature 1..27: note = Transcription factor 12 (417-425)
  source 1..27: mol_type = other RNA
cacgccgtgggccccagcacctccctg

SEQ ID NO: 56703 - RNA, 30 nt, synthetic construct
  misc_feature 1..30: note = GMP synthase (glutamine-hydrolyzing) (436-445)
  source 1..30: mol_type = other RNA
caccccttccctggcccagggctggccatc

SEQ ID NO: 56704 - RNA, 27 nt, synthetic construct
  misc_feature 1..27: note = Superkiller viralicidic activity 2-like 2 (807-815)
  source 1..27: mol_type = other RNA
caccccctgcataacgaccctaatctc

SEQ ID NO: 56705 - RNA, 27 nt, synthetic construct
  misc_feature 1..27: note = Staphylococcal nuclease domain-containing protein 1 (254-262)
  source 1..27: mol_type = other RNA
caccccaacggcaatatcaccgagctg

SEQ ID NO: 56706 - RNA, 33 nt, synthetic construct
  misc_feature 1..33: note = Extended synaptotagmin-1 (652-662)
  source 1..33: mol_type = other RNA
cacgtgctggaggcccaggacctcatcgctaag

SEQ ID NO: 56707 - RNA, 27 nt, synthetic construct
  misc_feature 1..27: note = Pre-mRNA-processing factor 19 (442-450)
  source 1..27: mol_type = other RNA
atcttcgaccagagcggcacctacctg

SEQ ID NO: 56708 - RNA, 30 nt, synthetic construct
  misc_feature 1..30: note = Heterogeneous nuclear ribonucleoprotein C-like 1 (20-29)
  source 1..30: mol_type = other RNA
atcggcaacctgaataccctcgtggtcaag

SEQ ID NO: 56709 - RNA, 27 nt, synthetic construct
  misc_feature 1..27: note = Catenin alpha-1 (90-98)
  source 1..27: mol_type = other RNA
atcctgcagaagaacgtgcccattctc

SEQ ID NO: 56710 - RNA, 27 nt, synthetic construct
  misc_feature 1..27: note = 60S ribosomal protein L10a (82-90)
  source 1..27: mol_type = other RNA
atcccccacatggacattgaggccctg

SEQ ID NO: 56711 - RNA, 33 nt, synthetic construct
  misc_feature 1..33: note = Spectrin beta chain, non-erythrocytic 1 (2247-2257)
  source 1..33: mol_type = other RNA
atcccctaccacagcgaggtgcctgtctccctg

SEQ ID NO: 56712 - RNA, 27 nt, synthetic construct
  misc_feature 1..27: note = Bifunctional glutamate/proline-tRNA ligase (415-423)
  source 1..27: mol_type = other RNA
atcagaaagccctacatttgggagtat

SEQ ID NO: 56713 - RNA, 27 nt, synthetic construct
  misc_feature 1..27: note = Histone deacetylase 1 (79-87)
  source 1..27: mol_type = other RNA
atcagacccgacaacatgagcgagtac

SEQ ID NO: 56714 - RNA, 27 nt, synthetic construct
  misc_feature 1..27: note = DNA replication licensing factor MCM5 (289-297)
  source 1..27: mol_type = other RNA
atcagaagctcctacattagggtgctg

SEQ ID NO: 56715 - RNA, 30 nt, synthetic construct
  misc_feature 1..30: note = Spectrin beta chain, non-erythrocytic 4 (145-154)
  source 1..30: mol_type = other RNA
atcgtggacggcaaccacagactgaccctc

SEQ ID NO: 56716 - RNA, 27 nt, synthetic construct
  misc_feature 1..27: note = Cytochrome c oxidase subunit 2 (209-217)
  source 1..27: mol_type = other RNA
atcgtgctggagctcattccccttaag

SEQ ID NO: 56717 - RNA, 27 nt, synthetic construct
  misc_feature 1..27: note = Mitotic checkpoint protein BUB3 (234-242)
  source 1..27: mol_type = other RNA
atctaccccgtgaacgccattagcttc

SEQ ID NO: 56718 - RNA, 27 nt, synthetic construct
  misc_feature 1..27: note = Non-POU domain-containing octamer-binding protein (10-18)
  source 1..27: mol_type = other RNA
aaggccggcgaggtgttcatccacaaa

SEQ ID NO: 56719 - RNA, 45 nt, synthetic construct
  misc_feature 1..45: note = ATP synthase-coupling factor 6, mitochondrial (94-108)
  source 1..45: mol_type = other RNA
aagttcgaggaccccaaatttgaagtgatcgagaagcctcaggcc

SEQ ID NO: 56720 - RNA, 27 nt, synthetic construct
  misc_feature 1..27: note = 60S ribosomal protein L10 (156-164)
  source 1..27: mol_type = other RNA
aagttcaaatttcccggcagacagaag

SEQ ID NO: 56721 - RNA, 27 nt, synthetic construct
  misc_feature 1..27: note = Coatomer subunit beta' (413-421)
  source 1..27: mol_type = other RNA
aagatcttcaaaaactttaaggagaaa

SEQ ID NO: 56722 - RNA, 27 nt, synthetic construct
  misc_feature 1..27: note = Elongation factor 2 (571-579)
  source 1..27: mol_type = other RNA
aagaaaagcgaccccgtggtctcctac

SEQ ID NO: 56723 - RNA, 27 nt, synthetic construct
  misc_feature 1..27: note = Apoptosis inhibitor 5 (238-246)
  source 1..27: mol_type = other RNA
aagctgttcgacaaactccttgagtac

SEQ ID NO: 56724 - RNA, 33 nt, synthetic construct
  misc_feature 1..33: note = COX assembly mitochondrial protein 2 homolog (69-79)
  source 1..33: mol_type = other RNA
aagctgttcaacccccctgaggaaagcgagaaa

SEQ ID NO: 56725 - RNA, 27 nt, synthetic construct
  misc_feature 1..27: note = 116 kDa U5 small nuclear ribonucleoprotein component (713-721)
  source 1..27: mol_type = other RNA
aagctgggcgagttctttcagaccaaa

SEQ ID NO: 56726 - RNA, 27 nt, synthetic construct
  misc_feature 1..27: note = 40S ribosomal protein S5 (86-94)
  source 1..27: mol_type = other RNA
aagctgatgaccgtgagaatcgtcaaa

SEQ ID NO: 56727 - RNA, 27 nt, synthetic construct
  misc_feature 1..27: note = 60S ribosomal protein L23a (115-123)
  source 1..27: mol_type = other RNA
aagctgtacgacatcgatgtggccaaa

SEQ ID NO: 56728 - RNA, 39 nt, synthetic construct
  misc_feature 1..39: note = ATP-citrate synthase (650-662)
  source 1..39: mol_type = other RNA
aagctgtacagacccggcagcgtggcctatgtctccagg

SEQ ID NO: 56729 - RNA, 30 nt, synthetic construct
  misc_feature 1..30: note = Signal recognition particle 54 kDa protein (433-442)
  source 1..30: mol_type = other RNA
aagatgggcgggatcaaaggactgttcaag

SEQ ID NO: 56730 - RNA, 27 nt, synthetic construct
  misc_feature 1..27: note = Charged multivesicular body protein 5 (9-17)
  source 1..27: mol_type = other RNA
aagcccaaagcccctccaccgagcctg

SEQ ID NO: 56731 - RNA, 66 nt, synthetic construct
  misc_feature 1..66: note = 60 kDa heat shock protein, mitochondrial (153-174)
  source 1..66: mol_type = other RNA
aagcccctggtgatcattgccgaggacgtcgatggcgaagctctcagcacccttgttctgaacaga

SEQ ID NO: 56732 - RNA, 27 nt, synthetic construct
  misc_feature 1..27: note = Lysine-specific histone demethylase 1A (200-208)
  source 1..27: mol_type = other RNA
aagcccgtgagcctgggccaggccctc

SEQ ID NO: 56733 - RNA, 39 nt, synthetic construct
  misc_feature 1..39: note = Histone H4 (80-92)
  source 1..39: mol_type = other RNA
aagaccgtgacagccatggacgtcgtttacgctctgaaa

SEQ ID NO: 56734 - RNA, 36 nt, synthetic construct
  misc_feature 1..36: note = High mobility group protein B1 (76-87)
  source 1..36: mol_type = other RNA
aagacctacatcccccctaaaggcgagacaaagaaa

SEQ ID NO: 56735 - RNA, 27 nt, synthetic construct
  misc_feature 1..27: note = GMP synthase (glutamine-hydrolyzing) (112-120)
  source 1..27: mol_type = other RNA
aaggtgttcggcgggaccgtccacaaa

SEQ ID NO: 56736 - RNA, 27 nt, synthetic construct
  misc_feature 1..27: note = Splicing factor 3B subunit 1 (554-562)
  source 1..27: mol_type = other RNA
aaggtgatcgacagaattctgtacaaa

SEQ ID NO: 56737 - RNA, 27 nt, synthetic construct
  misc_feature 1..27: note = SRSF protein kinase 1 (4-12)
  source 1..27: mol_type = other RNA
aaggtgctggccctccaggctagaaaa

SEQ ID NO: 56738 - RNA, 33 nt, synthetic construct
  misc_feature 1..33: note = RANBP2-like and GRIP domain-containing protein 2 (608-618)
  source 1..33: mol_type = other RNA
aaggtgctgcccctccttaaaatcattaagaaa

SEQ ID NO: 56739 - RNA, 33 nt, synthetic construct
  misc_feature 1..33: note = Cytochrome c oxidase subunit 4 isoform 1, mitochondrial (149-159)
  source 1..33: mol_type = other RNA
aaggtgaaccccatccagggcctggccagcaaa

SEQ ID NO: 56740 - RNA, 27 nt, synthetic construct
  misc_feature 1..27: note = PC4 and SFRS1-interacting protein (228-236)
  source 1..27: mol_type = other RNA
aaggtgagccaggtcatcatggagaaa

SEQ ID NO: 56741 - RNA, 30 nt, synthetic construct
  misc_feature 1..30: note = Rab GDP dissociation inhibitor alpha (103-112)
  source 1..30: mol_type = other RNA
aaggtggtcgagggcagcttcgtttacaaa

SEQ ID NO: 56742 - RNA, 27 nt, synthetic construct
  misc_feature 1..27: note = Lymphocyte cytosolic protein 2 (468-476)
  source 1..27: mol_type = other RNA
aaggtgtacaacatccagattagatat

SEQ ID NO: 56743 - RNA, 27 nt, synthetic construct
  misc_feature 1..27: note = ATP-dependent RNA helicase A (169-177)
  source 1..27: mol_type = other RNA
aagtaccccagccctttctttgtgttc

SEQ ID NO: 56744 - RNA, 57 nt, synthetic construct
  misc_feature 1..57: note = Vimentin (79-97)
  source 1..57: mol_type = other RNA
ctgctccaggacagcgtggatttctcccttgccgacgctatcaacaccgagtttaag

SEQ ID NO: 56745 - RNA, 27 nt, synthetic construct
  misc_feature 1..27: note = Actin, gamma-enteric smooth muscle (200-208)
  source 1..27: mol_type = other RNA
ctgcccgacggccaggtgatcaccatt

SEQ ID NO: 56746 - RNA, 27 nt, synthetic construct
  misc_feature 1..27: note = Polypyrimidine tract-binding protein 3 (123-131)
  source 1..27: mol_type = other RNA
ctgcccttcggcaaggtgaccaacctc

SEQ ID NO: 56747 - RNA, 27 nt, synthetic construct
  misc_feature 1..27: note = Histone deacetylase 1 (373-381)
  source 1..27: mol_type = other RNA
ctgccccacgcccctggcgtgcagatg

SEQ ID NO: 56748 - RNA, 30 nt, synthetic construct
  misc_feature 1..30: note = Eukaryotic translation initiation factor 4B (90-99)
  source 1..30: mol_type = other RNA
ctgcccaagagccctccatacaccgccttc

SEQ ID NO: 56749 - RNA, 27 nt, synthetic construct
  misc_feature 1..27: note = DNA polymerase epsilon subunit 3 (10-18)
  source 1..27: mol_type = other RNA
ctgcccaacgccgtgatcaccagaatt

SEQ ID NO: 56750 - RNA, 30 nt, synthetic construct
  misc_feature 1..30: note = Sorting nexin-1 (270-279)
  source 1..30: mol_type = other RNA
ctgcccagagccgtgggcacccagacactc

SEQ ID NO: 56751 - RNA, 27 nt, synthetic construct
  misc_feature 1..27: note = T-complex protein 1 subunit theta (260-268)
  source 1..27: mol_type = other RNA
ctgcccagactcacccctccagtgctt

SEQ ID NO: 56752 - RNA, 27 nt, synthetic construct
  misc_feature 1..27: note = Phosphate carrier protein, mitochondrial (340-348)
  source 1..27: mol_type = other RNA
ctgcccagacctccaccgcccgagatg

SEQ ID NO: 56753 - RNA, 27 nt, synthetic construct
  misc_feature 1..27: note = Protein flightless-1 homolog (881-889)
  source 1..27: mol_type = other RNA
ctgcccagacagcctccaatgagcctc

SEQ ID NO: 56754 - RNA, 27 nt, synthetic construct
  misc_feature 1..27: note = Cytochrome c oxidase subunit 2 (78-86)
  source 1..27: mol_type = other RNA
ctgcccagcctcagaatcctttacatg

SEQ ID NO: 56755 - RNA, 27 nt, synthetic construct
  misc_feature 1..27: note = BAG family molecular chaperone regulator 3 (188-196)
  source 1..27: mol_type = other RNA
ctgcccagctccggcagatcttcactc

SEQ ID NO: 56756 - RNA, 27 nt, synthetic construct
  misc_feature 1..27: note = Staphylococcal nuclease domain-containing protein 1 (747-755)
  source 1..27: mol_type = other RNA
ctgcccagcaccagactcggcacactt

SEQ ID NO: 56757 - RNA, 27 nt, synthetic construct
  misc_feature 1..27: note = Beta-enolase (102-110)
  source 1..27: mol_type = other RNA
ctgcccgtgcctgccttcaacgtcatc

SEQ ID NO: 56758 - RNA, 27 nt, synthetic construct
  misc_feature 1..27: note = RNA-binding protein 4 (186-194)
  source 1..27: mol_type = other RNA
ctgaccgagcagtacaacgaacaatat

SEQ ID NO: 56759 - RNA, 27 nt, synthetic construct
  misc_feature 1..27: note = 60S ribosomal protein L13 (150-158)
  source 1..27: mol_type = other RNA
ctgaccggccccgtgatgcctgtcaga

SEQ ID NO: 56760 - RNA, 27 nt, synthetic construct
  misc_feature 1..27: note = Proteasome activator complex subunit 3 (29-37)
  source 1..27: mol_type = other RNA
ctggtggccaacttctttcccaagaaa

SEQ ID NO: 56761 - RNA, 27 nt, synthetic construct
  misc_feature 1..27: note = CD99 antigen (1-9)
  source 1..27: mol_type = other RNA
atggccagaggcgctgcactggccctc

SEQ ID NO: 56762 - RNA, 33 nt, synthetic construct
  misc_feature 1..33: note = Destrin (115-125)
  source 1..33: mol_type = other RNA
atgatctacgccagctccaaggacgctattaaa

SEQ ID NO: 56763 - RNA, 36 nt, synthetic construct
  misc_feature 1..36: note = Destrin (115-126)
  source 1..36: mol_type = other RNA
atgatctacgccagctccaaggacgctattaaaaag

SEQ ID NO: 56764 - RNA, 33 nt, synthetic construct
  misc_feature 1..33: note = Peroxiredoxin-1 (21-31)
  source 1..33: mol_type = other RNA
atgcccgacggccagttcaaggatatcagcctg

SEQ ID NO: 56765 - RNA, 27 nt, synthetic construct
  misc_feature 1..27: note = E3 ubiquitin-protein ligase HECTD1 (409-417)
  source 1..27: mol_type = other RNA
atgcccagaggcgtggtcgttaccctg

SEQ ID NO: 56766 - RNA, 33 nt, synthetic construct
  misc_feature 1..33: note = Double-stranded RNA-binding protein Staufen homolog 1 (482-492)
  source 1..33: mol_type = other RNA
atgcccagaaccggcaacgggcctatgagcgtg

SEQ ID NO: 56767 - RNA, 27 nt, synthetic construct
  misc_feature 1..27: note = 60S acidic ribosomal protein P2 (1-9)
  source 1..27: mol_type = other RNA
atgagatacgtggccagctatctgctc

SEQ ID NO: 56768 - RNA, 27 nt, synthetic construct
  misc_feature 1..27: note = Eukaryotic translation initiation factor 1A, Y-chromosomal (87-95)
  source 1..27: mol_type = other RNA
aacaaggccgacgtgatcctgaaatac

SEQ ID NO: 56769 - RNA, 27 nt, synthetic construct
  misc_feature 1..27: note = ATP-dependent RNA helicase DDX24 (498-506)
  source 1..27: mol_type = other RNA
aaccccaagagacagaccctggtgttc

SEQ ID NO: 56770 - RNA, 30 nt, synthetic construct
  misc_feature 1..30: note = Transgelin-2 (158-167)
  source 1..30: mol_type = other RNA
aaccccagaaatttcagcgacaaccagctg

SEQ ID NO: 56771 - RNA, 27 nt, synthetic construct
  misc_feature 1..27: note = 5'-3' exoribonuclease 2 (456-464)
  source 1..27: mol_type = other RNA
aaccccagacaggccgcttacgagatg

SEQ ID NO: 56772 - RNA, 27 nt, synthetic construct
  misc_feature 1..27: note = Lysine-specific histone demethylase 1A (407-415)
  source 1..27: mol_type = other RNA
aacagactgctcgaggccaccagctac

SEQ ID NO: 56773 - RNA, 27 nt, synthetic construct
  misc_feature 1..27: note = Nesprin-2 (5548-5556)
  source 1..27: mol_type = other RNA
aacagacccgagttcatcaccgaattt

SEQ ID NO: 56774 - RNA, 27 nt, synthetic construct
  misc_feature 1..27: note = Protein DEK (115-123)
  source 1..27: mol_type = other RNA
aacagacccggcaccgtgagctccctg

SEQ ID NO: 56775 - RNA, 27 nt, synthetic construct
  misc_feature 1..27: note = ATP-dependent RNA helicase DDX3X (644-652)
  source 1..27: mol_type = other RNA
aacagcgacggctacgggggaaattat

SEQ ID NO: 56776 - RNA, 24 nt, synthetic construct
  misc_feature 1..24: note = 40S ribosomal protein S26 (108-115)
  source 1..24: mol_type = other RNA
cccagacctccaccgaagcccatg

SEQ ID NO: 56777 - RNA, 27 nt, synthetic construct
  misc_feature 1..27: note = Tubulin beta chain (43-51)
  source 1..27: mol_type = other RNA
cagctggacagaatcagcgtgtactat

SEQ ID NO: 56778 - RNA, 27 nt, synthetic construct
  misc_feature 1..27: note = Isoleucine-tRNA ligase, cytoplasmic (165-173)
  source 1..27: mol_type = other RNA
cagctgtacgacaagggcctcgtgtat

SEQ ID NO: 56779 - RNA, 27 nt, synthetic construct
  misc_feature 1..27: note = Filamin-A (2017-2025)
  source 1..27: mol_type = other RNA
cagcccgccagcttcgctgtgtccctg

SEQ ID NO: 56780 - RNA, 27 nt, synthetic construct
  misc_feature 1..27: note = Lysine-specific histone demethylase 1A (574-582)
  source 1..27: mol_type = other RNA
cagcccatcacccctggcccaagcatt

SEQ ID NO: 56781 - RNA, 27 nt, synthetic construct
  misc_feature 1..27: note = Pericentriolar material 1 protein (1892-1900)
  source 1..27: mol_type = other RNA
cagcccaaccctctgccactcagactt

SEQ ID NO: 56782 - RNA, 30 nt, synthetic construct
  misc_feature 1..30: note = Cytochrome c oxidase subunit 4 isoform 1, mitochondrial (93-102)
  source 1..30: mol_type = other RNA
cagagcttcgacaaggagtgggtggccaaa

SEQ ID NO: 56783 - RNA, 30 nt, synthetic construct
  misc_feature 1..30: note = Nucleoporin SEH1 (246-255)
  source 1..30: mol_type = other RNA
agaatcttcaccctgaagcccgtgaggaaa

SEQ ID NO: 56784 - RNA, 30 nt, synthetic construct
  misc_feature 1..30: note = L-lactate dehydrogenase B chain (270-279)
  source 1..30: mol_type = other RNA
agaatccaccccgtgagcaccatggtcaag

SEQ ID NO: 56785 - RNA, 27 nt, synthetic construct
  misc_feature 1..27: note = DNA replication licensing factor MCM6 (131-139)
  source 1..27: mol_type = other RNA
agaatcattgagaaggtgatacacagg

SEQ ID NO: 56786 - RNA, 36 nt, synthetic construct
  misc_feature 1..36: note = Reticulon-4 (62-73)
  source 1..36: mol_type = other RNA
agaatctacaagggcgtgattcaggccatacaaaaa

SEQ ID NO: 56787 - RNA, 27 nt, synthetic construct
  misc_feature 1..27: note = DNA (cytosine-5)-methyltransferase 1 (1459-1467)
  source 1..27: mol_type = other RNA
agactgttcggcaacatcctcgacaag

SEQ ID NO: 56788 - RNA, 30 nt, synthetic construct
  misc_feature 1..30: note = 26S protease regulatory subunit 6B (342-351)
  source 1..30: mol_type = other RNA
agactgatcttcagcaccattacatccaag

SEQ ID NO: 56789 - RNA, 33 nt, synthetic construct
  misc_feature 1..33: note = 26S protease regulatory subunit 6A (11-21)
  source 1..33: mol_type = other RNA
agactgctcgacagcgagatcaagattatgaaa

SEQ ID NO: 56790 - RNA, 39 nt, synthetic construct
  misc_feature 1..39: note = Heat shock 70 kDa protein 4L (128-140)
  source 1..39: mol_type = other RNA
agactgatgaacgagaccacagccgtggctctcgcatac

SEQ ID NO: 56791 - RNA, 30 nt, synthetic construct
  misc_feature 1..30: note = DNA-dependent protein kinase catalytic subunit (659-668)
  source 1..30: mol_type = other RNA
agactgcccctcatcagcggcttctacaag

SEQ ID NO: 56792 - RNA, 30 nt, synthetic construct
  misc_feature 1..30: note = Vimentin (69-78)
  source 1..30: mol_type = other RNA
agactgaggagctccgtgcccggcgtccgg

SEQ ID NO: 56793 - RNA, 27 nt, synthetic construct
  misc_feature 1..27: note = Cytoskeleton-associated protein 2 (369-377)
  source 1..27: mol_type = other RNA
agactgagcgagtggaaggccggcaaa

SEQ ID NO: 56794 - RNA, 30 nt, synthetic construct
  misc_feature 1..30: note = Coiled-coil domain-containing protein 124 (192-201)
  source 1..30: mol_type = other RNA
agactgagccagctcaagcaacttctgaaa

SEQ ID NO: 56795 - RNA, 27 nt, synthetic construct
  misc_feature 1..27: note = E3 ubiquitin-protein ligase HECTD1 (170-178)
  source 1..27: mol_type = other RNA
agactggtggacctccccatcagcaag

SEQ ID NO: 56796 - RNA, 27 nt, synthetic construct
  misc_feature 1..27: note = Serine-threonine kinase receptor-associated protein (290-298)
  source 1..27: mol_type = other RNA
agactgtggcagaccgtggtcggcaag

SEQ ID NO: 56797 - RNA, 39 nt, synthetic construct
  misc_feature 1..39: note = Mitotic checkpoint protein BUB3 (40-52)
  source 1..39: mol_type = other RNA
agactgtacgacgtgcccgccaacagcatgaggctcaag

SEQ ID NO: 56798 - RNA, 27 nt, synthetic construct
  misc_feature 1..27: note = DNA damage-binding protein 1 (889-897)
  source 1..27: mol_type = other RNA
agactgtacgagtggaccacagaaaag

SEQ ID NO: 56799 - RNA, 36 nt, synthetic construct
  misc_feature 1..36: note = 60S ribosomal protein L23a (129-140)
  source 1..36: mol_type = other RNA
agacccgacggcgagaagaaagcctacgtgaggctg

SEQ ID NO: 56800 - RNA, 27 nt, synthetic construct
  misc_feature 1..27: note = 26S proteasome non-ATPase regulatory subunit 12 (417-425)
  source 1..27: mol_type = other RNA
agacccaaggaccctaacaatctgctc

SEQ ID NO: 56801 - RNA, 27 nt, synthetic construct
  misc_feature 1..27: note = Ataxin-3 (188-196)
  source 1..27: mol_type = other RNA
agacccaagctgatcggcgaggaactc

SEQ ID NO: 56802 - RNA, 33 nt, synthetic construct
  misc_feature 1..33: note = Poly(rC)-binding protein 2 (183-193)
  source 1..33: mol_type = other RNA
agacccaagcctagctcctctccagtgatcttc

SEQ ID NO: 56803 - RNA, 27 nt, synthetic construct
  misc_feature 1..27: note = 40S ribosomal protein S11 (132-140)
  source 1..27: mol_type = other RNA
agacccctgagcaagaccgtgaggttc

SEQ ID NO: 56804 - RNA, 27 nt, synthetic construct
  misc_feature 1..27: note = Splicing factor 3B subunit 2 (222-230)
  source 1..27: mol_type = other RNA
agacccaggggccctccaccgccccct

SEQ ID NO: 56805 - RNA, 33 nt, synthetic construct
  misc_feature 1..33: note = Vimentin (23-33)
  source 1..33: mol_type = other RNA
agacccagctcctctaggtcatacgtgaccaca

SEQ ID NO: 56806 - RNA, 27 nt, synthetic construct
  misc_feature 1..27: note = Elongation factor 1-alpha 1 (240-248)
  source 1..27: mol_type = other RNA
agacccaccgacaagcctctgaggctc

SEQ ID NO: 56807 - RNA, 30 nt, synthetic construct
  misc_feature 1..30: note = Translation initiation factor eIF-2B subunit delta (385-394)
  source 1..30: mol_type = other RNA
agaccctggctggagggcaggcacaccctc

SEQ ID NO: 56808 - RNA, 30 nt, synthetic construct
  misc_feature 1..30: note = Polyglutamine-binding protein 1 (242-251)
  source 1..30: mol_type = other RNA
agaccctaccctagcccaggcgccgtgctg

SEQ ID NO: 56809 - RNA, 30 nt, synthetic construct
  misc_feature 1..30: note = Transcriptional repressor p66-alpha (257-266)
  source 1..30: mol_type = other RNA
agaagcatcccccagtccgccacctggaag

SEQ ID NO: 56810 - RNA, 30 nt, synthetic construct
  misc_feature 1..30: note = Constitutive coactivator of PPAR-gamma-like protein 1 (313-322)
  source 1..30: mol_type = other RNA
agaaccgacgataaggtgatcaggttcaaa

SEQ ID NO: 56811 - RNA, 33 nt, synthetic construct
  misc_feature 1..33: note = Ras GTPase-activating protein-binding protein 1 (247-257)
  source 1..33: mol_type = other RNA
agaaccttcagctgggcctccgtgacatctaag

SEQ ID NO: 56812 - RNA, 27 nt, synthetic construct
  misc_feature 1..27: note = 42 kda non-muscle cytoplasmic actin (2-10)
  source 1..27: mol_type = other RNA
agagtggcccccgaggaacaccctgtc

SEQ ID NO: 56813 - RNA, 39 nt, synthetic construct
  misc_feature 1..39: note = Heterogeneous nuclear ribonucleoprotein C-like 1 (17-29)
  source 1..39: mol_type = other RNA
agagtgttcatcggcaacctgaataccctcgtcgttaag

SEQ ID NO: 56814 - RNA, 36 nt, synthetic construct
  misc_feature 1..36: note = Elongation factor 2 (415-426)
  source 1..36: mol_type = other RNA
agagtgttcagcggcctggtctccaccgggctcaag

SEQ ID NO: 56815 - RNA, 27 nt, synthetic construct
  misc_feature 1..27: note = Paired amphipathic helix protein Sin3a (1263-1271)
  source 1..27: mol_type = other RNA
agagtgaagtacggcaccgtcttcaaa

SEQ ID NO: 56816 - RNA, 36 nt, synthetic construct
  misc_feature 1..36: note = Prohibitin (117-128)
  source 1..36: mol_type = other RNA
agagtgctgcccagcatcaccacagagattctcaag

SEQ ID NO: 56817 - RNA, 39 nt, synthetic construct
  misc_feature 1..39: note = Coatomer subunit beta (327-339)
  source 1..39: mol_type = other RNA
agagtgctgagcacccccgacctcgaggtcaggaagaaa

SEQ ID NO: 56818 - RNA, 27 nt, synthetic construct
  misc_feature 1..27: note = Filamin-A (2022-2030)
  source 1..27: mol_type = other RNA
agagtgagggtcagcggccaggggctg

SEQ ID NO: 56819 - RNA, 27 nt, synthetic construct
  misc_feature 1..27: note = Pre-mRNA-processing-splicing factor 8 (444-452)
  source 1..27: mol_type = other RNA
agagtgagctaccagaagctgctcaaa

SEQ ID NO: 56820 - RNA, 48 nt, synthetic construct
  misc_feature 1..48: note = Ribose-5-phosphate isomerase (219-234)
  source 1..48: mol_type = other RNA
agagtgtacttcggcatgcaggacgggagcgtcaacatgagggagaag

SEQ ID NO: 56821 - RNA, 27 nt, synthetic construct
  misc_feature 1..27: note = Antigen KI-67 (420-428)
  source 1..27: mol_type = other RNA
agcgagaacctgctcggcaagcagttc

SEQ ID NO: 56822 - RNA, 30 nt, synthetic construct
  misc_feature 1..30: note = Heterogeneous nuclear ribonucleoproteins A2/B1 (73-82)
  source 1..30: mol_type = other RNA
agcatcgacggcagagtggtcgagcccaag

SEQ ID NO: 56823 - RNA, 30 nt, synthetic construct
  misc_feature 1..30: note = Transmembrane and coiled-coil domain-containing protein 1 (107-116)
  source 1..30: mol_type = other RNA
agcatcttcgacggcagagtggtcgccaag

SEQ ID NO: 56824 - RNA, 33 nt, synthetic construct
  misc_feature 1..33: note = Phosphoglycerate kinase 1 (87-97)
  source 1..33: mol_type = other RNA
agcctgctcggcaaggacgtgcttttcctgaaa

SEQ ID NO: 56825 - RNA, 27 nt, synthetic construct
  misc_feature 1..27: note = Dynein light chain roadblock-type 1 (51-59)
  source 1..27: mol_type = other RNA
agcctgatgcactccttcatcctcaag

SEQ ID NO: 56826 - RNA, 30 nt, synthetic construct; identical to SEQ ID NO: 32599
  misc_feature 1..30: note = Vimentin (430-439)
  source 1..30: mol_type = other RNA

SEQ ID NO: 56827 - RNA, 42 nt, synthetic construct
  misc_feature 1..42: note = Vimentin (51-64)
  source 1..42: mol_type = other RNA
agcctgtacgcctcctctcccggcggggtgtatgctaccaga

SEQ ID NO: 56828 - RNA, 27 nt, synthetic construct
  misc_feature 1..27: note = Fatty acid synthase (2326-2334)
  source 1..27: mol_type = other RNA
agccccgcccctacccacaactccctg

SEQ ID NO: 56829 - RNA, 27 nt, synthetic construct
  misc_feature 1..27: note = Ataxin-2-like protein (516-524)
  source 1..27: mol_type = other RNA
agccccgcctcccctaagatctctctg

SEQ ID NO: 56830 - RNA, 27 nt, synthetic construct
  misc_feature 1..27: note = Chromosome alignment-maintaining phosphoprotein 1 (618-626)
  source 1..27: mol_type = other RNA
agccccgagcagtccagaaacgtgctg

SEQ ID NO: 56831 - RNA, 27 nt, synthetic construct
  misc_feature 1..27: note = Rho guanine nucleotide exchange factor 1 (10-18)
  source 1..27: mol_type = other RNA
agccccggcccttccagaccagggctg

SEQ ID NO: 56832 - RNA, 30 nt, synthetic construct
  misc_feature 1..30: note = Isocitrate dehydrogenase (NADP) cytoplasmic (28-37)
  source 1..30: mol_type = other RNA
agccccaacggcaccatcagaaatattctg

SEQ ID NO: 56833 - RNA, 27 nt, synthetic construct
  misc_feature 1..27: note = Trifunctional enzyme subunit alpha, mitochondrial (56-64)
  source 1..27: mol_type = other RNA
agccccaactccaaggtgaataccctg

SEQ ID NO: 56834 - RNA, 27 nt, synthetic construct
  misc_feature 1..27: note = Cleavage stimulation factor subunit 2 (153-161)
  source 1..27: mol_type = other RNA
agcccccaggaggccagaaacatgctg

SEQ ID NO: 56835 - RNA, 27 nt, synthetic construct
  misc_feature 1..27: note = Poly(rC)-binding protein 1 (173-181)
  source 1..27: mol_type = other RNA
agcccccagggcagagtgatgaccatc

SEQ ID NO: 56836 - RNA, 27 nt, synthetic construct
  misc_feature 1..27: note = E3 ubiquitin-protein ligase TRIP12 (1954-1962)
  source 1..27: mol_type = other RNA
agccccagactgcctgtgggcgggttc

SEQ ID NO: 56837 - RNA, 27 nt, synthetic construct
  misc_feature 1..27: note = Cytoplasmic dynein 1 light intermediate chain 1 (398-406)
  source 1..27: mol_type = other RNA
agccccagagtgcctggcgggtcccca

SEQ ID NO: 56838 - RNA, 30 nt, synthetic construct
  misc_feature 1..30: note = Telomeric repeat-binding factor 2-interacting protein 1 (154-163)
  source 1..30: mol_type = other RNA
agcccctcctctgtgaccggcaacgccctg

SEQ ID NO: 56839 - RNA, 27 nt, synthetic construct
  misc_feature 1..27: note = Transketolase (386-394)
  source 1..27: mol_type = other RNA
agcagacccgagaacgccatcatttac

SEQ ID NO: 56840 - RNA, 24 nt, synthetic construct
  misc_feature 1..24: note = Heterogeneous nuclear ribonucleoprotein K (81-88)
  source 1..24: mol_type = other RNA
agctccggccccgagagaatcctg

SEQ ID NO: 56841 - RNA, 36 nt, synthetic construct
  misc_feature 1..36: note = RNA-binding protein FUS (44-55)
  source 1..36: mol_type = other RNA
agcaccgacacatccggctacgggcagtcttcatat

SEQ ID NO: 56842 - RNA, 27 nt, synthetic construct
  misc_feature 1..27: note = DNA-dependent protein kinase catalytic subunit (1861-1869)
  source 1..27: mol_type = other RNA
agcaccttcgacacacagatcactaag

SEQ ID NO: 56843 - RNA, 27 nt, synthetic construct
  misc_feature 1..27: note = 60S ribosomal protein L10a (153-161)
  source 1..27: mol_type = other RNA
agcaccatcaagttccagatgaaaaag

SEQ ID NO: 56844 - RNA, 27 nt, synthetic construct
  misc_feature 1..27: note = Cytoskeleton-associated protein 5 (430-438)
  source 1..27: mol_type = other RNA
agcaccctgcccaagtccctccttaaa

SEQ ID NO: 56845 - RNA, 33 nt, synthetic construct
  misc_feature 1..33: note Dolichyl-diphosphooligosaccharide-proteinosyltransferase subunit 2 (254-264)
  source 1..33: mol_type = other RNA
agcgtggcctccgctgcagccgtcctgtctcac

SEQ ID NO: 56846 - RNA, 27 nt, synthetic construct
  misc_feature 1..27: note = Cytoplasmic FMR1-interacting protein 1 (504-512)
  source 1..27: mol_type = other RNA
agcgtgttcaaccacgccatcagacat

SEQ ID NO: 56847 - RNA, 27 nt, synthetic construct
  misc_feature 1..27: note = Far upstream element-binding protein 3 (77-85)
  source 1..27: mol_type = other RNA
agcgtgtacggctatggggtccagaag

SEQ ID NO: 56848 - RNA, 27 nt, synthetic construct
  misc_feature 1..27: note = YTH domain-containing protein 1 (570-578)
  source 1..27: mol_type = other RNA
agctacaacgactatgtgagagagttc

SEQ ID NO: 56849 - RNA, 27 nt, synthetic construct
  misc_feature 1..27: note = RNA binding motif protein, X-linked-like-1 (280-288)
  source 1..27: mol_type = other RNA
agctacagagactcctatgagtcttac

SEQ ID NO: 56850 - RNA, 27 nt, synthetic construct
  misc_feature 1..27: note = Nuclear pore complex protein Nup98-Nup96 (1516-1524)
  source 1..27: mol_type = other RNA
accgccgaccccctggattacagactc

SEQ ID NO: 56851 - RNA, 27 nt, synthetic construct
  misc_feature 1..27: note = Fatty acid synthase (1230-1238)
  source 1..27: mol_type = other RNA
accgccgtggagaacatgcccagcctg

SEQ ID NO: 56852 - RNA, 30 nt, synthetic construct
  misc_feature 1..30: note = T-complex protein 1 subunit theta (13-22)
  source 1..30: mol_type = other RNA
accgcctacggccccaacgggatgaataag

SEQ ID NO: 56853 - RNA, 27 nt, synthetic construct
  misc_feature 1..27: note = Eukaryotic translation elongation factor 1 epsilon-1 (114-122)
  source 1..27: mol_type = other RNA
accctggccgacatcctcctttactat

SEQ ID NO: 56854 - RNA, 27 nt, synthetic construct
  misc_feature 1..27: note = Coatomer subunit beta' (828-836)
  source 1..27: mol_type = other RNA
acccccaacgaggaaagaaatgtgatg

SEQ ID NO: 56855 - RNA, 27 nt, synthetic construct
  misc_feature 1..27: note = Extended synaptotagmin-1 (769-777)
  source 1..27: mol_type = other RNA
acccccagacctacagccgctgagctg

SEQ ID NO: 56856 - RNA, 27 nt, synthetic construct
  misc_feature 1..27: note = Serine/arginine repetitive matrix protein 2 (2049-2057)
  source 1..27: mol_type = other RNA
acccccgtggccggcagccagtccctg

SEQ ID NO: 56857 - RNA, 27 nt, synthetic construct
  misc_feature 1..27: note = Exportin-1 (61-69)
  source 1..27: mol_type = other RNA
accagagtggacacaatcctggagttc

SEQ ID NO: 56858 - RNA, 30 nt, synthetic construct
  misc_feature 1..30: note = TATA-binding protein-associated factor 2N (41-50)
  source 1..30: mol_type = other RNA
accacagacagctcctacggccagaactat

SEQ ID NO: 56859 - RNA, 30 nt, synthetic construct
  misc_feature 1..30: note = Retinoblastoma-associated protein (408-417)
  source 1..30: mol_type = other RNA
accgtgaaccccaaggagagcatcctgaaa

SEQ ID NO: 56860 - RNA, 27 nt, synthetic construct
  misc_feature 1..27: note = Prosaposin (51-59)
  source 1..27: mol_type = other RNA
accgtgtggaacaagcccacagtcaaa

SEQ ID NO: 56861 - RNA, 24 nt, synthetic construct
  misc_feature 1..24: note = Zinc phosphodiesterase ELAC protein 2 (581-588)
  source 1..24: mol_type = other RNA
gtggagagactgatcagctccctc

SEQ ID NO: 56862 - RNA, 24 nt, synthetic construct
  misc_feature 1..24: note = Antigen KI-67 (75-82)
  source 1..24: mol_type = other RNA
gtgatcgacgagcccgtcagactg

SEQ ID NO: 56863 - RNA, 39 nt, synthetic construct
  misc_feature 1..39: note = Myb-binding protein 1A (543-555)
  source 1..39: mol_type = other RNA
gtgatcagaagcccctccctgctccagtctggcgccaag

SEQ ID NO: 56864 - RNA, 30 nt, synthetic construct
  misc_feature 1..30: note = Filamin-A (331-340)
  source 1..30: mol_type = other RNA
gtgctgttcgccggccagcacatcgctaag

SEQ ID NO: 56865 - RNA, 27 nt, synthetic construct
  misc_feature 1..27: note = Barrier-to-autointegration factor (45-53)
  source 1..27: mol_type = other RNA
gtgctgggccagttcctcgtccttaag

SEQ ID NO: 56866 - RNA, 27 nt, synthetic construct
  misc_feature 1..27: note = Protein flightless-1 homolog (179-187)
  source 1..27: mol_type = other RNA
gtgctgaacggcaatcccctccttcac

SEQ ID NO: 56867 - RNA, 27 nt, synthetic construct
  misc_feature 1..27: note = Signal recognition particle subunit SRP68 (453-461)
  source 1..27: mol_type = other RNA
gtgctgtacgacagagtcctcaagtat

SEQ ID NO: 56868 - RNA, 27 nt, synthetic construct
  misc_feature 1..27: note = 60S ribosomal protein L7 (83-91)
  source 1..27: mol_type = other RNA
gtgcccgccgagcctaagctggctttc

SEQ ID NO: 56869 - RNA, 27 nt, synthetic construct
  misc_feature 1..27: note = Protein FAM219A (74-82)
  source 1..27: mol_type = other RNA
gtgcccaacaagggctacagctccctg

SEQ ID NO: 56870 - RNA, 30 nt, synthetic construct
  misc_feature 1..30: note = Long-chain-fatty-acid-CoA ligase 4 (576-585)
  source 1..30: mol_type = other RNA
gtgcccaaccagaagagactgaccctcctt

SEQ ID NO: 56871 - RNA, 27 nt, synthetic construct
  misc_feature 1..27: note = ATP-dependent RNA helicase DDX24 (199-207)
  source 1..27: mol_type = other RNA
gtgcccagacctgtcctgagggccctc

SEQ ID NO: 56872 - RNA, 27 nt, synthetic construct
  misc_feature 1..27: note = Ankyrin repeat and KH domain-containing protein 1 (748-756)
  source 1..27: mol_type = other RNA
gtgcccagagtccctacccacacactg

SEQ ID NO: 56873 - RNA, 27 nt, synthetic construct
  misc_feature 1..27: note = Nuclear pore complex protein Nup153 (582-590)
  source 1..27: mol_type = other RNA
gtgcccgtcgccaagaccgctgagctg

SEQ ID NO: 56874 - RNA, 27 nt, synthetic construct
  misc_feature 1..27: note = 60S ribosomal protein L27a (104-112)
  source 1..27: mol_type = other RNA
gtgagaagcggctactataaggtcctg

SEQ ID NO: 56875 - RNA, 27 nt, synthetic construct
  misc_feature 1..27: note = RNA-binding protein 4 (197-205)
  source 1..27: mol_type = other RNA
gtgagaaccccctacacaatgagctat

SEQ ID NO: 56876 - RNA, 33 nt, synthetic construct
  misc_feature 1..33: note = Tripeptidyl-peptidase 1 (68-78)
  source 1..33: mol_type = other RNA
gtgagcgacccctcctctcctcagtacggcaag

SEQ ID NO: 56877 - RNA, 33 nt, synthetic construct
  misc_feature 1..33: note = Vimentin (31-41)
  source 1..33: mol_type = other RNA
gtgaccacaagcactagaacgtactccctgggc

SEQ ID NO: 56878 - RNA, 30 nt, synthetic construct
  misc_feature 1..30: note = 60S ribosomal protein L8 (15-24)
  source 1..30: mol_type = other RNA
gtggtcttcagagacccctacaggtttaag

SEQ ID NO: 56879 - RNA, 24 nt, synthetic construct
  misc_feature 1..24: note = Non-specific lipid-transfer protein (16-23)
  source 1..24: mol_type = other RNA
gtggtcggcgttgggatgaccaag

SEQ ID NO: 56880 - RNA, 30 nt, synthetic construct
  misc_feature 1..30: note = Filamin-A (391-400)
  source 1..30: mol_type = other RNA
gtggtcatccaggaccccatgggccaaaag

SEQ ID NO: 56881 - RNA, 30 nt, synthetic construct
  misc_feature 1..30: note = Barrier-to-autointegration factor (44-53)
  source 1..30: mol_type = other RNA
gtggtcctgggccagttcctcgttcttaag

SEQ ID NO: 56882 - RNA, 63 nt, synthetic construct
  misc_feature 1..63: note = Glyceraldehyde-3-phosphate dehydrogenase (87-107)
  source 1..63: mol_type = other RNA
tggggcgacgccggggctgagtacgtggtcgaaagcaccggagttttcacaactatggagaag

SEQ ID NO: 56883 - RNA, 27 nt, synthetic construct
  misc_feature 1..27: note = Tubulin beta chain (179-187)
  source 1..27: mol_type = other RNA
taccccgacagaatcatgaacaccttc

SEQ ID NO: 56884 - RNA, 27 nt, synthetic construct
  misc_feature 1..27: note = RNA-binding protein 14 (249-257)
  source 1..27: mol_type = other RNA
tacagagcccagcccagcgcttccctg

SEQ ID NO: 56885 - RNA, 27 nt, synthetic construct
  misc_feature 1..27: note = RNA-binding protein 14 (237-245)
  source 1..27: mol_type = other RNA
tacagagcccagcccagcgtgtccctg

SEQ ID NO: 56886 - RNA, 27 nt, synthetic construct
  misc_feature 1..27: note = RNA-binding protein 14 (540-548)
  source 1..27: mol_type = other RNA
tacagaggccagcccgggaacgcctat

SEQ ID NO: 56887 - RNA, 24 nt, synthetic construct
  misc_feature 1..24: note = Cyclin-dependent kinase 9 (194-201)
  source 1..24: mol_type = other RNA
tacagaccccctgagctgctcctt

SEQ ID NO: 56888 - RNA, 27 nt, synthetic construct
  misc_feature 1..27: note = Pre-mRNA-processing-splicing factor 8 (1470-1478)
  source 1..27: mol_type = other RNA
tacagaaccgacatgatccaggccctg

SEQ ID NO: 56889 - RNA, 36 nt, synthetic construct
  misc_feature 1..36: note = Plectin (3167-3178)
  source 1..36: mol_type = other RNA
tacagcgacccctccaccggcgagcctgccacatat

SEQ ID NO: 56890 - RNA, 27 nt, synthetic construct
  misc_feature 1..27: note = Protein SON (1132-1140)
  source 1..27: mol_type = other RNA
tacaccgacagctatacagatacttac

SEQ ID NO: 56891 - RNA, 33 nt, synthetic construct
  misc_feature 1..33: note = HLA class I histocompatibility antigen, B-38 alpha chain (140-150)
  source 1..33: mol_type = other RNA
ttcgcctacgacggcaaggattatatcgctctg

SEQ ID NO: 56892 - RNA, 27 nt, synthetic construct
  misc_feature 1..27: note = Proteasome subunit beta type-7 (202-210)
  source 1..27: mol_type = other RNA
atcgccgctggcattttcaacgacctg

SEQ ID NO: 56893 - RNA, 27 nt, synthetic construct
  misc_feature 1..27: note = 40S ribosomal protein S17 (38-46)
  source 1..27: mol_type = other RNA
atcgccattatacccagcaagaaactg

SEQ ID NO: 56894 - RNA, 27 nt, synthetic construct
  misc_feature 1..27: note = Neudesin (21-29)
  source 1..27: mol_type = other RNA
gccctggctcccggcctccctaccgca

SEQ ID NO: 56895 - RNA, 30 nt, synthetic construct
  misc_feature 1..30: note = TRAF2 and NCK-interacting protein kinase (1170-1179)
  source 1..30: mol_type = other RNA
gcctgggctcccaagccttaccacaaattc

SEQ ID NO: 56896 - RNA, 27 nt, synthetic construct
  misc_feature 1..27: note = Neuroblast differentiation-associated protein AHNAK (739-747)
  source 1..27: mol_type = other RNA
gacgtgcacggccccgattggcatctg

SEQ ID NO: 56897 - RNA, 27 nt, synthetic construct
  misc_feature 1..27: note = Prelamin-A/C (53-61)
  source 1..27: mol_type = other RNA
gaggaactggacttccagaagaacatc

SEQ ID NO: 56898 - RNA, 27 nt, synthetic construct
  misc_feature 1..27: note = Protein flightless-1 homolog (1158-1166)
  source 1..27: mol_type = other RNA
gagtacatgaagcacaccagactgttc

SEQ ID NO: 56899 - RNA, 27 nt, synthetic construct
  misc_feature 1..27: note = Non-POU domain-containing octamer-binding protein (374-382)
  source 1..27: mol_type = other RNA
ttccccgacgccagagagcaggaaatc

SEQ ID NO: 56900 - RNA, 24 nt, synthetic construct
  misc_feature 1..24: note = Probable RNA-binding protein 23 (351-358)
  source 1..24: mol_type = other RNA
ttccccgacggcgatcaggagctg

SEQ ID NO: 56901 - RNA, 27 nt, synthetic construct
  misc_feature 1..27: note = Tubulin beta-6 chain (159-167)
  source 1..27: mol_type = other RNA
ttccccgacagaatcatgaacaccttt

SEQ ID NO: 56902 - RNA, 27 nt, synthetic construct
  misc_feature 1..27: note = Actin-related protein 2/3 complex subunit 3 (103-111)
  source 1..27: mol_type = other RNA
ttccccatccctggcgagccagggttt

SEQ ID NO: 56903 - RNA, 27 nt, synthetic construct
  misc_feature 1..27: note = Solute carrier family 35 member F5 (288-296)
  source 1..27: mol_type = other RNA
ttccccagcaactccggcgacagattt

SEQ ID NO: 56904 - RNA, 30 nt, synthetic construct; identical to SEQ ID NO: 32677
  misc_feature 1..30: note = Myoferlin (286-295)
  source 1..30: mol_type = other RNA

SEQ ID NO: 56905 - RNA, 30 nt, synthetic construct
  misc_feature 1..30: note = HLA class I histocompatibility antigen, B-44 alpha chain (216-225)
  source 1..30: mol_type = other RNA
caccccatcagcgaccatgaggtgaccctg

SEQ ID NO: 56906 - RNA, 24 nt, synthetic construct
  misc_feature 1..24: note = Fructose-bisphosphate aldolase B (192-199)
  source 1..24: mol_type = other RNA
atccccgacggcgatcacgacctg

SEQ ID NO: 56907 - RNA, 27 nt, synthetic construct
  misc_feature 1..27: note = Neutral cholesterol ester hydrolase 1 (34-42)
  source 1..27: mol_type = other RNA
aagtacttcctgaaacccgaggtgctc

SEQ ID NO: 56908 - RNA, 27 nt, synthetic construct
  misc_feature 1..27: note = Vacuolar protein sorting-associated protein 13B (2853-2861)
  source 1..27: mol_type = other RNA
ctgcccgaccctatcattatacacctc

SEQ ID NO: 56909 - RNA, 27 nt, synthetic construct
  misc_feature 1..27: note = FERM domain-containing protein 6 (550-558)
  source 1..27: mol_type = other RNA
ctgtaccagaaggacttcctcagaatc

SEQ ID NO: 56910 - RNA, 27 nt, synthetic construct
  misc_feature 1..27: note = Microtubule-associated protein RP/EB family member 1 (50-58)
  source 1..27: mol_type = other RNA
atgctgttccccggcagcatcgccctc

SEQ ID NO: 56911 - RNA, 27 nt, synthetic construct
  misc_feature 1..27: note = Cyclic AMP-dependent transcription factor ATF-4 (108-116)
  source 1..27: mol_type = other RNA
atgcccgacgatctgctcaccacactt

SEQ ID NO: 56912 - RNA, 24 nt, synthetic construct
  misc_feature 1..24: note = Neuroblast differentiation-associated protein AHNAK (820-827)
  source 1..24: mol_type = other RNA
atgcccgacgtggatctgcacctc

SEQ ID NO: 56913 - RNA, 27 nt, synthetic construct
  misc_feature 1..27: note = Transcription factor AP-1 (42-50)
  source 1..27: mol_type = other RNA
atggtggcccccgctgtcgcaagcgtt

SEQ ID NO: 56914 - RNA, 27 nt, synthetic construct
  misc_feature 1..27: note = Chloride intracellular channel protein 4 (190-198)
  source 1..27: mol_type = other RNA
aacctgctccccaagcttcacatcgtg

SEQ ID NO: 56915 - RNA, 27 nt, synthetic construct
  misc_feature 1..27: note = Growth arrest and DNA damage-inducible protein GADD45 alpha (48-56)
  source 1..27: mol_type = other RNA
aacgtggaccccgataatgtcgttctg

SEQ ID NO: 56916 - RNA, 27 nt, synthetic construct
  misc_feature 1..27: note = Probable C-mannosyltransferase DPY19L4 (693-701)
  source 1..27: mol_type = other RNA
aactacagcccctatgtgaattacttc

SEQ ID NO: 56917 - RNA, 33 nt, synthetic construct
  misc_feature 1..33: note = Integrin alpha-3 (412-422)
  source 1..33: mol_type = other RNA
cagccccaacaggtgatccacggcgagaagctg

SEQ ID NO: 56918 - RNA, 27 nt, synthetic construct
  misc_feature 1..27: note = Protein transport protein Sec61 subunit alpha isoform 2 (393-401)
  source 1..27: mol_type = other RNA
agatacatccccaccgccgctgcattc

SEQ ID NO: 56919 - RNA, 30 nt, synthetic construct
  misc_feature 1..30: note = Tumor suppressor candidate 3 (18-27)
  source 1..30: mol_type = other RNA
agatacctgcccaccggcagcttccctttt

SEQ ID NO: 56920 - RNA, 27 nt, synthetic construct
  misc_feature 1..27: note = Rho GTPase-activating protein 7 (915-923)
  source 1..27: mol_type = other RNA
agcgagggcccccctctgagactctgg

SEQ ID NO: 56921 - RNA, 27 nt, synthetic construct
  misc_feature 1..27: note = Exosome complex component RRP42 (222-230)
  source 1..27: mol_type = other RNA
agcctggcctccctccttgtgtctgtc

SEQ ID NO: 56922 - RNA, 27 nt, synthetic construct
  misc_feature 1..27: note = AAC83183.1 (1386-1394)
  source 1..27: mol_type = other RNA
agcctgctcgaccccgtgcctgaggtc

SEQ ID NO: 56923 - RNA, 27 nt, synthetic construct
  misc_feature 1..27: note = E3 ubiquitin-protein ligase BRE1A (312-320)
  source 1..27: mol_type = other RNA
agcctgtacggcgggaccatcacaatt

SEQ ID NO: 56924 - RNA, 27 nt, synthetic construct
  misc_feature 1..27: note = WD repeat-containing protein 48 (452-460)
  source 1..27: mol_type = other RNA
agccccgacggctccgatcctaagctg

SEQ ID NO: 56925 - RNA, 27 nt, synthetic construct
  misc_feature 1..27: note = Pericentriolar material 1 protein (1935-1943)
  source 1..27: mol_type = other RNA
agccccgacaccgagtcccctgtgctg

SEQ ID NO: 56926 - RNA, 30 nt, synthetic construct
  misc_feature 1..30: note = Protein LDOC1 (73-82)
  source 1..30: mol_type = other RNA
agctacatgctggtgaacgagaatagattc

SEQ ID NO: 56927 - RNA, 27 nt, synthetic construct
  misc_feature 1..27: note = Nardilysin (1115-1123)
  source 1..27: mol_type = other RNA
acctacctgcccacaagccctctcctt

SEQ ID NO: 56928 - RNA, 27 nt, synthetic construct
  misc_feature 1..27: note = Calnexin (12-20)
  source 1..27: mol_type = other RNA
gtgctgggcaccgccatcgtcgaggct

SEQ ID NO: 56929 - RNA, 27 nt, synthetic construct
  misc_feature 1..27: note = Cleft lip and palate transmembrane protein 1 (107-115)
  source 1..27: mol_type = other RNA
gtgtacatcagcgagcacgaacatttc

SEQ ID NO: 56930 - RNA, 27 nt, synthetic construct
  misc_feature 1..27: note = U5 small nuclear ribonucleoprotein 200 kDa helicase (1389-1397)
  source 1..27: mol_type = other RNA
gtgtacatggactggtatgagaagttc

SEQ ID NO: 56931 - RNA, 30 nt, synthetic construct
  misc_feature 1..30: note = BTB/POZ domain-containing protein KCTD4 (77-86)
  source 1..30: mol_type = other RNA
tacttcatcgacagagatggcctgctcttt

SEQ ID NO: 56932 - RNA, 30 nt, synthetic construct; identical to SEQ ID NO: 32705
  misc_feature 1..30: note = DNA-binding protein SATB2 (639-648)
  source 1..30: mol_type = other RNA

SEQ ID NO: 56933 - RNA, 30 nt, synthetic construct
  misc_feature 1..30: note = Long-chain-fatty-acid-CoA ligase 4 (238-247)
  source 1..30: mol_type = other RNA
taccccgagggcttcgaaatccacagcatg

SEQ ID NO: 56934 - RNA, 30 nt, synthetic construct
  misc_feature 1..30: note = Tribbles homolog 3 (259-268)
  source 1..30: mol_type = other RNA
taccccttccaggacagcgagcctgtgctg

SEQ ID NO: 56935 - RNA, 27 nt, synthetic construct
  misc_feature 1..27: note = Protein LAP2 (483-491)
  source 1..27: mol_type = other RNA
taccccaccccttatccagacgagctg

SEQ ID NO: 56936 - RNA, 27 nt, synthetic construct
  misc_feature 1..27: note = V-type proton ATPase catalytic subunit A (464-472)
  source 1..27: mol_type = other RNA
tactatgacaagcacttcaccgagttt

SEQ ID NO: 56937 - RNA, 33 nt, synthetic construct
  misc_feature 1..33: note = Filamin-B (515-525)
  source 1..33: mol_type = other RNA
tactatcccagcacccctggcagatactccatc

SEQ ID NO: 56938 - RNA, 27 nt, synthetic construct
  misc_feature 1..27: note = Polypyrimidine tract-binding protein 3 (113-121)
  source 1..27: mol_type = other RNA
tactatacccccatcacacctcacctg

SEQ ID NO: 56939 - RNA, 27 nt, synthetic construct
  misc_feature 1..27: note = Small nuclear ribonucleoprotein E (28-36)
  source 1..27: mol_type = other RNA
agaagcaggatccaggtgtggctgtac

SEQ ID NO: 56940 - RNA, 63 nt, synthetic construct
  misc_feature 1..63: note = 60S ribosomal protein L30 (95-115)
  source 1..63: mol_type = other RNA
gccatcattgaccccggcgatagcgacataatcagatccatgcctgagcagaccggggaaaag

SEQ ID NO: 56941 - RNA, 30 nt, synthetic construct
  misc_feature 1..30: note = Catenin beta-1 (115-124)
  source 1..30: mol_type = other RNA
gacgccgctcaccccaccaacgtgcagaga

SEQ ID NO: 56942 - RNA, 27 nt, synthetic construct
  misc_feature 1..27: note = HLA class I histocompatibility antigen, B-51 alpha chain (161-169)
  source 1..27: mol_type = other RNA
gacaccgccgctcagatcacacaaaga

SEQ ID NO: 56943 - RNA, 27 nt, synthetic construct
  misc_feature 1..27: note = Heterogeneous nuclear ribonucleoproteins A2/B1 (139-147)
  source 1..27: mol_type = other RNA
gacaccatcgagattataacagataga

SEQ ID NO: 56944 - RNA, 27 nt, synthetic construct
  misc_feature 1..27: note = Translocon-associated protein subunit beta isoform X1 (107-115)
  source 1..27: mol_type = other RNA
gacgtgagccacaccgtcgttctgaga

SEQ ID NO: 56945 - RNA, 27 nt, synthetic construct
  misc_feature 1..27: note = Actin, aortic smooth muscle (366-374)
  source 1..27: mol_type = other RNA
gaggccggccccagcatcgtgcacaga

SEQ ID NO: 56946 - RNA, 27 nt, synthetic construct
  misc_feature 1..27: note = Fructose-bisphosphate aldolase A (35-43)
  source 1..27: mol_type = other RNA
gagagcaccggctccatcgccaagaga

SEQ ID NO: 56947 - RNA, 27 nt, synthetic construct
  misc_feature 1..27: note = SH3 domain-binding glutamic acid-rich-like protein 3 (23-31)
  source 1..27: mol_type = other RNA
gaggtgaccagaatcctggacggcaag

SEQ ID NO: 56948 - RNA, 48 nt, synthetic construct
  misc_feature 1..48: note = HLA class II histocompatibility antigen, DRB1-4 beta chain (62-77)
  source 1..48: mol_type = other RNA
caccaggaggaatacgtgagattcgacagcgatgtcggcgagtatagg

SEQ ID NO: 56949 - RNA, 45 nt, synthetic construct
  misc_feature 1..45: note = Sodium/potassium-transporting ATPase subunit alpha-1 (60-74)
  source 1..45: mol_type = other RNA
atcgtggtctacaccggcgacagaacagttatggggaggattgcc

SEQ ID NO: 56950 - RNA, 48 nt, synthetic construct
  misc_feature 1..48: note = NEDD4 family-interacting protein 1 (63-78)
  source 1..48: mol_type = other RNA
aagccccctagctacaacgtggccaccacactgccatcctatgacgag

SEQ ID NO: 56951 - RNA, 27 nt, synthetic construct
  misc_feature 1..27: note = Keratin, type I cytoskeletal 18 (32-40)
  source 1..27: mol_type = other RNA
agactggccagctacctcgacagggtg

SEQ ID NO: 56952 - RNA, 27 nt, synthetic construct
  misc_feature 1..27: note = 60S ribosomal protein L24 (86-94)
  source 1..27: mol_type = other RNA
agcctggccgacatcatggctaagaga

SEQ ID NO: 56953 - RNA, 33 nt, synthetic construct
  misc_feature 1..33: note = HLA class I histocompatibility antigen, Cw-4 alpha chain (133-143)
  source 1..33: mol_type = other RNA
accgccgctgacacagcagcccagatcactaga

SEQ ID NO: 56954 - RNA, 30 nt, synthetic construct; identical to SEQ ID NO: 32727
  misc_feature 1..30: note = WD repeat-containing protein 6 (462-471)
  source 1..30: mol_type = other RNA

SEQ ID NO: 56955 - RNA, 27 nt, synthetic construct
  misc_feature 1..27: note = Fatty acid-binding protein, liver (114-122)
  source 1..27: mol_type = other RNA
accctgggcgacatcgtgttcaagaga

SEQ ID NO: 56956 - RNA, 27 nt, synthetic construct
  misc_feature 1..27: note = Actin, aortic smooth muscle (204-212)
  source 1..27: mol_type = other RNA
accacagccgagagagaaatcgtgagg

SEQ ID NO: 56957 - RNA, 27 nt, synthetic construct
  misc_feature 1..27: note = Polymeric immunoglobulin receptor (656-664)
  source 1..27: mol_type = other RNA
gtggccgtcggcgttgctagagcaagg

SEQ ID NO: 56958 - RNA, 27 nt, synthetic construct
  misc_feature 1..27: note = DAZ-associated protein 2 (63-71)
  source 1..27: mol_type = other RNA
gccgctttccccggcgcaagcctgtac

SEQ ID NO: 56959 - RNA, 27 nt, synthetic construct
  misc_feature 1..27: note = Kelch-like protein 24 (576-584)
  source 1..27: mol_type = other RNA
gccgctatgcccagacctgtgagctac

SEQ ID NO: 56960 - RNA, 27 nt, synthetic construct
  misc_feature 1..27: note = Lck-interacting transmembrane adapter 1 (159-167)
  source 1..27: mol_type = other RNA
gccgctagccccgtggtcgcagagtac

SEQ ID NO: 56961 - RNA, 27 nt, synthetic construct
  misc_feature 1..27: note = Cysteine-rich protein 2-binding protein (154-162)
  source 1..27: mol_type = other RNA
gccttcatcgagaagcactggaccttt

SEQ ID NO: 56962 - RNA, 27 nt, synthetic construct
  misc_feature 1..27: note = Bifunctional 3'-phosphoadenosine 5'-phosphosulfate synthase 2 (479-487)
  source 1..27: mol_type = other RNA
gccatcttccccagccctatgctgtac

SEQ ID NO: 56963 - RNA, 27 nt, synthetic construct
  misc_feature 1..27: note = Bifunctional 3'-phosphoadenosine 5'-phosphosulfate synthase 1 (488-496)
  source 1..27: mol_type = other RNA
gccatcttccccagccctatgatgtac

SEQ ID NO: 56964 - RNA, 27 nt, synthetic construct
  misc_feature 1..27: note = Phosphatidylinositol 5-phosphate 4-kinase type-2 alpha (356-364)
  source 1..27: mol_type = other RNA
gccatcattgacatactgacccactac

SEQ ID NO: 56965 - RNA, 30 nt, synthetic construct
  misc_feature 1..30: note = Calsyntenin-3 (69-78)
  source 1..30: mol_type = other RNA
gccctggacaaggatgctcccctcagatac

SEQ ID NO: 56966 - RNA, 27 nt, synthetic construct
  misc_feature 1..27: note = Ras-related protein Rab-20 (156-164)
  source 1..27: mol_type = other RNA
gccctgtacaagaaaatcctcaagtat

SEQ ID NO: 56967 - RNA, 27 nt, synthetic construct
  misc_feature 1..27: note = Structure-specific endonuclease subunit SLX4 (1765-1773)
  source 1..27: mol_type = other RNA
gccctgtaccagaaggtgctcctttat

SEQ ID NO: 56968 - RNA, 33 nt, synthetic construct
  misc_feature 1..33: note = Myosin regulatory light polypeptide 9 (24-34)
  source 1..33: mol_type = other RNA
gccatgttcgaccagagccaaatccaggagttt

SEQ ID NO: 56969 - RNA, 27 nt, synthetic construct
  misc_feature 1..27: note = 60S ribosomal protein L6 (61-69)
  source 1..27: mol_type = other RNA
gccatgtacagcagaaaggctatgtat

SEQ ID NO: 56970 - RNA, 27 nt, synthetic construct
  misc_feature 1..27: note = Junction plakoglobin (472-480)
  source 1..27: mol_type = other RNA
gcccagaacagcgtgagactgaattac

SEQ ID NO: 56971 - RNA, 27 nt, synthetic construct
  misc_feature 1..27: note = Protein transport protein Sec23B (125-133)
  source 1..27: mol_type = other RNA
gcccagagccccctgatcttcctctac

SEQ ID NO: 56972 - RNA, 27 nt, synthetic construct
  misc_feature 1..27: note = Centrosome-associated protein 350 (330-338)
  source 1..27: mol_type = other RNA
gccaccgctccccctgcaccagcctac

SEQ ID NO: 56973 - RNA, 27 nt, synthetic construct
  misc_feature 1..27: note = Protein transport protein Sec31A (61-69)
  source 1..27: mol_type = other RNA
gccaccttcagctcctctcacagatac

SEQ ID NO: 56974 - RNA, 30 nt, synthetic construct
  misc_feature 1..30: note = E3 ubiquitin/ISG15 ligase TRIM25 (592-601)
  source 1..30: mol_type = other RNA
gccgtggctgacaaggtccacctgatgtac

SEQ ID NO: 56975 - RNA, 27 nt, synthetic construct
  misc_feature 1..27: note = StAR-related lipid transfer protein 5 (12-20)
  source 1..27: mol_type = other RNA
gccgtggctgagaagatgctgcagtac

SEQ ID NO: 56976 - RNA, 27 nt, synthetic construct
  misc_feature 1..27: note = WASH complex subunit 7 (624-632)
  source 1..27: mol_type = other RNA
gccgtggacgctgcaagactgcactac

SEQ ID NO: 56977 - RNA, 30 nt, synthetic construct; identical to SEQ ID NO: 32750
  misc_feature 1..30: note = Nuclear pore membraneoprotein 210 (497-506)
  source 1..30: mol_type = other RNA

SEQ ID NO: 56978 - RNA, 27 nt, synthetic construct
  misc_feature 1..27: note = Lysocardiolipin acyltransferase 1 (91-99)
  source 1..27: mol_type = other RNA
gccgtgcacgacatcaccgtcgcttac

SEQ ID NO: 56979 - RNA, 30 nt, synthetic construct; identical to SEQ ID NO: 32752
  misc_feature 1..30: note = Methylsterol monooxygenase 1 (15-24)
  source 1..30: mol_type = other RNA

SEQ ID NO: 56980 - RNA, 27 nt, synthetic construct
  misc_feature 1..27: note = V-type proton ATPase subunit d 1 (111-119)
  source 1..27: mol_type = other RNA
gcctacctggagagcttctataagttt

SEQ ID NO: 56981 - RNA, 27 nt, synthetic construct
  misc_feature 1..27: note = Protein S100-A9 (67-75)
  source 1..27: mol_type = other RNA
gacaccaacgccgataagcagctgagc

SEQ ID NO: 56982 - RNA, 27 nt, synthetic construct
  misc_feature 1..27: note = Transcription elongation factor SPT6 (339-347)
  source 1..27: mol_type = other RNA
gacgtgtacaaccacttcctgctctat

SEQ ID NO: 56983 - RNA, 27 nt, synthetic construct
  misc_feature 1..27: note = MOB kinase activator 1A (175-183)
  source 1..27: mol_type = other RNA
gaggaagcccacctgaacaccagcttc

SEQ ID NO: 56984 - RNA, 27 nt, synthetic construct
  misc_feature 1..27: note = HLA class II histocompatibility antigen, DP alpha 1 chain (43-51)
  source 1..27: mol_type = other RNA
gaggaattcggccaggcctttagcttc

SEQ ID NO: 56985 - RNA, 27 nt, synthetic construct
  misc_feature 1..27: note = Protein arginine N-methyltransferase 1 (319-327)
  source 1..27: mol_type = other RNA
gaggaaatcttcggcaccattgggatg

SEQ ID NO: 56986 - RNA, 30 nt, synthetic construct
  misc_feature 1..30: note = Puromycin-sensitive aminopeptidase-like protein (113-122)
  source 1..30: mol_type = other RNA
gaggaaatccacgccaccggcttcaactac

SEQ ID NO: 56987 - RNA, 30 nt, synthetic construct
  misc_feature 1..30: note = Myocyte-specific enhancer factor 2D (127-136)
  source 1..30: mol_type = other RNA
gaggaactggacggcctcttcagaaggtac

SEQ ID NO: 56988 - RNA, 27 nt, synthetic construct
  misc_feature 1..27: note = Ribosomal RNA processing protein 36 homolog (132-140)
  source 1..27: mol_type = other RNA
gaggtgttcgacaagacctaccagttt

SEQ ID NO: 56989 - RNA, 27 nt, synthetic construct
  misc_feature 1..27: note = G1/S-specific cyclin-D3 (26-34)
  source 1..27: mol_type = other RNA
gaggtgttccccctggccatgaactac

SEQ ID NO: 56990 - RNA, 27 nt, synthetic construct
  misc_feature 1..27: note = Golgi resident protein GCP60 (490-498)
  source 1..27: mol_type = other RNA
gaggtgtacgccggcagccaccagtat

SEQ ID NO: 56991 - RNA, 27 nt, synthetic construct
  misc_feature 1..27: note = Dipeptidyl peptidase 1 (375-383)
  source 1..27: mol_type = other RNA
gaggtgtacgacgatttcctgcactat

SEQ ID NO: 56992 - RNA, 27 nt, synthetic construct
  misc_feature 1..27: note = Sphingolipid delta(4)-desaturase DES1 (176-184)
  source 1..27: mol_type = other RNA
ttcatcaaccccaagcctattacctac

SEQ ID NO: 56993 - RNA, 27 nt, synthetic construct
  misc_feature 1..27: note = Histone acetyltransferase KAT6A (600-608)
  source 1..27: mol_type = other RNA
ttcctggaccacaagaccctctactat

SEQ ID NO: 56994 - RNA, 27 nt, synthetic construct
  misc_feature 1..27: note = Putative ATP-dependent RNA helicase DHX57 (392-400)
  source 1..27: mol_type = other RNA
ttcctgtacgacaaggccctcaccttt

SEQ ID NO: 56995 - RNA, 27 nt, synthetic construct
  misc_feature 1..27: note = Calnexin (230-238)
  source 1..27: mol_type = other RNA
ttcaccgacaagaaaacacacctgtac

SEQ ID NO: 56996 - RNA, 30 nt, synthetic construct; identical to SEQ ID NO: 32769
  misc_feature 1..30: note = Histone-arginine methyltransferase CARM1 (584-593)
  source 1..30: mol_type = other RNA

SEQ ID NO: 56997 - RNA, 42 nt, synthetic construct
  misc_feature 1..42: note = Myosin regulatory light chain 12A (164-177)
  source 1..42: mol_type = other RNA
ttcaccagaatcctgaagcacggcgccaaagacaaggatgac

SEQ ID NO: 56998 - RNA, 27 nt, synthetic construct
  misc_feature 1..27: note = Plastin-3 (324-332)
  source 1..27: mol_type = other RNA
ttcgtggccaacctgtttaataagtac

SEQ ID NO: 56999 - RNA, 33 nt, synthetic construct
  misc_feature 1..33: note = U5 small nuclear ribonucleoprotein 200 kDa helicase (1845-1855)
  source 1..33: mol_type = other RNA
ttcgtggcccccgctaccggcgcacacaactac

SEQ ID NO: 57000 - RNA, 42 nt, synthetic construct
  misc_feature 1..42: note = Cytochrome c oxidase subunit NDUFA4 (19-32)
  source 1..42: mol_type = other RNA
ttcgtgtttatcggcaccggggccacaggagctactctgtac

SEQ ID NO: 57001 - RNA, 27 nt, synthetic construct
  misc_feature 1..27: note = Ras-related protein Rab-5B (92-100)
  source 1..27: mol_type = other RNA
ttcgtgaagggccagtttcacgagtac

SEQ ID NO: 57002 - RNA, 27 nt, synthetic construct
  misc_feature 1..27: note = COP9 signalosome complex subunit 6 (275-283)
  source 1..27: mol_type = other RNA
ttcgtgaacaagtttaatgtcctgtac

SEQ ID NO: 57003 - RNA, 30 nt, synthetic construct
  misc_feature 1..30: note = Probable ATP-dependent RNA helicase DDX5 (549-558)
  source 1..30: mol_type = other RNA
ttcgtgagcgccggcatccagacctccttt

SEQ ID NO: 57004 - RNA, 30 nt, synthetic construct
  misc_feature 1..30: note = Transmembrane protein 258 (37-46)
  source 1..30: mol_type = other RNA
ttcgtgtacgaggtcaccagcacaaagtat

SEQ ID NO: 57005 - RNA, 36 nt, synthetic construct
  misc_feature 1..36: note = Dermcidin (97-108)
  source 1..36: mol_type = other RNA
ggcgccgtgcacgacgtcaaggatgttctggacagc

SEQ ID NO: 57006 - RNA, 27 nt, synthetic construct
  misc_feature 1..27: note = Vacuolar protein sorting-associated protein 51 homolog (121-129)
  source 1..27: mol_type = other RNA
ggcgcctacgggcaggctgtgagatat

SEQ ID NO: 57007 - RNA, 27 nt, synthetic construct
  misc_feature 1..27: note = Histone H2B type 2-F (76-84)
  source 1..27: mol_type = other RNA
ggcgaggccagcagactggctcactac

SEQ ID NO: 57008 - RNA, 27 nt, synthetic construct
  misc_feature 1..27: note = RING finger and transmembrane domain-containing protein 2 (264-272)
  source 1..27: mol_type = other RNA
ggcatcgccgacttcgtgctgaagtac

SEQ ID NO: 57009 - RNA, 36 nt, synthetic construct
  misc_feature 1..36: note = Myosin-9 (1952-1963)
  source 1..36: mol_type = other RNA
ggcaaggccgacggggctgaggcaaaacccgccgaa

SEQ ID NO: 57010 - RNA, 27 nt, synthetic construct
  misc_feature 1..27: note = Inositol 1,4,5-trisphosphate receptor type 3 (2333-2341)
  source 1..27: mol_type = other RNA
ggcctgttcgcccacgagctcttttac

SEQ ID NO: 57011 - RNA, 27 nt, synthetic construct
  misc_feature 1..27: note = E3 ubiquitin-protein ligase TRIM56 (486-494)
  source 1..27: mol_type = other RNA
ggcctgctccccagacctatcttctac

SEQ ID NO: 57012 - RNA, 27 nt, synthetic construct
  misc_feature 1..27: note = Protein transport protein Sec16A (1463-1471)
  source 1..27: mol_type = other RNA
ggcctgtgggggcacgccctccttctg

SEQ ID NO: 57013 - RNA, 27 nt, synthetic construct
  misc_feature 1..27: note = DNA repair protein complementing XP-C cells (639-647)
  source 1..27: mol_type = other RNA
ggcctgtacaagaaccaccccctctat

SEQ ID NO: 57014 - RNA, 42 nt, synthetic construct
  misc_feature 1..42: note = Heterogeneous nuclear ribonucleoproteins A2/B1 (241-254)
  source 1..42: mol_type = other RNA
ggcaactacgggagcggaaattataacgacttcggtaattac

SEQ ID NO: 57015 - RNA, 24 nt, synthetic construct
  misc_feature 1..24: note = HLA class I histocompatibility antigen, B-15 alpha chain (25-32)
  source 1..24: mol_type = other RNA
ggcagccactccatgagatacttc

SEQ ID NO: 57016 - RNA, 27 nt, synthetic construct
  misc_feature 1..27: note = HLA class I histocompatibility antigen, B-35 alpha chain (25-33)
  source 1..27: mol_type = other RNA
ggcagccactccatgagatacttctat

SEQ ID NO: 57017 - RNA, 27 nt, synthetic construct
  misc_feature 1..27: note = Heterogeneous nuclear ribonucleoprotein A1 (310-318)
  source 1..27: mol_type = other RNA
ggcagctacaacgacttcgggaattat

SEQ ID NO: 57018 - RNA, 27 nt, synthetic construct
  misc_feature 1..27: note = E3 ubiquitin-protein ligase MARCH6 (620-628)
  source 1..27: mol_type = other RNA
ggcaccgccaagatccacgagctgtac

SEQ ID NO: 57019 - RNA, 27 nt, synthetic construct
  misc_feature 1..27: note = DNA topoisomerase 2-beta (560-568)
  source 1..27: mol_type = other RNA
ggcaccgccacaaagcacctgacttac

SEQ ID NO: 57020 - RNA, 27 nt, synthetic construct
  misc_feature 1..27: note = Filamin-A (2181-2189)
  source 1..27: mol_type = other RNA
ggcacccacacagtgagcgtcaagtac

SEQ ID NO: 57021 - RNA, 27 nt, synthetic construct
  misc_feature 1..27: note = Ubiquitin-conjugating enzyme E2 C (71-79)
  source 1..27: mol_type = other RNA
ggcaccgtgtacgaggacctgagatat

SEQ ID NO: 57022 - RNA, 30 nt, synthetic construct; identical to SEQ ID NO: 32795
  misc_feature 1..30: note = Cold shock domain-containing protein E1 (28-37)
  source 1..30: mol_type = other RNA

SEQ ID NO: 57023 - RNA, 39 nt, synthetic construct
  misc_feature 1..39: note = ADP-ribosylation factor GTPase-activating protein 2 (469-481)
  source 1..39: mol_type = other RNA
ggcgtgatgaacagcctgcaggacagatacgggtcctat

SEQ ID NO: 57024 - RNA, 27 nt, synthetic construct
  misc_feature 1..27: note = Bardet-Biedl syndrome 2 protein (227-235)
  source 1..27: mol_type = other RNA
ggcgtgtacgacaagaccagcagatat

SEQ ID NO: 57025 - RNA, 27 nt, synthetic construct
  misc_feature 1..27: note = Coatomer subunit alpha (633-641)
  source 1..27: mol_type = other RNA
ggctaccccgaggtggccctgcacttc

SEQ ID NO: 57026 - RNA, 33 nt, synthetic construct
  misc_feature 1..33: note = Protein S100-A8 (27-37)
  source 1..33: mol_type = other RNA
cacgccgtgtacagagacgatctgaagaaactc

SEQ ID NO: 57027 - RNA, 27 nt, synthetic construct
  misc_feature 1..27: note = Zinc finger protein 608 (1347-1355)
  source 1..27: mol_type = other RNA
cacgcctacccctatcctcagatgtac

SEQ ID NO: 57028 - RNA, 27 nt, synthetic construct
  misc_feature 1..27: note = Sphingolipid delta(4)-desaturase DES1 (228-236)
  source 1..27: mol_type = other RNA
cacttcatcgccgagcattacatgttt

SEQ ID NO: 57029 - RNA, 27 nt, synthetic construct
  misc_feature 1..27: note = BTB/POZ domain-containing protein KCTD1 (41-49)
  source 1..27: mol_type = other RNA
cacatcgacgtgggcgggcatatgtac

SEQ ID NO: 57030 - RNA, 27 nt, synthetic construct
  misc_feature 1..27: note = RNA-binding protein with serine-rich domain 1 (176-184)
  source 1..27: mol_type = other RNA
cacatcatggagattttcagcacctac

SEQ ID NO: 57031 - RNA, 27 nt, synthetic construct
  misc_feature 1..27: note = Laminin subunit beta-3 (1158-1166)
  source 1..27: mol_type = other RNA
cacatcaacggcagagtgctgtactat

SEQ ID NO: 57032 - RNA, 27 nt, synthetic construct
  misc_feature 1..27: note = UDP-N-acetylglucosamine-dolichyl-phosphate N-acetylglucosaminephosphotransferase (55-63)
  source 1..27: mol_type = other RNA
cacctggacctcggcatcctttactat

SEQ ID NO: 57033 - RNA, 27 nt, synthetic construct
  misc_feature 1..27: note = Nuclear pore complex protein Nup205 (240-248)
  source 1..27: mol_type = other RNA
cacctgtacggcagcctcctttattac

SEQ ID NO: 57034 - RNA, 27 nt, synthetic construct
  misc_feature 1..27: note = DAZ-associated protein 1 (397-405)
  source 1..27: mol_type = other RNA
cacaacgtgcagggcttccatccctac

SEQ ID NO: 57035 - RNA, 27 nt, synthetic construct
  misc_feature 1..27: note = pre-mRNA 3' end processing protein WDR33 (19-27)
  source 1..27: mol_type = other RNA
caccaggcccccagacaactgttctac

SEQ ID NO: 57036 - RNA, 27 nt, synthetic construct
  misc_feature 1..27: note = Nuclear receptor corepressor 2 (34-42)
  source 1..27: mol_type = other RNA
cacaccgacgtgggcctgctcgagtac

SEQ ID NO: 57037 - RNA, 27 nt, synthetic construct
  misc_feature 1..27: note = Ribosomal protein S6 kinase alpha-1 (517-525)
  source 1..27: mol_type = other RNA
cacaccatcggcaagacagtggagtac

SEQ ID NO: 57038 - RNA, 27 nt, synthetic construct
  misc_feature 1..27: note = Type II inositol 3,4-bisphosphate 4-phosphatase (657-665)
  source 1..27: mol_type = other RNA
cacaccgtgggcctgatcgtccagtac

SEQ ID NO: 57039 - RNA, 30 nt, synthetic construct
  misc_feature 1..30: note = Zinc finger CCHC domain-containing protein 14 (172-181)
  source 1..30: mol_type = other RNA
cacgtggacctggatagcggcctcagatac

SEQ ID NO: 57040 - RNA, 33 nt, synthetic construct
  misc_feature 1..33: note = Prefoldin subunit 5 (94-104)
  source 1..33: mol_type = other RNA
cacgtgctgatcgacgtcggcaccgggtactat

SEQ ID NO: 57041 - RNA, 27 nt, synthetic construct
  misc_feature 1..27: note = Erythroid differentiation-related factor 1 (370-378)
  source 1..27: mol_type = other RNA
cacgtgaacggcatcgtccagaagtac

SEQ ID NO: 57042 - RNA, 30 nt, synthetic construct
  misc_feature 1..30: note = Protein prenyltransferase alpha subunit repeat-containing protein 1 (213-222)
  source 1..30: mol_type = other RNA
cacgtgagcgaccattccggcttccactac

SEQ ID NO: 57043 - RNA, 27 nt, synthetic construct
  misc_feature 1..27: note = Peroxisomal membrane protein PEX14 (119-127)
  source 1..27: mol_type = other RNA
atcgccttcggctttcaccagctgtac

SEQ ID NO: 57044 - RNA, 27 nt, synthetic construct
  misc_feature 1..27: note = Protein FAM134C (153-161)
  source 1..27: mol_type = other RNA
atcttcattagaaacgtgctgctcttt

SEQ ID NO: 57045 - RNA, 27 nt, synthetic construct
  misc_feature 1..27: note = Probable ATP-dependent RNA helicase DDX5 (604-612)
  source 1..27: mol_type = other RNA
atcggctaccccatgcctaccgggtat

SEQ ID NO: 57046 - RNA, 27 nt, synthetic construct
  misc_feature 1..27: note = Dolichol kinase (352-360)
  source 1..27: mol_type = other RNA
atcattttcgacagacccctgctctac

SEQ ID NO: 57047 - RNA, 27 nt, synthetic construct
  misc_feature 1..27: note Dolichyl-diphosphooligosaccharide-proteinosyltransferase subunit 2 (410-418)
  source 1..27: mol_type = other RNA
atcctgagccccctccttctgttgttc

SEQ ID NO: 57048 - RNA, 33 nt, synthetic construct
  misc_feature 1..33: note = Beta-2-microglobulin (21-31)
  source 1..33: mol_type = other RNA
atccagagaacccccaagattcaagtgtacagc

SEQ ID NO: 57049 - RNA, 39 nt, synthetic construct
  misc_feature 1..39: note = Beta-2-microglobulin (21-33)
  source 1..39: mol_type = other RNA
atccagagaacccccaagattcaagtgtacagcaggcac

SEQ ID NO: 57050 - RNA, 27 nt, synthetic construct
  misc_feature 1..27: note = HLA class I histocompatibility antigen, B-52 alpha chain (90-98)
  source 1..27: mol_type = other RNA
atcagcaagaccaacacacagacttac

SEQ ID NO: 57051 - RNA, 33 nt, synthetic construct
  misc_feature 1..33: note = Eukaryotic peptide chain release factor subunit 1 (307-317)
  source 1..33: mol_type = other RNA
atcgtgtacgagaacctggacattatgagatat

SEQ ID NO: 57052 - RNA, 27 nt, synthetic construct
  misc_feature 1..27: note = Cyclin-H (138-146)
  source 1..27: mol_type = other RNA
aaggccctggagcagatcctcgaatac

SEQ ID NO: 57053 - RNA, 30 nt, synthetic construct
  misc_feature 1..30: note = Proliferating cell nuclear antigen (240-249)
  source 1..30: mol_type = other RNA
aagatcgccgacatgggccacctgaaatac

SEQ ID NO: 57054 - RNA, 27 nt, synthetic construct
  misc_feature 1..27: note = Protein LAP2 (282-290)
  source 1..27: mol_type = other RNA
aagatcgacgagaaccagctgatgtac

SEQ ID NO: 57055 - RNA, 27 nt, synthetic construct
  misc_feature 1..27: note = Beta-2-microglobulin (90-98)
  source 1..27: mol_type = other RNA
aagatcgtgaaatgggacagagatatg

SEQ ID NO: 57056 - RNA, 30 nt, synthetic construct
  misc_feature 1..30: note = Ras GTPase-activating-like protein IQGAP1 (94-103)
  source 1..30: mol_type = other RNA
aagatctacgacagagagcagaccaggtat

SEQ ID NO: 57057 - RNA, 27 nt, synthetic construct
  misc_feature 1..27: note = Phosphorylated CTD-interacting factor 1 (363-371)
  source 1..27: mol_type = other RNA
aagatctaccacattagcctggagtat

SEQ ID NO: 57058 - RNA, 27 nt, synthetic construct
  misc_feature 1..27: note = Cytoplasmic FMR1-interacting protein 1 (739-747)
  source 1..27: mol_type = other RNA
aagctggccgaccagatcttcgcttac

SEQ ID NO: 57059 - RNA, 30 nt, synthetic construct
  misc_feature 1..30: note = Cytoplasmic FMR1-interacting protein 1 (739-748)
  source 1..30: mol_type = other RNA
aagctggccgaccagatcttcgcttactat

SEQ ID NO: 57060 - RNA, 27 nt, synthetic construct
  misc_feature 1..27: note = Golgi-associated PDZ and coiled-coil motif-containing protein (394-402)
  source 1..27: mol_type = other RNA
aagctggacgatctccacaccctttac

SEQ ID NO: 57061 - RNA, 42 nt, synthetic construct
  misc_feature 1..42: note = Oxysterol-binding protein-related protein 8 (705-718)
  source 1..42: mol_type = other RNA
aagctgttcgagctcgacccccttaccggcgaatggcactac

SEQ ID NO: 57062 - RNA, 30 nt, synthetic construct
  misc_feature 1..30: note = SHC SH2 domain-binding protein 1 (262-271)
  source 1..30: mol_type = other RNA
aagctgatcgagaaccccctccttagatac

SEQ ID NO: 57063 - RNA, 27 nt, synthetic construct
  misc_feature 1..27: note = Proteasome subunit alpha type (67-75)
  source 1..27: mol_type = other RNA
aagctgaacgagtacctccttcagtat

SEQ ID NO: 57064 - RNA, 27 nt, synthetic construct
  misc_feature 1..27: note = Protein farnesyltransferase/geranylgeranyltransferase type-1 subunit alpha (211-219)
  source 1..27: mol_type = other RNA
aagctgtgggacaacgagctccagtac

SEQ ID NO: 57065 - RNA, 27 nt, synthetic construct
  misc_feature 1..27: note = Crooked neck-like protein 1 (615-623)
  source 1..27: mol_type = other RNA
aagctgtacgagaaattcctcgaattt

SEQ ID NO: 57066 - RNA, 27 nt, synthetic construct
  misc_feature 1..27: note = Tetratricopeptide repeat protein 21B (693-701)
  source 1..27: mol_type = other RNA
aagatggccgacatctacctgaaacac

SEQ ID NO: 57067 - RNA, 27 nt, synthetic construct
  misc_feature 1..27: note = SPRY domain-containing protein 3 (14-22)
  source 1..27: mol_type = other RNA
aagatggacgatctgaacctccactac

SEQ ID NO: 57068 - RNA, 27 nt, synthetic construct
  misc_feature 1..27: note = Phosphatidylinositol 4-kinase alpha (321-329)
  source 1..27: mol_type = other RNA
aagatgctgagagacaccctctactat

SEQ ID NO: 57069 - RNA, 27 nt, synthetic construct
  misc_feature 1..27: note = Platelet-activating factor acetylhydrolase IB subunit alpha (95-103)
  source 1..27: mol_type = other RNA
aagatgtgggaggtgcagaccggctac

SEQ ID NO: 57070 - RNA, 30 nt, synthetic construct
  misc_feature 1..30: note = Clathrin heavy chain 1 (1209-1218)
  source 1..30: mol_type = other RNA
aagatgtacgacgccgctaaactgctctat

SEQ ID NO: 57071 - RNA, 27 nt, synthetic construct
  misc_feature 1..27: note = Elongation factor Tu GTP-binding domain-containing protein 1 (71-79)
  source 1..27: mol_type = other RNA
aagagctccgccatctctctgcactac

SEQ ID NO: 57072 - RNA, 27 nt, synthetic construct
  misc_feature 1..27: note = Elongation factor 2 (71-79)
  source 1..27: mol_type = other RNA
aagagcaccgccatctccctgttctac

SEQ ID NO: 57073 - RNA, 27 nt, synthetic construct
  misc_feature 1..27: note = Flotillin-2 (214-222)
  source 1..27: mol_type = other RNA
aagaccgccgaggctcagctggcatac

SEQ ID NO: 57074 - RNA, 27 nt, synthetic construct
  misc_feature 1..27: note = Cytoplasmic dynein 1 heavy chain 1 (2633-2641)
  source 1..27: mol_type = other RNA
aagaccttcgaccactactgcgagtat

SEQ ID NO: 57075 - RNA, 27 nt, synthetic construct
  misc_feature 1..27: note = Protein RMD5 homolog B (13-21)
  source 1..27: mol_type = other RNA
aaggtgctgcagaaattcctcacctac

SEQ ID NO: 57076 - RNA, 27 nt, synthetic construct
  misc_feature 1..27: note = Probable E3 ubiquitin-protein ligase HECTD4 (700-708)
  source 1..27: mol_type = other RNA
aaggtgctgagcagagccctcatgtac

SEQ ID NO: 57077 - RNA, 27 nt, synthetic construct
  misc_feature 1..27: note = Cartilage-associated protein (329-337)
  source 1..27: mol_type = other RNA
aaggtgatgcagcaaaacctggtctac

SEQ ID NO: 57078 - RNA, 27 nt, synthetic construct
  misc_feature 1..27: note = KIF1-binding protein (205-213)
  source 1..27: mol_type = other RNA
aaggtgtacacccacaacctgtattac

SEQ ID NO: 57079 - RNA, 30 nt, synthetic construct
  misc_feature 1..30: note = Protein S100-A9 (66-75)
  source 1..30: mol_type = other RNA
ctggacaccaacgccgataagcagctcagc

SEQ ID NO: 57080 - RNA, 24 nt, synthetic construct
  misc_feature 1..24: note = Engulfment and cell motility protein 2 (574-581)
  source 1..24: mol_type = other RNA
ctgaaccacaaggtgctccattac

SEQ ID NO: 57081 - RNA, 27 nt, synthetic construct
  misc_feature 1..27: note = CDNA FLJ25829 fis, clone TST08126 (128-136)
  source 1..27: mol_type = other RNA
atgaccgccaagctgcagacaccctac

SEQ ID NO: 57082 - RNA, 27 nt, synthetic construct
  misc_feature 1..27: note = HLA class II histocompatibility antigen, DQ alpha 1 chain (247-255)
  source 1..27: mol_type = other RNA
aacgccgctgagagaaggggccccctg

SEQ ID NO: 57083 - RNA, 27 nt, synthetic construct
  misc_feature 1..27: note = Heat shock protein beta-1 (177-185)
  source 1..27: mol_type = other RNA
aacgagatcaccattcccgtgacattc

SEQ ID NO: 57084 - RNA, 27 nt, synthetic construct
  misc_feature 1..27: note = Serpin B12 (169-177)
  source 1..27: mol_type = other RNA
aacaagacccagacaatcctgttctac

SEQ ID NO: 57085 - RNA, 27 nt, synthetic construct
  misc_feature 1..27: note = S1 RNA-binding domain-containing protein 1 (240-248)
  source 1..27: mol_type = other RNA
aacaccatccccttcattataagatac

SEQ ID NO: 57086 - RNA, 42 nt, synthetic construct
  misc_feature 1..42: note = Mediator of RNA polymerase II transcription subunit 12 (2010-2023)
  source 1..42: mol_type = other RNA
aacacccagccccaacctagcacaaatatcttcggcagatac

SEQ ID NO: 57087 - RNA, 27 nt, synthetic construct
  misc_feature 1..27: note = Agrin (56-64)
  source 1..27: mol_type = other RNA
aacgtggaccccgtccagcacacctac

SEQ ID NO: 57088 - RNA, 27 nt, synthetic construct
  misc_feature 1..27: note = Abhydrolase domain-containing protein 2 (306-314)
  source 1..27: mol_type = other RNA
aacgtgatgagaaagttccacggctac

SEQ ID NO: 57089 - RNA, 30 nt, synthetic construct
  misc_feature 1..30: note = Tubulin beta chain (103-112)
  source 1..30: mol_type = other RNA
cagatcttcagacccgacaactttgtgttc

SEQ ID NO: 57090 - RNA, 27 nt, synthetic construct
  misc_feature 1..27: note = WD repeat-containing protein 19 (527-535)
  source 1..27: mol_type = other RNA
cagctgtacgagaagggcctctattac

SEQ ID NO: 57091 - RNA, 27 nt, synthetic construct
  misc_feature 1..27: note = Serine/threonine-protein phosphatase 2A 56 kDa regulatory subunit epsilon isoform (358-366)
  source 1..27: mol_type = other RNA
caggtggccgagagagctctgtactat

SEQ ID NO: 57092 - RNA, 30 nt, synthetic construct; identical to SEQ ID NO: 32865
  misc_feature 1..30: note = Muskelin (626-635)
  source 1..30: mol_type = other RNA

SEQ ID NO: 57093 - RNA, 27 nt, synthetic construct
  misc_feature 1..27: note = Coatomer subunit beta' (136-144)
  source 1..27: mol_type = other RNA
caggtgttcgagggccacacccattac

SEQ ID NO: 57094 - RNA, 27 nt, synthetic construct
  misc_feature 1..27: note = DNA polymerase epsilon subunit 3 (39-47)
  source 1..27: mol_type = other RNA
agagccgctagcgtgttcgtcctgtac

SEQ ID NO: 57095 - RNA, 27 nt, synthetic construct
  misc_feature 1..27: note = Histone H2B type 1-A (94-102)
  source 1..27: mol_type = other RNA
agagagatccagaccgccgtgaggctg

SEQ ID NO: 57096 - RNA, 27 nt, synthetic construct
  misc_feature 1..27: note = 26S proteasome non-ATPase regulatory subunit 3 (294-302)
  source 1..27: mol_type = other RNA
agaatcaaggccattcagctggagtac

SEQ ID NO: 57097 - RNA, 33 nt, synthetic construct
  misc_feature 1..33: note = DNA polymerase delta catalytic subunit (386-396)
  source 1..33: mol_type = other RNA
agaatcatggaccccgatgtgattaccggctac

SEQ ID NO: 57098 - RNA, 27 nt, synthetic construct
  misc_feature 1..27: note = Protein TASOR (185-193)
  source 1..27: mol_type = other RNA
agactggacgataagaaattcctctac

SEQ ID NO: 57099 - RNA, 27 nt, synthetic construct
  misc_feature 1..27: note = F-box only protein 7 (266-274)
  source 1..27: mol_type = other RNA
agactgttcaaggaccagctcgtgtac

SEQ ID NO: 57100 - RNA, 33 nt, synthetic construct
  misc_feature 1..33: note = Zinc finger protein 419 (43-53)
  source 1..33: mol_type = other RNA
agactgctcgacgatgcccagaggcttctgtac

SEQ ID NO: 57101 - RNA, 27 nt, synthetic construct
  misc_feature 1..27: note = Angiomotin (17-25)
  source 1..27: mol_type = other RNA
agactgctccaggagcaacttaggtac

SEQ ID NO: 57102 - RNA, 27 nt, synthetic construct
  misc_feature 1..27: note = Protein Smaug homolog 2 (103-111)
  source 1..27: mol_type = other RNA
agactgctccagaaggtgcttgcctac

SEQ ID NO: 57103 - RNA, 27 nt, synthetic construct
  misc_feature 1..27: note = N-acetylgalactosamine-6-sulfatase (376-384)
  source 1..27: mol_type = other RNA
agactgatggacaggcccatcttctac

SEQ ID NO: 57104 - RNA, 27 nt, synthetic construct
  misc_feature 1..27: note = Beta-catenin-like protein 1 (330-338)
  source 1..27: mol_type = other RNA
agactgatggagctccacttcaagtac

SEQ ID NO: 57105 - RNA, 27 nt, synthetic construct
  misc_feature 1..27: note = Mitochondrial folate transporter/carrier (251-259)
  source 1..27: mol_type = other RNA
agactgcaggaccaacacatgttctac

SEQ ID NO: 57106 - RNA, 27 nt, synthetic construct
  misc_feature 1..27: note = Probable C-mannosyltransferase DPY19L3 (411-419)
  source 1..27: mol_type = other RNA
agactgagcgacaccctccttttctac

SEQ ID NO: 57107 - RNA, 27 nt, synthetic construct
  misc_feature 1..27: note = Vacuolar protein sorting-associated protein 4A (30-38)
  source 1..27: mol_type = other RNA
agactgtaccagcacgccgtggagtat

SEQ ID NO: 57108 - RNA, 33 nt, synthetic construct
  misc_feature 1..33: note = Src substrate cortactin (94-104)
  source 1..33: mol_type = other RNA
agaatggacaagagcgccgtgggccacgagtac

SEQ ID NO: 57109 - RNA, 27 nt, synthetic construct
  misc_feature 1..27: note = ATP-dependent RNA helicase DDX42 (292-300)
  source 1..27: mol_type = other RNA
agaatgttcgacatgggctttgagtac

SEQ ID NO: 57110 - RNA, 27 nt, synthetic construct
  misc_feature 1..27: note = Signal peptidase complex catalytic subunit SEC11A (12-20)
  source 1..27: mol_type = other RNA
agaatgaacaagaggcagctgtactat

SEQ ID NO: 57111 - RNA, 27 nt, synthetic construct
  misc_feature 1..27: note = 60S ribosomal protein L24 (47-55)
  source 1..27: mol_type = other RNA
agacagatcaactggaccgtgctgtac

SEQ ID NO: 57112 - RNA, 39 nt, synthetic construct
  misc_feature 1..39: note = Annexin A5 (245-257)
  source 1..39: mol_type = other RNA
agaagcatccccgcctacctggctgagaccctctattac

SEQ ID NO: 57113 - RNA, 27 nt, synthetic construct
  misc_feature 1..27: note = Nuclear pore complex protein Nup160 (729-737)
  source 1..27: mol_type = other RNA
agaaccgcccccctgctccttagctac

SEQ ID NO: 57114 - RNA, 30 nt, synthetic construct
  misc_feature 1..30: note = Matrin-3 (149-158)
  source 1..30: mol_type = other RNA
agaaccgaggaaggccccacactgagctac

SEQ ID NO: 57115 - RNA, 27 nt, synthetic construct
  misc_feature 1..27: note = 26S proteasome non-ATPase regulatory subunit 2 (673-681)
  source 1..27: mol_type = other RNA
agaaccttcggccacctgctcaggtac

SEQ ID NO: 57116 - RNA, 27 nt, synthetic construct
  misc_feature 1..27: note = Tyrosine-protein phosphatase non-receptor type 23 (1272-1280)
  source 1..27: mol_type = other RNA
agaaccggcgccttcgctctgctctac

SEQ ID NO: 57117 - RNA, 27 nt, synthetic construct
  misc_feature 1..27: note = Msx2-interacting protein (176-184)
  source 1..27: mol_type = other RNA
agaaccctgcagcacggcctctactat

SEQ ID NO: 57118 - RNA, 27 nt, synthetic construct
  misc_feature 1..27: note = NFX1-type zinc finger-containing protein 1 (334-342)
  source 1..27: mol_type = other RNA
agaaccatgcccatctaccctacatat

SEQ ID NO: 57119 - RNA, 27 nt, synthetic construct
  misc_feature 1..27: note = UPF0505 protein C16orf62 (929-937)
  source 1..27: mol_type = other RNA
agaaccatggtgaagacactggagtac

SEQ ID NO: 57120 - RNA, 36 nt, synthetic construct
  misc_feature 1..36: note = DNA damage-regulated autophagy modulator protein 2 (236-247)
  source 1..36: mol_type = other RNA
agagtggaggccaacctgcacggcctcaccctttac

SEQ ID NO: 57121 - RNA, 39 nt, synthetic construct
  misc_feature 1..39: note = Eukaryotic translation initiation factor 3 subunit C-like protein (873-885)
  source 1..39: mol_type = other RNA
agagtgttcgaccacaagcagggcacctacgggggatat

SEQ ID NO: 57122 - RNA, 30 nt, synthetic construct
  misc_feature 1..30: note = Semaphorin-4C (339-348)
  source 1..30: mol_type = other RNA
agagtgttcgagggcccctacaaggaatat

SEQ ID NO: 57123 - RNA, 27 nt, synthetic construct
  misc_feature 1..27: note = Niemann-Pick C1 protein (1077-1085)
  source 1..27: mol_type = other RNA
agagtgttcccctacagcgtcttttat

SEQ ID NO: 57124 - RNA, 33 nt, synthetic construct
  misc_feature 1..33: note = 26S protease regulatory subunit 4 (249-259)
  source 1..33: mol_type = other RNA
agagtggtcggcagcgagctgatccagaagtac

SEQ ID NO: 57125 - RNA, 27 nt, synthetic construct
  misc_feature 1..27: note = HLA class II histocompatibility antigen, DRB1-4 beta chain (123-131)
  source 1..27: mol_type = other RNA
agagtgtaccccgaggtcaccgtttat

SEQ ID NO: 57126 - RNA, 27 nt, synthetic construct
  misc_feature 1..27: note = Sorting nexin-17 (432-440)
  source 1..27: mol_type = other RNA
agcgcctccgacgtgcacggcaacttc

SEQ ID NO: 57127 - RNA, 27 nt, synthetic construct
  misc_feature 1..27: note = Splicing factor 3B subunit 3 (351-359)
  source 1..27: mol_type = other RNA
agcgagttcggcaaccactacctgtat

SEQ ID NO: 57128 - RNA, 27 nt, synthetic construct
  misc_feature 1..27: note = Mitotic checkpoint protein BUB3 (241-249)
  source 1..27: mol_type = other RNA
agcttccacaacatccataataccttt

SEQ ID NO: 57129 - RNA, 27 nt, synthetic construct
  misc_feature 1..27: note = Transmembrane 9 superfamily member 2 (545-553)
  source 1..27: mol_type = other RNA
agcatctggtcccaccagatgtactat

SEQ ID NO: 57130 - RNA, 30 nt, synthetic construct
  misc_feature 1..30: note = Vimentin (87-96)
  source 1..30: mol_type = other RNA
agcctggccgacgctatcaacaccgagttc

SEQ ID NO: 57131 - RNA, 30 nt, synthetic construct
  misc_feature 1..30: note = Protein PRRC1 (47-56)
  source 1..30: mol_type = other RNA
agcatggagtccttcccccctctggcctac

SEQ ID NO: 57132 - RNA, 27 nt, synthetic construct
  misc_feature 1..27: note = Heterogeneous nuclear ribonucleoprotein A1 (304-312)
  source 1..27: mol_type = other RNA
agcaacttcggcgggggaggttcctac

SEQ ID NO: 57133 - RNA, 36 nt, synthetic construct
  misc_feature 1..36: note = Cyclin-dependent kinase 19 (490-501)
  source 1..36: mol_type = other RNA
agccagtaccacccctcccatcaagcccacagatat

SEQ ID NO: 57134 - RNA, 27 nt, synthetic construct
  misc_feature 1..27: note = Pre-mRNA-splicing factor ATP-dependent RNA helicase DHX15 (227-235)
  source 1..27: mol_type = other RNA
agctccgccaagaccatcctgaaatac

SEQ ID NO: 57135 - RNA, 27 nt, synthetic construct
  misc_feature 1..27: note = Probable glutamate-tRNA ligase, mitochondrial (249-257)
  source 1..27: mol_type = other RNA
agcaccgccaagcacctgctcctttac

SEQ ID NO: 57136 - RNA, 27 nt, synthetic construct
  misc_feature 1..27: note = Chondroitin sulfate proteoglycan 4 (745-753)
  source 1..27: mol_type = other RNA
agcaccgacccccagcaccatgcctac

SEQ ID NO: 57137 - RNA, 27 nt, synthetic construct
  misc_feature 1..27: note = Peroxisomal carnitine O-octanoyltransferase (8-16)
  source 1..27: mol_type = other RNA
agcaccgaggaaagaacattccagtac

SEQ ID NO: 57138 - RNA, 33 nt, synthetic construct
  misc_feature 1..33: note = WD repeat-containing protein 44 (34-44)
  source 1..33: mol_type = other RNA
agcaccttcaaggagacagaaaacactgcctac

SEQ ID NO: 57139 - RNA, 27 nt, synthetic construct
  misc_feature 1..27: note = Serine/threonine-protein kinase mTOR (1766-1774)
  source 1..27: mol_type = other RNA
agcaccatccccaaggtgctgcagtac

SEQ ID NO: 57140 - RNA, 27 nt, synthetic construct
  misc_feature 1..27: note = ADP-ribosylation factor GTPase-activating protein 3 (97-105)
  source 1..27: mol_type = other RNA
agcaccaacgacacaaatgccaagtac

SEQ ID NO: 57141 - RNA, 33 nt, synthetic construct
  misc_feature 1..33: note = Cytochrome c oxidase subunit 1 (9-19)
  source 1..33: mol_type = other RNA
agcaccaaccacaaggacatcggcacactgtac

SEQ ID NO: 57142 - RNA, 27 nt, synthetic construct
  misc_feature 1..27: note = Syntaxin-binding protein 1 (511-519)
  source 1..27: mol_type = other RNA
agcaccacagccgtgtccgctagatac

SEQ ID NO: 57143 - RNA, 27 nt, synthetic construct
  misc_feature 1..27: note = Regulator of microtubule dynamics protein 1 (209-217)
  source 1..27: mol_type = other RNA
agcacctacgagaaggccctgggctat

SEQ ID NO: 57144 - RNA, 27 nt, synthetic construct
  misc_feature 1..27: note = GPI transamidase component PIG-S (261-269)
  source 1..27: mol_type = other RNA
agcgtggactcccagatcctgtactat

SEQ ID NO: 57145 - RNA, 27 nt, synthetic construct
  misc_feature 1..27: note = Ubiquitin-protein ligase E3C (150-158)
  source 1..27: mol_type = other RNA
agcgtgatcgagcagattctgcactac

SEQ ID NO: 57146 - RNA, 27 nt, synthetic construct
  misc_feature 1..27: note = Transcription elongation regulator 1 (419-427)
  source 1..27: mol_type = other RNA
accgccgacggcaagacatactattac

SEQ ID NO: 57147 - RNA, 27 nt, synthetic construct
  misc_feature 1..27: note = Sorting nexin-9 (146-154)
  source 1..27: mol_type = other RNA
accgccttcggccacccccaggcttac

SEQ ID NO: 57148 - RNA, 27 nt, synthetic construct
  misc_feature 1..27: note = Heterogeneous nuclear ribonucleoprotein F (301-309)
  source 1..27: mol_type = other RNA
accgagaacgacatctacaatttcttt

SEQ ID NO: 57149 - RNA, 36 nt, synthetic construct; identical to SEQ ID NO: 32922
  misc_feature 1..36: note = N-acetylglucosamine-6-sulfatase (192-203)
  source 1..36: mol_type = other RNA

SEQ ID NO: 57150 - RNA, 33 nt, synthetic construct
  misc_feature 1..33: note = Thymosin beta-4 (34-44)
  source 1..33: mol_type = other RNA
accatcgagcaggaaaagcaagccggcgagagc

SEQ ID NO: 57151 - RNA, 27 nt, synthetic construct
  misc_feature 1..27: note = Integral membrane protein GPR155 (369-377)
  source 1..27: mol_type = other RNA
accatggaccccaagcctctggcctac

SEQ ID NO: 57152 - RNA, 27 nt, synthetic construct
  misc_feature 1..27: note = Intraflagellar transport protein 122 homolog (937-945)
  source 1..27: mol_type = other RNA
accatgctgggcaagttctaccacttt

SEQ ID NO: 57153 - RNA, 33 nt, synthetic construct
  misc_feature 1..33: note = Cytochrome c oxidase subunit 2 (182-192)
  source 1..33: mol_type = other RNA
accacattcactgccacgagacccggcgtgtac

SEQ ID NO: 57154 - RNA, 36 nt, synthetic construct
  misc_feature 1..36: note = Cytochrome c oxidase subunit 2 (182-193)
  source 1..36: mol_type = other RNA
accacattcactgccacgagacccggcgtgtactat

SEQ ID NO: 57155 - RNA, 27 nt, synthetic construct
  misc_feature 1..27: note = Calponin-3 (136-144)
  source 1..27: mol_type = other RNA
accacaatcgacattggcgtgaagtac

SEQ ID NO: 57156 - RNA, 27 nt, synthetic construct
  misc_feature 1..27: note = E3 ubiquitin/ISG15 ligase TRIM25 (593-601)
  source 1..27: mol_type = other RNA
gtggccgacaaggtccacctgatgtac

SEQ ID NO: 57157 - RNA, 27 nt, synthetic construct
  misc_feature 1..27: note = T-complex protein 1 subunit eta (127-135)
  source 1..27: mol_type = other RNA
gtggccttcaagaaaacctttagctac

SEQ ID NO: 57158 - RNA, 27 nt, synthetic construct
  misc_feature 1..27: note = General transcription factor II-I (324-332)
  source 1..27: mol_type = other RNA
gtggaggaactgttcgagagaaagtac

SEQ ID NO: 57159 - RNA, 27 nt, synthetic construct
  misc_feature 1..27: note = Inactive hydroxysteroid dehydrogenase-like protein 1 (133-141)
  source 1..27: mol_type = other RNA
gtgttctacccctatcctcagtacttt

SEQ ID NO: 57160 - RNA, 27 nt, synthetic construct
  misc_feature 1..27: note = NADH dehydrogenase (ubiquinone) 1 alpha subcomplex subunit 3 (30-38)
  source 1..27: mol_type = other RNA
gtgatcctgccccctctcagcccatac

SEQ ID NO: 57161 - RNA, 27 nt, synthetic construct
  misc_feature 1..27: note = Tribbles homolog 3 (126-134)
  source 1..27: mol_type = other RNA
gtgctggccggcacccagctcctttac

SEQ ID NO: 57162 - RNA, 27 nt, synthetic construct
  misc_feature 1..27: note = Transketolase (50-58)
  source 1..27: mol_type = other RNA
gtgctgttctttcacaccatgagatac

SEQ ID NO: 57163 - RNA, 27 nt, synthetic construct
  misc_feature 1..27: note = Unconventional myosin-Id (415-423)
  source 1..27: mol_type = other RNA
gtgctgaagcaggagcaagaagagtac

SEQ ID NO: 57164 - RNA, 27 nt, synthetic construct
  misc_feature 1..27: note = Calcyclin-binding protein (63-71)
  source 1..27: mol_type = other RNA
gtggtcgcccccatcaccacaggctac

SEQ ID NO: 57165 - RNA, 27 nt, synthetic construct
  misc_feature 1..27: note = Nischarin (324-332)
  source 1..27: mol_type = other RNA
gtggtcgacaacctgcagcacctctac

SEQ ID NO: 57166 - RNA, 27 nt, synthetic construct
  misc_feature 1..27: note = F-box only protein 31 (26-34)
  source 1..27: mol_type = other RNA
gtgtacgccaagctgctccacagatat

SEQ ID NO: 57167 - RNA, 27 nt, synthetic construct
  misc_feature 1..27: note = DNA replication licensing factor MCM7 (101-109)
  source 1..27: mol_type = other RNA
gtgtacatcgagcacagactgatgatg

SEQ ID NO: 57168 - RNA, 27 nt, synthetic construct
  misc_feature 1..27: note = MORN repeat-containing protein 1 (31-39)
  source 1..27: mol_type = other RNA
gtgtaccccaacagcttctttagatat

SEQ ID NO: 57169 - RNA, 30 nt, synthetic construct
  misc_feature 1..30: note = Glycoprotein endo-alpha-1,2-mannosidase-like protein (101-110)
  source 1..30: mol_type = other RNA
gtgtacagcgacctgcacgccttctattac

SEQ ID NO: 57170 - RNA, 30 nt, synthetic construct; identical to SEQ ID NO: 32943
  misc_feature 1..30: note = Prolyl endopeptidase (178-187)
  source 1..30: mol_type = other RNA

SEQ ID NO: 57171 - RNA, 27 nt, synthetic construct
  misc_feature 1..27: note = Vimentin (53-61)
  source 1..27: mol_type = other RNA
tacgccagctcccccggcggggtgtat

SEQ ID NO: 57172 - RNA, 27 nt, synthetic construct
  misc_feature 1..27: note = NmrA-like family domain-containing protein 1 (73-81)
  source 1..27: mol_type = other RNA
tacgccaccttcatcgtgacaaactat

SEQ ID NO: 57173 - RNA, 27 nt, synthetic construct
  misc_feature 1..27: note = Leukocyte receptor cluster member 8 (111-119)
  source 1..27: mol_type = other RNA
tacgcctatccctacagctattactat

SEQ ID NO: 57174 - RNA, 36 nt, synthetic construct
  misc_feature 1..36: note = RNMT-activating mini protein (107-118)
  source 1..36: mol_type = other RNA
tacggctataaccagagacccccttacgggtattac

SEQ ID NO: 57175 - RNA, 27 nt, synthetic construct
  misc_feature 1..27: note = Serine/threonine-protein kinase NLK (415-423)
  source 1..27: mol_type = other RNA
tacctggacgagggcagactcaggtat

SEQ ID NO: 57176 - RNA, 27 nt, synthetic construct
  misc_feature 1..27: note = chromosome 1 open reading frame 9, isoform CRA_e (1086-1094)
  source 1..27: mol_type = other RNA
tacctggaggaactcagccagagatat

SEQ ID NO: 57177 - RNA, 27 nt, synthetic construct
  misc_feature 1..27: note = Chromodomain-helicase-DNA-binding protein 1-like (385-393)
  source 1..27: mol_type = other RNA
tacatggactatagaggctacagctat

SEQ ID NO: 57178 - RNA, 30 nt, synthetic construct
  misc_feature 1..30: note = RNMT-activating mini protein (109-118)
  source 1..30: mol_type = other RNA
tacaaccagagacccccttatggctactat

SEQ ID NO: 57179 - RNA, 30 nt, synthetic construct
  misc_feature 1..30: note = ATP-dependent RNA helicase DDX3X (643-652)
  source 1..30: mol_type = other RNA
tacaacagcgacggctatgggggaaattac

SEQ ID NO: 57180 - RNA, 27 nt, synthetic construct
  misc_feature 1..27: note = Histone acetyltransferase KAT6B (551-559)
  source 1..27: mol_type = other RNA
tacagctccccctatcctcaggagtac

SEQ ID NO: 57181 - RNA, 27 nt, synthetic construct
  misc_feature 1..27: note = RNA-binding protein EWS (21-29)
  source 1..27: mol_type = other RNA
tacaccgcccagcccacacaaggctat

SEQ ID NO: 57182 - RNA, 30 nt, synthetic construct
  misc_feature 1..30: note = Protein FAM26F (92-101)
  source 1..30: mol_type = other RNA
tacaccttcaaccccaagggccagtattac

SEQ ID NO: 57183 - RNA, 27 nt, synthetic construct
  misc_feature 1..27: note = MORN repeat-containing protein 2 (30-38)
  source 1..27: mol_type = other RNA
tacaccttccccaacggcgccaagtat

SEQ ID NO: 57184 - RNA, 27 nt, synthetic construct
  misc_feature 1..27: note = Probable ATP-dependent RNA helicase YTHDC2 (389-397)
  source 1..27: mol_type = other RNA
tacaccaacaaggagatgctgaaatat

SEQ ID NO: 57185 - RNA, 27 nt, synthetic construct
  misc_feature 1..27: note = Probable dolichyl pyrophosphate Glc1Man9GlcNAc2 alpha-1,3-glucosyltransferase (204-212)
  source 1..27: mol_type = other RNA
tacgtggcccccgcttatggcgtctac

SEQ ID NO: 57186 - RNA, 27 nt, synthetic construct
  misc_feature 1..27: note = Filamin-A (1581-1589)
  source 1..27: mol_type = other RNA
tacgtgcccgacgtcaccggcagatat

SEQ ID NO: 57187 - RNA, 27 nt, synthetic construct
  misc_feature 1..27: note = Leucine-rich repeat-containing protein 1 (26-34)
  source 1..27: mol_type = other RNA
tacgtgcccgaggaaatctatagatac

SEQ ID NO: 57188 - RNA, 27 nt, synthetic construct
  misc_feature 1..27: note = Ectopic P granules protein 5 homolog (664-672)
  source 1..27: mol_type = other RNA
tacgtgagcgaccactgggcccagtat

SEQ ID NO: 57189 - RNA, 27 nt, synthetic construct
  misc_feature 1..27: note = Sphingomyelin phosphodiesterase 2 (133-141)
  source 1..27: mol_type = other RNA
tacgtgacccacctgcatgccgagtat

SEQ ID NO: 57190 - RNA, 30 nt, synthetic construct
  misc_feature 1..30: note = MORN repeat-containing protein 1 (30-39)
  source 1..30: mol_type = other RNA
tacgtgtatcccaacagcttctttagatac

SEQ ID NO: 57191 - RNA, 27 nt, synthetic construct
  misc_feature 1..27: note = Protein polybromo-1 (132-140)
  source 1..27: mol_type = other RNA
tactataagcccgacagccctgagtac

SEQ ID NO: 57192 - RNA, 27 nt, synthetic construct
  misc_feature 1..27: note = V-type proton ATPase subunit d 1 (7-15)
  source 1..27: mol_type = other RNA
tactatcccgagtacaagctgctcttc

SEQ ID NO: 57193 - RNA, 51 nt, synthetic construct
  misc_feature 1..51: note = Calmodulin (133-149)
  source 1..51: mol_type = other RNA
ggcgacgggcaggtgaactacgaggaattcgtccaaatgatgaccgccaag

SEQ ID NO: 57194 - RNA, 69 nt, synthetic construct
  misc_feature 1..69: note = Myosin regulatory light chain 12B (150-172)
  source 1..69: mol_type = other RNA
aagaaaggcaacttcaattacatcgagtttaccagaattctgaagcacggggccaaagacaaggatgac

SEQ ID NO: 57195 - RNA, 63 nt, synthetic construct
  misc_feature 1..63: note = HLA class I histocompatibility antigen, B-55 alpha chain (52-72)
  source 1..63: mol_type = other RNA
gtggacgatacccagttcgtcagatttgacagcgatgccgcttcccccagggaggaacctcgg

SEQ ID NO: 57196 - RNA, 39 nt, synthetic construct
  misc_feature 1..39: note = Sorting nexin-6 (245-257)
  source 1..39: mol_type = other RNA
gccgctgacgattacaacagaatcggcagctccctgtat

SEQ ID NO: 57197 - RNA, 27 nt, synthetic construct
  misc_feature 1..27: note = Peptidyl-prolyl cis-trans isomerase-like 2 (27-35)
  source 1..27: mol_type = other RNA
gccatcgacgaggatgtgctgagatac

SEQ ID NO: 57198 - RNA, 27 nt, synthetic construct
  misc_feature 1..27: note = Nucleolar GTP-binding protein 2 (416-424)
  source 1..27: mol_type = other RNA
gccctggacgagaagatcgctaaatac

SEQ ID NO: 57199 - RNA, 30 nt, synthetic construct
  misc_feature 1..30: note = Serine/threonine-protein kinase MRCK alpha (1203-1212)
  source 1..30: mol_type = other RNA
gccctggacggcagagagaccgatttctac

SEQ ID NO: 57200 - RNA, 36 nt, synthetic construct
  misc_feature 1..36: note = Cleavage stimulation factor subunit 3 (120-131)
  source 1..36: mol_type = other RNA
gccctggacaagatcggcatggagattatgagctac

SEQ ID NO: 57201 - RNA, 36 nt, synthetic construct
  misc_feature 1..36: note = 2-oxoisovalerate dehydrogenase subunit alpha, mitochondrial (80-91)
  source 1..36: mol_type = other RNA
gccctggacaacaccgatctcgtgttcggccagtac

SEQ ID NO: 57202 - RNA, 39 nt, synthetic construct
  misc_feature 1..39: note = Structural maintenance of chromosomes protein 1A (1161-1173)
  source 1..39: mol_type = other RNA
gccctggacaacaccaatatcggcaaggtggctaactac

SEQ ID NO: 57203 - RNA, 27 nt, synthetic construct
  misc_feature 1..27: note = Ubiquitin-like modifier-activating enzyme 6 (331-339)
  source 1..27: mol_type = other RNA
gccctggaccagttccaagagaagtac

SEQ ID NO: 57204 - RNA, 27 nt, synthetic construct
  misc_feature 1..27: note = SWI/SNF-related matrix-associated actin-dependent regulator of chromatin subfamily A member 5 (920-928)
  source 1..27: mol_type = other RNA
gccctggacaccaagatcggcagatac

SEQ ID NO: 57205 - RNA, 27 nt, synthetic construct
  misc_feature 1..27: note = Eukaryotic translation initiation factor 3 subunit E (54-62)
  source 1..27: mol_type = other RNA
gccatggacgtgtacaagaacctgtat

SEQ ID NO: 57206 - RNA, 27 nt, synthetic construct
  misc_feature 1..27: note = SAFB-like transcription modulator (735-743)
  source 1..27: mol_type = other RNA
gccagattcggccacgggagcgactac

SEQ ID NO: 57207 - RNA, 30 nt, synthetic construct
  misc_feature 1..30: note = Putative heat shock protein HSP 90-beta 2 (88-97)
  source 1..30: mol_type = other RNA
gccagcgacgctctggataagatcagatac

SEQ ID NO: 57208 - RNA, 30 nt, synthetic construct
  misc_feature 1..30: note = Gelsolin (362-371)
  source 1..30: mol_type = other RNA
gccagcgacttcatcaccaagatggattac

SEQ ID NO: 57209 - RNA, 27 nt, synthetic construct
  misc_feature 1..27: note = Ubiquitin-like protein 3 (32-40)
  source 1..27: mol_type = other RNA
gccagcgacatcgctaagcacgtgtac

SEQ ID NO: 57210 - RNA, 33 nt, synthetic construct
  misc_feature 1..33: note = Proteasome-associated protein ECM29 homolog (1073-1083)
  source 1..33: mol_type = other RNA
gccagcgacctgtcccagcccgatctcgtgtac

SEQ ID NO: 57211 - RNA, 27 nt, synthetic construct
  misc_feature 1..27: note = Kelch repeat and BTB domain-containing protein 6 (147-155)
  source 1..27: mol_type = other RNA
gccagcgacatgctgcagctcgagtac

SEQ ID NO: 57212 - RNA, 27 nt, synthetic construct
  misc_feature 1..27: note = GPN-loop GTPase 2 (210-218)
  source 1..27: mol_type = other RNA
gccagcgaccccttctttagacactac

SEQ ID NO: 57213 - RNA, 33 nt, synthetic construct
  misc_feature 1..33: note = WD repeat-containing protein 81 (817-827)
  source 1..33: mol_type = other RNA
gccagcgaccccatccacaccttcgatctgtac

SEQ ID NO: 57214 - RNA, 27 nt, synthetic construct
  misc_feature 1..27: note = DNA-directed RNA polymerase II subunit RPB2 (1103-1111)
  source 1..27: mol_type = other RNA
gccagcgacccctaccaggtgcacgtc

SEQ ID NO: 57215 - RNA, 27 nt, synthetic construct
  misc_feature 1..27: note = DDB1- and CUL4-associated factor 13 (368-376)
  source 1..27: mol_type = other RNA
gccagcgacagaaacatcgtgctgtac

SEQ ID NO: 57216 - RNA, 30 nt, synthetic construct
  misc_feature 1..30: note = Probable ATP-dependent RNA helicase DHX37 (105-114)
  source 1..30: mol_type = other RNA
gccagcgaggctgaaatgagactgttctac

SEQ ID NO: 57217 - RNA, 36 nt, synthetic construct
  misc_feature 1..36: note = Platelet-activating factor acetylhydrolase IB subunit alpha (4-15)
  source 1..36: mol_type = other RNA
gccagcgaggacgctaccatcaaggtgtgggattac

SEQ ID NO: 57218 - RNA, 30 nt, synthetic construct; identical to SEQ ID NO: 32991
  misc_feature 1..30: note = T-complex protein 11-like protein 1 (271-280)
  source 1..30: mol_type = other RNA

SEQ ID NO: 57219 - RNA, 30 nt, synthetic construct
  misc_feature 1..30: note = Splicing factor 3B subunit 3 (350-359)
  source 1..30: mol_type = other RNA
gccagcgagttcggcaaccactacctgtat

SEQ ID NO: 57220 - RNA, 39 nt, synthetic construct
  misc_feature 1..39: note = Aspartate-tRNA ligase, cytoplasmic (226-238)
  source 1..39: mol_type = other RNA
gccagcgagggcggggctaacgtgttcaccgtctcctac

SEQ ID NO: 57221 - RNA, 42 nt, synthetic construct
  misc_feature 1..42: note = MAP kinase-activated protein kinase 2 (163-176)
  source 1..42: mol_type = other RNA
gccagcgagatcatgaagtccattggcgaagctatacagtac

SEQ ID NO: 57222 - RNA, 39 nt, synthetic construct
  misc_feature 1..39: note = Thyroid receptor-interacting protein 11 (84-96)
  source 1..39: mol_type = other RNA
gccagcgagatccagattaagcaacagtccacctcttac

SEQ ID NO: 57223 - RNA, 36 nt, synthetic construct
  misc_feature 1..36: note = Clusterin-associated protein 1 (160-171)
  source 1..36: mol_type = other RNA
gccagcgagatcacctccaagggcgcttctctgtac

SEQ ID NO: 57224 - RNA, 27 nt, synthetic construct
  misc_feature 1..27: note = Cleavage stimulation factor subunit 3 (70-78)
  source 1..27: mol_type = other RNA
gccagcgagctgaaggctctcggctac

SEQ ID NO: 57225 - RNA, 36 nt, synthetic construct
  misc_feature 1..36: note = DNA-dependent protein kinase catalytic subunit (2173-2184)
  source 1..36: mol_type = other RNA
gccagcgagaacaatggcggggaaggaatccactac

SEQ ID NO: 57226 - RNA, 30 nt, synthetic construct
  misc_feature 1..30: note = Exocyst complex component 4 (72-81)
  source 1..30: mol_type = other RNA
gccagcgagccctccgctcagctgtcttac

SEQ ID NO: 57227 - RNA, 36 nt, synthetic construct
  misc_feature 1..36: note = Nucleoporin NUP188 homolog (766-777)
  source 1..36: mol_type = other RNA
gccagcgagcagcaagctctgcacaccgtgcagtac

SEQ ID NO: 57228 - RNA, 33 nt, synthetic construct
  misc_feature 1..33: note = Ubiquitin carboxyl-terminal hydrolase 32 (141-151)
  source 1..33: mol_type = other RNA
gccagcgagaccgctggctccgggttcctgtac

SEQ ID NO: 57229 - RNA, 30 nt, synthetic construct
  misc_feature 1..30: note = Low-density lipoprotein receptor class A domain-containing protein 3 (250-259)
  source 1..30: mol_type = other RNA
gccagcgaggtgggctcccccccttcttac

SEQ ID NO: 57230 - RNA, 27 nt, synthetic construct
  misc_feature 1..27: note = Homeodomain-interacting protein kinase 2 (404-412)
  source 1..27: mol_type = other RNA
gccagcgagtacgaccagatcagatat

SEQ ID NO: 57231 - RNA, 36 nt, synthetic construct
  misc_feature 1..36: note = Amyloid protein-binding protein 2 (330-341)
  source 1..36: mol_type = other RNA
gccaccgctcacgaggacctggcatacagctcctat

SEQ ID NO: 57232 - RNA, 39 nt, synthetic construct
  misc_feature 1..39: note = Zinc finger protein 318 (1381-1393)
  source 1..39: mol_type = other RNA
gccaccgctaacgcaaaggacctgtacgatatcttctat

SEQ ID NO: 57233 - RNA, 39 nt, synthetic construct
  misc_feature 1..39: note = E3 ubiquitin-protein ligase BRE1B (85-97)
  source 1..39: mol_type = other RNA
gccaccgacgatgctacactgctcatcgtgaacagatac

SEQ ID NO: 57234 - RNA, 27 nt, synthetic construct
  misc_feature 1..27: note = O-acetyl-ADP-ribose deacetylase 1 (142-150)
  source 1..27: mol_type = other RNA
gccaccgacatcaagattacagtgtac

SEQ ID NO: 57235 - RNA, 27 nt, synthetic construct
  misc_feature 1..27: note = Coiled-coil domain-containing protein 141 (498-506)
  source 1..27: mol_type = other RNA
gccaccgacctggctcagcacctctac

SEQ ID NO: 57236 - RNA, 30 nt, synthetic construct
  misc_feature 1..30: note = Endoribonuclease Dicer (239-248)
  source 1..30: mol_type = other RNA
gccaccgacctggtggtcctcgatagatac

SEQ ID NO: 57237 - RNA, 30 nt, synthetic construct; identical to SEQ ID NO: 33010
  misc_feature 1..30: note = EVI5-like protein (131-140)
  source 1..30: mol_type = other RNA

SEQ ID NO: 57238 - RNA, 27 nt, synthetic construct
  misc_feature 1..27: note = Dystonin (4021-4029)
  source 1..27: mol_type = other RNA
gccaccgacagattcaggagcctgtac

SEQ ID NO: 57239 - RNA, 39 nt, synthetic construct
  misc_feature 1..39: note = MAP kinase-interacting serine/threonine-protein kinase 2 (71-83)
  source 1..39: mol_type = other RNA
gccaccgacagcttctccggcagatttgaggatgtgtac

SEQ ID NO: 57240 - RNA, 30 nt, synthetic construct
  misc_feature 1..30: note = Nicotinamide phosphoribosyltransferase (14-23)
  source 1..30: mol_type = other RNA
gccaccgacagctacaaggtgacacactat

SEQ ID NO: 57241 - RNA, 39 nt, synthetic construct
  misc_feature 1..39: note = Spectrin beta chain, non-erythrocytic 1 (6-18)
  source 1..39: mol_type = other RNA
gccaccgactacgataacatcgagattcagcaacagtat

SEQ ID NO: 57242 - RNA, 27 nt, synthetic construct
  misc_feature 1..27: note = Fibronectin type III domain-containing protein 3B (348-356)
  source 1..27: mol_type = other RNA
gccaccgactaccacgtgagagtctat

SEQ ID NO: 57243 - RNA, 33 nt, synthetic construct
  misc_feature 1..33: note = Coatomer subunit beta' (480-490)
  source 1..33: mol_type = other RNA
gccaccgaggaaagcttctttatcctgaagtac

SEQ ID NO: 57244 - RNA, 27 nt, synthetic construct
  misc_feature 1..27: note = Cytoplasmic dynein 1 heavy chain 1 (3596-3604)
  source 1..27: mol_type = other RNA
gccaccgagttcatcatgaacgaatac

SEQ ID NO: 57245 - RNA, 39 nt, synthetic construct
  misc_feature 1..39: note = T-complex protein 1 subunit theta (414-426)
  source 1..39: mol_type = other RNA
gccaccgagatcgaactggctaagcagattacaagctac

SEQ ID NO: 57246 - RNA, 42 nt, synthetic construct
  misc_feature 1..42: note = Protein PRRC2A (1894-1907)
  source 1..42: mol_type = other RNA
gccaccgagctgggcaagctccccgctgggggagtgctttac

SEQ ID NO: 57247 - RNA, 27 nt, synthetic construct
  misc_feature 1..27: note = Eukaryotic translation initiation factor 3 subunit D (422-430)
  source 1..27: mol_type = other RNA
gccaccgagctgaagaacaatagctac

SEQ ID NO: 57248 - RNA, 27 nt, synthetic construct
  misc_feature 1..27: note = Serine/threonine-protein kinase SMG1 (2701-2709)
  source 1..27: mol_type = other RNA
gccaccgagatgacactgcagagatac

SEQ ID NO: 57249 - RNA, 36 nt, synthetic construct
  misc_feature 1..36: note = Protein phosphatase 1G (149-160)
  source 1..36: mol_type = other RNA
gccaccatgacaatcgaggaactgctcactagatac

SEQ ID NO: 57250 - RNA, 33 nt, synthetic construct
  misc_feature 1..33: note = Alpha-catulin (401-411)
  source 1..33: mol_type = other RNA
gccacccagctggctgcagacctccttaagtac

SEQ ID NO: 57251 - RNA, 30 nt, synthetic construct
  misc_feature 1..30: note = 60S ribosomal protein L8 (27-36)
  source 1..30: mol_type = other RNA
gccgtggacttcgctgagagacacggctac

SEQ ID NO: 57252 - RNA, 30 nt, synthetic construct
  misc_feature 1..30: note = Nuclear pore complex protein Nup160 (1036-1045)
  source 1..30: mol_type = other RNA
gccgtggacctgatgacccacaactactat

SEQ ID NO: 57253 - RNA, 27 nt, synthetic construct
  misc_feature 1..27: note = Chromodomain-helicase-DNA-binding protein 8 (2348-2356)
  source 1..27: mol_type = other RNA
gccgtggaccccagattcctggcttac

SEQ ID NO: 57254 - RNA, 36 nt, synthetic construct
  misc_feature 1..36: note = Short transient receptor potential channel 4-associated protein (530-541)
  source 1..36: mol_type = other RNA
gccgtggagagcttcctgagaggcaccacatcctac

SEQ ID NO: 57255 - RNA, 30 nt, synthetic construct
  misc_feature 1..30: note = TOX high mobility group box family member 4 (107-116)
  source 1..30: mol_type = other RNA
gacctggatcacagcatcggcacccagtac

SEQ ID NO: 57256 - RNA, 33 nt, synthetic construct
  misc_feature 1..33: note = Nuclear factor of activated T-cells 5 (12-22)
  source 1..33: mol_type = other RNA
gacctggatctcgagagccccaagtccctttac

SEQ ID NO: 57257 - RNA, 27 nt, synthetic construct
  misc_feature 1..27: note = Myocyte-specific enhancer factor 2A (61-69)
  source 1..27: mol_type = other RNA
gacatggataaggtgctgctcaaatac

SEQ ID NO: 57258 - RNA, 30 nt, synthetic construct
  misc_feature 1..30: note = Elongator complex protein 5 (57-66)
  source 1..30: mol_type = other RNA
gacagcgatatcaacaatagactggtgtac

SEQ ID NO: 57259 - RNA, 36 nt, synthetic construct
  misc_feature 1..36: note = Tubulin beta chain (39-50)
  source 1..36: mol_type = other RNA
gacagcgatctgcagctcgacagaatctccgtgtac

SEQ ID NO: 57260 - RNA, 39 nt, synthetic construct
  misc_feature 1..39: note = Tubulin beta chain (39-51)
  source 1..39: mol_type = other RNA
gacagcgatctgcagctcgacagaatctccgtgtactat

SEQ ID NO: 57261 - RNA, 39 nt, synthetic construct
  misc_feature 1..39: note = Protein FAM13A (271-283)
  source 1..39: mol_type = other RNA
gacagcgatcccatgctgtcccctagattctacgcctat

SEQ ID NO: 57262 - RNA, 39 nt, synthetic construct
  misc_feature 1..39: note = Eukaryotic translation initiation factor 4B (229-241)
  source 1..39: mol_type = other RNA
gacagcgatagatacagggacggctatcgggatgggtac

SEQ ID NO: 57263 - RNA, 36 nt, synthetic construct
  misc_feature 1..36: note = Eukaryotic translation initiation factor 4 gamma 3 (1501-1512)
  source 1..36: mol_type = other RNA
gacagcgataccgagaaggaactgcaggccctctac

SEQ ID NO: 57264 - RNA, 36 nt, synthetic construct
  misc_feature 1..36: note = GPI transamidase component PIG-T (51-62)
  source 1..36: mol_type = other RNA
gacagcgagctgcagagagaaggcgtgtcccactac

SEQ ID NO: 57265 - RNA, 30 nt, synthetic construct
  misc_feature 1..30: note = Inositol 1,4,5-trisphosphate receptor type 1 (2098-2107)
  source 1..30: mol_type = other RNA
gacagcgagaacgccgaaagaatcctgtac

SEQ ID NO: 57266 - RNA, 27 nt, synthetic construct
  misc_feature 1..27: note = Transcription factor E2F3 (290-298)
  source 1..27: mol_type = other RNA
gacagcgagaaccagagactggcctac

SEQ ID NO: 57267 - RNA, 36 nt, synthetic construct
  misc_feature 1..36: note = Zinc finger MYND domain-containing protein 11 (140-151)
  source 1..36: mol_type = other RNA
gacagcgagcaggccgatatcgctagaatgctgtac

SEQ ID NO: 57268 - RNA, 27 nt, synthetic construct
  misc_feature 1..27: note = Tubulin-specific chaperone cofactor E-like protein (299-307)
  source 1..27: mol_type = other RNA
gacagcgagagattctttatcaggtac

SEQ ID NO: 57269 - RNA, 33 nt, synthetic construct
  misc_feature 1..33: note = Matrin-3 (233-243)
  source 1..33: mol_type = other RNA
gacagcttctttggcgagacctcccacaactac

SEQ ID NO: 57270 - RNA, 33 nt, synthetic construct
  misc_feature 1..33: note = Calcium and integrin-binding protein 1 (100-110)
  source 1..33: mol_type = other RNA
gacaccgccacacccgatatcaagagccactac

SEQ ID NO: 57271 - RNA, 36 nt, synthetic construct
  misc_feature 1..36: note = SAFB-like transcription modulator (732-743)
  source 1..36: mol_type = other RNA
gacaccgatgccagattcggccacgggagcgactac

SEQ ID NO: 57272 - RNA, 27 nt, synthetic construct
  misc_feature 1..27: note = Calnexin (92-100)
  source 1..27: mol_type = other RNA
gacaccgatgacgagatcgccaagtac

SEQ ID NO: 57273 - RNA, 30 nt, synthetic construct
  misc_feature 1..30: note = Phospholipid scramblase 4 (159-168)
  source 1..30: mol_type = other RNA
gacaccgatgacttcacaagaaacgcctac

SEQ ID NO: 57274 - RNA, 36 nt, synthetic construct
  misc_feature 1..36: note = Complex I intermediate-associated protein 30, mitochondrial (226-237)
  source 1..36: mol_type = other RNA
gacaccgatttctttcagagaacaaaccaaatgtac

SEQ ID NO: 57275 - RNA, 30 nt, synthetic construct
  misc_feature 1..30: note = Aspartate-tRNA ligase, cytoplasmic (384-393)
  source 1..30: mol_type = other RNA
gacaccgatttctacatcctggacaagtat

SEQ ID NO: 57276 - RNA, 27 nt, synthetic construct
  misc_feature 1..27: note = Replication protein A 70 kDa DNA-binding subunit (504-512)
  source 1..27: mol_type = other RNA
gacaccgagttccccaactttaagtac

SEQ ID NO: 57277 - RNA, 27 nt, synthetic construct
  misc_feature 1..27: note = Adenylyl cyclase-associated protein 1 (344-352)
  source 1..27: mol_type = other RNA
gacaccgagctgaagcaggtggcctac

SEQ ID NO: 57278 - RNA, 27 nt, synthetic construct
  misc_feature 1..27: note = Actin, cytoplasmic 2 (77-85)
  source 1..27: mol_type = other RNA
gacgtggatatcagaaaggacctgtac

SEQ ID NO: 57279 - RNA, 27 nt, synthetic construct
  misc_feature 1..27: note = Heterogeneous nuclear ribonucleoprotein C-like 1 (32-40)
  source 1..27: mol_type = other RNA
gacgtggaggccatcttcagcaagtac

SEQ ID NO: 57280 - RNA, 30 nt, synthetic construct
  misc_feature 1..30: note = Protein arginine N-methyltransferase 7 (368-377)
  source 1..30: mol_type = other RNA
gaggccgaaccccaccctctgtgggagtac

SEQ ID NO: 57281 - RNA, 27 nt, synthetic construct
  misc_feature 1..27: note = Melanoma-associated antigen D2 (338-346)
  source 1..27: mol_type = other RNA
gagatcgacaagaacgatcacctgtac

SEQ ID NO: 57282 - RNA, 33 nt, synthetic construct
  misc_feature 1..33: note = Annexin A1 (305-315)
  source 1..33: mol_type = other RNA
gagatcgacatgaacgatattaaggccttctac

SEQ ID NO: 57283 - RNA, 30 nt, synthetic construct; identical to SEQ ID NO: 33056
  misc_feature 1..30: note = LIM domain kinase 2 (716-725)
  source 1..30: mol_type = other RNA

SEQ ID NO: 57284 - RNA, 33 nt, synthetic construct
  misc_feature 1..33: note = NADPH-cytochrome P450 reductase (304-314)
  source 1..33: mol_type = other RNA
gagctggacatcagcgattccaagattagatac

SEQ ID NO: 57285 - RNA, 33 nt, synthetic construct; identical to SEQ ID NO: 33058
  misc_feature 1..33: note = Splicing factor 3B subunit 2 (811-821)
  source 1..33: mol_type = other RNA

SEQ ID NO: 57286 - RNA, 33 nt, synthetic construct; identical to SEQ ID NO: 33059
  misc_feature 1..33: note = Peptidyl-prolyl cis-trans isomerase D (301-311)
  source 1..33: mol_type = other RNA

SEQ ID NO: 57287 - RNA, 27 nt, synthetic construct
  misc_feature 1..27: note = Ankyrin repeat and IBR domain-containing protein 1 (229-237)
  source 1..27: mol_type = other RNA
gagctggacagattcatgcactactat

SEQ ID NO: 57288 - RNA, 27 nt, synthetic construct
  misc_feature 1..27: note = Plectin (502-510)
  source 1..27: mol_type = other RNA
gagctggaagacagcaccctcagatac

SEQ ID NO: 57289 - RNA, 30 nt, synthetic construct
  misc_feature 1..30: note = Small G protein signaling modulator 2 (307-316)
  source 1..30: mol_type = other RNA
gagctggaaaagagcgtgtactgggactat

SEQ ID NO: 57290 - RNA, 30 nt, synthetic construct
  misc_feature 1..30: note = GPI transamidase component PIG-T (53-62)
  source 1..30: mol_type = other RNA
gagctgcagagagaaggcgtgagccactac

SEQ ID NO: 57291 - RNA, 33 nt, synthetic construct
  misc_feature 1..33: note = 60S ribosomal protein L4 (254-264)
  source 1..33: mol_type = other RNA
gagagcgccttcagaaagctggacgaactctac

SEQ ID NO: 57292 - RNA, 30 nt, synthetic construct
  misc_feature 1..30: note = Protein-glutamate O-methyltransferase (101-110)
  source 1..30: mol_type = other RNA
gagagcgacggcaagtccagatggttctac

SEQ ID NO: 57293 - RNA, 27 nt, synthetic construct
  misc_feature 1..27: note = Guanine nucleotide-binding protein subunit beta-5 (239-247)
  source 1..27: mol_type = other RNA
gagagcgacatcaactccgtgagatac

SEQ ID NO: 57294 - RNA, 27 nt, synthetic construct
  misc_feature 1..27: note = Zinc transporter 5 (26-34)
  source 1..27: mol_type = other RNA
gagagcgactccagacagatcttctac

SEQ ID NO: 57295 - RNA, 42 nt, synthetic construct
  misc_feature 1..42: note = Proteasome activator complex subunit 3 (182-195)
  source 1..42: mol_type = other RNA
gagagcgaagccgcttcctacctggaccagatctctagatat

SEQ ID NO: 57296 - RNA, 36 nt, synthetic construct
  misc_feature 1..36: note = Myotubularin-related protein 5 (821-832)
  source 1..36: mol_type = other RNA
gagagcgaaaacagatcctacgagggcaccctgtat

SEQ ID NO: 57297 - RNA, 30 nt, synthetic construct
  misc_feature 1..30: note = Asparagine synthetase (glutamine-hydrolyzing) (389-398)
  source 1..30: mol_type = other RNA
gagagcgaaagactgctcagggagctttac

SEQ ID NO: 57298 - RNA, 33 nt, synthetic construct
  misc_feature 1..33: note = Peptidyl-prolyl cis-trans isomerase FKBP8 (167-177)
  source 1..33: mol_type = other RNA
gagaccgccatggtgacagctgacagcaagtac

SEQ ID NO: 57299 - RNA, 30 nt, synthetic construct
  misc_feature 1..30: note = Eyes absent homolog 3 (87-96)
  source 1..30: mol_type = other RNA
gagaccgcctaccccggccagacacaatat

SEQ ID NO: 57300 - RNA, 30 nt, synthetic construct
  misc_feature 1..30: note = ATP-dependent RNA helicase DDX24 (571-580)
  source 1..30: mol_type = other RNA
gagaccgacgaaaaggatttctacctgtat

SEQ ID NO: 57301 - RNA, 33 nt, synthetic construct
  misc_feature 1..33: note = TFIIH basal transcription factor complex helicase XPD subunit (251-261)
  source 1..33: mol_type = other RNA
gagaccgacgaacagagactgagggatgagtac

SEQ ID NO: 57302 - RNA, 30 nt, synthetic construct; identical to SEQ ID NO: 33075
  misc_feature 1..30: note = Nicotinamide riboside kinase 1 (46-55)
  source 1..30: mol_type = other RNA

SEQ ID NO: 57303 - RNA, 27 nt, synthetic construct
  misc_feature 1..27: note = RNA binding motif protein 22 (245-253)
  source 1..27: mol_type = other RNA
gagaccgacctgagaaaccacttctac

SEQ ID NO: 57304 - RNA, 42 nt, synthetic construct
  misc_feature 1..42: note = PCNA-interacting partner (146-159)
  source 1..42: mol_type = other RNA
gagaccgacctgagcatccccacatcccctacttctaagtac

SEQ ID NO: 57305 - RNA, 27 nt, synthetic construct
  misc_feature 1..27: note = Beta-mannosidase (118-126)
  source 1..27: mol_type = other RNA
gagaccgacaacatgttcaatagatac

SEQ ID NO: 57306 - RNA, 39 nt, synthetic construct
  misc_feature 1..39: note = Probable ATP-dependent RNA helicase DDX17 (61-73)
  source 1..39: mol_type = other RNA
gagaccgacagagccggctacgctaacgggagcggatat

SEQ ID NO: 57307 - RNA, 27 nt, synthetic construct
  misc_feature 1..27: note = Synergin gamma (1198-1206)
  source 1..27: mol_type = other RNA
gagaccgacagcttcaagctggcctac

SEQ ID NO: 57308 - RNA, 33 nt, synthetic construct
  misc_feature 1..33: note = Probable ATP-dependent RNA helicase DDX56 (239-249)
  source 1..33: mol_type = other RNA
gagaccgaagaggacaagttcctgctcctttac

SEQ ID NO: 57309 - RNA, 30 nt, synthetic construct
  misc_feature 1..30: note = Kremen protein 2 (104-113)
  source 1..30: mol_type = other RNA
gagaccgaagagggcatctactggagatat

SEQ ID NO: 57310 - RNA, 27 nt, synthetic construct
  misc_feature 1..27: note = Intron-binding protein aquarius (887-895)
  source 1..27: mol_type = other RNA
gagaccgaaaaggacttcagcagatac

SEQ ID NO: 57311 - RNA, 36 nt, synthetic construct
  misc_feature 1..36: note = Guanine nucleotide exchange factor VAV3 (683-694)
  source 1..36: mol_type = other RNA
gagaccgaactgatcaacagagtgaatagcacatac

SEQ ID NO: 57312 - RNA, 39 nt, synthetic construct
  misc_feature 1..39: note = DNA polymerase zeta catalytic subunit (827-839)
  source 1..39: mol_type = other RNA
gagaccgaacagagcttcggcctgtacgggaacaagtat

SEQ ID NO: 57313 - RNA, 33 nt, synthetic construct
  misc_feature 1..33: note = Protein transport protein Sec16A (1244-1254)
  source 1..33: mol_type = other RNA
gagaccgaaagattcagggagctgctcctttac

SEQ ID NO: 57314 - RNA, 27 nt, synthetic construct
  misc_feature 1..27: note = Dynamin-2 (455-463)
  source 1..27: mol_type = other RNA
gagaccgaaagaatcgtgacaacttac

SEQ ID NO: 57315 - RNA, 27 nt, synthetic construct
  misc_feature 1..27: note = Integrin alpha-3 (1043-1051)
  source 1..27: mol_type = other RNA
gagaccgaaagactgacagacgattac

SEQ ID NO: 57316 - RNA, 33 nt, synthetic construct
  misc_feature 1..33: note = DnaJ homolog subfamily C member 7 (29-39)
  source 1..33: mol_type = other RNA
gagaccttcaaggaacagggcaacgcctactat

SEQ ID NO: 57317 - RNA, 33 nt, synthetic construct
  misc_feature 1..33: note = HLA class I histocompatibility antigen, B-8 alpha chain (21-31)
  source 1..33: mol_type = other RNA
gagacctgggccggcagccactccatgagatac

SEQ ID NO: 57318 - RNA, 30 nt, synthetic construct
  misc_feature 1..30: note = Lamin-B1 (229-238)
  source 1..30: mol_type = other RNA
gaggtggacagcggcagacagatcgaatac

SEQ ID NO: 57319 - RNA, 30 nt, synthetic construct
  misc_feature 1..30: note = Fatty acid synthase (1244-1253)
  source 1..30: mol_type = other RNA
gaggtgctggccggccacgggcatctctac

SEQ ID NO: 57320 - RNA, 33 nt, synthetic construct
  misc_feature 1..33: note = Histone acetyltransferase type B catalytic subunit (191-201)
  source 1..33: mol_type = other RNA
ttcatcgacgtggatgacgagagatggcactac

SEQ ID NO: 57321 - RNA, 33 nt, synthetic construct
  misc_feature 1..33: note = Protein Smaug homolog 2 (118-128)
  source 1..33: mol_type = other RNA
ttcatcgaggaaagcagacagctgctctcctac

SEQ ID NO: 57322 - RNA, 36 nt, synthetic construct
  misc_feature 1..36: note = Interferon regulatory factor 2-binding protein-like (420-431)
  source 1..36: mol_type = other RNA
ttcatcgagtaccccaccggcagcgggaacgtgtat

SEQ ID NO: 57323 - RNA, 39 nt, synthetic construct
  misc_feature 1..39: note = Protein YIF1B (69-81)
  source 1..39: mol_type = other RNA
ttcctggccgaccccgtgagcaacatggctatggcatac

SEQ ID NO: 57324 - RNA, 27 nt, synthetic construct
  misc_feature 1..27: note = Asparagine synthetase (glutamine-hydrolyzing) (337-345)
  source 1..27: mol_type = other RNA
ttcctggaccacagatttagctcctac

SEQ ID NO: 57325 - RNA, 30 nt, synthetic construct; identical to SEQ ID NO: 33098
  misc_feature 1..30: note = Phosphatidylinositol-binding clathrin assembly protein (109-118)
  source 1..30: mol_type = other RNA

SEQ ID NO: 57326 - RNA, 33 nt, synthetic construct
  misc_feature 1..33: note = Rho GTPase-activating protein 35 (733-743)
  source 1..33: mol_type = other RNA
ttcctggaccccgccagcgctggcatcgggtac

SEQ ID NO: 57327 - RNA, 33 nt, synthetic construct
  misc_feature 1..33: note = Ubiquitin carboxyl-terminal hydrolase 8 (552-562)
  source 1..33: mol_type = other RNA
ttcctggaccccatcaccggcacatttagatac

SEQ ID NO: 57328 - RNA, 36 nt, synthetic construct
  misc_feature 1..36: note = Group XV phospholipase A2 (126-137)
  source 1..36: mol_type = other RNA
ttcctggaccccagcaagtcctctgtgggctcatac

SEQ ID NO: 57329 - RNA, 33 nt, synthetic construct
  misc_feature 1..33: note = Microtubule-associated protein 4 (103-113)
  source 1..33: mol_type = other RNA
ttcctggaggaaaagatggcctaccaggagtat

SEQ ID NO: 57330 - RNA, 36 nt, synthetic construct
  misc_feature 1..36: note = Histone H4 (31-42)
  source 1..36: mol_type = other RNA
ttcctggagaacgtgatcagagacgccgtcacctac

SEQ ID NO: 57331 - RNA, 30 nt, synthetic construct
  misc_feature 1..30: note = Adenylate cyclase type 3 (615-624)
  source 1..30: mol_type = other RNA
ttcatggaccccgagatggaaaccagatac

SEQ ID NO: 57332 - RNA, 30 nt, synthetic construct
  misc_feature 1..30: note = Probable C-mannosyltransferase DPY19L1 (397-406)
  source 1..30: mol_type = other RNA
ttcatggagaaggaaacccccctgagatac

SEQ ID NO: 57333 - RNA, 36 nt, synthetic construct
  misc_feature 1..36: note = Probable E3 ubiquitin-protein ligase HERC1 (402-413)
  source 1..36: mol_type = other RNA
ttcagcgacgcccagaccatcgaggctggccaatac

SEQ ID NO: 57334 - RNA, 30 nt, synthetic construct; identical to SEQ ID NO: 33107
  misc_feature 1..30: note = Iduronate 2-sulfatase (424-433)
  source 1..30: mol_type = other RNA

SEQ ID NO: 57335 - RNA, 33 nt, synthetic construct
  misc_feature 1..33: note = Iduronate 2-sulfatase (424-434)
  source 1..33: mol_type = other RNA
ttcagcgacatccacgccggcgagctgtacttt

SEQ ID NO: 57336 - RNA, 30 nt, synthetic construct; identical to SEQ ID NO: 33109
  misc_feature 1..30: note = Type 2 lactosamine alpha-2,3-sialyltransferase (283-292)
  source 1..30: mol_type = other RNA

SEQ ID NO: 57337 - RNA, 33 nt, synthetic construct
  misc_feature 1..33: note = Type 2 lactosamine alpha-2,3-sialyltransferase (175-185)
  source 1..33: mol_type = other RNA
ttcagcgacctgaagtcccccctccactactat

SEQ ID NO: 57338 - RNA, 33 nt, synthetic construct; identical to SEQ ID NO: 33111
  misc_feature 1..33: note = Rab GTPase-activating protein 1-like (338-348)
  source 1..33: mol_type = other RNA

SEQ ID NO: 57339 - RNA, 33 nt, synthetic construct
  misc_feature 1..33: note = DAZ-associated protein 1 (363-373)
  source 1..33: mol_type = other RNA
ttcagcgacccctcccagcaacctccatcttac

SEQ ID NO: 57340 - RNA, 27 nt, synthetic construct
  misc_feature 1..27: note = Nipped-B-like protein (37-45)
  source 1..27: mol_type = other RNA
ttcagcgactccaagatccagaaatac

SEQ ID NO: 57341 - RNA, 33 nt, synthetic construct
  misc_feature 1..33: note = Protein FAM65B (671-681)
  source 1..33: mol_type = other RNA
ttcagcgacaccgagacagaaaagcactcctac

SEQ ID NO: 57342 - RNA, 33 nt, synthetic construct
  misc_feature 1..33: note = Probable E3 ubiquitin-protein ligase HERC1 (3591-3601)
  source 1..33: mol_type = other RNA
ttcagcgaggacagaccctttgccgtgggctac

SEQ ID NO: 57343 - RNA, 30 nt, synthetic construct
  misc_feature 1..30: note = Programmed cell death protein 6 (82-91)
  source 1..30: mol_type = other RNA
ttcagcgagtttaccggcgtgtggaagtac

SEQ ID NO: 57344 - RNA, 27 nt, synthetic construct
  misc_feature 1..27: note = Ubiquitin carboxyl-terminal hydrolase 32 (135-143)
  source 1..27: mol_type = other RNA
ttcagcgagggcgaaaaggtgaactac

SEQ ID NO: 57345 - RNA, 33 nt, synthetic construct
  misc_feature 1..33: note = Heat shock protein HSP 90-beta (342-352)
  source 1..33: mol_type = other RNA
ttcagcgagctggccgaagacaaggagaactac

SEQ ID NO: 57346 - RNA, 33 nt, synthetic construct
  misc_feature 1..33: note = Uncharacterized protein C14orf119 (120-130)
  source 1..33: mol_type = other RNA
ttcagcgagcccgactttgtggccaagttctac

SEQ ID NO: 57347 - RNA, 33 nt, synthetic construct
  misc_feature 1..33: note = Fc receptor-like A (67-77)
  source 1..33: mol_type = other RNA
ttcagcgagccctttcacctgatcgtgtcctac

SEQ ID NO: 57348 - RNA, 27 nt, synthetic construct
  misc_feature 1..27: note = cAMP-dependent protein kinase catalytic subunit alpha (131-139)
  source 1..27: mol_type = other RNA
ttcagcgagccccacgccagattttac

SEQ ID NO: 57349 - RNA, 27 nt, synthetic construct
  misc_feature 1..27: note = Serine/threonine-protein kinase N1 (718-726)
  source 1..27: mol_type = other RNA
ttcagcgagcccagagccatcttttac

SEQ ID NO: 57350 - RNA, 33 nt, synthetic construct
  misc_feature 1..33: note = Protein C-ets-1 (175-185)
  source 1..33: mol_type = other RNA
ttcagcgagccctcctttatcaccgaatcttac

SEQ ID NO: 57351 - RNA, 27 nt, synthetic construct
  misc_feature 1..27: note = Protein RCC2 (314-322)
  source 1..27: mol_type = other RNA
ttcagcgagcaggtggccatgggctac

SEQ ID NO: 57352 - RNA, 36 nt, synthetic construct
  misc_feature 1..36: note = DNA ligase 3 (127-138)
  source 1..36: mol_type = other RNA
ttcagcgagtccggcggggacatgaaggaatggtac

SEQ ID NO: 57353 - RNA, 30 nt, synthetic construct
  misc_feature 1..30: note = ETS translocation variant 5 (318-327)
  source 1..30: mol_type = other RNA
ttcagctcctctcacgagggcttttcatac

SEQ ID NO: 57354 - RNA, 27 nt, synthetic construct
  misc_feature 1..27: note = FAS-associated factor 1 (337-345)
  source 1..27: mol_type = other RNA
ttcaccgccgagtttagctccagatac

SEQ ID NO: 57355 - RNA, 27 nt, synthetic construct
  misc_feature 1..27: note = Staphylococcal nuclease domain-containing protein 1 (607-615)
  source 1..27: mol_type = other RNA
ttcaccgccgagagaagctcctactat

SEQ ID NO: 57356 - RNA, 27 nt, synthetic construct
  misc_feature 1..27: note = LanC-like protein 1 (199-207)
  source 1..27: mol_type = other RNA
ttcaccgccaagagccccctgatgtac

SEQ ID NO: 57357 - RNA, 27 nt, synthetic construct
  misc_feature 1..27: note = Cytochrome c oxidase subunit 2 (184-192)
  source 1..27: mol_type = other RNA
ttcaccgccacaagacccggcgtgtac

SEQ ID NO: 57358 - RNA, 33 nt, synthetic construct
  misc_feature 1..33: note = Splicing factor 3A subunit 3 (130-140)
  source 1..33: mol_type = other RNA
ttcaccgacgaggaaggctacgggagatatctg

SEQ ID NO: 57359 - RNA, 24 nt, synthetic construct
  misc_feature 1..24: note = Gem-associated protein 5 (895-902)
  source 1..24: mol_type = other RNA
ttcaccgacagagccacactgtac

SEQ ID NO: 57360 - RNA, 39 nt, synthetic construct
  misc_feature 1..39: note = Geranylgeranyl transferase type-2 subunit alpha (166-178)
  source 1..39: mol_type = other RNA
ttcaccgacagcctgatcacaagaaacttttccaattac

SEQ ID NO: 57361 - RNA, 30 nt, synthetic construct
  misc_feature 1..30: note = CLIP-associating protein 2 (80-89)
  source 1..30: mol_type = other RNA
ttcaccgacgtgcccagcatccagatttac

SEQ ID NO: 57362 - RNA, 36 nt, synthetic construct
  misc_feature 1..36: note = Basic leucine zipper and W2 domain-containing protein 1 (149-160)
  source 1..36: mol_type = other RNA
ttcaccgaggccggcctgaaggaactcagcgagtac

SEQ ID NO: 57363 - RNA, 33 nt, synthetic construct
  misc_feature 1..33: note = Heat shock protein HSP 90-alpha (546-556)
  source 1..33: mol_type = other RNA
ttcaccgagctggccgaagacaaggagaactac

SEQ ID NO: 57364 - RNA, 33 nt, synthetic construct
  misc_feature 1..33: note = Zinc finger protein 746 (547-557)
  source 1..33: mol_type = other RNA
ttcaccgagagaagcaagctgatcgaccactac

SEQ ID NO: 57365 - RNA, 36 nt, synthetic construct
  misc_feature 1..36: note = Coatomer subunit gamma-1 (402-413)
  source 1..36: mol_type = other RNA
ttcaccatgctgagagaggaaggcgggtttgagtac

SEQ ID NO: 57366 - RNA, 27 nt, synthetic construct
  misc_feature 1..27: note = Cytoplasmic dynein 1 heavy chain 1 (2784-2792)
  source 1..27: mol_type = other RNA
ttcacccaggacacacaaccccactac

SEQ ID NO: 57367 - RNA, 33 nt, synthetic construct
  misc_feature 1..33: note Dolichyl-diphosphooligosaccharide-proteinosyltransferase subunit 2 (449-459)
  source 1..33: mol_type = other RNA
ttcgtggccgagcccgacaacaagaatgtctac

SEQ ID NO: 57368 - RNA, 36 nt, synthetic construct
  misc_feature 1..36: note = G patch domain and KOW motifs-containing protein (365-376)
  source 1..36: mol_type = other RNA
ttcgtggacaacatgtacaagggcgggcagtattac

SEQ ID NO: 57369 - RNA, 36 nt, synthetic construct
  misc_feature 1..36: note = Retinoid-inducible serine carboxypeptidase (63-74)
  source 1..36: mol_type = other RNA
ttcgtggacaaccccgtcggcaccgggtttagctac

SEQ ID NO: 57370 - RNA, 30 nt, synthetic construct
  misc_feature 1..30: note = Kelch-like protein 15 (325-334)
  source 1..30: mol_type = other RNA
ttcgtggacccctaccctgtcaacaagtat

SEQ ID NO: 57371 - RNA, 30 nt, synthetic construct
  misc_feature 1..30: note = Abhydrolase domain-containing protein 2 (146-155)
  source 1..30: mol_type = other RNA
ttcgtggactacgcccagaagaacggctat

SEQ ID NO: 57372 - RNA, 39 nt, synthetic construct; identical to SEQ ID NO: 33145
  misc_feature 1..39: note = Trafficking protein particle complex subunit 3 (115-127)
  source 1..39: mol_type = other RNA

SEQ ID NO: 57373 - RNA, 36 nt, synthetic construct
  misc_feature 1..36: note = ADP-ribosylation factor 5 (24-35)
  source 1..36: mol_type = other RNA
ggcctggacgccgctgggaagaccacaatcctctac

SEQ ID NO: 57374 - RNA, 27 nt, synthetic construct
  misc_feature 1..27: note = Exosome complex exonuclease RRP44 (757-765)
  source 1..27: mol_type = other RNA
ggcatggacaacgatttccaccattac

SEQ ID NO: 57375 - RNA, 27 nt, synthetic construct
  misc_feature 1..27: note = Archaemetzincin-2 (148-156)
  source 1..27: mol_type = other RNA
ggcagcgacttctactccatgcactat

SEQ ID NO: 57376 - RNA, 39 nt, synthetic construct
  misc_feature 1..39: note = Xaa-Pro aminopeptidase 1 (256-268)
  source 1..39: mol_type = other RNA
ggcagcgacgtggagcacaaccccgtcttcttttcctac

SEQ ID NO: 57377 - RNA, 27 nt, synthetic construct
  misc_feature 1..27: note = Sorbitol dehydrogenase (46-54)
  source 1..27: mol_type = other RNA
ggcagcgacgtgcactactgggagtat

SEQ ID NO: 57378 - RNA, 27 nt, synthetic construct
  misc_feature 1..27: note = Eukaryotic translation initiation factor 3 subunit D (443-451)
  source 1..27: mol_type = other RNA
ggcagcgagtacctgaagctcgggtat

SEQ ID NO: 57379 - RNA, 39 nt, synthetic construct
  misc_feature 1..39: note = PMS1 protein homolog 1 (39-51)
  source 1..39: mol_type = other RNA
ggcaccgccgtgatgaacaatatggagagcttccagtac

SEQ ID NO: 57380 - RNA, 30 nt, synthetic construct
  misc_feature 1..30: note = SEC23-interacting protein (313-322)
  source 1..30: mol_type = other RNA
ggcaccgacgggggaagatacgatgtgtat

SEQ ID NO: 57381 - RNA, 27 nt, synthetic construct
  misc_feature 1..27: note = Syndetin (394-402)
  source 1..27: mol_type = other RNA
ggcaccgacctgagcatcttcaagtac

SEQ ID NO: 57382 - RNA, 36 nt, synthetic construct
  misc_feature 1..36: note = X-ray repair cross-complementing protein 5 (63-74)
  source 1..36: mol_type = other RNA
ggcaccgacaaccccctgagcgggggagatcagtac

SEQ ID NO: 57383 - RNA, 33 nt, synthetic construct
  misc_feature 1..33: note = DNA replication licensing factor MCM5 (45-55)
  source 1..33: mol_type = other RNA
ggcaccgacagaacagggttcacttttaagtac

SEQ ID NO: 57384 - RNA, 27 nt, synthetic construct
  misc_feature 1..27: note = WD repeat-containing protein 19 (157-165)
  source 1..27: mol_type = other RNA
ggcaccgacacaggggtggtccagtac

SEQ ID NO: 57385 - RNA, 42 nt, synthetic construct
  misc_feature 1..42: note = E3 ubiquitin-protein ligase MYCBP2 (1371-1384)
  source 1..42: mol_type = other RNA
ggcaccgacgtgaacgccgggcagatcccccaactgctctac

SEQ ID NO: 57386 - RNA, 39 nt, synthetic construct
  misc_feature 1..39: note = CDK5 regulatory subunit-associated protein 3 (77-89)
  source 1..39: mol_type = other RNA
ggcaccgaggccagcacaaagaacatcttcgggagatac

SEQ ID NO: 57387 - RNA, 30 nt, synthetic construct
  misc_feature 1..30: note = Endophilin-B1 (5-14)
  source 1..30: mol_type = other RNA
ggcaccgagttcgggcccggaacagcctac

SEQ ID NO: 57388 - RNA, 36 nt, synthetic construct
  misc_feature 1..36: note = GON-4-like protein (39-50)
  source 1..36: mol_type = other RNA
ggcaccgagttccccaaccctctgatcagcaagtac

SEQ ID NO: 57389 - RNA, 36 nt, synthetic construct
  misc_feature 1..36: note = Nucleolin (451-462)
  source 1..36: mol_type = other RNA
ggcaccgagatcgacgggagaagcatttccctgtac

SEQ ID NO: 57390 - RNA, 39 nt, synthetic construct
  misc_feature 1..39: note = Nucleolin (451-463)
  source 1..39: mol_type = other RNA
ggcaccgagatcgacgggagaagcatttccctgtactat

SEQ ID NO: 57391 - RNA, 30 nt, synthetic construct
  misc_feature 1..30: note = MHC class I polypeptide-related sequence A (50-59)
  source 1..30: mol_type = other RNA
cacctggacggccagcccttcctcagatac

SEQ ID NO: 57392 - RNA, 30 nt, synthetic construct
  misc_feature 1..30: note = Zinc finger protein with KRAB and SCAN domains 5 (234-243)
  source 1..30: mol_type = other RNA
cacctggaccagagccaaaagtccctctac

SEQ ID NO: 57393 - RNA, 27 nt, synthetic construct
  misc_feature 1..27: note = Zinc finger CW-type PWWP domain protein 1 (230-238)
  source 1..27: mol_type = other RNA
cacctggacagcctcccctccaagtac

SEQ ID NO: 57394 - RNA, 36 nt, synthetic construct; identical to SEQ ID NO: 33167
  misc_feature 1..36: note = Conserved oligomeric Golgi complex subunit 6 (528-539)
  source 1..36: mol_type = other RNA

SEQ ID NO: 57395 - RNA, 30 nt, synthetic construct
  misc_feature 1..30: note = Unconventional myosin-Va (41-50)
  source 1..30: mol_type = other RNA
cacctggaggaaggcaaggacctcgagtac

SEQ ID NO: 57396 - RNA, 30 nt, synthetic construct
  misc_feature 1..30: note = N6-adenosine-methyltransferase 70 kDa subunit (322-331)
  source 1..30: mol_type = other RNA
cacatggacacctgcaagtacgtgcattat

SEQ ID NO: 57397 - RNA, 30 nt, synthetic construct
  misc_feature 1..30: note = 5'-nucleotidase domain-containing protein 1 (266-275)
  source 1..30: mol_type = other RNA
cacagcgacatcttccccgccagacattac

SEQ ID NO: 57398 - RNA, 27 nt, synthetic construct
  misc_feature 1..27: note = Endoribonuclease Dicer (118-126)
  source 1..27: mol_type = other RNA
cacagcgacctgaaggtgggcgagtac

SEQ ID NO: 57399 - RNA, 30 nt, synthetic construct
  misc_feature 1..30: note = Arylamine N-acetyltransferase 1 (177-186)
  source 1..30: mol_type = other RNA
cacagcgacctgctcgaggattccaagtac

SEQ ID NO: 57400 - RNA, 36 nt, synthetic construct
  misc_feature 1..36: note = Protein virilizer homolog (783-794)
  source 1..36: mol_type = other RNA
cacagcgacctgctcggcacccttcataacctgtac

SEQ ID NO: 57401 - RNA, 33 nt, synthetic construct
  misc_feature 1..33: note = CD82 antigen (257-267)
  source 1..33: mol_type = other RNA
cacagcgaggactactccaaggtgcccaaatat

SEQ ID NO: 57402 - RNA, 36 nt, synthetic construct
  misc_feature 1..36: note = Ribonucleoside-diphosphate reductase subunit M2 B (68-79)
  source 1..36: mol_type = other RNA
cacagcgagatgtactccctgctcatcgacacctat

SEQ ID NO: 57403 - RNA, 27 nt, synthetic construct
  misc_feature 1..27: note = Histone deacetylase 5 (338-346)
  source 1..27: mol_type = other RNA
cacagcgagtaccataccctgctctat

SEQ ID NO: 57404 - RNA, 36 nt, synthetic construct
  misc_feature 1..36: note = Acyl-CoA desaturase (302-313)
  source 1..36: mol_type = other RNA
cacagcttcccctacgactattccgcctctgagtac

SEQ ID NO: 57405 - RNA, 30 nt, synthetic construct
  misc_feature 1..30: note = Elongation factor Tu, mitochondrial (124-133)
  source 1..30: mol_type = other RNA
cacaccgactgccccggccatgccgattac

SEQ ID NO: 57406 - RNA, 30 nt, synthetic construct
  misc_feature 1..30: note = Lathosterol oxidase (229-238)
  source 1..30: mol_type = other RNA
cacaccgaccatcacatgttctttgattac

SEQ ID NO: 57407 - RNA, 30 nt, synthetic construct
  misc_feature 1..30: note = NADPH-cytochrome P450 reductase (250-259)
  source 1..30: mol_type = other RNA
cacaccgacatcgatgccgctaaggtgtac

SEQ ID NO: 57408 - RNA, 30 nt, synthetic construct
  misc_feature 1..30: note = Synembryn-B (153-162)
  source 1..30: mol_type = other RNA
cacaccgacatcagaagccagctgaggtac

SEQ ID NO: 57409 - RNA, 30 nt, synthetic construct
  misc_feature 1..30: note = Mitochondrial enolase superfamily member 1 (29-38)
  source 1..30: mol_type = other RNA
cacaccgaccccgattacagcgccgcttat

SEQ ID NO: 57410 - RNA, 39 nt, synthetic construct
  misc_feature 1..39: note = Serine/threonine-protein kinase N2 (593-605)
  source 1..39: mol_type = other RNA
cacaccgacgtgttcagcgagcccagagccgtcttttac

SEQ ID NO: 57411 - RNA, 33 nt, synthetic construct
  misc_feature 1..33: note = RNA polymerase II subunit A C-terminal domain phosphatase (601-611)
  source 1..33: mol_type = other RNA
cacaccgactactatgccaagtacgatagatat

SEQ ID NO: 57412 - RNA, 39 nt, synthetic construct
  misc_feature 1..39: note = Hermansky-Pudlak syndrome 1 protein (98-110)
  source 1..39: mol_type = other RNA
cacaccgagagcgaaggcgacctgagaaggaagctctac

SEQ ID NO: 57413 - RNA, 27 nt, synthetic construct
  misc_feature 1..27: note = Protein 4.1 (461-469)
  source 1..27: mol_type = other RNA
cacaccgagacaaagactatcacgtac

SEQ ID NO: 57414 - RNA, 33 nt, synthetic construct
  misc_feature 1..33: note = Histone-lysine N-methyltransferase, H3 lysine-79 specific (273-283)
  source 1..33: mol_type = other RNA
cacaccatcgacagaacaattctggagaactac

SEQ ID NO: 57415 - RNA, 33 nt, synthetic construct; identical to SEQ ID NO: 33188
  misc_feature 1..33: note = Lysine-specific demethylase 2A (212-222)
  source 1..33: mol_type = other RNA

SEQ ID NO: 57416 - RNA, 36 nt, synthetic construct
  misc_feature 1..36: note = MICOS complex subunit MIC27 (90-101)
  source 1..36: mol_type = other RNA
atcatggacaccgtgcagttcggcaaggatgcctac

SEQ ID NO: 57417 - RNA, 39 nt, synthetic construct
  misc_feature 1..39: note = TP53-regulating kinase (188-200)
  source 1..39: mol_type = other RNA
atcagcgccctgcccgaggacaagggcgtggatctctac

SEQ ID NO: 57418 - RNA, 39 nt, synthetic construct
  misc_feature 1..39: note = Tubulin beta-4B chain (24-36)
  source 1..39: mol_type = other RNA
atcagcgacgagcacggcattgatcccaccgggacatac

SEQ ID NO: 57419 - RNA, 36 nt, synthetic construct
  misc_feature 1..36: note = Integrin alpha-V (214-225)
  source 1..36: mol_type = other RNA
atcagcgaccaggtggccgagattgtctccaagtac

SEQ ID NO: 57420 - RNA, 27 nt, synthetic construct
  misc_feature 1..27: note = Reticulon-4 (90-98)
  source 1..27: mol_type = other RNA
atcagcgaggaactggtgcagaagtac

SEQ ID NO: 57421 - RNA, 39 nt, synthetic construct
  misc_feature 1..39: note = Adenosylhomocysteinase (155-167)
  source 1..39: mol_type = other RNA
atcagcgaggaaaccacaactggcgtgcacaacctgtac

SEQ ID NO: 57422 - RNA, 27 nt, synthetic construct
  misc_feature 1..27: note = Protein disulfide-isomerase A5 (349-357)
  source 1..27: mol_type = other RNA
atcagcgagttccccaccctgaagtac

SEQ ID NO: 57423 - RNA, 33 nt, synthetic construct
  misc_feature 1..33: note = ATP-citrate synthase (6-16)
  source 1..33: mol_type = other RNA
atcagcgagcagaccggcaaggaactgctctac

SEQ ID NO: 57424 - RNA, 33 nt, synthetic construct
  misc_feature 1..33: note = Oligoribonuclease, mitochondrial (168-178)
  source 1..33: mol_type = other RNA
atcagcgagtccattaaggaactgcagttctac

SEQ ID NO: 57425 - RNA, 33 nt, synthetic construct
  misc_feature 1..33: note = Protein furry homolog-like (546-556)
  source 1..33: mol_type = other RNA
atcagcgagacccccattataggcaacaagtac

SEQ ID NO: 57426 - RNA, 27 nt, synthetic construct
  misc_feature 1..27: note = Bone morphogenetic protein receptor type-2 (374-382)
  source 1..27: mol_type = other RNA
atcagcgaggtgggcaccattagatac

SEQ ID NO: 57427 - RNA, 33 nt, synthetic construct
  misc_feature 1..33: note = Beta-hexosaminidase subunit alpha (436-446)
  source 1..33: mol_type = other RNA
atcagctacggccccgactggaaggatttctat

SEQ ID NO: 57428 - RNA, 33 nt, synthetic construct
  misc_feature 1..33: note = N-alpha-acetyltransferase 16, NatA auxiliary subunit (155-165)
  source 1..33: mol_type = other RNA
atcaccgacgatcagttcgactttcacacatac

SEQ ID NO: 57429 - RNA, 30 nt, synthetic construct
  misc_feature 1..30: note = Trophinin (580-589)
  source 1..30: mol_type = other RNA
atcaccgacgagttcgtgaagcagaaatac

SEQ ID NO: 57430 - RNA, 24 nt, synthetic construct
  misc_feature 1..24: note = Vacuolar protein sorting-associated protein 13C (155-162)
  source 1..24: mol_type = other RNA
atcaccgacattcacataaagtac

SEQ ID NO: 57431 - RNA, 39 nt, synthetic construct
  misc_feature 1..39: note = Filamin-A (1793-1805)
  source 1..39: mol_type = other RNA
atcaccgacaacaaggatggcacagtgactgtcagatac

SEQ ID NO: 57432 - RNA, 42 nt, synthetic construct
  misc_feature 1..42: note = Sorting nexin-1 (149-162)
  source 1..42: mol_type = other RNA
atcaccgaccccgagaagattggcgatgggatgaacgcctac

SEQ ID NO: 57433 - RNA, 36 nt, synthetic construct
  misc_feature 1..36: note = F-box/LRR-repeat protein 14 (130-141)
  source 1..36: mol_type = other RNA
atcaccgacagctccctgggcagaattgcccagtac

SEQ ID NO: 57434 - RNA, 39 nt, synthetic construct
  misc_feature 1..39: note = Coatomer subunit gamma-1 (131-143)
  source 1..39: mol_type = other RNA
atcaccgacagcacaatgctgcaggccattgagagatac

SEQ ID NO: 57435 - RNA, 36 nt, synthetic construct
  misc_feature 1..36: note = F-box/LRR-repeat protein 17 (206-217)
  source 1..36: mol_type = other RNA
atcaccgactacgccctgattgctataggcagatat

SEQ ID NO: 57436 - RNA, 39 nt, synthetic construct
  misc_feature 1..39: note = T-complex protein 1 subunit gamma (291-303)
  source 1..39: mol_type = other RNA
atcaccgagaagggcattagcgacctggcccagcactac

SEQ ID NO: 57437 - RNA, 33 nt, synthetic construct
  misc_feature 1..33: note = Tubulin alpha-1C chain (58-68)
  source 1..33: mol_type = other RNA
atcaccggcaaggaggacgccgctaacaattac

SEQ ID NO: 57438 - RNA, 30 nt, synthetic construct
  misc_feature 1..30: note = Transmembrane protein 218 (3-12)
  source 1..30: mol_type = other RNA
atcgtggacgatttctttattggcagatac

SEQ ID NO: 57439 - RNA, 27 nt, synthetic construct
  misc_feature 1..27: note = Protein unc-13 homolog B (372-380)
  source 1..27: mol_type = other RNA
atcgtggacgagttcgccatgagatac

SEQ ID NO: 57440 - RNA, 36 nt, synthetic construct
  misc_feature 1..36: note = 116 kDa U5 small nuclear ribonucleoprotein component (281-292)
  source 1..36: mol_type = other RNA
atcgtggacgaggtcaacggcctgattagcatgtac

SEQ ID NO: 57441 - RNA, 27 nt, synthetic construct
  misc_feature 1..27: note = Putative eukaryotic translation initiation factor 2 subunit 3-like protein (421-429)
  source 1..27: mol_type = other RNA
aaggccgacctgggcaaaatcgtgctc

SEQ ID NO: 57442 - RNA, 42 nt, synthetic construct
  misc_feature 1..42: note = Heterogeneous nuclear ribonucleoprotein L (552-565)
  source 1..42: mol_type = other RNA
aagagcgacgccctggagaccctcggcttccttaaccactac

SEQ ID NO: 57443 - RNA, 33 nt, synthetic construct
  misc_feature 1..33: note = Heterogeneous nuclear ribonucleoprotein C-like 1 (30-40)
  source 1..33: mol_type = other RNA
aagagcgacgtggaggccatcttctccaaatac

SEQ ID NO: 57444 - RNA, 33 nt, synthetic construct
  misc_feature 1..33: note = RNA-binding protein Raly (35-45)
  source 1..33: mol_type = other RNA
aagagcgacgtggagaccatcttctccaaatac

SEQ ID NO: 57445 - RNA, 30 nt, synthetic construct
  misc_feature 1..30: note = Interferon-induced protein with tetratricopeptide repeats 1 (393-402)
  source 1..30: mol_type = other RNA
aagagcgacgtgaacgccatcattcactac

SEQ ID NO: 57446 - RNA, 33 nt, synthetic construct
  misc_feature 1..33: note = Ras GTPase-activating protein-binding protein 1 (353-363)
  source 1..33: mol_type = other RNA
aagagcgagctgaaagacttctttcagtcctac

SEQ ID NO: 57447 - RNA, 30 nt, synthetic construct
  misc_feature 1..30: note = Mitochondrial import receptor subunit TOM70 (576-585)
  source 1..30: mol_type = other RNA
aagagcgagatggaaatggcccacctgtac

SEQ ID NO: 57448 - RNA, 27 nt, synthetic construct
  misc_feature 1..27: note = Epidermal growth factor receptor substrate 15-like 1 (284-292)
  source 1..27: mol_type = other RNA
aagaccgacctggatctcgacggctac

SEQ ID NO: 57449 - RNA, 36 nt, synthetic construct
  misc_feature 1..36: note = Myosin-9 (289-300)
  source 1..36: mol_type = other RNA
aagaccgacctgctccttgagccctacaacaaatat

SEQ ID NO: 57450 - RNA, 33 nt, synthetic construct
  misc_feature 1..33: note = Unconventional myosin-Id (307-317)
  source 1..33: mol_type = other RNA
aagaccgacatggtggagaaagccctgctctac

SEQ ID NO: 57451 - RNA, 36 nt, synthetic construct
  misc_feature 1..36: note = RNA polymerase II-associated factor 1 homolog (123-134)
  source 1..36: mol_type = other RNA
aagaccgagtacatcagcacagaattcaacagatat

SEQ ID NO: 57452 - RNA, 33 nt, synthetic construct
  misc_feature 1..33: note = Cytokine receptor-like factor 3 (197-207)
  source 1..33: mol_type = other RNA
aaggtggacgatgacttcaccgcccaggattac

SEQ ID NO: 57453 - RNA, 27 nt, synthetic construct
  misc_feature 1..27: note = X-ray repair cross-complementing protein 5 (221-229)
  source 1..27: mol_type = other RNA
aaggtggacgaggaacagatgaaatac

SEQ ID NO: 57454 - RNA, 27 nt, synthetic construct
  misc_feature 1..27: note Dolichyl-diphosphooligosaccharide-proteinosyltransferase 48 kDa subunit (391-399)
  source 1..27: mol_type = other RNA
aaggtggactacaacagactgggctat

SEQ ID NO: 57455 - RNA, 30 nt, synthetic construct
  misc_feature 1..30: note = Cytosol aminopeptidase (431-440)
  source 1..30: mol_type = other RNA
ctggccgacgtgaacaatatcggcaagtac

SEQ ID NO: 57456 - RNA, 33 nt, synthetic construct
  misc_feature 1..33: note = Double-stranded RNA-specific adenosine deaminase (334-344)
  source 1..33: mol_type = other RNA
ctgatcgacatggagagacagggcgatgtgtac

SEQ ID NO: 57457 - RNA, 30 nt, synthetic construct
  misc_feature 1..30: note = Annexin A2 (190-199)
  source 1..30: mol_type = other RNA
ctgatcgaccaggatgccagagacctctac

SEQ ID NO: 57458 - RNA, 33 nt, synthetic construct
  misc_feature 1..33: note = Protein zyg-11 homolog B (425-435)
  source 1..33: mol_type = other RNA
ctgatcgaggaaggcgggctccagcacctttac

SEQ ID NO: 57459 - RNA, 42 nt, synthetic construct
  misc_feature 1..42: note = N-acetylglucosamine-1-phosphotransferase subunits alpha/beta (903-916)
  source 1..42: mol_type = other RNA
ctgctcgacgaggaagagagccttaagacccagctggcctac

SEQ ID NO: 57460 - RNA, 30 nt, synthetic construct
  misc_feature 1..30: note = Protein transport protein Sec61 subunit alpha isoform 1 (164-173)
  source 1..30: mol_type = other RNA
ctgctcgacgagcttctgcagaagggctac

SEQ ID NO: 57461 - RNA, 36 nt, synthetic construct
  misc_feature 1..36: note = Mitogen-activated protein kinase kinase kinase 7 (547-558)
  source 1..36: mol_type = other RNA
ctgctcgacgagaacaagagcctttccacctactat

SEQ ID NO: 57462 - RNA, 33 nt, synthetic construct
  misc_feature 1..33: note = Syntaxin-binding protein 2 (253-263)
  source 1..33: mol_type = other RNA
ctgctcgacatcgagcaggatacctacagatat

SEQ ID NO: 57463 - RNA, 30 nt, synthetic construct
  misc_feature 1..30: note = Intraflagellar transport protein 43 homolog (4-13)
  source 1..30: mol_type = other RNA
ctgctcgaccttgatgaggaactgagatac

SEQ ID NO: 57464 - RNA, 30 nt, synthetic construct
  misc_feature 1..30: note = Zinc finger protein 627 (79-88)
  source 1..30: mol_type = other RNA
ctgctcgaccccagccagaagaacctttac

SEQ ID NO: 57465 - RNA, 30 nt, synthetic construct
  misc_feature 1..30: note = Zinc finger protein 614 (24-33)
  source 1..30: mol_type = other RNA
ctgctcgacaccgcccagaagaacctttac

SEQ ID NO: 57466 - RNA, 30 nt, synthetic construct
  misc_feature 1..30: note = Zinc finger protein 324B (17-26)
  source 1..30: mol_type = other RNA
ctgctcgacaccgcccagagagctctttac

SEQ ID NO: 57467 - RNA, 36 nt, synthetic construct
  misc_feature 1..36: note = S100P-binding protein (91-102)
  source 1..36: mol_type = other RNA
ctgctcgacacccccagagagaagaacagctcctac

SEQ ID NO: 57468 - RNA, 39 nt, synthetic construct
  misc_feature 1..39: note = Chromodomain-helicase-DNA-binding protein 4 (1078-1090)
  source 1..39: mol_type = other RNA
ctgctcgaggacttccttgaacacgagggctacaagtat

SEQ ID NO: 57469 - RNA, 27 nt, synthetic construct
  misc_feature 1..27: note = SWI/SNF-related matrix-associated actin-dependent regulator of chromatin subfamily A member 5 (784-792)
  source 1..27: mol_type = other RNA
ctgctcgagaaggaaatccttttctac

SEQ ID NO: 57470 - RNA, 30 nt, synthetic construct
  misc_feature 1..30: note = Early endosome antigen 1 (541-550)
  source 1..30: mol_type = other RNA
ctgctcgagaaggaaagagaggacctttac

SEQ ID NO: 57471 - RNA, 33 nt, synthetic construct
  misc_feature 1..33: note = E3 ubiquitin-protein ligase HUWE1 (982-992)
  source 1..33: mol_type = other RNA
ctgctcgagaacgacgtgagcacccttggctac

SEQ ID NO: 57472 - RNA, 36 nt, synthetic construct
  misc_feature 1..36: note = Ankyrin repeat and LEM domain-containing protein 2 (110-121)
  source 1..36: mol_type = other RNA
ctgctcgagcagggcgggagacttagctccttctac

SEQ ID NO: 57473 - RNA, 42 nt, synthetic construct
  misc_feature 1..42: note = Phospholipid scramblase 1 (116-129)
  source 1..42: mol_type = other RNA
ctgctcgaggtgcttaccggcttcgaaacaaacaataagtac

SEQ ID NO: 57474 - RNA, 30 nt, synthetic construct
  misc_feature 1..30: note = Signal recognition particle subunit SRP68 (128-137)
  source 1..30: mol_type = other RNA
ctgatggacgccgagagagcttggagctac

SEQ ID NO: 57475 - RNA, 33 nt, synthetic construct
  misc_feature 1..33: note = Sialidase-1 (232-242)
  source 1..33: mol_type = other RNA
ctgagcgacgatcacggcgcctcctggagatac

SEQ ID NO: 57476 - RNA, 24 nt, synthetic construct
  misc_feature 1..24: note = Melanoma inhibitory activity protein 3 (136-143)
  source 1..24: mol_type = other RNA
ctgagcgacgaggccatcaagtac

SEQ ID NO: 57477 - RNA, 27 nt, synthetic construct
  misc_feature 1..27: note = FACT complex subunit SSRP1 (85-93)
  source 1..27: mol_type = other RNA
ctgagcgacttctttaagacccactac

SEQ ID NO: 57478 - RNA, 30 nt, synthetic construct
  misc_feature 1..30: note = Inhibitor of nuclear factor kappa-B kinase subunit beta (67-76)
  source 1..30: mol_type = other RNA
ctgagcgacatcgcctccgctctcagatac

SEQ ID NO: 57479 - RNA, 27 nt, synthetic construct
  misc_feature 1..27: note = Deoxyribose-phosphate aldolase (312-320)
  source 1..27: mol_type = other RNA
ctgagcgacatcgagagacagatttac

SEQ ID NO: 57480 - RNA, 30 nt, synthetic construct
  misc_feature 1..30: note = Inhibitor of nuclear factor kappa-B kinase subunit alpha (94-103)
  source 1..30: mol_type = other RNA
ctgagcgacatcggctccgggattagatac

SEQ ID NO: 57481 - RNA, 27 nt, synthetic construct
  misc_feature 1..27: note = Rho-related BTB domain-containing protein 3 (340-348)
  source 1..27: mol_type = other RNA
ctgagcgacatcctcagattcatttac

SEQ ID NO: 57482 - RNA, 39 nt, synthetic construct
  misc_feature 1..39: note = DnaJ homolog subfamily C member 11 (69-81)
  source 1..39: mol_type = other RNA
ctgagcgacccccagaccagagccatctacgatatttat

SEQ ID NO: 57483 - RNA, 30 nt, synthetic construct
  misc_feature 1..30: note = Ribosomal protein S6 kinase delta-1 (155-164)
  source 1..30: mol_type = other RNA
ctgagcgacccctccggccctaagtcttac

SEQ ID NO: 57484 - RNA, 36 nt, synthetic construct
  misc_feature 1..36: note = Nucleoporin NDC1 (58-69)
  source 1..36: mol_type = other RNA
ctgagcgactccttctctgatctctactcaagttat

SEQ ID NO: 57485 - RNA, 33 nt, synthetic construct
  misc_feature 1..33: note = Importin-7 (681-691)
  source 1..33: mol_type = other RNA
ctgagcgacaccaagtacctcgagatgatctat

SEQ ID NO: 57486 - RNA, 36 nt, synthetic construct
  misc_feature 1..36: note = DNA polymerase zeta catalytic subunit (2423-2434)
  source 1..36: mol_type = other RNA
ctgagcgactggttcgataacaagaccgacctctac

SEQ ID NO: 57487 - RNA, 33 nt, synthetic construct
  misc_feature 1..33: note = Cyclin-dependent kinase 2-associated protein 1 (39-49)
  source 1..33: mol_type = other RNA
ctgagcgactacggccccccttccctcgggtat

SEQ ID NO: 57488 - RNA, 27 nt, synthetic construct
  misc_feature 1..27: note = PAS domain-containing serine/threonine-protein kinase (64-72)
  source 1..27: mol_type = other RNA
ctgagcgaggacagatggtcctcttac

SEQ ID NO: 57489 - RNA, 27 nt, synthetic construct
  misc_feature 1..27: note = Vacuolar protein sorting-associated protein 18 homolog (306-314)
  source 1..27: mol_type = other RNA
ctgagcgaggaaagagtgtgggagtac

SEQ ID NO: 57490 - RNA, 27 nt, synthetic construct
  misc_feature 1..27: note = Transmembrane and TPR repeat-containing protein 3 (84-92)
  source 1..27: mol_type = other RNA
ctgagcgagctcaagcccatgtcctac

SEQ ID NO: 57491 - RNA, 36 nt, synthetic construct
  misc_feature 1..36: note = DmX-like protein 1 (783-794)
  source 1..36: mol_type = other RNA
ctgagcgagctctccaaccccgaaatctctaagtac

SEQ ID NO: 57492 - RNA, 27 nt, synthetic construct
  misc_feature 1..27: note = Alpha/beta hydrolase domain-containing protein 17B (50-58)
  source 1..27: mol_type = other RNA
ctgagcgagagagccgactggcagtac

SEQ ID NO: 57493 - RNA, 27 nt, synthetic construct
  misc_feature 1..27: note = Immediate early response gene 5-like protein (48-56)
  source 1..27: mol_type = other RNA
ctgagcgagagatacgccgaactctat

SEQ ID NO: 57494 - RNA, 30 nt, synthetic construct; identical to SEQ ID NO: 33267
  misc_feature 1..30: note = Signal peptidase complex subunit 1 (5-14)
  source 1..30: mol_type = other RNA

SEQ ID NO: 57495 - RNA, 45 nt, synthetic construct
  misc_feature 1..45: note = Coatomer subunit epsilon (43-57)
  source 1..45: mol_type = other RNA
ctgagctcccccgagagagacgtggaaagggatgtcttcctctac

SEQ ID NO: 57496 - RNA, 33 nt, synthetic construct
  misc_feature 1..33: note = 26S proteasome non-ATPase regulatory subunit 2 (391-401)
  source 1..33: mol_type = other RNA
ctgaccgacgatggcaacaagtggctctacaaa

SEQ ID NO: 57497 - RNA, 27 nt, synthetic construct
  misc_feature 1..27: note = Casein kinase II subunit alpha' (129-137)
  source 1..27: mol_type = other RNA
ctgaccgacttcgatatcagattttac

SEQ ID NO: 57498 - RNA, 24 nt, synthetic construct
  misc_feature 1..24: note = Lysine-tRNA ligase (133-140)
  source 1..24: mol_type = other RNA
ctgaccgacttcatccagaagtac

SEQ ID NO: 57499 - RNA, 27 nt, synthetic construct
  misc_feature 1..27: note = DNA excision repair protein ERCC-6-like 2 (214-222)
  source 1..27: mol_type = other RNA
ctgaccgacttccagaaggccgtgtac

SEQ ID NO: 57500 - RNA, 30 nt, synthetic construct; identical to SEQ ID NO: 33273
  misc_feature 1..30: note = Thyroid adenoma-associated protein (45-54)
  source 1..30: mol_type = other RNA

SEQ ID NO: 57501 - RNA, 33 nt, synthetic construct; identical to SEQ ID NO: 33274
  misc_feature 1..33: note = 3'(2'),5'-bisphosphate nucleotidase 1 (262-272)
  source 1..33: mol_type = other RNA

SEQ ID NO: 57502 - RNA, 30 nt, synthetic construct
  misc_feature 1..30: note = Myotubularin-related protein 5 (70-79)
  source 1..30: mol_type = other RNA
ctgaccgacatcaacagcgagagacactac

SEQ ID NO: 57503 - RNA, 36 nt, synthetic construct
  misc_feature 1..36: note = E3 ubiquitin-protein ligase UBR4 (278-289)
  source 1..36: mol_type = other RNA
ctgaccgacaaggccgtgaaagattacagcgcttat

SEQ ID NO: 57504 - RNA, 33 nt, synthetic construct
  misc_feature 1..33: note = MAP kinase-activating death domain protein (81-91)
  source 1..33: mol_type = other RNA
ctgaccgacaaggatacaggcgtgactagatac

SEQ ID NO: 57505 - RNA, 30 nt, synthetic construct
  misc_feature 1..30: note = Dynactin subunit 2 (168-177)
  source 1..30: mol_type = other RNA
ctgaccgaccccgatggcgccctcgctaag

SEQ ID NO: 57506 - RNA, 30 nt, synthetic construct
  misc_feature 1..30: note = Mucosa-associated lymphoid tissue lymphoma translocation protein 1 (876-885)
  source 1..30: mol_type = other RNA
ctgaccgaccccatccagggcacagagtac

SEQ ID NO: 57507 - RNA, 30 nt, synthetic construct
  misc_feature 1..30: note = Putative deoxyribonuclease TATDN1 (13-22)
  source 1..30: mol_type = other RNA
ctgaccgaccccatgttcagaggcatctac

SEQ ID NO: 57508 - RNA, 27 nt, synthetic construct
  misc_feature 1..27: note = Interferon regulatory factor 3 (252-260)
  source 1..27: mol_type = other RNA
ctgaccgacagaggcgtgatgagctac

SEQ ID NO: 57509 - RNA, 30 nt, synthetic construct
  misc_feature 1..30: note = Tubulin polyglutamylase complex subunit 2 (125-134)
  source 1..30: mol_type = other RNA
ctgaccgacacattcactgcctactataga

SEQ ID NO: 57510 - RNA, 39 nt, synthetic construct
  misc_feature 1..39: note = Peroxisomal multifunctional enzyme type 2 (493-505)
  source 1..39: mol_type = other RNA
ctgaccgacacaactagcctcaaccaggccgctctttac

SEQ ID NO: 57511 - RNA, 27 nt, synthetic construct
  misc_feature 1..27: note = DNA polymerase zeta catalytic subunit (928-936)
  source 1..27: mol_type = other RNA
ctgaccgaggaaaagatggagctctac

SEQ ID NO: 57512 - RNA, 33 nt, synthetic construct
  misc_feature 1..33: note = Regulator of microtubule dynamics protein 3 (316-326)
  source 1..33: mol_type = other RNA
ctgaccgaggaagtgagcgagaagaaatcctac

SEQ ID NO: 57513 - RNA, 33 nt, synthetic construct
  misc_feature 1..33: note = Protein FAM65B (122-132)
  source 1..33: mol_type = other RNA
ctgaccgagatcaacagaagcttcaaggaatac

SEQ ID NO: 57514 - RNA, 39 nt, synthetic construct
  misc_feature 1..39: note = Probable histidine-tRNA ligase, mitochondrial (104-116)
  source 1..39: mol_type = other RNA
ctgaccgagaagtacggcgaagacagcgggctcatgtat

SEQ ID NO: 57515 - RNA, 30 nt, synthetic construct
  misc_feature 1..30: note = ATP synthase subunit alpha, mitochondrial (467-476)
  source 1..30: mol_type = other RNA
ctgaccgagctccttaagcagggccaatac

SEQ ID NO: 57516 - RNA, 27 nt, synthetic construct
  misc_feature 1..27: note = 39S ribosomal protein L52, mitochondrial (43-51)
  source 1..27: mol_type = other RNA
ctgaccgagctccccgactggagctac

SEQ ID NO: 57517 - RNA, 27 nt, synthetic construct
  misc_feature 1..27: note = Tectonin beta-propeller repeat-containing protein 2 (950-958)
  source 1..27: mol_type = other RNA
ctgaccgagcagagagccctcctttac

SEQ ID NO: 57518 - RNA, 30 nt, synthetic construct
  misc_feature 1..30: note = 7SK snRNA methylphosphate capping enzyme (629-638)
  source 1..30: mol_type = other RNA
ctgaccgagacaatctacaagaactattac

SEQ ID NO: 57519 - RNA, 39 nt, synthetic construct
  misc_feature 1..39: note = HLA class I histocompatibility antigen, B-8 alpha chain (19-31)
  source 1..39: mol_type = other RNA
ctgaccgagacatgggccggcagccactccatgagatac

SEQ ID NO: 57520 - RNA, 30 nt, synthetic construct
  misc_feature 1..30: note = Proline-rich nuclear receptor coactivator 1 (270-279)
  source 1..30: mol_type = other RNA
ctgaccgaggtgagccagaaggaaaactac

SEQ ID NO: 57521 - RNA, 39 nt, synthetic construct
  misc_feature 1..39: note = TOX high mobility group box family member 4 (104-116)
  source 1..39: mol_type = other RNA
ctgaccatggacctcgatcacagcatcggcacacagtac

SEQ ID NO: 57522 - RNA, 33 nt, synthetic construct
  misc_feature 1..33: note = Ubiquinone biosynthesis protein COQ9, mitochondrial (105-115)
  source 1..33: mol_type = other RNA
ctgaccagcatggtggacgatatgtggcactac

SEQ ID NO: 57523 - RNA, 30 nt, synthetic construct
  misc_feature 1..30: note = Clustered mitochondria protein homolog (608-617)
  source 1..30: mol_type = other RNA
ctggtggacgccttcgtcgagcacagatac

SEQ ID NO: 57524 - RNA, 36 nt, synthetic construct
  misc_feature 1..36: note = Poly (ADP-ribose) polymerase 1 (559-570)
  source 1..36: mol_type = other RNA
ctggtggacatcgtcaagggcaccaacagctactat

SEQ ID NO: 57525 - RNA, 27 nt, synthetic construct
  misc_feature 1..27: note = Alsin (683-691)
  source 1..27: mol_type = other RNA
ctggtggacaagaacatcatgggctac

SEQ ID NO: 57526 - RNA, 39 nt, synthetic construct
  misc_feature 1..39: note = Dexamethasone-induced protein (67-79)
  source 1..39: mol_type = other RNA
ctggtggacctcggcgtccttagcgatcccgggtccgga

SEQ ID NO: 57527 - RNA, 45 nt, synthetic construct
  misc_feature 1..45: note = Dexamethasone-induced protein (67-81)
  source 1..45: mol_type = other RNA
ctggtggacctcggcgtccttagcgatcccgggtccggactgtac

SEQ ID NO: 57528 - RNA, 27 nt, synthetic construct
  misc_feature 1..27: note = Zinc finger FYVE domain-containing protein 16 (1229-1237)
  source 1..27: mol_type = other RNA
ctggtggacctcagaaactaccagtat

SEQ ID NO: 57529 - RNA, 30 nt, synthetic construct; identical to SEQ ID NO: 33302
  misc_feature 1..30: note = Semaphorin-4F (69-78)
  source 1..30: mol_type = other RNA

SEQ ID NO: 57530 - RNA, 30 nt, synthetic construct
  misc_feature 1..30: note = Fatty acid-binding protein, epidermal (13-22)
  source 1..30: mol_type = other RNA
ctggtggacagcaagggcttcgatgagtac

SEQ ID NO: 57531 - RNA, 27 nt, synthetic construct
  misc_feature 1..27: note = Probable C-mannosyltransferase DPY19L1 (398-406)
  source 1..27: mol_type = other RNA
atggagaaggaaacccccctgagatac

SEQ ID NO: 57532 - RNA, 30 nt, synthetic construct
  misc_feature 1..30: note = MICOS complex subunit MIC60 (261-270)
  source 1..30: mol_type = other RNA
atgatcgacgagaccagaaacagcctgtac

SEQ ID NO: 57533 - RNA, 27 nt, synthetic construct
  misc_feature 1..27: note = SWI/SNF-related matrix-associated actin-dependent regulator of chromatin subfamily D member 2 (247-255)
  source 1..27: mol_type = other RNA
atgctggaccaccagccccctcaatac

SEQ ID NO: 57534 - RNA, 27 nt, synthetic construct
  misc_feature 1..27: note = Acylamino-acid-releasing enzyme (544-552)
  source 1..27: mol_type = other RNA
atgctggacaagagccccatcagatac

SEQ ID NO: 57535 - RNA, 27 nt, synthetic construct
  misc_feature 1..27: note = Cytoplasmic dynein 1 heavy chain 1 (3043-3051)
  source 1..27: mol_type = other RNA
atgctggacagccacgaggaactctac

SEQ ID NO: 57536 - RNA, 36 nt, synthetic construct
  misc_feature 1..36: note = Zinc finger MYM-type protein 4 (480-491)
  source 1..36: mol_type = other RNA
atgagcgacggctccatcagaaacttctgctcttac

SEQ ID NO: 57537 - RNA, 30 nt, synthetic construct
  misc_feature 1..30: note = YTH domain-containing family protein 3 (52-61)
  source 1..30: mol_type = other RNA
atgagcgacccctacatgccttcctattac

SEQ ID NO: 57538 - RNA, 24 nt, synthetic construct
  misc_feature 1..24: note = trabeculin-alpha (2316-2323)
  source 1..24: mol_type = other RNA
atgagcgacgtgaacctgaagtac

SEQ ID NO: 57539 - RNA, 30 nt, synthetic construct
  misc_feature 1..30: note = A-kinase anchor protein 6 (990-999)
  source 1..30: mol_type = other RNA
atgagcgaggaacagcaacagcacctgtac

SEQ ID NO: 57540 - RNA, 27 nt, synthetic construct
  misc_feature 1..27: note = Lambda-crystallin homolog (224-232)
  source 1..27: mol_type = other RNA
atgagcgagggcctggggatgagatac

SEQ ID NO: 57541 - RNA, 30 nt, synthetic construct
  misc_feature 1..30: note = Talin-1 (289-298)
  source 1..30: mol_type = other RNA
atgagcgagatcgaagccaaggtgagatac

SEQ ID NO: 57542 - RNA, 39 nt, synthetic construct
  misc_feature 1..39: note = Kelch-like protein 13 (423-435)
  source 1..39: mol_type = other RNA
atgagcgagccccactacggccatgccgggaccgtgtat

SEQ ID NO: 57543 - RNA, 27 nt, synthetic construct
  misc_feature 1..27: note = Antigen KI-67 (1611-1619)
  source 1..27: mol_type = other RNA
atgaccgacgataagatcacagaggtg

SEQ ID NO: 57544 - RNA, 33 nt, synthetic construct
  misc_feature 1..33: note = Telomerase protein component 1 (365-375)
  source 1..33: mol_type = other RNA
atgaccgacaagttcgcccagtttgatgagtac

SEQ ID NO: 57545 - RNA, 36 nt, synthetic construct; identical to SEQ ID NO: 33318
  misc_feature 1..36: note = DNA helicase B (287-298)
  source 1..36: mol_type = other RNA

SEQ ID NO: 57546 - RNA, 39 nt, synthetic construct
  misc_feature 1..39: note = TAR DNA-binding protein 43 (202-214)
  source 1..39: mol_type = other RNA
atgaccgaggacgaactgagagagttctttagccagtac

SEQ ID NO: 57547 - RNA, 39 nt, synthetic construct
  misc_feature 1..39: note = Muskelin (98-110)
  source 1..39: mol_type = other RNA
atgaccgagctgctcagctccggccttaagaacgactac

SEQ ID NO: 57548 - RNA, 30 nt, synthetic construct
  misc_feature 1..30: note = Presenilin-1 (1-10)
  source 1..30: mol_type = other RNA
atgaccgagctgcccgcccctctcagctac

SEQ ID NO: 57549 - RNA, 30 nt, synthetic construct
  misc_feature 1..30: note = Prolyl endopeptidase (67-76)
  source 1..30: mol_type = other RNA
atgaccgagctgtacgactatcccaagtac

SEQ ID NO: 57550 - RNA, 27 nt, synthetic construct
  misc_feature 1..27: note = E3 ubiquitin-protein ligase UBR5 (2723-2731)
  source 1..27: mol_type = other RNA
atgaccgagagacaggacctggtgtac

SEQ ID NO: 57551 - RNA, 30 nt, synthetic construct
  misc_feature 1..30: note = Protein Spindly (51-60)
  source 1..30: mol_type = other RNA
atgaccgagagctacgaacaggagaagtat

SEQ ID NO: 57552 - RNA, 39 nt, synthetic construct
  misc_feature 1..39: note = Zinc finger protein 428 (44-56)
  source 1..39: mol_type = other RNA
atgaccgagacaagagaacccgccgagactggcgggtac

SEQ ID NO: 57553 - RNA, 36 nt, synthetic construct
  misc_feature 1..36: note = NF-kappa-B-repressing factor (190-201)
  source 1..36: mol_type = other RNA
atgaccagcggctccgacaagatcaactacacatat

SEQ ID NO: 57554 - RNA, 27 nt, synthetic construct
  misc_feature 1..27: note = Probable ATP-dependent RNA helicase DHX35 (162-170)
  source 1..27: mol_type = other RNA
atggtggaccccctgctcaccaagtac

SEQ ID NO: 57555 - RNA, 33 nt, synthetic construct
  misc_feature 1..33: note = Cytochrome c oxidase subunit 1 (484-494)
  source 1..33: mol_type = other RNA
atggtggaggaacccagcatgaacctggagtgg

SEQ ID NO: 57556 - RNA, 36 nt, synthetic construct
  misc_feature 1..36: note = Lysocardiolipin acyltransferase 1 (88-99)
  source 1..36: mol_type = other RNA
aacctggacgccgtgcacgatatcaccgtcgcttac

SEQ ID NO: 57557 - RNA, 36 nt, synthetic construct
  misc_feature 1..36: note = Prolyl 3-hydroxylase OGFOD1 (84-95)
  source 1..36: mol_type = other RNA
aacctggacttccacgagaagtacaatgatctctat

SEQ ID NO: 57558 - RNA, 27 nt, synthetic construct
  misc_feature 1..27: note = Tubulin alpha-1C chain (181-189)
  source 1..27: mol_type = other RNA
aacctggacatcgagagacccacctac

SEQ ID NO: 57559 - RNA, 36 nt, synthetic construct
  misc_feature 1..36: note = Splicing factor 3B subunit 4 (106-117)
  source 1..36: mol_type = other RNA
aacctggaccccgagatcgatgaaaagctcctttac

SEQ ID NO: 57560 - RNA, 27 nt, synthetic construct
  misc_feature 1..27: note = N-alpha-acetyltransferase 20 (7-15)
  source 1..27: mol_type = other RNA
aacctggaccccctcaccgagacatac

SEQ ID NO: 57561 - RNA, 30 nt, synthetic construct
  misc_feature 1..30: note = E3 ubiquitin-protein ligase RNF135 (381-390)
  source 1..30: mol_type = other RNA
aacctggaggaaggcaagctcgccttctac

SEQ ID NO: 57562 - RNA, 27 nt, synthetic construct
  misc_feature 1..27: note = Basigin (111-119)
  source 1..27: mol_type = other RNA
aacatggaggccgaccccggccagtac

SEQ ID NO: 57563 - RNA, 42 nt, synthetic construct
  misc_feature 1..42: note = Ribonucleoside-diphosphate reductase large subunit (35-48)
  source 1..42: mol_type = other RNA
aacagcgccatcatttacgacagagatttctcctataattac

SEQ ID NO: 57564 - RNA, 30 nt, synthetic construct; identical to SEQ ID NO: 33337
  misc_feature 1..30: note = Thrombospondin-3 (640-649)
  source 1..30: mol_type = other RNA

SEQ ID NO: 57565 - RNA, 36 nt, synthetic construct
  misc_feature 1..36: note = NADH-ubiquinone oxidoreductase chain 5 (109-120)
  source 1..36: mol_type = other RNA
aacagcgaccccaatatcaaccagttctttaagtac

SEQ ID NO: 57566 - RNA, 33 nt, synthetic construct
  misc_feature 1..33: note = 52 kDa repressor of the inhibitor of the protein kinase (452-462)
  source 1..33: mol_type = other RNA
aacagcgacaccaatatcagatggaacaattac

SEQ ID NO: 57567 - RNA, 27 nt, synthetic construct
  misc_feature 1..27: note = Homeodomain-interacting protein kinase 1 (604-612)
  source 1..27: mol_type = other RNA
aacagcgacgtgtccctgctcaattac

SEQ ID NO: 57568 - RNA, 30 nt, synthetic construct
  misc_feature 1..30: note = Serine/threonine-protein kinase RIO3 (378-387)
  source 1..30: mol_type = other RNA
aacagcgaggaaatgaaggaggcctactat

SEQ ID NO: 57569 - RNA, 42 nt, synthetic construct
  misc_feature 1..42: note = Cerebellar degeneration-related protein 2 (286-299)
  source 1..42: mol_type = other RNA
aacagcgagctggaacagcaactcggcgccaccggggcttac

SEQ ID NO: 57570 - RNA, 30 nt, synthetic construct
  misc_feature 1..30: note = YY1-associated protein 1 (320-329)
  source 1..30: mol_type = other RNA
aacagcgagctgggctccgaaaccagatac

SEQ ID NO: 57571 - RNA, 27 nt, synthetic construct
  misc_feature 1..27: note = Myosin-14 (29-37)
  source 1..27: mol_type = other RNA
aacagcgagctgctcaatgacagatac

SEQ ID NO: 57572 - RNA, 27 nt, synthetic construct
  misc_feature 1..27: note = Thymidylate synthase (205-213)
  source 1..27: mol_type = other RNA
aacagcgagctgtcctgccagctctac

SEQ ID NO: 57573 - RNA, 42 nt, synthetic construct
  misc_feature 1..42: note = Neuroblastoma-amplified sequence (1978-1991)
  source 1..42: mol_type = other RNA
aacagcgagcaggaaaccctgcaaaagtactcccacctctat

SEQ ID NO: 57574 - RNA, 39 nt, synthetic construct
  misc_feature 1..39: note = Cytochrome c oxidase subunit 1 (360-372)
  source 1..39: mol_type = other RNA
aacagctccctggacatcgtgctccacgatacctactat

SEQ ID NO: 57575 - RNA, 33 nt, synthetic construct
  misc_feature 1..33: note = LIM domain and actin-binding protein 1 (82-92)
  source 1..33: mol_type = other RNA
aacaccgacgccagcggcaagatcgagaaatac

SEQ ID NO: 57576 - RNA, 33 nt, synthetic construct
  misc_feature 1..33: note = Zinc finger protein 462 (265-275)
  source 1..33: mol_type = other RNA
aacaccgacttcggcgatagcgggagactgtac

SEQ ID NO: 57577 - RNA, 36 nt, synthetic construct
  misc_feature 1..36: note = Zinc finger protein 462 (265-276)
  source 1..36: mol_type = other RNA
aacaccgacttcggcgatagcgggagactgtactat

SEQ ID NO: 57578 - RNA, 27 nt, synthetic construct
  misc_feature 1..27: note = Protein YIPF5 (8-16)
  source 1..27: mol_type = other RNA
aacaccgacttctaccagacaagctat

SEQ ID NO: 57579 - RNA, 27 nt, synthetic construct
  misc_feature 1..27: note = 2-oxoisovalerate dehydrogenase subunit alpha, mitochondrial (83-91)
  source 1..27: mol_type = other RNA
aacaccgacctggtgttcggccagtac

SEQ ID NO: 57580 - RNA, 33 nt, synthetic construct
  misc_feature 1..33: note = Protein TASOR (346-356)
  source 1..33: mol_type = other RNA
aacaccgacagaaatatcgataagtacaactat

SEQ ID NO: 57581 - RNA, 36 nt, synthetic construct
  misc_feature 1..36: note = 26S proteasome non-ATPase regulatory subunit 13 (227-238)
  source 1..36: mol_type = other RNA
aacaccgacagacagtggctgatcgatacactctac

SEQ ID NO: 57582 - RNA, 33 nt, synthetic construct
  misc_feature 1..33: note = Pericentriolar material 1 protein (1414-1424)
  source 1..33: mol_type = other RNA
aacaccgactacctgagacagagggccctctat

SEQ ID NO: 57583 - RNA, 36 nt, synthetic construct
  misc_feature 1..36: note = DnaJ homolog subfamily C member 3 (221-232)
  source 1..36: mol_type = other RNA
aacaccgaggccttctacaagatcagcacactgtat

SEQ ID NO: 57584 - RNA, 39 nt, synthetic construct
  misc_feature 1..39: note = Polypyrimidine tract-binding protein 1 (102-114)
  source 1..39: mol_type = other RNA
aacaccgaggaagccgctaatacaatggtgaactactat

SEQ ID NO: 57585 - RNA, 39 nt, synthetic construct
  misc_feature 1..39: note = DNA-directed RNA polymerase I subunit RPA1 (1579-1591)
  source 1..39: mol_type = other RNA
aacaccgagggcatcaatctgcccgaactcttcaagtac

SEQ ID NO: 57586 - RNA, 27 nt, synthetic construct
  misc_feature 1..27: note = Putative SMEK homolog 3 (187-195)
  source 1..27: mol_type = other RNA
aacaccgagggcctgcaccatctctac

SEQ ID NO: 57587 - RNA, 39 nt, synthetic construct
  misc_feature 1..39: note = Condensin complex subunit 1 (509-521)
  source 1..39: mol_type = other RNA
aacaccgagacaactgaagacgtgaagggcagaatctac

SEQ ID NO: 57588 - RNA, 30 nt, synthetic construct
  misc_feature 1..30: note = Charged multivesicular body protein 4b (102-111)
  source 1..30: mol_type = other RNA
aacaccgaggtgctgaagaatatgggctac

SEQ ID NO: 57589 - RNA, 39 nt, synthetic construct
  misc_feature 1..39: note = Solute carrier family 25 member 46 (374-386)
  source 1..39: mol_type = other RNA
aacaccatcagacaggaggaaggcgtgttcgggttttac

SEQ ID NO: 57590 - RNA, 39 nt, synthetic construct
  misc_feature 1..39: note = Microphthalmia-associated transcription factor (237-249)
  source 1..39: mol_type = other RNA
aacaccctgcccgtgagcggcaatctcatcgacctttac

SEQ ID NO: 57591 - RNA, 33 nt, synthetic construct
  misc_feature 1..33: note = AT-rich interactive domain-containing protein 1A (858-868)
  source 1..33: mol_type = other RNA
aacaccagcgacatgatgggcagaatgtcctac

SEQ ID NO: 57592 - RNA, 39 nt, synthetic construct; identical to SEQ ID NO: 33365
  misc_feature 1..39: note = Lysine-specific demethylase 5A (460-472)
  source 1..39: mol_type = other RNA

SEQ ID NO: 57593 - RNA, 36 nt, synthetic construct
  misc_feature 1..36: note = Anaphase-promoting complex subunit 7 (270-281)
  source 1..36: mol_type = other RNA
aacgtggacctgctcggcagccttgccgatctgtac

SEQ ID NO: 57594 - RNA, 27 nt, synthetic construct
  misc_feature 1..27: note = 60S ribosomal protein L13a (184-192)
  source 1..27: mol_type = other RNA
aacgtggagaagaaaatcgacaagtac

SEQ ID NO: 57595 - RNA, 30 nt, synthetic construct
  misc_feature 1..30: note = Unhealthy ribosome biogenesis protein 2 homolog (1354-1363)
  source 1..30: mol_type = other RNA
cccctggaccacctcaagcctcttgagtac

SEQ ID NO: 57596 - RNA, 30 nt, synthetic construct
  misc_feature 1..30: note = Nardilysin (107-116)
  source 1..30: mol_type = other RNA
cccagcgaccctaagcagtacagatatatc

SEQ ID NO: 57597 - RNA, 33 nt, synthetic construct
  misc_feature 1..33: note = Probable 28S rRNA (cytosine-C(5))-methyltransferase (291-301)
  source 1..33: mol_type = other RNA
cccagcgaccctagataccacgaggtgcattat

SEQ ID NO: 57598 - RNA, 27 nt, synthetic construct
  misc_feature 1..27: note = Vesicle-associated membrane protein 7 (37-45)
  source 1..27: mol_type = other RNA
cccagcgagaacaataagctgacctac

SEQ ID NO: 57599 - RNA, 36 nt, synthetic construct; identical to SEQ ID NO: 33372
  misc_feature 1..36: note = ELAV-like protein 1 (98-109)
  source 1..36: mol_type = other RNA

SEQ ID NO: 57600 - RNA, 27 nt, synthetic construct
  misc_feature 1..27: note = Copine-1 (299-307)
  source 1..27: mol_type = other RNA
cccagctcccctgactctctgcactac

SEQ ID NO: 57601 - RNA, 27 nt, synthetic construct
  misc_feature 1..27: note = Leucyl-cystinyl aminopeptidase (155-163)
  source 1..27: mol_type = other RNA
cccaccgccgtggtccctctgagatac

SEQ ID NO: 57602 - RNA, 36 nt, synthetic construct
  misc_feature 1..36: note = Mitogen-activated protein kinase kinase kinase kinase 2 (799-810)
  source 1..36: mol_type = other RNA
cccaccgacaaccctgaggcccacagcaatctgtac

SEQ ID NO: 57603 - RNA, 33 nt, synthetic construct
  misc_feature 1..33: note = GRAM domain-containing protein 4 (500-510)
  source 1..33: mol_type = other RNA
cccaccgactacatcagaaacggcgtgctgtat

SEQ ID NO: 57604 - RNA, 30 nt, synthetic construct
  misc_feature 1..30: note = Vam6/Vps39-like protein (288-297)
  source 1..30: mol_type = other RNA
cccaccgactacagaaagcagctgcaatat

SEQ ID NO: 57605 - RNA, 27 nt, synthetic construct
  misc_feature 1..27: note = Syntaxin-binding protein 5 (645-653)
  source 1..27: mol_type = other RNA
cccaccgagatccagagactgacatac

SEQ ID NO: 57606 - RNA, 36 nt, synthetic construct
  misc_feature 1..36: note = Mitochondrial import receptor subunit TOM70 (145-156)
  source 1..36: mol_type = other RNA
cccaccgagaagaacgtggacctgagcacattctac

SEQ ID NO: 57607 - RNA, 36 nt, synthetic construct
  misc_feature 1..36: note = Nuclear factor erythroid 2-related factor 1 (309-320)
  source 1..36: mol_type = other RNA
cccgtggaggaattcaacgagctgctcagcaagtac

SEQ ID NO: 57608 - RNA, 33 nt, synthetic construct
  misc_feature 1..33: note = Uncharacterized protein KIAA2013 (534-544)
  source 1..33: mol_type = other RNA
caggccgaccccgatgtgctgcacaacagctac

SEQ ID NO: 57609 - RNA, 30 nt, synthetic construct
  misc_feature 1..30: note = Lysophospholipid acyltransferase LPCAT4 (420-429)
  source 1..30: mol_type = other RNA
caggccgagggccccaacagactgctctac

SEQ ID NO: 57610 - RNA, 39 nt, synthetic construct
  misc_feature 1..39: note = Actin-related protein 6 (44-56)
  source 1..39: mol_type = other RNA
cagatcgacgagattaaggatcccagcggcctgttctac

SEQ ID NO: 57611 - RNA, 27 nt, synthetic construct
  misc_feature 1..27: note = Hepatocyte growth factor-regulated tyrosine kinase substrate (459-467)
  source 1..27: mol_type = other RNA
cagctggacgagagaaggctctactat

SEQ ID NO: 57612 - RNA, 27 nt, synthetic construct
  misc_feature 1..27: note = Speriolin-like protein (48-56)
  source 1..27: mol_type = other RNA
cagctggacagaaggatcctcgcctac

SEQ ID NO: 57613 - RNA, 30 nt, synthetic construct
  misc_feature 1..30: note = Zinc finger protein 74 (59-68)
  source 1..30: mol_type = other RNA
cagctggacagcccccaaagagccctctac

SEQ ID NO: 57614 - RNA, 27 nt, synthetic construct
  misc_feature 1..27: note = trabeculin-alpha (4357-4365)
  source 1..27: mol_type = other RNA
cagctggacacccacatggagctctac

SEQ ID NO: 57615 - RNA, 33 nt, synthetic construct
  misc_feature 1..33: note = Phosphofurin acidic cluster sorting protein 1 (106-116)
  source 1..33: mol_type = other RNA
cagctggacgtggccggcagagtcatgcaatac

SEQ ID NO: 57616 - RNA, 33 nt, synthetic construct
  misc_feature 1..33: note = Ubiquitin-40S ribosomal protein S27a (69-79)
  source 1..33: mol_type = other RNA
cagctggaggacggcagaaccctcagcgattac

SEQ ID NO: 57617 - RNA, 36 nt, synthetic construct
  misc_feature 1..36: note = PH domain leucine-rich repeat-containing protein phosphatase 2 (23-34)
  source 1..36: mol_type = other RNA
cagctggagagacccggcgggctcgacaccctttac

SEQ ID NO: 57618 - RNA, 27 nt, synthetic construct
  misc_feature 1..27: note = Transketolase (102-110)
  source 1..27: mol_type = other RNA
cagagcgaccccgcccctctgcaacac

SEQ ID NO: 57619 - RNA, 30 nt, synthetic construct
  misc_feature 1..30: note = HMG box-containing protein 1 (66-75)
  source 1..30: mol_type = other RNA
cagagcgaccccacccaatccggcatgtac

SEQ ID NO: 57620 - RNA, 30 nt, synthetic construct
  misc_feature 1..30: note = Aryl hydrocarbon receptor (150-159)
  source 1..30: mol_type = other RNA
cagagcgacgtgatccaccaatccgtctac

SEQ ID NO: 57621 - RNA, 39 nt, synthetic construct
  misc_feature 1..39: note = HLA class I histocompatibility antigen, A-1 alpha chain (86-98)
  source 1..39: mol_type = other RNA
cagagcgaggacggctcccacaccatccaaattatgtac

SEQ ID NO: 57622 - RNA, 33 nt, synthetic construct
  misc_feature 1..33: note = Pre-mRNA-splicing factor ISY1 homolog (275-285)
  source 1..33: mol_type = other RNA
cagagcgaggaagccagaaggctgctcggctac

SEQ ID NO: 57623 - RNA, 30 nt, synthetic construct
  misc_feature 1..30: note = LIM and SH3 domain protein 1 (77-86)
  source 1..30: mol_type = other RNA
cagagcgagctgcaatcccaggtgagatac

SEQ ID NO: 57624 - RNA, 27 nt, synthetic construct
  misc_feature 1..27: note = Dynamin-1-like protein (672-680)
  source 1..27: mol_type = other RNA
cagagcgagctggtgggccaactctac

SEQ ID NO: 57625 - RNA, 36 nt, synthetic construct
  misc_feature 1..36: note = E3 ubiquitin-protein ligase synoviolin (163-174)
  source 1..36: mol_type = other RNA
cagagcgagaacccctgggacaataaggccgtgtac

SEQ ID NO: 57626 - RNA, 27 nt, synthetic construct
  misc_feature 1..27: note = Vacuolar protein sorting-associated protein 13D (1153-1161)
  source 1..27: mol_type = other RNA
cagagcgagagagaatacatcaggtat

SEQ ID NO: 57627 - RNA, 30 nt, synthetic construct
  misc_feature 1..30: note = Ubiquitin carboxyl-terminal hydrolase 25 (71-80)
  source 1..30: mol_type = other RNA
cagaccgccctgcccggcaacgacagatac

SEQ ID NO: 57628 - RNA, 30 nt, synthetic construct
  misc_feature 1..30: note = Zinc finger MYM-type protein 2 (609-618)
  source 1..30: mol_type = other RNA
cagaccgacgatacatggagaactgagtac

SEQ ID NO: 57629 - RNA, 27 nt, synthetic construct
  misc_feature 1..27: note = Disintegrin and metalloproteinase domain-containing protein 10 (227-235)
  source 1..27: mol_type = other RNA
cagaccgaccacctgttctttaagtac

SEQ ID NO: 57630 - RNA, 33 nt, synthetic construct
  misc_feature 1..33: note = RNA polymerase-associated protein CTR9 homolog (424-434)
  source 1..33: mol_type = other RNA
cagaccgacatccaaggcgccctgagcgcttac

SEQ ID NO: 57631 - RNA, 36 nt, synthetic construct
  misc_feature 1..36: note = AP-1 complex subunit beta-1 (59-70)
  source 1..36: mol_type = other RNA
cagaccgacaacctggagctcaagaaacttgtgtac

SEQ ID NO: 57632 - RNA, 30 nt, synthetic construct
  misc_feature 1..30: note = Charged multivesicular body protein 7 (274-283)
  source 1..30: mol_type = other RNA
cagaccgaccaaatggtgttcaacgcctac

SEQ ID NO: 57633 - RNA, 33 nt, synthetic construct; identical to SEQ ID NO: 33406
  misc_feature 1..33: note = Midasin (362-372)
  source 1..33: mol_type = other RNA

SEQ ID NO: 57634 - RNA, 30 nt, synthetic construct
  misc_feature 1..30: note = RAB6A-GEF complex partner protein 2 (260-269)
  source 1..30: mol_type = other RNA
cagaccgaggaaagagtgcaacccgagtac

SEQ ID NO: 57635 - RNA, 33 nt, synthetic construct
  misc_feature 1..33: note = UDP-glucose:glycoprotein glucosyltransferase 1 (1328-1338)
  source 1..33: mol_type = other RNA
cagaccgagaagcaaagaatcatttggggctac

SEQ ID NO: 57636 - RNA, 30 nt, synthetic construct
  misc_feature 1..30: note = Probable cation-transporting ATPase 13A3 (131-140)
  source 1..30: mol_type = other RNA
cagaccgagagccaacagatcagatacttc

SEQ ID NO: 57637 - RNA, 36 nt, synthetic construct
  misc_feature 1..36: note = Intraflagellar transport protein 81 homolog (447-458)
  source 1..36: mol_type = other RNA
cagaccatggaggaaaagaaaggcatcagcgggtac

SEQ ID NO: 57638 - RNA, 27 nt, synthetic construct
  misc_feature 1..27: note = Importin subunit alpha-5 (516-524)
  source 1..27: mol_type = other RNA
caggtggacctgaaccaacagcagtac

SEQ ID NO: 57639 - RNA, 30 nt, synthetic construct; identical to SEQ ID NO: 33412
  misc_feature 1..30: note = Protein PRR14L (815-824)
  source 1..30: mol_type = other RNA

SEQ ID NO: 57640 - RNA, 30 nt, synthetic construct
  misc_feature 1..30: note = DNA-directed RNA polymerase II subunit RPB9 (103-112)
  source 1..30: mol_type = other RNA
agagccgaggacgctatgaggctgtactat

SEQ ID NO: 57641 - RNA, 27 nt, synthetic construct
  misc_feature 1..27: note = CDK5 regulatory subunit-associated protein 2 (1335-1343)
  source 1..27: mol_type = other RNA
agaatcgaggaagacaacctgacctac

SEQ ID NO: 57642 - RNA, 27 nt, synthetic construct
  misc_feature 1..27: note = Vacuole membrane protein 1 (105-113)
  source 1..27: mol_type = other RNA
agaatcgagaagcagttcctgctctac

SEQ ID NO: 57643 - RNA, 27 nt, synthetic construct
  misc_feature 1..27: note = Lanosterol 14-alpha demethylase (418-426)
  source 1..27: mol_type = other RNA
agactggacttcaaccccgataggtac

SEQ ID NO: 57644 - RNA, 30 nt, synthetic construct
  misc_feature 1..30: note = Tubulin alpha-1C chain (355-364)
  source 1..30: mol_type = other RNA
agactggaccacaagttcgatctcatgtac

SEQ ID NO: 57645 - RNA, 36 nt, synthetic construct
  misc_feature 1..36: note = Nitric oxide synthase, endothelial (782-793)
  source 1..36: mol_type = other RNA
agactggacaccggcgggcaggagggactccaatac

SEQ ID NO: 57646 - RNA, 33 nt, synthetic construct
  misc_feature 1..33: note = Transmembrane emp24 domain-containing protein 7 (68-78)
  source 1..33: mol_type = other RNA
agactggaggaccccgatggcaaggtgctctac

SEQ ID NO: 57647 - RNA, 30 nt, synthetic construct
  misc_feature 1..30: note = Peptidyl-prolyl cis-trans isomerase FKBP3 (189-198)
  source 1..30: mol_type = other RNA
agactggagatcgaacccgagtgggcctac

SEQ ID NO: 57648 - RNA, 33 nt, synthetic construct
  misc_feature 1..33: note = Ubiquitin carboxyl-terminal hydrolase 15 (403-413)
  source 1..33: mol_type = other RNA
agaatggaccccctgaccaagcctatgcagtac

SEQ ID NO: 57649 - RNA, 36 nt, synthetic construct
  misc_feature 1..36: note = WASH complex subunit strumpellin (230-241)
  source 1..36: mol_type = other RNA
agaagcgacgatatctacaaccaggtgtccgcctat

SEQ ID NO: 57650 - RNA, 30 nt, synthetic construct
  misc_feature 1..30: note = Selenocysteine insertion sequence-binding protein 2-like (379-388)
  source 1..30: mol_type = other RNA
agaagcgaccccaactccgagtctctgtac

SEQ ID NO: 57651 - RNA, 33 nt, synthetic construct
  misc_feature 1..33: note = Nuclear cap-binding protein subunit 2 (10-20)
  source 1..33: mol_type = other RNA
agaagcgactcctacgtggagctgtctcagtat

SEQ ID NO: 57652 - RNA, 36 nt, synthetic construct
  misc_feature 1..36: note = Methyltransferase-like protein 22 (16-27)
  source 1..36: mol_type = other RNA
agaagcgacaccgtgctgtccgatgtccacctctac

SEQ ID NO: 57653 - RNA, 45 nt, synthetic construct
  misc_feature 1..45: note = Eukaryotic translation initiation factor 3 subunit E (431-445)
  source 1..45: mol_type = other RNA
agaagcgaggcccccaactgggctacccaggactccggcttctac

SEQ ID NO: 57654 - RNA, 30 nt, synthetic construct
  misc_feature 1..30: note = F-box only protein 9 (210-219)
  source 1..30: mol_type = other RNA
agaaccgacgccatcctgctcggccactac

SEQ ID NO: 57655 - RNA, 33 nt, synthetic construct
  misc_feature 1..33: note = General transcription factor II-I repeat domain-containing protein 2B (69-79)
  source 1..33: mol_type = other RNA
agaaccgacttccagaaggattttgccaaatac

SEQ ID NO: 57656 - RNA, 27 nt, synthetic construct
  misc_feature 1..27: note = Cytoplasmic dynein 1 heavy chain 1 (3544-3552)
  source 1..27: mol_type = other RNA
agaaccgacatcgccaggacagagtac

SEQ ID NO: 57657 - RNA, 36 nt, synthetic construct
  misc_feature 1..36: note = ERI1 exoribonuclease 3 (98-109)
  source 1..36: mol_type = other RNA
agaaccatggagatcgaaagcacattccacatgtac

SEQ ID NO: 57658 - RNA, 30 nt, synthetic construct
  misc_feature 1..30: note = U5 small nuclear ribonucleoprotein 200 kDa helicase (666-675)
  source 1..30: mol_type = other RNA
agagtggaccccgccaagggcctgttctac

SEQ ID NO: 57659 - RNA, 30 nt, synthetic construct
  misc_feature 1..30: note = DmX-like protein 2 (729-738)
  source 1..30: mol_type = other RNA
agagtggaccccatcggccctctgagctac

SEQ ID NO: 57660 - RNA, 27 nt, synthetic construct
  misc_feature 1..27: note = Serine/threonine-protein kinase SMG1 (32-40)
  source 1..27: mol_type = other RNA
agcgccgaccccggcaacctgaagtac

SEQ ID NO: 57661 - RNA, 27 nt, synthetic construct
  misc_feature 1..27: note = DNA mismatch repair protein Msh6 (340-348)
  source 1..27: mol_type = other RNA
agcgactccctggtgcagaagggctac

SEQ ID NO: 57662 - RNA, 33 nt, synthetic construct
  misc_feature 1..33: note = GPI transamidase component PIG-T (52-62)
  source 1..33: mol_type = other RNA
agcgagctgcagagagaaggcgtgtcccactac

SEQ ID NO: 57663 - RNA, 33 nt, synthetic construct; identical to SEQ ID NO: 33436
  misc_feature 1..33: note = Ectonucleotide pyrophosphatase/phosphodiesterase family member 2 (308-318)
  source 1..33: mol_type = other RNA

SEQ ID NO: 57664 - RNA, 30 nt, synthetic construct
  misc_feature 1..30: note = Protein YIPF5 (17-26)
  source 1..30: mol_type = other RNA
agcatcgacgatcagtcccaacagtcttac

SEQ ID NO: 57665 - RNA, 30 nt, synthetic construct
  misc_feature 1..30: note = E3 ubiquitin-protein ligase HECTD1 (532-541)
  source 1..30: mol_type = other RNA
agcatcgagagactgcccctccacctttac

SEQ ID NO: 57666 - RNA, 33 nt, synthetic construct
  misc_feature 1..33: note = Creatine kinase B-type (164-174)
  source 1..33: mol_type = other RNA
agcctggacggcgatctcgccgggagatactat

SEQ ID NO: 57667 - RNA, 33 nt, synthetic construct
  misc_feature 1..33: note = Protein FAM91A1 (206-216)
  source 1..33: mol_type = other RNA
agcctggactacaacgtggtccactccctctat

SEQ ID NO: 57668 - RNA, 27 nt, synthetic construct
  misc_feature 1..27: note = Cytochrome c oxidase subunit 4 isoform 1, mitochondrial (36-44)
  source 1..27: mol_type = other RNA
agcatggacgagaaggtggaactgtac

SEQ ID NO: 57669 - RNA, 30 nt, synthetic construct
  misc_feature 1..30: note = Paired box protein Pax-3 (312-321)
  source 1..30: mol_type = other RNA
agcatggaccccgtgaccggctaccagtat

SEQ ID NO: 57670 - RNA, 30 nt, synthetic construct
  misc_feature 1..30: note = Heat shock protein HSP 90-alpha (174-183)
  source 1..30: mol_type = other RNA
agctccgacgccctggataagatcagatac

SEQ ID NO: 57671 - RNA, 33 nt, synthetic construct
  misc_feature 1..33: note = Integrin beta-3 (536-546)
  source 1..33: mol_type = other RNA
agctccgacttcggcaagatcaccgggaaatac

SEQ ID NO: 57672 - RNA, 33 nt, synthetic construct
  misc_feature 1..33: note = Protein SEC13 homolog (124-134)
  source 1..33: mol_type = other RNA
agctccgacggcgccatctctctgctcacctac

SEQ ID NO: 57673 - RNA, 30 nt, synthetic construct
  misc_feature 1..30: note = Nucleoporin GLE1 (16-25)
  source 1..30: mol_type = other RNA
agctccgacaagggcagactgtgctactat

SEQ ID NO: 57674 - RNA, 27 nt, synthetic construct
  misc_feature 1..27: note = Histone-lysine N-methyltransferase SETDB2 (309-317)
  source 1..27: mol_type = other RNA
agctccgacaagatcaccacaggctac

SEQ ID NO: 57675 - RNA, 30 nt, synthetic construct
  misc_feature 1..30: note = Scm-like with four MBT domains protein 1 (201-210)
  source 1..30: mol_type = other RNA
agctccgacaactacgagcactggctgtat

SEQ ID NO: 57676 - RNA, 30 nt, synthetic construct
  misc_feature 1..30: note = Forkhead box protein M1 (39-48)
  source 1..30: mol_type = other RNA
agctccgaccccgcctctcagctgtcatac

SEQ ID NO: 57677 - RNA, 33 nt, synthetic construct
  misc_feature 1..33: note = Protein kinase C and casein kinase substrate in neurons protein 2 (14-24)
  source 1..33: mol_type = other RNA
agctccgactctttctgggaggtgggcaactac

SEQ ID NO: 57678 - RNA, 36 nt, synthetic construct
  misc_feature 1..36: note = Vacuolar protein sorting-associated protein 51 homolog (377-388)
  source 1..36: mol_type = other RNA
agctccgactcttcaaagagaaccttcagtgtgtac

SEQ ID NO: 57679 - RNA, 30 nt, synthetic construct
  misc_feature 1..30: note = Clathrin interactor 1 (163-172)
  source 1..30: mol_type = other RNA
agctccgactctgtgggcgggttcagatac

SEQ ID NO: 57680 - RNA, 33 nt, synthetic construct
  misc_feature 1..33: note = Protein FAM189B (167-177)
  source 1..33: mol_type = other RNA
agctccgacaccgccgatttcagagacctgtac

SEQ ID NO: 57681 - RNA, 33 nt, synthetic construct
  misc_feature 1..33: note = WD40 repeat-containing protein SMU1 (7-17)
  source 1..33: mol_type = other RNA
agctccgacgtgatcagactgattatgcagtac

SEQ ID NO: 57682 - RNA, 30 nt, synthetic construct
  misc_feature 1..30: note = Archaemetzincin-2 (168-177)
  source 1..30: mol_type = other RNA
agctccgactactctatcttcgataactat

SEQ ID NO: 57683 - RNA, 27 nt, synthetic construct
  misc_feature 1..27: note = Nuclear receptor-interacting protein 1 (271-279)
  source 1..27: mol_type = other RNA
agctccgaggcccacctgcagcaatac

SEQ ID NO: 57684 - RNA, 27 nt, synthetic construct
  misc_feature 1..27: note = KIF1-binding protein (164-172)
  source 1..27: mol_type = other RNA
agctccgaggccctgtacaaccagtat

SEQ ID NO: 57685 - RNA, 39 nt, synthetic construct
  misc_feature 1..39: note = DNA-dependent protein kinase catalytic subunit (3366-3378)
  source 1..39: mol_type = other RNA
agctccgaggactctgaaaaggtgatcgccggcctgtac

SEQ ID NO: 57686 - RNA, 30 nt, synthetic construct
  misc_feature 1..30: note = Protein C-ets-1 (192-201)
  source 1..30: mol_type = other RNA
agctccgaggaactgctctctcttaagtac

SEQ ID NO: 57687 - RNA, 33 nt, synthetic construct
  misc_feature 1..33: note = UPF0769 protein C21orf59 (235-245)
  source 1..33: mol_type = other RNA
agctccgaggaacagaagcaactgatgctctac

SEQ ID NO: 57688 - RNA, 33 nt, synthetic construct
  misc_feature 1..33: note = Protein-glutamate O-methyltransferase (271-281)
  source 1..33: mol_type = other RNA
agctccgagctggccaccgaagtgcacttctac

SEQ ID NO: 57689 - RNA, 27 nt, synthetic construct
  misc_feature 1..27: note = Trafficking protein particle complex subunit 3 (15-23)
  source 1..27: mol_type = other RNA
agctccgagctgttcaccctcacatac

SEQ ID NO: 57690 - RNA, 30 nt, synthetic construct
  misc_feature 1..30: note = Centriole, cilia and spindle-associated protein (253-262)
  source 1..30: mol_type = other RNA
agctccgagaacccctggatgaccgaatac

SEQ ID NO: 57691 - RNA, 33 nt, synthetic construct
  misc_feature 1..33: note = Proline and serine-rich protein 1 (34-44)
  source 1..33: mol_type = other RNA
agctccgagcaggtggtcgacctgctcagatac

SEQ ID NO: 57692 - RNA, 30 nt, synthetic construct
  misc_feature 1..30: note = Ubiquitin carboxyl-terminal hydrolase 38 (207-216)
  source 1..30: mol_type = other RNA
agctccgagtctggccactactattcatac

SEQ ID NO: 57693 - RNA, 30 nt, synthetic construct
  misc_feature 1..30: note = DNA-dependent protein kinase catalytic subunit (556-565)
  source 1..30: mol_type = other RNA
agctccgagtctctgaaccacctcctttac

SEQ ID NO: 57694 - RNA, 42 nt, synthetic construct
  misc_feature 1..42: note = Single Ig IL-1-related receptor (382-395)
  source 1..42: mol_type = other RNA
agctccgaggtggacgtctctgatctgggctcaagaaactac

SEQ ID NO: 57695 - RNA, 33 nt, synthetic construct; identical to SEQ ID NO: 33468
  misc_feature 1..33: note = ELAV-like protein 1 (99-109)
  source 1..33: mol_type = other RNA

SEQ ID NO: 57696 - RNA, 33 nt, synthetic construct
  misc_feature 1..33: note = Protein FAM65B (857-867)
  source 1..33: mol_type = other RNA
agctccgaggtggtcaccgttttccagtactat

SEQ ID NO: 57697 - RNA, 36 nt, synthetic construct
  misc_feature 1..36: note = Interferon-induced, double-stranded RNA-activated protein kinase (420-431)
  source 1..36: mol_type = other RNA
agctcccaggactacggcaaggaggtggatctgtat

SEQ ID NO: 57698 - RNA, 36 nt, synthetic construct
  misc_feature 1..36: note = Histone-arginine methyltransferase CARM1 (405-416)
  source 1..36: mol_type = other RNA
agcaccgcccccacagagcctctgactcactggtac

SEQ ID NO: 57699 - RNA, 39 nt, synthetic construct
  misc_feature 1..39: note = Protein HIRA (392-404)
  source 1..39: mol_type = other RNA
agcaccgccgtgatcgagaaccccgaaatgctgaagtac

SEQ ID NO: 57700 - RNA, 33 nt, synthetic construct
  misc_feature 1..33: note = Nucleoprotein TPR (1876-1886)
  source 1..33: mol_type = other RNA
agcaccgacggcgaggtggaaacacaggtctac

SEQ ID NO: 57701 - RNA, 30 nt, synthetic construct
  misc_feature 1..30: note = Recombining binding protein suppressor of hairless (318-327)
  source 1..30: mol_type = other RNA
agcaccgacaaggccgagtacacattctat

SEQ ID NO: 57702 - RNA, 33 nt, synthetic construct
  misc_feature 1..33: note = Holliday junction recognition protein (523-533)
  source 1..33: mol_type = other RNA
agcaccgacaaggcctccatggaggtgagatac

SEQ ID NO: 57703 - RNA, 24 nt, synthetic construct
  misc_feature 1..24: note = Eukaryotic translation initiation factor 3 subunit I (111-118)
  source 1..24: mol_type = other RNA
agcaccgacaagcagatgggctac

SEQ ID NO: 57704 - RNA, 33 nt, synthetic construct
  misc_feature 1..33: note = Myocyte-specific enhancer factor 2A (59-69)
  source 1..33: mol_type = other RNA
agcaccgacatggataaggtgctgctcaaatac

SEQ ID NO: 57705 - RNA, 33 nt, synthetic construct
  misc_feature 1..33: note = Integrin alpha-5 (179-189)
  source 1..33: mol_type = other RNA
agcaccgacaacttcacaagaatcctggagtac

SEQ ID NO: 57706 - RNA, 30 nt, synthetic construct
  misc_feature 1..30: note = Nuclear pore complex protein Nup93 (541-550)
  source 1..30: mol_type = other RNA
agcaccgaccccagagaggccctgcagtac

SEQ ID NO: 57707 - RNA, 30 nt, synthetic construct
  misc_feature 1..30: note = Immunoglobulin superfamily member 8 (131-140)
  source 1..30: mol_type = other RNA
agcaccgacacaagatacctgggctcctat

SEQ ID NO: 57708 - RNA, 45 nt, synthetic construct
  misc_feature 1..45: note = RNA-binding protein FUS (44-58)
  source 1..45: mol_type = other RNA
agcaccgacacatccggctacgggcagtcttcatatagtagctac

SEQ ID NO: 57709 - RNA, 30 nt, synthetic construct
  misc_feature 1..30: note = Signal-induced proliferation-associated 1-like protein 1 (909-918)
  source 1..30: mol_type = other RNA
agcaccgacacatccctgaagatcttctac

SEQ ID NO: 57710 - RNA, 36 nt, synthetic construct
  misc_feature 1..36: note = Eukaryotic translation initiation factor 2A (264-275)
  source 1..36: mol_type = other RNA
agcaccgacgtggataagacaggcgcctcctactat

SEQ ID NO: 57711 - RNA, 33 nt, synthetic construct
  misc_feature 1..33: note = 26S proteasome non-ATPase regulatory subunit 8 (239-249)
  source 1..33: mol_type = other RNA
agcaccgagctggccaagcaggtgatcgaatac

SEQ ID NO: 57712 - RNA, 27 nt, synthetic construct
  misc_feature 1..27: note = Asparagine-tRNA ligase, cytoplasmic (174-182)
  source 1..27: mol_type = other RNA
agcaccgagtcctctgtggccgtctac

SEQ ID NO: 57713 - RNA, 36 nt, synthetic construct
  misc_feature 1..36: note = Mitochondrial import inner membrane translocase subunit Tim17-A (156-167)
  source 1..36: mol_type = other RNA
agcacccagctgccctcctctcctttcggcgactac

SEQ ID NO: 57714 - RNA, 27 nt, synthetic construct
  misc_feature 1..27: note = Zinc finger protein 106 (662-670)
  source 1..27: mol_type = other RNA
agcacctccgagatcggcacaagatac

SEQ ID NO: 57715 - RNA, 27 nt, synthetic construct
  misc_feature 1..27: note = Protein strawberry notch homolog 1 (1169-1177)
  source 1..27: mol_type = other RNA
agcacctccggccacgtggagctgtac

SEQ ID NO: 57716 - RNA, 33 nt, synthetic construct
  misc_feature 1..33: note = T-complex protein 1 subunit epsilon (270-280)
  source 1..33: mol_type = other RNA
agcgtggaggactacaaggccctgcagaaatat

SEQ ID NO: 57717 - RNA, 30 nt, synthetic construct
  misc_feature 1..30: note = Glutamine-fructose-6-phosphate aminotransferase (isomerizing) 1 (444-453)
  source 1..30: mol_type = other RNA
accgccgacacactgatgggcctcagatac

SEQ ID NO: 57718 - RNA, 36 nt, synthetic construct
  misc_feature 1..36: note = Splicing factor 3B subunit 6 (31-42)
  source 1..36: mol_type = other RNA
accgccgaggaaatgtacgacatcttcggcaagtat

SEQ ID NO: 57719 - RNA, 30 nt, synthetic construct
  misc_feature 1..30: note = Annexin A11 (431-440)
  source 1..30: mol_type = other RNA
accgacctgctcgatatcagaagcgagtac

SEQ ID NO: 57720 - RNA, 30 nt, synthetic construct
  misc_feature 1..30: note = RNA binding motif protein 22 (244-253)
  source 1..30: mol_type = other RNA
accgagacagacctgagaaaccacttctac

SEQ ID NO: 57721 - RNA, 33 nt, synthetic construct
  misc_feature 1..33: note = Glutamine-tRNA ligase (47-57)
  source 1..33: mol_type = other RNA
accatcgacaaggccacaggcattctgctctac

SEQ ID NO: 57722 - RNA, 30 nt, synthetic construct; identical to SEQ ID NO: 33495
  misc_feature 1..30: note = Pre-mRNA-splicing factor ATP-dependent RNA helicase DHX15 (294-303)
  source 1..30: mol_type = other RNA

SEQ ID NO: 57723 - RNA, 30 nt, synthetic construct; identical to SEQ ID NO: 33496
  misc_feature 1..30: note = ATP-dependent RNA helicase DHX8 (717-726)
  source 1..30: mol_type = other RNA

SEQ ID NO: 57724 - RNA, 30 nt, synthetic construct
  misc_feature 1..30: note = BRCA2-interacting transcriptional repressor EMSY (945-954)
  source 1..30: mol_type = other RNA
accctggacccccagacaggcctcttctac

SEQ ID NO: 57725 - RNA, 39 nt, synthetic construct
  misc_feature 1..39: note = A-kinase anchor protein 11 (1443-1455)
  source 1..39: mol_type = other RNA
accctggacccctacagaaacgaggtgagccagctctat

SEQ ID NO: 57726 - RNA, 27 nt, synthetic construct
  misc_feature 1..27: note = E3 SUMO-protein ligase NSE2 (70-78)
  source 1..27: mol_type = other RNA
accctggacagacagctcaaccactac

SEQ ID NO: 57727 - RNA, 36 nt, synthetic construct
  misc_feature 1..36: note = TOX high mobility group box family member 4 (105-116)
  source 1..36: mol_type = other RNA
accatggacctggatcacagcatcggcacacagtac

SEQ ID NO: 57728 - RNA, 30 nt, synthetic construct
  misc_feature 1..30: note = Dynein light chain roadblock-type 1 (40-49)
  source 1..30: mol_type = other RNA
accatggacaaccccacaactacgcagtac

SEQ ID NO: 57729 - RNA, 33 nt, synthetic construct; identical to SEQ ID NO: 33502
  misc_feature 1..33: note = Retinal dehydrogenase 1 (105-115)
  source 1..33: mol_type = other RNA

SEQ ID NO: 57730 - RNA, 42 nt, synthetic construct
  misc_feature 1..42: note = Alpha-N-acetylglucosaminidase (545-558)
  source 1..42: mol_type = other RNA
accagcgccccctccctggctacatctcctgcattcagatac

SEQ ID NO: 57731 - RNA, 30 nt, synthetic construct
  misc_feature 1..30: note = Cytoplasmic dynein 1 heavy chain 1 (1163-1172)
  source 1..30: mol_type = other RNA
accagcgacgccgtgacattcatcacttac

SEQ ID NO: 57732 - RNA, 30 nt, synthetic construct
  misc_feature 1..30: note = G1/S-specific cyclin-E2 (81-90)
  source 1..30: mol_type = other RNA
accagcgacttctccagatttacaaactac

SEQ ID NO: 57733 - RNA, 33 nt, synthetic construct
  misc_feature 1..33: note = E3 SUMO-protein ligase RanBP2 (1071-1081)
  source 1..33: mol_type = other RNA
accagcgacaagcccctgcagggcgatgggtac

SEQ ID NO: 57734 - RNA, 33 nt, synthetic construct
  misc_feature 1..33: note = Endoplasmic reticulum metallopeptidase 1 (361-371)
  source 1..33: mol_type = other RNA
accagcgacatgctggccgctgcatccaagtac

SEQ ID NO: 57735 - RNA, 33 nt, synthetic construct
  misc_feature 1..33: note = Fizzy-related protein homolog (81-91)
  source 1..33: mol_type = other RNA
accagcgacaacggcaaggatgggctggcctac

SEQ ID NO: 57736 - RNA, 27 nt, synthetic construct
  misc_feature 1..27: note = Beta-hexosaminidase subunit alpha (32-40)
  source 1..27: mol_type = other RNA
accagcgaccagagatacgtgctgtat

SEQ ID NO: 57737 - RNA, 30 nt, synthetic construct
  misc_feature 1..30: note = Leucine-rich repeat flightless-interacting protein 1 (241-250)
  source 1..30: mol_type = other RNA
accagcgacacactgaacaatgtgggctac

SEQ ID NO: 57738 - RNA, 33 nt, synthetic construct
  misc_feature 1..33: note = Protein SDE2 homolog (58-68)
  source 1..33: mol_type = other RNA
accagcgacacagtgcagcacggcgccgtctac

SEQ ID NO: 57739 - RNA, 36 nt, synthetic construct
  misc_feature 1..36: note = Uncharacterized protein C15orf41 (61-72)
  source 1..36: mol_type = other RNA
accagcgaggccatcgaatcctactatcagagatac

SEQ ID NO: 57740 - RNA, 27 nt, synthetic construct
  misc_feature 1..27: note = High affinity cAMP-specific and IBMX-insensitive 3',5'-cyclic phosphodiesterase 8A (115-123)
  source 1..27: mol_type = other RNA
accagcgaggacagattcatccagtac

SEQ ID NO: 57741 - RNA, 36 nt, synthetic construct
  misc_feature 1..36: note = Caprin-1 (438-449)
  source 1..36: mol_type = other RNA
accagcgagggctacacagcctcccagcccctgtat

SEQ ID NO: 57742 - RNA, 39 nt, synthetic construct
  misc_feature 1..39: note = Endoplasmin (188-200)
  source 1..39: mol_type = other RNA
accagcgagctgatcggccagttcggggtgggattttac

SEQ ID NO: 57743 - RNA, 33 nt, synthetic construct
  misc_feature 1..33: note = Sodium/potassium-transporting ATPase subunit alpha-2 (19-29)
  source 1..33: mol_type = other RNA
accagcgagcagctggacgatatcctcaagtac

SEQ ID NO: 57744 - RNA, 27 nt, synthetic construct
  misc_feature 1..27: note = Putative pre-mRNA-splicing factor ATP-dependent RNA helicase DHX16 (487-495)
  source 1..27: mol_type = other RNA
accagcgagagaacagtgctgaggtac

SEQ ID NO: 57745 - RNA, 27 nt, synthetic construct
  misc_feature 1..27: note = Neuroplastin (57-65)
  source 1..27: mol_type = other RNA
accagctcctctcacacactgacttac

SEQ ID NO: 57746 - RNA, 36 nt, synthetic construct
  misc_feature 1..36: note = Unconventional myosin-Va (1775-1786)
  source 1..36: mol_type = other RNA
accacagcccagatcgtgaaggtcctgaacctctac

SEQ ID NO: 57747 - RNA, 30 nt, synthetic construct
  misc_feature 1..30: note = Leukotriene A-4 hydrolase (421-430)
  source 1..30: mol_type = other RNA
accacagacgattggaaggacttcctgtac

SEQ ID NO: 57748 - RNA, 33 nt, synthetic construct
  misc_feature 1..33: note = DNA-directed RNA polymerases I and III subunit RPAC1 (26-36)
  source 1..33: mol_type = other RNA
accacagacttccccggcaactacagcgggtat

SEQ ID NO: 57749 - RNA, 27 nt, synthetic construct
  misc_feature 1..27: note = Mitotic spindle assembly checkpoint protein MAD2A (56-64)
  source 1..27: mol_type = other RNA
accacagacctggagctcatcaagtac

SEQ ID NO: 57750 - RNA, 30 nt, synthetic construct
  misc_feature 1..30: note = Ubiquitin-like modifier-activating enzyme 6 (145-154)
  source 1..30: mol_type = other RNA
accacagacctgagcttcctcgataagtac

SEQ ID NO: 57751 - RNA, 39 nt, synthetic construct
  misc_feature 1..39: note = Exosome complex component RRP4 (34-46)
  source 1..39: mol_type = other RNA
accacagacactggcttcatgagagggcacggaacgtac

SEQ ID NO: 57752 - RNA, 27 nt, synthetic construct
  misc_feature 1..27: note = SET domain-containing protein 4 (60-68)
  source 1..27: mol_type = other RNA
accacagacactgtgatcagaagctac

SEQ ID NO: 57753 - RNA, 30 nt, synthetic construct
  misc_feature 1..30: note = Transmembrane protein 70, mitochondrial (28-37)
  source 1..30: mol_type = other RNA
accacagacacttacaaggccatcacgtat

SEQ ID NO: 57754 - RNA, 27 nt, synthetic construct
  misc_feature 1..27: note = Enhancer of filamentation 1 (432-440)
  source 1..27: mol_type = other RNA
accacagactggagatgctacggctat

SEQ ID NO: 57755 - RNA, 36 nt, synthetic construct
  misc_feature 1..36: note = Matrin-3 (444-455)
  source 1..36: mol_type = other RNA
accacagaggacgcccaggctgcagtggattactat

SEQ ID NO: 57756 - RNA, 30 nt, synthetic construct
  misc_feature 1..30: note = Superkiller viralicidic activity 2-like 2 (229-238)
  source 1..30: mol_type = other RNA
accacagagatcctgagaagcatgctctac

SEQ ID NO: 57757 - RNA, 36 nt, synthetic construct
  misc_feature 1..36: note = TBCC domain-containing protein 1 (479-490)
  source 1..36: mol_type = other RNA
accacagagatccccggcgggctgcctagcgtgtac

SEQ ID NO: 57758 - RNA, 39 nt, synthetic construct
  misc_feature 1..39: note = DNA damage-binding protein 1 (894-906)
  source 1..39: mol_type = other RNA
accacagagaaggaactgagaactgagtgcaaccactac

SEQ ID NO: 57759 - RNA, 36 nt, synthetic construct
  misc_feature 1..36: note = Mitotic spindle assembly checkpoint protein MAD1 (643-654)
  source 1..36: mol_type = other RNA
accacagagaaccagtacagactgactagcctctat

SEQ ID NO: 57760 - RNA, 39 nt, synthetic construct
  misc_feature 1..39: note = Akirin-2 (77-89)
  source 1..39: mol_type = other RNA
accacagagcagatcctgtacaacattaagcaagaatat

SEQ ID NO: 57761 - RNA, 30 nt, synthetic construct
  misc_feature 1..30: note = vacuolar protein sorting-associated protein 26A isoform 3 (217-226)
  source 1..30: mol_type = other RNA
accacagagactgaaacgatcgccaagtac

SEQ ID NO: 57762 - RNA, 39 nt, synthetic construct
  misc_feature 1..39: note = BCL2/adenovirus E1B 19 kDa protein-interacting protein 2 (168-180)
  source 1..39: mol_type = other RNA
accacagaggtgatcagaaagggcagcattactgaatac

SEQ ID NO: 57763 - RNA, 27 nt, synthetic construct
  misc_feature 1..27: note = ADP-sugar pyrophosphatase (192-200)
  source 1..27: mol_type = other RNA
accgtggacgccagagtctacagctat

SEQ ID NO: 57764 - RNA, 27 nt, synthetic construct
  misc_feature 1..27: note = U3 small nucleolar RNA-associated protein 15 homolog (108-116)
  source 1..27: mol_type = other RNA
accgtggacttcacagccgataagtac

SEQ ID NO: 57765 - RNA, 30 nt, synthetic construct; identical to SEQ ID NO: 33538
  misc_feature 1..30: note = Fascin (484-493)
  source 1..30: mol_type = other RNA

SEQ ID NO: 57766 - RNA, 30 nt, synthetic construct
  misc_feature 1..30: note = Proteasome subunit alpha type-7 (97-106)
  source 1..30: mol_type = other RNA
accgtggaggaccccgtcacagttgaatac

SEQ ID NO: 57767 - RNA, 36 nt, synthetic construct
  misc_feature 1..36: note = 14-3-3 protein epsilon (38-49)
  source 1..36: mol_type = other RNA
accgtggaggaaagaaacctgctcagcgtcgcctac

SEQ ID NO: 57768 - RNA, 36 nt, synthetic construct
  misc_feature 1..36: note = Importin-11 (432-443)
  source 1..36: mol_type = other RNA
accgtggaggaaacaggcggggacagctggaagtac

SEQ ID NO: 57769 - RNA, 36 nt, synthetic construct
  misc_feature 1..36: note = Nodal modulator 2 (271-282)
  source 1..36: mol_type = other RNA
accgtgagcagagaggacggctccttctctttttac

SEQ ID NO: 57770 - RNA, 33 nt, synthetic construct
  misc_feature 1..33: note = Tetratricopeptide repeat protein 13 (506-516)
  source 1..33: mol_type = other RNA
gtggccgacagactgggcagcctcatgcagtac

SEQ ID NO: 57771 - RNA, 39 nt, synthetic construct
  misc_feature 1..39: note = Proteasome subunit beta type-4 (85-97)
  source 1..39: mol_type = other RNA
gtgatcgacgaggaactgctcggcgatgggcacagctac

SEQ ID NO: 57772 - RNA, 30 nt, synthetic construct
  misc_feature 1..30: note = Tubulin alpha-1C chain (144-153)
  source 1..30: mol_type = other RNA
gtgatcgacgaggtcagaaccggcacatac

SEQ ID NO: 57773 - RNA, 36 nt, synthetic construct
  misc_feature 1..36: note = Spindlin-3 (381-392)
  source 1..36: mol_type = other RNA
gtgatcgacagcctggtcggcaagcaggttgagtac

SEQ ID NO: 57774 - RNA, 30 nt, synthetic construct
  misc_feature 1..30: note = Protein HIRA (395-404)
  source 1..30: mol_type = other RNA
gtgatcgagaaccccgaaatgctgaagtac

SEQ ID NO: 57775 - RNA, 27 nt, synthetic construct
  misc_feature 1..27: note = Beta-hexosaminidase subunit alpha (60-68)
  source 1..27: mol_type = other RNA
gtgctggacgaggccttccagagatac

SEQ ID NO: 57776 - RNA, 27 nt, synthetic construct
  misc_feature 1..27: note = LETM1 and EF-hand domain-containing protein 1, mitochondrial (157-165)
  source 1..27: mol_type = other RNA
gtgctggacgagctcaagcactactat

SEQ ID NO: 57777 - RNA, 27 nt, synthetic construct
  misc_feature 1..27: note = Activating signal cointegrator 1 complex subunit 2 (386-394)
  source 1..27: mol_type = other RNA
gtgctggacgagaccagaacagcctac

SEQ ID NO: 57778 - RNA, 36 nt, synthetic construct
  misc_feature 1..36: note = DNA-directed RNA polymerase I subunit RPA1 (748-759)
  source 1..36: mol_type = other RNA
gtgctggacaaggcccactacggcagctccgcttat

SEQ ID NO: 57779 - RNA, 36 nt, synthetic construct
  misc_feature 1..36: note = Nucleolar protein 14 (322-333)
  source 1..36: mol_type = other RNA
gtgctggacaaggatgacagaaggctccttagctac

SEQ ID NO: 57780 - RNA, 30 nt, synthetic construct; identical to SEQ ID NO: 33553
  misc_feature 1..30: note = ATP-binding cassette sub-family B member 10, mitochondrial (194-203)
  source 1..30: mol_type = other RNA

SEQ ID NO: 57781 - RNA, 27 nt, synthetic construct
  misc_feature 1..27: note = Kinesin-like protein KIF18B (102-110)
  source 1..27: mol_type = other RNA
gtgctggacagcttcctccagggctac

SEQ ID NO: 57782 - RNA, 27 nt, synthetic construct
  misc_feature 1..27: note = Ubiquitin-conjugating enzyme E2 Z (270-278)
  source 1..27: mol_type = other RNA
gtgatggagaagagcttcctggaatac

SEQ ID NO: 57783 - RNA, 27 nt, synthetic construct
  misc_feature 1..27: note = Elongator complex protein 1 (872-880)
  source 1..27: mol_type = other RNA
gtgagcgccgaggaagctctgaagtac

SEQ ID NO: 57784 - RNA, 36 nt, synthetic construct
  misc_feature 1..36: note = DNA repair protein XRCC4 (166-177)
  source 1..36: mol_type = other RNA
gtgagcgccaaggaggctctggaaaccgacctctac

SEQ ID NO: 57785 - RNA, 27 nt, synthetic construct
  misc_feature 1..27: note = FERM domain-containing protein 4A (924-932)
  source 1..27: mol_type = other RNA
gtgagcgacgagctgagacagtggtac

SEQ ID NO: 57786 - RNA, 30 nt, synthetic construct; identical to SEQ ID NO: 33559
  misc_feature 1..30: note = Constitutive coactivator of peroxisome proliferator-activated receptor gamma (279-288)
  source 1..30: mol_type = other RNA

SEQ ID NO: 57787 - RNA, 36 nt, synthetic construct
  misc_feature 1..36: note = Importin-5 (842-853)
  source 1..36: mol_type = other RNA
gtgagcgacatcctgcactccattttctcttcatac

SEQ ID NO: 57788 - RNA, 36 nt, synthetic construct
  misc_feature 1..36: note = Splicing factor 1 (136-147)
  source 1..36: mol_type = other RNA
gtgagcgacaaggtcatgatcccccaggatgagtac

SEQ ID NO: 57789 - RNA, 27 nt, synthetic construct
  misc_feature 1..27: note = Phosphatidylinositol 4-phosphate 3-kinase C2 domain-containing subunit beta (917-925)
  source 1..27: mol_type = other RNA
gtgagcgacctgagagtcacccactac

SEQ ID NO: 57790 - RNA, 30 nt, synthetic construct; identical to SEQ ID NO: 33563
  misc_feature 1..30: note = Acetyl-coenzyme A transporter 1 (439-448)
  source 1..30: mol_type = other RNA

SEQ ID NO: 57791 - RNA, 39 nt, synthetic construct
  misc_feature 1..39: note = Zinc finger protein 275 (31-43)
  source 1..39: mol_type = other RNA
gtgagcgacccctcccctaacaccgatccagccaagtac

SEQ ID NO: 57792 - RNA, 36 nt, synthetic construct
  misc_feature 1..36: note = Tripeptidyl-peptidase 1 (68-79)
  source 1..36: mol_type = other RNA
gtgagcgacccctcctctcctcagtacggcaagtat

SEQ ID NO: 57793 - RNA, 39 nt, synthetic construct
  misc_feature 1..39: note = Tripeptidyl-peptidase 1 (68-80)
  source 1..39: mol_type = other RNA
gtgagcgacccctcctctcctcagtacggcaagtatctg

SEQ ID NO: 57794 - RNA, 33 nt, synthetic construct
  misc_feature 1..33: note = Cleavage and polyadenylation specificity factor subunit 1 (1271-1281)
  source 1..33: mol_type = other RNA
gtgagcgacagagataggaacctgatggtctac

SEQ ID NO: 57795 - RNA, 36 nt, synthetic construct
  misc_feature 1..36: note = TELO2-interacting protein 1 homolog (40-51)
  source 1..36: mol_type = other RNA
gtgagcgactccgccctgcaggagctccaacagtac

SEQ ID NO: 57796 - RNA, 30 nt, synthetic construct; identical to SEQ ID NO: 33569
  misc_feature 1..30: note = E3 ubiquitin-protein ligase HACE1 (749-758)
  source 1..30: mol_type = other RNA

SEQ ID NO: 57797 - RNA, 27 nt, synthetic construct
  misc_feature 1..27: note = AT-rich interactive domain-containing protein 2 (138-146)
  source 1..27: mol_type = other RNA
gtgagcgactacctgagacagtcctat

SEQ ID NO: 57798 - RNA, 33 nt, synthetic construct
  misc_feature 1..33: note Dolichyl-diphosphooligosaccharide-proteinosyltransferase subunit 2 (116-126)
  source 1..33: mol_type = other RNA
gtgagcgaggactcctctgtcacccagatctac

SEQ ID NO: 57799 - RNA, 33 nt, synthetic construct
  misc_feature 1..33: note = Histone H2B type 1-A (113-123)
  source 1..33: mol_type = other RNA
gtgagcgagggcaccaaggccgtcacaaaatac

SEQ ID NO: 57800 - RNA, 36 nt, synthetic construct
  misc_feature 1..36: note = Tetraspanin-33 (126-137)
  source 1..36: mol_type = other RNA
gtgagcgagatcattaacaatgccatagtccactac

SEQ ID NO: 57801 - RNA, 27 nt, synthetic construct
  misc_feature 1..27: note = Peroxisome assembly factor 2 (962-970)
  source 1..27: mol_type = other RNA
gtgagcgagcaggaactgctcagatac

SEQ ID NO: 57802 - RNA, 30 nt, synthetic construct
  misc_feature 1..30: note = TraB domain-containing protein (260-269)
  source 1..30: mol_type = other RNA
gtgagcgagagagacgtctacctgacctat

SEQ ID NO: 57803 - RNA, 39 nt, synthetic construct
  misc_feature 1..39: note = Paired amphipathic helix protein Sin3a (44-56)
  source 1..39: mol_type = other RNA
gtgagcgagaccatgcagtccgccacaggcatccaatac

SEQ ID NO: 57804 - RNA, 45 nt, synthetic construct
  misc_feature 1..45: note = Nuclear pore complex protein Nup160 (1171-1185)
  source 1..45: mol_type = other RNA
gtgagcgagtacgtcgacgccgttctgggcaaggggcaccagtat

SEQ ID NO: 57805 - RNA, 36 nt, synthetic construct
  misc_feature 1..36: note = Oral-facial-digital syndrome 1 protein (787-798)
  source 1..36: mol_type = other RNA
gtgagctccccccctgagcagaaggtcggcctgtac

SEQ ID NO: 57806 - RNA, 33 nt, synthetic construct
  misc_feature 1..33: note = Zinc finger protein 106 (703-713)
  source 1..33: mol_type = other RNA
gtgagctccacctctgagatcggcacaagatac

SEQ ID NO: 57807 - RNA, 39 nt, synthetic construct
  misc_feature 1..39: note = Nuclear factor of activated T-cells, cytoplasmic 1 (282-294)
  source 1..39: mol_type = other RNA
gtgaccgacgatagctggctgggcaacacaactcagtac

SEQ ID NO: 57808 - RNA, 36 nt, synthetic construct
  misc_feature 1..36: note = Mediator of RNA polymerase II transcription subunit 27 (204-215)
  source 1..36: mol_type = other RNA
gtgaccgaccacgccacaactgctctgctccattac

SEQ ID NO: 57809 - RNA, 30 nt, synthetic construct
  misc_feature 1..30: note = DnaJ homolog subfamily B member 12 (287-296)
  source 1..30: mol_type = other RNA
gtgaccgaccacctgggcgtcgtttactat

SEQ ID NO: 57810 - RNA, 33 nt, synthetic construct
  misc_feature 1..33: note = Telomerase protein component 1 (1368-1378)
  source 1..33: mol_type = other RNA
gtgaccgaccacctgagactcttcacactttac

SEQ ID NO: 57811 - RNA, 36 nt, synthetic construct
  misc_feature 1..36: note = TBC1 domain family member 8 (757-768)
  source 1..36: mol_type = other RNA
gtgaccgacatcagcgatctgattagagactcctac

SEQ ID NO: 57812 - RNA, 30 nt, synthetic construct
  misc_feature 1..30: note = Protein MEF2BNB (13-22)
  source 1..30: mol_type = other RNA
gtgaccgacaagttcacagagagcgtctac

SEQ ID NO: 57813 - RNA, 36 nt, synthetic construct
  misc_feature 1..36: note = Complex I assembly factor TMEM126B, mitochondrial (46-57)
  source 1..36: mol_type = other RNA
gtgaccgacaagctgttcgtcatcgatgccctctac

SEQ ID NO: 57814 - RNA, 39 nt, synthetic construct
  misc_feature 1..39: note = Histone acetyltransferase type B catalytic subunit (339-351)
  source 1..39: mol_type = other RNA
gtgaccgacatgagcgatgccgagcagtacagatcctat

SEQ ID NO: 57815 - RNA, 36 nt, synthetic construct
  misc_feature 1..36: note = Afadin (762-773)
  source 1..36: mol_type = other RNA
gtgaccgaccccgatagcggcctgtgctcccactac

SEQ ID NO: 57816 - RNA, 30 nt, synthetic construct
  misc_feature 1..30: note = Cation-independent mannose-6-phosphate receptor (769-778)
  source 1..30: mol_type = other RNA
gtgaccgaccccagcacactggagcagtac

SEQ ID NO: 57817 - RNA, 30 nt, synthetic construct
  misc_feature 1..30: note = DNA polymerase delta subunit 3 (14-23)
  source 1..30: mol_type = other RNA
gtgaccgaccagaacaagatcgtcacatac

SEQ ID NO: 57818 - RNA, 33 nt, synthetic construct
  misc_feature 1..33: note = Gamma-secretase subunit APH-1A (59-69)
  source 1..33: mol_type = other RNA
gtgaccgacagaagcgatgccaggctgcagtac

SEQ ID NO: 57819 - RNA, 30 nt, synthetic construct
  misc_feature 1..30: note = DNA topoisomerase 2-alpha (1118-1127)
  source 1..30: mol_type = other RNA
gtgaccgacagcggccccacattcaactac

SEQ ID NO: 57820 - RNA, 30 nt, synthetic construct
  misc_feature 1..30: note = Bcl-2-modifying factor (88-97)
  source 1..30: mol_type = other RNA
gtgaccgaggaaccccagagactgttctac

SEQ ID NO: 57821 - RNA, 33 nt, synthetic construct
  misc_feature 1..33: note = Protein SET (135-145)
  source 1..33: mol_type = other RNA
gtgaccgagttcgaagacatcaagagcggctac

SEQ ID NO: 57822 - RNA, 27 nt, synthetic construct
  misc_feature 1..27: note = Epididymis-specific alpha-mannosidase (660-668)
  source 1..27: mol_type = other RNA
gtgaccgagatcagacagtacttctat

SEQ ID NO: 57823 - RNA, 33 nt, synthetic construct
  misc_feature 1..33: note = Ras association domain-containing protein 3 (64-74)
  source 1..33: mol_type = other RNA
gtgaccgagagccccgccaagttcgctctgtac

SEQ ID NO: 57824 - RNA, 30 nt, synthetic construct
  misc_feature 1..30: note = WD repeat-containing protein 63 (174-183)
  source 1..30: mol_type = other RNA
gtgaccgagagcacaaagcagatcacttac

SEQ ID NO: 57825 - RNA, 27 nt, synthetic construct
  misc_feature 1..27: note = Uncharacterized protein C15orf61 (132-140)
  source 1..27: mol_type = other RNA
gtgaccgagacagtccacactagctac

SEQ ID NO: 57826 - RNA, 36 nt, synthetic construct
  misc_feature 1..36: note = Nesprin-2 (266-277)
  source 1..36: mol_type = other RNA
gtggtcgaccccgatgagaagagcatcatgacctac

SEQ ID NO: 57827 - RNA, 36 nt, synthetic construct
  misc_feature 1..36: note = Spindlin-1 (194-205)
  source 1..36: mol_type = other RNA
gtggtcgacagcctggttggcaagcaggtggagtac

SEQ ID NO: 57828 - RNA, 39 nt, synthetic construct
  misc_feature 1..39: note = Protein transport protein Sec61 subunit alpha isoform 1 (324-336)
  source 1..39: mol_type = other RNA
tggagcgacacctcctctggcgggcccgccagagcttac

SEQ ID NO: 57829 - RNA, 30 nt, synthetic construct
  misc_feature 1..30: note = Cholinesterase (404-413)
  source 1..30: mol_type = other RNA
tgggtggacgatcagagacccgagaactac

SEQ ID NO: 57830 - RNA, 39 nt, synthetic construct
  misc_feature 1..39: note = Acetyl-CoA carboxylase 1 (1775-1787)
  source 1..39: mol_type = other RNA
tgggtggaccccgaggatccttacaagggctatagatac

SEQ ID NO: 57831 - RNA, 30 nt, synthetic construct
  misc_feature 1..30: note = Proteasome subunit beta type-4 (129-138)
  source 1..30: mol_type = other RNA
tacgccgacggcgagagcttcctggggtat

SEQ ID NO: 57832 - RNA, 30 nt, synthetic construct
  misc_feature 1..30: note = DNA polymerase epsilon catalytic subunit A (1792-1801)
  source 1..30: mol_type = other RNA
tacgccgacaaccaggtgatgcacttctat

SEQ ID NO: 57833 - RNA, 33 nt, synthetic construct
  misc_feature 1..33: note = Sorting nexin-4 (300-310)
  source 1..33: mol_type = other RNA
tacgccgaccagctgaaggagtatctcttctac

SEQ ID NO: 57834 - RNA, 33 nt, synthetic construct
  misc_feature 1..33: note = Cleavage stimulation factor subunit 3 (337-347)
  source 1..33: mol_type = other RNA
tacgccgactatgaggaaagcagaatgaagtac

SEQ ID NO: 57835 - RNA, 27 nt, synthetic construct
  misc_feature 1..27: note = Transmembrane protein 87A (216-224)
  source 1..27: mol_type = other RNA
tacgccgagttccagaacatcagatat

SEQ ID NO: 57836 - RNA, 27 nt, synthetic construct
  misc_feature 1..27: note = Transcription elongation factor SPT6 (993-1001)
  source 1..27: mol_type = other RNA
tacggcgacaagcacatcaccctgtat

SEQ ID NO: 57837 - RNA, 33 nt, synthetic construct
  misc_feature 1..33: note = Lysyl oxidase homolog 3 (543-553)
  source 1..33: mol_type = other RNA
tacatcgaggacagacccctgcacatgctctat

SEQ ID NO: 57838 - RNA, 36 nt, synthetic construct
  misc_feature 1..36: note = High mobility group protein 20A (39-50)
  source 1..36: mol_type = other RNA
tacctggacgaggccgatagagacaaggaaaggtat

SEQ ID NO: 57839 - RNA, 36 nt, synthetic construct
  misc_feature 1..36: note = SWI/SNF-related matrix-associated actin-dependent regulator of chromatin subfamily E member 1-related (119-130)
  source 1..36: mol_type = other RNA
tacctggacgaggccgaaagagagaagcagcaatat

SEQ ID NO: 57840 - RNA, 27 nt, synthetic construct
  misc_feature 1..27: note = Prostamide/prostaglandin F synthase (122-130)
  source 1..27: mol_type = other RNA
tacctggacgagagcaagcagctctat

SEQ ID NO: 57841 - RNA, 27 nt, synthetic construct
  misc_feature 1..27: note = putative RHO/RAC effector protein (1124-1132)
  source 1..27: mol_type = other RNA
tacctggacatccccaaccctagatat

SEQ ID NO: 57842 - RNA, 24 nt, synthetic construct
  misc_feature 1..24: note = Proteasome activator complex subunit 3 (188-195)
  source 1..24: mol_type = other RNA
tacctggaccagatcagcagatat

SEQ ID NO: 57843 - RNA, 36 nt, synthetic construct
  misc_feature 1..36: note = E3 ubiquitin-protein ligase TRIM4 (423-434)
  source 1..36: mol_type = other RNA
tacctggacagaggcaccgggaacgtgagcttctat

SEQ ID NO: 57844 - RNA, 33 nt, synthetic construct
  misc_feature 1..33: note = U3 small nucleolar RNA-associated protein 6 homolog (480-490)
  source 1..33: mol_type = other RNA
tacctggactgggcctatagaagcggcgggtac

SEQ ID NO: 57845 - RNA, 33 nt, synthetic construct
  misc_feature 1..33: note = E3 ubiquitin-protein ligase UBR2 (1583-1593)
  source 1..33: mol_type = other RNA
tacctggagggcgaaagagacgccatcaggtat

SEQ ID NO: 57846 - RNA, 36 nt, synthetic construct
  misc_feature 1..36: note = MAGUK p55 subfamily member 2 (440-451)
  source 1..36: mol_type = other RNA
tacctggagcacggcgaatatgaggggaacctctac

SEQ ID NO: 57847 - RNA, 39 nt, synthetic construct
  misc_feature 1..39: note = DNA-directed RNA polymerase II subunit RPB1 (657-669)
  source 1..39: mol_type = other RNA
tacctggagatgggccacgacatcaccagactcttctat

SEQ ID NO: 57848 - RNA, 36 nt, synthetic construct
  misc_feature 1..36: note = KIF1-binding protein (161-172)
  source 1..36: mol_type = other RNA
tacctggagagctccgaagccctctataaccagtac

SEQ ID NO: 57849 - RNA, 30 nt, synthetic construct
  misc_feature 1..30: note = Immediate early response gene 5-like protein (47-56)
  source 1..30: mol_type = other RNA
tacctgagcgagagatatgccgaactctac

SEQ ID NO: 57850 - RNA, 27 nt, synthetic construct
  misc_feature 1..27: note = Cullin-1 (42-50)
  source 1..27: mol_type = other RNA
tacatggagctgtatacccacgtgtac

SEQ ID NO: 57851 - RNA, 27 nt, synthetic construct
  misc_feature 1..27: note = Far upstream element-binding protein 1 (632-640)
  source 1..27: mol_type = other RNA
tacagcgccgcttgggcagagtattac

SEQ ID NO: 57852 - RNA, 39 nt, synthetic construct
  misc_feature 1..39: note = Nuclear factor erythroid 2-related factor 1 (12-24)
  source 1..39: mol_type = other RNA
tacagcgccccccctggcgacccactgtccaccaactat

SEQ ID NO: 57853 - RNA, 39 nt, synthetic construct
  misc_feature 1..39: note = Cohesin subunit SA-2 (319-331)
  source 1..39: mol_type = other RNA
tacagcgacgccttcctgaacgattcctatctcaagtac

SEQ ID NO: 57854 - RNA, 30 nt, synthetic construct
  misc_feature 1..30: note = Dimethylaniline monooxygenase (N-oxide-forming) 4 (69-78)
  source 1..30: mol_type = other RNA
tacagcgacttcccctttcacgaggattat

SEQ ID NO: 57855 - RNA, 36 nt, synthetic construct
  misc_feature 1..36: note = Dihydropyrimidine dehydrogenase (NADP(+)) (211-222)
  source 1..36: mol_type = other RNA
tacagcgacatcaccattttcgagaagcaggaatat

SEQ ID NO: 57856 - RNA, 36 nt, synthetic construct
  misc_feature 1..36: note = Cyclin-dependent kinases regulatory subunit 2 (8-19)
  source 1..36: mol_type = other RNA
tacagcgacaagtatttcgatgagcactacgaatat

SEQ ID NO: 57857 - RNA, 33 nt, synthetic construct
  misc_feature 1..33: note = Spermatogenesis-associated protein 20 (357-367)
  source 1..33: mol_type = other RNA
tacagcgacgtggccaagggcatcctgcagtat

SEQ ID NO: 57858 - RNA, 33 nt, synthetic construct
  misc_feature 1..33: note = F-box only protein 3 (79-89)
  source 1..33: mol_type = other RNA
tacagcgacgtgggcagatatatcgatcactac

SEQ ID NO: 57859 - RNA, 27 nt, synthetic construct
  misc_feature 1..27: note = AN1-type zinc finger protein 6 (175-183)
  source 1..27: mol_type = other RNA
tacagcgacgtgcacaactgctcctat

SEQ ID NO: 57860 - RNA, 36 nt, synthetic construct
  misc_feature 1..36: note = YTH domain-containing family protein 1 (300-311)
  source 1..36: mol_type = other RNA
tacagcgaggacgatatccacagatccattaagtat

SEQ ID NO: 57861 - RNA, 30 nt, synthetic construct
  misc_feature 1..30: note = Intraflagellar transport protein 122 homolog (415-424)
  source 1..30: mol_type = other RNA
tacagcgaggacctgtccgatatgcactat

SEQ ID NO: 57862 - RNA, 33 nt, synthetic construct
  misc_feature 1..33: note = SUN domain-containing protein 2 (38-48)
  source 1..33: mol_type = other RNA
tacagcgaggacagaatcggcctggccgattat

SEQ ID NO: 57863 - RNA, 33 nt, synthetic construct
  misc_feature 1..33: note = MICOS complex subunit MIC60 (615-625)
  source 1..33: mol_type = other RNA
tacagcgaggaaaccctgagagccaggttctat

SEQ ID NO: 57864 - RNA, 39 nt, synthetic construct
  misc_feature 1..39: note = 45 kDa calcium-binding protein (340-352)
  source 1..39: mol_type = other RNA
tacagcgagttctttaccggctccaagctggtggactat

SEQ ID NO: 57865 - RNA, 30 nt, synthetic construct
  misc_feature 1..30: note = Protein artemis (322-331)
  source 1..30: mol_type = other RNA
tacagcgagatcaaggacttcctgtcctat

SEQ ID NO: 57866 - RNA, 30 nt, synthetic construct
  misc_feature 1..30: note = Integrator complex subunit 6 (86-95)
  source 1..30: mol_type = other RNA
tacagcgagctgggccaccccttcgggtat

SEQ ID NO: 57867 - RNA, 33 nt, synthetic construct
  misc_feature 1..33: note = Plectin (1309-1319)
  source 1..33: mol_type = other RNA
tacagcgagctgaccacactcacttcccagtat

SEQ ID NO: 57868 - RNA, 30 nt, synthetic construct
  misc_feature 1..30: note = Vacuolar protein sorting-associated protein 13C (3362-3371)
  source 1..30: mol_type = other RNA
tacagcgagcagttcctgaagcaaatgtat

SEQ ID NO: 57869 - RNA, 27 nt, synthetic construct
  misc_feature 1..27: note = Protein Lines homolog 1 (181-189)
  source 1..27: mol_type = other RNA
tacagcgagtccaacaaggccatctat

SEQ ID NO: 57870 - RNA, 36 nt, synthetic construct
  misc_feature 1..36: note = Proline-rich protein 7 (145-156)
  source 1..36: mol_type = other RNA
tacagcgaggtgctgaccgacacaagaggcctctat

SEQ ID NO: 57871 - RNA, 30 nt, synthetic construct
  misc_feature 1..30: note = Zinc finger MIZ domain-containing protein 2 (269-278)
  source 1..30: mol_type = other RNA
tacagcgaggtgtatcccggccagcaatac

SEQ ID NO: 57872 - RNA, 36 nt, synthetic construct
  misc_feature 1..36: note = Annexin A4 (298-309)
  source 1..36: mol_type = other RNA
tacagcttcatcaagggcgacacctccggggattat

SEQ ID NO: 57873 - RNA, 30 nt, synthetic construct
  misc_feature 1..30: note = Nucleoporin NUP188 homolog (239-248)
  source 1..30: mol_type = other RNA
tacagcttcctggacaagatgtccttttat

SEQ ID NO: 57874 - RNA, 27 nt, synthetic construct
  misc_feature 1..27: note = RNA-binding protein 5 (374-382)
  source 1..27: mol_type = other RNA
tacagccaggactatcaacagttctac

SEQ ID NO: 57875 - RNA, 36 nt, synthetic construct
  misc_feature 1..36: note = Serine/arginine-rich splicing factor 10 (105-116)
  source 1..36: mol_type = other RNA
tacagctcctctagatatgacgattacgacaggtat

SEQ ID NO: 57876 - RNA, 27 nt, synthetic construct
  misc_feature 1..27: note = Interferon-induced helicase C domain-containing protein 1 (5-13)
  source 1..27: mol_type = other RNA
tacagcaccgacgagaacttcagatat

SEQ ID NO: 57877 - RNA, 27 nt, synthetic construct
  misc_feature 1..27: note = Filamin-A (1685-1693)
  source 1..27: mol_type = other RNA
tacaccgccccccagcctggcaagtat

SEQ ID NO: 57878 - RNA, 36 nt, synthetic construct
  misc_feature 1..36: note = DAZ-associated protein 2 (35-46)
  source 1..36: mol_type = other RNA
tacaccgacgccccccctgcttatagcgagctgtac

SEQ ID NO: 57879 - RNA, 24 nt, synthetic construct
  misc_feature 1..24: note = Tetraspanin-4 (107-114)
  source 1..24: mol_type = other RNA
tacaccgacaagatcgatagatat

SEQ ID NO: 57880 - RNA, 30 nt, synthetic construct
  misc_feature 1..30: note = Serine/threonine-protein phosphatase PP1-beta catalytic subunit (68-77)
  source 1..30: mol_type = other RNA
tacaccgacctgctcagacttttcgagtat

SEQ ID NO: 57881 - RNA, 36 nt, synthetic construct
  misc_feature 1..36: note = E3 ubiquitin-protein ligase HUWE1 (157-168)
  source 1..36: mol_type = other RNA
tacaccgacatggagagcgaagattatcacttctac

SEQ ID NO: 57882 - RNA, 33 nt, synthetic construct
  misc_feature 1..33: note = Chromodomain-helicase-DNA-binding protein 8 (513-523)
  source 1..33: mol_type = other RNA
tacaccgaggccgaagagttctttgtgaagtat

SEQ ID NO: 57883 - RNA, 30 nt, synthetic construct; identical to SEQ ID NO: 33656
  misc_feature 1..30: note = Protein transport protein Sec61 subunit beta (59-68)
  source 1..30: mol_type = other RNA

SEQ ID NO: 57884 - RNA, 39 nt, synthetic construct
  misc_feature 1..39: note = DNA-directed RNA polymerases I, II, and III subunit RPABC5 (29-41)
  source 1..39: mol_type = other RNA
tacaccgagggcgacgccctggatgctctcgggcttaag

SEQ ID NO: 57885 - RNA, 45 nt, synthetic construct
  misc_feature 1..45: note = DNA-directed RNA polymerases I, II, and III subunit RPABC5 (29-43)
  source 1..45: mol_type = other RNA
tacaccgagggcgacgccctggatgctctcgggcttaagagatat

SEQ ID NO: 57886 - RNA, 33 nt, synthetic construct
  misc_feature 1..33: note = Ribosomal RNA small subunit methyltransferase NEP1 (207-217)
  source 1..33: mol_type = other RNA
tacaccgagaagatggtgagcatctccaactat

SEQ ID NO: 57887 - RNA, 30 nt, synthetic construct
  misc_feature 1..30: note = Presenilin-2 (112-121)
  source 1..30: mol_type = other RNA
tacaccgagaagaacggccagctgatctat

SEQ ID NO: 57888 - RNA, 33 nt, synthetic construct
  misc_feature 1..33: note = Exocyst complex component 4 (66-76)
  source 1..33: mol_type = other RNA
tacaccgagctgacaactgccatcagaacgtat

SEQ ID NO: 57889 - RNA, 30 nt, synthetic construct
  misc_feature 1..30: note = Prolyl 3-hydroxylase 2 (212-221)
  source 1..30: mol_type = other RNA
tacaccgagcccaactattggatcagatac

SEQ ID NO: 57890 - RNA, 33 nt, synthetic construct
  misc_feature 1..33: note = Mitogen-activated protein kinase kinase kinase 1 (1349-1359)
  source 1..33: mol_type = other RNA
tacaccgagcagctgctcagaggccttagctat

SEQ ID NO: 57891 - RNA, 36 nt, synthetic construct
  misc_feature 1..36: note = Coiled-coil domain-containing protein 121 (212-223)
  source 1..36: mol_type = other RNA
tacaccgagcagcccgaaaaggtgtggaacagctat

SEQ ID NO: 57892 - RNA, 30 nt, synthetic construct
  misc_feature 1..30: note = Gamma-secretase subunit PEN-2 (47-56)
  source 1..30: mol_type = other RNA
tacaccgagcagagccaaatcaagggctat

SEQ ID NO: 57893 - RNA, 27 nt, synthetic construct
  misc_feature 1..27: note = Vacuolar protein sorting-associated protein 18 homolog (381-389)
  source 1..27: mol_type = other RNA
tacaccgagagagccgtgttcaggtat

SEQ ID NO: 57894 - RNA, 36 nt, synthetic construct
  misc_feature 1..36: note = Osteoclast-stimulating factor 1 (21-32)
  source 1..36: mol_type = other RNA
tacaccttcgagcccagaacacctgacgaactgtat

SEQ ID NO: 57895 - RNA, 30 nt, synthetic construct
  misc_feature 1..30: note = Cleavage and polyadenylation specificity factor subunit 5 (45-54)
  source 1..30: mol_type = other RNA
tacaccttcggcacaaaggagcccctgtat

SEQ ID NO: 57896 - RNA, 27 nt, synthetic construct
  misc_feature 1..27: note = Coatomer subunit alpha (543-551)
  source 1..27: mol_type = other RNA
tacaccacaagcaaccacatcaagtat

SEQ ID NO: 57897 - RNA, 33 nt, synthetic construct
  misc_feature 1..33: note = Nodal modulator 2 (270-280)
  source 1..33: mol_type = other RNA
tacaccgtgagcagagaggacggctccttctct

SEQ ID NO: 57898 - RNA, 39 nt, synthetic construct
  misc_feature 1..39: note = Nodal modulator 2 (270-282)
  source 1..39: mol_type = other RNA
tacaccgtgagcagagaggacggctccttctctttttat

SEQ ID NO: 57899 - RNA, 36 nt, synthetic construct
  misc_feature 1..36: note = Nuclear pore complex protein Nup160 (1174-1185)
  source 1..36: mol_type = other RNA
tacgtggacgccgtcctgggcaaggggcaccagtat

SEQ ID NO: 57900 - RNA, 30 nt, synthetic construct
  misc_feature 1..30: note = General transcription factor 3C polypeptide 1 (627-636)
  source 1..30: mol_type = other RNA
tacgtggacgatgccagctggatgagatat

SEQ ID NO: 57901 - RNA, 27 nt, synthetic construct
  misc_feature 1..27: note = 39S ribosomal protein L35, mitochondrial (172-180)
  source 1..27: mol_type = other RNA
tacgtggacgatccctatcagaagtac

SEQ ID NO: 57902 - RNA, 30 nt, synthetic construct
  misc_feature 1..30: note = UDP-N-acetylhexosamine pyrophosphorylase-like protein 1 (277-286)
  source 1..30: mol_type = other RNA
tacgtggacgaggaaggcaacctggtcaag

SEQ ID NO: 57903 - RNA, 36 nt, synthetic construct
  misc_feature 1..36: note = RNA-binding protein 39 (436-447)
  source 1..36: mol_type = other RNA
tacgtggacaagaacagcgcccagggcaatgtctat

SEQ ID NO: 57904 - RNA, 27 nt, synthetic construct
  misc_feature 1..27: note = Thioredoxin-like protein AAED1 (118-126)
  source 1..27: mol_type = other RNA
tacgtggaccccgagagagaaatctat

SEQ ID NO: 57905 - RNA, 33 nt, synthetic construct
  misc_feature 1..33: note = Transmembrane emp24 domain-containing protein 3 (68-78)
  source 1..33: mol_type = other RNA
tacgtggaggacccccagggcaacaccatctat

SEQ ID NO: 57906 - RNA, 27 nt, synthetic construct
  misc_feature 1..27: note = Vacuole membrane protein 1 (94-102)
  source 1..27: mol_type = other RNA
tacgtggagggcgtccaccagcaatat

SEQ ID NO: 57907 - RNA, 33 nt, synthetic construct
  misc_feature 1..33: note = Eukaryotic translation initiation factor 3 subunit K (32-42)
  source 1..33: mol_type = other RNA
tacgtggagacccaggccaaggaaaacgcttat

SEQ ID NO: 57908 - RNA, 30 nt, synthetic construct
  misc_feature 1..30: note = Serine/threonine-protein kinase mTOR (89-98)
  source 1..30: mol_type = other RNA
gccatcgctagcctgattggcgtggagggg

SEQ ID NO: 57909 - RNA, 27 nt, synthetic construct
  misc_feature 1..27: note = Eukaryotic translation initiation factor 4 gamma 1 (1248-1256)
  source 1..27: mol_type = other RNA
gccatcattgaggaatacctgcacctc

SEQ ID NO: 57910 - RNA, 27 nt, synthetic construct
  misc_feature 1..27: note = Protein timeless homolog (848-856)
  source 1..27: mol_type = other RNA
gccatcctggctcacctcaacaccgtg

SEQ ID NO: 57911 - RNA, 27 nt, synthetic construct
  misc_feature 1..27: note = Zinc finger and BTB domain-containing protein 6 (396-404)
  source 1..27: mol_type = other RNA
gccctgaagaaacacctcaccagcgtg

SEQ ID NO: 57912 - RNA, 27 nt, synthetic construct
  misc_feature 1..27: note = Small subunit processome component 20 homolog (626-634)
  source 1..27: mol_type = other RNA
gccctgatggagctcttccccaagctt

SEQ ID NO: 57913 - RNA, 27 nt, synthetic construct
  misc_feature 1..27: note = Ribosome-binding protein 1 (124-132)
  source 1..27: mol_type = other RNA
gccctgcagaagagactcgacgaggtg

SEQ ID NO: 57914 - RNA, 30 nt, synthetic construct
  misc_feature 1..30: note = Cytochrome c oxidase subunit 7A2, mitochondrial (74-83)
  source 1..30: mol_type = other RNA
gccgtggctagcttccccaagaaacaggag

SEQ ID NO: 57915 - RNA, 27 nt, synthetic construct
  misc_feature 1..27: note = DNA-dependent protein kinase catalytic subunit (145-153)
  source 1..27: mol_type = other RNA
gacgagttcaagatcggcgaactgttt

SEQ ID NO: 57916 - RNA, 27 nt, synthetic construct
  misc_feature 1..27: note = Exosome component 10 (58-66)
  source 1..27: mol_type = other RNA
gacgagtacgatttctatagaagcttt

SEQ ID NO: 57917 - RNA, 42 nt, synthetic construct
  misc_feature 1..42: note = Peptidyl-prolyl cis-trans isomerase A (9-22)
  source 1..42: mol_type = other RNA
gacatcgccgtggatggcgagcccctggggagagtcagcttc

SEQ ID NO: 57918 - RNA, 63 nt, synthetic construct
  misc_feature 1..63: note = Endoplasmin (783-803)
  source 1..63: mol_type = other RNA
gacgtgggcaccgatgaggaagaggaaacagccaaggagagcactgctgaaaaagacgagctg

SEQ ID NO: 57919 - RNA, 27 nt, synthetic construct
  misc_feature 1..27: note = Zinc finger protein 638 (1756-1764)
  source 1..27: mol_type = other RNA
gaggaagacgaggatagcctggccgac

SEQ ID NO: 57920 - RNA, 27 nt, synthetic construct
  misc_feature 1..27: note = Inner centromere protein (48-56)
  source 1..27: mol_type = other RNA
gagttcagcaaggaacccgagctgatg

SEQ ID NO: 57921 - RNA, 27 nt, synthetic construct
  misc_feature 1..27: note = ATP-binding cassette sub-family A member 3 (1686-1694)
  source 1..27: mol_type = other RNA
gagcaggtgttcctgagctttgcccac

SEQ ID NO: 57922 - RNA, 30 nt, synthetic construct
  misc_feature 1..30: note = Vinculin (10-19)
  source 1..30: mol_type = other RNA
gagagcatcctggaacccgtggcccagcaa

SEQ ID NO: 57923 - RNA, 27 nt, synthetic construct
  misc_feature 1..27: note = Microtubule-associated protein 1A (806-814)
  source 1..27: mol_type = other RNA
gagaccgaactgacataccccactaac

SEQ ID NO: 57924 - RNA, 30 nt, synthetic construct
  misc_feature 1..30: note = C-Jun-amino-terminal kinase-interacting protein 2 (683-692)
  source 1..30: mol_type = other RNA
ttcgacgtgcagtttctgggcagcgtcgag

SEQ ID NO: 57925 - RNA, 57 nt, synthetic construct
  misc_feature 1..57: note = Cytochrome c oxidase subunit 7C, mitochondrial (45-63)
  source 1..57: mol_type = other RNA
ttcggcagcgcctttgctacccccttcctggtggtcagacaccagctccttaagaca

SEQ ID NO: 57926 - RNA, 75 nt, synthetic construct
  misc_feature 1..75: note = Peptidyl-prolyl cis-trans isomerase A (88-112)
  source 1..75: mol_type = other RNA
ttcatcctgaagcacaccggccccgggattctcagcatggccaacgctggacctaatacaaacggttcccagttt

SEQ ID NO: 57927 - RNA, 30 nt, synthetic construct
  misc_feature 1..30: note = Elongation factor 1-alpha 1 (415-424)
  source 1..30: mol_type = other RNA
ttcagcgactacccccctctgggcagattt

SEQ ID NO: 57928 - RNA, 42 nt, synthetic construct
  misc_feature 1..42: note = Elongation factor 1-beta (2-15)
  source 1..42: mol_type = other RNA
ggcttcggggacctgaagagccccgccggactccaggtgctt

SEQ ID NO: 57929 - RNA, 69 nt, synthetic construct
  misc_feature 1..69: note = Elongation factor 1-beta (2-24)
  source 1..69: mol_type = other RNA
ggcttcggggacctgaagagccccgccggactccaggtgcttaacgattacctggctgacaaatcctat

SEQ ID NO: 57930 - RNA, 30 nt, synthetic construct; identical to SEQ ID NO: 33703
  misc_feature 1..30: note = Plakophilin-2 (581-590)
  source 1..30: mol_type = other RNA

SEQ ID NO: 57931 - RNA, 45 nt, synthetic construct
  misc_feature 1..45: note = Peptidyl-prolyl cis-trans isomerase A (10-24)
  source 1..45: mol_type = other RNA
atcgccgtggacggcgagcccctggggagagtcagcttcgaactc

SEQ ID NO: 57932 - RNA, 27 nt, synthetic construct
  misc_feature 1..27: note = 39S ribosomal protein L34, mitochondrial (58-66)
  source 1..27: mol_type = other RNA
atcaagagaaaaaacaagcacggctgg

SEQ ID NO: 57933 - RNA, 27 nt, synthetic construct
  misc_feature 1..27: note = Centrosome-associated protein 350 (2297-2305)
  source 1..27: mol_type = other RNA
atcctgagcaagaaagacctccccctt

SEQ ID NO: 57934 - RNA, 48 nt, synthetic construct
  misc_feature 1..48: note = Glyceraldehyde-3-phosphate dehydrogenase (269-284)
  source 1..48: mol_type = other RNA
atcagctggtacgacaacgagttcggctattccaatagagtggtcgat

SEQ ID NO: 57935 - RNA, 57 nt, synthetic construct
  misc_feature 1..57: note = Macrophage migration inhibitory factor (3-21)
  source 1..57: mol_type = other RNA
atcgtgaacaccaatgtccccagagccagcgttcctgacggcttcctgtccgagctc

SEQ ID NO: 57936 - RNA, 27 nt, synthetic construct
  misc_feature 1..27: note = T-complex protein 1 subunit theta (234-242)
  source 1..27: mol_type = other RNA
aagtacaacatcatgctggtgagactc

SEQ ID NO: 57937 - RNA, 27 nt, synthetic construct
  misc_feature 1..27: note = Ras-related protein Rab-27A (178-186)
  source 1..27: mol_type = other RNA
ctggacctcatcatgaagagaatggag

SEQ ID NO: 57938 - RNA, 27 nt, synthetic construct
  misc_feature 1..27: note = Uncharacterized protein C18orf8 (501-509)
  source 1..27: mol_type = other RNA
ctgcacgagctcgtgatcaagaccctt

SEQ ID NO: 57939 - RNA, 27 nt, synthetic construct
  misc_feature 1..27: note = ER membrane protein complex subunit 1 (641-649)
  source 1..27: mol_type = other RNA
ctgctcatcgacgatgagtacaaggtg

SEQ ID NO: 57940 - RNA, 27 nt, synthetic construct
  misc_feature 1..27: note = DNA-dependent protein kinase catalytic subunit (2836-2844)
  source 1..27: mol_type = other RNA
ctgctccaggacttcaacagatttctt

SEQ ID NO: 57941 - RNA, 27 nt, synthetic construct
  misc_feature 1..27: note = Acyl-CoA desaturase (132-140)
  source 1..27: mol_type = other RNA
ctgcccctcagacttttcctgatcatt

SEQ ID NO: 57942 - RNA, 27 nt, synthetic construct
  misc_feature 1..27: note = Serine/threonine-protein kinase tousled-like 1 (49-57)
  source 1..27: mol_type = other RNA
atggacgagctggccagcctcgatccc

SEQ ID NO: 57943 - RNA, 42 nt, synthetic construct
  misc_feature 1..42: note = Protein S100-A4 (59-72)
  source 1..42: mol_type = other RNA
atgagcaacctggactccaatagagataacgaggtggacttc

SEQ ID NO: 57944 - RNA, 27 nt, synthetic construct
  misc_feature 1..27: note = Centriolin (2174-2182)
  source 1..27: mol_type = other RNA
aacctgaatcagttcctccccgagctt

SEQ ID NO: 57945 - RNA, 27 nt, synthetic construct
  misc_feature 1..27: note = Transcriptional repressor CTCF (102-110)
  source 1..27: mol_type = other RNA
aacatggaggaacagcccatcaatatt

SEQ ID NO: 57946 - RNA, 27 nt, synthetic construct
  misc_feature 1..27: note = Golgin subfamily A member 3 (875-883)
  source 1..27: mol_type = other RNA
agactggacagcgagctcaaggaactt

SEQ ID NO: 57947 - RNA, 66 nt, synthetic construct
  misc_feature 1..66: note = Cytochrome c oxidase subunit 7C, mitochondrial (17-38)
  source 1..66: mol_type = other RNA
agccactacgaggaaggccccgggaagaacctgcctttctccgtggagaataaatggtctctcctt

SEQ ID NO: 57948 - RNA, 33 nt, synthetic construct
  misc_feature 1..33: note = Midasin (1471-1481)
  source 1..33: mol_type = other RNA
agcctggccgacgattccgtgctcgagagactt

SEQ ID NO: 57949 - RNA, 27 nt, synthetic construct
  misc_feature 1..27: note = Cullin-7 (999-1007)
  source 1..27: mol_type = other RNA
agcctgcacaccgagctcaactccgtg

SEQ ID NO: 57950 - RNA, 27 nt, synthetic construct
  misc_feature 1..27: note = Small subunit processome component 20 homolog (299-307)
  source 1..27: mol_type = other RNA
agcctgctcgaccttcacaccaaggtg

SEQ ID NO: 57951 - RNA, 33 nt, synthetic construct
  misc_feature 1..33: note = Death-inducer obliterator 1 (941-951)
  source 1..33: mol_type = other RNA
agccccctggaggacctctccccttgcccagcc

SEQ ID NO: 57952 - RNA, 33 nt, synthetic construct
  misc_feature 1..33: note = Glycogen debranching enzyme (980-990)
  source 1..33: mol_type = other RNA
accatcgccgaggtgggcaagtggctgcaggct

SEQ ID NO: 57953 - RNA, 27 nt, synthetic construct
  misc_feature 1..27: note = Inositol 1,4,5-trisphosphate receptor type 3 (2354-2362)
  source 1..27: mol_type = other RNA
accctgttcaacgtgatcaagagcgtc

SEQ ID NO: 57954 - RNA, 27 nt, synthetic construct
  misc_feature 1..27: note = Transmembrane protein 181 (304-312)
  source 1..27: mol_type = other RNA
acctacaaccccgccttcagcagactg

SEQ ID NO: 57955 - RNA, 30 nt, synthetic construct
  misc_feature 1..30: note = A-kinase anchor protein 9 (1398-1407)
  source 1..30: mol_type = other RNA
gtggacagcgtcgttatcaccgagtccgat

SEQ ID NO: 57956 - RNA, 27 nt, synthetic construct
  misc_feature 1..27: note = Signal peptidase complex catalytic subunit SEC11A (146-154)
  source 1..27: mol_type = other RNA
gtgccctacatcggcattgtcaccata

SEQ ID NO: 57957 - RNA, 27 nt, synthetic construct
  misc_feature 1..27: note = E3 ubiquitin-protein ligase MYLIP (431-439)
  source 1..27: mol_type = other RNA
gtgtacctgcccacccacacaagcctc

SEQ ID NO: 57958 - RNA, 27 nt, synthetic construct
  misc_feature 1..27: note = Guanine nucleotide-binding protein G(i) subunit alpha-2 (155-163)
  source 1..27: mol_type = other RNA
tactatctgaacgacctcgagagaatc

SEQ ID NO: 57959 - RNA, 27 nt, synthetic construct
  misc_feature 1..27: note = Peptidyl-prolyl cis-trans isomerase FKBP4 (372-380)
  source 1..27: mol_type = other RNA
gccagagctgacttccagaaggtgctg

SEQ ID NO: 57960 - RNA, 27 nt, synthetic construct
  misc_feature 1..27: note = Metaxin-1 (300-308)
  source 1..27: mol_type = other RNA
gccagagctcccggcaccaggacactg

SEQ ID NO: 57961 - RNA, 27 nt, synthetic construct
  misc_feature 1..27: note = Exosome component 10 (437-445)
  source 1..27: mol_type = other RNA
gccagagacgatacccactacctgctc

SEQ ID NO: 57962 - RNA, 33 nt, synthetic construct
  misc_feature 1..33: note = Annexin A2 (195-205)
  source 1..33: mol_type = other RNA
gccagagacctgtacgatgctggcgtgaagagg

SEQ ID NO: 57963 - RNA, 27 nt, synthetic construct
  misc_feature 1..27: note = Coronin-1C (333-341)
  source 1..27: mol_type = other RNA
gccagattctttaagctgcacgagagg

SEQ ID NO: 57964 - RNA, 27 nt, synthetic construct
  misc_feature 1..27: note = Uncharacterized protein KIAA1143 (19-27)
  source 1..27: mol_type = other RNA
gccagattcaaggagagggtgggctac

SEQ ID NO: 57965 - RNA, 30 nt, synthetic construct
  misc_feature 1..30: note = Disabled homolog 2 (41-50)
  source 1..30: mol_type = other RNA
gccagattcaagggcgacggggtgaaatac

SEQ ID NO: 57966 - RNA, 30 nt, synthetic construct
  misc_feature 1..30: note = Serine/threonine-protein kinase tousled-like 2 (17-26)
  source 1..30: mol_type = other RNA
gccagattcaccggcgtgggggtcagcaag

SEQ ID NO: 57967 - RNA, 27 nt, synthetic construct
  misc_feature 1..27: note = ER degradation-enhancing alpha-mannosidase-like protein 1 (134-142)
  source 1..27: mol_type = other RNA
gccagaggcatgttcgtgtttgggtac

SEQ ID NO: 57968 - RNA, 36 nt, synthetic construct
  misc_feature 1..36: note = Lon protease homolog 2, peroxisomal (291-302)
  source 1..36: mol_type = other RNA
gccagaatcctgctcgacaacgatcactacgctatg

SEQ ID NO: 57969 - RNA, 27 nt, synthetic construct
  misc_feature 1..27: note = Chromodomain-helicase-DNA-binding protein 4 (1901-1909)
  source 1..27: mol_type = other RNA
gccagaatcccccctgtggctgtcagg

SEQ ID NO: 57970 - RNA, 30 nt, synthetic construct
  misc_feature 1..30: note = Actin-related protein 2/3 complex subunit 4 (157-166)
  source 1..30: mol_type = other RNA
gccagaatcgtggctgaggaattcctgaag

SEQ ID NO: 57971 - RNA, 27 nt, synthetic construct
  misc_feature 1..27: note = Coiled-coil domain-containing protein 85B (34-42)
  source 1..27: mol_type = other RNA
gccagactggctgcactcgtgcagagg

SEQ ID NO: 57972 - RNA, 33 nt, synthetic construct
  misc_feature 1..33: note = THO complex subunit 5 homolog (189-199)
  source 1..33: mol_type = other RNA
gccagactggactgggagctcgaacagaggaag

SEQ ID NO: 57973 - RNA, 30 nt, synthetic construct
  misc_feature 1..30: note = Squamous cell carcinoma antigen recognized by T-cells 3 (242-251)
  source 1..30: mol_type = other RNA
gccagactggagaaggtgcacagcctcttc

SEQ ID NO: 57974 - RNA, 27 nt, synthetic construct
  misc_feature 1..27: note = G patch domain-containing protein 4 (161-169)
  source 1..27: mol_type = other RNA
gccagactgggcatcaccatgaaggct

SEQ ID NO: 57975 - RNA, 27 nt, synthetic construct
  misc_feature 1..27: note = Natural resistance-associated macrophage protein 2 (119-127)
  source 1..27: mol_type = other RNA
gccagactgggcgtggtcaccgggctc

SEQ ID NO: 57976 - RNA, 30 nt, synthetic construct
  misc_feature 1..30: note = WD repeat-containing protein 36 (93-102)
  source 1..30: mol_type = other RNA
gccagaaacaaggagatcgtgcacaccttc

SEQ ID NO: 57977 - RNA, 27 nt, synthetic construct
  misc_feature 1..27: note = General transcription factor 3C polypeptide 1 (196-204)
  source 1..27: mol_type = other RNA
gccagaagcgagctgctcaccacagtg

SEQ ID NO: 57978 - RNA, 27 nt, synthetic construct
  misc_feature 1..27: note = Nucleolin (392-400)
  source 1..27: mol_type = other RNA
gccagaaccctgctcgctaagaacctt

SEQ ID NO: 57979 - RNA, 27 nt, synthetic construct
  misc_feature 1..27: note = S-adenosyl-L-methionine-dependent tRNA 4-demethylwyosine synthase (634-642)
  source 1..27: mol_type = other RNA
gccagaaccccccactgggctctgttc

SEQ ID NO: 57980 - RNA, 27 nt, synthetic construct
  misc_feature 1..27: note = Puromycin-sensitive aminopeptidase (236-244)
  source 1..27: mol_type = other RNA
gccagaacccccgtgatgagcacatac

SEQ ID NO: 57981 - RNA, 27 nt, synthetic construct
  misc_feature 1..27: note = Puromycin-sensitive aminopeptidase-like protein (236-244)
  source 1..27: mol_type = other RNA
gccagaacccccgtgacaagcacttac

SEQ ID NO: 57982 - RNA, 27 nt, synthetic construct
  misc_feature 1..27: note = Protocadherin gamma-A11 (880-888)
  source 1..27: mol_type = other RNA
gccagatacggcccccagttcaccctg

SEQ ID NO: 57983 - RNA, 27 nt, synthetic construct
  misc_feature 1..27: note = Protein ELYS (743-751)
  source 1..27: mol_type = other RNA
gagagaatcgaaaagctgtggaaaagg

SEQ ID NO: 57984 - RNA, 27 nt, synthetic construct
  misc_feature 1..27: note = Unconventional myosin-Ic (223-231)
  source 1..27: mol_type = other RNA
gagagaaacccccagagctacctgtat

SEQ ID NO: 57985 - RNA, 27 nt, synthetic construct
  misc_feature 1..27: note = TRPM8 channel-associated factor 1 (164-172)
  source 1..27: mol_type = other RNA
ttcagaggccccctggtgatcaacagg

SEQ ID NO: 57986 - RNA, 27 nt, synthetic construct
  misc_feature 1..27: note = Translocon-associated protein subunit alpha (124-132)
  source 1..27: mol_type = other RNA
ttcagatacccccaggactatcaattt

SEQ ID NO: 57987 - RNA, 30 nt, synthetic construct
  misc_feature 1..30: note = Protein DEK (128-137)
  source 1..30: mol_type = other RNA
ggccagttcagcgggtttcccttcgagaag

SEQ ID NO: 57988 - RNA, 27 nt, synthetic construct
  misc_feature 1..27: note = DAZ-associated protein 2 (5-13)
  source 1..27: mol_type = other RNA
ggccagtaccccacccaacctacatat

SEQ ID NO: 57989 - RNA, 30 nt, synthetic construct
  misc_feature 1..30: note = Sorting and assembly machinery component 50 homolog (154-163)
  source 1..30: mol_type = other RNA
ggcagagccgagaaggtgaccttccagttt

SEQ ID NO: 57990 - RNA, 30 nt, synthetic construct
  misc_feature 1..30: note = Replication protein A 32 kDa subunit (83-92)
  source 1..30: mol_type = other RNA
ggcagagcccccatcagcaaccctgggatg

SEQ ID NO: 57991 - RNA, 27 nt, synthetic construct
  misc_feature 1..27: note = Eukaryotic peptide chain release factor GTP-binding subunit ERF3A (142-150)
  source 1..27: mol_type = other RNA
ggcagagcctacttcgagaccgaaaag

SEQ ID NO: 57992 - RNA, 27 nt, synthetic construct
  misc_feature 1..27: note = Actin, gamma-enteric smooth muscle (140-148)
  source 1..27: mol_type = other RNA
ggcagagacctgaccgattacctcatg

SEQ ID NO: 57993 - RNA, 27 nt, synthetic construct
  misc_feature 1..27: note = Protocadherin Fat 1 (1957-1965)
  source 1..27: mol_type = other RNA
ggcagattcgccgggctgaccagcgtg

SEQ ID NO: 57994 - RNA, 30 nt, synthetic construct
  misc_feature 1..30: note = H(+)/Cl(-) exchange transporter 7 (345-354)
  source 1..30: mol_type = other RNA
ggcagattcgacagcgagaagatggcctac

SEQ ID NO: 57995 - RNA, 30 nt, synthetic construct
  misc_feature 1..30: note = Zinc finger protein 407 (271-280)
  source 1..30: mol_type = other RNA
ggcagattcgacagctccatcattaggata

SEQ ID NO: 57996 - RNA, 30 nt, synthetic construct
  misc_feature 1..30: note = U2 small nuclear ribonucleoprotein B'' (185-194)
  source 1..30: mol_type = other RNA
ggcagacacgacatcgccttcgtggagttt

SEQ ID NO: 57997 - RNA, 33 nt, synthetic construct
  misc_feature 1..33: note = 40S ribosomal protein S4, X isoform (171-181)
  source 1..33: mol_type = other RNA
ggcagaatcggggtgattaccaacagggagcgg

SEQ ID NO: 57998 - RNA, 33 nt, synthetic construct
  misc_feature 1..33: note = 40S ribosomal protein S11 (70-80)
  source 1..33: mol_type = other RNA
ggcagaatcctgagcggggtggtcaccaagatg

SEQ ID NO: 57999 - RNA, 33 nt, synthetic construct
  misc_feature 1..33: note = Desmoplakin (1624-1634)
  source 1..33: mol_type = other RNA
ggcagaatcagcaccgaggaagccattaggaag

SEQ ID NO: 58000 - RNA, 27 nt, synthetic construct
  misc_feature 1..27: note = Protein PML (295-303)
  source 1..27: mol_type = other RNA
ggcagactggacgccgtgctccagagg

SEQ ID NO: 58001 - RNA, 30 nt, synthetic construct
  misc_feature 1..30: note = Plectin (581-590)
  source 1..30: mol_type = other RNA
ggcagactggacctccagtacgccaagctt

SEQ ID NO: 58002 - RNA, 27 nt, synthetic construct
  misc_feature 1..27: note = Kelch-like protein 7 (492-500)
  source 1..27: mol_type = other RNA
ggcagactggggcacatcctcgagtac

SEQ ID NO: 58003 - RNA, 27 nt, synthetic construct
  misc_feature 1..27: note = H(+)/Cl(-) exchange transporter 3 (772-780)
  source 1..27: mol_type = other RNA
ggcagactgctcgggatcattaccaag

SEQ ID NO: 58004 - RNA, 33 nt, synthetic construct
  misc_feature 1..33: note = Heat shock cognate 71 kDa protein (508-518)
  source 1..33: mol_type = other RNA
ggcagactgagcaaggaggacatcgaaaggatg

SEQ ID NO: 58005 - RNA, 30 nt, synthetic construct
  misc_feature 1..30: note = Protein phosphatase 1 regulatory subunit 3C (303-312)
  source 1..30: mol_type = other RNA
ggcagaatggagaacctggccagctacagg

SEQ ID NO: 58006 - RNA, 27 nt, synthetic construct
  misc_feature 1..27: note = Integrin-linked protein kinase (45-53)
  source 1..27: mol_type = other RNA
ggcagaagcgccgtggtcgagatgctg

SEQ ID NO: 58007 - RNA, 27 nt, synthetic construct
  misc_feature 1..27: note = Interleukin-17 receptor C (13-21)
  source 1..27: mol_type = other RNA
ggcagaagccccgtggtcctgtccctc

SEQ ID NO: 58008 - RNA, 30 nt, synthetic construct
  misc_feature 1..30: note = Solute carrier family 22 member 18 (21-30)
  source 1..30: mol_type = other RNA
ggcagaagctccgtgatcctgctcacctac

SEQ ID NO: 58009 - RNA, 33 nt, synthetic construct
  misc_feature 1..33: note = Insulin receptor substrate 2 (717-727)
  source 1..33: mol_type = other RNA
ggcagaaccttccccgccagcgggggaggttac

SEQ ID NO: 58010 - RNA, 27 nt, synthetic construct
  misc_feature 1..27: note = Sodium/potassium-transporting ATPase subunit beta-1 (26-34)
  source 1..27: mol_type = other RNA
ggcagaaccgggggaagctggttcaag

SEQ ID NO: 58011 - RNA, 27 nt, synthetic construct
  misc_feature 1..27: note = ATP-binding cassette sub-family B member 8, mitochondrial (643-651)
  source 1..27: mol_type = other RNA
ggcagaaccgtgctggtcatcgcccac

SEQ ID NO: 58012 - RNA, 27 nt, synthetic construct
  misc_feature 1..27: note = ATP-dependent RNA helicase A (565-573)
  source 1..27: mol_type = other RNA
ggcagaacctaccccgtgcaggagtat

SEQ ID NO: 58013 - RNA, 30 nt, synthetic construct
  misc_feature 1..30: note = Sorbin and SH3 domain-containing protein 2 (299-308)
  source 1..30: mol_type = other RNA
ggcagagtggggatcttccccattagctac

SEQ ID NO: 58014 - RNA, 33 nt, synthetic construct
  misc_feature 1..33: note = Poly (ADP-ribose) polymerase 1 (590-600)
  source 1..33: mol_type = other RNA
ggcagagtggggaccgtcatcggaagcaacaag

SEQ ID NO: 58015 - RNA, 27 nt, synthetic construct
  misc_feature 1..27: note = Intraflagellar transport protein 172 homolog (293-301)
  source 1..27: mol_type = other RNA
ggcagatgggagcaggcccacaagctg

SEQ ID NO: 58016 - RNA, 27 nt, synthetic construct
  misc_feature 1..27: note = Histidine-tRNA ligase, cytoplasmic (247-255)
  source 1..27: mol_type = other RNA
ggcagatacgacgggctggtgggaatg

SEQ ID NO: 58017 - RNA, 30 nt, synthetic construct
  misc_feature 1..30: note = DNA mismatch repair protein Msh6 (337-346)
  source 1..30: mol_type = other RNA
ggcagatacagcgactccctggtgcagaag

SEQ ID NO: 58018 - RNA, 33 nt, synthetic construct
  misc_feature 1..33: note = Anion exchange protein 2 (262-272)
  source 1..33: mol_type = other RNA
cacagattcgaggacgtgcccggcgtcaggcgg

SEQ ID NO: 58019 - RNA, 27 nt, synthetic construct
  misc_feature 1..27: note = Probable cation-transporting ATPase 13A2 (626-634)
  source 1..27: mol_type = other RNA
cacagattcccctttagctccgccctg

SEQ ID NO: 58020 - RNA, 27 nt, synthetic construct
  misc_feature 1..27: note = 26S proteasome non-ATPase regulatory subunit 13 (23-31)
  source 1..27: mol_type = other RNA
cacagactggaggaactctacaccaag

SEQ ID NO: 58021 - RNA, 30 nt, synthetic construct
  misc_feature 1..30: note = 26S proteasome non-ATPase regulatory subunit 13 (23-32)
  source 1..30: mol_type = other RNA
cacagactggaggaactctacaccaagaaa

SEQ ID NO: 58022 - RNA, 27 nt, synthetic construct
  misc_feature 1..27: note = 40S ribosomal protein S16 (83-91)
  source 1..27: mol_type = other RNA
atcagacagagcatttccaaggccctg

SEQ ID NO: 58023 - RNA, 27 nt, synthetic construct
  misc_feature 1..27: note = RNA-binding motif protein 22 (258-266)
  source 1..27: mol_type = other RNA
atcagaaccattacagtggtccagagg

SEQ ID NO: 58024 - RNA, 27 nt, synthetic construct
  misc_feature 1..27: note = Protein MCM10 homolog (426-434)
  source 1..27: mol_type = other RNA
aagagagccgacctgcagagcaccttc

SEQ ID NO: 58025 - RNA, 30 nt, synthetic construct
  misc_feature 1..30: note = Signal peptidase complex subunit 2 (164-173)
  source 1..30: mol_type = other RNA
aagagattcgacgataaatacaccctgaag

SEQ ID NO: 58026 - RNA, 33 nt, synthetic construct
  misc_feature 1..33: note = Unconventional myosin-Ib (37-47)
  source 1..33: mol_type = other RNA
aagagattcgaccacagcgagatctacacctat

SEQ ID NO: 58027 - RNA, 27 nt, synthetic construct
  misc_feature 1..27: note = Eukaryotic translation initiation factor 3 subunit C-like protein (55-63)
  source 1..27: mol_type = other RNA
aagagattcgaggaactgaccaacctc

SEQ ID NO: 58028 - RNA, 27 nt, synthetic construct
  misc_feature 1..27: note = KIF1-binding protein (201-209)
  source 1..27: mol_type = other RNA
aagagattcgagaaagtgtacacccac

SEQ ID NO: 58029 - RNA, 27 nt, synthetic construct
  misc_feature 1..27: note = NADH dehydrogenase (ubiquinone) iron-sulfur protein 5 (8-16)
  source 1..27: mol_type = other RNA
aagagattcggcctgaacatcgacagg

SEQ ID NO: 58030 - RNA, 27 nt, synthetic construct
  misc_feature 1..27: note = Peptidyl-prolyl cis-trans isomerase FKBP3 (70-78)
  source 1..27: mol_type = other RNA
aagagattcaaaggcaccgagagcatc

SEQ ID NO: 58031 - RNA, 30 nt, synthetic construct
  misc_feature 1..30: note = Intron-binding protein aquarius (24-33)
  source 1..30: mol_type = other RNA
aagagacacgacctggtgaaactcggcttc

SEQ ID NO: 58032 - RNA, 27 nt, synthetic construct
  misc_feature 1..27: note = THO complex subunit 5 homolog (342-350)
  source 1..27: mol_type = other RNA
aagagacaccccctgagcgtgatgctc

SEQ ID NO: 58033 - RNA, 27 nt, synthetic construct
  misc_feature 1..27: note = MAP/microtubule affinity-regulating kinase 3 (330-338)
  source 1..27: mol_type = other RNA
aagagaatcgacattatggtgggcatg

SEQ ID NO: 58034 - RNA, 30 nt, synthetic construct
  misc_feature 1..30: note = NADH dehydrogenase (ubiquinone) flavoprotein 2, mitochondrial (61-70)
  source 1..30: mol_type = other RNA
aagagaatcgaggccattgtgaaaaactac

SEQ ID NO: 58035 - RNA, 27 nt, synthetic construct
  misc_feature 1..27: note = ATP-binding cassette sub-family F member 2 (275-283)
  source 1..27: mol_type = other RNA
aagagaatcctggtgctcgtcagccac

SEQ ID NO: 58036 - RNA, 27 nt, synthetic construct
  misc_feature 1..27: note = Ceramide synthase 5 (210-218)
  source 1..27: mol_type = other RNA
aagagaaaagacttcctgatcatgttt

SEQ ID NO: 58037 - RNA, 27 nt, synthetic construct
  misc_feature 1..27: note = Probable ATP-dependent RNA helicase DDX47 (296-304)
  source 1..27: mol_type = other RNA
aagagactgggcagcctcaacaaattc

SEQ ID NO: 58038 - RNA, 27 nt, synthetic construct
  misc_feature 1..27: note = Transcription intermediary factor 1-beta (207-215)
  source 1..27: mol_type = other RNA
aagagagtgcaggtcgacgttaaaatg

SEQ ID NO: 58039 - RNA, 27 nt, synthetic construct
  misc_feature 1..27: note = Arginine-tRNA ligase, cytoplasmic (579-587)
  source 1..27: mol_type = other RNA
ctgagattccccgagatcctccagaag

SEQ ID NO: 58040 - RNA, 27 nt, synthetic construct
  misc_feature 1..27: note = Neurosecretory protein VGF (4-12)
  source 1..27: mol_type = other RNA
ctgagactcagcgcctccgctcttttc

SEQ ID NO: 58041 - RNA, 27 nt, synthetic construct
  misc_feature 1..27: note = Large proline-rich protein BAG6 (1102-1110)
  source 1..27: mol_type = other RNA
ctgagaagcgacatccagaagaggctc

SEQ ID NO: 58042 - RNA, 33 nt, synthetic construct
  misc_feature 1..33: note = Ribonucleoside-diphosphate reductase subunit M2 (271-281)
  source 1..33: mol_type = other RNA
ctgagatggatcggcgacaaggaggccacctac

SEQ ID NO: 58043 - RNA, 30 nt, synthetic construct
  misc_feature 1..30: note = T-complex protein 1 subunit gamma (305-314)
  source 1..30: mol_type = other RNA
atgagagccaacatcaccgctattaggcgg

SEQ ID NO: 58044 - RNA, 27 nt, synthetic construct
  misc_feature 1..27: note = U8 snoRNA-decapping enzyme (48-56)
  source 1..27: mol_type = other RNA
atgagattcgacggcaggctggggttt

SEQ ID NO: 58045 - RNA, 27 nt, synthetic construct
  misc_feature 1..27: note = Epididymal secretory protein E1 (1-9)
  source 1..27: mol_type = other RNA
atgagattcctggccgctacctttctc

SEQ ID NO: 58046 - RNA, 27 nt, synthetic construct
  misc_feature 1..27: note = 26S proteasome non-ATPase regulatory subunit 2 (477-485)
  source 1..27: mol_type = other RNA
atgagactgggcagcatcttcgggctc

SEQ ID NO: 58047 - RNA, 27 nt, synthetic construct
  misc_feature 1..27: note = Translocon-associated protein subunit alpha (1-9)
  source 1..27: mol_type = other RNA
atgagactgctccccaggcttctgttg

SEQ ID NO: 58048 - RNA, 30 nt, synthetic construct
  misc_feature 1..30: note = Phenylalanine-tRNA ligase alpha subunit (94-103)
  source 1..30: mol_type = other RNA
atgagactgcccagcggcaaggtggggttc

SEQ ID NO: 58049 - RNA, 27 nt, synthetic construct
  misc_feature 1..27: note = Dipeptidyl peptidase 8 (31-39)
  source 1..27: mol_type = other RNA
aacagattcaagggcgtgaaatacttt

SEQ ID NO: 58050 - RNA, 27 nt, synthetic construct
  misc_feature 1..27: note = E3 ubiquitin-protein ligase UHRF1 (553-561)
  source 1..27: mol_type = other RNA
aacagatacgacggcatctataaggtg

SEQ ID NO: 58051 - RNA, 27 nt, synthetic construct
  misc_feature 1..27: note = ATP-dependent RNA helicase DDX19B (371-379)
  source 1..27: mol_type = other RNA
cagagagccgctgtgatcgagaggttc

SEQ ID NO: 58052 - RNA, 27 nt, synthetic construct
  misc_feature 1..27: note = V-type proton ATPase subunit H (106-114)
  source 1..27: mol_type = other RNA
cagagagtgagcatcttctttgactac

SEQ ID NO: 58053 - RNA, 27 nt, synthetic construct
  misc_feature 1..27: note = Zinc finger protein 536 (380-388)
  source 1..27: mol_type = other RNA
agaaggttcaaggagccctggtttctg

SEQ ID NO: 58054 - RNA, 27 nt, synthetic construct
  misc_feature 1..27: note = F-box only protein 25 (53-61)
  source 1..27: mol_type = other RNA
agaaggttcaactacgtggtcaagctg

SEQ ID NO: 58055 - RNA, 27 nt, synthetic construct
  misc_feature 1..27: note = Myosin-9 (1209-1217)
  source 1..27: mol_type = other RNA
agaaggggcgacctgcccttcgtggtc

SEQ ID NO: 58056 - RNA, 33 nt, synthetic construct
  misc_feature 1..33: note = Plectin (1853-1863)
  source 1..33: mol_type = other RNA
agaaggctggccgaggacgaagctttccagcgg

SEQ ID NO: 58057 - RNA, 33 nt, synthetic construct
  misc_feature 1..33: note = 60S ribosomal protein L15 (143-153)
  source 1..33: mol_type = other RNA
agaaggaaccccgacacccagtggatcacaaag

SEQ ID NO: 58058 - RNA, 27 nt, synthetic construct
  misc_feature 1..27: note = E3 SUMO-protein ligase RanBP2 (1126-1134)
  source 1..27: mol_type = other RNA
agaaggagcgacgatatgttcaccttt

SEQ ID NO: 58059 - RNA, 27 nt, synthetic construct
  misc_feature 1..27: note = F-box only protein 21 (295-303)
  source 1..27: mol_type = other RNA
agaaggaccggcatccccattagcatg

SEQ ID NO: 58060 - RNA, 27 nt, synthetic construct
  misc_feature 1..27: note = Prelamin-A/C (40-48)
  source 1..27: mol_type = other RNA
agaagggtggacgccgagaaccggctg

SEQ ID NO: 58061 - RNA, 30 nt, synthetic construct
  misc_feature 1..30: note = Polymerase I and transcript release factor (137-146)
  source 1..30: mol_type = other RNA
agaagggtggacgatttcaagaaagccttt

SEQ ID NO: 58062 - RNA, 36 nt, synthetic construct
  misc_feature 1..36: note = Polymerase I and transcript release factor (137-148)
  source 1..36: mol_type = other RNA
agaagggtggacgatttcaagaaagcctttagcaag

SEQ ID NO: 58063 - RNA, 30 nt, synthetic construct
  misc_feature 1..30: note = Hsp90 co-chaperone Cdc37 (166-175)
  source 1..30: mol_type = other RNA
agaaggtgggacgatagccagaagtacctg

SEQ ID NO: 58064 - RNA, 27 nt, synthetic construct
  misc_feature 1..27: note = Vascular endothelial growth factor A (62-70)
  source 1..27: mol_type = other RNA
agcagattcggcggggccgtggtcagg

SEQ ID NO: 58065 - RNA, 27 nt, synthetic construct
  misc_feature 1..27: note = Lysosomal protective protein (472-480)
  source 1..27: mol_type = other RNA
agcagattcctgaacaagcagccctac

SEQ ID NO: 58066 - RNA, 27 nt, synthetic construct
  misc_feature 1..27: note = Decapping and exoribonuclease protein (154-162)
  source 1..27: mol_type = other RNA
agcagattccagggcaccctgtacctc

SEQ ID NO: 58067 - RNA, 30 nt, synthetic construct
  misc_feature 1..30: note = Glia-derived nexin (207-216)
  source 1..30: mol_type = other RNA
agcagattccagcccgagaacaccaagaaa

SEQ ID NO: 58068 - RNA, 27 nt, synthetic construct
  misc_feature 1..27: note = Signal transducer and activator of transcription 1-alpha/beta (69-77)
  source 1..27: mol_type = other RNA
agcagattctccctggagaacaatttt

SEQ ID NO: 58069 - RNA, 27 nt, synthetic construct
  misc_feature 1..27: note = PITH domain-containing protein 1 (143-151)
  source 1..27: mol_type = other RNA
agcagattctccaacgtgtaccacctg

SEQ ID NO: 58070 - RNA, 27 nt, synthetic construct
  misc_feature 1..27: note = Gamma-aminobutyric acid receptor subunit beta-3 (452-460)
  source 1..27: mol_type = other RNA
agcagaatcgtgttcccctttaccttc

SEQ ID NO: 58071 - RNA, 24 nt, synthetic construct
  misc_feature 1..24: note = Probable dolichyl pyrophosphate Glc1Man9GlcNAc2 alpha-1,3-glucosyltransferase (267-274)
  source 1..24: mol_type = other RNA
agcagactgttcccctttaagagg

SEQ ID NO: 58072 - RNA, 27 nt, synthetic construct
  misc_feature 1..27: note = Lysine-specific demethylase 3B (1181-1189)
  source 1..27: mol_type = other RNA
agcagactgccctcctacttcgtgagg

SEQ ID NO: 58073 - RNA, 27 nt, synthetic construct
  misc_feature 1..27: note = Arginine-tRNA ligase, cytoplasmic (78-86)
  source 1..27: mol_type = other RNA
agcagactgcaggaggtgttcggccac

SEQ ID NO: 58074 - RNA, 30 nt, synthetic construct
  misc_feature 1..30: note = Myeloid leukemia factor 2 (28-37)
  source 1..30: mol_type = other RNA
agcagaatgctgtccggcgggttcggatac

SEQ ID NO: 58075 - RNA, 27 nt, synthetic construct
  misc_feature 1..27: note = Protein diaphanous homolog 2 (855-863)
  source 1..27: mol_type = other RNA
agcagaaacgcccagtccctgggcttc

SEQ ID NO: 58076 - RNA, 27 nt, synthetic construct
  misc_feature 1..27: note = Catenin beta-1 (646-654)
  source 1..27: mol_type = other RNA
agcagaaacgagggcgtggccacctac

SEQ ID NO: 58077 - RNA, 27 nt, synthetic construct
  misc_feature 1..27: note = Nuclear protein localization protein 4 homolog (328-336)
  source 1..27: mol_type = other RNA
agcagaaacaaggacacctacttcctg

SEQ ID NO: 58078 - RNA, 33 nt, synthetic construct
  misc_feature 1..33: note = TOX high mobility group box family member 4 (588-598)
  source 1..33: mol_type = other RNA
agcagaaactccaataccgtggtcttcgttaag

SEQ ID NO: 58079 - RNA, 27 nt, synthetic construct
  misc_feature 1..27: note = Spectrin beta chain, non-erythrocytic 1 (903-911)
  source 1..27: mol_type = other RNA
agcagagtggccgtcgttaaccagatc

SEQ ID NO: 58080 - RNA, 30 nt, synthetic construct
  misc_feature 1..30: note = Aldehyde dehydrogenase family 1 member A3 (318-327)
  source 1..30: mol_type = other RNA
agcagagtgttcgtcgaggaacaggtttac

SEQ ID NO: 58081 - RNA, 27 nt, synthetic construct
  misc_feature 1..27: note = Dystonin (6683-6691)
  source 1..27: mol_type = other RNA
agcagatgggagaaggtggtccagagg

SEQ ID NO: 58082 - RNA, 33 nt, synthetic construct
  misc_feature 1..33: note = Phosphatidylinositol-binding clathrin assembly protein (128-138)
  source 1..33: mol_type = other RNA
agcagatacctgaacgagaaggccgtgtcctat

SEQ ID NO: 58083 - RNA, 30 nt, synthetic construct
  misc_feature 1..30: note = TRPM8 channel-associated factor 1 (46-55)
  source 1..30: mol_type = other RNA
agcagatacaggctgcccgtggccacccgg

SEQ ID NO: 58084 - RNA, 27 nt, synthetic construct
  misc_feature 1..27: note = Protein yippee-like 5 (33-41)
  source 1..27: mol_type = other RNA
accagattcacaggcgccactgggagg

SEQ ID NO: 58085 - RNA, 27 nt, synthetic construct
  misc_feature 1..27: note = 78 kDa glucose-regulated protein (364-372)
  source 1..27: mol_type = other RNA
accagaatccccaagattcagcaactg

SEQ ID NO: 58086 - RNA, 27 nt, synthetic construct
  misc_feature 1..27: note = Ubiquitin-like protein 5 (37-45)
  source 1..27: mol_type = other RNA
accagatggaacaagatcgtgctgaaa

SEQ ID NO: 58087 - RNA, 27 nt, synthetic construct
  misc_feature 1..27: note = Zinc finger BED domain-containing protein 5 (574-582)
  source 1..27: mol_type = other RNA
gtgagaaaccccttcaccgtcacagtt

SEQ ID NO: 58088 - RNA, 30 nt, synthetic construct
  misc_feature 1..30: note = Proteasome subunit beta type-4 (223-232)
  source 1..30: mol_type = other RNA
tacagagacgccaggagctataaccggttc

SEQ ID NO: 58089 - RNA, 30 nt, synthetic construct
  misc_feature 1..30: note = Proteasome subunit beta type-4 (22-31)
  source 1..30: mol_type = other RNA
tacagaatccccagcacccctgactccttc

SEQ ID NO: 58090 - RNA, 30 nt, synthetic construct
  misc_feature 1..30: note = Rho GTPase-activating protein 5 (1010-1019)
  source 1..30: mol_type = other RNA
tacagactggacctcgagggcaacgaatat

SEQ ID NO: 58091 - RNA, 27 nt, synthetic construct
  misc_feature 1..27: note = Pre-mRNA-processing-splicing factor 8 (1786-1794)
  source 1..27: mol_type = other RNA
tacagagtgaccatccacaagacattc

SEQ ID NO: 58092 - RNA, 27 nt, synthetic construct
  misc_feature 1..27: note = Arginine-glutamic acid dipeptide repeats protein (336-344)
  source 1..27: mol_type = other RNA
gccgctgcatacccccacaccagcctg

SEQ ID NO: 58093 - RNA, 30 nt, synthetic construct
  misc_feature 1..30: note = Lon protease homolog 2, peroxisomal (789-798)
  source 1..30: mol_type = other RNA
gccgctttcgacggcgggtttaccgtgaag

SEQ ID NO: 58094 - RNA, 27 nt, synthetic construct
  misc_feature 1..27: note = Double-stranded RNA-binding protein Staufen homolog 2 (139-147)
  source 1..27: mol_type = other RNA
gccgctatgaaggcactgcaggccctc

SEQ ID NO: 58095 - RNA, 30 nt, synthetic construct
  misc_feature 1..30: note = 26S proteasome non-ATPase regulatory subunit 14 (301-310)
  source 1..30: mol_type = other RNA
gccgctatgctggacaccgtggtcttcaag

SEQ ID NO: 58096 - RNA, 27 nt, synthetic construct
  misc_feature 1..27: note = 40S ribosomal protein S17 (12-20)
  source 1..27: mol_type = other RNA
gccgctagagtgatcattgagaagtac

SEQ ID NO: 58097 - RNA, 27 nt, synthetic construct
  misc_feature 1..27: note = Endoplasmic reticulum resident protein 29 (3-11)
  source 1..27: mol_type = other RNA
gccgctgtgcccagagcagccttcctg

SEQ ID NO: 58098 - RNA, 27 nt, synthetic construct
  misc_feature 1..27: note = Tyrosine-protein phosphatase non-receptor type 1 (264-272)
  source 1..27: mol_type = other RNA
gccgaccagctgagattcagctacctc

SEQ ID NO: 58099 - RNA, 27 nt, synthetic construct
  misc_feature 1..27: note = ATP-dependent RNA helicase DDX18 (335-343)
  source 1..27: mol_type = other RNA
gccgacagaatcctggatgtgggcttc

SEQ ID NO: 58100 - RNA, 27 nt, synthetic construct
  misc_feature 1..27: note = Spectrin alpha chain, non-erythrocytic 1 (781-789)
  source 1..27: mol_type = other RNA
gccgacagcctgagactccagcaactt

SEQ ID NO: 58101 - RNA, 24 nt, synthetic construct
  misc_feature 1..24: note = Exosome complex exonuclease RRP44 (753-760)
  source 1..24: mol_type = other RNA
gccgacgtgatcgtccacagactg

SEQ ID NO: 58102 - RNA, 27 nt, synthetic construct
  misc_feature 1..27: note = Trafficking protein particle complex subunit 4 (26-34)
  source 1..27: mol_type = other RNA
gccgaggctgaaaagaccttcagctac

SEQ ID NO: 58103 - RNA, 27 nt, synthetic construct
  misc_feature 1..27: note = Plectin (2624-2632)
  source 1..27: mol_type = other RNA
gccgaggctgaacccgagcacagcttc

SEQ ID NO: 58104 - RNA, 30 nt, synthetic construct
  misc_feature 1..30: note = Spectrin beta chain, non-erythrocytic 1 (1181-1190)
  source 1..30: mol_type = other RNA
gccgaggctttcctgaacaatcaggaatac

SEQ ID NO: 58105 - RNA, 33 nt, synthetic construct
  misc_feature 1..33: note = Structural maintenance of chromosomes protein 2 (370-380)
  source 1..33: mol_type = other RNA
gccgaggctctggcagccgcgcagcaacacttc

SEQ ID NO: 58106 - RNA, 27 nt, synthetic construct
  misc_feature 1..27: note = Coatomer subunit alpha (1048-1056)
  source 1..27: mol_type = other RNA
gccgaggctcagcaactgatcaccatt

SEQ ID NO: 58107 - RNA, 33 nt, synthetic construct
  misc_feature 1..33: note = Dihydropyrimidinase-related protein 1 (233-243)
  source 1..33: mol_type = other RNA
gccgaggctgtgttcagagcaatcaccattgcc

SEQ ID NO: 58108 - RNA, 27 nt, synthetic construct
  misc_feature 1..27: note = Mitochondrial import receptor subunit TOM20 homolog (63-71)
  source 1..27: mol_type = other RNA
gccgaggctgtgcagaagttctttctg

SEQ ID NO: 58109 - RNA, 33 nt, synthetic construct
  misc_feature 1..33: note = ADP-ribosylation factor 3 (112-122)
  source 1..33: mol_type = other RNA
gccgaggacgaactgagagatgctgtgctcctt

SEQ ID NO: 58110 - RNA, 30 nt, synthetic construct
  misc_feature 1..30: note = WD repeat-containing protein 26 (246-255)
  source 1..30: mol_type = other RNA
gccgaggacctgagagctaaggcagaatgg

SEQ ID NO: 58111 - RNA, 27 nt, synthetic construct
  misc_feature 1..27: note = Mitogen-activated protein kinase kinase kinase 3 (613-621)
  source 1..27: mol_type = other RNA
gccgaggaactgctcacccaccatttc

SEQ ID NO: 58112 - RNA, 30 nt, synthetic construct
  misc_feature 1..30: note = LisH domain-containing protein ARMC9 (22-31)
  source 1..30: mol_type = other RNA
gccgagttcgaagacaccctgaagacattt

SEQ ID NO: 58113 - RNA, 30 nt, synthetic construct
  misc_feature 1..30: note = RNA-binding protein 28 (545-554)
  source 1..30: mol_type = other RNA
gccgagttccaggaacacgagcatgctctg

SEQ ID NO: 58114 - RNA, 27 nt, synthetic construct
  misc_feature 1..27: note = Tubulin alpha-1C chain (243-251)
  source 1..27: mol_type = other RNA
gccgagaaggcttaccacgaacagctg

SEQ ID NO: 58115 - RNA, 27 nt, synthetic construct
  misc_feature 1..27: note = Junction plakoglobin (137-145)
  source 1..27: mol_type = other RNA
gccgagctggctaccagagcactcccc

SEQ ID NO: 58116 - RNA, 27 nt, synthetic construct
  misc_feature 1..27: note = Zinc finger protein 579 (465-473)
  source 1..27: mol_type = other RNA
gccgagctggaaagagctgcagccctc

SEQ ID NO: 58117 - RNA, 30 nt, synthetic construct
  misc_feature 1..30: note = Myosin-9 (780-789)
  source 1..30: mol_type = other RNA
gccgagctggaaagactcaacaagcagttc

SEQ ID NO: 58118 - RNA, 27 nt, synthetic construct
  misc_feature 1..27: note = F-box/LRR-repeat protein 5 (165-173)
  source 1..27: mol_type = other RNA
gccgagctgctcagaggccttagcctg

SEQ ID NO: 58119 - RNA, 33 nt, synthetic construct
  misc_feature 1..33: note = Cyclin-dependent kinase inhibitor 1C (51-61)
  source 1..33: mol_type = other RNA
gccgagctgaacgctgaagaccagaatagatgg

SEQ ID NO: 58120 - RNA, 30 nt, synthetic construct
  misc_feature 1..30: note = Calmodulin (104-113)
  source 1..30: mol_type = other RNA
gccgagctgagacacgtgatgaccaacctc

SEQ ID NO: 58121 - RNA, 27 nt, synthetic construct
  misc_feature 1..27: note = Uridine phosphorylase 1 (195-203)
  source 1..27: mol_type = other RNA
gccgagctgagcgaattcaccacagtg

SEQ ID NO: 58122 - RNA, 27 nt, synthetic construct
  misc_feature 1..27: note = U5 small nuclear ribonucleoprotein 200 kDa helicase (318-326)
  source 1..27: mol_type = other RNA
gccgagctgaccggcgaccaccagctc

SEQ ID NO: 58123 - RNA, 27 nt, synthetic construct
  misc_feature 1..27: note = E3 ubiquitin/ISG15 ligase TRIM25 (482-490)
  source 1..27: mol_type = other RNA
gccgagatgccccagaactacagacct

SEQ ID NO: 58124 - RNA, 27 nt, synthetic construct
  misc_feature 1..27: note = Heterogeneous nuclear ribonucleoprotein U (399-407)
  source 1..27: mol_type = other RNA
gccgagaaccccggcaagtacaatatc

SEQ ID NO: 58125 - RNA, 27 nt, synthetic construct
  misc_feature 1..27: note = Nuclear pore complex protein Nup160 (377-385)
  source 1..27: mol_type = other RNA
gccgagaaccagaccgtggtcaagtac

SEQ ID NO: 58126 - RNA, 27 nt, synthetic construct
  misc_feature 1..27: note = MORF4 family-associated protein 1 (10-18)
  source 1..27: mol_type = other RNA
gccgagcccgaagaggtggaagtcctg

SEQ ID NO: 58127 - RNA, 30 nt, synthetic construct
  misc_feature 1..30: note = Matrin-3 (229-238)
  source 1..30: mol_type = other RNA
gccgagccctacggcaagatcaaaaactat

SEQ ID NO: 58128 - RNA, 27 nt, synthetic construct
  misc_feature 1..27: note = Exocyst complex component 1 (513-521)
  source 1..27: mol_type = other RNA
gccgagcaggacttcatcagcaagttt

SEQ ID NO: 58129 - RNA, 33 nt, synthetic construct
  misc_feature 1..33: note = Keratin, type I cytoskeletal 10 (133-143)
  source 1..33: mol_type = other RNA
gccgagcagaacagaaaggacgctgaagcatgg

SEQ ID NO: 58130 - RNA, 30 nt, synthetic construct
  misc_feature 1..30: note = 14 kDa phosphohistidine phosphatase (38-47)
  source 1..30: mol_type = other RNA
gccgagagcaaggaaatcgtgagaggctac

SEQ ID NO: 58131 - RNA, 27 nt, synthetic construct
  misc_feature 1..27: note = Heterogeneous nuclear ribonucleoproteins A2/B1 (61-69)
  source 1..27: mol_type = other RNA
gccgaggtggacgctgcaatggccgcg

SEQ ID NO: 58132 - RNA, 27 nt, synthetic construct
  misc_feature 1..27: note = Rho GTPase-activating protein 18 (654-662)
  source 1..27: mol_type = other RNA
gccgagtgggtgatcaagagcaaaccc

SEQ ID NO: 58133 - RNA, 27 nt, synthetic construct
  misc_feature 1..27: note = RNA-binding protein 8A (94-102)
  source 1..27: mol_type = other RNA
gccgagtacggcgaaatcaagaacatt

SEQ ID NO: 58134 - RNA, 30 nt, synthetic construct; identical to SEQ ID NO: 33907
  misc_feature 1..30: note = Mitotic checkpoint serine/threonine-protein kinase BUB1 (76-85)
  source 1..30: mol_type = other RNA

SEQ ID NO: 58135 - RNA, 33 nt, synthetic construct
  misc_feature 1..33: note = T-complex protein 1 subunit eta (249-259)
  source 1..33: mol_type = other RNA
gccggcttcgacgctaccaacatcctgaataag

SEQ ID NO: 58136 - RNA, 27 nt, synthetic construct
  misc_feature 1..27: note = Eukaryotic translation initiation factor 4 gamma 1 (1268-1276)
  source 1..27: mol_type = other RNA
gccggccacctgagcaccgctcagtac

SEQ ID NO: 58137 - RNA, 36 nt, synthetic construct
  misc_feature 1..36: note = Cytoplasmic dynein 1 heavy chain 1 (3396-3407)
  source 1..36: mol_type = other RNA
gccatcgctcagctgaactacgcagacatgctcaag

SEQ ID NO: 58138 - RNA, 33 nt, synthetic construct; identical to SEQ ID NO: 33911
  misc_feature 1..33: note = Transmembrane protein 131 (804-814)
  source 1..33: mol_type = other RNA

SEQ ID NO: 58139 - RNA, 27 nt, synthetic construct
  misc_feature 1..27: note = Mortality factor 4-like protein 1 (34-42)
  source 1..27: mol_type = other RNA
gccatcaaggacaaacaggtgaagtac

SEQ ID NO: 58140 - RNA, 27 nt, synthetic construct
  misc_feature 1..27: note = Endoribonuclease Dicer (608-616)
  source 1..27: mol_type = other RNA
gccatcctggactacctcattaccaag

SEQ ID NO: 58141 - RNA, 27 nt, synthetic construct
  misc_feature 1..27: note = Ceramide synthase 6 (81-89)
  source 1..27: mol_type = other RNA
gccatcctggagaaggtgttcaccgct

SEQ ID NO: 58142 - RNA, 33 nt, synthetic construct
  misc_feature 1..33: note = Aryl hydrocarbon receptor (422-432)
  source 1..33: mol_type = other RNA
gccatcatggaccccctgcctctcagaaccaag

SEQ ID NO: 58143 - RNA, 27 nt, synthetic construct
  misc_feature 1..27: note = MICOS complex subunit MIC25 (96-104)
  source 1..27: mol_type = other RNA
gccatccaggacaagctgttccaagtg

SEQ ID NO: 58144 - RNA, 27 nt, synthetic construct
  misc_feature 1..27: note = DNA mismatch repair protein Msh2 (765-773)
  source 1..27: mol_type = other RNA
gccatcagcgagtacattgctaccaag

SEQ ID NO: 58145 - RNA, 30 nt, synthetic construct
  misc_feature 1..30: note = Cytochrome b-c1 complex subunit 9 (42-51)
  source 1..30: mol_type = other RNA
gccatctacgaccacattaacgagggcaag

SEQ ID NO: 58146 - RNA, 36 nt, synthetic construct
  misc_feature 1..36: note = Cytochrome c oxidase subunit 7A2, mitochondrial (69-80)
  source 1..36: mol_type = other RNA
gccatctacgagctggctgtggcaagcttccccaag

SEQ ID NO: 58147 - RNA, 33 nt, synthetic construct
  misc_feature 1..33: note = BCL-6 corepressor (147-157)
  source 1..33: mol_type = other RNA
gccatctacaagaccccccctggcattcagaaa

SEQ ID NO: 58148 - RNA, 27 nt, synthetic construct
  misc_feature 1..27: note = Apolipoprotein L2 (101-109)
  source 1..27: mol_type = other RNA
gccctggctgaggaagtggagcaggtc

SEQ ID NO: 58149 - RNA, 30 nt, synthetic construct
  misc_feature 1..30: note = Epidermal growth factor receptor substrate 15 (283-292)
  source 1..30: mol_type = other RNA
gccctggctttccacctcatcagccagaag

SEQ ID NO: 58150 - RNA, 27 nt, synthetic construct
  misc_feature 1..27: note = E3 ubiquitin-protein ligase RNF114 (70-78)
  source 1..27: mol_type = other RNA
gccctggctcccggcgtgagagcagtc

SEQ ID NO: 58151 - RNA, 27 nt, synthetic construct
  misc_feature 1..27: note = Neudesin (124-132)
  source 1..27: mol_type = other RNA
gccctggacgaggtgttcaccaaggtc

SEQ ID NO: 58152 - RNA, 27 nt, synthetic construct
  misc_feature 1..27: note = JNK1/MAPK8-associated membrane protein (109-117)
  source 1..27: mol_type = other RNA
gccctgttccagcacatcaccgctctc

SEQ ID NO: 58153 - RNA, 27 nt, synthetic construct
  misc_feature 1..27: note = Set1/Ash2 histone methyltransferase complex subunit ASH2 (290-298)
  source 1..27: mol_type = other RNA
gccctgcacgacagagctccccagctc

SEQ ID NO: 58154 - RNA, 27 nt, synthetic construct
  misc_feature 1..27: note = Coiled-coil domain-containing protein 14 (24-32)
  source 1..27: mol_type = other RNA
gccctgatcgaggacgaacacaacctc

SEQ ID NO: 58155 - RNA, 27 nt, synthetic construct
  misc_feature 1..27: note = Clustered mitochondria protein homolog (826-834)
  source 1..27: mol_type = other RNA
gccctgctcgacaacaatatcggcctt

SEQ ID NO: 58156 - RNA, 30 nt, synthetic construct
  misc_feature 1..30: note = Lysine-specific demethylase 5C (683-692)
  source 1..30: mol_type = other RNA
gccctgctcgagaagggcatcaccgaagct

SEQ ID NO: 58157 - RNA, 27 nt, synthetic construct
  misc_feature 1..27: note = Cleft lip and palate transmembrane protein 1 (348-356)
  source 1..27: mol_type = other RNA
gccctgctcgagaccaacccctacctt

SEQ ID NO: 58158 - RNA, 27 nt, synthetic construct
  misc_feature 1..27: note = S100P-binding protein (349-357)
  source 1..27: mol_type = other RNA
gccctgatggaccaggtgcaccatatg

SEQ ID NO: 58159 - RNA, 27 nt, synthetic construct
  misc_feature 1..27: note = Brefeldin A-inhibited guanine nucleotide-exchange protein 2 (869-877)
  source 1..27: mol_type = other RNA
gccctgatggaggctgtgagccacgca

SEQ ID NO: 58160 - RNA, 27 nt, synthetic construct
  misc_feature 1..27: note = Exosome complex component MTR3 (214-222)
  source 1..27: mol_type = other RNA
gccctgatgcccgtgctcaaccaggtc

SEQ ID NO: 58161 - RNA, 33 nt, synthetic construct
  misc_feature 1..33: note = Endoplasmic reticulum resident protein 29 (38-48)
  source 1..33: mol_type = other RNA
gccctgcccctcgacaccgtgacattctacaag

SEQ ID NO: 58162 - RNA, 27 nt, synthetic construct
  misc_feature 1..27: note = Vimentin (268-276)
  source 1..27: mol_type = other RNA
gccctgagagacgtgaggcagcaatac

SEQ ID NO: 58163 - RNA, 27 nt, synthetic construct
  misc_feature 1..27: note = Interferon regulatory factor 2-binding protein 1 (300-308)
  source 1..27: mol_type = other RNA
gccctgagagagcccggcaaggctctc

SEQ ID NO: 58164 - RNA, 27 nt, synthetic construct
  misc_feature 1..27: note = PR domain zinc finger protein 4 (284-292)
  source 1..27: mol_type = other RNA
gccctgagcgactccatccacaccgtg

SEQ ID NO: 58165 - RNA, 27 nt, synthetic construct
  misc_feature 1..27: note = Annexin A2 (108-116)
  source 1..27: mol_type = other RNA
gccctgagcggccacctcgagaccgtg

SEQ ID NO: 58166 - RNA, 27 nt, synthetic construct
  misc_feature 1..27: note = Protein CutA (89-97)
  source 1..27: mol_type = other RNA
gccctgaccgacttcgtgagaagcgtc

SEQ ID NO: 58167 - RNA, 30 nt, synthetic construct
  misc_feature 1..30: note = Trafficking protein particle complex subunit 2-like protein (19-28)
  source 1..30: mol_type = other RNA
gccctggtggaccagagagagctctacctt

SEQ ID NO: 58168 - RNA, 27 nt, synthetic construct
  misc_feature 1..27: note = Flap endonuclease 1 (165-173)
  source 1..27: mol_type = other RNA
gccctggtgaaggctggcaaagtctac

SEQ ID NO: 58169 - RNA, 30 nt, synthetic construct
  misc_feature 1..30: note = Cofilin-1 (83-92)
  source 1..30: mol_type = other RNA
gccctgtacgacgctacctatgagacaaag

SEQ ID NO: 58170 - RNA, 27 nt, synthetic construct
  misc_feature 1..27: note = COP9 signalosome complex subunit 2 (216-224)
  source 1..27: mol_type = other RNA
gccctgtacgagcagagcctccacatc

SEQ ID NO: 58171 - RNA, 39 nt, synthetic construct
  misc_feature 1..39: note = TGF-beta-activated kinase 1 and MAP3K7-binding protein 1 (311-323)
  source 1..39: mol_type = other RNA
gccatgatcgacaccgagttcgctaagcagacaagcctg

SEQ ID NO: 58172 - RNA, 42 nt, synthetic construct
  misc_feature 1..42: note = Cyclin-dependent kinase 2-associated protein 2 (6-19)
  source 1..42: mol_type = other RNA
gccatgaagccccctggcgctcaggggagccaatccacctac

SEQ ID NO: 58173 - RNA, 27 nt, synthetic construct
  misc_feature 1..27: note = Poly(rC)-binding protein 1 (249-257)
  source 1..27: mol_type = other RNA
gccatgatgcacggcgggaccggattc

SEQ ID NO: 58174 - RNA, 27 nt, synthetic construct
  misc_feature 1..27: note = Eyes absent homolog 3 (200-208)
  source 1..27: mol_type = other RNA
gcccccgctcctgcagcccagagactg

SEQ ID NO: 58175 - RNA, 27 nt, synthetic construct
  misc_feature 1..27: note = Homocysteine-responsive endoplasmic reticulum-resident ubiquitin-like domain member 1 protein (211-219)
  source 1..27: mol_type = other RNA
gcccccgctcctatccacaaccagttc

SEQ ID NO: 58176 - RNA, 27 nt, synthetic construct
  misc_feature 1..27: note = Wings apart-like protein homolog (598-606)
  source 1..27: mol_type = other RNA
gcccccgctcctccaagcaaggtgatc

SEQ ID NO: 58177 - RNA, 27 nt, synthetic construct
  misc_feature 1..27: note = Pre-mRNA-splicing factor ATP-dependent RNA helicase PRP16 (41-49)
  source 1..27: mol_type = other RNA
gcccccgctcctagaccaagcctgctc

SEQ ID NO: 58178 - RNA, 27 nt, synthetic construct
  misc_feature 1..27: note = Two pore calcium channel protein 1 (59-67)
  source 1..27: mol_type = other RNA
gcccccgctgtgcctgcactgagactc

SEQ ID NO: 58179 - RNA, 27 nt, synthetic construct
  misc_feature 1..27: note = Structural maintenance of chromosomes protein 3 (150-158)
  source 1..27: mol_type = other RNA
gcccccgacagccagagactgaagctc

SEQ ID NO: 58180 - RNA, 27 nt, synthetic construct
  misc_feature 1..27: note = Integrator complex subunit 3 (30-38)
  source 1..27: mol_type = other RNA
gcccccggcgggggaagactgctcctt

SEQ ID NO: 58181 - RNA, 51 nt, synthetic construct
  misc_feature 1..51: note = Fructose-bisphosphate aldolase A (79-95)
  source 1..51: mol_type = other RNA
gcccccggcaaggggatcctggctgcagacgagagcaccggatccattgcc

SEQ ID NO: 58182 - RNA, 27 nt, synthetic construct
  misc_feature 1..27: note = DNA/RNA-binding protein KIN17 (338-346)
  source 1..27: mol_type = other RNA
gcccccggcaagagaatcctggtgctc

SEQ ID NO: 58183 - RNA, 30 nt, synthetic construct
  misc_feature 1..30: note = Ribonucleoprotein PTB-binding 1 (298-307)
  source 1..30: mol_type = other RNA
gcccccggccctccagggagaagcatgctg

SEQ ID NO: 58184 - RNA, 27 nt, synthetic construct
  misc_feature 1..27: note = Sterol regulatory element-binding protein 1 (1104-1112)
  source 1..27: mol_type = other RNA
gcccccggccagagagtggggatgctg

SEQ ID NO: 58185 - RNA, 27 nt, synthetic construct
  misc_feature 1..27: note = E3 ubiquitin-protein ligase RNF114 (72-80)
  source 1..27: mol_type = other RNA
gcccccggcgtgagagctgtcgagctg

SEQ ID NO: 58186 - RNA, 27 nt, synthetic construct
  misc_feature 1..27: note = LIM domain and actin-binding protein 1 (397-405)
  source 1..27: mol_type = other RNA
gcccccatcgctaaggtgggcgtcctg

SEQ ID NO: 58187 - RNA, 27 nt, synthetic construct
  misc_feature 1..27: note = Destrin (109-117)
  source 1..27: mol_type = other RNA
gcccccctgaagagcaaaatgatctac

SEQ ID NO: 58188 - RNA, 33 nt, synthetic construct
  misc_feature 1..33: note = Talin-1 (1688-1698)
  source 1..33: mol_type = other RNA
gcccccagagagggcatcagccaggaagctctg

SEQ ID NO: 58189 - RNA, 30 nt, synthetic construct
  misc_feature 1..30: note = NADH dehydrogenase (ubiquinone) 1 alpha subcomplex assembly factor 4 (30-39)
  source 1..30: mol_type = other RNA
gcccccagacaccctagcaccaactccctg

SEQ ID NO: 58190 - RNA, 33 nt, synthetic construct
  misc_feature 1..33: note = Proline-rich nuclear receptor coactivator 2 (5-15)
  source 1..33: mol_type = other RNA
gcccccagactgaacagcgctgacaggcctatg

SEQ ID NO: 58191 - RNA, 27 nt, synthetic construct
  misc_feature 1..27: note = Zinc finger protein 526 (559-567)
  source 1..27: mol_type = other RNA
gcccccagactgcctatcaccggcctc

SEQ ID NO: 58192 - RNA, 27 nt, synthetic construct
  misc_feature 1..27: note = Protein Wiz (126-134)
  source 1..27: mol_type = other RNA
gcccccagacctggcctgctcagcctt

SEQ ID NO: 58193 - RNA, 33 nt, synthetic construct
  misc_feature 1..33: note = Coiled-coil-helix-coiled-coil-helix domain-containing protein 2 (49-59)
  source 1..33: mol_type = other RNA
gcccccagacagcctggcctgatggctcaaatg

SEQ ID NO: 58194 - RNA, 33 nt, synthetic construct
  misc_feature 1..33: note = PHD finger protein 23 (80-90)
  source 1..33: mol_type = other RNA
gcccccagcgacctgagaaccatccagacattc

SEQ ID NO: 58195 - RNA, 30 nt, synthetic construct
  misc_feature 1..30: note = Aladin (253-262)
  source 1..30: mol_type = other RNA
gcccccagcggcgggagactgctctccgct

SEQ ID NO: 58196 - RNA, 27 nt, synthetic construct
  misc_feature 1..27: note = SWI/SNF-related matrix-associated actin-dependent regulator of chromatin subfamily A member 5 (16-24)
  source 1..27: mol_type = other RNA
gcccccagcaagcctgctgcatccatc

SEQ ID NO: 58197 - RNA, 27 nt, synthetic construct
  misc_feature 1..27: note = Pre-mRNA-processing-splicing factor 8 (2018-2026)
  source 1..27: mol_type = other RNA
gcccccagccagcaaagacagcagatc

SEQ ID NO: 58198 - RNA, 30 nt, synthetic construct; identical to SEQ ID NO: 33971
  misc_feature 1..30: note Dolichyl-diphosphooligosaccharide-proteinosyltransferase 48 kDa subunit (183-192)
  source 1..30: mol_type = other RNA

SEQ ID NO: 58199 - RNA, 39 nt, synthetic construct
  misc_feature 1..39: note = Eukaryotic initiation factor 4A-II (75-87)
  source 1..39: mol_type = other RNA
gcccaggctcaaagcggcaccgggaagacagcaactttc

SEQ ID NO: 58200 - RNA, 45 nt, synthetic construct
  misc_feature 1..45: note = Crooked neck-like protein 1 (704-718)
  source 1..45: mol_type = other RNA
gcccagttcgagctgagctccggcaaggaagggtctctcaccaaa

SEQ ID NO: 58201 - RNA, 27 nt, synthetic construct
  misc_feature 1..27: note = Carboxymethylenebutenolidase homolog (123-131)
  source 1..27: mol_type = other RNA
gcccagaagatcggcattgtggggttc

SEQ ID NO: 58202 - RNA, 27 nt, synthetic construct
  misc_feature 1..27: note = Suppressor of SWI4 1 homolog (17-25)
  source 1..27: mol_type = other RNA
gcccagctgagaaacctcgaggcttac

SEQ ID NO: 58203 - RNA, 30 nt, synthetic construct
  misc_feature 1..30: note = Hsc70-interacting protein (339-348)
  source 1..30: mol_type = other RNA
gcccagaaccccgctaatatgagcaagtac

SEQ ID NO: 58204 - RNA, 27 nt, synthetic construct
  misc_feature 1..27: note = Protein phosphatase 1 regulatory subunit 15B (54-62)
  source 1..27: mol_type = other RNA
gcccagcccgagaccagagtgagctac

SEQ ID NO: 58205 - RNA, 36 nt, synthetic construct
  misc_feature 1..36: note = Putative PIP5K1A and PSMD4-like protein (282-293)
  source 1..36: mol_type = other RNA
gcccagagagagcccctgagctccgaaacccaatac

SEQ ID NO: 58206 - RNA, 27 nt, synthetic construct
  misc_feature 1..27: note = Ras-related C3 botulinum toxin substrate 1 (44-52)
  source 1..27: mol_type = other RNA
gccagcttcgagaacgtgagagctaag

SEQ ID NO: 58207 - RNA, 30 nt, synthetic construct; identical to SEQ ID NO: 33980
  misc_feature 1..30: note = Dynein light chain roadblock-type 1 (43-52)
  source 1..30: mol_type = other RNA

SEQ ID NO: 58208 - RNA, 33 nt, synthetic construct
  misc_feature 1..33: note = Heterogeneous nuclear ribonucleoprotein H (160-170)
  source 1..33: mol_type = other RNA
gccagccaggagatcgctgaaaaggcactgaaa

SEQ ID NO: 58209 - RNA, 27 nt, synthetic construct
  misc_feature 1..27: note = VPS53 protein (19-27)
  source 1..27: mol_type = other RNA
gccagctacaccaagatcgtggtcaaa

SEQ ID NO: 58210 - RNA, 33 nt, synthetic construct
  misc_feature 1..33: note = Catenin alpha-1 (826-836)
  source 1..33: mol_type = other RNA
gccagctacgtggcttccaccaagtatcagaaa

SEQ ID NO: 58211 - RNA, 27 nt, synthetic construct
  misc_feature 1..27: note = Acyl-protein thioesterase 1 (20-28)
  source 1..27: mol_type = other RNA
gccaccgctgcagtgatcttcctgcac

SEQ ID NO: 58212 - RNA, 36 nt, synthetic construct
  misc_feature 1..36: note = Prohibitin (229-240)
  source 1..36: mol_type = other RNA
gccaccgctggcgacgggctgatcgagctcagaaag

SEQ ID NO: 58213 - RNA, 30 nt, synthetic construct
  misc_feature 1..30: note = Major facilitator superfamily domain-containing protein 10 (72-81)
  source 1..30: mol_type = other RNA
gccaccgctatcggcatgcccgtggagaag

SEQ ID NO: 58214 - RNA, 27 nt, synthetic construct
  misc_feature 1..27: note = Biogenesis of lysosome-related organelles complex 1 subunit 1 (109-117)
  source 1..27: mol_type = other RNA
gccaccgctctggagtacgtgtataag

SEQ ID NO: 58215 - RNA, 39 nt, synthetic construct
  misc_feature 1..39: note = E3 ubiquitin-protein ligase BRE1A (84-96)
  source 1..39: mol_type = other RNA
gccaccgacgatgctagcctgctcatcgtgaacagatac

SEQ ID NO: 58216 - RNA, 27 nt, synthetic construct
  misc_feature 1..27: note = Alpha-1,2-mannosyltransferase ALG9 (450-458)
  source 1..27: mol_type = other RNA
gccaccgaccccacaatccacactgtg

SEQ ID NO: 58217 - RNA, 33 nt, synthetic construct
  misc_feature 1..33: note = Probable ATP-dependent RNA helicase DDX56 (198-208)
  source 1..33: mol_type = other RNA
gccaccttcaacgaggacgtgcaggctctgaag

SEQ ID NO: 58218 - RNA, 27 nt, synthetic construct
  misc_feature 1..27: note = Major facilitator superfamily domain-containing protein 10 (320-328)
  source 1..27: mol_type = other RNA
gccaccatccagggcgcttacgcaaga

SEQ ID NO: 58219 - RNA, 27 nt, synthetic construct
  misc_feature 1..27: note = E3 ubiquitin-protein ligase MYLIP (151-159)
  source 1..27: mol_type = other RNA
gccaccctgaacagcatcgtggctaag

SEQ ID NO: 58220 - RNA, 27 nt, synthetic construct
  misc_feature 1..27: note = Ankyrin repeat domain-containing protein 10 (82-90)
  source 1..27: mol_type = other RNA
gccaccctgaacgtgagcacaactaga

SEQ ID NO: 58221 - RNA, 30 nt, synthetic construct
  misc_feature 1..30: note = Filamin-A (829-838)
  source 1..30: mol_type = other RNA
gccacccccacaagccctatcagagtgaag

SEQ ID NO: 58222 - RNA, 33 nt, synthetic construct
  misc_feature 1..33: note = Nucleolar protein 14 (841-851)
  source 1..33: mol_type = other RNA
gccacccaggagggcgaatggaaggctctgaaa

SEQ ID NO: 58223 - RNA, 27 nt, synthetic construct
  misc_feature 1..27: note = Cullin-7 (1690-1698)
  source 1..27: mol_type = other RNA
gccacccagagcttctccacatttaga

SEQ ID NO: 58224 - RNA, 30 nt, synthetic construct
  misc_feature 1..30: note = Gamma-interferon-inducible protein 16 (234-243)
  source 1..30: mol_type = other RNA
gccacccagacacaattctttcacgtgaag

SEQ ID NO: 58225 - RNA, 27 nt, synthetic construct
  misc_feature 1..27: note = Vesicle transport protein SEC20 (257-265)
  source 1..27: mol_type = other RNA
gccaccgtgctgtacatcgtcaagaaa

SEQ ID NO: 58226 - RNA, 36 nt, synthetic construct
  misc_feature 1..36: note = Glycerol-3-phosphate dehydrogenase, mitochondrial (373-384)
  source 1..36: mol_type = other RNA
gccacctacggcgacaaggctttcgaggtggcaaaa

SEQ ID NO: 58227 - RNA, 27 nt, synthetic construct
  misc_feature 1..27: note = DNA (cytosine-5)-methyltransferase 3A (168-176)
  source 1..27: mol_type = other RNA
gccacctacaacaagcagcccatgtat

SEQ ID NO: 58228 - RNA, 27 nt, synthetic construct
  misc_feature 1..27: note = Cytoplasmic dynein 1 heavy chain 1 (156-164)
  source 1..27: mol_type = other RNA
gccgtggctcccttctttaagagctac

SEQ ID NO: 58229 - RNA, 27 nt, synthetic construct
  misc_feature 1..27: note = Triple functional domain protein (2585-2593)
  source 1..27: mol_type = other RNA
gccgtggctaccaagttcgtcaacaaa

SEQ ID NO: 58230 - RNA, 27 nt, synthetic construct
  misc_feature 1..27: note = Cleavage stimulation factor subunit 1 (359-367)
  source 1..27: mol_type = other RNA
gccgtgttcaaccacaccgaggactac

SEQ ID NO: 58231 - RNA, 30 nt, synthetic construct
  misc_feature 1..30: note = Inositol hexakisphosphate and diphosphoinositol-pentakisphosphate kinase 1 (189-198)
  source 1..30: mol_type = other RNA
gccgtgttccccaagccttttgtcgagaaa

SEQ ID NO: 58232 - RNA, 33 nt, synthetic construct
  misc_feature 1..33: note = POTE ankyrin domain family member F (729-739)
  source 1..33: mol_type = other RNA
gccgtgttccccagcatcgtcggcagacctagg

SEQ ID NO: 58233 - RNA, 27 nt, synthetic construct
  misc_feature 1..27: note = Probable ATP-dependent RNA helicase DDX10 (63-71)
  source 1..27: mol_type = other RNA
gccgtgatcgagaacctgcccaagaaa

SEQ ID NO: 58234 - RNA, 33 nt, synthetic construct
  misc_feature 1..33: note = Zinc finger protein 292 (1897-1907)
  source 1..33: mol_type = other RNA
gccgtgatccccgagaagcagctggtcgaaaaa

SEQ ID NO: 58235 - RNA, 27 nt, synthetic construct
  misc_feature 1..27: note = Leucine-rich repeat and calponin homology domain-containing protein 3 (504-512)
  source 1..27: mol_type = other RNA
gccgtgctggacttcgtcaagcagaaa

SEQ ID NO: 58236 - RNA, 33 nt, synthetic construct
  misc_feature 1..33: note = Calcium-binding protein 39 (24-34)
  source 1..33: mol_type = other RNA
gccgtgctggagaagcaggacatcagcgataaa

SEQ ID NO: 58237 - RNA, 27 nt, synthetic construct
  misc_feature 1..27: note = Small integral membrane protein 15 (38-46)
  source 1..27: mol_type = other RNA
gccgtgctgagctggaagctcgctaaa

SEQ ID NO: 58238 - RNA, 33 nt, synthetic construct
  misc_feature 1..33: note = Cytoskeleton-associated protein 5 (403-413)
  source 1..33: mol_type = other RNA
gccgtgatggacaacaagaatcccaccatcaaa

SEQ ID NO: 58239 - RNA, 39 nt, synthetic construct
  misc_feature 1..39: note = MICOS complex subunit MIC60 (234-246)
  source 1..39: mol_type = other RNA
gccgtgcaggctgtcaacgcacacagcaatatcctgaag

SEQ ID NO: 58240 - RNA, 36 nt, synthetic construct
  misc_feature 1..36: note = Ran GTPase-activating protein 1 (489-500)
  source 1..36: mol_type = other RNA
gccgtgcaggacgctgtcgatgcactgatgcaaaag

SEQ ID NO: 58241 - RNA, 27 nt, synthetic construct
  misc_feature 1..27: note = PRELI domain-containing protein 1, mitochondrial (142-150)
  source 1..27: mol_type = other RNA
gccgtgcaggagttcggcctggctaga

SEQ ID NO: 58242 - RNA, 30 nt, synthetic construct
  misc_feature 1..30: note = V-type proton ATPase subunit E 1 (147-156)
  source 1..30: mol_type = other RNA
gccgtgcagaaggctatccccatgtacaaa

SEQ ID NO: 58243 - RNA, 27 nt, synthetic construct
  misc_feature 1..27: note = Lamin-B receptor (364-372)
  source 1..27: mol_type = other RNA
gccgtgtacgacttctttatcggcaga

SEQ ID NO: 58244 - RNA, 39 nt, synthetic construct
  misc_feature 1..39: note = Protein phosphatase 1A (57-69)
  source 1..39: mol_type = other RNA
gccgtgtacgacggccacgctgggagccaggtcgcaaag

SEQ ID NO: 58245 - RNA, 27 nt, synthetic construct
  misc_feature 1..27: note = ATPase family AAA domain-containing protein 2 (1085-1093)
  source 1..27: mol_type = other RNA
gcctacgctatcattaaggaggaactg

SEQ ID NO: 58246 - RNA, 27 nt, synthetic construct
  misc_feature 1..27: note = ATP-dependent RNA helicase DHX29 (855-863)
  source 1..27: mol_type = other RNA
gcctacctggacaagagcccccagttc

SEQ ID NO: 58247 - RNA, 27 nt, synthetic construct
  misc_feature 1..27: note = Structural maintenance of chromosomes protein 6 (494-502)
  source 1..27: mol_type = other RNA
gcctacagacagggccacttcacctat

SEQ ID NO: 58248 - RNA, 27 nt, synthetic construct
  misc_feature 1..27: note = Protein PRRC2C (846-854)
  source 1..27: mol_type = other RNA
gcctacagcgtggagcacaaccagctg

SEQ ID NO: 58249 - RNA, 24 nt, synthetic construct
  misc_feature 1..24: note = Coatomer subunit alpha (194-201)
  source 1..24: mol_type = other RNA
gacgccgtggtcaagcacgttctg

SEQ ID NO: 58250 - RNA, 24 nt, synthetic construct
  misc_feature 1..24: note = Talin-1 (1943-1950)
  source 1..24: mol_type = other RNA
gacgcctacaccaagaaagagctg

SEQ ID NO: 58251 - RNA, 24 nt, synthetic construct
  misc_feature 1..24: note = Spindlin-1 (249-256)
  source 1..24: mol_type = other RNA
gacgatttccacatctacgtgtat

SEQ ID NO: 58252 - RNA, 27 nt, synthetic construct
  misc_feature 1..27: note = Caldesmon (92-100)
  source 1..27: mol_type = other RNA
gacgaggccgctttcctggaaagactc

SEQ ID NO: 58253 - RNA, 33 nt, synthetic construct
  misc_feature 1..33: note = E3 ubiquitin-protein ligase CHIP (39-49)
  source 1..33: mol_type = other RNA
gacgaggccatcgctaacctgcagagagcatac

SEQ ID NO: 58254 - RNA, 30 nt, synthetic construct
  misc_feature 1..30: note = REST corepressor 1 (472-481)
  source 1..30: mol_type = other RNA
gacgaggcccccgtgctggatgtcagatac

SEQ ID NO: 58255 - RNA, 27 nt, synthetic construct
  misc_feature 1..27: note = Peptidyl-prolyl cis-trans isomerase-like 2 (267-275)
  source 1..27: mol_type = other RNA
gacgaggatgtgctgagataccagttc

SEQ ID NO: 58256 - RNA, 27 nt, synthetic construct
  misc_feature 1..27: note = Annexin A5 (190-198)
  source 1..27: mol_type = other RNA
gacgaggaaaagttcatcaccattttt

SEQ ID NO: 58257 - RNA, 27 nt, synthetic construct
  misc_feature 1..27: note = Coatomer subunit gamma-1 (781-789)
  source 1..27: mol_type = other RNA
gacgagttcgaaaaggaggaaaccttt

SEQ ID NO: 58258 - RNA, 27 nt, synthetic construct
  misc_feature 1..27: note = Pre-mRNA-splicing factor ATP-dependent RNA helicase PRP16 (334-342)
  source 1..27: mol_type = other RNA
gacgagttccacaaccccctggcctac

SEQ ID NO: 58259 - RNA, 27 nt, synthetic construct
  misc_feature 1..27: note = Calmodulin-like protein 4 (136-144)
  source 1..27: mol_type = other RNA
gacgagttcatccacaagattaccctg

SEQ ID NO: 58260 - RNA, 24 nt, synthetic construct
  misc_feature 1..24: note = Coatomer subunit gamma-1 (373-380)
  source 1..24: mol_type = other RNA
gacgagttcaaggtggtcgttgtg

SEQ ID NO: 58261 - RNA, 27 nt, synthetic construct
  misc_feature 1..27: note = Eukaryotic translation initiation factor 4 gamma 3 (1231-1239)
  source 1..27: mol_type = other RNA
gacgagttcctgcacatcaacgatttt

SEQ ID NO: 58262 - RNA, 27 nt, synthetic construct
  misc_feature 1..27: note = F-box/WD repeat-containing protein 5 (42-50)
  source 1..27: mol_type = other RNA
gacgagttcctgtggagagaacagttt

SEQ ID NO: 58263 - RNA, 27 nt, synthetic construct
  misc_feature 1..27: note = Calreticulin (166-174)
  source 1..27: mol_type = other RNA
gacgagttcacccacctgtacacactc

SEQ ID NO: 58264 - RNA, 24 nt, synthetic construct
  misc_feature 1..24: note = Zinc finger RNA-binding protein (575-582)
  source 1..24: mol_type = other RNA
gacgagggcaaggtgatcagattc

SEQ ID NO: 58265 - RNA, 27 nt, synthetic construct
  misc_feature 1..27: note = Sterol O-acyltransferase 1 (163-171)
  source 1..27: mol_type = other RNA
gacgagggcagactggtgctcgaattc

SEQ ID NO: 58266 - RNA, 24 nt, synthetic construct
  misc_feature 1..24: note = L-aminoadipate-semialdehyde dehydrogenase-phosphopantetheinyl transferase (236-243)
  source 1..24: mol_type = other RNA
gacgagcaccatttcgtggccgtc

SEQ ID NO: 58267 - RNA, 27 nt, synthetic construct
  misc_feature 1..27: note = Menin (320-328)
  source 1..27: mol_type = other RNA
gacgagcacatctacccctatatgtac

SEQ ID NO: 58268 - RNA, 24 nt, synthetic construct
  misc_feature 1..24: note = U5 small nuclear ribonucleoprotein 200 kDa helicase (1248-1255)
  source 1..24: mol_type = other RNA
gacgagcacctgatcaccttcttt

SEQ ID NO: 58269 - RNA, 24 nt, synthetic construct
  misc_feature 1..24: note = Oxysterol-binding protein-related protein 9 (560-567)
  source 1..24: mol_type = other RNA
gacgagcactacatcctgaccttc

SEQ ID NO: 58270 - RNA, 30 nt, synthetic construct
  misc_feature 1..30: note = Ras GTPase-activating-like protein IQGAP1 (124-133)
  source 1..30: mol_type = other RNA
gacgagatcggcctgcccaagattttctac

SEQ ID NO: 58271 - RNA, 27 nt, synthetic construct
  misc_feature 1..27: note = Hom s 5 (293-301)
  source 1..27: mol_type = other RNA
gacgagatcaacttcctgagagccctc

SEQ ID NO: 58272 - RNA, 30 nt, synthetic construct
  misc_feature 1..30: note = Hom s 5 (293-302)
  source 1..30: mol_type = other RNA
gacgagatcaacttcctgagagccctctac

SEQ ID NO: 58273 - RNA, 27 nt, synthetic construct
  misc_feature 1..27: note = Harmonin (132-140)
  source 1..27: mol_type = other RNA
gacgagatcgtgagaattaacggctac

SEQ ID NO: 58274 - RNA, 27 nt, synthetic construct
  misc_feature 1..27: note = Splicing factor 3B subunit 4 (112-120)
  source 1..27: mol_type = other RNA
gacgagaagctgctctacgataccttc

SEQ ID NO: 58275 - RNA, 24 nt, synthetic construct
  misc_feature 1..24: note = Plectin (380-387)
  source 1..24: mol_type = other RNA
gacgagaagagcatcattacctac

SEQ ID NO: 58276 - RNA, 33 nt, synthetic construct
  misc_feature 1..33: note = 60 kDa heat shock protein, mitochondrial (209-219)
  source 1..33: mol_type = other RNA
gacgagctggaaatcattgagggcatgaagttc

SEQ ID NO: 58277 - RNA, 27 nt, synthetic construct
  misc_feature 1..27: note = tRNA selenocysteine 1-associated protein 1 (146-154)
  source 1..27: mol_type = other RNA
gacgagctggaacagaagagagccctc

SEQ ID NO: 58278 - RNA, 27 nt, synthetic construct
  misc_feature 1..27: note = Vacuolar protein sorting-associated protein 35 (72-80)
  source 1..27: mol_type = other RNA
gacgagctgcactacctcgaagtgtat

SEQ ID NO: 58279 - RNA, 24 nt, synthetic construct
  misc_feature 1..24: note = Exocyst complex component 4 (59-66)
  source 1..24: mol_type = other RNA
gacgagctgatcgtgcagcactac

SEQ ID NO: 58280 - RNA, 27 nt, synthetic construct
  misc_feature 1..27: note = Signal transducer and activator of transcription 2 (704-712)
  source 1..27: mol_type = other RNA
gacgagctgcagcaacccctcgaactt

SEQ ID NO: 58281 - RNA, 24 nt, synthetic construct
  misc_feature 1..24: note = Spectrin beta chain, non-erythrocytic 1 (545-552)
  source 1..24: mol_type = other RNA
gacgagatgaaggtgctggtcctc

SEQ ID NO: 58282 - RNA, 24 nt, synthetic construct
  misc_feature 1..24: note = Eukaryotic initiation factor 4A-I (185-192)
  source 1..24: mol_type = other RNA
gacgagatgctgagcagaggcttc

SEQ ID NO: 58283 - RNA, 24 nt, synthetic construct
  misc_feature 1..24: note = Myosin light polypeptide 6 (58-65)
  source 1..24: mol_type = other RNA
gacgagatgaacgtgaaggtcctg

SEQ ID NO: 58284 - RNA, 27 nt, synthetic construct
  misc_feature 1..27: note = Ras GTPase-activating protein-binding protein 2 (343-351)
  source 1..27: mol_type = other RNA
gacgagaacgaactgaaggagttcttt

SEQ ID NO: 58285 - RNA, 27 nt, synthetic construct
  misc_feature 1..27: note = Pyruvate kinase PKM (153-161)
  source 1..27: mol_type = other RNA
gacgagaacatcctgtggctcgattac

SEQ ID NO: 58286 - RNA, 27 nt, synthetic construct
  misc_feature 1..27: note = Argininosuccinate synthase (182-190)
  source 1..27: mol_type = other RNA
gacgagaacctgatgcacatcagctac

SEQ ID NO: 58287 - RNA, 30 nt, synthetic construct
  misc_feature 1..30: note = HLA class II histocompatibility antigen, DR alpha chain (196-205)
  source 1..30: mol_type = other RNA
gacgagcccctgctcaagcactgggaattc

SEQ ID NO: 58288 - RNA, 27 nt, synthetic construct
  misc_feature 1..27: note = RNA-binding protein 3 (18-26)
  source 1..27: mol_type = other RNA
gacgagcaggccctggaagatcacttc

SEQ ID NO: 58289 - RNA, 27 nt, synthetic construct
  misc_feature 1..27: note = 40S ribosomal protein S6 (20-28)
  source 1..27: mol_type = other RNA
gacgagagaaagctgaggaccttctac

SEQ ID NO: 58290 - RNA, 27 nt, synthetic construct
  misc_feature 1..27: note = Myosin-11 (1867-1875)
  source 1..27: mol_type = other RNA
gacgagagaaagatggccgaacagtac

SEQ ID NO: 58291 - RNA, 27 nt, synthetic construct
  misc_feature 1..27: note = Carbonic anhydrase 12 (281-289)
  source 1..27: mol_type = other RNA
gacgagagactggtgtacaccagcttc

SEQ ID NO: 58292 - RNA, 27 nt, synthetic construct
  misc_feature 1..27: note = Myosin-10 (277-285)
  source 1..27: mol_type = other RNA
gacgagagaaccttccacatcttttac

SEQ ID NO: 58293 - RNA, 27 nt, synthetic construct
  misc_feature 1..27: note = Carboxy-terminal domain RNA polymerase II polypeptide A small phosphatase 2 (109-117)
  source 1..27: mol_type = other RNA
gacgagaccctggtgcacagctccttc

SEQ ID NO: 58294 - RNA, 33 nt, synthetic construct
  misc_feature 1..33: note = Alpha-ketoglutarate-dependent dioxygenase FTO (189-199)
  source 1..33: mol_type = other RNA
gacgaggtggatatcaagagcagagccgcttac

SEQ ID NO: 58295 - RNA, 24 nt, synthetic construct
  misc_feature 1..24: note = FACT complex subunit SPT16 (838-845)
  source 1..24: mol_type = other RNA
gacgaggtggaactgatccacttc

SEQ ID NO: 58296 - RNA, 27 nt, synthetic construct
  misc_feature 1..27: note = Electrogenic sodium bicarbonate cotransporter 1 (306-314)
  source 1..27: mol_type = other RNA
gacgaggtgttccacgatatcgcctac

SEQ ID NO: 58297 - RNA, 24 nt, synthetic construct
  misc_feature 1..24: note = Annexin A4 (191-198)
  source 1..24: mol_type = other RNA
gacgaggtgaagttcctgaccgtc

SEQ ID NO: 58298 - RNA, 27 nt, synthetic construct
  misc_feature 1..27: note = Annexin A4 (191-199)
  source 1..27: mol_type = other RNA
gacgaggtgaagttcctgaccgtcctc

SEQ ID NO: 58299 - RNA, 27 nt, synthetic construct
  misc_feature 1..27: note = Polymerase I and transcript release factor (158-166)
  source 1..27: mol_type = other RNA
gacgaggtgaagctgcccgccaaactc

SEQ ID NO: 58300 - RNA, 24 nt, synthetic construct
  misc_feature 1..24: note = Protein arginine N-methyltransferase 1 (69-76)
  source 1..24: mol_type = other RNA
gacgaggtgagaaccctgacatac

SEQ ID NO: 58301 - RNA, 42 nt, synthetic construct
  misc_feature 1..42: note = Annexin A2 (52-65)
  source 1..42: mol_type = other RNA
gacgaggtgaccatcgtcaacattctgacaaatagaagcaac

SEQ ID NO: 58302 - RNA, 27 nt, synthetic construct
  misc_feature 1..27: note = Deoxyribose-phosphate aldolase (278-286)
  source 1..27: mol_type = other RNA
gacgagtggctgaagcccgaactcttc

SEQ ID NO: 58303 - RNA, 27 nt, synthetic construct
  misc_feature 1..27: note = Cell cycle progression protein 1 (726-734)
  source 1..27: mol_type = other RNA
gacgagtacatctatagacacttcttt

SEQ ID NO: 58304 - RNA, 30 nt, synthetic construct
  misc_feature 1..30: note = Epidermal growth factor receptor (1014-1023)
  source 1..30: mol_type = other RNA
gacgagtacctgatcccccagcaaggcttc

SEQ ID NO: 58305 - RNA, 27 nt, synthetic construct
  misc_feature 1..27: note = 39S ribosomal protein L49, mitochondrial (43-51)
  source 1..27: mol_type = other RNA
gacgagtaccagttcgtggaaagactg

SEQ ID NO: 58306 - RNA, 27 nt, synthetic construct
  misc_feature 1..27: note = Talin-1 (125-133)
  source 1..27: mol_type = other RNA
gacgagtacagcctggtgagagaactc

SEQ ID NO: 58307 - RNA, 45 nt, synthetic construct
  misc_feature 1..45: note = Peptidyl-prolyl cis-trans isomerase A (9-23)
  source 1..45: mol_type = other RNA
gacatcgccgtggatggcgagcccctggggagagtcagcttcgaa

SEQ ID NO: 58308 - RNA, 27 nt, synthetic construct
  misc_feature 1..27: note = DNA (cytosine-5)-methyltransferase 1 (811-819)
  source 1..27: mol_type = other RNA
gacctggatagcagagtgctctactat

SEQ ID NO: 58309 - RNA, 27 nt, synthetic construct
  misc_feature 1..27: note = ELKS/Rab6-interacting/CAST family member 1 (356-364)
  source 1..27: mol_type = other RNA
gacctgaaggagaaagtgagcctcctt

SEQ ID NO: 58310 - RNA, 27 nt, synthetic construct
  misc_feature 1..27: note = Alpha-taxilin (480-488)
  source 1..27: mol_type = other RNA
gacctgaacaagagagtgcaggatctc

SEQ ID NO: 58311 - RNA, 24 nt, synthetic construct
  misc_feature 1..24: note = DnaJ homolog subfamily A member 1 (244-251)
  source 1..24: mol_type = other RNA
gaccagaaggatcacgccgtgttc

SEQ ID NO: 58312 - RNA, 27 nt, synthetic construct
  misc_feature 1..27: note = Statherin (20-28)
  source 1..27: mol_type = other RNA
gacagctccgaggaaaagttcctgaga

SEQ ID NO: 58313 - RNA, 30 nt, synthetic construct
  misc_feature 1..30: note = Protein S100-A9 (67-76)
  source 1..30: mol_type = other RNA
gacaccaacgccgataagcagctgagcttc

SEQ ID NO: 58314 - RNA, 24 nt, synthetic construct
  misc_feature 1..24: note = Myosin light polypeptide 6 (148-155)
  source 1..24: mol_type = other RNA
gaggccttcgtgagacacatcctg

SEQ ID NO: 58315 - RNA, 30 nt, synthetic construct
  misc_feature 1..30: note = ATP-dependent RNA helicase DDX1 (481-490)
  source 1..30: mol_type = other RNA
gaggccatcaagattctgaaaggcgaatac

SEQ ID NO: 58316 - RNA, 27 nt, synthetic construct
  misc_feature 1..27: note = 6-phosphofructo-2-kinase/fructose-2,6-bisphosphatase 3 (57-65)
  source 1..27: mol_type = other RNA
gaggccgtgaagcagtacagctcctat

SEQ ID NO: 58317 - RNA, 27 nt, synthetic construct
  misc_feature 1..27: note = Formin-like protein 3 (893-901)
  source 1..27: mol_type = other RNA
gaggcctacaacgctgtggtcagatat

SEQ ID NO: 58318 - RNA, 27 nt, synthetic construct
  misc_feature 1..27: note = Elongator complex protein 2 (246-254)
  source 1..27: mol_type = other RNA
gaggactggatcagaggcgtggaatgg

SEQ ID NO: 58319 - RNA, 30 nt, synthetic construct
  misc_feature 1..30: note = Vimentin (197-206)
  source 1..30: mol_type = other RNA
gaggaagccgagaacaccctgcagagcttc

SEQ ID NO: 58320 - RNA, 27 nt, synthetic construct
  misc_feature 1..27: note = X-ray repair cross-complementing protein 5 (699-707)
  source 1..27: mol_type = other RNA
gaggaagccaagaaattcctggctccc

SEQ ID NO: 58321 - RNA, 27 nt, synthetic construct
  misc_feature 1..27: note = Prostaglandin G/H synthase 1 (266-274)
  source 1..27: mol_type = other RNA
gaggaagcccccgtgctgatgcactac

SEQ ID NO: 58322 - RNA, 30 nt, synthetic construct
  misc_feature 1..30: note = ATP-dependent DNA helicase Q5 (961-970)
  source 1..30: mol_type = other RNA
gaggaagcccagaacctgatcagacacttc

SEQ ID NO: 58323 - RNA, 30 nt, synthetic construct
  misc_feature 1..30: note = Chromodomain-helicase-DNA-binding protein 4 (166-175)
  source 1..30: mol_type = other RNA
gaggaagactacagaaccctgacaaactat

SEQ ID NO: 58324 - RNA, 30 nt, synthetic construct
  misc_feature 1..30: note = Nucleolar protein 10 (434-443)
  source 1..30: mol_type = other RNA
gaggaagaggaaaagcagaaaagcacctgg

SEQ ID NO: 58325 - RNA, 27 nt, synthetic construct
  misc_feature 1..27: note = Thioredoxin-like protein 1 (254-262)
  source 1..27: mol_type = other RNA
gaggaagagaccacaagaatcagctac

SEQ ID NO: 58326 - RNA, 27 nt, synthetic construct
  misc_feature 1..27: note = ETS translocation variant 3 (48-56)
  source 1..27: mol_type = other RNA
gaggaattcagacacgtgatcgcctgg

SEQ ID NO: 58327 - RNA, 30 nt, synthetic construct
  misc_feature 1..30: note = Pre-mRNA-processing-splicing factor 8 (1205-1214)
  source 1..30: mol_type = other RNA
gaggaattcacccacaaggacggcgtgtgg

SEQ ID NO: 58328 - RNA, 24 nt, synthetic construct
  misc_feature 1..24: note = Interferon-induced transmembrane protein 1 (4-11)
  source 1..24: mol_type = other RNA
gaggaacacgaggtggccgtcctg

SEQ ID NO: 58329 - RNA, 30 nt, synthetic construct
  misc_feature 1..30: note = Actin, alpha skeletal muscle (101-110)
  source 1..30: mol_type = other RNA
gaggaacaccccaccctgctcacagaggcc

SEQ ID NO: 58330 - RNA, 27 nt, synthetic construct
  misc_feature 1..27: note = KAT8 regulatory NSL complex subunit 3 (37-45)
  source 1..27: mol_type = other RNA
gaggaacacgtgaacagaaccggctgg

SEQ ID NO: 58331 - RNA, 24 nt, synthetic construct
  misc_feature 1..24: note = General transcription factor II-I (535-542)
  source 1..24: mol_type = other RNA
gaggaaatcttcaacctgaagttt

SEQ ID NO: 58332 - RNA, 27 nt, synthetic construct
  misc_feature 1..27: note = Neutral and basic amino acid transport protein rBAT (294-302)
  source 1..27: mol_type = other RNA
gaggaaatcaaggagattctgagattc

SEQ ID NO: 58333 - RNA, 30 nt, synthetic construct
  misc_feature 1..30: note = Calmodulin (87-96)
  source 1..30: mol_type = other RNA
gaggaaatcagagaggccttcagggtgttt

SEQ ID NO: 58334 - RNA, 27 nt, synthetic construct
  misc_feature 1..27: note = Protein PRR14L (198-206)
  source 1..27: mol_type = other RNA
gaggaaatctacaccaacaagaattat

SEQ ID NO: 58335 - RNA, 33 nt, synthetic construct
  misc_feature 1..33: note = Choline-phosphate cytidylyltransferase A (268-278)
  source 1..33: mol_type = other RNA
gaggaaaagagcatcgacctgattcagaaatgg

SEQ ID NO: 58336 - RNA, 27 nt, synthetic construct
  misc_feature 1..27: note = Myotubularin-related protein 2 (253-261)
  source 1..27: mol_type = other RNA
gaggaactgaagagagtggccagcttc

SEQ ID NO: 58337 - RNA, 30 nt, synthetic construct
  misc_feature 1..30: note = Glutathione S-transferase Mu 4 (129-138)
  source 1..30: mol_type = other RNA
gaggaactgcccaccatgatgcagcacttc

SEQ ID NO: 58338 - RNA, 24 nt, synthetic construct
  misc_feature 1..24: note = DNA polymerase epsilon subunit 3 (74-81)
  source 1..24: mol_type = other RNA
gaggaaatggagttccagagattt

SEQ ID NO: 58339 - RNA, 27 nt, synthetic construct
  misc_feature 1..27: note = DNA replication licensing factor MCM3 (760-768)
  source 1..27: mol_type = other RNA
gaggaaatgccccaggtgcacacccct

SEQ ID NO: 58340 - RNA, 27 nt, synthetic construct
  misc_feature 1..27: note = Serine hydroxymethyltransferase, cytosolic (187-195)
  source 1..27: mol_type = other RNA
gaggaaaacgccagactgttccacccc

SEQ ID NO: 58341 - RNA, 24 nt, synthetic construct
  misc_feature 1..24: note = Vimentin (348-355)
  source 1..24: mol_type = other RNA
gaggaaaacttcgccgtggaggct

SEQ ID NO: 58342 - RNA, 27 nt, synthetic construct
  misc_feature 1..27: note = ADP-ribosylation factor-like protein 2-binding protein (56-64)
  source 1..27: mol_type = other RNA
gaggaaaacaagctgatctacaccccc

SEQ ID NO: 58343 - RNA, 24 nt, synthetic construct
  misc_feature 1..24: note = Signal transducer and activator of transcription 3 (306-313)
  source 1..24: mol_type = other RNA
gaggaaagaatcgtggagctgttc

SEQ ID NO: 58344 - RNA, 27 nt, synthetic construct
  misc_feature 1..27: note = A-kinase-interacting protein 1 (76-84)
  source 1..27: mol_type = other RNA
gaggaaagaccccctaccctgagcgcc

SEQ ID NO: 58345 - RNA, 27 nt, synthetic construct
  misc_feature 1..27: note = Calnexin (478-486)
  source 1..27: mol_type = other RNA
gaggaaagaccctggctgtgggtggtc

SEQ ID NO: 58346 - RNA, 27 nt, synthetic construct
  misc_feature 1..27: note = WASH complex subunit strumpellin (506-514)
  source 1..27: mol_type = other RNA
gaggaagtgcaggagttccaccaactg

SEQ ID NO: 58347 - RNA, 27 nt, synthetic construct
  misc_feature 1..27: note = Cytoplasmic FMR1-interacting protein 2 (432-440)
  source 1..27: mol_type = other RNA
gaggaatacgagagagccaccaggtat

SEQ ID NO: 58348 - RNA, 33 nt, synthetic construct
  misc_feature 1..33: note = Sorting nexin-7 (294-304)
  source 1..33: mol_type = other RNA
gagctggacagcaaggtggaagtcctcacctac

SEQ ID NO: 58349 - RNA, 27 nt, synthetic construct
  misc_feature 1..27: note = Serine-protein kinase ATM (744-752)
  source 1..27: mol_type = other RNA
gagctgttccagaaggccaaaagcctc

SEQ ID NO: 58350 - RNA, 45 nt, synthetic construct
  misc_feature 1..45: note = Heat shock cognate 71 kDa protein (446-460)
  source 1..45: mol_type = other RNA
gagagagccatgaccaaggacaacaatctgctcggcaaattcgaa

SEQ ID NO: 58351 - RNA, 60 nt, synthetic construct
  misc_feature 1..60: note = Heat shock protein beta-1 (186-205)
  source 1..60: mol_type = other RNA
gagagcagagcccagctgggcgggcccgaagctgcaaagtccgacgagaccgccgcgaaa

SEQ ID NO: 58352 - RNA, 27 nt, synthetic construct
  misc_feature 1..27: note = 40S ribosomal protein S7 (169-177)
  source 1..27: mol_type = other RNA
gagaccttcagcggcgtgtacaagaaa

SEQ ID NO: 58353 - RNA, 27 nt, synthetic construct
  misc_feature 1..27: note = Kelch-like protein 15 (308-316)
  source 1..27: mol_type = other RNA
gagaccttctacagcacagaaagatat

SEQ ID NO: 58354 - RNA, 27 nt, synthetic construct
  misc_feature 1..27: note = Poly (ADP-ribose) polymerase (202-210)
  source 1..27: mol_type = other RNA
gagtacaacaccatcaaggacaaattc

SEQ ID NO: 58355 - RNA, 27 nt, synthetic construct
  misc_feature 1..27: note = Dynamin-like 120 kDa protein, mitochondrial (717-725)
  source 1..27: mol_type = other RNA
ttcgccgaggacagcctgagagtgatc

SEQ ID NO: 58356 - RNA, 27 nt, synthetic construct
  misc_feature 1..27: note = Transcription factor AP-1 (110-118)
  source 1..27: mol_type = other RNA
ttcgccgagggctttgtgagagctctg

SEQ ID NO: 58357 - RNA, 27 nt, synthetic construct
  misc_feature 1..27: note = Piezo-type mechanosensitive ion channel component 1 (1665-1673)
  source 1..27: mol_type = other RNA
ttcgccgagggccaggggagagctctg

SEQ ID NO: 58358 - RNA, 27 nt, synthetic construct
  misc_feature 1..27: note = Sister chromatid cohesion protein PDS5 homolog A (273-281)
  source 1..27: mol_type = other RNA
ttcgccatcgacccccacctgctcctt

SEQ ID NO: 58359 - RNA, 27 nt, synthetic construct
  misc_feature 1..27: note = Spermatid perinuclear RNA-binding protein (7-15)
  source 1..27: mol_type = other RNA
ttcgccaacgacgatagacacgtgatg

SEQ ID NO: 58360 - RNA, 27 nt, synthetic construct
  misc_feature 1..27: note = Multidrug resistance-associated protein 1 (1201-1209)
  source 1..27: mol_type = other RNA
ttcgccgtgatcagcagacactccctg

SEQ ID NO: 58361 - RNA, 30 nt, synthetic construct
  misc_feature 1..30: note = Glutathione-specific gamma-glutamylcyclotransferase 1 (89-98)
  source 1..30: mol_type = other RNA
ttcgcctacagcgactccagagtgggcttt

SEQ ID NO: 58362 - RNA, 45 nt, synthetic construct
  misc_feature 1..45: note = Peptidyl-prolyl cis-trans isomerase A (8-22)
  source 1..45: mol_type = other RNA
ttcgacatcgccgtggatggcgagcccctggggagagtcagcttt

SEQ ID NO: 58363 - RNA, 51 nt, synthetic construct
  misc_feature 1..51: note = Peptidyl-prolyl cis-trans isomerase A (8-24)
  source 1..51: mol_type = other RNA
ttcgacatcgccgtggatggcgagcccctggggagagtcagctttgaactc

SEQ ID NO: 58364 - RNA, 30 nt, synthetic construct
  misc_feature 1..30: note = Probable ATP-dependent RNA helicase DDX56 (464-473)
  source 1..30: mol_type = other RNA
ttcgaggacaaccccagagatctgcagctc

SEQ ID NO: 58365 - RNA, 27 nt, synthetic construct
  misc_feature 1..27: note = Inhibitor of growth protein 4 (19-27)
  source 1..27: mol_type = other RNA
ttcgagctgcagagaaactttcaactc

SEQ ID NO: 58366 - RNA, 30 nt, synthetic construct
  misc_feature 1..30: note = Macrophage metalloelastase (449-458)
  source 1..30: mol_type = other RNA
ttcgagtacgactttctgctccagagaatc

SEQ ID NO: 58367 - RNA, 27 nt, synthetic construct
  misc_feature 1..27: note = SURP and G-patch domain-containing protein 1 (604-612)
  source 1..27: mol_type = other RNA
ttcggcatcgacagacccgccgagctg

SEQ ID NO: 58368 - RNA, 27 nt, synthetic construct
  misc_feature 1..27: note = Signal-induced proliferation-associated 1-like protein 2 (760-768)
  source 1..27: mol_type = other RNA
ttcggcccccctatcccaaagggggtg

SEQ ID NO: 58369 - RNA, 24 nt, synthetic construct
  misc_feature 1..24: note = Factor VIII intron 22 protein (50-57)
  source 1..24: mol_type = other RNA
ttcggccagctggggagagagctc

SEQ ID NO: 58370 - RNA, 27 nt, synthetic construct
  misc_feature 1..27: note = Disintegrin and metalloproteinase domain-containing protein 10 (19-27)
  source 1..27: mol_type = other RNA
ttcatccagaccagaggcgggacattt

SEQ ID NO: 58371 - RNA, 27 nt, synthetic construct
  misc_feature 1..27: note = 2'-5'-oligoadenylate synthase 1 (278-286)
  source 1..27: mol_type = other RNA
ttcaagaaccccatcattgagaaatac

SEQ ID NO: 58372 - RNA, 57 nt, synthetic construct
  misc_feature 1..57: note = Alpha-enolase (261-279)
  source 1..57: mol_type = other RNA
ttcaagagccccgacgatccttccagatacatctctccagaccagctggccgatctc

SEQ ID NO: 58373 - RNA, 27 nt, synthetic construct
  misc_feature 1..27: note = Sacsin (89-97)
  source 1..27: mol_type = other RNA
ttcctggccgacatcgtgcagaagctc

SEQ ID NO: 58374 - RNA, 27 nt, synthetic construct
  misc_feature 1..27: note = Serine-protein kinase ATM (1077-1085)
  source 1..27: mol_type = other RNA
ttcctggccgacaaccaccatcaggtg

SEQ ID NO: 58375 - RNA, 30 nt, synthetic construct
  misc_feature 1..30: note = Epithelial discoidin domain-containing receptor 1 (885-894)
  source 1..30: mol_type = other RNA
ttcctggccgaggacgctctcaacaccgtg

SEQ ID NO: 58376 - RNA, 27 nt, synthetic construct
  misc_feature 1..27: note = T-complex protein 1 subunit theta (105-113)
  source 1..27: mol_type = other RNA
ttcctggccaagctcatcgctcaggca

SEQ ID NO: 58377 - RNA, 30 nt, synthetic construct
  misc_feature 1..30: note = Phospholipid transfer protein (8-17)
  source 1..30: mol_type = other RNA
ttcctggccctccttgctggcgcacacgcc

SEQ ID NO: 58378 - RNA, 27 nt, synthetic construct
  misc_feature 1..27: note = Pseudouridylate synthase 7 homolog-like protein (128-136)
  source 1..27: mol_type = other RNA
ttcctggacgagaagacccacgaactc

SEQ ID NO: 58379 - RNA, 33 nt, synthetic construct
  misc_feature 1..33: note = RuvB-like 2 (433-443)
  source 1..33: mol_type = other RNA
ttcctggacgagagcagatccacccagtacatg

SEQ ID NO: 58380 - RNA, 30 nt, synthetic construct
  misc_feature 1..30: note = La-related protein 1 (530-539)
  source 1..30: mol_type = other RNA
ttcctgtttgacgaggaaatggagcagatg

SEQ ID NO: 58381 - RNA, 27 nt, synthetic construct
  misc_feature 1..27: note = Alpha-2-macroglobulin receptor-associated protein (22-30)
  source 1..27: mol_type = other RNA
ttcctgggcccctggcctgccgctagc

SEQ ID NO: 58382 - RNA, 27 nt, synthetic construct
  misc_feature 1..27: note = Sterol regulatory element-binding protein 2 (1033-1041)
  source 1..27: mol_type = other RNA
ttcctgcacgaggccaccgtgagactc

SEQ ID NO: 58383 - RNA, 30 nt, synthetic construct
  misc_feature 1..30: note = Adenylate kinase 2, mitochondrial (96-105)
  source 1..30: mol_type = other RNA
ttcctgctcgacggctttcccagaaccgtg

SEQ ID NO: 58384 - RNA, 33 nt, synthetic construct
  misc_feature 1..33: note = ATR-interacting protein (164-174)
  source 1..33: mol_type = other RNA
ttcctgctcgagcaggaaaagacccaagccctt

SEQ ID NO: 58385 - RNA, 27 nt, synthetic construct
  misc_feature 1..27: note = YY1-associated protein 1 (323-331)
  source 1..27: mol_type = other RNA
ttcctgaaccccctcatcagcaagtac

SEQ ID NO: 58386 - RNA, 33 nt, synthetic construct
  misc_feature 1..33: note = BRCA1-A complex subunit BRE (92-102)
  source 1..33: mol_type = other RNA
ttcctgcccgaccctagcgccctccagaacctt

SEQ ID NO: 58387 - RNA, 27 nt, synthetic construct
  misc_feature 1..27: note = Nesprin-2 (5714-5722)
  source 1..27: mol_type = other RNA
ttcctgaccgacacaagccacctcctt

SEQ ID NO: 58388 - RNA, 27 nt, synthetic construct
  misc_feature 1..27: note = Transmembrane protein 41B (141-149)
  source 1..27: mol_type = other RNA
ttcctgtacccctttcctctcgccctt

SEQ ID NO: 58389 - RNA, 27 nt, synthetic construct
  misc_feature 1..27: note = Zinc finger RNA-binding protein (569-577)
  source 1..27: mol_type = other RNA
ttcaacgaccccaatgccaaggagatg

SEQ ID NO: 58390 - RNA, 27 nt, synthetic construct
  misc_feature 1..27: note = Fc receptor-like A (169-177)
  source 1..27: mol_type = other RNA
ttccccgcccctatcctgagagctgtg

SEQ ID NO: 58391 - RNA, 27 nt, synthetic construct
  misc_feature 1..27: note = Sphingolipid delta(4)-desaturase DES1 (265-273)
  source 1..27: mol_type = other RNA
ttccccaacatccctggcaagagcctg

SEQ ID NO: 58392 - RNA, 33 nt, synthetic construct
  misc_feature 1..33: note = Protein SZT2 (903-913)
  source 1..33: mol_type = other RNA
ttccccagaagccctggccagccatcctctctg

SEQ ID NO: 58393 - RNA, 30 nt, synthetic construct; identical to SEQ ID NO: 34166
  misc_feature 1..30: note = Dipeptidyl peptidase 8 (180-189)
  source 1..30: mol_type = other RNA

SEQ ID NO: 58394 - RNA, 27 nt, synthetic construct
  misc_feature 1..27: note = Transient receptor potential cation channel subfamily V member 2 (517-525)
  source 1..27: mol_type = other RNA
ttccagcacaccggcatctacagcgtg

SEQ ID NO: 58395 - RNA, 24 nt, synthetic construct
  misc_feature 1..24: note = Elongation factor 1-gamma (423-430)
  source 1..24: mol_type = other RNA
ttccagcacgtgggcaaggccttt

SEQ ID NO: 58396 - RNA, 27 nt, synthetic construct
  misc_feature 1..27: note = Phosphatidylcholine translocator ABCB4 (241-249)
  source 1..27: mol_type = other RNA
ttcagcgacaaggagctggccgcttac

SEQ ID NO: 58397 - RNA, 24 nt, synthetic construct
  misc_feature 1..24: note = Ras GTPase-activating-like protein IQGAP2 (196-203)
  source 1..24: mol_type = other RNA
ttcagcaagatcggcgggattctg

SEQ ID NO: 58398 - RNA, 27 nt, synthetic construct
  misc_feature 1..27: note = RNA-binding protein 4B (186-194)
  source 1..27: mol_type = other RNA
ttcaccgagcagtacaacgaacaatat

SEQ ID NO: 58399 - RNA, 27 nt, synthetic construct
  misc_feature 1..27: note = F-box DNA helicase 1 (553-561)
  source 1..27: mol_type = other RNA
ttcaccgtgccccacacacatgtcttt

SEQ ID NO: 58400 - RNA, 30 nt, synthetic construct
  misc_feature 1..30: note = Fas apoptotic inhibitory molecule 1 (167-176)
  source 1..30: mol_type = other RNA
ttcgtggacgatggcaccgagacacacttt

SEQ ID NO: 58401 - RNA, 27 nt, synthetic construct
  misc_feature 1..27: note = DNA damage-binding protein 1 (451-459)
  source 1..27: mol_type = other RNA
ttcgtggacgatcagcaaacctttttc

SEQ ID NO: 58402 - RNA, 27 nt, synthetic construct
  misc_feature 1..27: note = Interferon regulatory factor 2-binding protein 2 (51-59)
  source 1..27: mol_type = other RNA
ttcgtgatcgagaccgccagacagctg

SEQ ID NO: 58403 - RNA, 27 nt, synthetic construct
  misc_feature 1..27: note = Inactive serine/threonine-protein kinase VRK3 (37-45)
  source 1..27: mol_type = other RNA
ttcgtgaacccccacgtcagctccttt

SEQ ID NO: 58404 - RNA, 27 nt, synthetic construct
  misc_feature 1..27: note = DNA polymerase epsilon catalytic subunit A (732-740)
  source 1..27: mol_type = other RNA
ttctacgtggacaccgtcagagccttt

SEQ ID NO: 58405 - RNA, 33 nt, synthetic construct
  misc_feature 1..33: note = NADH dehydrogenase (ubiquinone) flavoprotein 2, mitochondrial (33-43)
  source 1..33: mol_type = other RNA
ggcgccgggggagctctgttcgtgcacagagac

SEQ ID NO: 58406 - RNA, 27 nt, synthetic construct
  misc_feature 1..27: note = Complement C1q tumor necrosis factor-related protein 3 (229-237)
  source 1..27: mol_type = other RNA
ggcgaccaccagagattcagcaccttt

SEQ ID NO: 58407 - RNA, 27 nt, synthetic construct
  misc_feature 1..27: note = Deoxyribose-phosphate aldolase (201-209)
  source 1..27: mol_type = other RNA
ggcgaggcccacctgaagaccatcctc

SEQ ID NO: 58408 - RNA, 33 nt, synthetic construct
  misc_feature 1..33: note = ATPase family AAA domain-containing protein 2 (286-296)
  source 1..33: mol_type = other RNA
ggcgaggaagagaaccagaagagatactatctg

SEQ ID NO: 58409 - RNA, 27 nt, synthetic construct
  misc_feature 1..27: note = Interferon regulatory factor 2-binding protein-like (561-569)
  source 1..27: mol_type = other RNA
ggcgaggaacagcaaagacagcagtgg

SEQ ID NO: 58410 - RNA, 27 nt, synthetic construct
  misc_feature 1..27: note = NADPH-cytochrome P450 reductase (240-248)
  source 1..27: mol_type = other RNA
ggcgaggaaagctccatcagacagtac

SEQ ID NO: 58411 - RNA, 30 nt, synthetic construct
  misc_feature 1..30: note = Coiled-coil domain-containing protein 106 (234-243)
  source 1..30: mol_type = other RNA
ggcgagttcgaccccagcaaggaaagactg

SEQ ID NO: 58412 - RNA, 27 nt, synthetic construct
  misc_feature 1..27: note = LIM and senescent cell antigen-like-containing domain protein 1 (75-83)
  source 1..27: mol_type = other RNA
ggcgagttcatcattgggagagtgata

SEQ ID NO: 58413 - RNA, 33 nt, synthetic construct
  misc_feature 1..33: note = Thioredoxin (66-76)
  source 1..33: mol_type = other RNA
ggcgagttcagcggggccaacaaggaaaaactg

SEQ ID NO: 58414 - RNA, 36 nt, synthetic construct
  misc_feature 1..36: note = Fibrinogen alpha chain (23-34)
  source 1..36: mol_type = other RNA
ggcgagggggacttcctggccgaaggaggtggcgtg

SEQ ID NO: 58415 - RNA, 27 nt, synthetic construct
  misc_feature 1..27: note = Cytospin-B (579-587)
  source 1..27: mol_type = other RNA
ggcgagatcaagcacgtgagctccctg

SEQ ID NO: 58416 - RNA, 27 nt, synthetic construct
  misc_feature 1..27: note = Filamin-B (1758-1766)
  source 1..27: mol_type = other RNA
ggcgagatcaccggggaagtgcacatg

SEQ ID NO: 58417 - RNA, 27 nt, synthetic construct
  misc_feature 1..27: note = DNA-directed RNA polymerase III subunit RPC7 (24-32)
  source 1..27: mol_type = other RNA
ggcgagaagctgcccgacgtggtcctc

SEQ ID NO: 58418 - RNA, 33 nt, synthetic construct
  misc_feature 1..33: note = Regulator of nonsense transcripts 1 (585-595)
  source 1..33: mol_type = other RNA
ggcgagctgagctccgccgacgaaaagagatac

SEQ ID NO: 58419 - RNA, 36 nt, synthetic construct
  misc_feature 1..36: note = Heat shock protein HSP 90-beta (172-183)
  source 1..36: mol_type = other RNA
ggcgagcccatcgggagaggaaccaaggtgattctg

SEQ ID NO: 58420 - RNA, 30 nt, synthetic construct; identical to SEQ ID NO: 34193
  misc_feature 1..30: note = 60S ribosomal protein L4 (15-24)
  source 1..30: mol_type = other RNA

SEQ ID NO: 58421 - RNA, 27 nt, synthetic construct
  misc_feature 1..27: note = Prefoldin subunit 6 (11-19)
  source 1..27: mol_type = other RNA
ggcgaggtggaaaagtaccagcaactg

SEQ ID NO: 58422 - RNA, 30 nt, synthetic construct; identical to SEQ ID NO: 34195
  misc_feature 1..30: note = 60S ribosomal protein L3 (319-328)
  source 1..30: mol_type = other RNA

SEQ ID NO: 58423 - RNA, 27 nt, synthetic construct
  misc_feature 1..27: note = Eukaryotic translation initiation factor 3 subunit L (258-266)
  source 1..27: mol_type = other RNA
ggcgagtacgggagacacagcctgtat

SEQ ID NO: 58424 - RNA, 48 nt, synthetic construct
  misc_feature 1..48: note = Keratin, type II cytoskeletal 2 epidermal (142-157)
  source 1..48: mol_type = other RNA
ggcgggcccggaggtttcggccctgggggatacccaggcggtatccac

SEQ ID NO: 58425 - RNA, 33 nt, synthetic construct
  misc_feature 1..33: note = Actin, cytoplasmic 2 (12-22)
  source 1..33: mol_type = other RNA
ggcatccacgagaccacattcaacagcattatg

SEQ ID NO: 58426 - RNA, 33 nt, synthetic construct
  misc_feature 1..33: note = Glyceraldehyde-3-phosphate dehydrogenase (2-12)
  source 1..33: mol_type = other RNA
ggcaaggtgaaagtcggggttaacggattcggt

SEQ ID NO: 58427 - RNA, 27 nt, synthetic construct
  misc_feature 1..27: note = E3 ubiquitin-protein ligase RNF213 (2847-2855)
  source 1..27: mol_type = other RNA
ggcctggccgaggacagccccaagatg

SEQ ID NO: 58428 - RNA, 27 nt, synthetic construct
  misc_feature 1..27: note = Gem-associated protein 4 (541-549)
  source 1..27: mol_type = other RNA
ggcctggccaaggctgtggcaagcgtc

SEQ ID NO: 58429 - RNA, 27 nt, synthetic construct
  misc_feature 1..27: note = Histone-lysine N-methyltransferase ASH1L (2026-2034)
  source 1..27: mol_type = other RNA
ggcctgttccccgcccctatccacgtg

SEQ ID NO: 58430 - RNA, 27 nt, synthetic construct
  misc_feature 1..27: note = Signal-induced proliferation-associated 1-like protein 2 (957-965)
  source 1..27: mol_type = other RNA
ggcctggggcagctcggattccacgtg

SEQ ID NO: 58431 - RNA, 27 nt, synthetic construct
  misc_feature 1..27: note = Plectin (4147-4155)
  source 1..27: mol_type = other RNA
ggcctgatcgaccaccagacctacctc

SEQ ID NO: 58432 - RNA, 30 nt, synthetic construct
  misc_feature 1..30: note = Protein strawberry notch homolog 1 (1078-1087)
  source 1..30: mol_type = other RNA
ggcctgatcggggtgggactcattaacgtc

SEQ ID NO: 58433 - RNA, 27 nt, synthetic construct
  misc_feature 1..27: note = Elongation factor 2 (343-351)
  source 1..27: mol_type = other RNA
ggcctgaaggaggggatccccgccctc

SEQ ID NO: 58434 - RNA, 27 nt, synthetic construct
  misc_feature 1..27: note = Coatomer subunit alpha (991-999)
  source 1..27: mol_type = other RNA
ggcctgaagaacggggtgcccgccgtc

SEQ ID NO: 58435 - RNA, 27 nt, synthetic construct
  misc_feature 1..27: note = Serine/threonine-protein kinase 17A (41-49)
  source 1..27: mol_type = other RNA
ggcctgctcaccgagatcagagccgtg

SEQ ID NO: 58436 - RNA, 27 nt, synthetic construct
  misc_feature 1..27: note = Nuclear receptor corepressor 2 (413-421)
  source 1..27: mol_type = other RNA
ggcctgatggccgaccccatgaaggtg

SEQ ID NO: 58437 - RNA, 27 nt, synthetic construct
  misc_feature 1..27: note = Serine/threonine-protein kinase Sgk1 (62-70)
  source 1..27: mol_type = other RNA
ggcctgaacgacttcatccagaagatt

SEQ ID NO: 58438 - RNA, 27 nt, synthetic construct
  misc_feature 1..27: note = MORC family CW-type zinc finger protein 4 (519-527)
  source 1..27: mol_type = other RNA
ggcctgaacaataagaccatcgggtac

SEQ ID NO: 58439 - RNA, 33 nt, synthetic construct
  misc_feature 1..33: note = DNA polymerase alpha subunit B (470-480)
  source 1..33: mol_type = other RNA
ggcctgaccagcacagacctccttttccacctg

SEQ ID NO: 58440 - RNA, 33 nt, synthetic construct
  misc_feature 1..33: note = C-terminal-binding protein 2 (814-824)
  source 1..33: mol_type = other RNA
ggcctggtggacgagaaggccctcgctcaggca

SEQ ID NO: 58441 - RNA, 30 nt, synthetic construct
  misc_feature 1..30: note = Staphylococcal nuclease domain-containing protein 1 (829-838)
  source 1..30: mol_type = other RNA
ggcctggtgaaggaggggctcgtcatggtt

SEQ ID NO: 58442 - RNA, 30 nt, synthetic construct
  misc_feature 1..30: note = Basic salivary proline-rich protein 2 (70-79)
  source 1..30: mol_type = other RNA
ggcccccctccaccgcccgggaagcctcag

SEQ ID NO: 58443 - RNA, 33 nt, synthetic construct
  misc_feature 1..33: note = Salivary acidic proline-rich phosphoprotein 1/2 (137-147)
  source 1..33: mol_type = other RNA
ggcccccctccaccgccccctgggaagccacag

SEQ ID NO: 58444 - RNA, 36 nt, synthetic construct
  misc_feature 1..36: note = Salivary acidic proline-rich phosphoprotein 1/2 (110-121)
  source 1..36: mol_type = other RNA
ggcccccctcagcaagggggacacccaagaccgccc

SEQ ID NO: 58445 - RNA, 27 nt, synthetic construct
  misc_feature 1..27: note = Nuclear receptor corepressor 1 (1455-1463)
  source 1..27: mol_type = other RNA
ggccccagcgtgctgagatccaccctc

SEQ ID NO: 58446 - RNA, 27 nt, synthetic construct
  misc_feature 1..27: note = Histone chaperone ASF1A (103-111)
  source 1..27: mol_type = other RNA
ggccaggagttcatcagagtggggtac

SEQ ID NO: 58447 - RNA, 27 nt, synthetic construct
  misc_feature 1..27: note = Beclin-1 (280-288)
  source 1..27: mol_type = other RNA
ggccagttcgggaccatcaacaatttt

SEQ ID NO: 58448 - RNA, 36 nt, synthetic construct
  misc_feature 1..36: note = Putative methyltransferase-like protein 15P1 (77-88)
  source 1..36: mol_type = other RNA
ggccagttcagccaagccgaggctctgctcatgaag

SEQ ID NO: 58449 - RNA, 27 nt, synthetic construct
  misc_feature 1..27: note = Dual specificity tyrosine-phosphorylation-regulated kinase 1A (32-40)
  source 1..27: mol_type = other RNA
ggccagatgccccacagccatcaatac

SEQ ID NO: 58450 - RNA, 33 nt, synthetic construct
  misc_feature 1..33: note = Myosin light polypeptide 6 (46-56)
  source 1..33: mol_type = other RNA
ggccagaaccccaccaatgccgaggtgctgaag

SEQ ID NO: 58451 - RNA, 36 nt, synthetic construct
  misc_feature 1..36: note = RNA-binding protein EWS (221-232)
  source 1..36: mol_type = other RNA
ggccagcaaagctcctacgggcagcagtcttcatat

SEQ ID NO: 58452 - RNA, 27 nt, synthetic construct
  misc_feature 1..27: note = Putative peripheral benzodiazepine receptor-related protein (21-29)
  source 1..27: mol_type = other RNA
ggccagtgggggggaggtagccactac

SEQ ID NO: 58453 - RNA, 33 nt, synthetic construct
  misc_feature 1..33: note = Store-operated calcium entry-associated regulatory factor (197-207)
  source 1..33: mol_type = other RNA
ggccagtacagcccccctccatattccgagtac

SEQ ID NO: 58454 - RNA, 30 nt, synthetic construct
  misc_feature 1..30: note = EH domain-containing protein 1 (65-74)
  source 1..30: mol_type = other RNA
ggccagtacagcaccgggaagacaactttc

SEQ ID NO: 58455 - RNA, 27 nt, synthetic construct
  misc_feature 1..27: note = Protein FAM216A (60-68)
  source 1..27: mol_type = other RNA
ggcagcgacagaatcaaggatgggtac

SEQ ID NO: 58456 - RNA, 27 nt, synthetic construct
  misc_feature 1..27: note = Splicing factor 3B subunit 1 (46-54)
  source 1..27: mol_type = other RNA
ggcagcgactccagattcgccgggtac

SEQ ID NO: 58457 - RNA, 27 nt, synthetic construct
  misc_feature 1..27: note = AP-2 complex subunit beta (568-576)
  source 1..27: mol_type = other RNA
ggcagcctggcctccgtgtaccacaag

SEQ ID NO: 58458 - RNA, 27 nt, synthetic construct
  misc_feature 1..27: note = L-lactate dehydrogenase A chain (68-76)
  source 1..27: mol_type = other RNA
ggcagcctgttcctcagaacccccaag

SEQ ID NO: 58459 - RNA, 27 nt, synthetic construct
  misc_feature 1..27: note = PHD and RING finger domain-containing protein 1 (519-527)
  source 1..27: mol_type = other RNA
ggcagctccgacgtgatcattcacaga

SEQ ID NO: 58460 - RNA, 30 nt, synthetic construct
  misc_feature 1..30: note = E3 ubiquitin-protein ligase TRAF7 (378-387)
  source 1..30: mol_type = other RNA
ggcagctacgacccccagcaaatcttcaag

SEQ ID NO: 58461 - RNA, 33 nt, synthetic construct
  misc_feature 1..33: note = Voltage-dependent anion-selective channel protein 3 (187-197)
  source 1..33: mol_type = other RNA
ggcaccgagttcgggggaagcatctaccagaag

SEQ ID NO: 58462 - RNA, 33 nt, synthetic construct
  misc_feature 1..33: note = Iron-responsive element-binding protein 2 (740-750)
  source 1..33: mol_type = other RNA
ggcaccttcgccaacatcaagctgtttaataaa

SEQ ID NO: 58463 - RNA, 33 nt, synthetic construct
  misc_feature 1..33: note = Cyclin-dependent kinase 1 (191-201)
  source 1..33: mol_type = other RNA
ggcaccatcttcgccgagctggctacaaagaaa

SEQ ID NO: 58464 - RNA, 27 nt, synthetic construct
  misc_feature 1..27: note = AP-1 complex subunit beta-1 (568-576)
  source 1..27: mol_type = other RNA
ggcaccctggccagcgtgtaccacaag

SEQ ID NO: 58465 - RNA, 27 nt, synthetic construct
  misc_feature 1..27: note = Alpha-ketoglutarate-dependent dioxygenase FTO (329-337)
  source 1..27: mol_type = other RNA
ggcaccctggactacatcctccagaga

SEQ ID NO: 58466 - RNA, 36 nt, synthetic construct
  misc_feature 1..36: note = Structural maintenance of chromosomes protein 4 (663-674)
  source 1..36: mol_type = other RNA
ggcaccatgacagggggaggtagcaaggtgatgaaa

SEQ ID NO: 58467 - RNA, 27 nt, synthetic construct
  misc_feature 1..27: note = Sigma non-opioid intracellular receptor 1 (31-39)
  source 1..27: mol_type = other RNA
ggcacccagagcttcgtgtttcaaaga

SEQ ID NO: 58468 - RNA, 27 nt, synthetic construct
  misc_feature 1..27: note = F-box/WD repeat-containing protein 11 (19-27)
  source 1..27: mol_type = other RNA
ggcaccagctccgtgatcgtctctaga

SEQ ID NO: 58469 - RNA, 33 nt, synthetic construct
  misc_feature 1..33: note = Protein O-GlcNAcase (729-739)
  source 1..33: mol_type = other RNA
ggcaccgtggacgtcacacccttcatcaagaaa

SEQ ID NO: 58470 - RNA, 30 nt, synthetic construct
  misc_feature 1..30: note = Transcription factor BTF3 (75-84)
  source 1..30: mol_type = other RNA
ggcaccgtgatccacttcaacaatcccaag

SEQ ID NO: 58471 - RNA, 27 nt, synthetic construct
  misc_feature 1..27: note = Peptidyl-prolyl cis-trans isomerase FKBP4 (277-285)
  source 1..27: mol_type = other RNA
ggcaccgtgtacttcaaggaggggaaa

SEQ ID NO: 58472 - RNA, 27 nt, synthetic construct
  misc_feature 1..27: note = Tubulin-folding cofactor B (7-15)
  source 1..27: mol_type = other RNA
ggcgtggacgataagttctacagcaaa

SEQ ID NO: 58473 - RNA, 33 nt, synthetic construct; identical to SEQ ID NO: 34246
  misc_feature 1..33: note = Activating signal cointegrator 1 complex subunit 1 (166-176)
  source 1..33: mol_type = other RNA

SEQ ID NO: 58474 - RNA, 27 nt, synthetic construct
  misc_feature 1..27: note = Eukaryotic translation initiation factor 4 gamma 1 (757-765)
  source 1..27: mol_type = other RNA
ggcgtgatcgacctgattttcgagaag

SEQ ID NO: 58475 - RNA, 27 nt, synthetic construct
  misc_feature 1..27: note = 40S ribosomal protein S19 (86-94)
  source 1..27: mol_type = other RNA
ggcgtgatgcccagccacttctccaga

SEQ ID NO: 58476 - RNA, 27 nt, synthetic construct
  misc_feature 1..27: note = Heat shock cognate 71 kDa protein (408-416)
  source 1..27: mol_type = other RNA
ggcgtgatgaccgtcctgatcaagaga

SEQ ID NO: 58477 - RNA, 27 nt, synthetic construct
  misc_feature 1..27: note = Polypyrimidine tract-binding protein 3 (285-293)
  source 1..27: mol_type = other RNA
ggcgtgtacggggacgtccacagagtt

SEQ ID NO: 58478 - RNA, 30 nt, synthetic construct
  misc_feature 1..30: note = Polypyrimidine tract-binding protein 2 (308-317)
  source 1..30: mol_type = other RNA
ggcgtgtacggggacgtccagagagttaag

SEQ ID NO: 58479 - RNA, 27 nt, synthetic construct
  misc_feature 1..27: note = Mitochondrial genome maintenance exonuclease 1 (204-212)
  source 1..27: mol_type = other RNA
ggctacatcgagagcgtgcagcacatt

SEQ ID NO: 58480 - RNA, 27 nt, synthetic construct
  misc_feature 1..27: note = Catenin beta-1 (186-194)
  source 1..27: mol_type = other RNA
cacgccatcatgagaagcccccagatg

SEQ ID NO: 58481 - RNA, 27 nt, synthetic construct
  misc_feature 1..27: note = Adenylyl cyclase-associated protein 1 (417-425)
  source 1..27: mol_type = other RNA
cacgcctacctgagcaagaactccctc

SEQ ID NO: 58482 - RNA, 27 nt, synthetic construct
  misc_feature 1..27: note = Surfeit locus protein 4 (232-240)
  source 1..27: mol_type = other RNA
cacgacttcctgaagtacgattttttc

SEQ ID NO: 58483 - RNA, 27 nt, synthetic construct
  misc_feature 1..27: note = NEDD4-binding protein 2-like 1 (64-72)
  source 1..27: mol_type = other RNA
cacgacttccccagagccctgatcttt

SEQ ID NO: 58484 - RNA, 27 nt, synthetic construct
  misc_feature 1..27: note = Cold shock domain-containing protein E1 (507-515)
  source 1..27: mol_type = other RNA
cacgacaaggagatcttctttcattac

SEQ ID NO: 58485 - RNA, 27 nt, synthetic construct
  misc_feature 1..27: note = Protein Niban (200-208)
  source 1..27: mol_type = other RNA
cacgactacatgaagcagatgaccttc

SEQ ID NO: 58486 - RNA, 27 nt, synthetic construct
  misc_feature 1..27: note = Zinc finger and BTB domain-containing protein 38 (210-218)
  source 1..27: mol_type = other RNA
cacgaggccgaacccgtgagaaccctg

SEQ ID NO: 58487 - RNA, 30 nt, synthetic construct
  misc_feature 1..30: note = Synaptic vesicle membrane protein VAT-1 homolog (222-231)
  source 1..30: mol_type = other RNA
cacgaggccctgaaggaaaacggcgtgacc

SEQ ID NO: 58488 - RNA, 27 nt, synthetic construct
  misc_feature 1..27: note = Protein sel-1 homolog 3 (891-899)
  source 1..27: mol_type = other RNA
cacgaggccctgctctactatgtgctt

SEQ ID NO: 58489 - RNA, 30 nt, synthetic construct; identical to SEQ ID NO: 34262
  misc_feature 1..30: note = Nuclear migration protein nudC (79-88)
  source 1..30: mol_type = other RNA

SEQ ID NO: 58490 - RNA, 27 nt, synthetic construct
  misc_feature 1..27: note = EH domain-containing protein 1 (210-218)
  source 1..27: mol_type = other RNA
cacgaggacaagatcagagtggtcctg

SEQ ID NO: 58491 - RNA, 27 nt, synthetic construct
  misc_feature 1..27: note = Exosome complex exonuclease RRP44 (679-687)
  source 1..27: mol_type = other RNA
cacgaggaattcagcgagcatgccctg

SEQ ID NO: 58492 - RNA, 27 nt, synthetic construct
  misc_feature 1..27: note = Repressor of RNA polymerase III transcription MAF1 homolog (116-124)
  source 1..27: mol_type = other RNA
cacgagttcagcagagaaccctccctg

SEQ ID NO: 58493 - RNA, 27 nt, synthetic construct
  misc_feature 1..27: note = Versican core protein (1534-1542)
  source 1..27: mol_type = other RNA
cacgagcataccgaacccgtgagcctg

SEQ ID NO: 58494 - RNA, 27 nt, synthetic construct
  misc_feature 1..27: note = Sphingolipid delta(4)-desaturase DES1 (89-97)
  source 1..27: mol_type = other RNA
cacgagatcgcccataacgctgcattc

SEQ ID NO: 58495 - RNA, 30 nt, synthetic construct
  misc_feature 1..30: note = Histone-lysine N-methyltransferase 2E (353-362)
  source 1..30: mol_type = other RNA
cacgagatccaggacggcaccattcatctg

SEQ ID NO: 58496 - RNA, 27 nt, synthetic construct
  misc_feature 1..27: note = Endothelial PAS domain-containing protein 1 (39-47)
  source 1..27: mol_type = other RNA
cacgagctgcccctccctcatagcgtg

SEQ ID NO: 58497 - RNA, 30 nt, synthetic construct
  misc_feature 1..30: note = ATP-dependent RNA helicase DHX8 (1152-1161)
  source 1..30: mol_type = other RNA
cacgagctggtgctcaccacaaaggaatac

SEQ ID NO: 58498 - RNA, 24 nt, synthetic construct
  misc_feature 1..24: note = E3 ubiquitin-protein ligase RNF213 (1247-1254)
  source 1..24: mol_type = other RNA
cacgagatgatcattctgaagctc

SEQ ID NO: 58499 - RNA, 27 nt, synthetic construct
  misc_feature 1..27: note = Histone-lysine N-methyltransferase NSD2 (449-457)
  source 1..27: mol_type = other RNA
cacgagaacgacatcacccatttctac

SEQ ID NO: 58500 - RNA, 27 nt, synthetic construct
  misc_feature 1..27: note = Sorting nexin-6 (212-220)
  source 1..27: mol_type = other RNA
cacgagagaaccttcctgctcgaatac

SEQ ID NO: 58501 - RNA, 27 nt, synthetic construct
  misc_feature 1..27: note = Heterogeneous nuclear ribonucleoprotein K (415-423)
  source 1..27: mol_type = other RNA
cacgagagcggcgcctccatcaagatt

SEQ ID NO: 58502 - RNA, 27 nt, synthetic construct
  misc_feature 1..27: note = Amyloid-like protein 2 (692-700)
  source 1..27: mol_type = other RNA
cacggctacgagaaccccacctataag

SEQ ID NO: 58503 - RNA, 27 nt, synthetic construct
  misc_feature 1..27: note = Transcription initiation factor TFIID subunit 4 (42-50)
  source 1..27: mol_type = other RNA
cacctggcccccagaacccctgaggtg

SEQ ID NO: 58504 - RNA, 27 nt, synthetic construct
  misc_feature 1..27: note = Cysteine and histidine-rich protein 1 (106-114)
  source 1..27: mol_type = other RNA
cacctgggccccgaggggagaagcgtg

SEQ ID NO: 58505 - RNA, 30 nt, synthetic construct
  misc_feature 1..30: note = Formin-like protein 2 (244-253)
  source 1..30: mol_type = other RNA
cacccccatgccgtgaacgagatcgctctg

SEQ ID NO: 58506 - RNA, 27 nt, synthetic construct
  misc_feature 1..27: note = KRR1 small subunit processome component homolog (214-222)
  source 1..27: mol_type = other RNA
caccccatctacaacattaagagcctg

SEQ ID NO: 58507 - RNA, 30 nt, synthetic construct
  misc_feature 1..30: note = HLA class I histocompatibility antigen, Cw-7 alpha chain (216-225)
  source 1..30: mol_type = other RNA
caccccctgagcgaccatgaggccaccctc

SEQ ID NO: 58508 - RNA, 27 nt, synthetic construct
  misc_feature 1..27: note = V-type proton ATPase 116 kDa subunit a isoform 3 (715-723)
  source 1..27: mol_type = other RNA
caccaggccatccataccattgagttc

SEQ ID NO: 58509 - RNA, 27 nt, synthetic construct
  misc_feature 1..27: note = Dymeclin (278-286)
  source 1..27: mol_type = other RNA
caccagaacagcaatatcagaacctac

SEQ ID NO: 58510 - RNA, 24 nt, synthetic construct
  misc_feature 1..24: note = WD repeat-containing protein 1 (59-66)
  source 1..24: mol_type = other RNA
caccaggtggtcgttgccaagtac

SEQ ID NO: 58511 - RNA, 27 nt, synthetic construct
  misc_feature 1..27: note = HLA class I histocompatibility antigen, A-2 alpha chain (73-81)
  source 1..27: mol_type = other RNA
cacagagtggacctgggcaccctcagg

SEQ ID NO: 58512 - RNA, 24 nt, synthetic construct
  misc_feature 1..24: note = Endoplasmic reticulum resident protein 44 (95-102)
  source 1..24: mol_type = other RNA
cacagcgacatcgcccagagatac

SEQ ID NO: 58513 - RNA, 27 nt, synthetic construct
  misc_feature 1..27: note = Histone deacetylase 4 (715-723)
  source 1..27: mol_type = other RNA
cacagcgaggcccataccctgctctac

SEQ ID NO: 58514 - RNA, 27 nt, synthetic construct
  misc_feature 1..27: note = Nucleolar protein 10 (122-130)
  source 1..27: mol_type = other RNA
cacagccagtccggcttctactataag

SEQ ID NO: 58515 - RNA, 24 nt, synthetic construct
  misc_feature 1..24: note = Eukaryotic translation initiation factor 3 subunit F (182-189)
  source 1..24: mol_type = other RNA
cacagcgtgctgatccatgagtac

SEQ ID NO: 58516 - RNA, 27 nt, synthetic construct
  misc_feature 1..27: note = Dual specificity protein phosphatase 5 (234-242)
  source 1..27: mol_type = other RNA
cacaccgccgacatcagctcccatttc

SEQ ID NO: 58517 - RNA, 30 nt, synthetic construct
  misc_feature 1..30: note = AP-3 complex subunit delta-1 (383-392)
  source 1..30: mol_type = other RNA
cacgtggacaaggccgagggcaccacatac

SEQ ID NO: 58518 - RNA, 27 nt, synthetic construct
  misc_feature 1..27: note = Rac GTPase-activating protein 1 (480-488)
  source 1..27: mol_type = other RNA
cacgtgatcgagaacagcaatgccttc

SEQ ID NO: 58519 - RNA, 27 nt, synthetic construct
  misc_feature 1..27: note = T-complex protein 1 subunit epsilon (135-143)
  source 1..27: mol_type = other RNA
cacgtgatcgagaccctgattggcaag

SEQ ID NO: 58520 - RNA, 27 nt, synthetic construct
  misc_feature 1..27: note = Triple functional domain protein (477-485)
  source 1..27: mol_type = other RNA
cacgtgctggacgtcatccatgaggtt

SEQ ID NO: 58521 - RNA, 27 nt, synthetic construct
  misc_feature 1..27: note = Manganese-transporting ATPase 13A1 (956-964)
  source 1..27: mol_type = other RNA
atcgccgctcccttcaccagcaagctg

SEQ ID NO: 58522 - RNA, 45 nt, synthetic construct
  misc_feature 1..45: note = Solute carrier family 2, facilitated glucose transporter member 1 (21-35)
  source 1..45: mol_type = other RNA
atcgcccaggtgttcggcctggacagcattatggggaacaaggat

SEQ ID NO: 58523 - RNA, 24 nt, synthetic construct
  misc_feature 1..24: note = Insulin receptor substrate 2 (1323-1330)
  source 1..24: mol_type = other RNA
atcgacttcctgagccaccatctc

SEQ ID NO: 58524 - RNA, 24 nt, synthetic construct
  misc_feature 1..24: note = Neuroblast differentiation-associated protein AHNAK (4419-4426)
  source 1..24: mol_type = other RNA
atcgacattaagggccccagcctg

SEQ ID NO: 58525 - RNA, 27 nt, synthetic construct
  misc_feature 1..27: note = Tripeptidyl-peptidase 2 (1087-1095)
  source 1..27: mol_type = other RNA
atcgaccagaccgccctggctgtgtac

SEQ ID NO: 58526 - RNA, 33 nt, synthetic construct
  misc_feature 1..33: note = U5 small nuclear ribonucleoprotein 200 kDa helicase (803-813)
  source 1..33: mol_type = other RNA
atcgaggaacccagcgccaagattaacgtgctg

SEQ ID NO: 58527 - RNA, 27 nt, synthetic construct
  misc_feature 1..27: note = Structural maintenance of chromosomes protein 1A (7-15)
  source 1..27: mol_type = other RNA
atcgagattgaaaacttcaagagctac

SEQ ID NO: 58528 - RNA, 24 nt, synthetic construct
  misc_feature 1..24: note = Casein kinase I isoform delta (51-58)
  source 1..24: mol_type = other RNA
atcgagagcaagatttacaaaatg

SEQ ID NO: 58529 - RNA, 24 nt, synthetic construct
  misc_feature 1..24: note = Protein S100-A9 (12-19)
  source 1..24: mol_type = other RNA
atcgagaccattataaacacattc

SEQ ID NO: 58530 - RNA, 30 nt, synthetic construct
  misc_feature 1..30: note = Probable UDP-sugar transporter protein SLC35A5 (264-273)
  source 1..30: mol_type = other RNA
atcttcattcagaacagcaagctgtacttt

SEQ ID NO: 58531 - RNA, 30 nt, synthetic construct
  misc_feature 1..30: note = Pre-mRNA-processing-splicing factor 8 (1809-1818)
  source 1..30: mol_type = other RNA
atcttcaaccccagaaccggccagctgttt

SEQ ID NO: 58532 - RNA, 39 nt, synthetic construct
  misc_feature 1..39: note = ATP synthase-coupling factor 6, mitochondrial (25-37)
  source 1..39: mol_type = other RNA
atcggcgtgaccgccgtcgctttcaacaaggagctggac

SEQ ID NO: 58533 - RNA, 27 nt, synthetic construct
  misc_feature 1..27: note = DNA damage-binding protein 1 (793-801)
  source 1..27: mol_type = other RNA
atcattgaccagcacaccttcgaggtg

SEQ ID NO: 58534 - RNA, 27 nt, synthetic construct
  misc_feature 1..27: note = 26S proteasome non-ATPase regulatory subunit 2 (809-817)
  source 1..27: mol_type = other RNA
atcattctgggcaagagccactacgtg

SEQ ID NO: 58535 - RNA, 36 nt, synthetic construct
  misc_feature 1..36: note = Elongation factor 1-alpha 1 (178-189)
  source 1..36: mol_type = other RNA
atcaagaaaattggctacaaccccgacaccgtggcc

SEQ ID NO: 58536 - RNA, 33 nt, synthetic construct
  misc_feature 1..33: note = Probable ATP-dependent RNA helicase DDX60-like (1497-1507)
  source 1..33: mol_type = other RNA
atcctggccgagctccccgaagacttcaaggct

SEQ ID NO: 58537 - RNA, 27 nt, synthetic construct
  misc_feature 1..27: note = Interferon-induced GTP-binding protein Mx2 (436-444)
  source 1..27: mol_type = other RNA
atcctggccaccaacacacagaaggtg

SEQ ID NO: 58538 - RNA, 33 nt, synthetic construct
  misc_feature 1..33: note = Eukaryotic translation initiation factor 4 gamma 3 (389-399)
  source 1..33: mol_type = other RNA
atcctggagaacccccctgaagagatgaagctc

SEQ ID NO: 58539 - RNA, 27 nt, synthetic construct
  misc_feature 1..27: note = ATP-dependent RNA helicase DDX42 (333-341)
  source 1..27: mol_type = other RNA
atcctgattgaccccataagagtggtc

SEQ ID NO: 58540 - RNA, 27 nt, synthetic construct
  misc_feature 1..27: note = Phosphorylated CTD-interacting factor 1 (267-275)
  source 1..27: mol_type = other RNA
atcatgaacgacattcccataagactg

SEQ ID NO: 58541 - RNA, 27 nt, synthetic construct
  misc_feature 1..27: note = RNA polymerase-associated protein CTR9 homolog (124-132)
  source 1..27: mol_type = other RNA
atcatgtacgaccagaaccacctgctc

SEQ ID NO: 58542 - RNA, 51 nt, synthetic construct
  misc_feature 1..51: note = Cystatin-A (2-18)
  source 1..51: mol_type = other RNA
atccccggcgggctgagcgaggccaagcctgctaccccagaaattcaggag

SEQ ID NO: 58543 - RNA, 30 nt, synthetic construct
  misc_feature 1..30: note = Splicing factor U2AF 65 kDa subunit (413-422)
  source 1..30: mol_type = other RNA
atccccagacctgtggacggcgtcgaggtt

SEQ ID NO: 58544 - RNA, 27 nt, synthetic construct
  misc_feature 1..27: note = Membrane-bound transcription factor site-1 protease (189-197)
  source 1..27: mol_type = other RNA
atccccagacaggtggcccaaaccctg

SEQ ID NO: 58545 - RNA, 33 nt, synthetic construct
  misc_feature 1..33: note = Cytospin-A (862-872)
  source 1..33: mol_type = other RNA
atccccagaacccctctgagcccatccccgatg

SEQ ID NO: 58546 - RNA, 33 nt, synthetic construct
  misc_feature 1..33: note = Filamin-A (1569-1579)
  source 1..33: mol_type = other RNA
atccaggacaaccacgatggcacctacacagtg

SEQ ID NO: 58547 - RNA, 33 nt, synthetic construct
  misc_feature 1..33: note = UBX domain-containing protein 4 (322-332)
  source 1..33: mol_type = other RNA
atccagttcagactgcccgacggcagctccttt

SEQ ID NO: 58548 - RNA, 30 nt, synthetic construct
  misc_feature 1..30: note = Thyroid receptor-interacting protein 11 (87-96)
  source 1..30: mol_type = other RNA
atccagattaagcaacagagcacctcctac

SEQ ID NO: 58549 - RNA, 27 nt, synthetic construct
  misc_feature 1..27: note = Coatomer subunit delta (393-401)
  source 1..27: mol_type = other RNA
atccaggtgaccaaggtcacacaagtt

SEQ ID NO: 58550 - RNA, 27 nt, synthetic construct
  misc_feature 1..27: note = Kinesin-like protein KIF11 (400-408)
  source 1..27: mol_type = other RNA
atcagcgaggaaaacttcagagtgatg

SEQ ID NO: 58551 - RNA, 42 nt, synthetic construct
  misc_feature 1..42: note = FAST kinase domain-containing protein 2 (542-555)
  source 1..42: mol_type = other RNA
atcagcgagctgctcacctccgacgatatgaagaacgcctac

SEQ ID NO: 58552 - RNA, 27 nt, synthetic construct
  misc_feature 1..27: note = LEM domain-containing protein 2 (23-31)
  source 1..27: mol_type = other RNA
atcaccgacacaactagagatgtgtac

SEQ ID NO: 58553 - RNA, 48 nt, synthetic construct
  misc_feature 1..48: note = Galectin-3 (132-147)
  source 1..48: mol_type = other RNA
atcaccattctgggcacagtgaagcccaacgccaatagaatagctctc

SEQ ID NO: 58554 - RNA, 27 nt, synthetic construct
  misc_feature 1..27: note = NADH dehydrogenase (ubiquinone) 1 beta subcomplex subunit 10 (34-42)
  source 1..27: mol_type = other RNA
atcgtggacagacccgtcaccctggtt

SEQ ID NO: 58555 - RNA, 27 nt, synthetic construct
  misc_feature 1..27: note = Cell division cycle protein 27 homolog (695-703)
  source 1..27: mol_type = other RNA
atcgtgattgaccccaagaaccctctg

SEQ ID NO: 58556 - RNA, 42 nt, synthetic construct
  misc_feature 1..42: note = Macrophage migration inhibitory factor (3-16)
  source 1..42: mol_type = other RNA
atcgtgaacaccaatgtccccagagccagcgttcctgacggc

SEQ ID NO: 58557 - RNA, 30 nt, synthetic construct
  misc_feature 1..30: note = Solute carrier family 12 member 6 (219-228)
  source 1..30: mol_type = other RNA
atctacgccggcgctattaagagctccttc

SEQ ID NO: 58558 - RNA, 27 nt, synthetic construct
  misc_feature 1..27: note = ATP-dependent RNA helicase DHX29 (1317-1325)
  source 1..27: mol_type = other RNA
atctacttccaggcccccgtgaagatt

SEQ ID NO: 58559 - RNA, 27 nt, synthetic construct
  misc_feature 1..27: note = Tripeptidyl-peptidase 2 (478-486)
  source 1..27: mol_type = other RNA
atctacctgagagaccccgtgcaggtc

SEQ ID NO: 58560 - RNA, 27 nt, synthetic construct
  misc_feature 1..27: note = BCL2/adenovirus E1B 19 kDa protein-interacting protein 3 (38-46)
  source 1..27: mol_type = other RNA
atctacaacggcgacatggagaagatt

SEQ ID NO: 58561 - RNA, 27 nt, synthetic construct
  misc_feature 1..27: note = Serine/threonine-protein phosphatase 2A 56 kDa regulatory subunit gamma isoform (91-99)
  source 1..27: mol_type = other RNA
atctaccccgaggtggtccacatgttc

SEQ ID NO: 58562 - RNA, 33 nt, synthetic construct
  misc_feature 1..33: note = Flotillin-2 (104-114)
  source 1..33: mol_type = other RNA
atctaccaggacagagatcaattcgccaagctg

SEQ ID NO: 58563 - RNA, 27 nt, synthetic construct
  misc_feature 1..27: note = Bardet-Biedl syndrome 4 protein (45-53)
  source 1..27: mol_type = other RNA
atctaccagaaggccttcgagcacctg

SEQ ID NO: 58564 - RNA, 27 nt, synthetic construct
  misc_feature 1..27: note = Signal transducer and activator of transcription 6 (87-95)
  source 1..27: mol_type = other RNA
atctaccagagagaccccctgaagctc

SEQ ID NO: 58565 - RNA, 27 nt, synthetic construct
  misc_feature 1..27: note = Progestin and adipoQ receptor family member 4 (52-60)
  source 1..27: mol_type = other RNA
atctacacccacggcctggccctcctt

SEQ ID NO: 58566 - RNA, 24 nt, synthetic construct
  misc_feature 1..24: note = 40S ribosomal protein S23 (29-36)
  source 1..24: mol_type = other RNA
aaggcccacctgggcaccgctctc

SEQ ID NO: 58567 - RNA, 27 nt, synthetic construct
  misc_feature 1..27: note = Peroxisomal membrane protein PMP34 (213-221)
  source 1..27: mol_type = other RNA
aaggccatcgctaccacagtgacttac

SEQ ID NO: 58568 - RNA, 27 nt, synthetic construct
  misc_feature 1..27: note = Protein PRRC2C (2255-2263)
  source 1..27: mol_type = other RNA
aaggcctgggagaacagccccaatgtg

SEQ ID NO: 58569 - RNA, 30 nt, synthetic construct
  misc_feature 1..30: note = Polycystic kidney disease and receptor for egg jelly-related protein (701-710)
  source 1..30: mol_type = other RNA
aaggacttcctgcccgccggctacctcctt

SEQ ID NO: 58570 - RNA, 27 nt, synthetic construct
  misc_feature 1..27: note = FERM domain-containing protein 6 (545-553)
  source 1..27: mol_type = other RNA
aaggacttcctgagaatcgccggcctc

SEQ ID NO: 58571 - RNA, 33 nt, synthetic construct
  misc_feature 1..33: note = Microtubule-actin cross-linking factor 1, isoforms 1/2/3/5 (2405-2415)
  source 1..33: mol_type = other RNA
aaggacaaactgaaggatgccaccgagagatac

SEQ ID NO: 58572 - RNA, 27 nt, synthetic construct
  misc_feature 1..27: note = Calcium-binding protein 39 (189-197)
  source 1..27: mol_type = other RNA
aaggacctgctcaccagacacaaactt

SEQ ID NO: 58573 - RNA, 27 nt, synthetic construct
  misc_feature 1..27: note = Ribonucleoside-diphosphate reductase subunit M2 B (73-81)
  source 1..27: mol_type = other RNA
aaggacctgccccactggaacaaactc

SEQ ID NO: 58574 - RNA, 27 nt, synthetic construct
  misc_feature 1..27: note = Spectrin beta chain, non-erythrocytic 1 (655-663)
  source 1..27: mol_type = other RNA
aaggacctgaccagcgtgatgagactc

SEQ ID NO: 58575 - RNA, 27 nt, synthetic construct
  misc_feature 1..27: note = Plastin-3 (18-26)
  source 1..27: mol_type = other RNA
aaggaggccttcgctaaagtggacctg

SEQ ID NO: 58576 - RNA, 27 nt, synthetic construct
  misc_feature 1..27: note = Protein Red (496-504)
  source 1..27: mol_type = other RNA
aaggaggccctgcccaaagctgcattc

SEQ ID NO: 58577 - RNA, 30 nt, synthetic construct; identical to SEQ ID NO: 34350
  misc_feature 1..30: note = Protein KHNYN (158-167)
  source 1..30: mol_type = other RNA

SEQ ID NO: 58578 - RNA, 27 nt, synthetic construct
  misc_feature 1..27: note = 40S ribosomal protein S15 (65-73)
  source 1..27: mol_type = other RNA
aaggaggccccccctatggaaaaacca

SEQ ID NO: 58579 - RNA, 27 nt, synthetic construct
  misc_feature 1..27: note = Protein transport protein Sec23B (564-572)
  source 1..27: mol_type = other RNA
aaggaggaccccaccagcttcagactg

SEQ ID NO: 58580 - RNA, 33 nt, synthetic construct
  misc_feature 1..33: note = Tropomyosin alpha-4 chain (228-238)
  source 1..33: mol_type = other RNA
aaggaggaaaacgtgggcctgcaccagaccctc

SEQ ID NO: 58581 - RNA, 30 nt, synthetic construct
  misc_feature 1..30: note = Putative methyltransferase NSUN6 (163-172)
  source 1..30: mol_type = other RNA
aaggagttcgacggcaccaaagtgtttctg

SEQ ID NO: 58582 - RNA, 30 nt, synthetic construct
  misc_feature 1..30: note = Sin3 histone deacetylase corepressor complex component SDS3 (137-146)
  source 1..30: mol_type = other RNA
aaggagttcgaagacaaaaaggtggagctg

SEQ ID NO: 58583 - RNA, 27 nt, synthetic construct
  misc_feature 1..27: note = Heat shock protein HSP 90-alpha (656-664)
  source 1..27: mol_type = other RNA
aaggagttcgaaggcaaaaccctggtg

SEQ ID NO: 58584 - RNA, 27 nt, synthetic construct
  misc_feature 1..27: note = Protein S100-A10 (37-45)
  source 1..27: mol_type = other RNA
aaggagttccccggctttctggaaaac

SEQ ID NO: 58585 - RNA, 36 nt, synthetic construct
  misc_feature 1..36: note = Serine palmitoyltransferase 2 (526-537)
  source 1..36: mol_type = other RNA
aaggagatcgacgaagtgggcgatctgctccagctt

SEQ ID NO: 58586 - RNA, 27 nt, synthetic construct
  misc_feature 1..27: note = Melanoma-associated antigen D4 (471-479)
  source 1..27: mol_type = other RNA
aaggagatcgacaaagaagagcacctg

SEQ ID NO: 58587 - RNA, 39 nt, synthetic construct
  misc_feature 1..39: note = Spectrin beta chain, non-erythrocytic 1 (1434-1446)
  source 1..39: mol_type = other RNA
aaggagatcgaagagctgcagagccaagcccaggctctc

SEQ ID NO: 58588 - RNA, 36 nt, synthetic construct
  misc_feature 1..36: note = Calcium/calmodulin-dependent protein kinase type IV (135-146)
  source 1..36: mol_type = other RNA
aaggagatcttcgaaacccccacagagattagcctg

SEQ ID NO: 58589 - RNA, 27 nt, synthetic construct
  misc_feature 1..27: note = E3 ubiquitin-protein ligase RNF19B (187-195)
  source 1..27: mol_type = other RNA
aaggagatcagcgacctgcactacctc

SEQ ID NO: 58590 - RNA, 27 nt, synthetic construct
  misc_feature 1..27: note = Centromere protein F (392-400)
  source 1..27: mol_type = other RNA
aaggagaaagaattccaggaggaactg

SEQ ID NO: 58591 - RNA, 30 nt, synthetic construct
  misc_feature 1..30: note = Girdin (728-737)
  source 1..30: mol_type = other RNA
aaggagctggaaagcgagaaagaacagctc

SEQ ID NO: 58592 - RNA, 30 nt, synthetic construct
  misc_feature 1..30: note = Testin (173-182)
  source 1..30: mol_type = other RNA
aaggagatggaacagttcgtgaaaaagtac

SEQ ID NO: 58593 - RNA, 30 nt, synthetic construct; identical to SEQ ID NO: 34366
  misc_feature 1..30: note = Leucine-tRNA ligase, cytoplasmic (775-784)
  source 1..30: mol_type = other RNA

SEQ ID NO: 58594 - RNA, 30 nt, synthetic construct
  misc_feature 1..30: note = SWI/SNF-related matrix-associated actin-dependent regulator of chromatin subfamily B member 1 (277-286)
  source 1..30: mol_type = other RNA
aaggagaacagccccgaaaaattcgccctg

SEQ ID NO: 58595 - RNA, 33 nt, synthetic construct
  misc_feature 1..33: note = Squalene monooxygenase (157-167)
  source 1..33: mol_type = other RNA
aaggagcccgacagaatcgtgggcgaattcctg

SEQ ID NO: 58596 - RNA, 27 nt, synthetic construct
  misc_feature 1..27: note = Calcium uptake protein 2, mitochondrial (204-212)
  source 1..27: mol_type = other RNA
aaggagcccgaaatcaacaccacactg

SEQ ID NO: 58597 - RNA, 27 nt, synthetic construct
  misc_feature 1..27: note = Farnesyl pyrophosphate synthase (39-47)
  source 1..27: mol_type = other RNA
aaggaggtgctggaatacaacgccatc

SEQ ID NO: 58598 - RNA, 24 nt, synthetic construct
  misc_feature 1..24: note = Tetratricopeptide repeat protein 25 (351-358)
  source 1..24: mol_type = other RNA
aaggagtacgacctgcccgatgcc

SEQ ID NO: 58599 - RNA, 30 nt, synthetic construct
  misc_feature 1..30: note = Inhibitor of growth protein 5 (76-85)
  source 1..30: mol_type = other RNA
aaggagtacagcgacgataaagtgcagctg

SEQ ID NO: 58600 - RNA, 27 nt, synthetic construct
  misc_feature 1..27: note = Son of sevenless homolog 2 (677-685)
  source 1..27: mol_type = other RNA
aaggagtacgtgcagcccgtccaactg

SEQ ID NO: 58601 - RNA, 27 nt, synthetic construct
  misc_feature 1..27: note = Nodal modulator 2 (392-400)
  source 1..27: mol_type = other RNA
aagatcgcccccaacacccctcagctg

SEQ ID NO: 58602 - RNA, 30 nt, synthetic construct
  misc_feature 1..30: note = Trans-Golgi network integral membrane protein 2 (408-417)
  source 1..30: mol_type = other RNA
aagatcattgccttcgtgctggagggcaaa

SEQ ID NO: 58603 - RNA, 27 nt, synthetic construct
  misc_feature 1..27: note = Interleukin enhancer-binding factor 2 (127-135)
  source 1..27: mol_type = other RNA
aagatcctgcccaccctcgaggccgtg

SEQ ID NO: 58604 - RNA, 27 nt, synthetic construct
  misc_feature 1..27: note = Insulin-like growth factor 2 mRNA-binding protein 3 (552-560)
  source 1..27: mol_type = other RNA
aagatccaggagattctgacccaagtg

SEQ ID NO: 58605 - RNA, 30 nt, synthetic construct
  misc_feature 1..30: note = WD repeat-containing protein 1 (119-128)
  source 1..30: mol_type = other RNA
aagatctgggacgtgagcgtcaactccgtt

SEQ ID NO: 58606 - RNA, 27 nt, synthetic construct
  misc_feature 1..27: note = Transcription factor SOX-8 (1-9)
  source 1..27: mol_type = other RNA
aagctggccgaccagtacccccacctc

SEQ ID NO: 58607 - RNA, 27 nt, synthetic construct
  misc_feature 1..27: note = 14-3-3 protein theta (11-19)
  source 1..27: mol_type = other RNA
aagctggccgagcaggctgaaagatac

SEQ ID NO: 58608 - RNA, 27 nt, synthetic construct
  misc_feature 1..27: note = Akirin-1 (163-171)
  source 1..27: mol_type = other RNA
aagctggccgagcagtacgaaagcttc

SEQ ID NO: 58609 - RNA, 33 nt, synthetic construct
  misc_feature 1..33: note = Akirin-1 (163-173)
  source 1..33: mol_type = other RNA
aagctggccgagcagtacgaaagcttcgtgaaa

SEQ ID NO: 58610 - RNA, 27 nt, synthetic construct
  misc_feature 1..27: note = V-type proton ATPase subunit C 1 (25-33)
  source 1..27: mol_type = other RNA
aagctggacgccttcgtggagggcgtc

SEQ ID NO: 58611 - RNA, 27 nt, synthetic construct
  misc_feature 1..27: note = Kinetochore-associated protein 1 (1298-1306)
  source 1..27: mol_type = other RNA
aagctgttcggcgagaccacactcgtg

SEQ ID NO: 58612 - RNA, 27 nt, synthetic construct
  misc_feature 1..27: note = Heterogeneous nuclear ribonucleoprotein A0 (8-16)
  source 1..27: mol_type = other RNA
aagctgttcatcggcgggctcaacgtg

SEQ ID NO: 58613 - RNA, 27 nt, synthetic construct
  misc_feature 1..27: note = Heterogeneous nuclear ribonucleoprotein A1 (15-23)
  source 1..27: mol_type = other RNA
aagctgttcatcggcgggctcagcttt

SEQ ID NO: 58614 - RNA, 30 nt, synthetic construct; identical to SEQ ID NO: 34387
  misc_feature 1..30: note = Serine/threonine-protein kinase DCLK2 (534-543)
  source 1..30: mol_type = other RNA

SEQ ID NO: 58615 - RNA, 27 nt, synthetic construct
  misc_feature 1..27: note = TRPM8 channel-associated factor 1 (199-207)
  source 1..27: mol_type = other RNA
aagctgggcagcgtgcccgtcaccgtt

SEQ ID NO: 58616 - RNA, 27 nt, synthetic construct
  misc_feature 1..27: note = Transformation/transcription domain-associated protein (911-919)
  source 1..27: mol_type = other RNA
aagctgcactacgtggtcaccgaggtt

SEQ ID NO: 58617 - RNA, 33 nt, synthetic construct
  misc_feature 1..33: note = E3 ubiquitin-protein ligase UBR4 (1375-1385)
  source 1..33: mol_type = other RNA
aagctgatcgacgagacccaggatatgctcctt

SEQ ID NO: 58618 - RNA, 27 nt, synthetic construct
  misc_feature 1..27: note = Pericentriolar material 1 protein (412-420)
  source 1..27: mol_type = other RNA
aagctgctcggcgagcttcacaccctg

SEQ ID NO: 58619 - RNA, 27 nt, synthetic construct
  misc_feature 1..27: note = Peptidyl-prolyl cis-trans isomerase FKBP3 (42-50)
  source 1..27: mol_type = other RNA
aagctgctcggcaacatcaaaaatgtg

SEQ ID NO: 58620 - RNA, 27 nt, synthetic construct
  misc_feature 1..27: note = Calnexin (166-174)
  source 1..27: mol_type = other RNA
aagctgctcagcaaaacccccgagctt

SEQ ID NO: 58621 - RNA, 27 nt, synthetic construct
  misc_feature 1..27: note = Golgin subfamily A member 5 (484-492)
  source 1..27: mol_type = other RNA
aagctgatgggccagatccaccaactc

SEQ ID NO: 58622 - RNA, 27 nt, synthetic construct
  misc_feature 1..27: note = TBC1 domain family member 13 (39-47)
  source 1..27: mol_type = other RNA
aagctgaaccccggcatcgcctacgtg

SEQ ID NO: 58623 - RNA, 27 nt, synthetic construct
  misc_feature 1..27: note = E3 ubiquitin-protein ligase TRIP12 (912-920)
  source 1..27: mol_type = other RNA
aagctgcccgacatcttcagcgtgtac

SEQ ID NO: 58624 - RNA, 30 nt, synthetic construct
  misc_feature 1..30: note = Kelch-like protein 24 (347-356)
  source 1..30: mol_type = other RNA
aagctgcccgagttcaccaaaagcgaatac

SEQ ID NO: 58625 - RNA, 27 nt, synthetic construct
  misc_feature 1..27: note = Transmembrane and coiled-coil domain-containing protein 1 (116-124)
  source 1..27: mol_type = other RNA
aagctgcccttcacccctctcagctac

SEQ ID NO: 58626 - RNA, 30 nt, synthetic construct
  misc_feature 1..30: note = HLA class II histocompatibility antigen, DR beta 5 chain (5-14)
  source 1..30: mol_type = other RNA
aagctgcccggcgggagctacatggccaaa

SEQ ID NO: 58627 - RNA, 27 nt, synthetic construct
  misc_feature 1..27: note = Fanconi anemia group I protein (16-24)
  source 1..27: mol_type = other RNA
aagctgcaggagttcctccaaaccctt

SEQ ID NO: 58628 - RNA, 27 nt, synthetic construct
  misc_feature 1..27: note = Tyrosine-protein kinase BAZ1B (379-387)
  source 1..27: mol_type = other RNA
aagctgagcgagatccccctcaccctt

SEQ ID NO: 58629 - RNA, 27 nt, synthetic construct
  misc_feature 1..27: note = E3 SUMO-protein ligase CBX4 (347-355)
  source 1..27: mol_type = other RNA
aagctgagccccaccaaagaggccttc

SEQ ID NO: 58630 - RNA, 27 nt, synthetic construct
  misc_feature 1..27: note = PWWP domain-containing protein MUM1 (574-582)
  source 1..27: mol_type = other RNA
aagctggtggagtacatcgtcaaagcc

SEQ ID NO: 58631 - RNA, 27 nt, synthetic construct
  misc_feature 1..27: note = Minor histocompatibility protein HA-1 (532-540)
  source 1..27: mol_type = other RNA
aagctgtacgaccccggccagcaatat

SEQ ID NO: 58632 - RNA, 27 nt, synthetic construct
  misc_feature 1..27: note = Replication factor C subunit 5 (304-312)
  source 1..27: mol_type = other RNA
aagatggccgacatcgagtacagactg

SEQ ID NO: 58633 - RNA, 36 nt, synthetic construct
  misc_feature 1..36: note = Interferon-induced transmembrane protein 2 (87-98)
  source 1..36: mol_type = other RNA
aagatggtgggcgacgtcaccggggcccaggcttac

SEQ ID NO: 58634 - RNA, 33 nt, synthetic construct
  misc_feature 1..33: note = U1 small nuclear ribonucleoprotein 70 kDa (87-97)
  source 1..33: mol_type = other RNA
aagatgtgggacccccacaacgatcctaatgcc

SEQ ID NO: 58635 - RNA, 33 nt, synthetic construct
  misc_feature 1..33: note = Myosin-9 (517-527)
  source 1..33: mol_type = other RNA
aagcccgccggccctccagggatcctggctctc

SEQ ID NO: 58636 - RNA, 30 nt, synthetic construct
  misc_feature 1..30: note = Transketolase (6-15)
  source 1..30: mol_type = other RNA
aagcccgaccagcaaaaactgcaggccctc

SEQ ID NO: 58637 - RNA, 30 nt, synthetic construct
  misc_feature 1..30: note = Calponin-3 (156-165)
  source 1..30: mol_type = other RNA
aagcccttcgaccagaccacaatcagcctg

SEQ ID NO: 58638 - RNA, 33 nt, synthetic construct; identical to SEQ ID NO: 34411
  misc_feature 1..33: note = DNA polymerase kappa (36-46)
  source 1..33: mol_type = other RNA

SEQ ID NO: 58639 - RNA, 27 nt, synthetic construct
  misc_feature 1..27: note = Elongation factor 2 (445-453)
  source 1..27: mol_type = other RNA
aagcccatccagagaaccattctgatg

SEQ ID NO: 58640 - RNA, 27 nt, synthetic construct
  misc_feature 1..27: note = Galectin-3 (139-147)
  source 1..27: mol_type = other RNA
aagcccaacgccaatagaatcgctctg

SEQ ID NO: 58641 - RNA, 33 nt, synthetic construct
  misc_feature 1..33: note = Spectrin beta chain, non-erythrocytic 1 (1939-1949)
  source 1..33: mol_type = other RNA
aagcccagagacgtgagctccgtcgagctgctc

SEQ ID NO: 58642 - RNA, 30 nt, synthetic construct
  misc_feature 1..30: note = Methionine synthase (342-351)
  source 1..30: mol_type = other RNA
aagcccagagtgcctccagccaccgctttc

SEQ ID NO: 58643 - RNA, 27 nt, synthetic construct
  misc_feature 1..27: note = Peroxisomal multifunctional enzyme type 2 (565-573)
  source 1..27: mol_type = other RNA
aagcccgtgtaccctggccagaccctg

SEQ ID NO: 58644 - RNA, 24 nt, synthetic construct
  misc_feature 1..24: note = SWI/SNF-related matrix-associated actin-dependent regulator of chromatin subfamily A containing DEAD/H box 1 (68-75)
  source 1..24: mol_type = other RNA
aagccctaccagaaagtgggcctg

SEQ ID NO: 58645 - RNA, 27 nt, synthetic construct
  misc_feature 1..27: note = Programmed cell death protein 6 (116-124)
  source 1..27: mol_type = other RNA
aagcaggccctgagcggcttcgggtac

SEQ ID NO: 58646 - RNA, 27 nt, synthetic construct
  misc_feature 1..27: note = Ubiquitin-associated protein 2-like (939-947)
  source 1..27: mol_type = other RNA
aagcagcacggcgtgaacgtcagcgtt

SEQ ID NO: 58647 - RNA, 27 nt, synthetic construct
  misc_feature 1..27: note = DnaJ homolog subfamily A member 1 (46-54)
  source 1..27: mol_type = other RNA
aagcagatcagccaagcctacgaggtg

SEQ ID NO: 58648 - RNA, 27 nt, synthetic construct
  misc_feature 1..27: note = E3 ubiquitin-protein ligase MGRN1 (240-248)
  source 1..27: mol_type = other RNA
aagcagatcgtggacagagtcagctac

SEQ ID NO: 58649 - RNA, 30 nt, synthetic construct
  misc_feature 1..30: note = MICOS complex subunit MIC60 (724-733)
  source 1..30: mol_type = other RNA
aagcagatcgtggagattctgaccgcctac

SEQ ID NO: 58650 - RNA, 27 nt, synthetic construct
  misc_feature 1..27: note = Transgelin-2 (88-96)
  source 1..27: mol_type = other RNA
aagcagatggagcaaatcagccagttc

SEQ ID NO: 58651 - RNA, 30 nt, synthetic construct
  misc_feature 1..30: note = Transgelin-2 (88-97)
  source 1..30: mol_type = other RNA
aagcagatggagcaaatcagccagttcctg

SEQ ID NO: 58652 - RNA, 27 nt, synthetic construct
  misc_feature 1..27: note = Zinc finger MIZ domain-containing protein 2 (174-182)
  source 1..27: mol_type = other RNA
aagcagagccaagagctgtcccagtac

SEQ ID NO: 58653 - RNA, 27 nt, synthetic construct
  misc_feature 1..27: note = Heat shock cognate 71 kDa protein (423-431)
  source 1..27: mol_type = other RNA
aagcagacccaaacattcactacgtac

SEQ ID NO: 58654 - RNA, 27 nt, synthetic construct
  misc_feature 1..27: note = Heterogeneous nuclear ribonucleoprotein K (456-464)
  source 1..27: mol_type = other RNA
aagcagtacgccgacgtggagggcttc

SEQ ID NO: 58655 - RNA, 27 nt, synthetic construct
  misc_feature 1..27: note = T-complex protein 1 subunit theta (98-106)
  source 1..27: mol_type = other RNA
aagcagtacggcaacgaggtgttcctg

SEQ ID NO: 58656 - RNA, 27 nt, synthetic construct
  misc_feature 1..27: note = Coatomer subunit beta' (386-394)
  source 1..27: mol_type = other RNA
aagagcttcggctccgcccaggagttt

SEQ ID NO: 58657 - RNA, 33 nt, synthetic construct
  misc_feature 1..33: note = Elongation factor 1-alpha 1 (20-30)
  source 1..33: mol_type = other RNA
aagagcaccacaactggccacctgatctacaaa

SEQ ID NO: 58658 - RNA, 27 nt, synthetic construct
  misc_feature 1..27: note = Translocation protein SEC63 homolog (95-103)
  source 1..27: mol_type = other RNA
aagaccgacagagagtaccaggaatat

SEQ ID NO: 58659 - RNA, 27 nt, synthetic construct
  misc_feature 1..27: note = E3 ubiquitin-protein ligase RBBP6 (1474-1482)
  source 1..27: mol_type = other RNA
aagaccgactacgatacaagagagtat

SEQ ID NO: 58660 - RNA, 33 nt, synthetic construct
  misc_feature 1..33: note = Probable ATP-dependent RNA helicase DDX47 (195-205)
  source 1..33: mol_type = other RNA
aagaccttcctgtttagcgccacaatgactaaa

SEQ ID NO: 58661 - RNA, 27 nt, synthetic construct
  misc_feature 1..27: note = Cytoplasmic dynein 1 heavy chain 1 (872-880)
  source 1..27: mol_type = other RNA
aagaccttcagcgagatcctgaacaga

SEQ ID NO: 58662 - RNA, 27 nt, synthetic construct
  misc_feature 1..27: note = Chromodomain Y-like protein (93-101)
  source 1..27: mol_type = other RNA
aagaccagccccaaagccctggtgatc

SEQ ID NO: 58663 - RNA, 36 nt, synthetic construct
  misc_feature 1..36: note = Protein polybromo-1 (260-271)
  source 1..36: mol_type = other RNA
aagacctacaacgagcccggcagccaggtgttcaaa

SEQ ID NO: 58664 - RNA, 27 nt, synthetic construct
  misc_feature 1..27: note = 60S ribosomal protein L7a (11-19)
  source 1..27: mol_type = other RNA
aaggtggcccccgctcctgcagtcgtt

SEQ ID NO: 58665 - RNA, 27 nt, synthetic construct
  misc_feature 1..27: note = Procollagen-lysine,2-oxoglutarate 5-dioxygenase 2 (109-117)
  source 1..27: mol_type = other RNA
aaggtgttcgccggctactataccaaa

SEQ ID NO: 58666 - RNA, 27 nt, synthetic construct
  misc_feature 1..27: note = Nucleolin (370-378)
  source 1..27: mol_type = other RNA
aaggtgttcggcaacgagatcaaactg

SEQ ID NO: 58667 - RNA, 27 nt, synthetic construct
  misc_feature 1..27: note = F-box only protein 28 (103-111)
  source 1..27: mol_type = other RNA
aaggtgatcgacgagatttacagagtc

SEQ ID NO: 58668 - RNA, 27 nt, synthetic construct
  misc_feature 1..27: note = Trafficking protein particle complex subunit 5 (81-89)
  source 1..27: mol_type = other RNA
aaggtgctgggcgccctccttttcgtc

SEQ ID NO: 58669 - RNA, 30 nt, synthetic construct
  misc_feature 1..30: note = Long-chain-fatty-acid-CoA ligase 4 (347-356)
  source 1..30: mol_type = other RNA
aaggtgcaggagatgaactacatccaaaaa

SEQ ID NO: 58670 - RNA, 27 nt, synthetic construct
  misc_feature 1..27: note = 78 kDa glucose-regulated protein (146-154)
  source 1..27: mol_type = other RNA
aaggtgacccacgccgtcgttacagtg

SEQ ID NO: 58671 - RNA, 27 nt, synthetic construct
  misc_feature 1..27: note = 26S proteasome non-ATPase regulatory subunit 11 (409-417)
  source 1..27: mol_type = other RNA
aaggtggtcgacagcctgtacaacaaa

SEQ ID NO: 58672 - RNA, 27 nt, synthetic construct
  misc_feature 1..27: note = Tripartite motif-containing protein 34 (162-170)
  source 1..27: mol_type = other RNA
aagtacggcgtgttcgaggaaagcctg

SEQ ID NO: 58673 - RNA, 27 nt, synthetic construct
  misc_feature 1..27: note = Tubulin-tyrosine ligase (184-192)
  source 1..27: mol_type = other RNA
aagtacctggagcaccccctccttctg

SEQ ID NO: 58674 - RNA, 27 nt, synthetic construct
  misc_feature 1..27: note = DNA topoisomerase 3-beta-1 (425-433)
  source 1..27: mol_type = other RNA
aagtacctgcagagcaccatctccttc

SEQ ID NO: 58675 - RNA, 27 nt, synthetic construct
  misc_feature 1..27: note = Lysine-specific demethylase 2A (48-56)
  source 1..27: mol_type = other RNA
aagtacaacgccaatttcgtgaccttt

SEQ ID NO: 58676 - RNA, 27 nt, synthetic construct
  misc_feature 1..27: note = Hermansky-Pudlak syndrome 3 protein (16-24)
  source 1..27: mol_type = other RNA
aagtaccagatcattaacgaggaattc

SEQ ID NO: 58677 - RNA, 27 nt, synthetic construct
  misc_feature 1..27: note = G/T mismatch-specific thymine DNAosylase (221-229)
  source 1..27: mol_type = other RNA
aagtaccagcccagaatcgccgtgttc

SEQ ID NO: 58678 - RNA, 27 nt, synthetic construct
  misc_feature 1..27: note = Casein kinase II subunit alpha (49-57)
  source 1..27: mol_type = other RNA
aagtacagcgaggtgttcgaagccatc

SEQ ID NO: 58679 - RNA, 36 nt, synthetic construct
  misc_feature 1..36: note = Eukaryotic translation initiation factor 3 subunit D (58-69)
  source 1..36: mol_type = other RNA
aagtacagctcccagttcggcgggggatctcaatat

SEQ ID NO: 58680 - RNA, 27 nt, synthetic construct
  misc_feature 1..27: note = E3 ubiquitin-protein ligase listerin (1408-1416)
  source 1..27: mol_type = other RNA
aagtacgtgagctccgtcctgtctttc

SEQ ID NO: 58681 - RNA, 51 nt, synthetic construct
  misc_feature 1..51: note = Glutathione S-transferase P (194-210)
  source 1..51: mol_type = other RNA
ctggccagccccgagtacgtgaacctccctatcaatggcaacgggaagcag

SEQ ID NO: 58682 - RNA, 27 nt, synthetic construct
  misc_feature 1..27: note = Msx2-interacting protein (2085-2093)
  source 1..27: mol_type = other RNA
ctggccgtggacaagagcgcttccctc

SEQ ID NO: 58683 - RNA, 24 nt, synthetic construct
  misc_feature 1..24: note = Transducin beta-like protein 3 (781-788)
  source 1..24: mol_type = other RNA
ctggacttcctctggcacaacatg

SEQ ID NO: 58684 - RNA, 27 nt, synthetic construct
  misc_feature 1..27: note = Negative regulator of reactive oxygen species (186-194)
  source 1..27: mol_type = other RNA
ctggacctccagagaaactacatcttc

SEQ ID NO: 58685 - RNA, 27 nt, synthetic construct
  misc_feature 1..27: note = Protein S100-A9 (66-74)
  source 1..27: mol_type = other RNA
ctggacaccaacgccgataagcagctc

SEQ ID NO: 58686 - RNA, 30 nt, synthetic construct
  misc_feature 1..30: note = Ubiquitin-60S ribosomal protein L40 (55-64)
  source 1..30: mol_type = other RNA
ctggaggacggcagaaccctcagcgattac

SEQ ID NO: 58687 - RNA, 27 nt, synthetic construct
  misc_feature 1..27: note = Microtubule-actin cross-linking factor 1 isoform X1 (2426-2434)
  source 1..27: mol_type = other RNA
ctggaggaagacagcgccagagagatc

SEQ ID NO: 58688 - RNA, 24 nt, synthetic construct
  misc_feature 1..24: note = Coatomer subunit zeta-1 (62-69)
  source 1..24: mol_type = other RNA
ctggagggcctcaccgtggtctac

SEQ ID NO: 58689 - RNA, 27 nt, synthetic construct
  misc_feature 1..27: note = Phosphatidylinositol 4-kinase alpha (113-121)
  source 1..27: mol_type = other RNA
ctggagatccaggacaaggaatacctc

SEQ ID NO: 58690 - RNA, 24 nt, synthetic construct
  misc_feature 1..24: note = Vimentin (220-227)
  source 1..24: mol_type = other RNA
ctggagagaaaggtggaaagcctc

SEQ ID NO: 58691 - RNA, 27 nt, synthetic construct
  misc_feature 1..27: note = BAG family molecular chaperone regulator 2 (29-37)
  source 1..27: mol_type = other RNA
ctggagagcctcgaccagcttgaactg

SEQ ID NO: 58692 - RNA, 27 nt, synthetic construct
  misc_feature 1..27: note = Ubiquitin carboxyl-terminal hydrolase 11 (266-274)
  source 1..27: mol_type = other RNA
ctggagaccggccagctcatcattatg

SEQ ID NO: 58693 - RNA, 27 nt, synthetic construct
  misc_feature 1..27: note = ATP-dependent RNA helicase DDX1 (284-292)
  source 1..27: mol_type = other RNA
ctgatcgtggagcccagcagagaactc

SEQ ID NO: 58694 - RNA, 27 nt, synthetic construct
  misc_feature 1..27: note = 60S acidic ribosomal protein P0 (102-110)
  source 1..27: mol_type = other RNA
ctgctcgccaacaaggtgcccgctgca

SEQ ID NO: 58695 - RNA, 27 nt, synthetic construct
  misc_feature 1..27: note = Ras GTPase-activating-like protein IQGAP2 (984-992)
  source 1..27: mol_type = other RNA
ctgctcgcccccgtggtcaaggagatc

SEQ ID NO: 58696 - RNA, 27 nt, synthetic construct
  misc_feature 1..27: note = Nucleolar complex protein 4 homolog (333-341)
  source 1..27: mol_type = other RNA
ctgctcgaccccagcgtgttccacgtc

SEQ ID NO: 58697 - RNA, 27 nt, synthetic construct
  misc_feature 1..27: note = Inositol hexakisphosphate kinase 2 (76-84)
  source 1..27: mol_type = other RNA
ctgctcgagcccttcgtgcaccaggtc

SEQ ID NO: 58698 - RNA, 27 nt, synthetic construct
  misc_feature 1..27: note = TBC1 domain family member 9B (211-219)
  source 1..27: mol_type = other RNA
ctgctcttccccgagagcatcagagtg

SEQ ID NO: 58699 - RNA, 27 nt, synthetic construct
  misc_feature 1..27: note = Ganglioside GM2 activator (15-23)
  source 1..27: mol_type = other RNA
ctgctccttgccgctcccgcacaggcc

SEQ ID NO: 58700 - RNA, 27 nt, synthetic construct
  misc_feature 1..27: note = DNA damage-binding protein 1 (1050-1058)
  source 1..27: mol_type = other RNA
ctgctccttgacatgcagaacagactg

SEQ ID NO: 58701 - RNA, 27 nt, synthetic construct
  misc_feature 1..27: note = Retinoblastoma-associated protein (476-484)
  source 1..27: mol_type = other RNA
ctgctcaacgacaatatcttccacatg

SEQ ID NO: 58702 - RNA, 30 nt, synthetic construct
  misc_feature 1..30: note = RNA-binding protein 12B (432-441)
  source 1..30: mol_type = other RNA
ctgctctacgacgataagggcgtggggctt

SEQ ID NO: 58703 - RNA, 27 nt, synthetic construct
  misc_feature 1..27: note = Beta-galactoside alpha-2,6-sialyltransferase 1 (371-379)
  source 1..27: mol_type = other RNA
ctgctctacgagaagaaccttgtgaaa

SEQ ID NO: 58704 - RNA, 33 nt, synthetic construct
  misc_feature 1..33: note = Junction plakoglobin (16-26)
  source 1..33: mol_type = other RNA
ctgctctaccaggagggcgccaagatggctgtg

SEQ ID NO: 58705 - RNA, 36 nt, synthetic construct
  misc_feature 1..36: note = General transcription factor IIH subunit 5 (60-71)
  source 1..36: mol_type = other RNA
ctgatggaccagaacgccttcagcctcacccaaaag

SEQ ID NO: 58706 - RNA, 30 nt, synthetic construct
  misc_feature 1..30: note = Dynactin subunit 5 (164-173)
  source 1..30: mol_type = other RNA
ctgatgatcgacgtgaccaagagctactat

SEQ ID NO: 58707 - RNA, 27 nt, synthetic construct
  misc_feature 1..27: note = Protein SSXT (79-87)
  source 1..27: mol_type = other RNA
ctgcccgcccctccaacccagaacatg

SEQ ID NO: 58708 - RNA, 27 nt, synthetic construct
  misc_feature 1..27: note = N-terminal Xaa-Pro-Lys N-methyltransferase 1 (211-219)
  source 1..27: mol_type = other RNA
ctgcccgacgagatctaccacgtgtat

SEQ ID NO: 58709 - RNA, 27 nt, synthetic construct
  misc_feature 1..27: note = Ran-binding protein 9 (350-358)
  source 1..27: mol_type = other RNA
ctgcccaagcagcctccactcgccctt

SEQ ID NO: 58710 - RNA, 27 nt, synthetic construct
  misc_feature 1..27: note = E3 ubiquitin-protein ligase RNF216 (406-414)
  source 1..27: mol_type = other RNA
ctgcccagacctgtgccacagaacctc

SEQ ID NO: 58711 - RNA, 30 nt, synthetic construct
  misc_feature 1..30: note = SET domain-containing protein 5 (1382-1391)
  source 1..30: mol_type = other RNA
ctgcccagcgacctcagaaccatctccctt

SEQ ID NO: 58712 - RNA, 27 nt, synthetic construct
  misc_feature 1..27: note = Anaphase-promoting complex subunit 7 (132-140)
  source 1..27: mol_type = other RNA
ctgcccagcgagatcgaagtgaagtac

SEQ ID NO: 58713 - RNA, 27 nt, synthetic construct
  misc_feature 1..27: note = F-box/WD repeat-containing protein 7 (467-475)
  source 1..27: mol_type = other RNA
ctgcagttcgacggcatccacgtggtc

SEQ ID NO: 58714 - RNA, 39 nt, synthetic construct
  misc_feature 1..39: note = Keratin, type I cytoskeletal 10 (222-234)
  source 1..39: mol_type = other RNA
ctgcagatcgacaacgccagactcgctgcagatgacttc

SEQ ID NO: 58715 - RNA, 30 nt, synthetic construct
  misc_feature 1..30: note = Double-stranded RNA-binding protein Staufen homolog 1 (119-128)
  source 1..30: mol_type = other RNA
ctgcagaacgagcccctccctgaaagactt

SEQ ID NO: 58716 - RNA, 45 nt, synthetic construct
  misc_feature 1..45: note = HLA class I histocompatibility antigen, Cw-3 alpha chain (296-310)
  source 1..45: mol_type = other RNA
ctgagatgggagcccagctcccagcctaccatcccaattgtgggc

SEQ ID NO: 58717 - RNA, 24 nt, synthetic construct
  misc_feature 1..24: note = TRIO and F-actin-binding protein (42-49)
  source 1..24: mol_type = other RNA
ctgaccgacagctccctcaagtac

SEQ ID NO: 58718 - RNA, 27 nt, synthetic construct
  misc_feature 1..27: note = Pleckstrin homology domain-containing family A member 2 (315-323)
  source 1..27: mol_type = other RNA
ctgaccagacccggcagctcctctctc

SEQ ID NO: 58719 - RNA, 27 nt, synthetic construct
  misc_feature 1..27: note = DNA topoisomerase 2-beta (566-574)
  source 1..27: mol_type = other RNA
ctgacctacaacgacttcatcaataag

SEQ ID NO: 58720 - RNA, 27 nt, synthetic construct
  misc_feature 1..27: note = Suppressor of SWI4 1 homolog (117-125)
  source 1..27: mol_type = other RNA
ctggtgagagacgtcgttagctccctc

SEQ ID NO: 58721 - RNA, 30 nt, synthetic construct
  misc_feature 1..30: note = Leucine-rich repeat-containing protein 20 (34-43)
  source 1..30: mol_type = other RNA
ctggtgagcttccccatcggcatttacaag

SEQ ID NO: 58722 - RNA, 33 nt, synthetic construct; identical to SEQ ID NO: 34495
  misc_feature 1..33: note = Beta-actin-like protein 2 (9-19)
  source 1..33: mol_type = other RNA

SEQ ID NO: 58723 - RNA, 27 nt, synthetic construct
  misc_feature 1..27: note = Peptidyl-prolyl cis-trans isomerase FKBP4 (410-418)
  source 1..27: mol_type = other RNA
ctgtacgccaacatgttcgagagactc

SEQ ID NO: 58724 - RNA, 27 nt, synthetic construct
  misc_feature 1..27: note = AKT-interacting protein (201-209)
  source 1..27: mol_type = other RNA
ctgtacgagaaggacatccagctcttc

SEQ ID NO: 58725 - RNA, 27 nt, synthetic construct
  misc_feature 1..27: note = Serine palmitoyltransferase 2 (282-290)
  source 1..27: mol_type = other RNA
ctgtacctcgacgaggcccacagcatc

SEQ ID NO: 58726 - RNA, 27 nt, synthetic construct
  misc_feature 1..27: note = DNA-dependent protein kinase catalytic subunit (3377-3385)
  source 1..27: mol_type = other RNA
ctgtaccagagagccttccaacacctc

SEQ ID NO: 58727 - RNA, 27 nt, synthetic construct
  misc_feature 1..27: note = Stimulator of interferon genes protein (214-222)
  source 1..27: mol_type = other RNA
atggccgaccccaacatcagattcctg

SEQ ID NO: 58728 - RNA, 24 nt, synthetic construct
  misc_feature 1..24: note = Putative V-set and immunoglobulin domain-containing-like protein IGHV4OR15-8 (1-8)
  source 1..24: mol_type = other RNA
atggacctgctccacaagaacatg

SEQ ID NO: 58729 - RNA, 27 nt, synthetic construct
  misc_feature 1..27: note = Ig kappa chain V-I region HK102 (1-9)
  source 1..27: mol_type = other RNA
atggacatgagagtgcccgcccagctg

SEQ ID NO: 58730 - RNA, 27 nt, synthetic construct
  misc_feature 1..27: note = Hypoxia-inducible factor 1-alpha (632-640)
  source 1..27: mol_type = other RNA
atggaggacatcaagattctgatagcc

SEQ ID NO: 58731 - RNA, 24 nt, synthetic construct
  misc_feature 1..24: note = Ras GTPase-activating protein-binding protein 1 (183-190)
  source 1..24: mol_type = other RNA
atggaggaacacctggaggaaccc

SEQ ID NO: 58732 - RNA, 27 nt, synthetic construct
  misc_feature 1..27: note = Vimentin (347-355)
  source 1..27: mol_type = other RNA
atggaggaaaacttcgccgtggaggct

SEQ ID NO: 58733 - RNA, 30 nt, synthetic construct
  misc_feature 1..30: note = Protein S100-A10 (5-14)
  source 1..30: mol_type = other RNA
atggagcacgccatggaaaccatgatgttc

SEQ ID NO: 58734 - RNA, 27 nt, synthetic construct
  misc_feature 1..27: note = Actin, alpha skeletal muscle (84-92)
  source 1..27: mol_type = other RNA
atggagaagatctggcaccataccttc

SEQ ID NO: 58735 - RNA, 27 nt, synthetic construct
  misc_feature 1..27: note = Arachidonate 5-lipoxygenase (186-194)
  source 1..27: mol_type = other RNA
atggagaacctgttcatcaatagattt

SEQ ID NO: 58736 - RNA, 27 nt, synthetic construct
  misc_feature 1..27: note = Protein diaphanous homolog 1 (496-504)
  source 1..27: mol_type = other RNA
atggagagcgacttcgaacagaagctg

SEQ ID NO: 58737 - RNA, 27 nt, synthetic construct
  misc_feature 1..27: note = Cytochrome c oxidase subunit 2 (20-28)
  source 1..27: mol_type = other RNA
atggagaccgtgtggacaatcctgccc

SEQ ID NO: 58738 - RNA, 27 nt, synthetic construct
  misc_feature 1..27: note = Poly(A)-specific ribonuclease PARN (243-251)
  source 1..27: mol_type = other RNA
atgctgctcgacgtgatgcacaccgtc

SEQ ID NO: 58739 - RNA, 27 nt, synthetic construct
  misc_feature 1..27: note = DNA ligase 1 (393-401)
  source 1..27: mol_type = other RNA
atgctgccccctccaccgctcaccgcc

SEQ ID NO: 58740 - RNA, 30 nt, synthetic construct
  misc_feature 1..30: note = Eukaryotic translation initiation factor 3 subunit A (514-523)
  source 1..30: mol_type = other RNA
atgcccagcgagcagatcagaaaccaactg

SEQ ID NO: 58741 - RNA, 27 nt, synthetic construct
  misc_feature 1..27: note = U2 snRNP-associated SURP motif-containing protein (392-400)
  source 1..27: mol_type = other RNA
atgaccgagagcaagttctccaaatac

SEQ ID NO: 58742 - RNA, 27 nt, synthetic construct
  misc_feature 1..27: note = Probable ATP-dependent RNA helicase DDX6 (168-176)
  source 1..27: mol_type = other RNA
atggtgatcgtccccaccagagagctg

SEQ ID NO: 58743 - RNA, 27 nt, synthetic construct
  misc_feature 1..27: note = Staphylococcal nuclease domain-containing protein 1 (327-335)
  source 1..27: mol_type = other RNA
aacgccgacgctatcgtggtcaagctg

SEQ ID NO: 58744 - RNA, 30 nt, synthetic construct; identical to SEQ ID NO: 34517
  misc_feature 1..30: note = Ceruloplasmin (651-660)
  source 1..30: mol_type = other RNA

SEQ ID NO: 58745 - RNA, 27 nt, synthetic construct
  misc_feature 1..27: note = HLA class I histocompatibility antigen, A-3 alpha chain (151-159)
  source 1..27: mol_type = other RNA
aacgaggacctgagaagctggaccgcc

SEQ ID NO: 58746 - RNA, 33 nt, synthetic construct
  misc_feature 1..33: note = Nuclear pore complex protein Nup50 (371-381)
  source 1..33: mol_type = other RNA
aacgagttcaaggaaaaaggcatcgggaccctg

SEQ ID NO: 58747 - RNA, 24 nt, synthetic construct
  misc_feature 1..24: note = 40S ribosomal protein S3 (22-29)
  source 1..24: mol_type = other RNA
aacgagttcctgaccagagaactc

SEQ ID NO: 58748 - RNA, 27 nt, synthetic construct
  misc_feature 1..27: note = Adenylyl cyclase-associated protein 1 (449-457)
  source 1..27: mol_type = other RNA
aacgagttccccgtgcctgaacagttt

SEQ ID NO: 58749 - RNA, 30 nt, synthetic construct
  misc_feature 1..30: note = Protein C-ets-1 (86-95)
  source 1..30: mol_type = other RNA
aacgagttcagcctgaagggcgtggacttt

SEQ ID NO: 58750 - RNA, 27 nt, synthetic construct
  misc_feature 1..27: note = Midasin (329-337)
  source 1..27: mol_type = other RNA
aacgagatcctgggcagcctcagatgg

SEQ ID NO: 58751 - RNA, 24 nt, synthetic construct
  misc_feature 1..24: note = Guanine nucleotide-binding protein-like 3-like protein (192-199)
  source 1..24: mol_type = other RNA
aacgagctgcccaccgtggccttc

SEQ ID NO: 58752 - RNA, 30 nt, synthetic construct
  misc_feature 1..30: note = Trinucleotide repeat-containing gene 6B protein (723-732)
  source 1..30: mol_type = other RNA
aacgagaatcccagcaaggaccagggctgg

SEQ ID NO: 58753 - RNA, 30 nt, synthetic construct
  misc_feature 1..30: note = DNA dC-dU-editing enzyme APOBEC-3B (23-32)
  source 1..30: mol_type = other RNA
aacgagcccatcctgtacggcagaagctat

SEQ ID NO: 58754 - RNA, 27 nt, synthetic construct
  misc_feature 1..27: note = Catenin alpha-1 (169-177)
  source 1..27: mol_type = other RNA
aacgagcaggacctgggcatccaatac

SEQ ID NO: 58755 - RNA, 30 nt, synthetic construct
  misc_feature 1..30: note = Cytoplasmic FMR1-interacting protein 2 (99-108)
  source 1..30: mol_type = other RNA
aacgagcagcccaatagagtggaaatctac

SEQ ID NO: 58756 - RNA, 27 nt, synthetic construct
  misc_feature 1..27: note = Four and a half LIM domains protein 2 (121-129)
  source 1..27: mol_type = other RNA
aacgagagcctgttcggcaagaaatac

SEQ ID NO: 58757 - RNA, 24 nt, synthetic construct
  misc_feature 1..24: note = Protein disulfide-isomerase (430-437)
  source 1..24: mol_type = other RNA
aacgaggtggaagccgtcaaggtt

SEQ ID NO: 58758 - RNA, 27 nt, synthetic construct
  misc_feature 1..27: note = Radial spoke head protein 3 homolog (440-448)
  source 1..27: mol_type = other RNA
aacgaggtggaaaagaccatggagtac

SEQ ID NO: 58759 - RNA, 24 nt, synthetic construct
  misc_feature 1..24: note = Nucleosome assembly protein 1-like 1 (226-233)
  source 1..24: mol_type = other RNA
aacgaggtgctgaccaagacatac

SEQ ID NO: 58760 - RNA, 27 nt, synthetic construct
  misc_feature 1..27: note = Collagen alpha-3(VI) chain (2246-2254)
  source 1..27: mol_type = other RNA
aacgaggtgaccacagaaatcagattc

SEQ ID NO: 58761 - RNA, 24 nt, synthetic construct
  misc_feature 1..24: note = 60S ribosomal protein L31 (18-25)
  source 1..24: mol_type = other RNA
aacgaggtggtcaccagagaatac

SEQ ID NO: 58762 - RNA, 27 nt, synthetic construct
  misc_feature 1..27: note = Synaptobrevin homolog YKT6 (83-91)
  source 1..27: mol_type = other RNA
aacgagtaccccagcagagtggccttc

SEQ ID NO: 58763 - RNA, 27 nt, synthetic construct
  misc_feature 1..27: note = 26S proteasome non-ATPase regulatory subunit 4 (18-26)
  source 1..27: mol_type = other RNA
aacggcgacttcctgcccaccagactc

SEQ ID NO: 58764 - RNA, 39 nt, synthetic construct
  misc_feature 1..39: note = Eukaryotic translation initiation factor 3 subunit D (57-69)
  source 1..39: mol_type = other RNA
aacaagtacagctcccagttcggcgggggatctcaatat

SEQ ID NO: 58765 - RNA, 30 nt, synthetic construct
  misc_feature 1..30: note = Structural maintenance of chromosomes protein 4 (634-643)
  source 1..30: mol_type = other RNA
aacctggaccaggccaccagagtggcttac

SEQ ID NO: 58766 - RNA, 27 nt, synthetic construct
  misc_feature 1..27: note = Heterogeneous nuclear ribonucleoprotein U-like protein 2 (358-366)
  source 1..27: mol_type = other RNA
aaccccgagaagagatacaatgtgctg

SEQ ID NO: 58767 - RNA, 27 nt, synthetic construct
  misc_feature 1..27: note = 2'-5'-oligoadenylate synthase 1 (128-136)
  source 1..27: mol_type = other RNA
aaccccagagccctgagcttcgtgctc

SEQ ID NO: 58768 - RNA, 30 nt, synthetic construct
  misc_feature 1..30: note = Cleavage and polyadenylation specificity factor subunit 3 (308-317)
  source 1..30: mol_type = other RNA
aaccccagaaataccgaggccgtgacactg

SEQ ID NO: 58769 - RNA, 27 nt, synthetic construct
  misc_feature 1..27: note = ETS translocation variant 5 (210-218)
  source 1..27: mol_type = other RNA
aaccagtaccccagcgagcaaagattc

SEQ ID NO: 58770 - RNA, 27 nt, synthetic construct
  misc_feature 1..27: note = Protein TASOR (346-354)
  source 1..27: mol_type = other RNA
aacaccgacagaaatatcgataagtac

SEQ ID NO: 58771 - RNA, 51 nt, synthetic construct
  misc_feature 1..51: note = Actin, cytoplasmic 2 (35-51)
  source 1..51: mol_type = other RNA
aacaccgtgctgagcggcgggacaactatgtaccccggaatcgccgacaga

SEQ ID NO: 58772 - RNA, 27 nt, synthetic construct
  misc_feature 1..27: note = ORM1-like protein 2 (53-61)
  source 1..27: mol_type = other RNA
aacgtgatccacaatctggccacctac

SEQ ID NO: 58773 - RNA, 27 nt, synthetic construct
  misc_feature 1..27: note = Unconventional myosin-Ic (852-860)
  source 1..27: mol_type = other RNA
aactacccccagagcgtgcctagactg

SEQ ID NO: 58774 - RNA, 27 nt, synthetic construct
  misc_feature 1..27: note = Myotubularin-related protein 6 (104-112)
  source 1..27: mol_type = other RNA
aactacagcaatatcagattccagttt

SEQ ID NO: 58775 - RNA, 27 nt, synthetic construct
  misc_feature 1..27: note = Actin-related protein 2/3 complex subunit 3 (2-10)
  source 1..27: mol_type = other RNA
cccgcctaccacagctccctgatggac

SEQ ID NO: 58776 - RNA, 30 nt, synthetic construct
  misc_feature 1..30: note = NADH dehydrogenase (ubiquinone) 1 beta subcomplex subunit 11, mitochondrial (144-153)
  source 1..30: mol_type = other RNA
cccagcaagatccagctgcctgaggacgaa

SEQ ID NO: 58777 - RNA, 27 nt, synthetic construct
  misc_feature 1..27: note = Probable helicase with zinc finger domain (955-963)
  source 1..27: mol_type = other RNA
ccctacgccgaccaggtgttcagaatc

SEQ ID NO: 58778 - RNA, 27 nt, synthetic construct
  misc_feature 1..27: note = Polypeptide N-acetylgalactosaminyltransferase 2 (407-415)
  source 1..27: mol_type = other RNA
ccctacggcaacatccagagcagactg

SEQ ID NO: 58779 - RNA, 27 nt, synthetic construct
  misc_feature 1..27: note = Nucleolin (401-409)
  source 1..27: mol_type = other RNA
ccctacaaggtgacccaggacgagctg

SEQ ID NO: 58780 - RNA, 48 nt, synthetic construct
  misc_feature 1..48: note = Cytochrome c oxidase subunit 5B, mitochondrial (61-76)
  source 1..48: mol_type = other RNA
ccctacaacgtgctggcccctaagggcgctagcgggaccagagaggac

SEQ ID NO: 58781 - RNA, 27 nt, synthetic construct
  misc_feature 1..27: note = Dol-P-Man:Man(7)GlcNAc(2)-PP-Dol alpha-1,6-mannosyltransferase (29-37)
  source 1..27: mol_type = other RNA
ccctacaccaaggtggaggaaagcttc

SEQ ID NO: 58782 - RNA, 27 nt, synthetic construct
  misc_feature 1..27: note = Serglycin (81-89)
  source 1..27: mol_type = other RNA
caggacctgaacagaatcttccccctc

SEQ ID NO: 58783 - RNA, 27 nt, synthetic construct
  misc_feature 1..27: note = Paraneoplastic antigen Ma1 (117-125)
  source 1..27: mol_type = other RNA
caggacgtggccagagtcctgggcttc

SEQ ID NO: 58784 - RNA, 27 nt, synthetic construct
  misc_feature 1..27: note = UDP-glucuronic acid decarboxylase 1 (248-256)
  source 1..27: mol_type = other RNA
caggagggcgtggaagtcagagttgcc

SEQ ID NO: 58785 - RNA, 27 nt, synthetic construct
  misc_feature 1..27: note = Talin-1 (1707-1715)
  source 1..27: mol_type = other RNA
caggagatcagccacctgattgaaccc

SEQ ID NO: 58786 - RNA, 27 nt, synthetic construct
  misc_feature 1..27: note = Integrin beta-2 (422-430)
  source 1..27: mol_type = other RNA
caggagcaaagcttcgtgatcagagcc

SEQ ID NO: 58787 - RNA, 27 nt, synthetic construct
  misc_feature 1..27: note = Forkhead-associated domain-containing protein 1 (519-527)
  source 1..27: mol_type = other RNA
cagctgatcgagaagattacccaagtg

SEQ ID NO: 58788 - RNA, 27 nt, synthetic construct
  misc_feature 1..27: note = Integrin alpha-V (217-225)
  source 1..27: mol_type = other RNA
caggtggccgagatcgtcagcaagtac

SEQ ID NO: 58789 - RNA, 27 nt, synthetic construct
  misc_feature 1..27: note = Biogenesis of lysosome-related organelles complex 1 subunit 1 (64-72)
  source 1..27: mol_type = other RNA
caggtgcaagccgctcagttcgcaaag

SEQ ID NO: 58790 - RNA, 27 nt, synthetic construct
  misc_feature 1..27: note = CCR4-NOT transcription complex subunit 1 (465-473)
  source 1..27: mol_type = other RNA
cagtacgagcaagtgaagcagctgttc

SEQ ID NO: 58791 - RNA, 27 nt, synthetic construct
  misc_feature 1..27: note = Phosphatidylinositol 3,4,5-trisphosphate-dependent Rac exchanger 1 protein (1095-1103)
  source 1..27: mol_type = other RNA
cagtacgtgacccaaatcaacagactg

SEQ ID NO: 58792 - RNA, 36 nt, synthetic construct
  misc_feature 1..36: note = Non-POU domain-containing octamer-binding protein (367-378)
  source 1..36: mol_type = other RNA
agagccgctcccggcgcagagttcgcccctaacaag

SEQ ID NO: 58793 - RNA, 27 nt, synthetic construct
  misc_feature 1..27: note = SWI/SNF-related matrix-associated actin-dependent regulator of chromatin subfamily E member 1-related (135-143)
  source 1..27: mol_type = other RNA
agagcctaccagcaaagcgaggcttat

SEQ ID NO: 58794 - RNA, 24 nt, synthetic construct
  misc_feature 1..24: note = Zinc finger protein 36, C3H1 type-like 2 (239-246)
  source 1..24: mol_type = other RNA
agagacgccctgcacctcggcttc

SEQ ID NO: 58795 - RNA, 27 nt, synthetic construct
  misc_feature 1..27: note = Chloride intracellular channel protein 6 (640-648)
  source 1..27: mol_type = other RNA
agagacttcgagtttcccagcgaaatg

SEQ ID NO: 58796 - RNA, 24 nt, synthetic construct
  misc_feature 1..24: note = Rab3 GTPase-activating protein non-catalytic subunit (18-25)
  source 1..24: mol_type = other RNA
agagacttcctgtttccccacctc

SEQ ID NO: 58797 - RNA, 24 nt, synthetic construct
  misc_feature 1..24: note = 60S ribosomal protein L9 (36-43)
  source 1..24: mol_type = other RNA
agagacttcaaccacatcaatgtg

SEQ ID NO: 58798 - RNA, 27 nt, synthetic construct
  misc_feature 1..27: note = Guanylate-binding protein 4 (196-204)
  source 1..27: mol_type = other RNA
agagacttcaccctggagctcaagctt

SEQ ID NO: 58799 - RNA, 27 nt, synthetic construct
  misc_feature 1..27: note = Alkyldihydroxyacetonephosphate synthase, peroxisomal (515-523)
  source 1..27: mol_type = other RNA
agagacctggccctcgagtactatgtg

SEQ ID NO: 58800 - RNA, 24 nt, synthetic construct
  misc_feature 1..24: note = Cell division control protein 42 homolog (147-154)
  source 1..24: mol_type = other RNA
agagacctgaaggccgtgaaatac

SEQ ID NO: 58801 - RNA, 24 nt, synthetic construct
  misc_feature 1..24: note = 40S ribosomal protein S27-like (5-12)
  source 1..24: mol_type = other RNA
agagacctgctccaccccagcctt

SEQ ID NO: 58802 - RNA, 27 nt, synthetic construct
  misc_feature 1..27: note = Septin-9 (519-527)
  source 1..27: mol_type = other RNA
agagacctgctcatcaggacccacatg

SEQ ID NO: 58803 - RNA, 27 nt, synthetic construct
  misc_feature 1..27: note = Eukaryotic translation initiation factor 3 subunit C (586-594)
  source 1..27: mol_type = other RNA
agagacctgatgctcatgagccacctt

SEQ ID NO: 58804 - RNA, 33 nt, synthetic construct
  misc_feature 1..33: note = Macrosialin (238-248)
  source 1..33: mol_type = other RNA
agagacctgcaggcccccctcggccaaagcttc

SEQ ID NO: 58805 - RNA, 27 nt, synthetic construct
  misc_feature 1..27: note = E3 ubiquitin-protein ligase RNF213 (160-168)
  source 1..27: mol_type = other RNA
agagacctgagccacatcctcggcatt

SEQ ID NO: 58806 - RNA, 27 nt, synthetic construct
  misc_feature 1..27: note = Serine/threonine-protein kinase RIO1 (201-209)
  source 1..27: mol_type = other RNA
agagacatggatatcattatgaagctg

SEQ ID NO: 58807 - RNA, 27 nt, synthetic construct
  misc_feature 1..27: note = Transcription factor 25 (650-658)
  source 1..27: mol_type = other RNA
agagacatgatggccaacttccacctg

SEQ ID NO: 58808 - RNA, 24 nt, synthetic construct
  misc_feature 1..24: note = Transcription elongation factor A protein 1 (123-130)
  source 1..24: mol_type = other RNA
agagacacctacgtgagctccttc

SEQ ID NO: 58809 - RNA, 27 nt, synthetic construct
  misc_feature 1..27: note = Growth arrest and DNA damage-inducible protein GADD45 alpha (67-75)
  source 1..27: mol_type = other RNA
agagacgtggccctgcagatccacttc

SEQ ID NO: 58810 - RNA, 24 nt, synthetic construct
  misc_feature 1..24: note = Transmembrane protein 14A (51-58)
  source 1..24: mol_type = other RNA
agagacgtgaaggtcagcctgttc

SEQ ID NO: 58811 - RNA, 27 nt, synthetic construct
  misc_feature 1..27: note = TraB domain-containing protein (259-267)
  source 1..27: mol_type = other RNA
agagacgtgtacctgacctatatgctc

SEQ ID NO: 58812 - RNA, 30 nt, synthetic construct
  misc_feature 1..30: note = Pyruvate kinase PKM (383-392)
  source 1..30: mol_type = other RNA
agagaggccgaagctgcaatctaccacctg

SEQ ID NO: 58813 - RNA, 27 nt, synthetic construct
  misc_feature 1..27: note = Protein nepro homolog (226-234)
  source 1..27: mol_type = other RNA
agagaggccgaaagcttcacccagctg

SEQ ID NO: 58814 - RNA, 30 nt, synthetic construct
  misc_feature 1..30: note = 40S ribosomal protein S4, X isoform (39-48)
  source 1..30: mol_type = other RNA
agagagtgcctgcccctcatcattttcctt

SEQ ID NO: 58815 - RNA, 27 nt, synthetic construct
  misc_feature 1..27: note = T-complex protein 1 subunit gamma (260-268)
  source 1..27: mol_type = other RNA
agagaggaagacttcaccaggatcctg

SEQ ID NO: 58816 - RNA, 33 nt, synthetic construct
  misc_feature 1..33: note = Transcription factor E2F7 (433-443)
  source 1..33: mol_type = other RNA
agagaggaacagggcagcgggggatactccctg

SEQ ID NO: 58817 - RNA, 24 nt, synthetic construct
  misc_feature 1..24: note = Ribonucleoside-diphosphate reductase subunit M2 (190-197)
  source 1..24: mol_type = other RNA
agagagttcctgtttaacgccatc

SEQ ID NO: 58818 - RNA, 27 nt, synthetic construct
  misc_feature 1..27: note = DNA-dependent protein kinase catalytic subunit (1087-1095)
  source 1..27: mol_type = other RNA
agagagttcagggaagaggaaagcctg

SEQ ID NO: 58819 - RNA, 24 nt, synthetic construct
  misc_feature 1..24: note = Vacuolar protein sorting-associated protein 51 homolog (490-497)
  source 1..24: mol_type = other RNA
agagagggcctgatcgtggggttc

SEQ ID NO: 58820 - RNA, 27 nt, synthetic construct
  misc_feature 1..27: note = Torsin-4A (350-358)
  source 1..27: mol_type = other RNA
agagagcaccccctgtggcaggccgct

SEQ ID NO: 58821 - RNA, 27 nt, synthetic construct
  misc_feature 1..27: note = Vimentin (186-194)
  source 1..27: mol_type = other RNA
agagagaagctgcaggaagagatgctc

SEQ ID NO: 58822 - RNA, 27 nt, synthetic construct
  misc_feature 1..27: note = Protein CEBPZOS (68-76)
  source 1..27: mol_type = other RNA
agagagctggaccagaagacctggctc

SEQ ID NO: 58823 - RNA, 27 nt, synthetic construct
  misc_feature 1..27: note = Extended synaptotagmin-1 (125-133)
  source 1..27: mol_type = other RNA
agagagctgcccgcctgggtgagcttc

SEQ ID NO: 58824 - RNA, 27 nt, synthetic construct
  misc_feature 1..27: note = DNA-directed RNA polymerase II subunit RPB1 (1380-1388)
  source 1..27: mol_type = other RNA
agagagctgtaccacgtgatcagcttc

SEQ ID NO: 58825 - RNA, 24 nt, synthetic construct
  misc_feature 1..24: note = HLA class I histocompatibility antigen, B-57 alpha chain (99-106)
  source 1..24: mol_type = other RNA
agagagaacctgaggatcgccctc

SEQ ID NO: 58826 - RNA, 27 nt, synthetic construct
  misc_feature 1..27: note = Ras-related protein M-Ras (116-124)
  source 1..27: mol_type = other RNA
agagagagcttccccatgatcctggtg

SEQ ID NO: 58827 - RNA, 27 nt, synthetic construct
  misc_feature 1..27: note = Large proline-rich protein BAG6 (814-822)
  source 1..27: mol_type = other RNA
agagagagcttctccctggtgcaggtc

SEQ ID NO: 58828 - RNA, 27 nt, synthetic construct
  misc_feature 1..27: note = Vimentin (424-432)
  source 1..27: mol_type = other RNA
agagagaccaacctggacagcctcccc

SEQ ID NO: 58829 - RNA, 30 nt, synthetic construct
  misc_feature 1..30: note = DNA polymerase delta subunit 2 (109-118)
  source 1..30: mol_type = other RNA
agagaggtgagcgaagagcacaacctgctc

SEQ ID NO: 58830 - RNA, 27 nt, synthetic construct
  misc_feature 1..27: note = Zinc finger protein 343 (243-251)
  source 1..27: mol_type = other RNA
agagagtacgaacccgaccacaacctg

SEQ ID NO: 58831 - RNA, 27 nt, synthetic construct
  misc_feature 1..27: note = Desmin (386-394)
  source 1..27: mol_type = other RNA
agagagtaccaggacctgctcaacgtg

SEQ ID NO: 58832 - RNA, 27 nt, synthetic construct
  misc_feature 1..27: note = ADP-ribosylation factor 6 (95-103)
  source 1..27: mol_type = other RNA
agaatcgacgaggccaggcaggaactg

SEQ ID NO: 58833 - RNA, 42 nt, synthetic construct
  misc_feature 1..42: note = Heat shock 70 kDa protein 1-like (173-186)
  source 1..42: mol_type = other RNA
agaatcattaacgagcccaccgccgctgcaatagcctacggc

SEQ ID NO: 58834 - RNA, 27 nt, synthetic construct
  misc_feature 1..27: note = Chromobox protein homolog 6 (91-99)
  source 1..27: mol_type = other RNA
agaatcagcgacgtgcacttctccgtc

SEQ ID NO: 58835 - RNA, 27 nt, synthetic construct
  misc_feature 1..27: note = Vimentin (410-418)
  source 1..27: mol_type = other RNA
agaatcagcctgcccctccctaacttc

SEQ ID NO: 58836 - RNA, 30 nt, synthetic construct
  misc_feature 1..30: note = Discoidin, CUB and LCCL domain-containing protein 2 (86-95)
  source 1..30: mol_type = other RNA
agaatctacaacggcattggggtgagcagg

SEQ ID NO: 58837 - RNA, 27 nt, synthetic construct
  misc_feature 1..27: note = Polyribonucleotide 5'-hydroxyl-kinase Clp1 (206-214)
  source 1..27: mol_type = other RNA
agactggccgacgtgttcaaccagagg

SEQ ID NO: 58838 - RNA, 27 nt, synthetic construct
  misc_feature 1..27: note = Clathrin heavy chain 1 (1226-1234)
  source 1..27: mol_type = other RNA
agactggccagcaccctcgtgcacctt

SEQ ID NO: 58839 - RNA, 27 nt, synthetic construct
  misc_feature 1..27: note = Transcription elongation factor SPT6 (292-300)
  source 1..27: mol_type = other RNA
agactgttcgagaagatgcaggcctac

SEQ ID NO: 58840 - RNA, 33 nt, synthetic construct
  misc_feature 1..33: note = Deoxyhypusine synthase (263-273)
  source 1..33: mol_type = other RNA
agactgatcaacacccaggccattttcgctaag

SEQ ID NO: 58841 - RNA, 27 nt, synthetic construct
  misc_feature 1..27: note = Lysophospholipid acyltransferase 5 (293-301)
  source 1..27: mol_type = other RNA
agactgatccaggagagccccaccctc

SEQ ID NO: 58842 - RNA, 27 nt, synthetic construct
  misc_feature 1..27: note = trabeculin-alpha (476-484)
  source 1..27: mol_type = other RNA
agactgcaggacgagctcgtgaccctt

SEQ ID NO: 58843 - RNA, 27 nt, synthetic construct
  misc_feature 1..27: note = Gamma-tubulin complex component 5 (326-334)
  source 1..27: mol_type = other RNA
agactgcaggagttcatcgacgaagtg

SEQ ID NO: 58844 - RNA, 27 nt, synthetic construct
  misc_feature 1..27: note = Nuclear cap-binding protein subunit 1 (694-702)
  source 1..27: mol_type = other RNA
agactgcaggagaaggtggaaagcgcc

SEQ ID NO: 58845 - RNA, 27 nt, synthetic construct
  misc_feature 1..27: note = Integrin beta-7 (181-189)
  source 1..27: mol_type = other RNA
agactgcaggaggtgacccacagcgtc

SEQ ID NO: 58846 - RNA, 27 nt, synthetic construct
  misc_feature 1..27: note = 40S ribosomal protein S27 (87-95)
  source 1..27: mol_type = other RNA
agactggtgcagagccccaactcctac

SEQ ID NO: 58847 - RNA, 30 nt, synthetic construct
  misc_feature 1..30: note = Serpin H1 (133-142)
  source 1..30: mol_type = other RNA
agactgtacggccccagctccgtgtctttc

SEQ ID NO: 58848 - RNA, 27 nt, synthetic construct
  misc_feature 1..27: note = Tetratricopeptide repeat protein 30A (82-90)
  source 1..27: mol_type = other RNA
agactgtaccaggcccaagctctctat

SEQ ID NO: 58849 - RNA, 27 nt, synthetic construct
  misc_feature 1..27: note = DNA mismatch repair protein Msh2 (406-414)
  source 1..27: mol_type = other RNA
agactgtaccagggcatcaaccaactc

SEQ ID NO: 58850 - RNA, 27 nt, synthetic construct
  misc_feature 1..27: note = Probable 18S rRNA (guanine-N(7))-methyltransferase (31-39)
  source 1..27: mol_type = other RNA
agaatgatcgacattcagaccaggatg

SEQ ID NO: 58851 - RNA, 27 nt, synthetic construct
  misc_feature 1..27: note = 26S protease regulatory subunit 4 (411-419)
  source 1..27: mol_type = other RNA
agaatgaaggtgaccaacgaggacttc

SEQ ID NO: 58852 - RNA, 27 nt, synthetic construct
  misc_feature 1..27: note = A-kinase anchor protein 8-like (199-207)
  source 1..27: mol_type = other RNA
agaatgtgggaggaccccatgggcgcc

SEQ ID NO: 58853 - RNA, 33 nt, synthetic construct
  misc_feature 1..33: note = Keratin, type I cytoskeletal 10 (99-109)
  source 1..33: mol_type = other RNA
agaaacgtgagcaccggcgacgtcaatgttgag

SEQ ID NO: 58854 - RNA, 27 nt, synthetic construct
  misc_feature 1..27: note = Ubiquitin-like modifier-activating enzyme 1 (325-333)
  source 1..27: mol_type = other RNA
agacccgcccagctgcacatcggcttc

SEQ ID NO: 58855 - RNA, 33 nt, synthetic construct
  misc_feature 1..33: note = Eukaryotic translation initiation factor 4 gamma 1 (191-201)
  source 1..33: mol_type = other RNA
agacccgacgataggagccagggcgccatcatt

SEQ ID NO: 58856 - RNA, 27 nt, synthetic construct
  misc_feature 1..27: note = Microtubule-associated protein 4 (670-678)
  source 1..27: mol_type = other RNA
agacccgaggaaggcaggcctgtggtc

SEQ ID NO: 58857 - RNA, 27 nt, synthetic construct
  misc_feature 1..27: note = Syntenin-1 (193-201)
  source 1..27: mol_type = other RNA
agacccttcgagaggaccatcacaatg

SEQ ID NO: 58858 - RNA, 27 nt, synthetic construct
  misc_feature 1..27: note = Cellular tumor antigen p53 (25-33)
  source 1..27: mol_type = other RNA
agacccatcctgaccattataacactc

SEQ ID NO: 58859 - RNA, 27 nt, synthetic construct
  misc_feature 1..27: note = Methionine adenosyltransferase 2 subunit beta (277-285)
  source 1..27: mol_type = other RNA
agacccatcaccgacagccctgtgctg

SEQ ID NO: 58860 - RNA, 27 nt, synthetic construct
  misc_feature 1..27: note = U2 snRNP-associated SURP motif-containing protein (430-438)
  source 1..27: mol_type = other RNA
agacccaagaaacctggccagagcttc

SEQ ID NO: 58861 - RNA, 27 nt, synthetic construct
  misc_feature 1..27: note = Methionine-tRNA ligase, cytoplasmic (45-53)
  source 1..27: mol_type = other RNA
agacccaaggtgcctgtcctgcagctc

SEQ ID NO: 58862 - RNA, 27 nt, synthetic construct
  misc_feature 1..27: note = Actin-related protein 3 (262-270)
  source 1..27: mol_type = other RNA
agacccctgtacaagaacatcgtgctc

SEQ ID NO: 58863 - RNA, 24 nt, synthetic construct
  misc_feature 1..24: note = Proline-rich nuclear receptor coactivator 2 (13-20)
  source 1..24: mol_type = other RNA
agacccatgaagaccagcgtgctg

SEQ ID NO: 58864 - RNA, 27 nt, synthetic construct
  misc_feature 1..27: note = DNA damage-binding protein 1 (753-761)
  source 1..27: mol_type = other RNA
agacccagcgcctccacccaggctctg

SEQ ID NO: 58865 - RNA, 30 nt, synthetic construct
  misc_feature 1..30: note = Inositol-tetrakisphosphate 1-kinase (256-265)
  source 1..30: mol_type = other RNA
agacccagcgacgaggtgatcagggaactg

SEQ ID NO: 58866 - RNA, 27 nt, synthetic construct
  misc_feature 1..27: note = Nucleoprotein TPR (1808-1816)
  source 1..27: mol_type = other RNA
agacccagcacctccacagccgtgttc

SEQ ID NO: 58867 - RNA, 30 nt, synthetic construct
  misc_feature 1..30: note = Nuclear pore complex protein Nup214 (1284-1293)
  source 1..30: mol_type = other RNA
agacccgtggcccctagcggcaccgctctg

SEQ ID NO: 58868 - RNA, 27 nt, synthetic construct
  misc_feature 1..27: note = 60S ribosomal protein L15 (73-81)
  source 1..27: mol_type = other RNA
agacccgtgcctaagggcgccacctac

SEQ ID NO: 58869 - RNA, 27 nt, synthetic construct
  misc_feature 1..27: note = STE20-related kinase adapter protein alpha (358-366)
  source 1..27: mol_type = other RNA
agacccgtgacccctatcacaaacttc

SEQ ID NO: 58870 - RNA, 27 nt, synthetic construct
  misc_feature 1..27: note = Grancalcin (145-153)
  source 1..27: mol_type = other RNA
agacaggccatcggcctgatggggtac

SEQ ID NO: 58871 - RNA, 30 nt, synthetic construct
  misc_feature 1..30: note = Transcriptional repressor p66-beta (415-424)
  source 1..30: mol_type = other RNA
agacaggccccccaacctcagagctccctg

SEQ ID NO: 58872 - RNA, 36 nt, synthetic construct
  misc_feature 1..36: note = UBX domain-containing protein 4 (346-357)
  source 1..36: mol_type = other RNA
agacagttcgccgctcaaaccgtgggcaacacatac

SEQ ID NO: 58873 - RNA, 27 nt, synthetic construct
  misc_feature 1..27: note = Spectrin alpha chain, non-erythrocytic 1 (1012-1020)
  source 1..27: mol_type = other RNA
agacagggcttcgtgcccgccgcttac

SEQ ID NO: 58874 - RNA, 24 nt, synthetic construct
  misc_feature 1..24: note = Fragile X mental retardation syndrome-related protein 1 (376-383)
  source 1..24: mol_type = other RNA
agacagatcggcagcaggtcctac

SEQ ID NO: 58875 - RNA, 27 nt, synthetic construct
  misc_feature 1..27: note = Sialidase-1 (69-77)
  source 1..27: mol_type = other RNA
agacagatcggcagcgtggacaccttc

SEQ ID NO: 58876 - RNA, 27 nt, synthetic construct
  misc_feature 1..27: note = Cytochrome b-245 heavy chain (92-100)
  source 1..27: mol_type = other RNA
agacagctggacaggaacctcaccttc

SEQ ID NO: 58877 - RNA, 27 nt, synthetic construct
  misc_feature 1..27: note = Vacuole membrane protein 1 (48-56)
  source 1..27: mol_type = other RNA
agacagcccctgatcaccctccaatac

SEQ ID NO: 58878 - RNA, 27 nt, synthetic construct
  misc_feature 1..27: note = Lanosterol synthase (234-242)
  source 1..27: mol_type = other RNA
agacaggtgtacctgcccatgagctat

SEQ ID NO: 58879 - RNA, 24 nt, synthetic construct
  misc_feature 1..24: note = Eukaryotic translation initiation factor 3 subunit L (38-45)
  source 1..24: mol_type = other RNA
agacagtacgagcaacagacctat

SEQ ID NO: 58880 - RNA, 27 nt, synthetic construct
  misc_feature 1..27: note = Protein CDV3 homolog (7-15)
  source 1..27: mol_type = other RNA
agaagcctggacaacttctttgccaag

SEQ ID NO: 58881 - RNA, 33 nt, synthetic construct
  misc_feature 1..33: note = Cation-independent mannose-6-phosphate receptor (2345-2355)
  source 1..33: mol_type = other RNA
agaagctccaacgtgtcttacaagtattcaaaa

SEQ ID NO: 58882 - RNA, 27 nt, synthetic construct
  misc_feature 1..27: note = Protein phosphatase 1 regulatory subunit 12A (704-712)
  source 1..27: mol_type = other RNA
agaacctacgacgagacatatcagagg

SEQ ID NO: 58883 - RNA, 33 nt, synthetic construct
  misc_feature 1..33: note = Protein FAM168A (83-93)
  source 1..33: mol_type = other RNA
agaacctaccaggccagctccgctgcattcagg

SEQ ID NO: 58884 - RNA, 27 nt, synthetic construct
  misc_feature 1..27: note = Manganese-transporting ATPase 13A1 (839-847)
  source 1..27: mol_type = other RNA
agagtggcccccaagcagaaagagttc

SEQ ID NO: 58885 - RNA, 27 nt, synthetic construct
  misc_feature 1..27: note = Alpha-adducin (27-35)
  source 1..27: mol_type = other RNA
agagtggacgagaacaatcccgaatac

SEQ ID NO: 58886 - RNA, 27 nt, synthetic construct
  misc_feature 1..27: note = DNA damage-binding protein 1 (263-271)
  source 1..27: mol_type = other RNA
agagtggaccccaacggcagcaggtac

SEQ ID NO: 58887 - RNA, 30 nt, synthetic construct
  misc_feature 1..30: note = Eukaryotic translation initiation factor 3 subunit C-like protein (873-882)
  source 1..30: mol_type = other RNA
agagtgttcgaccacaagcagggcacctac

SEQ ID NO: 58888 - RNA, 39 nt, synthetic construct
  misc_feature 1..39: note = LIM and senescent cell antigen-like-containing domain protein 1 (319-331)
  source 1..39: mol_type = other RNA
agagtgatcgagggcgacgtcgttagcgccctgaacaag

SEQ ID NO: 58889 - RNA, 27 nt, synthetic construct
  misc_feature 1..27: note = Ran GTPase-activating protein 1 (205-213)
  source 1..27: mol_type = other RNA
agagtgatcggcaccctggaggaagtc

SEQ ID NO: 58890 - RNA, 27 nt, synthetic construct
  misc_feature 1..27: note = HLA class II histocompatibility antigen, DRB1-16 beta chain (89-97)
  source 1..27: mol_type = other RNA
agagtgcagcccaaggtcaccgtttac

SEQ ID NO: 58891 - RNA, 33 nt, synthetic construct
  misc_feature 1..33: note = Glucose-6-phosphate 1-dehydrogenase (240-250)
  source 1..33: mol_type = other RNA
agagtgcagcccaacgaggccgtctacaccaag

SEQ ID NO: 58892 - RNA, 27 nt, synthetic construct
  misc_feature 1..27: note = Rotatin (803-811)
  source 1..27: mol_type = other RNA
agagtgaccgacctgttcatcggcaag

SEQ ID NO: 58893 - RNA, 45 nt, synthetic construct
  misc_feature 1..45: note = Histone H2A type 1-B/E (100-114)
  source 1..45: mol_type = other RNA
agagtgaccatcgcccagggcggggtcctgcccaacattcaagct

SEQ ID NO: 58894 - RNA, 42 nt, synthetic construct
  misc_feature 1..42: note = SH3 domain-binding glutamic acid-rich-like protein (4-17)
  source 1..42: mol_type = other RNA
agagtgtacatcgccagctcctctggctcaaccgctattaag

SEQ ID NO: 58895 - RNA, 33 nt, synthetic construct
  misc_feature 1..33: note = WD repeat domain phosphoinositide-interacting protein 3 (34-44)
  source 1..33: mol_type = other RNA
agagtgtacaacaccgaccccctgaaggagaaa

SEQ ID NO: 58896 - RNA, 30 nt, synthetic construct
  misc_feature 1..30: note = Serine/arginine-rich splicing factor 9 (181-190)
  source 1..30: mol_type = other RNA
agagtgtaccccgagaggagcacctcctat

SEQ ID NO: 58897 - RNA, 27 nt, synthetic construct
  misc_feature 1..27: note = Lysine-specific demethylase 6B (135-143)
  source 1..27: mol_type = other RNA
agatacggcgggagcttcgccgagctg

SEQ ID NO: 58898 - RNA, 27 nt, synthetic construct
  misc_feature 1..27: note = Ras GTPase-activating protein-binding protein 2 (293-301)
  source 1..27: mol_type = other RNA
agataccccgacagccaccagctgttc

SEQ ID NO: 58899 - RNA, 27 nt, synthetic construct
  misc_feature 1..27: note = Eukaryotic translation initiation factor 3 subunit L (328-336)
  source 1..27: mol_type = other RNA
agataccaggacgccatcagggtgttc

SEQ ID NO: 58900 - RNA, 27 nt, synthetic construct
  misc_feature 1..27: note = Poly (ADP-ribose) polymerase 8 (33-41)
  source 1..27: mol_type = other RNA
agatacagcgactccaccttcacattt

SEQ ID NO: 58901 - RNA, 33 nt, synthetic construct
  misc_feature 1..33: note = ATPase family AAA domain-containing protein 2 (163-173)
  source 1..33: mol_type = other RNA
agatacagcggcgtgaaccagtccatgctgttc

SEQ ID NO: 58902 - RNA, 27 nt, synthetic construct
  misc_feature 1..27: note = Heterogeneous nuclear ribonucleoprotein H (23-31)
  source 1..27: mol_type = other RNA
agcgccgacgaggtgcagagattcttt

SEQ ID NO: 58903 - RNA, 27 nt, synthetic construct
  misc_feature 1..27: note = Intraflagellar transport protein 25 homolog (121-129)
  source 1..27: mol_type = other RNA
agcgccttcgaccactttgcttccgtg

SEQ ID NO: 58904 - RNA, 27 nt, synthetic construct
  misc_feature 1..27: note = Histone-lysine N-methyltransferase setd3 (403-411)
  source 1..27: mol_type = other RNA
agcgccatcgacagaattttcaccctg

SEQ ID NO: 58905 - RNA, 27 nt, synthetic construct
  misc_feature 1..27: note = Rho guanine nucleotide exchange factor 12 (613-621)
  source 1..27: mol_type = other RNA
agcgccatcggcagagctatggagctg

SEQ ID NO: 58906 - RNA, 27 nt, synthetic construct
  misc_feature 1..27: note = Cell division cycle protein 16 homolog (483-491)
  source 1..27: mol_type = other RNA
agcgccatcggctacattcactccctg

SEQ ID NO: 58907 - RNA, 27 nt, synthetic construct
  misc_feature 1..27: note = Transient receptor potential cation channel subfamily V member 2 (165-173)
  source 1..27: mol_type = other RNA
agcgccctgcacatcgctattgagaag

SEQ ID NO: 58908 - RNA, 27 nt, synthetic construct
  misc_feature 1..27: note = ATP-dependent zinc metalloprotease YME1L1 (158-166)
  source 1..27: mol_type = other RNA
agcgcccagtccttctttgagaacaag

SEQ ID NO: 58909 - RNA, 27 nt, synthetic construct
  misc_feature 1..27: note = Putative annexin A2-like protein (22-30)
  source 1..27: mol_type = other RNA
agcgcctacggctccgtgaaggcttat

SEQ ID NO: 58910 - RNA, 27 nt, synthetic construct
  misc_feature 1..27: note = Guanine nucleotide-binding protein G(I)/G(S)/G(T) subunit beta-1 (245-253)
  source 1..27: mol_type = other RNA
agcgacgatgccacctgcagactgttc

SEQ ID NO: 58911 - RNA, 27 nt, synthetic construct
  misc_feature 1..27: note = Ubiquitin thioesterase OTUB1 (215-223)
  source 1..27: mol_type = other RNA
agcgaccacatccatattatagccctg

SEQ ID NO: 58912 - RNA, 27 nt, synthetic construct
  misc_feature 1..27: note = Homeobox-containing protein 1 (316-324)
  source 1..27: mol_type = other RNA
agcgacctggagagagtgacctccctc

SEQ ID NO: 58913 - RNA, 27 nt, synthetic construct
  misc_feature 1..27: note = Protein FAM162A (32-40)
  source 1..27: mol_type = other RNA
agcgacctgaagagaatcaacggcttc

SEQ ID NO: 58914 - RNA, 27 nt, synthetic construct
  misc_feature 1..27: note = Group XIIB secretory phospholipase A2-like protein (142-150)
  source 1..27: mol_type = other RNA
agcgacctgaagagatccctcggcttc

SEQ ID NO: 58915 - RNA, 27 nt, synthetic construct
  misc_feature 1..27: note = SH3 domain-binding protein 2 (218-226)
  source 1..27: mol_type = other RNA
agcgacatgcccagagcccactccttc

SEQ ID NO: 58916 - RNA, 33 nt, synthetic construct
  misc_feature 1..33: note = Vimentin (299-309)
  source 1..33: mol_type = other RNA
agcgaggccgctaacagaaataacgacgcactg

SEQ ID NO: 58917 - RNA, 27 nt, synthetic construct
  misc_feature 1..27: note = 14-3-3 protein eta (80-88)
  source 1..27: mol_type = other RNA
agcgaggccgcttacaaggaagcattc

SEQ ID NO: 58918 - RNA, 27 nt, synthetic construct
  misc_feature 1..27: note = WD repeat-containing protein 6 (1032-1040)
  source 1..27: mol_type = other RNA
agcgaggacggctccctgcacgtgttc

SEQ ID NO: 58919 - RNA, 30 nt, synthetic construct
  misc_feature 1..30: note = 60S ribosomal protein L7a (85-94)
  source 1..30: mol_type = other RNA
agcgaggacaagggcgccctggctaaactc

SEQ ID NO: 58920 - RNA, 27 nt, synthetic construct
  misc_feature 1..27: note = Cofilin-1 (41-49)
  source 1..27: mol_type = other RNA
agcgaggacaagaaaaacatcattctg

SEQ ID NO: 58921 - RNA, 27 nt, synthetic construct
  misc_feature 1..27: note = Coatomer subunit alpha (268-276)
  source 1..27: mol_type = other RNA
agcgaggacaagtccatcagagtgtgg

SEQ ID NO: 58922 - RNA, 33 nt, synthetic construct; identical to SEQ ID NO: 34695
  misc_feature 1..33: note = 26S proteasome non-ATPase regulatory subunit 2 (436-446)
  source 1..33: mol_type = other RNA

SEQ ID NO: 58923 - RNA, 27 nt, synthetic construct
  misc_feature 1..27: note = Calmodulin (82-90)
  source 1..27: mol_type = other RNA
agcgaggaagagatcagagaagccttc

SEQ ID NO: 58924 - RNA, 30 nt, synthetic construct
  misc_feature 1..30: note = Nucleolar transcription factor 1 (115-124)
  source 1..30: mol_type = other RNA
agcgaggaaggcatcaccaagtccacactg

SEQ ID NO: 58925 - RNA, 27 nt, synthetic construct
  misc_feature 1..27: note = Nucleoside diphosphate kinase 3 (61-69)
  source 1..27: mol_type = other RNA
agcgaggaactgctcagagagcactac

SEQ ID NO: 58926 - RNA, 27 nt, synthetic construct
  misc_feature 1..27: note = A-kinase anchor protein 6 (991-999)
  source 1..27: mol_type = other RNA
agcgaggaacagcaacagcacctgtac

SEQ ID NO: 58927 - RNA, 30 nt, synthetic construct
  misc_feature 1..30: note = 14-3-3 protein zeta/delta (227-236)
  source 1..30: mol_type = other RNA
agcgaggaatcctacaaggactctaccctg

SEQ ID NO: 58928 - RNA, 30 nt, synthetic construct
  misc_feature 1..30: note = CTTNBP2 N-terminal-like protein (259-268)
  source 1..30: mol_type = other RNA
agcgagttcgacatcgaaagagagcagctg

SEQ ID NO: 58929 - RNA, 27 nt, synthetic construct
  misc_feature 1..27: note = Alpha-enolase (79-87)
  source 1..27: mol_type = other RNA
agcgagttctttagatccggcaagtac

SEQ ID NO: 58930 - RNA, 27 nt, synthetic construct
  misc_feature 1..27: note = Dynamin-like 120 kDa protein, mitochondrial (351-359)
  source 1..27: mol_type = other RNA
agcgagggcccccaccatgtggccctg

SEQ ID NO: 58931 - RNA, 30 nt, synthetic construct
  misc_feature 1..30: note = Cyclic AMP-dependent transcription factor ATF-6 beta (8-17)
  source 1..30: mol_type = other RNA
agcgagatcgccgaccccaccagattcttt

SEQ ID NO: 58932 - RNA, 27 nt, synthetic construct
  misc_feature 1..27: note = Claspin (704-712)
  source 1..27: mol_type = other RNA
agcgagatcggcaaggccgtggggttc

SEQ ID NO: 58933 - RNA, 27 nt, synthetic construct
  misc_feature 1..27: note = ATP-dependent zinc metalloprotease YME1L1 (695-703)
  source 1..27: mol_type = other RNA
agcgagaagctgggcgtgatgacctac

SEQ ID NO: 58934 - RNA, 24 nt, synthetic construct
  misc_feature 1..24: note = Protein yippee-like 5 (28-35)
  source 1..24: mol_type = other RNA
agcgagctgatctccaccagattc

SEQ ID NO: 58935 - RNA, 27 nt, synthetic construct
  misc_feature 1..27: note = Ubiquitin carboxyl-terminal hydrolase 7 (778-786)
  source 1..27: mol_type = other RNA
agcgagctgcccaccgccaaggaatac

SEQ ID NO: 58936 - RNA, 27 nt, synthetic construct
  misc_feature 1..27: note = Mitochondrial import receptor subunit TOM70 (577-585)
  source 1..27: mol_type = other RNA
agcgagatggaaatggcccacctgtac

SEQ ID NO: 58937 - RNA, 27 nt, synthetic construct
  misc_feature 1..27: note = ADP-ribosylation factor 4 (137-145)
  source 1..27: mol_type = other RNA
agcgagatgaccgacaagctgggcctc

SEQ ID NO: 58938 - RNA, 27 nt, synthetic construct
  misc_feature 1..27: note = Geranylgeranyl transferase type-1 subunit beta (168-176)
  source 1..27: mol_type = other RNA
agcgagaacgacatgagattcgtgtac

SEQ ID NO: 58939 - RNA, 27 nt, synthetic construct
  misc_feature 1..27: note = Nuclear pore complex protein Nup153 (1194-1202)
  source 1..27: mol_type = other RNA
agcgagcagcccgccaaggctaccttc

SEQ ID NO: 58940 - RNA, 27 nt, synthetic construct
  misc_feature 1..27: note = Coatomer subunit gamma-1 (353-361)
  source 1..27: mol_type = other RNA
agcgagtcctctatcgacagactgatg

SEQ ID NO: 58941 - RNA, 24 nt, synthetic construct
  misc_feature 1..24: note = T-complex protein 1 subunit zeta (155-162)
  source 1..24: mol_type = other RNA
agcgagaccgacacatccctgatc

SEQ ID NO: 58942 - RNA, 24 nt, synthetic construct
  misc_feature 1..24: note = Caprin-1 (287-294)
  source 1..24: mol_type = other RNA
agcgaggtggaatccaccgagtac

SEQ ID NO: 58943 - RNA, 27 nt, synthetic construct
  misc_feature 1..27: note = Galectin-2 (80-88)
  source 1..27: mol_type = other RNA
agcgaggtgaagttcaccgtcacattt

SEQ ID NO: 58944 - RNA, 30 nt, synthetic construct
  misc_feature 1..30: note = Serpin B8 (75-84)
  source 1..30: mol_type = other RNA
agcgaggtgaacagaaccggcacacagtac

SEQ ID NO: 58945 - RNA, 27 nt, synthetic construct
  misc_feature 1..27: note = Protein yippee-like 5 (54-62)
  source 1..27: mol_type = other RNA
agcgaggtgcaggacagagtcatgctg

SEQ ID NO: 58946 - RNA, 39 nt, synthetic construct
  misc_feature 1..39: note = Heterogeneous nuclear ribonucleoproteins A2/B1 (266-278)
  source 1..39: mol_type = other RNA
agcggcaacttcgggggatccagaaatatgggtggcccc

SEQ ID NO: 58947 - RNA, 27 nt, synthetic construct
  misc_feature 1..27: note = Protein PRRC2C (661-669)
  source 1..27: mol_type = other RNA
agcggctacttcaagcagtttcaaaaa

SEQ ID NO: 58948 - RNA, 27 nt, synthetic construct
  misc_feature 1..27: note = CAAX prenyl protease 1 homolog (244-252)
  source 1..27: mol_type = other RNA
agcatcgacttccccctgaccaaggtg

SEQ ID NO: 58949 - RNA, 27 nt, synthetic construct
  misc_feature 1..27: note = Signal transducer and activator of transcription 2 (358-366)
  source 1..27: mol_type = other RNA
agcatcgacagaaacccccctcagctg

SEQ ID NO: 58950 - RNA, 36 nt, synthetic construct
  misc_feature 1..36: note = Phospholipase D1 (579-590)
  source 1..36: mol_type = other RNA
agcatcgactccacctcttcatacttcaaccactat

SEQ ID NO: 58951 - RNA, 33 nt, synthetic construct
  misc_feature 1..33: note = Double-stranded RNA-specific adenosine deaminase (938-948)
  source 1..33: mol_type = other RNA
agcatcttcgagcccgccaagggcggggaaaaa

SEQ ID NO: 58952 - RNA, 36 nt, synthetic construct
  misc_feature 1..36: note = DNA-directed RNA polymerase III subunit RPC4 (107-118)
  source 1..36: mol_type = other RNA
agcatcttcgagcagggccccgccgaaatgatgaag

SEQ ID NO: 58953 - RNA, 27 nt, synthetic construct
  misc_feature 1..27: note = Serine/threonine-protein kinase MARK2 (578-586)
  source 1..27: mol_type = other RNA
agcatcttctccaagtttacctctaaa

SEQ ID NO: 58954 - RNA, 30 nt, synthetic construct
  misc_feature 1..30: note = Mortality factor 4-like protein 1 (192-201)
  source 1..30: mol_type = other RNA
agcatcctggaggactacgccaactataag

SEQ ID NO: 58955 - RNA, 27 nt, synthetic construct
  misc_feature 1..27: note = Transmembrane protein 41B (276-284)
  source 1..27: mol_type = other RNA
agcatcctgcccgccattttccagaag

SEQ ID NO: 58956 - RNA, 27 nt, synthetic construct
  misc_feature 1..27: note = DNA polymerase delta subunit 3 (419-427)
  source 1..27: mol_type = other RNA
agcatcaccggcttctttcagagaaag

SEQ ID NO: 58957 - RNA, 36 nt, synthetic construct
  misc_feature 1..36: note = Double-stranded RNA-specific adenosine deaminase (134-145)
  source 1..36: mol_type = other RNA
agcatctaccaggaccaagagcagagaattctgaag

SEQ ID NO: 58958 - RNA, 27 nt, synthetic construct
  misc_feature 1..27: note = Histone H2B type 2-E (14-22)
  source 1..27: mol_type = other RNA
agcatctacgtgtataaggtcctgaaa

SEQ ID NO: 58959 - RNA, 27 nt, synthetic construct
  misc_feature 1..27: note = Serine/threonine-protein kinase Nek6 (66-74)
  source 1..27: mol_type = other RNA
agcctggccgacttccagatcgagaag

SEQ ID NO: 58960 - RNA, 27 nt, synthetic construct
  misc_feature 1..27: note = Poly(rC)-binding protein 2 (315-323)
  source 1..27: mol_type = other RNA
agcctggcccagtacctcatcaacgtg

SEQ ID NO: 58961 - RNA, 27 nt, synthetic construct
  misc_feature 1..27: note = Eukaryotic translation initiation factor 3 subunit C-like protein (835-843)
  source 1..27: mol_type = other RNA
agcctggaccagcccacccaaacagtg

SEQ ID NO: 58962 - RNA, 27 nt, synthetic construct
  misc_feature 1..27: note = FGFR1 oncogene partner 2 (28-36)
  source 1..27: mol_type = other RNA
agcctgatcgagcagaccacagccctc

SEQ ID NO: 58963 - RNA, 27 nt, synthetic construct
  misc_feature 1..27: note = 60S ribosomal protein L10a (115-123)
  source 1..27: mol_type = other RNA
agcctgatcaagcagattcccagaata

SEQ ID NO: 58964 - RNA, 27 nt, synthetic construct
  misc_feature 1..27: note = Protein zyg-11 homolog B (362-370)
  source 1..27: mol_type = other RNA
agcctgctcgacgatcttcactccgcc

SEQ ID NO: 58965 - RNA, 33 nt, synthetic construct
  misc_feature 1..33: note = 4F2 cell-surface antigen heavy chain (289-299)
  source 1..33: mol_type = other RNA
agcctgctcgagtccaacaaggaccttctgttg

SEQ ID NO: 58966 - RNA, 30 nt, synthetic construct
  misc_feature 1..30: note = Homocysteine-responsive endoplasmic reticulum-resident ubiquitin-like domain member 1 protein (221-230)
  source 1..30: mol_type = other RNA
agcctgctccccgagggccctccagccatc

SEQ ID NO: 58967 - RNA, 27 nt, synthetic construct
  misc_feature 1..27: note = Bromodomain-containing protein 8 (139-147)
  source 1..27: mol_type = other RNA
agcctgctccccacctcccctagactt

SEQ ID NO: 58968 - RNA, 39 nt, synthetic construct
  misc_feature 1..39: note = Mitochondrial coenzyme A transporter SLC25A42 (36-48)
  source 1..39: mol_type = other RNA
agcctgctctccggcgcccttgctggggcactggccaag

SEQ ID NO: 58969 - RNA, 27 nt, synthetic construct
  misc_feature 1..27: note = Mediator of RNA polymerase II transcription subunit 12 (1321-1329)
  source 1..27: mol_type = other RNA
agcctgctctcccagcaacccttcctt

SEQ ID NO: 58970 - RNA, 30 nt, synthetic construct
  misc_feature 1..30: note = Ganglioside GM2 activator (3-12)
  source 1..30: mol_type = other RNA
agcctgatgcaggcccccctccttatcgct

SEQ ID NO: 58971 - RNA, 27 nt, synthetic construct
  misc_feature 1..27: note = Terminal uridylyltransferase 7 (826-834)
  source 1..27: mol_type = other RNA
agcctgaaccacttcacccattccgtg

SEQ ID NO: 58972 - RNA, 27 nt, synthetic construct
  misc_feature 1..27: note = Signal transducer and activator of transcription 6 (256-264)
  source 1..27: mol_type = other RNA
agcctgaccggcagactcgacgaggtg

SEQ ID NO: 58973 - RNA, 27 nt, synthetic construct
  misc_feature 1..27: note = Hyccin (36-44)
  source 1..27: mol_type = other RNA
agcctggtgtcctctctctacaaggtc

SEQ ID NO: 58974 - RNA, 30 nt, synthetic construct
  misc_feature 1..30: note = Keratin, type II cytoskeletal 2 epidermal (342-351)
  source 1..30: mol_type = other RNA
agcatggacaactccagaaatctggatctc

SEQ ID NO: 58975 - RNA, 30 nt, synthetic construct
  misc_feature 1..30: note = Serine/threonine-protein phosphatase 2B catalytic subunit beta isoform (116-125)
  source 1..30: mol_type = other RNA
agccccgccaacaccagatacctgttcctc

SEQ ID NO: 58976 - RNA, 27 nt, synthetic construct
  misc_feature 1..27: note = Treacle protein (700-708)
  source 1..27: mol_type = other RNA
agccccgcccaggtgaagacctccgtc

SEQ ID NO: 58977 - RNA, 51 nt, synthetic construct
  misc_feature 1..51: note = Alpha-enolase (263-279)
  source 1..51: mol_type = other RNA
agccccgacgatccttccagatacatctctccagaccagctggccgatctc

SEQ ID NO: 58978 - RNA, 27 nt, synthetic construct
  misc_feature 1..27: note = LIM domain and actin-binding protein 1 (264-272)
  source 1..27: mol_type = other RNA
agccccgactccagagcctcttcactg

SEQ ID NO: 58979 - RNA, 27 nt, synthetic construct
  misc_feature 1..27: note = Sterol regulatory element-binding protein 2 (1098-1106)
  source 1..27: mol_type = other RNA
agccccggccagagagccgtgctgctc

SEQ ID NO: 58980 - RNA, 27 nt, synthetic construct
  misc_feature 1..27: note = Midasin (1754-1762)
  source 1..27: mol_type = other RNA
agccccggcgtggggaagacctccctg

SEQ ID NO: 58981 - RNA, 30 nt, synthetic construct
  misc_feature 1..30: note = Nucleophosmin (70-79)
  source 1..30: mol_type = other RNA
agccccatcaaggtgaccctggccacactc

SEQ ID NO: 58982 - RNA, 33 nt, synthetic construct
  misc_feature 1..33: note = Cation-independent mannose-6-phosphate receptor (554-564)
  source 1..33: mol_type = other RNA
agccccatgaaggagaaaggcaacatccagctg

SEQ ID NO: 58983 - RNA, 27 nt, synthetic construct
  misc_feature 1..27: note = Transcription factor SOX-9 (199-207)
  source 1..27: mol_type = other RNA
agccccaacgccatcttcaaggctctg

SEQ ID NO: 58984 - RNA, 27 nt, synthetic construct
  misc_feature 1..27: note = F-box/LRR-repeat protein 6 (377-385)
  source 1..27: mol_type = other RNA
agccccaacctgagactccttgacctg

SEQ ID NO: 58985 - RNA, 27 nt, synthetic construct
  misc_feature 1..27: note = Adiponectin receptor protein 1 (231-239)
  source 1..27: mol_type = other RNA
agcccccagcctagactgatctacctc

SEQ ID NO: 58986 - RNA, 33 nt, synthetic construct
  misc_feature 1..33: note = Ribosomal protein S6 kinase beta-1 (418-428)
  source 1..33: mol_type = other RNA
agccccagaacccctgtgtccccagtcaagttc

SEQ ID NO: 58987 - RNA, 27 nt, synthetic construct
  misc_feature 1..27: note = Zinc finger protein 655 (12-20)
  source 1..27: mol_type = other RNA
agccccagagtgcagttccaatccctg

SEQ ID NO: 58988 - RNA, 33 nt, synthetic construct
  misc_feature 1..33: note = Probable aminopeptidase NPEPL1 (88-98)
  source 1..33: mol_type = other RNA
agcccctccgccgctcacttcatcaccagactg

SEQ ID NO: 58989 - RNA, 33 nt, synthetic construct
  misc_feature 1..33: note = Activating transcription factor 7-interacting protein 1 (907-917)
  source 1..33: mol_type = other RNA
agcccctccaccaacagaggccctatccagatg

SEQ ID NO: 58990 - RNA, 30 nt, synthetic construct
  misc_feature 1..30: note = Protein transport protein Sec24A (613-622)
  source 1..30: mol_type = other RNA
agccccaccggcgggagaatgtccgtgttc

SEQ ID NO: 58991 - RNA, 24 nt, synthetic construct
  misc_feature 1..24: note = Exportin-5 (826-833)
  source 1..24: mol_type = other RNA
agccccgtgttcaagaccgtcctg

SEQ ID NO: 58992 - RNA, 33 nt, synthetic construct
  misc_feature 1..33: note = Vacuolar protein sorting-associated protein 41 homolog (371-381)
  source 1..33: mol_type = other RNA
agcccctacctgcctagaggcgacccagtgctc

SEQ ID NO: 58993 - RNA, 30 nt, synthetic construct
  misc_feature 1..30: note Dolichyl-diphosphooligosaccharide-proteinosyltransferase subunit 1 (164-173)
  source 1..30: mol_type = other RNA
agcccctaccctaccaagacacagactatg

SEQ ID NO: 58994 - RNA, 33 nt, synthetic construct
  misc_feature 1..33: note = Cell division control protein 6 homolog (6-16)
  source 1..33: mol_type = other RNA
agccaggcccaagctaccatctccttccccaag

SEQ ID NO: 58995 - RNA, 30 nt, synthetic construct
  misc_feature 1..30: note = Nuclear transcription factor Y subunit gamma (290-299)
  source 1..30: mol_type = other RNA
agccagttcaccgacggccaacagctgtac

SEQ ID NO: 58996 - RNA, 27 nt, synthetic construct
  misc_feature 1..27: note = Inactive serine/threonine-protein kinase VRK3 (34-42)
  source 1..27: mol_type = other RNA
agccagaccttcgtgaacccccacgtc

SEQ ID NO: 58997 - RNA, 27 nt, synthetic construct
  misc_feature 1..27: note = Vacuolar protein sorting-associated protein 13B (2936-2944)
  source 1..27: mol_type = other RNA
agccagtgggactcccccatgagagtg

SEQ ID NO: 58998 - RNA, 36 nt, synthetic construct
  misc_feature 1..36: note = Zinc finger MIZ domain-containing protein 2 (180-191)
  source 1..36: mol_type = other RNA
agccagtacggcgccatgggggctggacaatccttc

SEQ ID NO: 58999 - RNA, 27 nt, synthetic construct
  misc_feature 1..27: note = Methylsterol monooxygenase 1 (145-153)
  source 1..27: mol_type = other RNA
agccagtacaacgcctataatgagaag

SEQ ID NO: 59000 - RNA, 30 nt, synthetic construct
  misc_feature 1..30: note = COUP transcription factor 2 (198-207)
  source 1..30: mol_type = other RNA
agccagtaccccaaccaacctaccagattc

SEQ ID NO: 59001 - RNA, 27 nt, synthetic construct
  misc_feature 1..27: note = SUN domain-containing protein 2 (62-70)
  source 1..27: mol_type = other RNA
agctccgacgcccacacctcttactat

SEQ ID NO: 59002 - RNA, 27 nt, synthetic construct
  misc_feature 1..27: note = E3 ISG15-protein ligase HERC5 (113-121)
  source 1..27: mol_type = other RNA
agctccgacggcaagcccttcgagtac

SEQ ID NO: 59003 - RNA, 27 nt, synthetic construct
  misc_feature 1..27: note = Serrate RNA effector molecule homolog (88-96)
  source 1..27: mol_type = other RNA
agctccgacccctaccactctggctat

SEQ ID NO: 59004 - RNA, 27 nt, synthetic construct
  misc_feature 1..27: note = Chromodomain-helicase-DNA-binding protein 1 (1545-1553)
  source 1..27: mol_type = other RNA
agctccgacagacacctgacccagtac

SEQ ID NO: 59005 - RNA, 27 nt, synthetic construct
  misc_feature 1..27: note = Glycogen phosphorylase, brain form (813-821)
  source 1..27: mol_type = other RNA
agctccgacagaaccatcacagagtac

SEQ ID NO: 59006 - RNA, 27 nt, synthetic construct
  misc_feature 1..27: note = HMG box-containing protein 1 (78-86)
  source 1..27: mol_type = other RNA
agctccgacgtgtctcaccaggagtac

SEQ ID NO: 59007 - RNA, 27 nt, synthetic construct
  misc_feature 1..27: note = Disintegrin and metalloproteinase domain-containing protein 23 (174-182)
  source 1..27: mol_type = other RNA
agctccgactacgtggagatccactat

SEQ ID NO: 59008 - RNA, 27 nt, synthetic construct
  misc_feature 1..27: note = Insulin-like growth factor I (5-13)
  source 1..27: mol_type = other RNA
agctccctgcccacccagctcttcaag

SEQ ID NO: 59009 - RNA, 33 nt, synthetic construct
  misc_feature 1..33: note = Keratin, type I cytoskeletal 10 (37-47)
  source 1..33: mol_type = other RNA
agctcctctaagggctcactggggggaggtttc

SEQ ID NO: 59010 - RNA, 63 nt, synthetic construct
  misc_feature 1..63: note = Keratin, type I cytoskeletal 10 (37-57)
  source 1..63: mol_type = other RNA
agctcctctaagggctcactggggggaggtttcagtagcggcgggttttccggaggctctttc

SEQ ID NO: 59011 - RNA, 45 nt, synthetic construct
  misc_feature 1..45: note = Keratin, type I cytoskeletal 10 (568-582)
  source 1..45: mol_type = other RNA
agctcctcttcaggcagtgtgggggagagctcctctaagggaccc

SEQ ID NO: 59012 - RNA, 27 nt, synthetic construct
  misc_feature 1..27: note = 40S ribosomal protein S19 (59-67)
  source 1..27: mol_type = other RNA
agcaccgccagacacctgtacctcagg

SEQ ID NO: 59013 - RNA, 27 nt, synthetic construct
  misc_feature 1..27: note = Putative elongation factor 1-alpha-like 3 (157-165)
  source 1..27: mol_type = other RNA
agcaccgagcccccttactcccagaag

SEQ ID NO: 59014 - RNA, 30 nt, synthetic construct
  misc_feature 1..30: note = DNA-dependent protein kinase catalytic subunit (1861-1870)
  source 1..30: mol_type = other RNA
agcaccttcgacacacagatcactaagaaa

SEQ ID NO: 59015 - RNA, 27 nt, synthetic construct
  misc_feature 1..27: note = Sentrin-specific protease 2 (440-448)
  source 1..27: mol_type = other RNA
agcaccttcttttaccccaagctgaaa

SEQ ID NO: 59016 - RNA, 30 nt, synthetic construct
  misc_feature 1..30: note = Actin, alpha cardiac muscle 1 (22-31)
  source 1..30: mol_type = other RNA
agcaccttccagcaaatgtggatctccaag

SEQ ID NO: 59017 - RNA, 27 nt, synthetic construct
  misc_feature 1..27: note = Transketolase (258-266)
  source 1..27: mol_type = other RNA
agcaccttctccgagatctttaagaaa

SEQ ID NO: 59018 - RNA, 30 nt, synthetic construct
  misc_feature 1..30: note = Syntenin-1 (205-214)
  source 1..30: mol_type = other RNA
agcaccggccacgtggggttcatctttaag

SEQ ID NO: 59019 - RNA, 27 nt, synthetic construct
  misc_feature 1..27: note = E3 ubiquitin-protein ligase HECTD1 (455-463)
  source 1..27: mol_type = other RNA
agcaccatcttctactatgtgcagaag

SEQ ID NO: 59020 - RNA, 33 nt, synthetic construct; identical to SEQ ID NO: 34793
  misc_feature 1..33: note = Hexokinase-2 (408-418)
  source 1..33: mol_type = other RNA

SEQ ID NO: 59021 - RNA, 27 nt, synthetic construct
  misc_feature 1..27: note = Heat shock protein HSP 90-beta (541-549)
  source 1..27: mol_type = other RNA
agcaccatgggctacatgatggccaag

SEQ ID NO: 59022 - RNA, 33 nt, synthetic construct
  misc_feature 1..33: note = Actin-related protein 2 (307-317)
  source 1..33: mol_type = other RNA
agcaccatgtaccccggcctgccttccagactc

SEQ ID NO: 59023 - RNA, 36 nt, synthetic construct
  misc_feature 1..36: note = Adenosylhomocysteinase (85-96)
  source 1..36: mol_type = other RNA
agcacccaggaccacgccgctgcagccatcgcgaag

SEQ ID NO: 59024 - RNA, 33 nt, synthetic construct
  misc_feature 1..33: note = Apoptosis-inducing factor 1, mitochondrial (76-86)
  source 1..33: mol_type = other RNA
agcaccgtgggcgccggggcttacgcatataag

SEQ ID NO: 59025 - RNA, 27 nt, synthetic construct
  misc_feature 1..27: note = Denticleless protein homolog (404-412)
  source 1..27: mol_type = other RNA
agcaccgtgggctgggcctcccagaag

SEQ ID NO: 59026 - RNA, 27 nt, synthetic construct
  misc_feature 1..27: note = WD repeat-containing protein 48 (319-327)
  source 1..27: mol_type = other RNA
agcaccgtgaacaagtggacactgaaa

SEQ ID NO: 59027 - RNA, 33 nt, synthetic construct; identical to SEQ ID NO: 34800
  misc_feature 1..33: note = Sarcoplasmic/endoplasmic reticulum calcium ATPase 2 (387-397)
  source 1..33: mol_type = other RNA

SEQ ID NO: 59028 - RNA, 33 nt, synthetic construct
  misc_feature 1..33: note = Integrator complex subunit 11 (175-185)
  source 1..33: mol_type = other RNA
agcacctacgccacaactatcagagactccaag

SEQ ID NO: 59029 - RNA, 33 nt, synthetic construct; identical to SEQ ID NO: 34802
  misc_feature 1..33: note = Nucleolar RNA helicase 2 (324-334)
  source 1..33: mol_type = other RNA

SEQ ID NO: 59030 - RNA, 30 nt, synthetic construct
  misc_feature 1..30: note = Eukaryotic translation initiation factor 3 subunit H (119-128)
  source 1..30: mol_type = other RNA
agcacctactatggctccttcgtgacaaga

SEQ ID NO: 59031 - RNA, 27 nt, synthetic construct
  misc_feature 1..27: note = Heterogeneous nuclear ribonucleoprotein A1-like 2 (5-13)
  source 1..27: mol_type = other RNA
agcgtggacaagatcgtcattcagaaa

SEQ ID NO: 59032 - RNA, 30 nt, synthetic construct; identical to SEQ ID NO: 34805
  misc_feature 1..30: note = Mitochondrial import inner membrane translocase subunit TIM50 (213-222)
  source 1..30: mol_type = other RNA

SEQ ID NO: 59033 - RNA, 27 nt, synthetic construct
  misc_feature 1..27: note = Lysine-tRNA ligase (98-106)
  source 1..27: mol_type = other RNA
agcgtggaccccaaccagtactataag

SEQ ID NO: 59034 - RNA, 33 nt, synthetic construct
  misc_feature 1..33: note = 39S ribosomal protein L43, mitochondrial (93-103)
  source 1..33: mol_type = other RNA
agcgtggaggaaatctccaccctggtccagaag

SEQ ID NO: 59035 - RNA, 33 nt, synthetic construct
  misc_feature 1..33: note = Chromodomain-helicase-DNA-binding protein 3 (1189-1199)
  source 1..33: mol_type = other RNA
agcgtggaggaaagaatcacccaggtcgccaag

SEQ ID NO: 59036 - RNA, 39 nt, synthetic construct
  misc_feature 1..39: note = Cirhin (180-192)
  source 1..39: mol_type = other RNA
agcgtgttcgacgtcaagtccggctctgccgttcacaaa

SEQ ID NO: 59037 - RNA, 36 nt, synthetic construct
  misc_feature 1..36: note = Histone-lysine N-methyltransferase EHMT1 (87-98)
  source 1..36: mol_type = other RNA
agcgtgatcggctccaacgggtacattctgaataag

SEQ ID NO: 59038 - RNA, 30 nt, synthetic construct
  misc_feature 1..30: note = Integrin alpha-4 (81-90)
  source 1..30: mol_type = other RNA
agcgtgatcaaccccggcgccatttacaga

SEQ ID NO: 59039 - RNA, 48 nt, synthetic construct
  misc_feature 1..48: note = Protein S100-A9 (23-38)
  source 1..48: mol_type = other RNA
agcgtgaagctgggccaccccgacaccctcaaccagggggagttcaaa

SEQ ID NO: 59040 - RNA, 27 nt, synthetic construct
  misc_feature 1..27: note = Mediator of RNA polymerase II transcription subunit 6 (28-36)
  source 1..27: mol_type = other RNA
agcgtgctggactacttctccgagaga

SEQ ID NO: 59041 - RNA, 39 nt, synthetic construct
  misc_feature 1..39: note = Gelsolin (378-390)
  source 1..39: mol_type = other RNA
agcgtgctgcccgagggcggggaaacccctctcttcaag

SEQ ID NO: 59042 - RNA, 33 nt, synthetic construct
  misc_feature 1..33: note = Heat shock 70 kDa protein 14 (206-216)
  source 1..33: mol_type = other RNA
agcgtgatggaggtcaactccggcatctacaga

SEQ ID NO: 59043 - RNA, 30 nt, synthetic construct; identical to SEQ ID NO: 34816
  misc_feature 1..30: note = Basic leucine zipper and W2 domain-containing protein 1 (215-224)
  source 1..30: mol_type = other RNA

SEQ ID NO: 59044 - RNA, 27 nt, synthetic construct
  misc_feature 1..27: note = 60S ribosomal protein L7 (149-157)
  source 1..27: mol_type = other RNA
agcgtgaacgagctgatctacaagaga

SEQ ID NO: 59045 - RNA, 36 nt, synthetic construct
  misc_feature 1..36: note = Chromatin complexes subunit BAP18 (122-133)
  source 1..36: mol_type = other RNA
agcgtgcccgaggccggcgggcctccaatcaagaaa

SEQ ID NO: 59046 - RNA, 27 nt, synthetic construct
  misc_feature 1..27: note = ADP/ATP translocase 2 (180-188)
  source 1..27: mol_type = other RNA
agcgtgcagggcatcattatatacaga

SEQ ID NO: 59047 - RNA, 27 nt, synthetic construct
  misc_feature 1..27: note = Anaphase-promoting complex subunit 16 (24-32)
  source 1..27: mol_type = other RNA
agcgtgtccgacctggccccccctaga

SEQ ID NO: 59048 - RNA, 27 nt, synthetic construct
  misc_feature 1..27: note = Nesprin-2 (1819-1827)
  source 1..27: mol_type = other RNA
agcgtgtccgacctgttcaacaccaag

SEQ ID NO: 59049 - RNA, 36 nt, synthetic construct
  misc_feature 1..36: note = A-kinase anchor protein 1, mitochondrial (874-885)
  source 1..36: mol_type = other RNA
agcgtggtcggcgacgaggttgtgctgatcaacaga

SEQ ID NO: 59050 - RNA, 36 nt, synthetic construct
  misc_feature 1..36: note = Exocyst complex component 6 (35-46)
  source 1..36: mol_type = other RNA
agcgtgtacgacgatcagcccaacgcccacaagaaa

SEQ ID NO: 59051 - RNA, 30 nt, synthetic construct; identical to SEQ ID NO: 34824
  misc_feature 1..30: note = Dehydrodolichyl diphosphate syntase complex subunit NUS1 (133-142)
  source 1..30: mol_type = other RNA

SEQ ID NO: 59052 - RNA, 33 nt, synthetic construct
  misc_feature 1..33: note = Dehydrodolichyl diphosphate syntase complex subunit NUS1 (133-143)
  source 1..33: mol_type = other RNA
agcgtgtacgaccaccagggcatcttcaagaga

SEQ ID NO: 59053 - RNA, 48 nt, synthetic construct
  misc_feature 1..48: note = Actin, alpha skeletal muscle (35-50)
  source 1..48: mol_type = other RNA
agctacgagctgcccgacggccaggtgatcaccattgggaacgaaaga

SEQ ID NO: 59054 - RNA, 30 nt, synthetic construct; identical to SEQ ID NO: 34827
  misc_feature 1..30: note = Tetratricopeptide repeat protein 27 (18-27)
  source 1..30: mol_type = other RNA

SEQ ID NO: 59055 - RNA, 27 nt, synthetic construct
  misc_feature 1..27: note = U5 small nuclear ribonucleoprotein 200 kDa helicase (1958-1966)
  source 1..27: mol_type = other RNA
agctacctgaagcagctcccccacttc

SEQ ID NO: 59056 - RNA, 27 nt, synthetic construct
  misc_feature 1..27: note = Intraflagellar transport protein 122 homolog (100-108)
  source 1..27: mol_type = other RNA
agctacaaccccatcacccaccagctg

SEQ ID NO: 59057 - RNA, 27 nt, synthetic construct
  misc_feature 1..27: note = Constitutive coactivator of peroxisome proliferator-activated receptor gamma (261-269)
  source 1..27: mol_type = other RNA
agctacacctccgtgaaggagaacttc

SEQ ID NO: 59058 - RNA, 24 nt, synthetic construct
  misc_feature 1..24: note = 60S ribosomal protein L24 (24-31)
  source 1..24: mol_type = other RNA
accgacggcaaggtgttccagttt

SEQ ID NO: 59059 - RNA, 27 nt, synthetic construct
  misc_feature 1..27: note = DNA-directed RNA polymerase II subunit RPB11-b2 (113-121)
  source 1..27: mol_type = other RNA
accgacctgatcagagagctcagcctt

SEQ ID NO: 59060 - RNA, 27 nt, synthetic construct
  misc_feature 1..27: note = WD repeat-containing protein (630-638)
  source 1..27: mol_type = other RNA
accgacctgatgagactcaaggagatc

SEQ ID NO: 59061 - RNA, 27 nt, synthetic construct
  misc_feature 1..27: note = Protein disulfide-isomerase (296-304)
  source 1..27: mol_type = other RNA
accgacaaccagagaatcctggagttc

SEQ ID NO: 59062 - RNA, 27 nt, synthetic construct
  misc_feature 1..27: note = Tensin-1 (1649-1657)
  source 1..27: mol_type = other RNA
accgacaaccagagaaagctgttcttt

SEQ ID NO: 59063 - RNA, 27 nt, synthetic construct
  misc_feature 1..27: note = Keratin, type I cytoskeletal 19 (327-335)
  source 1..27: mol_type = other RNA
accgaggccagattcggcgctcagctg

SEQ ID NO: 59064 - RNA, 27 nt, synthetic construct
  misc_feature 1..27: note = Nucleolin (584-592)
  source 1..27: mol_type = other RNA
accgaggaaacactgaaggagagcttc

SEQ ID NO: 59065 - RNA, 27 nt, synthetic construct
  misc_feature 1..27: note = UPF0568 protein C14orf166 (23-31)
  source 1..27: mol_type = other RNA
accgagttcagaaactttatcgtgtgg

SEQ ID NO: 59066 - RNA, 27 nt, synthetic construct
  misc_feature 1..27: note = Cytoplasmic dynein 1 heavy chain 1 (1693-1701)
  source 1..27: mol_type = other RNA
accgagcaccccaagatcaacgaatgg

SEQ ID NO: 59067 - RNA, 27 nt, synthetic construct
  misc_feature 1..27: note = Disheveled-associated activator of morphogenesis 1 (629-637)
  source 1..27: mol_type = other RNA
accgagatcgacgatacaaaggtgttc

SEQ ID NO: 59068 - RNA, 27 nt, synthetic construct
  misc_feature 1..27: note = Proteasome activator complex subunit 3 (207-215)
  source 1..27: mol_type = other RNA
accgagatcgacgaaaaggagtacatt

SEQ ID NO: 59069 - RNA, 33 nt, synthetic construct
  misc_feature 1..33: note = Nucleolin (452-462)
  source 1..33: mol_type = other RNA
accgagatcgacggcagaagcatttccctgtac

SEQ ID NO: 59070 - RNA, 30 nt, synthetic construct
  misc_feature 1..30: note = Coatomer subunit alpha (1207-1216)
  source 1..30: mol_type = other RNA
accgagatcggcaaggacgtgattgggctg

SEQ ID NO: 59071 - RNA, 27 nt, synthetic construct
  misc_feature 1..27: note = Thiopurine S-methyltransferase (113-121)
  source 1..27: mol_type = other RNA
accgagatccccggcacaaaggtgttc

SEQ ID NO: 59072 - RNA, 30 nt, synthetic construct
  misc_feature 1..30: note = Angiomotin (467-476)
  source 1..30: mol_type = other RNA
accgagatccagagagtgagcgaagcctac

SEQ ID NO: 59073 - RNA, 27 nt, synthetic construct
  misc_feature 1..27: note = Eukaryotic translation initiation factor 3 subunit C-like protein (323-331)
  source 1..27: mol_type = other RNA
accgagatcacacacgccgtggtcatt

SEQ ID NO: 59074 - RNA, 27 nt, synthetic construct
  misc_feature 1..27: note = Fructose-bisphosphate aldolase A (206-214)
  source 1..27: mol_type = other RNA
accgagaaggtgctggccgctgtctac

SEQ ID NO: 59075 - RNA, 27 nt, synthetic construct
  misc_feature 1..27: note = Staphylococcal nuclease domain-containing protein 1 (260-268)
  source 1..27: mol_type = other RNA
accgagctgctccttaaggaaggcttc

SEQ ID NO: 59076 - RNA, 27 nt, synthetic construct
  misc_feature 1..27: note = Sorting nexin-5 (292-300)
  source 1..27: mol_type = other RNA
accgagctgctcagatactatatgctt

SEQ ID NO: 59077 - RNA, 27 nt, synthetic construct
  misc_feature 1..27: note = Tuftelin (365-373)
  source 1..27: mol_type = other RNA
accgagaaccccggcagcatcagaatt

SEQ ID NO: 59078 - RNA, 27 nt, synthetic construct
  misc_feature 1..27: note = KN motif and ankyrin repeat domain-containing protein 2 (612-620)
  source 1..27: mol_type = other RNA
accgagagagaactgaaggtggcctac

SEQ ID NO: 59079 - RNA, 27 nt, synthetic construct
  misc_feature 1..27: note = Tensin-1 (19-27)
  source 1..27: mol_type = other RNA
accgagagaatcattgccgtgagcttc

SEQ ID NO: 59080 - RNA, 30 nt, synthetic construct
  misc_feature 1..30: note = Microtubule-actin cross-linking factor 1, isoforms 1/2/3/5 (327-336)
  source 1..30: mol_type = other RNA
accgaggtggacagcagatggcaggaatac

SEQ ID NO: 59081 - RNA, 27 nt, synthetic construct
  misc_feature 1..27: note = Melanoma-associated antigen D2 (67-75)
  source 1..27: mol_type = other RNA
accgaggtgagcaagacacccgaagcc

SEQ ID NO: 59082 - RNA, 33 nt, synthetic construct
  misc_feature 1..33: note = Cytoplasmic dynein 1 heavy chain 1 (3550-3560)
  source 1..33: mol_type = other RNA
accgagtacctgagcaacgccgacgaaagactc

SEQ ID NO: 59083 - RNA, 30 nt, synthetic construct
  misc_feature 1..30: note = Autophagy-related protein 9A (6-15)
  source 1..30: mol_type = other RNA
accgagtaccagagactggaagccagctat

SEQ ID NO: 59084 - RNA, 39 nt, synthetic construct
  misc_feature 1..39: note = Glyceraldehyde-3-phosphate dehydrogenase (3-15)
  source 1..39: mol_type = other RNA
accttcgacgccggcgctgggatcgcactgaacgatcac

SEQ ID NO: 59085 - RNA, 27 nt, synthetic construct
  misc_feature 1..27: note = Hydroxymethylglutaryl-CoA synthase, cytoplasmic (131-139)
  source 1..27: mol_type = other RNA
accatcattgacaagagcaaatccgtg

SEQ ID NO: 59086 - RNA, 33 nt, synthetic construct
  misc_feature 1..33: note = Histone H3.3 (119-129)
  source 1..33: mol_type = other RNA
accatcatgcccaaggacattcagctggccaga

SEQ ID NO: 59087 - RNA, 30 nt, synthetic construct
  misc_feature 1..30: note = NADH dehydrogenase (ubiquinone) iron-sulfur protein 5 (19-28)
  source 1..30: mol_type = other RNA
accatccagagcggcgagcaaccctacaag

SEQ ID NO: 59088 - RNA, 30 nt, synthetic construct
  misc_feature 1..30: note = T-complex protein 1 subunit zeta-2 (204-213)
  source 1..30: mol_type = other RNA
accaaggaggtgaacagcggcttcttttac

SEQ ID NO: 59089 - RNA, 27 nt, synthetic construct
  misc_feature 1..27: note = Serine/threonine-protein phosphatase 6 regulatory ankyrin repeat subunit C (603-611)
  source 1..27: mol_type = other RNA
accctggccgagacactcgtgaacctt

SEQ ID NO: 59090 - RNA, 27 nt, synthetic construct
  misc_feature 1..27: note = Leucine-rich repeat-containing protein 41 (19-27)
  source 1..27: mol_type = other RNA
accctggccagctccctccacacactt

SEQ ID NO: 59091 - RNA, 27 nt, synthetic construct
  misc_feature 1..27: note = MOB kinase activator 1A (130-138)
  source 1..27: mol_type = other RNA
accctgttccccagcaagatcggcgtg

SEQ ID NO: 59092 - RNA, 27 nt, synthetic construct
  misc_feature 1..27: note = A-kinase anchor protein 11 (1555-1563)
  source 1..27: mol_type = other RNA
accctgggcagcacagtgttcagagtc

SEQ ID NO: 59093 - RNA, 27 nt, synthetic construct
  misc_feature 1..27: note = Nucleosome-remodeling factor subunit BPTF (281-289)
  source 1..27: mol_type = other RNA
accctgatggccgagatgcacgtggtc

SEQ ID NO: 59094 - RNA, 27 nt, synthetic construct
  misc_feature 1..27: note = WD repeat-containing protein 81 (157-165)
  source 1..27: mol_type = other RNA
accctgatggacatcctccccagaatt

SEQ ID NO: 59095 - RNA, 27 nt, synthetic construct
  misc_feature 1..27: note = Exportin-1 (346-354)
  source 1..27: mol_type = other RNA
accctgatggaggccctccactacatg

SEQ ID NO: 59096 - RNA, 27 nt, synthetic construct
  misc_feature 1..27: note = Splicing factor 3A subunit 1 (521-529)
  source 1..27: mol_type = other RNA
accctgcaggagcaaatcgaagccatt

SEQ ID NO: 59097 - RNA, 27 nt, synthetic construct
  misc_feature 1..27: note = Replication protein A 32 kDa subunit (58-66)
  source 1..27: mol_type = other RNA
accctggtggacgaggtcttcagaatc

SEQ ID NO: 59098 - RNA, 27 nt, synthetic construct
  misc_feature 1..27: note = Elongator complex protein 2 (406-414)
  source 1..27: mol_type = other RNA
accctgtggcccgaggtgcagaagctc

SEQ ID NO: 59099 - RNA, 27 nt, synthetic construct
  misc_feature 1..27: note = Exosome complex component RRP42 (108-116)
  source 1..27: mol_type = other RNA
accctgtacagaatcttcaacaataag

SEQ ID NO: 59100 - RNA, 27 nt, synthetic construct
  misc_feature 1..27: note = Transmembrane protein 50A (48-56)
  source 1..27: mol_type = other RNA
accatgaaggacttcaaccacagctac

SEQ ID NO: 59101 - RNA, 27 nt, synthetic construct
  misc_feature 1..27: note = snRNA-activating protein complex subunit 4 (1152-1160)
  source 1..27: mol_type = other RNA
acccccgcccctccaacacacgctctg

SEQ ID NO: 59102 - RNA, 30 nt, synthetic construct
  misc_feature 1..30: note = Spectrin beta chain, non-erythrocytic 1 (2320-2329)
  source 1..30: mol_type = other RNA
acccccgccagctccagagctcagacactg

SEQ ID NO: 59103 - RNA, 33 nt, synthetic construct
  misc_feature 1..33: note = 26S proteasome non-ATPase regulatory subunit 4 (65-75)
  source 1..33: mol_type = other RNA
acccccgacacaggcagaatcctgagcaagctc

SEQ ID NO: 59104 - RNA, 27 nt, synthetic construct
  misc_feature 1..27: note = ATP-dependent zinc metalloprotease YME1L1 (25-33)
  source 1..27: mol_type = other RNA
acccccaagaacacaagcgtgtccctg

SEQ ID NO: 59105 - RNA, 27 nt, synthetic construct
  misc_feature 1..27: note = Galectin-8 (193-201)
  source 1..27: mol_type = other RNA
acccccatgggccctgggagaacagtg

SEQ ID NO: 59106 - RNA, 27 nt, synthetic construct
  misc_feature 1..27: note = WAS/WASL-interacting protein family member 1 (331-339)
  source 1..27: mol_type = other RNA
acccccagactgcctcagaggaacctc

SEQ ID NO: 59107 - RNA, 33 nt, synthetic construct
  misc_feature 1..33: note = ATP synthase F(0) complex subunit C2, mitochondrial (26-36)
  source 1..33: mol_type = other RNA
acccccagcctggtgaagtccacatctcagctc

SEQ ID NO: 59108 - RNA, 27 nt, synthetic construct
  misc_feature 1..27: note = Ubiquitin carboxyl-terminal hydrolase 48 (860-868)
  source 1..27: mol_type = other RNA
acccaggccacaatctacgtgcacaag

SEQ ID NO: 59109 - RNA, 33 nt, synthetic construct
  misc_feature 1..33: note = HLA class I histocompatibility antigen, B-13 alpha chain (63-73)
  source 1..33: mol_type = other RNA
acccagatcagcaagacaaacactcaaacgtac

SEQ ID NO: 59110 - RNA, 30 nt, synthetic construct
  misc_feature 1..30: note = rRNA-processing protein FCF1 homolog (61-70)
  source 1..30: mol_type = other RNA
acccagctgggccccccttaccacatcctc

SEQ ID NO: 59111 - RNA, 27 nt, synthetic construct
  misc_feature 1..27: note = 14-3-3 protein gamma (115-123)
  source 1..27: mol_type = other RNA
acccagtacgagagcaaggtgttctat

SEQ ID NO: 59112 - RNA, 27 nt, synthetic construct
  misc_feature 1..27: note = Gamma-interferon-inducible protein 16 (419-427)
  source 1..27: mol_type = other RNA
accacattccccgagagccacctgaga

SEQ ID NO: 59113 - RNA, 27 nt, synthetic construct
  misc_feature 1..27: note = MIT domain-containing protein 1 (236-244)
  source 1..27: mol_type = other RNA
accacagtggacatcttccacaagaaa

SEQ ID NO: 59114 - RNA, 27 nt, synthetic construct
  misc_feature 1..27: note = Lys-63-specific deubiquitinase BRCC36 (66-74)
  source 1..27: mol_type = other RNA
accgtggccgagaaggtcgacgctgtt

SEQ ID NO: 59115 - RNA, 27 nt, synthetic construct
  misc_feature 1..27: note = 28S ribosomal protein S24, mitochondrial (78-86)
  source 1..27: mol_type = other RNA
accgtggaggacgtcttcctgagaaag

SEQ ID NO: 59116 - RNA, 36 nt, synthetic construct
  misc_feature 1..36: note = Phosphatidylinositol-4,5-bisphosphate 4-phosphatase 2 (39-50)
  source 1..36: mol_type = other RNA
accgtggagagccccgaactgcaggtcccttacaag

SEQ ID NO: 59117 - RNA, 27 nt, synthetic construct
  misc_feature 1..27: note = Glycine-tRNA ligase (533-541)
  source 1..27: mol_type = other RNA
accgtgttcgagcacacatttcatgtc

SEQ ID NO: 59118 - RNA, 33 nt, synthetic construct
  misc_feature 1..33: note = Tubulin alpha-1C chain (38-48)
  source 1..33: mol_type = other RNA
accgtgatcgacgaggtcagaacaggcacttac

SEQ ID NO: 59119 - RNA, 27 nt, synthetic construct
  misc_feature 1..27: note = Transcription factor BTF3 (76-84)
  source 1..27: mol_type = other RNA
accgtgatccacttcaacaatcccaag

SEQ ID NO: 59120 - RNA, 33 nt, synthetic construct
  misc_feature 1..33: note = DNA replication licensing factor MCM6 (163-173)
  source 1..33: mol_type = other RNA
accgtgatcagagacgtcgagcagcaattcaag

SEQ ID NO: 59121 - RNA, 33 nt, synthetic construct
  misc_feature 1..33: note Dolichyl-diphosphooligosaccharide-proteinosyltransferase subunit 2 (165-175)
  source 1..33: mol_type = other RNA
accgtgctggagagcagatccctcttctctaag

SEQ ID NO: 59122 - RNA, 48 nt, synthetic construct
  misc_feature 1..48: note = Actin, cytoplasmic 2 (36-51)
  source 1..48: mol_type = other RNA
accgtgctgagcggcgggacaactatgtaccccggaatcgccgacaga

SEQ ID NO: 59123 - RNA, 27 nt, synthetic construct
  misc_feature 1..27: note = Ubiquitin-protein ligase E3A (325-333)
  source 1..27: mol_type = other RNA
acctacaaggtgatcagcaacgagttc

SEQ ID NO: 59124 - RNA, 27 nt, synthetic construct
  misc_feature 1..27: note = Vacuolar protein sorting-associated protein 51 homolog (480-488)
  source 1..27: mol_type = other RNA
gtggccgacgaggaactggtccacctc

SEQ ID NO: 59125 - RNA, 24 nt, synthetic construct
  misc_feature 1..24: note = Eukaryotic translation initiation factor 3 subunit H (221-228)
  source 1..24: mol_type = other RNA
gtggccgacaagcacgagctgctc

SEQ ID NO: 59126 - RNA, 27 nt, synthetic construct
  misc_feature 1..27: note = Bifunctional polynucleotide phosphatase/kinase (54-62)
  source 1..27: mol_type = other RNA
gtggccgaccccgagaccagaacagtc

SEQ ID NO: 59127 - RNA, 27 nt, synthetic construct
  misc_feature 1..27: note = Serine/threonine-protein kinase PLK2 (471-479)
  source 1..27: mol_type = other RNA
gtggccgacaccgtcgctagagttctg

SEQ ID NO: 59128 - RNA, 27 nt, synthetic construct
  misc_feature 1..27: note = Ubiquitin carboxyl-terminal hydrolase 16 (733-741)
  source 1..27: mol_type = other RNA
gtggccgaggaaaacaccagagtcctg

SEQ ID NO: 59129 - RNA, 27 nt, synthetic construct
  misc_feature 1..27: note = HLA class I histocompatibility antigen, B-8 alpha chain (151-159)
  source 1..27: mol_type = other RNA
gtggccgagcaggacagagcttacctg

SEQ ID NO: 59130 - RNA, 27 nt, synthetic construct
  misc_feature 1..27: note = Mitochondrial import receptor subunit TOM5 homolog (35-43)
  source 1..27: mol_type = other RNA
gtggccctgctcagagtcacccccttc

SEQ ID NO: 59131 - RNA, 54 nt, synthetic construct
  misc_feature 1..54: note = Actin, cytoplasmic 1 (13-30)
  source 1..54: mol_type = other RNA
gtggcccccgaggaacaccctgtcctgctcaccgaggctccacttaacccgaag

SEQ ID NO: 59132 - RNA, 24 nt, synthetic construct
  misc_feature 1..24: note = Polymerase I and transcript release factor (229-236)
  source 1..24: mol_type = other RNA
gtggacgatttcaagaaagccttt

SEQ ID NO: 59133 - RNA, 27 nt, synthetic construct
  misc_feature 1..27: note = Cholesteryl ester transfer protein (230-238)
  source 1..27: mol_type = other RNA
gtggacatcagcctgaccggcgatccc

SEQ ID NO: 59134 - RNA, 24 nt, synthetic construct
  misc_feature 1..24: note = Heterogeneous nuclear ribonucleoproteins C1/C2 (33-40)
  source 1..24: mol_type = other RNA
gtggaggccatcttcagcaagtac

SEQ ID NO: 59135 - RNA, 27 nt, synthetic construct
  misc_feature 1..27: note = Sodium/potassium-transporting ATPase subunit alpha-1 (701-709)
  source 1..27: mol_type = other RNA
gtggaggacagctacggccagcaatgg

SEQ ID NO: 59136 - RNA, 30 nt, synthetic construct
  misc_feature 1..30: note = 116 kDa U5 small nuclear ribonucleoprotein component (621-630)
  source 1..30: mol_type = other RNA
gtggaggaaagcggcgagcacgtcatcctg

SEQ ID NO: 59137 - RNA, 33 nt, synthetic construct
  misc_feature 1..33: note = Adenosylhomocysteinase 2 (222-232)
  source 1..33: mol_type = other RNA
gtggaggaaagcgtcaccggcgttcacagactg

SEQ ID NO: 59138 - RNA, 36 nt, synthetic construct
  misc_feature 1..36: note = ATP synthase subunit alpha, mitochondrial (96-107)
  source 1..36: mol_type = other RNA
gtggagttcagctccggcctgaaggggatgtctctc

SEQ ID NO: 59139 - RNA, 27 nt, synthetic construct
  misc_feature 1..27: note = HLA class II histocompatibility antigen, DRB1-4 beta chain (204-212)
  source 1..27: mol_type = other RNA
gtggagcaccccagcctgacctcccct

SEQ ID NO: 59140 - RNA, 33 nt, synthetic construct
  misc_feature 1..33: note = Protein disulfide-isomerase A6 (411-421)
  source 1..33: mol_type = other RNA
gtggagctggacgatctcggcaaggacgaactt

SEQ ID NO: 59141 - RNA, 27 nt, synthetic construct
  misc_feature 1..27: note = Galectin-3 (204-212)
  source 1..27: mol_type = other RNA
gtggagcccgaccacttcaaggtcgcc

SEQ ID NO: 59142 - RNA, 24 nt, synthetic construct
  misc_feature 1..24: note = SARM1 protein (269-276)
  source 1..24: mol_type = other RNA
gtggagagagaagtcgagcaggtt

SEQ ID NO: 59143 - RNA, 24 nt, synthetic construct
  misc_feature 1..24: note = N6-adenosine-methyltransferase 70 kDa subunit (116-123)
  source 1..24: mol_type = other RNA
gtggagagcctgctccagaagttc

SEQ ID NO: 59144 - RNA, 27 nt, synthetic construct
  misc_feature 1..27: note = Protein RMD5 homolog B (280-288)
  source 1..27: mol_type = other RNA
gtggagagccccctgtccgtctctttc

SEQ ID NO: 59145 - RNA, 33 nt, synthetic construct
  misc_feature 1..33: note = Nucleosome assembly protein 1-like 1 (60-70)
  source 1..33: mol_type = other RNA
gtggagacccccacaggctacatcgaaagcctg

SEQ ID NO: 59146 - RNA, 27 nt, synthetic construct
  misc_feature 1..27: note = Influenza virus NS1A-binding protein (83-91)
  source 1..27: mol_type = other RNA
gtggaggtcctgctcaactacgcctat

SEQ ID NO: 59147 - RNA, 27 nt, synthetic construct
  misc_feature 1..27: note = Rho GDP-dissociation inhibitor 1 (108-116)
  source 1..27: mol_type = other RNA
gtggagtacagaatcaagattagcttc

SEQ ID NO: 59148 - RNA, 51 nt, synthetic construct
  misc_feature 1..51: note = 40S ribosomal protein S3a (66-82)
  source 1..51: mol_type = other RNA
gtgttcgaggtcagcctggccgacctccagaacgatgaagttgcttttaga

SEQ ID NO: 59149 - RNA, 27 nt, synthetic construct
  misc_feature 1..27: note = 40S ribosomal protein S23 (112-120)
  source 1..27: mol_type = other RNA
gtgggcgacatccccggggtcagattc

SEQ ID NO: 59150 - RNA, 27 nt, synthetic construct
  misc_feature 1..27: note = AT-rich interactive domain-containing protein 1A (1378-1386)
  source 1..27: mol_type = other RNA
gtgggcgaccccgggcagagaaccctg

SEQ ID NO: 59151 - RNA, 27 nt, synthetic construct
  misc_feature 1..27: note = Bromodomain-containing protein 8 (239-247)
  source 1..27: mol_type = other RNA
gtgggcgacccccacaccgtcacagtt

SEQ ID NO: 59152 - RNA, 27 nt, synthetic construct
  misc_feature 1..27: note = F-box/LRR-repeat protein 19 (440-448)
  source 1..27: mol_type = other RNA
gtgggcgaccccagcgtccacctgctc

SEQ ID NO: 59153 - RNA, 27 nt, synthetic construct
  misc_feature 1..27: note = Nucleolar protein 56 (117-125)
  source 1..27: mol_type = other RNA
gtgatcgccgagattctgagaggcgtc

SEQ ID NO: 59154 - RNA, 27 nt, synthetic construct
  misc_feature 1..27: note = Kelch-like ECH-associated protein 1 (420-428)
  source 1..27: mol_type = other RNA
gtgatcgacggccacatttacgccgtc

SEQ ID NO: 59155 - RNA, 27 nt, synthetic construct
  misc_feature 1..27: note = Eukaryotic translation initiation factor 3 subunit L (83-91)
  source 1..27: mol_type = other RNA
gtgatcgaccagaaggtctacgagatt

SEQ ID NO: 59156 - RNA, 27 nt, synthetic construct
  misc_feature 1..27: note = E3 ubiquitin-protein ligase RNF213 (1305-1313)
  source 1..27: mol_type = other RNA
gtgatcttcaaggactttgtcaacaaa

SEQ ID NO: 59157 - RNA, 27 nt, synthetic construct
  misc_feature 1..27: note = MICOS complex subunit MIC27 (158-166)
  source 1..27: mol_type = other RNA
gtgatcattgccaaggtcaccgctaaa

SEQ ID NO: 59158 - RNA, 39 nt, synthetic construct
  misc_feature 1..39: note = Elongation factor 1-alpha 1 (344-356)
  source 1..39: mol_type = other RNA
gtgatcattctgaaccaccccggccagataagcgccggg

SEQ ID NO: 59159 - RNA, 27 nt, synthetic construct
  misc_feature 1..27: note = Plectin (1820-1828)
  source 1..27: mol_type = other RNA
gtgctggccgagaagctcgctgcaatc

SEQ ID NO: 59160 - RNA, 24 nt, synthetic construct
  misc_feature 1..24: note = Lysine-specific demethylase 5A (1593-1600)
  source 1..24: mol_type = other RNA
gtgctggacatccccagcaagtac

SEQ ID NO: 59161 - RNA, 27 nt, synthetic construct
  misc_feature 1..27: note = Integrin-linked protein kinase (219-227)
  source 1..27: mol_type = other RNA
gtgctgcacgagggcaccaacttcgtc

SEQ ID NO: 59162 - RNA, 27 nt, synthetic construct
  misc_feature 1..27: note = Interleukin-12 subunit alpha (14-22)
  source 1..27: mol_type = other RNA
gtgctgctcgaccaccttagcctggcc

SEQ ID NO: 59163 - RNA, 33 nt, synthetic construct
  misc_feature 1..33: note = Tumor necrosis factor receptor superfamily member 19 (5-15)
  source 1..33: mol_type = other RNA
gtgctgctcgagcaggaaaagaccttctttaca

SEQ ID NO: 59164 - RNA, 30 nt, synthetic construct
  misc_feature 1..30: note = Protein CNPPD1 (210-219)
  source 1..30: mol_type = other RNA
gtgctgctcgagcagcccacctggcaactt

SEQ ID NO: 59165 - RNA, 30 nt, synthetic construct; identical to SEQ ID NO: 34938
  misc_feature 1..30: note = Fatty acid synthase (2105-2114)
  source 1..30: mol_type = other RNA

SEQ ID NO: 59166 - RNA, 27 nt, synthetic construct
  misc_feature 1..27: note = 2'-deoxynucleoside 5'-phosphate N-hydrolase 1 (52-60)
  source 1..27: mol_type = other RNA
gtgctgaccgagcacgtcgccgctgca

SEQ ID NO: 59167 - RNA, 30 nt, synthetic construct; identical to SEQ ID NO: 34940
  misc_feature 1..30: note = AKT-interacting protein (200-209)
  source 1..30: mol_type = other RNA

SEQ ID NO: 59168 - RNA, 27 nt, synthetic construct
  misc_feature 1..27: note = Thioredoxin-like protein 4A (44-52)
  source 1..27: mol_type = other RNA
gtgctgtacagcatcgccgagaaggtc

SEQ ID NO: 59169 - RNA, 33 nt, synthetic construct
  misc_feature 1..33: note = Putative PIP5K1A and PSMD4-like protein (813-823)
  source 1..33: mol_type = other RNA
gtgatgcaggaccccgagttcctgcaaagcgtc

SEQ ID NO: 59170 - RNA, 48 nt, synthetic construct
  misc_feature 1..48: note = 78 kDa glucose-regulated protein (177-192)
  source 1..48: mol_type = other RNA
gtgatgagaatcattaacgagcccaccgccgctgcaatagcctacggc

SEQ ID NO: 59171 - RNA, 33 nt, synthetic construct
  misc_feature 1..33: note = Glutathione S-transferase P (200-210)
  source 1..33: mol_type = other RNA
gtgaacctgcccatcaatggcaacgggaagcag

SEQ ID NO: 59172 - RNA, 27 nt, synthetic construct
  misc_feature 1..27: note = Eukaryotic translation initiation factor 3 subunit E (109-117)
  source 1..27: mol_type = other RNA
gtgcccgccaccgacagaaacgctctg

SEQ ID NO: 59173 - RNA, 33 nt, synthetic construct
  misc_feature 1..33: note = Protein UXT (95-105)
  source 1..33: mol_type = other RNA
gtgcccgacaccagcagaatctacgtcgccctg

SEQ ID NO: 59174 - RNA, 33 nt, synthetic construct
  misc_feature 1..33: note = A-kinase-interacting protein 1 (107-117)
  source 1..33: mol_type = other RNA
gtgcccgaggaaggcggggccacccacgtctac

SEQ ID NO: 59175 - RNA, 27 nt, synthetic construct
  misc_feature 1..27: note = N-alpha-acetyltransferase 10 (67-75)
  source 1..27: mol_type = other RNA
gtgccccacggccatatcaccagcctg

SEQ ID NO: 59176 - RNA, 27 nt, synthetic construct
  misc_feature 1..27: note = Tubulin beta chain (80-88)
  source 1..27: mol_type = other RNA
gtgcccagagccatcctggtcgacctc

SEQ ID NO: 59177 - RNA, 27 nt, synthetic construct
  misc_feature 1..27: note = Protein phosphatase 1 regulatory subunit 15A (126-134)
  source 1..27: mol_type = other RNA
gtgcccagaggccaggggagccaattc

SEQ ID NO: 59178 - RNA, 27 nt, synthetic construct
  misc_feature 1..27: note = Protein Wiz (759-767)
  source 1..27: mol_type = other RNA
gtgcccagacctccacagaccagcctg

SEQ ID NO: 59179 - RNA, 24 nt, synthetic construct
  misc_feature 1..24: note = Transmembrane protein 140 (75-82)
  source 1..24: mol_type = other RNA
gtgcccagagtcggcctggggctc

SEQ ID NO: 59180 - RNA, 27 nt, synthetic construct
  misc_feature 1..27: note = Nucleolar transcription factor 1 (161-169)
  source 1..27: mol_type = other RNA
gtgcccagcaccgagagaatggtcctg

SEQ ID NO: 59181 - RNA, 27 nt, synthetic construct
  misc_feature 1..27: note = Replication protein A 70 kDa DNA-binding subunit (383-391)
  source 1..27: mol_type = other RNA
gtgagcgacttcggcgggagatccctg

SEQ ID NO: 59182 - RNA, 27 nt, synthetic construct
  misc_feature 1..27: note = Cytosolic non-specific dipeptidase (386-394)
  source 1..27: mol_type = other RNA
gtgagcgacttctcccacccccattac

SEQ ID NO: 59183 - RNA, 27 nt, synthetic construct
  misc_feature 1..27: note = Sister chromatid cohesion protein PDS5 homolog A (258-266)
  source 1..27: mol_type = other RNA
gtgagcgacctgtccgagcacgtcttc

SEQ ID NO: 59184 - RNA, 24 nt, synthetic construct
  misc_feature 1..24: note = DNA damage-inducible transcript 4 protein (124-131)
  source 1..24: mol_type = other RNA
gtgagccaggtcggcaaggagctg

SEQ ID NO: 59185 - RNA, 30 nt, synthetic construct
  misc_feature 1..30: note = Tetratricopeptide repeat protein 28 (985-994)
  source 1..30: mol_type = other RNA
gtgaccgaccccacaggcttcctgagaatg

SEQ ID NO: 59186 - RNA, 27 nt, synthetic construct
  misc_feature 1..27: note = Beta-2-syntrophin (352-360)
  source 1..27: mol_type = other RNA
gtgaccgagaaggacctgctcctttac

SEQ ID NO: 59187 - RNA, 30 nt, synthetic construct
  misc_feature 1..30: note = T-complex protein 1 subunit epsilon (13-22)
  source 1..30: mol_type = other RNA
gtgaccatcttcattagaggcgggaacaag

SEQ ID NO: 59188 - RNA, 30 nt, synthetic construct
  misc_feature 1..30: note = NHP2-like protein 1 (104-113)
  source 1..30: mol_type = other RNA
gtgaccatcaaggagggcagccagctgaaa

SEQ ID NO: 59189 - RNA, 36 nt, synthetic construct
  misc_feature 1..36: note = T-complex protein 1 subunit delta (68-79)
  source 1..36: mol_type = other RNA
gtgaccatcacaaacgacggcgccactattctgaag

SEQ ID NO: 59190 - RNA, 27 nt, synthetic construct
  misc_feature 1..27: note = HLA class I histocompatibility antigen, alpha chain E (313-321)
  source 1..27: mol_type = other RNA
gtggtcgccgctgttatctggagaaag

SEQ ID NO: 59191 - RNA, 27 nt, synthetic construct
  misc_feature 1..27: note = Jouberin (370-378)
  source 1..27: mol_type = other RNA
gtggtcgacgagcacaccggccagtac

SEQ ID NO: 59192 - RNA, 27 nt, synthetic construct
  misc_feature 1..27: note = WASH complex subunit 7 (157-165)
  source 1..27: mol_type = other RNA
gtggtcatgaacgttgtgcaccagctg

SEQ ID NO: 59193 - RNA, 33 nt, synthetic construct
  misc_feature 1..33: note = Cyclin-G-associated kinase (580-590)
  source 1..33: mol_type = other RNA
gtggtcatgacccccgttcctctgttcagcaag

SEQ ID NO: 59194 - RNA, 30 nt, synthetic construct
  misc_feature 1..30: note = Exportin-6 (715-724)
  source 1..30: mol_type = other RNA
gtggtccaggagcccggccaagttttcaag

SEQ ID NO: 59195 - RNA, 27 nt, synthetic construct
  misc_feature 1..27: note = DNA damage-binding protein 1 (508-516)
  source 1..27: mol_type = other RNA
gtggtcgttgccgtgggcagagctctg

SEQ ID NO: 59196 - RNA, 33 nt, synthetic construct
  misc_feature 1..33: note = rRNA 2'-O-methyltransferase fibrillarin (305-315)
  source 1..33: mol_type = other RNA
gtggtcgttggcgtgtacagaccccctccaaag

SEQ ID NO: 59197 - RNA, 27 nt, synthetic construct
  misc_feature 1..27: note = Transmembrane protein 41B (174-182)
  source 1..27: mol_type = other RNA
gtggtctacaagtatctgaccgagaaa

SEQ ID NO: 59198 - RNA, 27 nt, synthetic construct
  misc_feature 1..27: note = Ribose-phosphate pyrophosphokinase 1 (40-48)
  source 1..27: mol_type = other RNA
gtgtacgccatcctgacccacggcatt

SEQ ID NO: 59199 - RNA, 30 nt, synthetic construct
  misc_feature 1..30: note = ATP synthase mitochondrial F1 complex assembly factor 1 (87-96)
  source 1..30: mol_type = other RNA
gtgtacgccgtcatccccgctgagaagttc

SEQ ID NO: 59200 - RNA, 27 nt, synthetic construct
  misc_feature 1..27: note = Antizyme inhibitor 1 (320-328)
  source 1..27: mol_type = other RNA
gtgtacggcagcttcgcctccaagctg

SEQ ID NO: 59201 - RNA, 30 nt, synthetic construct; identical to SEQ ID NO: 34974
  misc_feature 1..30: note = ATP-dependent RNA helicase DHX8 (1133-1142)
  source 1..30: mol_type = other RNA

SEQ ID NO: 59202 - RNA, 27 nt, synthetic construct
  misc_feature 1..27: note = Adenosylhomocysteinase 2 (207-215)
  source 1..27: mol_type = other RNA
gtgtacaagaaatatcccaacgtcttc

SEQ ID NO: 59203 - RNA, 27 nt, synthetic construct
  misc_feature 1..27: note = Inactive tyrosine-protein kinase 7 (955-963)
  source 1..27: mol_type = other RNA
gtgtacaacagcgagtattaccacttc

SEQ ID NO: 59204 - RNA, 27 nt, synthetic construct
  misc_feature 1..27: note = 2'-5'-oligoadenylate synthase 3 (865-873)
  source 1..27: mol_type = other RNA
tgggagaaccccagagtgctgagcttc

SEQ ID NO: 59205 - RNA, 21 nt, synthetic construct
  misc_feature 1..21: note = Actin, aortic smooth muscle (358-364)
  source 1..21: mol_type = other RNA
tggatcagcaagcaggagtac

SEQ ID NO: 59206 - RNA, 27 nt, synthetic construct
  misc_feature 1..27: note = Protein LYRIC (404-412)
  source 1..27: mol_type = other RNA
tgggtggacgaggaaagagccagcctg

SEQ ID NO: 59207 - RNA, 30 nt, synthetic construct
  misc_feature 1..30: note = General transcription factor 3C polypeptide 5 (51-60)
  source 1..30: mol_type = other RNA
tacgccgaccccaccaagagactggagctc

SEQ ID NO: 59208 - RNA, 27 nt, synthetic construct
  misc_feature 1..27: note = Translocon-associated protein subunit delta (67-75)
  source 1..27: mol_type = other RNA
tacgccgacgtgggcgggaagcagttc

SEQ ID NO: 59209 - RNA, 30 nt, synthetic construct; identical to SEQ ID NO: 34982
  misc_feature 1..30: note = U5 small nuclear ribonucleoprotein 200 kDa helicase (1245-1254)
  source 1..30: mol_type = other RNA

SEQ ID NO: 59210 - RNA, 33 nt, synthetic construct
  misc_feature 1..33: note = HLA class I histocompatibility antigen, alpha chain G (137-147)
  source 1..33: mol_type = other RNA
tacgcctatgacggcaaggattacctggctctc

SEQ ID NO: 59211 - RNA, 45 nt, synthetic construct
  misc_feature 1..45: note = Cofilin-1 (85-99)
  source 1..45: mol_type = other RNA
tacgacgccacctatgagacaaaggaaagcaaaaaggaggatctg

SEQ ID NO: 59212 - RNA, 27 nt, synthetic construct
  misc_feature 1..27: note = Transcriptional adapter 2-alpha (431-439)
  source 1..27: mol_type = other RNA
tacgacttcctgatcagagagggctat

SEQ ID NO: 59213 - RNA, 27 nt, synthetic construct
  misc_feature 1..27: note = Myeloid cell nuclear differentiation antigen (31-39)
  source 1..27: mol_type = other RNA
tacgacctgggcctcaccacaaagatg

SEQ ID NO: 59214 - RNA, 27 nt, synthetic construct
  misc_feature 1..27: note = Dual specificity tyrosine-phosphorylation-regulated kinase 1A (246-254)
  source 1..27: mol_type = other RNA
tacgacctgctcagaaacaccaatttc

SEQ ID NO: 59215 - RNA, 24 nt, synthetic construct
  misc_feature 1..24: note = Renin receptor (335-342)
  source 1..24: mol_type = other RNA
tacgacagcatcatttatagaatg

SEQ ID NO: 59216 - RNA, 27 nt, synthetic construct
  misc_feature 1..27: note = Integrin beta-1 (314-322)
  source 1..27: mol_type = other RNA
tacgactatcccagcatcgcccacctg

SEQ ID NO: 59217 - RNA, 27 nt, synthetic construct
  misc_feature 1..27: note = ATP-dependent RNA helicase DDX3X (283-291)
  source 1..27: mol_type = other RNA
tacgaggaagccagaaagttcagctat

SEQ ID NO: 59218 - RNA, 27 nt, synthetic construct
  misc_feature 1..27: note = Cytochrome c oxidase subunit 7C, mitochondrial (19-27)
  source 1..27: mol_type = other RNA
tacgaggaaggccccgggaagaacctg

SEQ ID NO: 59219 - RNA, 27 nt, synthetic construct
  misc_feature 1..27: note = Spectrin beta chain, non-erythrocytic 1 (461-469)
  source 1..27: mol_type = other RNA
tacgaggaaagagtgcaggccgtcgtt

SEQ ID NO: 59220 - RNA, 33 nt, synthetic construct
  misc_feature 1..33: note = La-related protein 1 (633-643)
  source 1..33: mol_type = other RNA
tacgagatcgacgatagagacgtgaacaagatt

SEQ ID NO: 59221 - RNA, 30 nt, synthetic construct
  misc_feature 1..30: note = Nodal modulator 2 (181-190)
  source 1..30: mol_type = other RNA
tacgagatcctggccacccaccccacatgg

SEQ ID NO: 59222 - RNA, 27 nt, synthetic construct
  misc_feature 1..27: note = Keratin, type I cytoskeletal 10 (42-50)
  source 1..27: mol_type = other RNA
tacgagaacgaagtggccctgagacag

SEQ ID NO: 59223 - RNA, 27 nt, synthetic construct
  misc_feature 1..27: note = Ubiquitin carboxyl-terminal hydrolase 22 (258-266)
  source 1..27: mol_type = other RNA
tacgagcagcaagacgcccacgaattc

SEQ ID NO: 59224 - RNA, 30 nt, synthetic construct
  misc_feature 1..30: note = Regulator of microtubule dynamics protein 1 (94-103)
  source 1..30: mol_type = other RNA
tacgagagcggcgaaaccgagaagctgtat

SEQ ID NO: 59225 - RNA, 27 nt, synthetic construct
  misc_feature 1..27: note = Thioredoxin-interacting protein (97-105)
  source 1..27: mol_type = other RNA
tacgagtataagttcggctttgaactg

SEQ ID NO: 59226 - RNA, 33 nt, synthetic construct
  misc_feature 1..33: note = Hemoglobin subunit alpha (25-35)
  source 1..33: mol_type = other RNA
tacggcgccgaggctctggaaagaatgttcctc

SEQ ID NO: 59227 - RNA, 27 nt, synthetic construct
  misc_feature 1..27: note = Solute carrier family 25 member 43 (300-308)
  source 1..27: mol_type = other RNA
tacatcctgagccccctctcctataag

SEQ ID NO: 59228 - RNA, 30 nt, synthetic construct
  misc_feature 1..30: note = UDP-N-acetylglucosamine transporter (266-275)
  source 1..30: mol_type = other RNA
tacatctatgacggcgagctggtgagcaag

SEQ ID NO: 59229 - RNA, 30 nt, synthetic construct
  misc_feature 1..30: note = Zinc finger protein 573 (42-51)
  source 1..30: mol_type = other RNA
tacctggaccccaaccagagagatctctat

SEQ ID NO: 59230 - RNA, 27 nt, synthetic construct
  misc_feature 1..27: note = Splicing factor 3A subunit 3 (192-200)
  source 1..27: mol_type = other RNA
tacctgcaggactataccgatagagtg

SEQ ID NO: 59231 - RNA, 33 nt, synthetic construct
  misc_feature 1..33: note = Regulator of microtubule dynamics protein 1 (92-102)
  source 1..33: mol_type = other RNA
tacctgtatgagagcggcgaaaccgagaagctc

SEQ ID NO: 59232 - RNA, 27 nt, synthetic construct
  misc_feature 1..27: note = Myc proto-oncogene protein (334-342)
  source 1..27: mol_type = other RNA
taccccgccgctaagagagtgaaactg

SEQ ID NO: 59233 - RNA, 27 nt, synthetic construct
  misc_feature 1..27: note = Exportin-T (608-616)
  source 1..27: mol_type = other RNA
taccccgccgagagaaagcaggctctg

SEQ ID NO: 59234 - RNA, 30 nt, synthetic construct
  misc_feature 1..30: note = Ubiquitin-conjugating enzyme E2 D2 (59-68)
  source 1..30: mol_type = other RNA
taccccttcaagcctccaaaagtggccttt

SEQ ID NO: 59235 - RNA, 30 nt, synthetic construct
  misc_feature 1..30: note = Ubiquitin-conjugating enzyme E2 E1 (89-98)
  source 1..30: mol_type = other RNA
taccccttcaagcctccaaaagtgaccttt

SEQ ID NO: 59236 - RNA, 27 nt, synthetic construct
  misc_feature 1..27: note = ATP-dependent RNA helicase DDX24 (383-391)
  source 1..27: mol_type = other RNA
taccccaagagacctctgctcggcctt

SEQ ID NO: 59237 - RNA, 27 nt, synthetic construct
  misc_feature 1..27: note = All-trans-retinol 13,14-reductase (15-23)
  source 1..27: mol_type = other RNA
taccccagaggcgggagctccgagatc

SEQ ID NO: 59238 - RNA, 27 nt, synthetic construct
  misc_feature 1..27: note = Laminin subunit gamma-1 (615-623)
  source 1..27: mol_type = other RNA
taccccagcgagaccacagtgaagtat

SEQ ID NO: 59239 - RNA, 27 nt, synthetic construct
  misc_feature 1..27: note = Eukaryotic translation initiation factor 3 subunit E (62-70)
  source 1..27: mol_type = other RNA
tacagcgacgatatcccccacgccctg

SEQ ID NO: 59240 - RNA, 36 nt, synthetic construct
  misc_feature 1..36: note = Bromodomain and WD repeat-containing protein 1 (854-865)
  source 1..36: mol_type = other RNA
tacagcgagtcctcttcagacagtagctccagatat

SEQ ID NO: 59241 - RNA, 27 nt, synthetic construct
  misc_feature 1..27: note = Nuclear pore complex protein Nup160 (345-353)
  source 1..27: mol_type = other RNA
tacagcctggaccacatctcctctctc

SEQ ID NO: 59242 - RNA, 27 nt, synthetic construct
  misc_feature 1..27: note = ATP-dependent RNA helicase DDX51 (304-312)
  source 1..27: mol_type = other RNA
tacaccgacgccacacccctgagagtg

SEQ ID NO: 59243 - RNA, 24 nt, synthetic construct
  misc_feature 1..24: note = Cytosolic purine 5'-nucleotidase (255-262)
  source 1..24: mol_type = other RNA
tacaccgacaagatcatgacatat

SEQ ID NO: 59244 - RNA, 30 nt, synthetic construct
  misc_feature 1..30: note = Sterol regulatory element-binding protein cleavage-activating protein (160-169)
  source 1..30: mol_type = other RNA
tacaccgaccccgccggcctgagaaactat

SEQ ID NO: 59245 - RNA, 27 nt, synthetic construct
  misc_feature 1..27: note = General transcription factor 3C polypeptide 2 (787-795)
  source 1..27: mol_type = other RNA
tacaccgagacagtgaaccaccattat

SEQ ID NO: 59246 - RNA, 27 nt, synthetic construct
  misc_feature 1..27: note = Cytochrome c oxidase subunit 1 (403-411)
  source 1..27: mol_type = other RNA
tacaccctggaccagacatatgccaag

SEQ ID NO: 59247 - RNA, 27 nt, synthetic construct
  misc_feature 1..27: note = 3-phosphoinositide-dependent protein kinase 1 (486-494)
  source 1..27: mol_type = other RNA
tacgtggaccccgtcaacaaggttctg

SEQ ID NO: 59248 - RNA, 30 nt, synthetic construct
  misc_feature 1..30: note = Alanine-tRNA ligase, cytoplasmic (497-506)
  source 1..30: mol_type = other RNA
tacgtgttcgagaacaccgtcgccacagtt

SEQ ID NO: 59249 - RNA, 42 nt, synthetic construct
  misc_feature 1..42: note = Actin, aortic smooth muscle (55-68)
  source 1..42: mol_type = other RNA
tacgtgggcgacgaggcccagagcaagagagggatcctgacc

SEQ ID NO: 59250 - RNA, 27 nt, synthetic construct
  misc_feature 1..27: note = Exocyst complex component 2 (206-214)
  source 1..27: mol_type = other RNA
tactatgccgaggtggaaaccagaatc

SEQ ID NO: 59251 - RNA, 27 nt, synthetic construct
  misc_feature 1..27: note = Nuclear receptor corepressor 2 (332-340)
  source 1..27: mol_type = other RNA
tactatgagaagcagttccccgaaatc

SEQ ID NO: 59252 - RNA, 27 nt, synthetic construct
  misc_feature 1..27: note = Plexin-B2 (1-9)
  source 1..27: mol_type = other RNA
tactataccgacatcatgcacacactg

SEQ ID NO: 59253 - RNA, 27 nt, synthetic construct
  misc_feature 1..27: note = Tankyrase-1 (100-108)
  source 1..27: mol_type = other RNA
gccgctgcacccgtggtccctgccgtt

SEQ ID NO: 59254 - RNA, 27 nt, synthetic construct
  misc_feature 1..27: note = Ubiquitin-conjugating enzyme E2 J2 (242-250)
  source 1..27: mol_type = other RNA
gccgctttcgcatacaccgtgaagtat

SEQ ID NO: 59255 - RNA, 27 nt, synthetic construct
  misc_feature 1..27: note = DNA replication licensing factor MCM5 (326-334)
  source 1..27: mol_type = other RNA
gccgctctgcccaacgtgtacgaggtc

SEQ ID NO: 59256 - RNA, 27 nt, synthetic construct
  misc_feature 1..27: note = Heterogeneous nuclear ribonucleoprotein Q (215-223)
  source 1..27: mol_type = other RNA
gccgctcaggaggcagtgaagctgtac

SEQ ID NO: 59257 - RNA, 27 nt, synthetic construct
  misc_feature 1..27: note = Zinc finger protein 609 (360-368)
  source 1..27: mol_type = other RNA
gccgaggctgacaagatctacagcttc

SEQ ID NO: 59258 - RNA, 27 nt, synthetic construct
  misc_feature 1..27: note = M-phase inducer phosphatase 2 (285-293)
  source 1..27: mol_type = other RNA
gccgaggaacccaaggctagagtgctg

SEQ ID NO: 59259 - RNA, 30 nt, synthetic construct; identical to SEQ ID NO: 35032
  misc_feature 1..30: note = SHC SH2 domain-binding protein 1 (437-446)
  source 1..30: mol_type = other RNA

SEQ ID NO: 59260 - RNA, 27 nt, synthetic construct
  misc_feature 1..27: note = Pre-mRNA-splicing factor ATP-dependent RNA helicase DHX15 (563-571)
  source 1..27: mol_type = other RNA
gccgagttccccctggaccctcagctc

SEQ ID NO: 59261 - RNA, 33 nt, synthetic construct
  misc_feature 1..33: note = Intraflagellar transport protein 81 homolog (43-53)
  source 1..33: mol_type = other RNA
gccgagatcgaccccaagcagctggtggatatt

SEQ ID NO: 59262 - RNA, 27 nt, synthetic construct
  misc_feature 1..27: note = Clathrin heavy chain 1 (493-501)
  source 1..27: mol_type = other RNA
gccgagaccggccaggtgcaaaagatc

SEQ ID NO: 59263 - RNA, 27 nt, synthetic construct
  misc_feature 1..27: note = Uncharacterized protein C8orf59 (62-70)
  source 1..27: mol_type = other RNA
gcccacttcgctaagagcatctccctg

SEQ ID NO: 59264 - RNA, 27 nt, synthetic construct
  misc_feature 1..27: note = 60S ribosomal protein L9 (97-105)
  source 1..27: mol_type = other RNA
gcccacttccccatcaacgtggtcatt

SEQ ID NO: 59265 - RNA, 27 nt, synthetic construct
  misc_feature 1..27: note = Intraflagellar transport protein 27 homolog (30-38)
  source 1..27: mol_type = other RNA
gcccacttccagaagagctacaccctg

SEQ ID NO: 59266 - RNA, 27 nt, synthetic construct
  misc_feature 1..27: note = Xaa-Pro aminopeptidase 1 (333-341)
  source 1..27: mol_type = other RNA
gcccacatcaaggacgctgtggcactg

SEQ ID NO: 59267 - RNA, 27 nt, synthetic construct
  misc_feature 1..27: note = CCR4-NOT transcription complex subunit 1 (2246-2254)
  source 1..27: mol_type = other RNA
gcccacatggacatcttccagaacctg

SEQ ID NO: 59268 - RNA, 27 nt, synthetic construct
  misc_feature 1..27: note = NEDD8 ultimate buster 1 (148-156)
  source 1..27: mol_type = other RNA
gcccacaacgtgaaggctatggtcctg

SEQ ID NO: 59269 - RNA, 30 nt, synthetic construct
  misc_feature 1..30: note = Peptidyl-prolyl cis-trans isomerase FKBP8 (230-239)
  source 1..30: mol_type = other RNA
gcccactaccagagagctgacttcgtgctg

SEQ ID NO: 59270 - RNA, 27 nt, synthetic construct
  misc_feature 1..27: note = Zinc phosphodiesterase ELAC protein 2 (230-238)
  source 1..27: mol_type = other RNA
gccatcgctcccattatagcagccgtg

SEQ ID NO: 59271 - RNA, 30 nt, synthetic construct
  misc_feature 1..30: note = Sister chromatid cohesion protein PDS5 homolog A (274-283)
  source 1..30: mol_type = other RNA
gccatcgacccccacctgctccttagcgtg

SEQ ID NO: 59272 - RNA, 27 nt, synthetic construct
  misc_feature 1..27: note = RNA-binding motif, single-stranded-interacting protein 2 (87-95)
  source 1..27: mol_type = other RNA
gccatcctggacaagaccacaaacaaa

SEQ ID NO: 59273 - RNA, 27 nt, synthetic construct
  misc_feature 1..27: note = S-phase kinase-associated protein 1 (53-61)
  source 1..27: mol_type = other RNA
gccatcctgaagaaagtgattcagtgg

SEQ ID NO: 59274 - RNA, 27 nt, synthetic construct
  misc_feature 1..27: note = Importin-11 (662-670)
  source 1..27: mol_type = other RNA
gccatcctgaccacactcattcacctt

SEQ ID NO: 59275 - RNA, 27 nt, synthetic construct
  misc_feature 1..27: note = Probable ATP-dependent RNA helicase DDX5 (466-474)
  source 1..27: mol_type = other RNA
gccatcaaccccaagctgctccagctt

SEQ ID NO: 59276 - RNA, 27 nt, synthetic construct
  misc_feature 1..27: note = Mitochondrial fission process protein 1 (94-102)
  source 1..27: mol_type = other RNA
gccatccccggcttcaccattaacaga

SEQ ID NO: 59277 - RNA, 33 nt, synthetic construct
  misc_feature 1..33: note = Rab GDP dissociation inhibitor beta (163-173)
  source 1..33: mol_type = other RNA
gccatctacggcgggacctatatgctgaacaag

SEQ ID NO: 59278 - RNA, 27 nt, synthetic construct
  misc_feature 1..27: note = Protein SHQ1 homolog (400-408)
  source 1..27: mol_type = other RNA
gccctggctgaggcactcaaggaagtg

SEQ ID NO: 59279 - RNA, 27 nt, synthetic construct
  misc_feature 1..27: note = DNA mismatch repair protein Msh2 (789-797)
  source 1..27: mol_type = other RNA
gccctggctaaccagatccccaccgtg

SEQ ID NO: 59280 - RNA, 27 nt, synthetic construct
  misc_feature 1..27: note = EH domain-containing protein 2 (507-515)
  source 1..27: mol_type = other RNA
gccctggctagccacctcatcgaggca

SEQ ID NO: 59281 - RNA, 27 nt, synthetic construct
  misc_feature 1..27: note = Carboxypeptidase Q (122-130)
  source 1..27: mol_type = other RNA
gccctggctagcctcatcagatccgtg

SEQ ID NO: 59282 - RNA, 27 nt, synthetic construct
  misc_feature 1..27: note = serine/threonine-protein phosphatase 2A 65 kDa regulatory subunit A beta isoform isoform e (229-237)
  source 1..27: mol_type = other RNA
gccctggctagcgtgatcatgggcctc

SEQ ID NO: 59283 - RNA, 27 nt, synthetic construct
  misc_feature 1..27: note = Fidgetin-like protein 1 (133-141)
  source 1..27: mol_type = other RNA
gccctggctagcgtggtcatccacaag

SEQ ID NO: 59284 - RNA, 27 nt, synthetic construct
  misc_feature 1..27: note = Cleavage and polyadenylation specificity factor subunit 1 (195-203)
  source 1..27: mol_type = other RNA
gccctggacgagaagctccttaacatc

SEQ ID NO: 59285 - RNA, 30 nt, synthetic construct
  misc_feature 1..30: note = Serine/threonine-protein kinase 10 (901-910)
  source 1..30: mol_type = other RNA
gccctggacgagagccacaaccagaatctc

SEQ ID NO: 59286 - RNA, 30 nt, synthetic construct
  misc_feature 1..30: note = Protein phosphatase 1 regulatory subunit 15B (166-175)
  source 1..30: mol_type = other RNA
gccctggaccccgctgcacaggccttcctc

SEQ ID NO: 59287 - RNA, 33 nt, synthetic construct
  misc_feature 1..33: note = Cardiolipin synthase (CMP-forming) (167-177)
  source 1..33: mol_type = other RNA
gccctggaccccctcgctgataagatccttatt

SEQ ID NO: 59288 - RNA, 27 nt, synthetic construct
  misc_feature 1..27: note = Splicing regulatory glutamine/lysine-rich protein 1 (152-160)
  source 1..27: mol_type = other RNA
gccctggaccccaacatcgctaccctc

SEQ ID NO: 59289 - RNA, 27 nt, synthetic construct
  misc_feature 1..27: note = ATP-binding cassette sub-family A member 7 (273-281)
  source 1..27: mol_type = other RNA
gccctggacagccaccccctctccaga

SEQ ID NO: 59290 - RNA, 27 nt, synthetic construct
  misc_feature 1..27: note = Ras-related protein Rab-11A (155-163)
  source 1..27: mol_type = other RNA
gccctggacagcaccaacgtggaggct

SEQ ID NO: 59291 - RNA, 27 nt, synthetic construct
  misc_feature 1..27: note = AT-rich interactive domain-containing protein 1B (1641-1649)
  source 1..27: mol_type = other RNA
gccctggacaccatcaacattctcctt

SEQ ID NO: 59292 - RNA, 30 nt, synthetic construct
  misc_feature 1..30: note = SWI/SNF-related matrix-associated actin-dependent regulator of chromatin subfamily A member 5 (920-929)
  source 1..30: mol_type = other RNA
gccctggacaccaagatcggcagatacaaa

SEQ ID NO: 59293 - RNA, 27 nt, synthetic construct
  misc_feature 1..27: note = Glutamate carboxypeptidase 2 (718-726)
  source 1..27: mol_type = other RNA
gccctgttcgacatcgagagcaaggtg

SEQ ID NO: 59294 - RNA, 33 nt, synthetic construct; identical to SEQ ID NO: 35067
  misc_feature 1..33: note = Sodium/potassium-transporting ATPase subunit beta-3 (132-142)
  source 1..33: mol_type = other RNA

SEQ ID NO: 59295 - RNA, 30 nt, synthetic construct
  misc_feature 1..30: note = RING finger protein 214 (467-476)
  source 1..30: mol_type = other RNA
gccctgttccccgctcctctcgcacagatc

SEQ ID NO: 59296 - RNA, 27 nt, synthetic construct
  misc_feature 1..27: note = Protein disulfide-isomerase A3 (7-15)
  source 1..27: mol_type = other RNA
gccctgttccccggcgtggctctcctt

SEQ ID NO: 59297 - RNA, 33 nt, synthetic construct
  misc_feature 1..33: note = Exportin-2 (684-694)
  source 1..33: mol_type = other RNA
gccctgttcccccacctccttcagcctgtgctg

SEQ ID NO: 59298 - RNA, 27 nt, synthetic construct
  misc_feature 1..27: note = Zinc finger BED domain-containing protein 1 (596-604)
  source 1..27: mol_type = other RNA
gccctgttccccctccttcctaaggtg

SEQ ID NO: 59299 - RNA, 27 nt, synthetic construct
  misc_feature 1..27: note = UDP-glucuronosyltransferase 1-10 (322-330)
  source 1..27: mol_type = other RNA
gccctgggcaagatcccccagaccgtg

SEQ ID NO: 59300 - RNA, 30 nt, synthetic construct; identical to SEQ ID NO: 35073
  misc_feature 1..30: note = Developmentally-regulated GTP-binding protein 2 (66-75)
  source 1..30: mol_type = other RNA

SEQ ID NO: 59301 - RNA, 27 nt, synthetic construct
  misc_feature 1..27: note = Transcription factor Maf (116-124)
  source 1..27: mol_type = other RNA
gccctgatcagcaactcccaccagctc

SEQ ID NO: 59302 - RNA, 24 nt, synthetic construct
  misc_feature 1..24: note = U3 small nucleolar ribonucleoprotein protein IMP3 (78-85)
  source 1..24: mol_type = other RNA
gccctgctcgacaagctttacgct

SEQ ID NO: 59303 - RNA, 27 nt, synthetic construct
  misc_feature 1..27: note = microtubule-actin cross-linking factor 1 isoform X2 (1652-1660)
  source 1..27: mol_type = other RNA
gccctgctcgactgggtgaccagcgtc

SEQ ID NO: 59304 - RNA, 33 nt, synthetic construct
  misc_feature 1..33: note = Coatomer subunit zeta-1 (90-100)
  source 1..33: mol_type = other RNA
gccctgctcgagaacatggaaggccttttcctg

SEQ ID NO: 59305 - RNA, 30 nt, synthetic construct
  misc_feature 1..30: note = Serine/threonine-protein kinase 35 (192-201)
  source 1..30: mol_type = other RNA
gccctgctcgagaaccccaagatggaactt

SEQ ID NO: 59306 - RNA, 27 nt, synthetic construct
  misc_feature 1..27: note = GRIP and coiled-coil domain-containing protein 2 (277-285)
  source 1..27: mol_type = other RNA
gccctgctcgagaccgtgaacagactt

SEQ ID NO: 59307 - RNA, 27 nt, synthetic construct
  misc_feature 1..27: note = Progestin and adipoQ receptor family member 4 (146-154)
  source 1..27: mol_type = other RNA
gccctgctcggcgggcttgtgaacgtc

SEQ ID NO: 59308 - RNA, 33 nt, synthetic construct
  misc_feature 1..33: note = Elongation of very long chain fatty acids protein 5 (14-24)
  source 1..33: mol_type = other RNA
gccctgctcggccccagagacaccagggtgaag

SEQ ID NO: 59309 - RNA, 27 nt, synthetic construct
  misc_feature 1..27: note = Minor histocompatibility antigen H13 (43-51)
  source 1..27: mol_type = other RNA
gccctgctccccatcttctttggcgct

SEQ ID NO: 59310 - RNA, 27 nt, synthetic construct
  misc_feature 1..27: note = Transcription factor IIIB 90 kDa subunit (582-590)
  source 1..27: mol_type = other RNA
gccctgctccccagctcccctaccctt

SEQ ID NO: 59311 - RNA, 27 nt, synthetic construct
  misc_feature 1..27: note = TAF6-like RNA polymerase II p300/CBP-associated factor-associated factor 65 kDa subunit 6L (191-199)
  source 1..27: mol_type = other RNA
gccctgctcccctacttcgtgtatgtc

SEQ ID NO: 59312 - RNA, 27 nt, synthetic construct
  misc_feature 1..27: note = Plectin (403-411)
  source 1..27: mol_type = other RNA
gccctgctccagagcgacgtgagactt

SEQ ID NO: 59313 - RNA, 27 nt, synthetic construct
  misc_feature 1..27: note = RNA-binding protein Raly (187-195)
  source 1..27: mol_type = other RNA
gccctgctcagcagacttgagcagatc

SEQ ID NO: 59314 - RNA, 27 nt, synthetic construct
  misc_feature 1..27: note = Serine/threonine-protein phosphatase 6 regulatory ankyrin repeat subunit B (148-156)
  source 1..27: mol_type = other RNA
gccctgaacggccacgtggagatggtc

SEQ ID NO: 59315 - RNA, 27 nt, synthetic construct
  misc_feature 1..27: note = Ankyrin repeat domain-containing protein 27 (605-613)
  source 1..27: mol_type = other RNA
gccctgaacagcaagatcctctccgtg

SEQ ID NO: 59316 - RNA, 27 nt, synthetic construct
  misc_feature 1..27: note = Zinc finger protein 148 (107-115)
  source 1..27: mol_type = other RNA
gccctgaacgtgcccatcagcgtcaag

SEQ ID NO: 59317 - RNA, 27 nt, synthetic construct
  misc_feature 1..27: note = Putative eukaryotic translation initiation factor 2 subunit 3-like protein (363-371)
  source 1..27: mol_type = other RNA
gccctgcccgagatcttcaccgaactc

SEQ ID NO: 59318 - RNA, 27 nt, synthetic construct
  misc_feature 1..27: note = La-related protein 1 (131-139)
  source 1..27: mol_type = other RNA
gccctgccccctgtgctcaccacagtc

SEQ ID NO: 59319 - RNA, 27 nt, synthetic construct
  misc_feature 1..27: note = Importin subunit alpha-5 (339-347)
  source 1..27: mol_type = other RNA
gccctgcagagcctccttcacctgttg

SEQ ID NO: 59320 - RNA, 27 nt, synthetic construct
  misc_feature 1..27: note = Nuclear receptor-interacting protein 1 (745-753)
  source 1..27: mol_type = other RNA
gccctgagcgagcagatcctcatggtg

SEQ ID NO: 59321 - RNA, 27 nt, synthetic construct
  misc_feature 1..27: note = Glutamate-rich WD repeat-containing protein 1 (434-442)
  source 1..27: mol_type = other RNA
gccctgagcggcttcaccatctttaga

SEQ ID NO: 59322 - RNA, 27 nt, synthetic construct
  misc_feature 1..27: note = Fidgetin-like protein 1 (268-276)
  source 1..27: mol_type = other RNA
gccctgagcaaccccatcctcaataag

SEQ ID NO: 59323 - RNA, 27 nt, synthetic construct
  misc_feature 1..27: note = TBC domain-containing protein kinase-like protein (116-124)
  source 1..27: mol_type = other RNA
gccctgagcccccacaacatcctcctt

SEQ ID NO: 59324 - RNA, 27 nt, synthetic construct
  misc_feature 1..27: note = Enhancer of mRNA-decapping protein 4 (739-747)
  source 1..27: mol_type = other RNA
gccctgagccaggacatccccgagatt

SEQ ID NO: 59325 - RNA, 27 nt, synthetic construct
  misc_feature 1..27: note = Quinone oxidoreductase-like protein 1 (41-49)
  source 1..27: mol_type = other RNA
gccctgagccagatcaacaccaagctc

SEQ ID NO: 59326 - RNA, 27 nt, synthetic construct
  misc_feature 1..27: note = Prelamin-A/C (147-155)
  source 1..27: mol_type = other RNA
gccctgagcaccgctctctccgagaag

SEQ ID NO: 59327 - RNA, 27 nt, synthetic construct
  misc_feature 1..27: note = Cyclin-dependent kinase 4 (96-104)
  source 1..27: mol_type = other RNA
gccctgacccccgtggtcgttacactc

SEQ ID NO: 59328 - RNA, 27 nt, synthetic construct
  misc_feature 1..27: note = Transcription initiation factor TFIID subunit 2 (948-956)
  source 1..27: mol_type = other RNA
gccctggtggaccagctctggaagctt

SEQ ID NO: 59329 - RNA, 27 nt, synthetic construct
  misc_feature 1..27: note = Beta-hexosaminidase subunit beta (22-30)
  source 1..27: mol_type = other RNA
gccctggtggtccaggttgctgaggca

SEQ ID NO: 59330 - RNA, 27 nt, synthetic construct
  misc_feature 1..27: note = Nesprin-2 (1646-1654)
  source 1..27: mol_type = other RNA
gccctgtgggacaagctcttcaacctt

SEQ ID NO: 59331 - RNA, 33 nt, synthetic construct
  misc_feature 1..33: note = Transmembrane protein 234 (16-26)
  source 1..33: mol_type = other RNA
gccctgtggggcgggacccagcccctccttaag

SEQ ID NO: 59332 - RNA, 27 nt, synthetic construct
  misc_feature 1..27: note = 28S ribosomal protein S29, mitochondrial (267-275)
  source 1..27: mol_type = other RNA
gccctgtggggcagaaccacactcaag

SEQ ID NO: 59333 - RNA, 27 nt, synthetic construct
  misc_feature 1..27: note = Lamin-B receptor (434-442)
  source 1..27: mol_type = other RNA
gccctgtggaacgaggaagctctcctt

SEQ ID NO: 59334 - RNA, 27 nt, synthetic construct
  misc_feature 1..27: note = CAS1 domain-containing protein 1 (533-541)
  source 1..27: mol_type = other RNA
gccctgtggccccagatcattcaaaag

SEQ ID NO: 59335 - RNA, 33 nt, synthetic construct
  misc_feature 1..33: note = Tetratricopeptide repeat protein 14 (349-359)
  source 1..33: mol_type = other RNA
gccctgtacgctaccaagggcagcctcaacaaa

SEQ ID NO: 59336 - RNA, 27 nt, synthetic construct
  misc_feature 1..27: note = Ubiquitin carboxyl-terminal hydrolase 4 (552-560)
  source 1..27: mol_type = other RNA
gccctgtacggccagcccctccttctg

SEQ ID NO: 59337 - RNA, 27 nt, synthetic construct
  misc_feature 1..27: note = Tyrosine-protein kinase Fyn (383-391)
  source 1..27: mol_type = other RNA
gccctgtacggcagattcaccatcaag

SEQ ID NO: 59338 - RNA, 27 nt, synthetic construct
  misc_feature 1..27: note = Putative ATP-dependent RNA helicase DHX57 (1220-1228)
  source 1..27: mol_type = other RNA
gccctgtaccccaacgtggtccaggtt

SEQ ID NO: 59339 - RNA, 27 nt, synthetic construct
  misc_feature 1..27: note = Nuclear pore complex protein Nup155 (411-419)
  source 1..27: mol_type = other RNA
gccctgtacagcaagggcatcctcctt

SEQ ID NO: 59340 - RNA, 27 nt, synthetic construct
  misc_feature 1..27: note = Heterogeneous nuclear ribonucleoprotein A0 (64-72)
  source 1..27: mol_type = other RNA
gccatggctgcaagcccccacgccgtg

SEQ ID NO: 59341 - RNA, 27 nt, synthetic construct
  misc_feature 1..27: note = Synemin (1524-1532)
  source 1..27: mol_type = other RNA
gccatgttcgacaagaaagtgcagctg

SEQ ID NO: 59342 - RNA, 30 nt, synthetic construct
  misc_feature 1..30: note = DNA-dependent protein kinase catalytic subunit (1302-1311)
  source 1..30: mol_type = other RNA
gccatgcacgacatcattgctgcagagaag

SEQ ID NO: 59343 - RNA, 27 nt, synthetic construct
  misc_feature 1..27: note = Methionine synthase (186-194)
  source 1..27: mol_type = other RNA
gccatgcacggcgtgttcctgtaccat

SEQ ID NO: 59344 - RNA, 27 nt, synthetic construct
  misc_feature 1..27: note = Transformation/transcription domain-associated protein (2516-2524)
  source 1..27: mol_type = other RNA
gccatgctgcccagcatcaccaacgtg

SEQ ID NO: 59345 - RNA, 27 nt, synthetic construct
  misc_feature 1..27: note = Heterogeneous nuclear ribonucleoprotein A1 (71-79)
  source 1..27: mol_type = other RNA
gccatgaacgctagaccccacaaggtg

SEQ ID NO: 59346 - RNA, 30 nt, synthetic construct
  misc_feature 1..30: note = Double-strand-break repair protein rad21 homolog (467-476)
  source 1..30: mol_type = other RNA
gccatgccccctccaccgccccagggcgtg

SEQ ID NO: 59347 - RNA, 33 nt, synthetic construct
  misc_feature 1..33: note = Biogenesis of lysosome-related organelles complex 1 subunit 3 (99-109)
  source 1..33: mol_type = other RNA
gcccccgctcctgcaccagccagaagcctgctc

SEQ ID NO: 59348 - RNA, 27 nt, synthetic construct
  misc_feature 1..27: note = Solute carrier family 23 member 2 (174-182)
  source 1..27: mol_type = other RNA
gcccccgctagagcaatcctgagcctc

SEQ ID NO: 59349 - RNA, 27 nt, synthetic construct
  misc_feature 1..27: note = ATP-binding cassette sub-family F member 3 (303-311)
  source 1..27: mol_type = other RNA
gcccccgctagagcaagcgtgatcctg

SEQ ID NO: 59350 - RNA, 27 nt, synthetic construct
  misc_feature 1..27: note = Syndecan-4 (2-10)
  source 1..27: mol_type = other RNA
gcccccgctagactgttcgcactcctt

SEQ ID NO: 59351 - RNA, 30 nt, synthetic construct
  misc_feature 1..30: note = Ankyrin repeat domain-containing protein 11 (1778-1787)
  source 1..30: mol_type = other RNA
gcccccgctagacctctgagcaccaacctc

SEQ ID NO: 59352 - RNA, 27 nt, synthetic construct
  misc_feature 1..27: note = Solute carrier family 22 member 18 (145-153)
  source 1..27: mol_type = other RNA
gcccccgaggaaagacctgctgcactg

SEQ ID NO: 59353 - RNA, 27 nt, synthetic construct
  misc_feature 1..27: note = Zinc fingers and homeoboxes protein 2 (415-423)
  source 1..27: mol_type = other RNA
gcccccgagcctaagagaccacacatc

SEQ ID NO: 59354 - RNA, 30 nt, synthetic construct
  misc_feature 1..30: note = Hepatoma-derived growth factor (231-240)
  source 1..30: mol_type = other RNA
gcccccggcatcagagaccacgagagcctg

SEQ ID NO: 59355 - RNA, 30 nt, synthetic construct
  misc_feature 1..30: note = Heterogeneous nuclear ribonucleoprotein M (460-469)
  source 1..30: mol_type = other RNA
gcccccatcgacagagtgggccagaccatt

SEQ ID NO: 59356 - RNA, 30 nt, synthetic construct; identical to SEQ ID NO: 35129
  misc_feature 1..30: note = Gamma-interferon-inducible protein 16 (685-694)
  source 1..30: mol_type = other RNA

SEQ ID NO: 59357 - RNA, 30 nt, synthetic construct
  misc_feature 1..30: note = Cancer/testis antigen 2 (114-123)
  source 1..30: mol_type = other RNA
gcccccctgcctagaccaggcgctgtgctc

SEQ ID NO: 59358 - RNA, 24 nt, synthetic construct
  misc_feature 1..24: note = Talin-1 (1328-1335)
  source 1..24: mol_type = other RNA
gcccccaacctgaagagccagctc

SEQ ID NO: 59359 - RNA, 30 nt, synthetic construct
  misc_feature 1..30: note = REST corepressor 1 (61-70)
  source 1..30: mol_type = other RNA
gcccccaacaatggccagaacaagagcctg

SEQ ID NO: 59360 - RNA, 27 nt, synthetic construct
  misc_feature 1..27: note = Histone deacetylase 6 (706-714)
  source 1..27: mol_type = other RNA
gccccccagcctgctaagccaagactg

SEQ ID NO: 59361 - RNA, 27 nt, synthetic construct
  misc_feature 1..27: note = BAG family molecular chaperone regulator 3 (130-138)
  source 1..27: mol_type = other RNA
gccccccagagaagccaatcccctctg

SEQ ID NO: 59362 - RNA, 27 nt, synthetic construct
  misc_feature 1..27: note = Conserved oligomeric Golgi complex subunit 7 (287-295)
  source 1..27: mol_type = other RNA
gcccccagagctgcactgaccaggctc

SEQ ID NO: 59363 - RNA, 33 nt, synthetic construct
  misc_feature 1..33: note = Protein PRRC2B (1519-1529)
  source 1..33: mol_type = other RNA
gcccccagagctggcgagcagggggaagcaatg

SEQ ID NO: 59364 - RNA, 33 nt, synthetic construct
  misc_feature 1..33: note = Striatin-4 (219-229)
  source 1..33: mol_type = other RNA
gcccccagagctcctccaggcccggcagggctg

SEQ ID NO: 59365 - RNA, 33 nt, synthetic construct
  misc_feature 1..33: note = Tricarboxylate transport protein, mitochondrial (3-13)
  source 1..33: mol_type = other RNA
gcccccagagctcctagggcactggccgcggct

SEQ ID NO: 59366 - RNA, 27 nt, synthetic construct
  misc_feature 1..27: note = Actin, gamma-enteric smooth muscle (27-35)
  source 1..27: mol_type = other RNA
gcccccagagctgtgttccctagcatc

SEQ ID NO: 59367 - RNA, 27 nt, synthetic construct
  misc_feature 1..27: note = General transcription factor IIF subunit 2 (77-85)
  source 1..27: mol_type = other RNA
gcccccagagagcaccctttcgtgctg

SEQ ID NO: 59368 - RNA, 33 nt, synthetic construct
  misc_feature 1..33: note = Proteasome subunit beta type-8 (9-19)
  source 1..33: mol_type = other RNA
gcccccagaggccagaggcctgagagcgctctg

SEQ ID NO: 59369 - RNA, 30 nt, synthetic construct
  misc_feature 1..30: note = 40S ribosomal protein S2 (198-207)
  source 1..30: mol_type = other RNA
gcccccagaggcaccgggatcgtgagcgct

SEQ ID NO: 59370 - RNA, 30 nt, synthetic construct
  misc_feature 1..30: note = General transcription factor 3C polypeptide 2 (702-711)
  source 1..30: mol_type = other RNA
gcccccagaaagggcaccgtgtggagcctg

SEQ ID NO: 59371 - RNA, 27 nt, synthetic construct
  misc_feature 1..27: note = Coiled-coil domain-containing protein 12 (108-116)
  source 1..27: mol_type = other RNA
gcccccagaaagcctgactgggatctg

SEQ ID NO: 59372 - RNA, 27 nt, synthetic construct
  misc_feature 1..27: note = RNA demethylase ALKBH5 (289-297)
  source 1..27: mol_type = other RNA
gcccccagactggagaccaagagcctc

SEQ ID NO: 59373 - RNA, 33 nt, synthetic construct
  misc_feature 1..33: note = Phosphatidylinositide phosphatase SAC2 (898-908)
  source 1..33: mol_type = other RNA
gcccccagactgggcagcaggtcccagtctctc

SEQ ID NO: 59374 - RNA, 27 nt, synthetic construct
  misc_feature 1..27: note = Structural maintenance of chromosomes protein 4 (79-87)
  source 1..27: mol_type = other RNA
gcccccagactgatgatcacccacatt

SEQ ID NO: 59375 - RNA, 27 nt, synthetic construct
  misc_feature 1..27: note = IST1 homolog (107-115)
  source 1..27: mol_type = other RNA
gcccccagactgcagagcgaggtggct

SEQ ID NO: 59376 - RNA, 33 nt, synthetic construct
  misc_feature 1..33: note = IST1 homolog (107-117)
  source 1..33: mol_type = other RNA
gcccccagactgcagagcgaggtggctgaactc

SEQ ID NO: 59377 - RNA, 36 nt, synthetic construct
  misc_feature 1..36: note = 60S ribosomal protein L13 (47-58)
  source 1..36: mol_type = other RNA
gcccccagacctgctagcggcccaatcaggccgatt

SEQ ID NO: 59378 - RNA, 33 nt, synthetic construct
  misc_feature 1..33: note = Cold shock domain-containing protein E1 (762-772)
  source 1..33: mol_type = other RNA
gcccccagacctgacaggctggtgaaccggctc

SEQ ID NO: 59379 - RNA, 33 nt, synthetic construct
  misc_feature 1..33: note = tRNA-splicing endonuclease subunit Sen34 (71-81)
  source 1..33: mol_type = other RNA
gcccccagacctgacagcaggcaccattccctg

SEQ ID NO: 59380 - RNA, 27 nt, synthetic construct
  misc_feature 1..27: note = WAS/WASL-interacting protein family member 2 (122-130)
  source 1..27: mol_type = other RNA
gcccccagacctccagtgagcgctgca

SEQ ID NO: 59381 - RNA, 27 nt, synthetic construct
  misc_feature 1..27: note = Rab GTPase-activating protein 1 (88-96)
  source 1..27: mol_type = other RNA
gcccccagaagcgaggtggaagctctg

SEQ ID NO: 59382 - RNA, 33 nt, synthetic construct
  misc_feature 1..33: note = HLA class II histocompatibility antigen, DP beta 1 chain (9-19)
  source 1..33: mol_type = other RNA
gcccccagaaccgtggctctgacagcactcctt

SEQ ID NO: 59383 - RNA, 33 nt, synthetic construct
  misc_feature 1..33: note = Protocadherin gamma-C3 (257-267)
  source 1..33: mol_type = other RNA
gcccccagcggcaccagagtggtccaggttctg

SEQ ID NO: 59384 - RNA, 30 nt, synthetic construct
  misc_feature 1..30: note = Rho GTPase-activating protein 7 (785-794)
  source 1..30: mol_type = other RNA
gcccccagcctgttccacctcaacaccctt

SEQ ID NO: 59385 - RNA, 33 nt, synthetic construct
  misc_feature 1..33: note = Round spermatid basic protein 1-like protein (94-104)
  source 1..33: mol_type = other RNA
gcccccagcccttcctcttcaagaagtagcttc

SEQ ID NO: 59386 - RNA, 27 nt, synthetic construct
  misc_feature 1..27: note = intercellular adhesion molecule-1
  source 1..27: mol_type = other RNA
gcccccagctcccctagaccagctctg

SEQ ID NO: 59387 - RNA, 30 nt, synthetic construct
  misc_feature 1..30: note = intercellular adhesion molecule-1 (2-11)
  source 1..30: mol_type = other RNA
gcccccagctcccctagaccagctctgccg

SEQ ID NO: 59388 - RNA, 24 nt, synthetic construct
  misc_feature 1..24: note = Unconventional myosin-Ic (176-183)
  source 1..24: mol_type = other RNA
gcccccgtgggcgggcacatcctg

SEQ ID NO: 59389 - RNA, 27 nt, synthetic construct
  misc_feature 1..27: note = Alpha-mannosidase 2C1 (660-668)
  source 1..27: mol_type = other RNA
gcccccgtgcctccaccgaccagcctg

SEQ ID NO: 59390 - RNA, 27 nt, synthetic construct
  misc_feature 1..27: note = Transcription factor p65 (247-255)
  source 1..27: mol_type = other RNA
gcccccgtgagagtcagcatgcagctg

SEQ ID NO: 59391 - RNA, 27 nt, synthetic construct
  misc_feature 1..27: note = Serine protease 23 (107-115)
  source 1..27: mol_type = other RNA
gccccctggaagcctacctggccagct

SEQ ID NO: 59392 - RNA, 27 nt, synthetic construct
  misc_feature 1..27: note = Splicing factor, arginine/serine-rich 15 (410-418)
  source 1..27: mol_type = other RNA
gcccagaacgagcccctgacccaaaag

SEQ ID NO: 59393 - RNA, 30 nt, synthetic construct
  misc_feature 1..30: note = GTP-binding nuclear protein Ran (215-224)
  source 1..30: mol_type = other RNA
gcccagtacgagcacgacctggaagtggct

SEQ ID NO: 59394 - RNA, 27 nt, synthetic construct
  misc_feature 1..27: note = Neuropathy target esterase (279-287)
  source 1..27: mol_type = other RNA
gccagagacagcaccgtgctgaggctc

SEQ ID NO: 59395 - RNA, 27 nt, synthetic construct
  misc_feature 1..27: note = Tubulin epsilon chain (273-281)
  source 1..27: mol_type = other RNA
gccagattcgagggcagcctgaacatg

SEQ ID NO: 59396 - RNA, 27 nt, synthetic construct
  misc_feature 1..27: note = Splicing factor 3A subunit 1 (306-314)
  source 1..27: mol_type = other RNA
gccagaatcctgattcaggagaggtac

SEQ ID NO: 59397 - RNA, 27 nt, synthetic construct
  misc_feature 1..27: note = Dedicator of cytokinesis protein 7 (251-259)
  source 1..27: mol_type = other RNA
gccagagtgaagatgcaggtcaccatg

SEQ ID NO: 59398 - RNA, 27 nt, synthetic construct
  misc_feature 1..27: note = MICOS complex subunit MIC13 (3-11)
  source 1..27: mol_type = other RNA
gccagagtgtggagcctgatgaggttc

SEQ ID NO: 59399 - RNA, 27 nt, synthetic construct
  misc_feature 1..27: note = Endonuclease domain-containing 1 protein (4-12)
  source 1..27: mol_type = other RNA
gccagatggctggctctcggcagcctt

SEQ ID NO: 59400 - RNA, 27 nt, synthetic construct
  misc_feature 1..27: note = Sodium-dependent phosphate transport protein 4 (18-26)
  source 1..27: mol_type = other RNA
gccagatacggcatcgctctggtgctc

SEQ ID NO: 59401 - RNA, 33 nt, synthetic construct
  misc_feature 1..33: note = Deubiquitinating protein VCIP135 (28-38)
  source 1..33: mol_type = other RNA
gccagcgctgcagcctccggcgggctgctcaag

SEQ ID NO: 59402 - RNA, 27 nt, synthetic construct
  misc_feature 1..27: note = Kinase D-interacting substrate of 220 kDa (763-771)
  source 1..27: mol_type = other RNA
gccagcgacccccacatcattataaag

SEQ ID NO: 59403 - RNA, 30 nt, synthetic construct
  misc_feature 1..30: note = Multivesicular body subunit 12A (40-49)
  source 1..30: mol_type = other RNA
gccagcttcggcaagtcctttgctcagaaa

SEQ ID NO: 59404 - RNA, 33 nt, synthetic construct
  misc_feature 1..33: note = Myosin-9 (366-376)
  source 1..33: mol_type = other RNA
gccagcatgcccgacaacaccgctgcacagaag

SEQ ID NO: 59405 - RNA, 27 nt, synthetic construct
  misc_feature 1..27: note = Pro-interleukin-16 (1150-1158)
  source 1..27: mol_type = other RNA
gccagccaggagggcaccatccaaaag

SEQ ID NO: 59406 - RNA, 27 nt, synthetic construct
  misc_feature 1..27: note = Cullin-4B (91-99)
  source 1..27: mol_type = other RNA
gccagctcccacgtgcccatccagaag

SEQ ID NO: 59407 - RNA, 33 nt, synthetic construct
  misc_feature 1..33: note = Vimentin (54-64)
  source 1..33: mol_type = other RNA
gccagctcccccggcggggtgtacgctaccaga

SEQ ID NO: 59408 - RNA, 27 nt, synthetic construct
  misc_feature 1..27: note = Heterogeneous nuclear ribonucleoprotein D-like (81-89)
  source 1..27: mol_type = other RNA
gccagcgtggacaaggtcctggagctc

SEQ ID NO: 59409 - RNA, 27 nt, synthetic construct
  misc_feature 1..27: note = Gamma-adducin (236-244)
  source 1..27: mol_type = other RNA
gccaccgctgcagtgagctccatgaag

SEQ ID NO: 59410 - RNA, 30 nt, synthetic construct
  misc_feature 1..30: note = Clathrin heavy chain 1 (311-320)
  source 1..30: mol_type = other RNA
gccaccgctggcatcattggggtgaacaga

SEQ ID NO: 59411 - RNA, 27 nt, synthetic construct
  misc_feature 1..27: note = WD repeat-containing protein 44 (93-101)
  source 1..27: mol_type = other RNA
gccaccgctagccccatcgtggcaaga

SEQ ID NO: 59412 - RNA, 27 nt, synthetic construct
  misc_feature 1..27: note = Nucleotide exchange factor SIL1 (214-222)
  source 1..27: mol_type = other RNA
gccaccgagcagcccctgacagctaag

SEQ ID NO: 59413 - RNA, 27 nt, synthetic construct
  misc_feature 1..27: note = Ankyrin repeat and KH domain-containing protein 1 (1541-1549)
  source 1..27: mol_type = other RNA
gccaccttcacaaacgtgtttggcaag

SEQ ID NO: 59414 - RNA, 30 nt, synthetic construct
  misc_feature 1..30: note = Protein artemis (555-564)
  source 1..30: mol_type = other RNA
gccaccggcgagagcatcgctgtgaagaaa

SEQ ID NO: 59415 - RNA, 30 nt, synthetic construct; identical to SEQ ID NO: 35188
  misc_feature 1..30: note = Guanine nucleotide-binding protein G(I)/G(S)/G(T) subunit beta-1 (228-237)
  source 1..30: mol_type = other RNA

SEQ ID NO: 59416 - RNA, 27 nt, synthetic construct
  misc_feature 1..27: note = Serine/threonine-protein kinase mTOR (800-808)
  source 1..27: mol_type = other RNA
gccaccatcggcgagctggctcaggtg

SEQ ID NO: 59417 - RNA, 33 nt, synthetic construct
  misc_feature 1..33: note = Interferon regulatory factor 2-binding protein-like (88-98)
  source 1..33: mol_type = other RNA
gccaccatcctggctggcgacgtgaaggtcaaa

SEQ ID NO: 59418 - RNA, 27 nt, synthetic construct
  misc_feature 1..27: note = Protein FAM76B (209-217)
  source 1..27: mol_type = other RNA
gccaccatccagaacgagacacccaag

SEQ ID NO: 59419 - RNA, 33 nt, synthetic construct
  misc_feature 1..33: note = Paired amphipathic helix protein Sin3a (628-638)
  source 1..33: mol_type = other RNA
gccaccatcagagtgctggaggctattcagaag

SEQ ID NO: 59420 - RNA, 36 nt, synthetic construct
  misc_feature 1..36: note = T-complex protein 1 subunit eta (44-55)
  source 1..36: mol_type = other RNA
gccaccatcagcaacgacggcgctacaattctgaag

SEQ ID NO: 59421 - RNA, 27 nt, synthetic construct
  misc_feature 1..27: note = Hexokinase-1 (356-364)
  source 1..27: mol_type = other RNA
gccaccctgggcgctatcctcaacaga

SEQ ID NO: 59422 - RNA, 27 nt, synthetic construct
  misc_feature 1..27: note = Nuclear mitotic apparatus protein 1 (150-158)
  source 1..27: mol_type = other RNA
gccaccctgcaggaggctctcgcacac

SEQ ID NO: 59423 - RNA, 27 nt, synthetic construct
  misc_feature 1..27: note = Cytoplasmic dynein 1 heavy chain 1 (3080-3088)
  source 1..27: mol_type = other RNA
gccaccagccccgctctgttcaacaga

SEQ ID NO: 59424 - RNA, 30 nt, synthetic construct
  misc_feature 1..30: note = Isoaspartyl peptidase/L-asparaginase (183-192)
  source 1..30: mol_type = other RNA
gccaccagcacaggcgggatcgtgaacaag

SEQ ID NO: 59425 - RNA, 27 nt, synthetic construct
  misc_feature 1..27: note = Ankyrin repeat domain-containing protein 17 (653-661)
  source 1..27: mol_type = other RNA
gccaccacactgcccatcagaaacaag

SEQ ID NO: 59426 - RNA, 33 nt, synthetic construct
  misc_feature 1..33: note = Alsin (409-419)
  source 1..33: mol_type = other RNA
gccacctacgaggctggcgcactgagcctcaag

SEQ ID NO: 59427 - RNA, 30 nt, synthetic construct
  misc_feature 1..30: note = Chromobox protein homolog 2 (418-427)
  source 1..30: mol_type = other RNA
gccgtggctccccctaccccagcaagcaag

SEQ ID NO: 59428 - RNA, 36 nt, synthetic construct
  misc_feature 1..36: note = Guanine nucleotide-binding protein G(I)/G(S)/G(T) subunit beta-2 (326-337)
  source 1..36: mol_type = other RNA
gccgtggctaccggcagctgggactccttcctgaag

SEQ ID NO: 59429 - RNA, 30 nt, synthetic construct
  misc_feature 1..30: note = Cilia- and flagella-associated protein 97 (505-514)
  source 1..30: mol_type = other RNA
gccgtggaccccagctccggccaccctaga

SEQ ID NO: 59430 - RNA, 36 nt, synthetic construct; identical to SEQ ID NO: 35203
  misc_feature 1..36: note = Heme-binding protein 1 (85-96)
  source 1..36: mol_type = other RNA

SEQ ID NO: 59431 - RNA, 27 nt, synthetic construct
  misc_feature 1..27: note = SCY1-like protein 2 (22-30)
  source 1..27: mol_type = other RNA
gccgtgatgggcaaccccgtcaccaga

SEQ ID NO: 59432 - RNA, 27 nt, synthetic construct
  misc_feature 1..27: note = PH domain leucine-rich repeat-containing protein phosphatase 1 (285-293)
  source 1..27: mol_type = other RNA
gccgtgagaaacgtccccgacgctctg

SEQ ID NO: 59433 - RNA, 33 nt, synthetic construct
  misc_feature 1..33: note = Histone H2B type 1-A (112-122)
  source 1..33: mol_type = other RNA
gccgtgagcgagggcaccaaggctgtcacaaaa

SEQ ID NO: 59434 - RNA, 27 nt, synthetic construct
  misc_feature 1..27: note = E3 ubiquitin-protein ligase RNF123 (619-627)
  source 1..27: mol_type = other RNA
gccgtgaccggcatcctggtccagctc

SEQ ID NO: 59435 - RNA, 27 nt, synthetic construct
  misc_feature 1..27: note = Transcription termination factor 1 (809-817)
  source 1..27: mol_type = other RNA
gccgtgtacgtccccttctggcagaag

SEQ ID NO: 59436 - RNA, 27 nt, synthetic construct
  misc_feature 1..27: note = Tyrosine-protein kinase Fyn (324-332)
  source 1..27: mol_type = other RNA
gcctacatcgagagaatgaactatatt

SEQ ID NO: 59437 - RNA, 27 nt, synthetic construct
  misc_feature 1..27: note = COP9 signalosome complex subunit 4 (165-173)
  source 1..27: mol_type = other RNA
gcctacatcaacagagctagcctgctc

SEQ ID NO: 59438 - RNA, 27 nt, synthetic construct
  misc_feature 1..27: note = UDP-N-acetylglucosamine-peptide N-acetylglucosaminyltransferase 110 kDa subunit (697-705)
  source 1..27: mol_type = other RNA
gcctacatgccccacaccttctttatc

SEQ ID NO: 59439 - RNA, 27 nt, synthetic construct
  misc_feature 1..27: note = Translocating chain-associated membrane protein 1 (155-163)
  source 1..27: mol_type = other RNA
gcctacccccacaacctgatgaccttc

SEQ ID NO: 59440 - RNA, 27 nt, synthetic construct
  misc_feature 1..27: note = Dihydropyrimidine dehydrogenase (NADP(+)) (185-193)
  source 1..27: mol_type = other RNA
gcctacagcgctaagatcgcactgttc

SEQ ID NO: 59441 - RNA, 27 nt, synthetic construct
  misc_feature 1..27: note = Double-stranded RNA-binding protein Staufen homolog 1 (70-78)
  source 1..27: mol_type = other RNA
gacgccgctgcaaaggccctgagaatc

SEQ ID NO: 59442 - RNA, 24 nt, synthetic construct
  misc_feature 1..24: note = Minor histocompatibility antigen H13 (74-81)
  source 1..24: mol_type = other RNA
gacgccgctagattccccatcatt

SEQ ID NO: 59443 - RNA, 27 nt, synthetic construct
  misc_feature 1..27: note = Conserved oligomeric Golgi complex subunit 2 (338-346)
  source 1..27: mol_type = other RNA
gacgccttccacgagaagtacaccatc

SEQ ID NO: 59444 - RNA, 24 nt, synthetic construct
  misc_feature 1..24: note = AP-2 complex subunit mu (30-37)
  source 1..24: mol_type = other RNA
gacgccttcagagtgaacgtcatc

SEQ ID NO: 59445 - RNA, 27 nt, synthetic construct
  misc_feature 1..27: note = UDP-N-acetylglucosamine-peptide N-acetylglucosaminyltransferase 110 kDa subunit (430-438)
  source 1..27: mol_type = other RNA
gacgcccacagcaacctggcttccatc

SEQ ID NO: 59446 - RNA, 24 nt, synthetic construct
  misc_feature 1..24: note = Neurobeachin-like protein 2 (378-385)
  source 1..24: mol_type = other RNA
gacgccatcgctgtgcacgtcgtt

SEQ ID NO: 59447 - RNA, 27 nt, synthetic construct
  misc_feature 1..27: note = Rho-associated protein kinase 2 (203-211)
  source 1..27: mol_type = other RNA
gacgccatccacagcatgggcctgatt

SEQ ID NO: 59448 - RNA, 27 nt, synthetic construct
  misc_feature 1..27: note = Ubiquitin carboxyl-terminal hydrolase 22 (496-504)
  source 1..27: mol_type = other RNA
gacgccatcattaccaaggctagcata

SEQ ID NO: 59449 - RNA, 27 nt, synthetic construct
  misc_feature 1..27: note = NF-kappa-B essential modulator (63-71)
  source 1..27: mol_type = other RNA
gacgccatcagacagagcaaccaaatt

SEQ ID NO: 59450 - RNA, 24 nt, synthetic construct
  misc_feature 1..24: note = Uncharacterized protein C1orf43 (108-115)
  source 1..24: mol_type = other RNA
gacgccatcagaaccagcgagatt

SEQ ID NO: 59451 - RNA, 27 nt, synthetic construct
  misc_feature 1..27: note = Enhancer of filamentation 1 (541-549)
  source 1..27: mol_type = other RNA
gacgccaagcagctgaccacaactatc

SEQ ID NO: 59452 - RNA, 27 nt, synthetic construct
  misc_feature 1..27: note = Endoplasmin (89-97)
  source 1..27: mol_type = other RNA
gacgccctggataagatcagactcatt

SEQ ID NO: 59453 - RNA, 27 nt, synthetic construct
  misc_feature 1..27: note = 60S ribosomal protein L23a (145-153)
  source 1..27: mol_type = other RNA
gacgccctggatgtggctaacaagatc

SEQ ID NO: 59454 - RNA, 27 nt, synthetic construct
  misc_feature 1..27: note = Peroxisome proliferator activated receptor interacting complex protein (2369-2377)
  source 1..27: mol_type = other RNA
gacgccctgggcaagctcatcagcatt

SEQ ID NO: 59455 - RNA, 24 nt, synthetic construct
  misc_feature 1..24: note = S-adenosylmethionine synthase isoform type-2 (220-227)
  source 1..24: mol_type = other RNA
gacgccctgaaggagaaagtgatc

SEQ ID NO: 59456 - RNA, 27 nt, synthetic construct
  misc_feature 1..27: note = Microtubule-actin cross-linking factor 1, isoforms 1/2/3/5 (533-541)
  source 1..27: mol_type = other RNA
gacgccctgaaggtgatcaacaaagtc

SEQ ID NO: 59457 - RNA, 27 nt, synthetic construct
  misc_feature 1..27: note = Bax inhibitor 1 (57-65)
  source 1..27: mol_type = other RNA
gacgccctgctcaagttcagccacatc

SEQ ID NO: 59458 - RNA, 27 nt, synthetic construct
  misc_feature 1..27: note = Spectrin beta chain, non-erythrocytic 1 (949-957)
  source 1..27: mol_type = other RNA
gacgccctgctcagcgctctttccatc

SEQ ID NO: 59459 - RNA, 24 nt, synthetic construct
  misc_feature 1..24: note = Protein FAM179B (198-205)
  source 1..24: mol_type = other RNA
gacgccctgcagatcctccacatt

SEQ ID NO: 59460 - RNA, 24 nt, synthetic construct
  misc_feature 1..24: note = Isoleucine-tRNA ligase, cytoplasmic (621-628)
  source 1..24: mol_type = other RNA
gacgccctgagactctaccttatc

SEQ ID NO: 59461 - RNA, 27 nt, synthetic construct
  misc_feature 1..27: note = Programmed cell death protein 4 (72-80)
  source 1..27: mol_type = other RNA
gacgccctgagaagcggcctcaccgtg

SEQ ID NO: 59462 - RNA, 27 nt, synthetic construct
  misc_feature 1..27: note = Methionine-tRNA ligase, cytoplasmic (281-289)
  source 1..27: mol_type = other RNA
gacgccctgagaagcatcctcaccatt

SEQ ID NO: 59463 - RNA, 27 nt, synthetic construct
  misc_feature 1..27: note = ATP synthase subunit alpha, mitochondrial (164-172)
  source 1..27: mol_type = other RNA
gacgccatgaagtacaccatcgtggtc

SEQ ID NO: 59464 - RNA, 27 nt, synthetic construct
  misc_feature 1..27: note = Plectin (246-254)
  source 1..27: mol_type = other RNA
gacgccatgcccagagtgcctgatgtc

SEQ ID NO: 59465 - RNA, 24 nt, synthetic construct
  misc_feature 1..24: note = Cyclic AMP-responsive element-binding protein 1 (144-151)
  source 1..24: mol_type = other RNA
gacgcccccggcgtgcctagaatc

SEQ ID NO: 59466 - RNA, 27 nt, synthetic construct
  misc_feature 1..27: note = Putative Polycomb group protein ASXL1 (26-34)
  source 1..27: mol_type = other RNA
gacgcccccatgacccctaagcagatc

SEQ ID NO: 59467 - RNA, 27 nt, synthetic construct
  misc_feature 1..27: note = NEDD4 family-interacting protein 1 (37-45)
  source 1..27: mol_type = other RNA
gacgccccccctccatacagctccatc

SEQ ID NO: 59468 - RNA, 24 nt, synthetic construct
  misc_feature 1..24: note = E3 ubiquitin-protein ligase MGRN1 (127-134)
  source 1..24: mol_type = other RNA
gacgccagagtggctatcaccatt

SEQ ID NO: 59469 - RNA, 27 nt, synthetic construct
  misc_feature 1..27: note = HLA class I histocompatibility antigen, A-1 alpha chain (115-123)
  source 1..27: mol_type = other RNA
gacgcctacgatggcaaggactatatc

SEQ ID NO: 59470 - RNA, 24 nt, synthetic construct
  misc_feature 1..24: note = Probable ATP-dependent RNA helicase DDX49 (232-239)
  source 1..24: mol_type = other RNA
gacgcctacctggtgcacctcatc

SEQ ID NO: 59471 - RNA, 27 nt, synthetic construct
  misc_feature 1..27: note = Endothelin-converting enzyme 1 (30-38)
  source 1..27: mol_type = other RNA
gacgcctaccccaacggcctgcaggtg

SEQ ID NO: 59472 - RNA, 27 nt, synthetic construct
  misc_feature 1..27: note = Cohesin subunit SA-2 (683-691)
  source 1..27: mol_type = other RNA
gacgcctaccaggtgctgagcaccctc

SEQ ID NO: 59473 - RNA, 27 nt, synthetic construct
  misc_feature 1..27: note = Torsin-1A-interacting protein 1 (432-440)
  source 1..27: mol_type = other RNA
gacgcctacagctccttcagatctgtg

SEQ ID NO: 59474 - RNA, 27 nt, synthetic construct
  misc_feature 1..27: note = ATP-binding cassette sub-family E member 1 (434-442)
  source 1..27: mol_type = other RNA
gacgcctacacccacccccagttcgtg

SEQ ID NO: 59475 - RNA, 27 nt, synthetic construct
  misc_feature 1..27: note = Talin-1 (1943-1951)
  source 1..27: mol_type = other RNA
gacgcctacaccaagaaagagctgatc

SEQ ID NO: 59476 - RNA, 27 nt, synthetic construct
  misc_feature 1..27: note = Gelsolin (93-101)
  source 1..27: mol_type = other RNA
gacgcctacgtgatcctgaagaccgtc

SEQ ID NO: 59477 - RNA, 24 nt, synthetic construct
  misc_feature 1..24: note = 40S ribosomal protein S26 (60-67)
  source 1..24: mol_type = other RNA
gacgcctacgtgctgcccaagctc

SEQ ID NO: 59478 - RNA, 27 nt, synthetic construct
  misc_feature 1..27: note = 40S ribosomal protein S26 (60-68)
  source 1..27: mol_type = other RNA
gacgcctacgtgctgcccaagctctat

SEQ ID NO: 59479 - RNA, 27 nt, synthetic construct
  misc_feature 1..27: note = Intraflagellar transport protein 25 homolog (124-132)
  source 1..27: mol_type = other RNA
gaccacttcgccagcgtgcattccgtc

SEQ ID NO: 59480 - RNA, 27 nt, synthetic construct
  misc_feature 1..27: note = Vacuolar protein sorting-associated protein 13A (1926-1934)
  source 1..27: mol_type = other RNA
gaccacttcaacgccatgaccagcctg

SEQ ID NO: 59481 - RNA, 27 nt, synthetic construct
  misc_feature 1..27: note = Cytoplasmic FMR1-interacting protein 2 (355-363)
  source 1..27: mol_type = other RNA
gaccacatcagattcattagcgagctg

SEQ ID NO: 59482 - RNA, 27 nt, synthetic construct
  misc_feature 1..27: note = Protein zer-1 homolog (237-245)
  source 1..27: mol_type = other RNA
gaccacatcagagtgattgtccagctg

SEQ ID NO: 59483 - RNA, 27 nt, synthetic construct
  misc_feature 1..27: note = Cytoplasmic FMR1-interacting protein 1 (355-363)
  source 1..27: mol_type = other RNA
gaccacatgagattcatcagcgagctg

SEQ ID NO: 59484 - RNA, 30 nt, synthetic construct
  misc_feature 1..30: note = 60S ribosomal protein L9 (11-20)
  source 1..30: mol_type = other RNA
gacatccccgagaacgtggatattaccctg

SEQ ID NO: 59485 - RNA, 27 nt, synthetic construct
  misc_feature 1..27: note = 5'-3' exoribonuclease 1 (835-843)
  source 1..27: mol_type = other RNA
gacatcagagccttcgatagcaggttt

SEQ ID NO: 59486 - RNA, 30 nt, synthetic construct
  misc_feature 1..30: note = MAX gene-associated protein (126-135)
  source 1..30: mol_type = other RNA
gacatcagccccgtggataaccacagatac

SEQ ID NO: 59487 - RNA, 30 nt, synthetic construct
  misc_feature 1..30: note = Protein MAK16 homolog (177-186)
  source 1..30: mol_type = other RNA
gacatctacaacttccccattcacgccttt

SEQ ID NO: 59488 - RNA, 27 nt, synthetic construct
  misc_feature 1..27: note = DNA-directed RNA polymerases I, II, and III subunit RPABC5 (54-62)
  source 1..27: mol_type = other RNA
gacctgatcgagaagctccttaactac

SEQ ID NO: 59489 - RNA, 27 nt, synthetic construct
  misc_feature 1..27: note = TAR DNA-binding protein 43 (128-136)
  source 1..27: mol_type = other RNA
gacctgatcattaagggcataagcgtg

SEQ ID NO: 59490 - RNA, 27 nt, synthetic construct
  misc_feature 1..27: note = Arf-GAP with Rho-GAP domain, ANK repeat and PH domain-containing protein 3 (271-279)
  source 1..27: mol_type = other RNA
gacctgatcagcccctacgcctccttc

SEQ ID NO: 59491 - RNA, 27 nt, synthetic construct
  misc_feature 1..27: note = V-type proton ATPase subunit C 1 (62-70)
  source 1..27: mol_type = other RNA
gacctggtgacctacatcacaagattc

SEQ ID NO: 59492 - RNA, 27 nt, synthetic construct
  misc_feature 1..27: note = Lysine-specific demethylase 5B (44-52)
  source 1..27: mol_type = other RNA
gaccccttcgcctttatccacaagatt

SEQ ID NO: 59493 - RNA, 27 nt, synthetic construct
  misc_feature 1..27: note = 116 kDa U5 small nuclear ribonucleoprotein component (910-918)
  source 1..27: mol_type = other RNA
gaccccctggataagagcatcgtgatt

SEQ ID NO: 59494 - RNA, 27 nt, synthetic construct
  misc_feature 1..27: note = Signal recognition particle 9 kDa protein (21-29)
  source 1..27: mol_type = other RNA
gaccccatgaaggccagagtggtcctg

SEQ ID NO: 59495 - RNA, 27 nt, synthetic construct
  misc_feature 1..27: note = Probable 28S rRNA (cytosine-C(5))-methyltransferase (223-231)
  source 1..27: mol_type = other RNA
gacccccctccaggcagccacgtgatc

SEQ ID NO: 59496 - RNA, 27 nt, synthetic construct
  misc_feature 1..27: note = Protein BTG2 (105-113)
  source 1..27: mol_type = other RNA
gacccctacgaggtgagctatagaatc

SEQ ID NO: 59497 - RNA, 27 nt, synthetic construct
  misc_feature 1..27: note = Small integral membrane protein 15 (18-26)
  source 1..27: mol_type = other RNA
gacccctacggcttcctgaccacagtg

SEQ ID NO: 59498 - RNA, 27 nt, synthetic construct
  misc_feature 1..27: note = Serine/threonine-protein kinase mTOR (895-903)
  source 1..27: mol_type = other RNA
gacccctacaagcacaaagtgaacatc

SEQ ID NO: 59499 - RNA, 24 nt, synthetic construct
  misc_feature 1..24: note = Serine/threonine-protein kinase tousled-like 2 (715-722)
  source 1..24: mol_type = other RNA
gacccctacctgctccctcacatc

SEQ ID NO: 59500 - RNA, 24 nt, synthetic construct
  misc_feature 1..24: note = AP-3 complex subunit delta-1 isoform 3 (706-713)
  source 1..24: mol_type = other RNA
gacccctacagagccctggatatc

SEQ ID NO: 59501 - RNA, 24 nt, synthetic construct
  misc_feature 1..24: note = DnaJ homolog subfamily C member 16 (29-36)
  source 1..24: mol_type = other RNA
gacccctacagagtgctgggcgtc

SEQ ID NO: 59502 - RNA, 30 nt, synthetic construct
  misc_feature 1..30: note = CSC1-like protein 1 (174-183)
  source 1..30: mol_type = other RNA
gacccctacagcttcggcagaaccacaatc

SEQ ID NO: 59503 - RNA, 27 nt, synthetic construct
  misc_feature 1..27: note = Nuclear pore membraneoprotein 210 (430-438)
  source 1..27: mol_type = other RNA
gaccaggatggcggggtgcacatcctg

SEQ ID NO: 59504 - RNA, 27 nt, synthetic construct
  misc_feature 1..27: note = Ubiquitin carboxyl-terminal hydrolase 7 (365-373)
  source 1..27: mol_type = other RNA
gacagattcgagtttcccgaacagctg

SEQ ID NO: 59505 - RNA, 30 nt, synthetic construct
  misc_feature 1..30: note = 39S ribosomal protein L38, mitochondrial (371-380)
  source 1..30: mol_type = other RNA
gacagccacgagcccacctacggcatctat

SEQ ID NO: 59506 - RNA, 30 nt, synthetic construct
  misc_feature 1..30: note = Golgin subfamily A member 2 (517-526)
  source 1..30: mol_type = other RNA
gacaccatcggcgagtacattgccctgtat

SEQ ID NO: 59507 - RNA, 30 nt, synthetic construct
  misc_feature 1..30: note = N-alpha-acetyltransferase 25, NatB auxiliary subunit (540-549)
  source 1..30: mol_type = other RNA
gacaccatcggctacctgctcacaagatat

SEQ ID NO: 59508 - RNA, 27 nt, synthetic construct
  misc_feature 1..27: note = E3 ubiquitin-protein ligase RNF213 (545-553)
  source 1..27: mol_type = other RNA
gacaccatcaacctgaatagcttcttt

SEQ ID NO: 59509 - RNA, 27 nt, synthetic construct
  misc_feature 1..27: note = Gamma-interferon-inducible protein 16 (447-455)
  source 1..27: mol_type = other RNA
gacaccatcagcaagatgaacgatttc

SEQ ID NO: 59510 - RNA, 27 nt, synthetic construct
  misc_feature 1..27: note = ADP-ribosylation factor-like protein 2 (42-50)
  source 1..27: mol_type = other RNA
gacaccatcagccccacactgggcttc

SEQ ID NO: 59511 - RNA, 27 nt, synthetic construct
  misc_feature 1..27: note = Protein Asterix (74-82)
  source 1..27: mol_type = other RNA
gacaccaagcagatgatgagctccttc

SEQ ID NO: 59512 - RNA, 27 nt, synthetic construct
  misc_feature 1..27: note = Long-chain-fatty-acid-CoA ligase 3 (86-94)
  source 1..27: mol_type = other RNA
gacaccctggataaggtgttcacatac

SEQ ID NO: 59513 - RNA, 33 nt, synthetic construct
  misc_feature 1..33: note = Heterogeneous nuclear ribonucleoprotein A3 (178-188)
  source 1..33: mol_type = other RNA
gacaccgtggataagatcgtcgttcagaaatac

SEQ ID NO: 59514 - RNA, 27 nt, synthetic construct
  misc_feature 1..27: note = Protein SDE2 homolog (60-68)
  source 1..27: mol_type = other RNA
gacaccgtgcagcacggcgccgtctac

SEQ ID NO: 59515 - RNA, 33 nt, synthetic construct
  misc_feature 1..33: note = Heterogeneous nuclear ribonucleoprotein A0 (108-118)
  source 1..33: mol_type = other RNA
gacgtggccgagggcgatctgatcgaacacttc

SEQ ID NO: 59516 - RNA, 33 nt, synthetic construct
  misc_feature 1..33: note = Small ubiquitin-related modifier 2 isoform b precursor (61-71)
  source 1..33: mol_type = other RNA
gacgtgttccagcaacagaccggcggggtctac

SEQ ID NO: 59517 - RNA, 30 nt, synthetic construct
  misc_feature 1..30: note = Dapper homolog 1 (245-254)
  source 1..30: mol_type = other RNA
gacgtgatcgccgatgtcaaccccaagtac

SEQ ID NO: 59518 - RNA, 33 nt, synthetic construct; identical to SEQ ID NO: 35291
  misc_feature 1..33: note = Transmembrane protein 64 (301-311)
  source 1..33: mol_type = other RNA

SEQ ID NO: 59519 - RNA, 30 nt, synthetic construct
  misc_feature 1..30: note = 60S acidic ribosomal protein P2 (53-62)
  source 1..30: mol_type = other RNA
gacgtgatcgcccagggcattgggaagctg

SEQ ID NO: 59520 - RNA, 27 nt, synthetic construct
  misc_feature 1..27: note = Transcription factor EB (253-261)
  source 1..27: mol_type = other RNA
gacgtgatcgataacattatgagactg

SEQ ID NO: 59521 - RNA, 27 nt, synthetic construct
  misc_feature 1..27: note = Nipped-B-like protein (1331-1339)
  source 1..27: mol_type = other RNA
gacgtgatcgagagagtcattcagtac

SEQ ID NO: 59522 - RNA, 27 nt, synthetic construct
  misc_feature 1..27: note = Magnesium transporter NIPA2 (278-286)
  source 1..27: mol_type = other RNA
gacgtgatcggcaccctgagcgggttc

SEQ ID NO: 59523 - RNA, 27 nt, synthetic construct
  misc_feature 1..27: note = DnaJ homolog subfamily C member 8 (26-34)
  source 1..27: mol_type = other RNA
gacgtgatccaggccggcaaggagtac

SEQ ID NO: 59524 - RNA, 27 nt, synthetic construct
  misc_feature 1..27: note = Mitochondrial import receptor subunit TOM5 homolog (23-31)
  source 1..27: mol_type = other RNA
gacgtgatcagctccattagaaacttc

SEQ ID NO: 59525 - RNA, 27 nt, synthetic construct
  misc_feature 1..27: note = Membrane-bound transcription factor site-2 protease (264-272)
  source 1..27: mol_type = other RNA
gacgtgaaggatctgatcggcttcttt

SEQ ID NO: 59526 - RNA, 27 nt, synthetic construct
  misc_feature 1..27: note = E3 ubiquitin-protein ligase RNF213 (4145-4153)
  source 1..27: mol_type = other RNA
gacgtgaaggattacatccaggagtat

SEQ ID NO: 59527 - RNA, 33 nt, synthetic construct
  misc_feature 1..33: note = Pre-mRNA-processing-splicing factor 8 (1650-1660)
  source 1..33: mol_type = other RNA
gacgtgatggatagcaccacaactcagaagtac

SEQ ID NO: 59528 - RNA, 27 nt, synthetic construct
  misc_feature 1..27: note = Coiled-coil domain-containing protein 134 (67-75)
  source 1..27: mol_type = other RNA
gacgtgatgctgaagggcctcttcaaa

SEQ ID NO: 59529 - RNA, 30 nt, synthetic construct
  misc_feature 1..30: note = Dipeptidyl peptidase 9 (772-781)
  source 1..30: mol_type = other RNA
gacgtgcccgagaacaatcagcacggctac

SEQ ID NO: 59530 - RNA, 27 nt, synthetic construct
  misc_feature 1..27: note = Vimentin (271-279)
  source 1..27: mol_type = other RNA
gacgtgagacagcaatacgagagcgtc

SEQ ID NO: 59531 - RNA, 27 nt, synthetic construct
  misc_feature 1..27: note = Src substrate cortactin (289-297)
  source 1..27: mol_type = other RNA
gacgtgacccaggtcagctccgcctac

SEQ ID NO: 59532 - RNA, 27 nt, synthetic construct
  misc_feature 1..27: note = Kynurenine 3-monooxygenase (252-260)
  source 1..27: mol_type = other RNA
gacgtggtcgatttctttcagaagtac

SEQ ID NO: 59533 - RNA, 33 nt, synthetic construct
  misc_feature 1..33: note = Vigilin (521-531)
  source 1..33: mol_type = other RNA
gacgtggtcgatagcgaggccctgcaggtttac

SEQ ID NO: 59534 - RNA, 27 nt, synthetic construct
  misc_feature 1..27: note = Clathrin heavy chain 1 (271-279)
  source 1..27: mol_type = other RNA
gacgtggtcttcctgatcaccaagtac

SEQ ID NO: 59535 - RNA, 27 nt, synthetic construct
  misc_feature 1..27: note = Peptidyl-prolyl cis-trans isomerase F, mitochondrial (179-187)
  source 1..27: mol_type = other RNA
gacgtggtcaagaaaatcgagagcttc

SEQ ID NO: 59536 - RNA, 27 nt, synthetic construct
  misc_feature 1..27: note = GH3 domain-containing protein (366-374)
  source 1..27: mol_type = other RNA
gacgtggtcagagttgtgggcgcctac

SEQ ID NO: 59537 - RNA, 30 nt, synthetic construct
  misc_feature 1..30: note = MAP kinase-activated protein kinase 2 (122-131)
  source 1..30: mol_type = other RNA
gacgtgtacgagaacctgtatgccggcaga

SEQ ID NO: 59538 - RNA, 30 nt, synthetic construct
  misc_feature 1..30: note = AF4/FMR2 family member 1 (32-41)
  source 1..30: mol_type = other RNA
gaggccttccccgaaaagatccctctgttt

SEQ ID NO: 59539 - RNA, 27 nt, synthetic construct
  misc_feature 1..27: note = Protein SHQ1 homolog (207-215)
  source 1..27: mol_type = other RNA
gaggccatcgaacagattctgaagtac

SEQ ID NO: 59540 - RNA, 27 nt, synthetic construct
  misc_feature 1..27: note = Condensin complex subunit 1 (636-644)
  source 1..27: mol_type = other RNA
gaggccatcggcattataagcaagatg

SEQ ID NO: 59541 - RNA, 27 nt, synthetic construct
  misc_feature 1..27: note = Protein transport protein Sec16A (1405-1413)
  source 1..27: mol_type = other RNA
gaggccatccagagaaccgaagcttac

SEQ ID NO: 59542 - RNA, 27 nt, synthetic construct
  misc_feature 1..27: note = Trafficking protein particle complex subunit 9 (320-328)
  source 1..27: mol_type = other RNA
gaggccatcagctactattccaagtac

SEQ ID NO: 59543 - RNA, 24 nt, synthetic construct
  misc_feature 1..24: note = Heat shock cognate 71 kDa protein (88-95)
  source 1..24: mol_type = other RNA
gaggcctacctgggcaagaccgtg

SEQ ID NO: 59544 - RNA, 27 nt, synthetic construct
  misc_feature 1..27: note = Calcineurin B homologous protein 1 (15-23)
  source 1..27: mol_type = other RNA
gaggaaatcaagaaagagaccggcttc

SEQ ID NO: 59545 - RNA, 27 nt, synthetic construct
  misc_feature 1..27: note = Protein diaphanous homolog 1 (941-949)
  source 1..27: mol_type = other RNA
gaggaactgagaaagagcgagtccttc

SEQ ID NO: 59546 - RNA, 27 nt, synthetic construct
  misc_feature 1..27: note = Plectin (1635-1643)
  source 1..27: mol_type = other RNA
gaggaagtggcccagcaaaagagcctg

SEQ ID NO: 59547 - RNA, 27 nt, synthetic construct
  misc_feature 1..27: note = Poly(ADP-ribose)ohydrolase ARH3 (12-20)
  source 1..27: mol_type = other RNA
gagggcctggccagacccctccctctt

SEQ ID NO: 59548 - RNA, 27 nt, synthetic construct
  misc_feature 1..27: note = Mitochondrial enolase superfamily member 1 (393-401)
  source 1..27: mol_type = other RNA
gagcacttcaagtaccccgtgatgatc

SEQ ID NO: 59549 - RNA, 27 nt, synthetic construct
  misc_feature 1..27: note = TERF1-interacting nuclear factor 2 (29-37)
  source 1..27: mol_type = other RNA
gagcacttccccagagtgctggaattt

SEQ ID NO: 59550 - RNA, 33 nt, synthetic construct
  misc_feature 1..33: note = Basigin (50-60)
  source 1..33: mol_type = other RNA
gagcacatcaacgaaggcgagaccgccatgctg

SEQ ID NO: 59551 - RNA, 27 nt, synthetic construct
  misc_feature 1..27: note = Prefoldin subunit 2 (53-61)
  source 1..27: mol_type = other RNA
gagcacagcctggtgatcgacaccctc

SEQ ID NO: 59552 - RNA, 27 nt, synthetic construct
  misc_feature 1..27: note = Regulator of microtubule dynamics protein 3 (350-358)
  source 1..27: mol_type = other RNA
gagcacgtggacaaggccatcgctctg

SEQ ID NO: 59553 - RNA, 27 nt, synthetic construct
  misc_feature 1..27: note = E3 ubiquitin-protein ligase MARCH6 (288-296)
  source 1..27: mol_type = other RNA
gagcacgtgttctgggtcgttagcctg

SEQ ID NO: 59554 - RNA, 27 nt, synthetic construct
  misc_feature 1..27: note = Early endosome antigen 1 (171-179)
  source 1..27: mol_type = other RNA
gagatcgccgacattaagagcaaatac

SEQ ID NO: 59555 - RNA, 27 nt, synthetic construct
  misc_feature 1..27: note = Heat shock 70 kDa protein 1B (129-137)
  source 1..27: mol_type = other RNA
gagatcgccgaagcttacctgggctat

SEQ ID NO: 59556 - RNA, 27 nt, synthetic construct
  misc_feature 1..27: note = Pumilio homolog 1 (848-856)
  source 1..27: mol_type = other RNA
gagatcgccggccacattatggaattc

SEQ ID NO: 59557 - RNA, 30 nt, synthetic construct
  misc_feature 1..30: note = GMP synthase (glutamine-hydrolyzing) (148-157)
  source 1..30: mol_type = other RNA
gagatcttccccctggaaacccctgccttt

SEQ ID NO: 59558 - RNA, 33 nt, synthetic construct
  misc_feature 1..33: note = ATP synthase subunit g, mitochondrial (91-101)
  source 1..33: mol_type = other RNA
gagatcattggcaagagagggataatcggatac

SEQ ID NO: 59559 - RNA, 27 nt, synthetic construct
  misc_feature 1..27: note = Serine/threonine-protein kinase 4 (69-77)
  source 1..27: mol_type = other RNA
gagatcattaaggaaataagcatcatg

SEQ ID NO: 59560 - RNA, 27 nt, synthetic construct
  misc_feature 1..27: note = Protein furry homolog-like (472-480)
  source 1..27: mol_type = other RNA
gagatcattaagataatcggcaaatac

SEQ ID NO: 59561 - RNA, 27 nt, synthetic construct
  misc_feature 1..27: note = Arf-GAP with SH3 domain, ANK repeat and PH domain-containing protein 2 (422-430)
  source 1..27: mol_type = other RNA
gagatcattagcgaagtgcagagaatg

SEQ ID NO: 59562 - RNA, 27 nt, synthetic construct
  misc_feature 1..27: note = Structural maintenance of chromosomes flexible hinge domain-containing protein 1 (760-768)
  source 1..27: mol_type = other RNA
gagatcattagccacatatcccagcat

SEQ ID NO: 59563 - RNA, 27 nt, synthetic construct
  misc_feature 1..27: note = Vacuolar protein sorting-associated protein 13C (916-924)
  source 1..27: mol_type = other RNA
gagatcaaggaagtgattctggagttc

SEQ ID NO: 59564 - RNA, 27 nt, synthetic construct
  misc_feature 1..27: note = Pre-mRNA-processing-splicing factor 8 (2006-2014)
  source 1..27: mol_type = other RNA
gagatcagagacattatactgggcatg

SEQ ID NO: 59565 - RNA, 30 nt, synthetic construct
  misc_feature 1..30: note = Filamin A (106-115)
  source 1..30: mol_type = other RNA
gagatcgtggaaggcgagaaccacacctac

SEQ ID NO: 59566 - RNA, 27 nt, synthetic construct
  misc_feature 1..27: note = Putative elongation factor 1-alpha-like 3 (169-177)
  source 1..27: mol_type = other RNA
gagatcgtgaaggaagtcagcacctac

SEQ ID NO: 59567 - RNA, 30 nt, synthetic construct
  misc_feature 1..30: note = Bifunctional 3'-phosphoadenosine 5'-phosphosulfate synthase 1 (555-564)
  source 1..30: mol_type = other RNA
gagatcgtgcccttcagagtcgccgcttac

SEQ ID NO: 59568 - RNA, 30 nt, synthetic construct
  misc_feature 1..30: note = Splicing factor 3B subunit 1 (42-51)
  source 1..30: mol_type = other RNA
gagatctacggcgggagcgactccagattc

SEQ ID NO: 59569 - RNA, 27 nt, synthetic construct
  misc_feature 1..27: note = Protein SET (73-81)
  source 1..27: mol_type = other RNA
gagctgatcgccaagattcccaacttc

SEQ ID NO: 59570 - RNA, 27 nt, synthetic construct
  misc_feature 1..27: note = Protein CMSS1 (152-160)
  source 1..27: mol_type = other RNA
gagctgatcagaagcatgaccgccttc

SEQ ID NO: 59571 - RNA, 24 nt, synthetic construct
  misc_feature 1..24: note = Beta-lactamase-like protein 2 (240-247)
  source 1..24: mol_type = other RNA
gagctggtgaagatcatttacaaa

SEQ ID NO: 59572 - RNA, 27 nt, synthetic construct
  misc_feature 1..27: note = Structural maintenance of chromosomes flexible hinge domain-containing protein 1 (1904-1912)
  source 1..27: mol_type = other RNA
gagcagatcgacctgctccaacagtac

SEQ ID NO: 59573 - RNA, 33 nt, synthetic construct
  misc_feature 1..33: note = Glutamine-fructose-6-phosphate aminotransferase (isomerizing) 1 (443-453)
  source 1..33: mol_type = other RNA
gagaccgccgacacactgatgggcctcagatac

SEQ ID NO: 59574 - RNA, 27 nt, synthetic construct
  misc_feature 1..27: note = Ezrin (109-117)
  source 1..27: mol_type = other RNA
gagaccgccgtgctgctcggcagctac

SEQ ID NO: 59575 - RNA, 30 nt, synthetic construct
  misc_feature 1..30: note = Mediator of RNA polymerase II transcription subunit 13 (1609-1618)
  source 1..30: mol_type = other RNA
gagaccttcggcgaagccgggcagaagtac

SEQ ID NO: 59576 - RNA, 33 nt, synthetic construct
  misc_feature 1..33: note = A-kinase anchor protein 13 (546-556)
  source 1..33: mol_type = other RNA
gagaccttcggcgggtttgacagccaccagatg

SEQ ID NO: 59577 - RNA, 30 nt, synthetic construct
  misc_feature 1..30: note = DnaJ homolog subfamily C member 7 (29-38)
  source 1..30: mol_type = other RNA
gagaccttcaaggaacagggcaacgcctac

SEQ ID NO: 59578 - RNA, 27 nt, synthetic construct
  misc_feature 1..27: note = ERO1-like protein alpha (51-59)
  source 1..27: mol_type = other RNA
gagaccatcgacagattcaacaattac

SEQ ID NO: 59579 - RNA, 30 nt, synthetic construct
  misc_feature 1..30: note = Protein SLX4IP (47-56)
  source 1..30: mol_type = other RNA
gagaccatcgacagcagagtgcaggaatac

SEQ ID NO: 59580 - RNA, 27 nt, synthetic construct
  misc_feature 1..27: note = Pre-mRNA-processing-splicing factor 8 (1612-1620)
  source 1..27: mol_type = other RNA
gagaccatccaccccagaaagagctac

SEQ ID NO: 59581 - RNA, 27 nt, synthetic construct
  misc_feature 1..27: note = Far upstream element-binding protein 1 (396-404)
  source 1..27: mol_type = other RNA
gagaccatcaagagcatttcccagcaa

SEQ ID NO: 59582 - RNA, 27 nt, synthetic construct
  misc_feature 1..27: note = Vacuolar protein sorting-associated protein 8 homolog (1056-1064)
  source 1..27: mol_type = other RNA
gagaccatccagattacacaaaagtac

SEQ ID NO: 59583 - RNA, 27 nt, synthetic construct
  misc_feature 1..27: note = RING finger protein 145 (166-174)
  source 1..27: mol_type = other RNA
gagaccatcgtgattataaacaagttc

SEQ ID NO: 59584 - RNA, 30 nt, synthetic construct; identical to SEQ ID NO: 35357
  misc_feature 1..30: note = RNA polymerase-associated protein CTR9 homolog (376-385)
  source 1..30: mol_type = other RNA

SEQ ID NO: 59585 - RNA, 30 nt, synthetic construct
  misc_feature 1..30: note = Protein phosphatase 1 regulatory subunit 12A (825-834)
  source 1..30: mol_type = other RNA
gagacccagacagacagcatctccagatac

SEQ ID NO: 59586 - RNA, 30 nt, synthetic construct
  misc_feature 1..30: note = WD repeat-containing protein 11 (1019-1028)
  source 1..30: mol_type = other RNA
gagaccagcgccgacaaccagcactactat

SEQ ID NO: 59587 - RNA, 33 nt, synthetic construct
  misc_feature 1..33: note = Heterogeneous nuclear ribonucleoproteins A2/B1 (19-29)
  source 1..33: mol_type = other RNA
gagaccacagaagagagcctgagaaactactat

SEQ ID NO: 59588 - RNA, 33 nt, synthetic construct
  misc_feature 1..33: note = Constitutive coactivator of PPAR-gamma-like protein 1 (893-903)
  source 1..33: mol_type = other RNA
gagaccgtggccacaggcccctacagagctttc

SEQ ID NO: 59589 - RNA, 30 nt, synthetic construct
  misc_feature 1..30: note = Type II inositol 1,4,5-trisphosphate 5-phosphatase (190-199)
  source 1..30: mol_type = other RNA
gagaccgtgggcacagggatcatgggaaga

SEQ ID NO: 59590 - RNA, 27 nt, synthetic construct
  misc_feature 1..27: note = HLA class II histocompatibility antigen, DR alpha chain (35-43)
  source 1..27: mol_type = other RNA
gagaccgtgtggagactggaagagttc

SEQ ID NO: 59591 - RNA, 27 nt, synthetic construct
  misc_feature 1..27: note = Spectrin alpha chain, non-erythrocytic 1 (648-656)
  source 1..27: mol_type = other RNA
gaggtggccgctagaatgaacgaagtc

SEQ ID NO: 59592 - RNA, 27 nt, synthetic construct
  misc_feature 1..27: note = Heterogeneous nuclear ribonucleoprotein M (10-18)
  source 1..27: mol_type = other RNA
gaggtggccgctaccgaaatcaagatg

SEQ ID NO: 59593 - RNA, 30 nt, synthetic construct
  misc_feature 1..30: note = Transmembrane anterior posterior transformation protein 1 homolog (204-213)
  source 1..30: mol_type = other RNA
gaggtggccgacagactgttcagctccttt

SEQ ID NO: 59594 - RNA, 27 nt, synthetic construct
  misc_feature 1..27: note = Tankyrase-2 (792-800)
  source 1..27: mol_type = other RNA
gaggtggccgaatacctgctccagcac

SEQ ID NO: 59595 - RNA, 27 nt, synthetic construct
  misc_feature 1..27: note = Nuclear pore membraneoprotein 210 (776-784)
  source 1..27: mol_type = other RNA
gaggtggccggccacctgagaacctac

SEQ ID NO: 59596 - RNA, 30 nt, synthetic construct
  misc_feature 1..30: note = Nucleoprotein TPR (1215-1224)
  source 1..30: mol_type = other RNA
gaggtggcccaggtcgaaagcctgagatac

SEQ ID NO: 59597 - RNA, 27 nt, synthetic construct
  misc_feature 1..27: note = Glutamyl-tRNA(Gln) amidotransferase subunit A, mitochondrial (334-342)
  source 1..27: mol_type = other RNA
gaggtggccagcaacatggctagattc

SEQ ID NO: 59598 - RNA, 30 nt, synthetic construct
  misc_feature 1..30: note = Rho guanine nucleotide exchange factor 1 (666-675)
  source 1..30: mol_type = other RNA
gaggtggccaccgaccacaaggctttctac

SEQ ID NO: 59599 - RNA, 30 nt, synthetic construct
  misc_feature 1..30: note = Disheveled-associated activator of morphogenesis 1 (1034-1043)
  source 1..30: mol_type = other RNA
gaggtgttcgacaaggatctgagcaaactc

SEQ ID NO: 59600 - RNA, 30 nt, synthetic construct; identical to SEQ ID NO: 35373
  misc_feature 1..30: note = Fatty acyl-CoA reductase 1 (146-155)
  source 1..30: mol_type = other RNA

SEQ ID NO: 59601 - RNA, 30 nt, synthetic construct; identical to SEQ ID NO: 35374
  misc_feature 1..30: note = G1/S-specific cyclin-D2 (75-84)
  source 1..30: mol_type = other RNA

SEQ ID NO: 59602 - RNA, 30 nt, synthetic construct
  misc_feature 1..30: note = Uncharacterized protein ZMYM6NB (45-54)
  source 1..30: mol_type = other RNA
gaggtgttccccctgaaggtctttggctac

SEQ ID NO: 59603 - RNA, 30 nt, synthetic construct
  misc_feature 1..30: note = Mitotic spindle assembly checkpoint protein MAD1 (619-628)
  source 1..30: mol_type = other RNA
gaggtgttccagaccaagatccaagaattt

SEQ ID NO: 59604 - RNA, 27 nt, synthetic construct
  misc_feature 1..27: note = Zinc finger and BTB domain-containing protein 38 (82-90)
  source 1..27: mol_type = other RNA
gaggtgttcaccgaaatcctgaactac

SEQ ID NO: 59605 - RNA, 27 nt, synthetic construct
  misc_feature 1..27: note = Peroxisomal multifunctional enzyme type 2 (214-222)
  source 1..27: mol_type = other RNA
gaggtgggcgccgggtggatcggaaag

SEQ ID NO: 59606 - RNA, 27 nt, synthetic construct
  misc_feature 1..27: note = Chromodomain-helicase-DNA-binding protein 1-like (232-240)
  source 1..27: mol_type = other RNA
gaggtgggcgacttcatccagagatac

SEQ ID NO: 59607 - RNA, 27 nt, synthetic construct
  misc_feature 1..27: note = PERQ amino acid-rich with GYF domain-containing protein 2 (1163-1171)
  source 1..27: mol_type = other RNA
gaggtgcacgactacatcagagcctat

SEQ ID NO: 59608 - RNA, 30 nt, synthetic construct
  misc_feature 1..30: note = Centrosomal protein of 55 kDa (275-284)
  source 1..30: mol_type = other RNA
gaggtgcacaacctgaatcagctcctttac

SEQ ID NO: 59609 - RNA, 30 nt, synthetic construct
  misc_feature 1..30: note = Transcription termination factor 1, mitochondrial (99-108)
  source 1..30: mol_type = other RNA
gaggtgatcgccagcattatatccagatac

SEQ ID NO: 59610 - RNA, 27 nt, synthetic construct
  misc_feature 1..27: note = Sterol 26-hydroxylase, mitochondrial (180-188)
  source 1..27: mol_type = other RNA
gaggtgatcgacgatttcatgaccaga

SEQ ID NO: 59611 - RNA, 27 nt, synthetic construct
  misc_feature 1..27: note = Alpha/beta hydrolase domain-containing protein 17C (277-285)
  source 1..27: mol_type = other RNA
gaggtgatcgacttcagccacggcctg

SEQ ID NO: 59612 - RNA, 30 nt, synthetic construct
  misc_feature 1..30: note = PHD finger protein 10 (57-66)
  source 1..30: mol_type = other RNA
gaggtgatcgacctgatgattaaggaatac

SEQ ID NO: 59613 - RNA, 30 nt, synthetic construct
  misc_feature 1..30: note = SNF-related serine/threonine-protein kinase (80-89)
  source 1..30: mol_type = other RNA
gaggtgatcgacacccagacaaagctgtac

SEQ ID NO: 59614 - RNA, 27 nt, synthetic construct
  misc_feature 1..27: note = Transcription initiation factor TFIID subunit 1-like (1043-1051)
  source 1..27: mol_type = other RNA
gaggtgatcgacgtcgttagaaccatg

SEQ ID NO: 59615 - RNA, 27 nt, synthetic construct
  misc_feature 1..27: note = Shootin-1 (164-172)
  source 1..27: mol_type = other RNA
gaggtgatcgaagaggtcaacaaggtt

SEQ ID NO: 59616 - RNA, 36 nt, synthetic construct
  misc_feature 1..36: note = Glucocorticoid receptor (538-549)
  source 1..36: mol_type = other RNA
gaggtgatcgaacccgaggtcctgtacgccggctat

SEQ ID NO: 59617 - RNA, 30 nt, synthetic construct
  misc_feature 1..30: note = Transformation/transcription domain-associated protein (3103-3112)
  source 1..30: mol_type = other RNA
gaggtgatcgaaagcaccaacctgaagtac

SEQ ID NO: 59618 - RNA, 30 nt, synthetic construct
  misc_feature 1..30: note = Serine/threonine-protein kinase MARK2 (117-126)
  source 1..30: mol_type = other RNA
gaggtgatcgaaaccgagaagacactgtac

SEQ ID NO: 59619 - RNA, 30 nt, synthetic construct
  misc_feature 1..30: note = Histone H2A deubiquitinase MYSM1 (495-504)
  source 1..30: mol_type = other RNA
gaggtgatcggcctgctcgggggaagatac

SEQ ID NO: 59620 - RNA, 27 nt, synthetic construct
  misc_feature 1..27: note = CD9 antigen (116-124)
  source 1..27: mol_type = other RNA
gaggtgatcaaggaagtccaggagttc

SEQ ID NO: 59621 - RNA, 27 nt, synthetic construct
  misc_feature 1..27: note = Eukaryotic translation initiation factor 3 subunit L (50-58)
  source 1..27: mol_type = other RNA
gaggtgatcaagaacttcattcagtac

SEQ ID NO: 59622 - RNA, 30 nt, synthetic construct
  misc_feature 1..30: note = Calcium signal-modulating cyclophilin ligand (207-216)
  source 1..30: mol_type = other RNA
gaggtgatcaacagaagcatggacacctac

SEQ ID NO: 59623 - RNA, 27 nt, synthetic construct
  misc_feature 1..27: note = NADH dehydrogenase (ubiquinone) 1 beta subcomplex subunit 6 (115-123)
  source 1..27: mol_type = other RNA
gaggtgatcccccctatgaaggaattc

SEQ ID NO: 59624 - RNA, 27 nt, synthetic construct
  misc_feature 1..27: note = Tyrosyl-DNA phosphodiesterase 2 (152-160)
  source 1..27: mol_type = other RNA
gaggtgatccccccttactatagctac

SEQ ID NO: 59625 - RNA, 27 nt, synthetic construct
  misc_feature 1..27: note = 60 kDa SS-A/Ro ribonucleoprotein (72-80)
  source 1..27: mol_type = other RNA
gaggtgatccaggaaattaagagcttc

SEQ ID NO: 59626 - RNA, 27 nt, synthetic construct
  misc_feature 1..27: note = Insulin-degrading enzyme (951-959)
  source 1..27: mol_type = other RNA
gaggtgatccagaacatgaccgaattc

SEQ ID NO: 59627 - RNA, 27 nt, synthetic construct
  misc_feature 1..27: note = Cytosolic 5'-nucleotidase 3A (161-169)
  source 1..27: mol_type = other RNA
gaggtgatcagacaggccggcgtctac

SEQ ID NO: 59628 - RNA, 30 nt, synthetic construct; identical to SEQ ID NO: 35401
  misc_feature 1..30: note = Nucleoprotein TPR (531-540)
  source 1..30: mol_type = other RNA

SEQ ID NO: 59629 - RNA, 27 nt, synthetic construct
  misc_feature 1..27: note = Mediator of RNA polymerase II transcription subunit 26 (33-41)
  source 1..27: mol_type = other RNA
gaggtgatcagctccctggaaaagtac

SEQ ID NO: 59630 - RNA, 27 nt, synthetic construct
  misc_feature 1..27: note = Bloom syndrome protein (1277-1285)
  source 1..27: mol_type = other RNA
gaggtgatcagcgtcctgcagaagtac

SEQ ID NO: 59631 - RNA, 33 nt, synthetic construct
  misc_feature 1..33: note = Ribosomal protein S6 kinase alpha-3 (14-24)
  source 1..33: mol_type = other RNA
gaggtgaaggaagacatcggcgtcgggagctac

SEQ ID NO: 59632 - RNA, 36 nt, synthetic construct
  misc_feature 1..36: note = Farnesyl pyrophosphate synthase (40-51)
  source 1..36: mol_type = other RNA
gaggtgctggaatacaacgccatcggcgggaagtat

SEQ ID NO: 59633 - RNA, 33 nt, synthetic construct
  misc_feature 1..33: note = Tight junction protein ZO-2 (118-128)
  source 1..33: mol_type = other RNA
gaggtgatggacgaattcgatggcagaagcttt

SEQ ID NO: 59634 - RNA, 27 nt, synthetic construct
  misc_feature 1..27: note = DNA polymerase eta (98-106)
  source 1..27: mol_type = other RNA
gaggtgatggaaatcatgagcagattc

SEQ ID NO: 59635 - RNA, 27 nt, synthetic construct
  misc_feature 1..27: note = 2',3'-cyclic-nucleotide 3'-phosphodiesterase (369-377)
  source 1..27: mol_type = other RNA
gaggtgagagccatcttcaccggctac

SEQ ID NO: 59636 - RNA, 30 nt, synthetic construct
  misc_feature 1..30: note = Fragile X mental retardation syndrome-related protein 1 (7-16)
  source 1..30: mol_type = other RNA
gaggtgagaggcagcaacggggccttctac

SEQ ID NO: 59637 - RNA, 27 nt, synthetic construct
  misc_feature 1..27: note = Glycylpeptide N-tetradecanoyltransferase 1 (60-68)
  source 1..27: mol_type = other RNA
gaggtgaccgacttcctgagcttttac

SEQ ID NO: 59638 - RNA, 27 nt, synthetic construct
  misc_feature 1..27: note = A-kinase anchor protein 9 (664-672)
  source 1..27: mol_type = other RNA
gaggtgaccgaaatcattagccagttc

SEQ ID NO: 59639 - RNA, 27 nt, synthetic construct
  misc_feature 1..27: note = DNA-directed RNA polymerases I, II, and III subunit RPABC1 (155-163)
  source 1..27: mol_type = other RNA
gaggtgaccgaactgctcgccagatac

SEQ ID NO: 59640 - RNA, 27 nt, synthetic construct
  misc_feature 1..27: note = DNA topoisomerase 2-alpha (74-82)
  source 1..27: mol_type = other RNA
gaggtgaccttcgtccccggcctgtac

SEQ ID NO: 59641 - RNA, 27 nt, synthetic construct
  misc_feature 1..27: note = Volume-regulated anion channel subunit LRRC8D (74-82)
  source 1..27: mol_type = other RNA
gaggtgaccacaaacatccccaagatg

SEQ ID NO: 59642 - RNA, 27 nt, synthetic construct
  misc_feature 1..27: note = Vacuolar protein sorting-associated protein 13D (1985-1993)
  source 1..27: mol_type = other RNA
gaggtggtcgccttcatccagcacttt

SEQ ID NO: 59643 - RNA, 27 nt, synthetic construct
  misc_feature 1..27: note = Mortality factor 4-like protein 1 (216-224)
  source 1..27: mol_type = other RNA
gaggtggtcgccggcatcaaggaatac

SEQ ID NO: 59644 - RNA, 30 nt, synthetic construct
  misc_feature 1..30: note = Mortality factor 4-like protein 1 (216-225)
  source 1..30: mol_type = other RNA
gaggtggtcgccggcatcaaggaatacttc

SEQ ID NO: 59645 - RNA, 27 nt, synthetic construct
  misc_feature 1..27: note = Nesprin-2 (1588-1596)
  source 1..27: mol_type = other RNA
gaggtggtcgacaagatcaaccaggtt

SEQ ID NO: 59646 - RNA, 27 nt, synthetic construct
  misc_feature 1..27: note = Peptide-N(4)-(N-acetyl-beta-glucosaminyl)asparagine amidase (383-391)
  source 1..27: mol_type = other RNA
gaggtggtcgacgttacctggagatac

SEQ ID NO: 59647 - RNA, 27 nt, synthetic construct
  misc_feature 1..27: note = GA-binding protein subunit beta-1 (118-126)
  source 1..27: mol_type = other RNA
gaggtggtcgaactgctcatcaagtac

SEQ ID NO: 59648 - RNA, 27 nt, synthetic construct
  misc_feature 1..27: note = Glucocorticoid receptor (728-736)
  source 1..27: mol_type = other RNA
gaggtggtcgaaaacctgctcaattac

SEQ ID NO: 59649 - RNA, 27 nt, synthetic construct
  misc_feature 1..27: note = Inverted formin-2 (336-344)
  source 1..27: mol_type = other RNA
gaggtggtcgaaagactgctcagcgtt

SEQ ID NO: 59650 - RNA, 27 nt, synthetic construct
  misc_feature 1..27: note = F-box only protein 22 (27-35)
  source 1..27: mol_type = other RNA
gaggtggtcgaaagagttctgaccttc

SEQ ID NO: 59651 - RNA, 33 nt, synthetic construct
  misc_feature 1..33: note = Actin-binding protein IPP (418-428)
  source 1..33: mol_type = other RNA
gaggtggtcggcaacatggccgttagcagatac

SEQ ID NO: 59652 - RNA, 30 nt, synthetic construct
  misc_feature 1..30: note = 26S proteasome non-ATPase regulatory subunit 2 (581-590)
  source 1..30: mol_type = other RNA
gaggtggtcagcgaacccttcagatccttt

SEQ ID NO: 59653 - RNA, 30 nt, synthetic construct; identical to SEQ ID NO: 35426
  misc_feature 1..30: note = Cold shock domain-containing protein E1 (630-639)
  source 1..30: mol_type = other RNA

SEQ ID NO: 59654 - RNA, 27 nt, synthetic construct
  misc_feature 1..27: note = Zinc finger MIZ domain-containing protein 2 (271-279)
  source 1..27: mol_type = other RNA
gaggtgtaccccggccagcaatatctg

SEQ ID NO: 59655 - RNA, 27 nt, synthetic construct
  misc_feature 1..27: note = Uncharacterized protein C18orf8 (437-445)
  source 1..27: mol_type = other RNA
gagtacatcagaagcctgaaccagttc

SEQ ID NO: 59656 - RNA, 27 nt, synthetic construct
  misc_feature 1..27: note = Oxysterol-binding protein (17-25)
  source 1..27: mol_type = other RNA
gagtacatggaacacgtgtatctgatc

SEQ ID NO: 59657 - RNA, 27 nt, synthetic construct
  misc_feature 1..27: note = Insulin receptor substrate 2 (597-605)
  source 1..27: mol_type = other RNA
gagtacaccctgatgagagccacattc

SEQ ID NO: 59658 - RNA, 27 nt, synthetic construct
  misc_feature 1..27: note = Striatin-interacting protein 2 (594-602)
  source 1..27: mol_type = other RNA
gagtacgtgagccagcacctggtcttc

SEQ ID NO: 59659 - RNA, 27 nt, synthetic construct
  misc_feature 1..27: note = Phospholipid hydroperoxide glutathione peroxidase, mitochondrial (119-127)
  source 1..27: mol_type = other RNA
ttcgccgctggctacaacgtgaagttt

SEQ ID NO: 59660 - RNA, 24 nt, synthetic construct
  misc_feature 1..24: note = Tuftelin-interacting protein 11 (132-139)
  source 1..24: mol_type = other RNA
ttcgccggcgggaccaagagcttt

SEQ ID NO: 59661 - RNA, 33 nt, synthetic construct
  misc_feature 1..33: note = Sister chromatid cohesion protein PDS5 homolog A (273-283)
  source 1..33: mol_type = other RNA
ttcgccatcgacccccacctgctccttagcgtg

SEQ ID NO: 59662 - RNA, 27 nt, synthetic construct
  misc_feature 1..27: note = ATP-dependent RNA helicase DDX24 (247-255)
  source 1..27: mol_type = other RNA
ttcgccatccccatgattcacgctgtg

SEQ ID NO: 59663 - RNA, 27 nt, synthetic construct
  misc_feature 1..27: note = Clathrin heavy chain 1 (1594-1602)
  source 1..27: mol_type = other RNA
ttcgccatgccctactttatccaggtg

SEQ ID NO: 59664 - RNA, 27 nt, synthetic construct
  misc_feature 1..27: note = Splicing factor, proline- and glutamine-rich (486-494)
  source 1..27: mol_type = other RNA
ttcgagtacgaatatagccagagatgg

SEQ ID NO: 59665 - RNA, 27 nt, synthetic construct
  misc_feature 1..27: note = Serine/threonine-protein phosphatase PP1-beta catalytic subunit (226-234)
  source 1..27: mol_type = other RNA
ttcggcgccgacgtggtcagcaagttt

SEQ ID NO: 59666 - RNA, 27 nt, synthetic construct
  misc_feature 1..27: note = Chromatin assembly factor 1 subunit B (228-236)
  source 1..27: mol_type = other RNA
ttccacgacgatagcatgaagtccttt

SEQ ID NO: 59667 - RNA, 27 nt, synthetic construct
  misc_feature 1..27: note = Endoplasmin (422-430)
  source 1..27: mol_type = other RNA
ttccacgacatgatgcccaagtacctg

SEQ ID NO: 59668 - RNA, 27 nt, synthetic construct
  misc_feature 1..27: note = Protein transport protein Sec23B (630-638)
  source 1..27: mol_type = other RNA
ttccacggcccccctgagccagtgctg

SEQ ID NO: 59669 - RNA, 27 nt, synthetic construct
  misc_feature 1..27: note = Coatomer subunit alpha (101-109)
  source 1..27: mol_type = other RNA
ttccaccatgagtacccctggatcctg

SEQ ID NO: 59670 - RNA, 27 nt, synthetic construct
  misc_feature 1..27: note = Putative heat shock protein HSP 90-alpha A5 (3-11)
  source 1..27: mol_type = other RNA
ttccaccatgtgggccaggccgggctg

SEQ ID NO: 59671 - RNA, 27 nt, synthetic construct
  misc_feature 1..27: note = Phosphatidylinositol 4,5-bisphosphate 3-kinase catalytic subunit gamma isoform (961-969)
  source 1..27: mol_type = other RNA
ttccacatcgactttggccatattctg

SEQ ID NO: 59672 - RNA, 27 nt, synthetic construct
  misc_feature 1..27: note = Fas apoptotic inhibitory molecule 3 (252-260)
  source 1..27: mol_type = other RNA
ttccacatcctgattcccaccatactc

SEQ ID NO: 59673 - RNA, 27 nt, synthetic construct
  misc_feature 1..27: note = Rho GTPase-activating protein 4 (276-284)
  source 1..27: mol_type = other RNA
ttccacctggccctcggccaggtgctt

SEQ ID NO: 59674 - RNA, 30 nt, synthetic construct
  misc_feature 1..30: note = Proteasome subunit alpha type-5 (154-163)
  source 1..30: mol_type = other RNA
ttccacatggaccccagcggcacctttgtg

SEQ ID NO: 59675 - RNA, 27 nt, synthetic construct
  misc_feature 1..27: note = Anaphase-promoting complex subunit 1 (1137-1145)
  source 1..27: mol_type = other RNA
ttccacaacggcgtggccgctgggctg

SEQ ID NO: 59676 - RNA, 27 nt, synthetic construct
  misc_feature 1..27: note = Ubiquitin-conjugating enzyme E2 J1 (237-245)
  source 1..27: mol_type = other RNA
ttccaccagcccacccaacctgtggcc

SEQ ID NO: 59677 - RNA, 27 nt, synthetic construct
  misc_feature 1..27: note = Mitotic checkpoint serine/threonine-protein kinase BUB1 (438-446)
  source 1..27: mol_type = other RNA
ttccacaccacacccaacactagcctg

SEQ ID NO: 59678 - RNA, 27 nt, synthetic construct
  misc_feature 1..27: note = WD repeat-containing protein 47 (348-356)
  source 1..27: mol_type = other RNA
ttccactaccccggcgtgcagaacctg

SEQ ID NO: 59679 - RNA, 30 nt, synthetic construct
  misc_feature 1..30: note = Probable ubiquitin carboxyl-terminal hydrolase FAF-X (1466-1475)
  source 1..30: mol_type = other RNA
ttcatctttcccgccagcaacgtgtacctg

SEQ ID NO: 59680 - RNA, 27 nt, synthetic construct
  misc_feature 1..27: note = Endoplasmic reticulum aminopeptidase 1 (249-257)
  source 1..27: mol_type = other RNA
ttcatcattagcgactttgagtccgtg

SEQ ID NO: 59681 - RNA, 27 nt, synthetic construct
  misc_feature 1..27: note = Protein kinase C-binding protein 1 (213-221)
  source 1..27: mol_type = other RNA
ttcctggccgacgctaagtggatcctc

SEQ ID NO: 59682 - RNA, 27 nt, synthetic construct
  misc_feature 1..27: note = Unconventional myosin-Ic (773-781)
  source 1..27: mol_type = other RNA
ttcctggaccacgtgagaaccagcttt

SEQ ID NO: 59683 - RNA, 27 nt, synthetic construct
  misc_feature 1..27: note = E3 ubiquitin-protein ligase RNF216 (134-142)
  source 1..27: mol_type = other RNA
ttcctggacctcggcccccctgggatc

SEQ ID NO: 59684 - RNA, 27 nt, synthetic construct
  misc_feature 1..27: note = UDP-glucose:glycoprotein glucosyltransferase 2 (97-105)
  source 1..27: mol_type = other RNA
ttcctggacaacctccacatcaatctt

SEQ ID NO: 59685 - RNA, 27 nt, synthetic construct
  misc_feature 1..27: note = Proteasome-associated protein ECM29 homolog (801-809)
  source 1..27: mol_type = other RNA
ttcctggacagcacctcccccctcctt

SEQ ID NO: 59686 - RNA, 27 nt, synthetic construct
  misc_feature 1..27: note = Eukaryotic translation initiation factor 3 subunit M (218-226)
  source 1..27: mol_type = other RNA
ttcctgtttgaccacctccttaccctg

SEQ ID NO: 59687 - RNA, 27 nt, synthetic construct
  misc_feature 1..27: note = HEAT repeat-containing protein 1 (2003-2011)
  source 1..27: mol_type = other RNA
ttcctgtttgacacccagcacttcatc

SEQ ID NO: 59688 - RNA, 30 nt, synthetic construct
  misc_feature 1..30: note = Apolipoprotein L1 (239-248)
  source 1..30: mol_type = other RNA
ttcctgggcgagaacatcagcaattttctc

SEQ ID NO: 59689 - RNA, 27 nt, synthetic construct
  misc_feature 1..27: note = WASH complex subunit strumpellin (1046-1054)
  source 1..27: mol_type = other RNA
ttcctgatcgcccagctccccaagctt

SEQ ID NO: 59690 - RNA, 30 nt, synthetic construct
  misc_feature 1..30: note = Tensin-1 (1527-1536)
  source 1..30: mol_type = other RNA
ttcctgatcgagaccggccccagaggggtg

SEQ ID NO: 59691 - RNA, 27 nt, synthetic construct
  misc_feature 1..27: note = Plexin-B2 (395-403)
  source 1..27: mol_type = other RNA
ttcctgatcaactttattcacaccctc

SEQ ID NO: 59692 - RNA, 27 nt, synthetic construct
  misc_feature 1..27: note = cAMP-specific 3',5'-cyclic phosphodiesterase 4B (382-390)
  source 1..27: mol_type = other RNA
ttcctgatcaacaccaatagcgagctc

SEQ ID NO: 59693 - RNA, 30 nt, synthetic construct
  misc_feature 1..30: note = Serine/threonine-protein kinase 11-interacting protein (316-325)
  source 1..30: mol_type = other RNA
ttcctgctcgacggcaaggtgcttagcctg

SEQ ID NO: 59694 - RNA, 33 nt, synthetic construct
  misc_feature 1..33: note = Tyrosine-protein kinase BAZ1B (291-301)
  source 1..33: mol_type = other RNA
ttcctgctcgacccctacaagtatatgaccctt

SEQ ID NO: 59695 - RNA, 30 nt, synthetic construct
  misc_feature 1..30: note = Transmembrane emp24 domain-containing protein 10 (22-31)
  source 1..30: mol_type = other RNA
ttcctgctcggccccagacttgtgctggcc

SEQ ID NO: 59696 - RNA, 27 nt, synthetic construct
  misc_feature 1..27: note = TBC1 domain family member 13 (329-337)
  source 1..27: mol_type = other RNA
ttcctgctccccgacgtgatcagaatt

SEQ ID NO: 59697 - RNA, 30 nt, synthetic construct
  misc_feature 1..30: note = Atlastin-3 (263-272)
  source 1..30: mol_type = other RNA
ttcctgctcccccaccctggccttcaggtg

SEQ ID NO: 59698 - RNA, 27 nt, synthetic construct
  misc_feature 1..27: note = Glycerol-3-phosphate acyltransferase 4 (174-182)
  source 1..27: mol_type = other RNA
ttcctgctcccccttagaatcgccctg

SEQ ID NO: 59699 - RNA, 30 nt, synthetic construct
  misc_feature 1..30: note = ATP-dependent RNA helicase DDX24 (582-591)
  source 1..30: mol_type = other RNA
ttcctgatgcagtaccccggcagaagcctc

SEQ ID NO: 59700 - RNA, 27 nt, synthetic construct
  misc_feature 1..27: note = Quinone oxidoreductase-like protein 1 (284-292)
  source 1..27: mol_type = other RNA
ttcctgaacgacgaggtgtggaatctc

SEQ ID NO: 59701 - RNA, 27 nt, synthetic construct
  misc_feature 1..27: note = Spectrin beta chain, non-erythrocytic 1 (1184-1192)
  source 1..27: mol_type = other RNA
ttcctgaacaatcaggagtacgtgctc

SEQ ID NO: 59702 - RNA, 27 nt, synthetic construct
  misc_feature 1..27: note = Bifunctional coenzyme A synthase (125-133)
  source 1..27: mol_type = other RNA
ttcctgccccctctcccaaccagcgtg

SEQ ID NO: 59703 - RNA, 27 nt, synthetic construct
  misc_feature 1..27: note = RNA-binding protein EWS (550-558)
  source 1..27: mol_type = other RNA
ttcctgccccctccatttccgccccct

SEQ ID NO: 59704 - RNA, 27 nt, synthetic construct
  misc_feature 1..27: note = Arginyl aminopeptidase-like 1 (87-95)
  source 1..27: mol_type = other RNA
ttcctgccccctagctttccaatcgtg

SEQ ID NO: 59705 - RNA, 30 nt, synthetic construct; identical to SEQ ID NO: 35478
  misc_feature 1..30: note = Exosome complex component RRP4 (134-143)
  source 1..30: mol_type = other RNA

SEQ ID NO: 59706 - RNA, 30 nt, synthetic construct
  misc_feature 1..30: note = Cirhin (214-223)
  source 1..30: mol_type = other RNA
ttcctgagcgacggcaccatcatttccgtg

SEQ ID NO: 59707 - RNA, 27 nt, synthetic construct
  misc_feature 1..27: note = 26S proteasome non-ATPase regulatory subunit 1 (260-268)
  source 1..27: mol_type = other RNA
ttcctgagctccgtgatccagaacctc

SEQ ID NO: 59708 - RNA, 27 nt, synthetic construct
  misc_feature 1..27: note = Acidic leucine-rich nuclear phosphoprotein 32 family member A (46-54)
  source 1..27: mol_type = other RNA
ttcctgagcaccatcaacgtgggcctc

SEQ ID NO: 59709 - RNA, 30 nt, synthetic construct
  misc_feature 1..30: note = Mannosyl-oligosaccharide glucosidase (448-457)
  source 1..30: mol_type = other RNA
ttcctgtgggacgagggctttcaccagctc

SEQ ID NO: 59710 - RNA, 27 nt, synthetic construct
  misc_feature 1..27: note = rRNA methyltransferase 1, mitochondrial (246-254)
  source 1..27: mol_type = other RNA
ttcctgtgggagagacccaccctcctt

SEQ ID NO: 59711 - RNA, 24 nt, synthetic construct
  misc_feature 1..24: note = Transmembrane protein 41B (141-148)
  source 1..24: mol_type = other RNA
ttcctgtacccctttcctctcgcc

SEQ ID NO: 59712 - RNA, 27 nt, synthetic construct
  misc_feature 1..27: note = tRNA-splicing endonuclease subunit Sen15 (185-193)
  source 1..27: mol_type = other RNA
ttcatgctgcccgaccctcagaacatc

SEQ ID NO: 59713 - RNA, 33 nt, synthetic construct
  misc_feature 1..33: note = tRNA-splicing endonuclease subunit Sen15 (185-195)
  source 1..33: mol_type = other RNA
ttcatgctgcccgaccctcagaacatcagcctc

SEQ ID NO: 59714 - RNA, 27 nt, synthetic construct
  misc_feature 1..27: note = Intraflagellar transport protein 172 homolog (435-443)
  source 1..27: mol_type = other RNA
ttcatgaacccccacctgatcagcgtg

SEQ ID NO: 59715 - RNA, 27 nt, synthetic construct
  misc_feature 1..27: note = Ecto-NOX disulfide-thiol exchanger 1 (187-195)
  source 1..27: mol_type = other RNA
ttcatggtggacaaggccatctacctg

SEQ ID NO: 59716 - RNA, 27 nt, synthetic construct
  misc_feature 1..27: note = Integrin alpha-4 (949-957)
  source 1..27: mol_type = other RNA
ttccccgagcctaacccaagagtgatc

SEQ ID NO: 59717 - RNA, 27 nt, synthetic construct
  misc_feature 1..27: note = Protein RRP5 homolog (1250-1258)
  source 1..27: mol_type = other RNA
ttcccctttggcaagatcgggaccgtg

SEQ ID NO: 59718 - RNA, 27 nt, synthetic construct
  misc_feature 1..27: note = Zinc finger protein 662 (74-82)
  source 1..27: mol_type = other RNA
ttcccctttcctaagccagccctgatc

SEQ ID NO: 59719 - RNA, 30 nt, synthetic construct
  misc_feature 1..30: note = U2 small nuclear ribonucleoprotein B'' (72-81)
  source 1..30: mol_type = other RNA
ttccccttttacggcaagcctatgagaatc

SEQ ID NO: 59720 - RNA, 27 nt, synthetic construct
  misc_feature 1..27: note = Cyclin-dependent kinase 9 (59-67)
  source 1..27: mol_type = other RNA
ttccccatcaccgccctgagagagatt

SEQ ID NO: 59721 - RNA, 24 nt, synthetic construct
  misc_feature 1..24: note = HLA class II histocompatibility antigen, DP alpha 1 chain (123-130)
  source 1..24: mol_type = other RNA
ttccccaaggagcctgtggaactg

SEQ ID NO: 59722 - RNA, 27 nt, synthetic construct
  misc_feature 1..27: note = Poly(A)-specific ribonuclease PARN (273-281)
  source 1..27: mol_type = other RNA
ttccccagactgctcgacaccaagctt

SEQ ID NO: 59723 - RNA, 27 nt, synthetic construct
  misc_feature 1..27: note = Glutamine-fructose-6-phosphate aminotransferase (isomerizing) 2 (671-679)
  source 1..27: mol_type = other RNA
ttccccagaaacctggccaagagcgtg

SEQ ID NO: 59724 - RNA, 27 nt, synthetic construct
  misc_feature 1..27: note = AT-rich interactive domain-containing protein 2 (669-677)
  source 1..27: mol_type = other RNA
ttccccgtgcagggcgtccacaccgtt

SEQ ID NO: 59725 - RNA, 27 nt, synthetic construct
  misc_feature 1..27: note = Putative heat shock protein HSP 90-beta 2 (17-25)
  source 1..27: mol_type = other RNA
ttccaggccgagatcgctcaactgatg

SEQ ID NO: 59726 - RNA, 27 nt, synthetic construct
  misc_feature 1..27: note = Transcription intermediary factor 1-alpha (890-898)
  source 1..27: mol_type = other RNA
ttccaggaccccgtgcctctgaccgtc

SEQ ID NO: 59727 - RNA, 27 nt, synthetic construct
  misc_feature 1..27: note = Integrin beta-7 (790-798)
  source 1..27: mol_type = other RNA
ttccaggaggccgacagccccaccctg

SEQ ID NO: 59728 - RNA, 27 nt, synthetic construct
  misc_feature 1..27: note = Nicotinate phosphoribosyltransferase (342-350)
  source 1..27: mol_type = other RNA
ttccaggtgccctggctggagagcgtc

SEQ ID NO: 59729 - RNA, 27 nt, synthetic construct
  misc_feature 1..27: note = 5-aminolevulinate synthase, nonspecific, mitochondrial (214-222)
  source 1..27: mol_type = other RNA
ttccagtacgacagatttttcgagaag

SEQ ID NO: 59730 - RNA, 27 nt, synthetic construct
  misc_feature 1..27: note = Asparagine synthetase (glutamine-hydrolyzing) (11-19)
  source 1..27: mol_type = other RNA
ttcagatttgagaacgtgaatggctac

SEQ ID NO: 59731 - RNA, 30 nt, synthetic construct
  misc_feature 1..30: note = Probable ATP-dependent RNA helicase DDX5 (558-567)
  source 1..30: mol_type = other RNA
ttcagaaccggcaaccccacagggacttac

SEQ ID NO: 59732 - RNA, 30 nt, synthetic construct
  misc_feature 1..30: note = Protein transport protein Sec31A (398-407)
  source 1..30: mol_type = other RNA
ttcagctttggcgggaagctggtgaccttc

SEQ ID NO: 59733 - RNA, 27 nt, synthetic construct
  misc_feature 1..27: note = Polymeric immunoglobulin receptor (132-140)
  source 1..27: mol_type = other RNA
ttcagcgtggtcatcaaccagctgaga

SEQ ID NO: 59734 - RNA, 27 nt, synthetic construct
  misc_feature 1..27: note = Neutral amino acid transporter B(0) (89-97)
  source 1..27: mol_type = other RNA
ttcgtgtttcccggcgagctgctcctt

SEQ ID NO: 59735 - RNA, 27 nt, synthetic construct
  misc_feature 1..27: note = Clathrin heavy chain 1 (783-791)
  source 1..27: mol_type = other RNA
ttcgtgcacgacctggtcctctacctt

SEQ ID NO: 59736 - RNA, 27 nt, synthetic construct
  misc_feature 1..27: note = Actin-binding protein anillin (958-966)
  source 1..27: mol_type = other RNA
ttcgtgctggacaaggtcccctttctc

SEQ ID NO: 59737 - RNA, 24 nt, synthetic construct
  misc_feature 1..24: note = Myosin light polypeptide 6 (150-157)
  source 1..24: mol_type = other RNA
ttcgtgagacacatcctgagcggc

SEQ ID NO: 59738 - RNA, 33 nt, synthetic construct
  misc_feature 1..33: note = Alkyldihydroxyacetonephosphate synthase, peroxisomal (497-507)
  source 1..33: mol_type = other RNA
ggcgaggacaacgggcagagaggatacctgctc

SEQ ID NO: 59739 - RNA, 27 nt, synthetic construct
  misc_feature 1..27: note = Putative deoxyribonuclease TATDN3 (48-56)
  source 1..27: mol_type = other RNA
ggcgagttcgaaaagatcatgcagctg

SEQ ID NO: 59740 - RNA, 27 nt, synthetic construct
  misc_feature 1..27: note = Zinc finger protein 428 (174-182)
  source 1..27: mol_type = other RNA
ggcgagctgcacgggcatttcatgctc

SEQ ID NO: 59741 - RNA, 27 nt, synthetic construct
  misc_feature 1..27: note = Patatin-like phospholipase domain-containing protein 2 (124-132)
  source 1..27: mol_type = other RNA
ggcgagaacgtgatcattagccacttc

SEQ ID NO: 59742 - RNA, 27 nt, synthetic construct
  misc_feature 1..27: note = DAZ-associated protein 1 (125-133)
  source 1..27: mol_type = other RNA
ggcgagaccgaactgagagagtacttc

SEQ ID NO: 59743 - RNA, 33 nt, synthetic construct
  misc_feature 1..33: note = Nuclear pore complex protein Nup93 (311-321)
  source 1..33: mol_type = other RNA
ggcgaggtggaagggcaccccgtctgggccctg

SEQ ID NO: 59744 - RNA, 27 nt, synthetic construct
  misc_feature 1..27: note = Elongation factor 2 (120-128)
  source 1..27: mol_type = other RNA
ggcgaggtgagcgccagacaggaactg

SEQ ID NO: 59745 - RNA, 27 nt, synthetic construct
  misc_feature 1..27: note = WD repeat-containing protein 61 (188-196)
  source 1..27: mol_type = other RNA
ggccacgccatgcccatcagaagcctg

SEQ ID NO: 59746 - RNA, 27 nt, synthetic construct
  misc_feature 1..27: note = Elongator complex protein 2 (237-245)
  source 1..27: mol_type = other RNA
ggccacttcgacggggtgcaggatctg

SEQ ID NO: 59747 - RNA, 27 nt, synthetic construct
  misc_feature 1..27: note = Neuropathy target esterase (188-196)
  source 1..27: mol_type = other RNA
ggccacttcgagaagcccctgtttctc

SEQ ID NO: 59748 - RNA, 30 nt, synthetic construct
  misc_feature 1..30: note = Protein SCAF8 (919-928)
  source 1..30: mol_type = other RNA
ggcatcctggggattcagccccctagcgtg

SEQ ID NO: 59749 - RNA, 30 nt, synthetic construct
  misc_feature 1..30: note = MKL/myocardin-like protein 2 (440-449)
  source 1..30: mol_type = other RNA
ggcctggccgctgggggaatcgtggcagtc

SEQ ID NO: 59750 - RNA, 30 nt, synthetic construct
  misc_feature 1..30: note = TRPM8 channel-associated factor 2 (73-82)
  source 1..30: mol_type = other RNA
ggcctggcccccttcctccttaacgctgtg

SEQ ID NO: 59751 - RNA, 27 nt, synthetic construct
  misc_feature 1..27: note = Neurobeachin-like protein 2 (789-797)
  source 1..27: mol_type = other RNA
ggcctggcccccaagcctgtgcaggtc

SEQ ID NO: 59752 - RNA, 27 nt, synthetic construct
  misc_feature 1..27: note = Rapamycin-insensitive companion of mTOR (711-719)
  source 1..27: mol_type = other RNA
ggcctggccagagtgatcctcagcaag

SEQ ID NO: 59753 - RNA, 33 nt, synthetic construct
  misc_feature 1..33: note = Nuclear pore complex protein Nup107 (915-925)
  source 1..33: mol_type = other RNA
ggcctggaccccctcgggtacgagatccagctt

SEQ ID NO: 59754 - RNA, 27 nt, synthetic construct
  misc_feature 1..27: note = Elongation factor 2 (217-225)
  source 1..27: mol_type = other RNA
ggcctgcacgggtgggccttcaccctc

SEQ ID NO: 59755 - RNA, 27 nt, synthetic construct
  misc_feature 1..27: note = CCR4-NOT transcription complex subunit 1 (373-381)
  source 1..27: mol_type = other RNA
ggcctgcacaacgtggtctacgggatc

SEQ ID NO: 59756 - RNA, 27 nt, synthetic construct
  misc_feature 1..27: note = DNA-dependent protein kinase catalytic subunit (2509-2517)
  source 1..27: mol_type = other RNA
ggcctgatcgacgagaaccccgggctc

SEQ ID NO: 59757 - RNA, 27 nt, synthetic construct
  misc_feature 1..27: note = Structural maintenance of chromosomes flexible hinge domain-containing protein 1 (829-837)
  source 1..27: mol_type = other RNA
ggcctgctcgaccttcccttcagagtg

SEQ ID NO: 59758 - RNA, 30 nt, synthetic construct
  misc_feature 1..30: note = F-box only protein 22 (210-219)
  source 1..30: mol_type = other RNA
ggcctgctcgacaaccccgagcttagagtg

SEQ ID NO: 59759 - RNA, 33 nt, synthetic construct
  misc_feature 1..33: note = Nuclear receptor subfamily 2 group C member 2 (238-248)
  source 1..33: mol_type = other RNA
ggcctgctcgaccccgggatgcttgtgaacatc

SEQ ID NO: 59760 - RNA, 27 nt, synthetic construct
  misc_feature 1..27: note = Protein zer-1 homolog (593-601)
  source 1..27: mol_type = other RNA
ggcctgctcgggaacgtggccgaggtc

SEQ ID NO: 59761 - RNA, 27 nt, synthetic construct
  misc_feature 1..27: note = Protein zyg-11 homolog B (299-307)
  source 1..27: mol_type = other RNA
ggcctgctcaacaatatcgccgaggtg

SEQ ID NO: 59762 - RNA, 27 nt, synthetic construct
  misc_feature 1..27: note = Lysophospholipid acyltransferase 7 (141-149)
  source 1..27: mol_type = other RNA
ggcctgctccccgacgtgcctagcctt

SEQ ID NO: 59763 - RNA, 27 nt, synthetic construct
  misc_feature 1..27: note = E3 ubiquitin-protein ligase UBR4 (1708-1716)
  source 1..27: mol_type = other RNA
ggcctgctcagaatcattccctacctt

SEQ ID NO: 59764 - RNA, 27 nt, synthetic construct
  misc_feature 1..27: note = Protein ELYS (929-937)
  source 1..27: mol_type = other RNA
ggcctgatggaggacctccttaagctg

SEQ ID NO: 59765 - RNA, 27 nt, synthetic construct
  misc_feature 1..27: note = Exocyst complex component 4 (173-181)
  source 1..27: mol_type = other RNA
ggcctgagcgacctcagacttgagctg

SEQ ID NO: 59766 - RNA, 27 nt, synthetic construct
  misc_feature 1..27: note = Nuclear pore complex protein Nup155 (139-147)
  source 1..27: mol_type = other RNA
ggcctgagcgagaccatcctcgccgtg

SEQ ID NO: 59767 - RNA, 27 nt, synthetic construct
  misc_feature 1..27: note = Leucine-rich repeat and calponin homology domain-containing protein 3 (750-758)
  source 1..27: mol_type = other RNA
ggcctgagccaggtggccgtcaccgtt

SEQ ID NO: 59768 - RNA, 27 nt, synthetic construct
  misc_feature 1..27: note = Glucocorticoid modulatory element-binding protein 1 (503-511)
  source 1..27: mol_type = other RNA
ggcctgaccagcgccatccaggctgtg

SEQ ID NO: 59769 - RNA, 30 nt, synthetic construct
  misc_feature 1..30: note = Complex I assembly factor TIMMDC1, mitochondrial (187-196)
  source 1..30: mol_type = other RNA
ggcctggtggccgggggaatcattggtgct

SEQ ID NO: 59770 - RNA, 27 nt, synthetic construct
  misc_feature 1..27: note = Serine-tRNA ligase, cytoplasmic (31-39)
  source 1..27: mol_type = other RNA
ggcctggtggaccagctcgtcaaggcc

SEQ ID NO: 59771 - RNA, 27 nt, synthetic construct
  misc_feature 1..27: note = KATNB1-like protein 1 (274-282)
  source 1..27: mol_type = other RNA
ggcctgtgggagcaggaaaaccacctc

SEQ ID NO: 59772 - RNA, 27 nt, synthetic construct
  misc_feature 1..27: note = Rotatin (1413-1421)
  source 1..27: mol_type = other RNA
ggcctgtgggggaccgtggtcaacatc

SEQ ID NO: 59773 - RNA, 30 nt, synthetic construct; identical to SEQ ID NO: 35546
  misc_feature 1..30: note = Melanoma-associated antigen 10 (254-263)
  source 1..30: mol_type = other RNA

SEQ ID NO: 59774 - RNA, 27 nt, synthetic construct
  misc_feature 1..27: note = tRNA (adenine(58)-N(1))-methyltransferase non-catalytic subunit TRM6 (83-91)
  source 1..27: mol_type = other RNA
ggcctgtacgagttccccctcaacaag

SEQ ID NO: 59775 - RNA, 27 nt, synthetic construct
  misc_feature 1..27: note = Putative ATP-dependent RNA helicase DHX30 (983-991)
  source 1..27: mol_type = other RNA
ggcctgtaccccaacctcatccaggtg

SEQ ID NO: 59776 - RNA, 30 nt, synthetic construct
  misc_feature 1..30: note = Catenin alpha-1 (725-734)
  source 1..30: mol_type = other RNA
ggcatggccagcctgaacctccccgctgtg

SEQ ID NO: 59777 - RNA, 27 nt, synthetic construct
  misc_feature 1..27: note = RNA-binding protein 12 (509-517)
  source 1..27: mol_type = other RNA
ggcatgctggagaagatcgacatgatt

SEQ ID NO: 59778 - RNA, 27 nt, synthetic construct
  misc_feature 1..27: note = Probable ATP-dependent RNA helicase YTHDC2 (978-986)
  source 1..27: mol_type = other RNA
ggcatgtaccccaacctggtgcacgtc

SEQ ID NO: 59779 - RNA, 27 nt, synthetic construct
  misc_feature 1..27: note = Heterogeneous nuclear ribonucleoprotein M (480-488)
  source 1..27: mol_type = other RNA
ggccccgccatcgagagaatggggctg

SEQ ID NO: 59780 - RNA, 27 nt, synthetic construct
  misc_feature 1..27: note = ETS translocation variant 5 (173-181)
  source 1..27: mol_type = other RNA
ggccccgcccctgctccacacagcctg

SEQ ID NO: 59781 - RNA, 33 nt, synthetic construct
  misc_feature 1..33: note = Filamin-A (852-862)
  source 1..33: mol_type = other RNA
ggccccgggctgagcagaaccggagtggagctc

SEQ ID NO: 59782 - RNA, 30 nt, synthetic construct
  misc_feature 1..30: note = Splicing factor, proline- and glutamine-rich (215-224)
  source 1..30: mol_type = other RNA
ggccccaagcctgggggaggtccaggcctg

SEQ ID NO: 59783 - RNA, 27 nt, synthetic construct
  misc_feature 1..27: note = Peptidyl-prolyl cis-trans isomerase-like 2 (134-142)
  source 1..27: mol_type = other RNA
ggccccaacagcaatagatcccagttc

SEQ ID NO: 59784 - RNA, 30 nt, synthetic construct
  misc_feature 1..30: note = RuvB-like 1 (70-79)
  source 1..30: mol_type = other RNA
ggcccccctgggaccggaaagacagccctg

SEQ ID NO: 59785 - RNA, 27 nt, synthetic construct
  misc_feature 1..27: note = Transmembrane protein 214 (461-469)
  source 1..27: mol_type = other RNA
ggccccagactgccttggaccaggctc

SEQ ID NO: 59786 - RNA, 27 nt, synthetic construct
  misc_feature 1..27: note = PHD finger protein 3 (205-213)
  source 1..27: mol_type = other RNA
ggccagatcgaggtggtccccgaagtt

SEQ ID NO: 59787 - RNA, 27 nt, synthetic construct
  misc_feature 1..27: note = Nucleolar RNA helicase 2 (190-198)
  source 1..27: mol_type = other RNA
ggcagagccccccaggtgctggtcctc

SEQ ID NO: 59788 - RNA, 30 nt, synthetic construct
  misc_feature 1..30: note = Ran-binding protein 9 (76-85)
  source 1..30: mol_type = other RNA
ggcagagacgggtacatgggaatcggtctg

SEQ ID NO: 59789 - RNA, 27 nt, synthetic construct
  misc_feature 1..27: note = COP9 signalosome complex subunit 5 (281-289)
  source 1..27: mol_type = other RNA
ggcagagggagcttcatgctgggactc

SEQ ID NO: 59790 - RNA, 27 nt, synthetic construct
  misc_feature 1..27: note = WD repeat-containing protein 81 (717-725)
  source 1..27: mol_type = other RNA
ggcagaatcctgctccccgaggggttc

SEQ ID NO: 59791 - RNA, 30 nt, synthetic construct
  misc_feature 1..30: note = Neutral amino acid transporter A (111-120)
  source 1..30: mol_type = other RNA
ggcagactggggggaatcgccgtggcttac

SEQ ID NO: 59792 - RNA, 30 nt, synthetic construct
  misc_feature 1..30: note = Spectrin beta chain, non-erythrocytic 1 (822-831)
  source 1..30: mol_type = other RNA
ggcagactgagcgggatcgaggaaaggtac

SEQ ID NO: 59793 - RNA, 33 nt, synthetic construct
  misc_feature 1..33: note = ATP-binding cassette sub-family F member 3 (595-605)
  source 1..33: mol_type = other RNA
ggcagatacgggatcagcggagagctggccatg

SEQ ID NO: 59794 - RNA, 27 nt, synthetic construct
  misc_feature 1..27: note = Stathmin 1/oncoprotein 18 (118-126)
  source 1..27: mol_type = other RNA
ggcagccacttcatctcccatctgtct

SEQ ID NO: 59795 - RNA, 27 nt, synthetic construct
  misc_feature 1..27: note = AP-5 complex subunit beta-1 (317-325)
  source 1..27: mol_type = other RNA
ggcaccgcccagctgacactccttcac

SEQ ID NO: 59796 - RNA, 27 nt, synthetic construct
  misc_feature 1..27: note = UPF0428 protein CXorf56 (73-81)
  source 1..27: mol_type = other RNA
ggcaccctgatcgacaaccagttcaag

SEQ ID NO: 59797 - RNA, 27 nt, synthetic construct
  misc_feature 1..27: note = PX domain-containing protein kinase-like protein (149-157)
  source 1..27: mol_type = other RNA
ggcaccctgaaggacctcatctacaaa

SEQ ID NO: 59798 - RNA, 27 nt, synthetic construct
  misc_feature 1..27: note = Putative inactive carbonic anhydrase 5B-like protein (13-21)
  source 1..27: mol_type = other RNA
ggcaccctgagctcctggaacctcaag

SEQ ID NO: 59799 - RNA, 27 nt, synthetic construct
  misc_feature 1..27: note = Small integral membrane protein 4 (34-42)
  source 1..27: mol_type = other RNA
ggcaccatggagtggatcatgattaag

SEQ ID NO: 59800 - RNA, 27 nt, synthetic construct
  misc_feature 1..27: note = Arf-GAP with SH3 domain, ANK repeat and PH domain-containing protein 2 (482-490)
  source 1..27: mol_type = other RNA
ggcaccagcgagctgctccttgccaag

SEQ ID NO: 59801 - RNA, 27 nt, synthetic construct
  misc_feature 1..27: note = DNA cross-link repair 1A protein (877-885)
  source 1..27: mol_type = other RNA
ggcacctacagcatcgggaaggagaaa

SEQ ID NO: 59802 - RNA, 27 nt, synthetic construct
  misc_feature 1..27: note = Proteasome subunit beta type-3 (184-192)
  source 1..27: mol_type = other RNA
ggcgtgatcgtccacattatagagaag

SEQ ID NO: 59803 - RNA, 27 nt, synthetic construct
  misc_feature 1..27: note = Tensin-1 (71-79)
  source 1..27: mol_type = other RNA
cacgccaaggtgctggagttcggctgg

SEQ ID NO: 59804 - RNA, 27 nt, synthetic construct
  misc_feature 1..27: note = Mothers against decapentaplegic homolog 2 (291-299)
  source 1..27: mol_type = other RNA
cacgccagccagccctccctgaccgtg

SEQ ID NO: 59805 - RNA, 27 nt, synthetic construct
  misc_feature 1..27: note = TIP41-like protein (203-211)
  source 1..27: mol_type = other RNA
cacgaggccgacaagacctacatgctg

SEQ ID NO: 59806 - RNA, 27 nt, synthetic construct
  misc_feature 1..27: note = Zinc finger protein 655 (167-175)
  source 1..27: mol_type = other RNA
cacgagcccgaaaagagcttctccctg

SEQ ID NO: 59807 - RNA, 24 nt, synthetic construct
  misc_feature 1..24: note = Retinol dehydrogenase 10 (221-228)
  source 1..24: mol_type = other RNA
cacgagagcctgtcccatgaactc

SEQ ID NO: 59808 - RNA, 27 nt, synthetic construct
  misc_feature 1..27: note = Hippocampus abundant transcript-like protein 1 (50-58)
  source 1..27: mol_type = other RNA
cacgagaccttcagccagcatacattt

SEQ ID NO: 59809 - RNA, 27 nt, synthetic construct
  misc_feature 1..27: note = N-acetyltransferase 9 (4-12)
  source 1..27: mol_type = other RNA
cacgagtggatgaagagcgaagagctg

SEQ ID NO: 59810 - RNA, 27 nt, synthetic construct
  misc_feature 1..27: note = Tubulin beta-4B chain (28-36)
  source 1..27: mol_type = other RNA
cacggcatcgaccccaccgggacatac

SEQ ID NO: 59811 - RNA, 27 nt, synthetic construct
  misc_feature 1..27: note = MOB kinase activator 3A (169-177)
  source 1..27: mol_type = other RNA
caccatttcgacagaatcgcccagatg

SEQ ID NO: 59812 - RNA, 27 nt, synthetic construct
  misc_feature 1..27: note = Fanconi anemia group I protein (98-106)
  source 1..27: mol_type = other RNA
caccatttccccggccctctgctcgtg

SEQ ID NO: 59813 - RNA, 27 nt, synthetic construct
  misc_feature 1..27: note = Transcriptional repressor protein YY1 (78-86)
  source 1..27: mol_type = other RNA
caccatcacccccctatgatcgccctg

SEQ ID NO: 59814 - RNA, 27 nt, synthetic construct
  misc_feature 1..27: note = Myotubularin-related protein 6 (51-59)
  source 1..27: mol_type = other RNA
caccatatcgccagcgtggagaagctg

SEQ ID NO: 59815 - RNA, 27 nt, synthetic construct
  misc_feature 1..27: note = Kelch-like protein 6 (219-227)
  source 1..27: mol_type = other RNA
caccatatcctgaagagcgacgatctc

SEQ ID NO: 59816 - RNA, 30 nt, synthetic construct
  misc_feature 1..30: note = Squalene synthase (268-277)
  source 1..30: mol_type = other RNA
caccatatccccgacgtgattacctacctg

SEQ ID NO: 59817 - RNA, 24 nt, synthetic construct
  misc_feature 1..24: note = N-alpha-acetyltransferase 38, NatC auxiliary subunit (107-114)
  source 1..24: mol_type = other RNA
caccatatcgtgagcattgaggtc

SEQ ID NO: 59818 - RNA, 30 nt, synthetic construct
  misc_feature 1..30: note = Fructose-bisphosphate aldolase A (220-229)
  source 1..30: mol_type = other RNA
caccatatctacctggagggcaccctcctt

SEQ ID NO: 59819 - RNA, 27 nt, synthetic construct
  misc_feature 1..27: note = Signal recognition particle 54 kDa protein (472-480)
  source 1..27: mol_type = other RNA
caccatatgggcgggatggccggactg

SEQ ID NO: 59820 - RNA, 30 nt, synthetic construct
  misc_feature 1..30: note = U1 small nuclear ribonucleoprotein A (155-164)
  source 1..30: mol_type = other RNA
caccatatgcccggccagcctccatacatg

SEQ ID NO: 59821 - RNA, 24 nt, synthetic construct
  misc_feature 1..24: note = DNA topoisomerase 2-alpha (558-565)
  source 1..24: mol_type = other RNA
caccataactggcccagcctgctc

SEQ ID NO: 59822 - RNA, 27 nt, synthetic construct
  misc_feature 1..27: note = Ubiquitin-associated protein 2-like (890-898)
  source 1..27: mol_type = other RNA
caccataccacacagcaaactttcctg

SEQ ID NO: 59823 - RNA, 30 nt, synthetic construct
  misc_feature 1..30: note = Dedicator of cytokinesis protein 2 (573-582)
  source 1..30: mol_type = other RNA
caccatgtggagaacaagggcgccaccctg

SEQ ID NO: 59824 - RNA, 27 nt, synthetic construct
  misc_feature 1..27: note = Oxidative stress-induced growth inhibitor 2 (114-122)
  source 1..27: mol_type = other RNA
caccattacatcccccacgtggtcctg

SEQ ID NO: 59825 - RNA, 30 nt, synthetic construct
  misc_feature 1..30: note = 60S ribosomal protein L30 (72-81)
  source 1..30: mol_type = other RNA
caccattacagcggcaacaatatcgagctg

SEQ ID NO: 59826 - RNA, 27 nt, synthetic construct
  misc_feature 1..27: note = Ribosomal L1 domain-containing protein 1 (227-235)
  source 1..27: mol_type = other RNA
cacatcattgagaacatagtggccgtc

SEQ ID NO: 59827 - RNA, 27 nt, synthetic construct
  misc_feature 1..27: note = E3 ubiquitin-protein ligase TRIM11 (224-232)
  source 1..27: mol_type = other RNA
cacctggccgagctcatcgctgaactt

SEQ ID NO: 59828 - RNA, 27 nt, synthetic construct
  misc_feature 1..27: note = Probable E3 ubiquitin-protein ligase HERC1 (1903-1911)
  source 1..27: mol_type = other RNA
cacctgggcgacttcctcgtgtttctt

SEQ ID NO: 59829 - RNA, 27 nt, synthetic construct
  misc_feature 1..27: note = Talin-1 (1711-1719)
  source 1..27: mol_type = other RNA
cacctgatcgagcccctcgccaacgct

SEQ ID NO: 59830 - RNA, 27 nt, synthetic construct
  misc_feature 1..27: note = Transmembrane protein 41B (196-204)
  source 1..27: mol_type = other RNA
cacctgatcaactacattatattcctc

SEQ ID NO: 59831 - RNA, 27 nt, synthetic construct
  misc_feature 1..27: note = tRNA-specific adenosine deaminase 1 (169-177)
  source 1..27: mol_type = other RNA
cacctgctcgaggaacccatctacctt

SEQ ID NO: 59832 - RNA, 27 nt, synthetic construct
  misc_feature 1..27: note = Nuclear pore complex protein Nup205 (808-816)
  source 1..27: mol_type = other RNA
cacctgctcaacgagagccccatgctt

SEQ ID NO: 59833 - RNA, 30 nt, synthetic construct
  misc_feature 1..30: note = Activating transcription factor 7-interacting protein 1 (1036-1045)
  source 1..30: mol_type = other RNA
cacctgctccccaccgcccctacaactgtg

SEQ ID NO: 59834 - RNA, 27 nt, synthetic construct
  misc_feature 1..27: note = Ras GTPase-activating-like protein IQGAP1 (1247-1255)
  source 1..27: mol_type = other RNA
cacctgagcatcattaacgagtacctc

SEQ ID NO: 59835 - RNA, 27 nt, synthetic construct
  misc_feature 1..27: note = Nucleoprotein TPR (907-915)
  source 1..27: mol_type = other RNA
cacctgagcaacatggaggtgcaggtc

SEQ ID NO: 59836 - RNA, 27 nt, synthetic construct
  misc_feature 1..27: note = Next to BRCA1 gene 1 protein (330-338)
  source 1..27: mol_type = other RNA
cacctgtggaacagcatccatggcctc

SEQ ID NO: 59837 - RNA, 33 nt, synthetic construct
  misc_feature 1..33: note = E3 ubiquitin-protein ligase HUWE1 (111-121)
  source 1..33: mol_type = other RNA
cacctgtacagctccatcgagcatctcaccaca

SEQ ID NO: 59838 - RNA, 27 nt, synthetic construct
  misc_feature 1..27: note = Transmembrane protein 248 (135-143)
  source 1..27: mol_type = other RNA
cacctgtacagcaccatcctcggccat

SEQ ID NO: 59839 - RNA, 27 nt, synthetic construct
  misc_feature 1..27: note = E3 ubiquitin-protein ligase RNF167 (2-10)
  source 1..27: mol_type = other RNA
caccccgccgctttccctctgccagtg

SEQ ID NO: 59840 - RNA, 27 nt, synthetic construct
  misc_feature 1..27: note = T-complex protein 1 subunit theta (7-15)
  source 1..27: mol_type = other RNA
caccccgccgctaagatgatcgtgatg

SEQ ID NO: 59841 - RNA, 27 nt, synthetic construct
  misc_feature 1..27: note = Ras GTPase-activating protein-binding protein 1 (336-344)
  source 1..27: mol_type = other RNA
caccccgacagccatcagctgttcatc

SEQ ID NO: 59842 - RNA, 33 nt, synthetic construct
  misc_feature 1..33: note = Sterol regulatory element-binding protein 2 (512-522)
  source 1..33: mol_type = other RNA
cacccccatagcggctccgggagatctgtgctg

SEQ ID NO: 59843 - RNA, 27 nt, synthetic construct
  misc_feature 1..27: note = AP-2 complex subunit beta (191-199)
  source 1..27: mol_type = other RNA
caccccaacagcaatctgctcgacctt

SEQ ID NO: 59844 - RNA, 27 nt, synthetic construct
  misc_feature 1..27: note = Catenin beta-1 (499-507)
  source 1..27: mol_type = other RNA
cacccccctagccattggccactgatc

SEQ ID NO: 59845 - RNA, 30 nt, synthetic construct
  misc_feature 1..30: note = Uncharacterized protein C20orf196 (108-117)
  source 1..30: mol_type = other RNA
cacccccagcctggcagcgccaactccctg

SEQ ID NO: 59846 - RNA, 27 nt, synthetic construct
  misc_feature 1..27: note = Polycomb protein EED (185-193)
  source 1..27: mol_type = other RNA
caccccagagaccctaacctgctcctt

SEQ ID NO: 59847 - RNA, 30 nt, synthetic construct
  misc_feature 1..30: note = Hypoxia-inducible factor 1-alpha (708-717)
  source 1..30: mol_type = other RNA
caccccagaagccctaacgtgctgtccgtc

SEQ ID NO: 59848 - RNA, 27 nt, synthetic construct
  misc_feature 1..27: note = Exosome complex component RRP46 (111-119)
  source 1..27: mol_type = other RNA
caccccagaaccagcatcacagtggtc

SEQ ID NO: 59849 - RNA, 27 nt, synthetic construct
  misc_feature 1..27: note = Kelch-like protein 11 (343-351)
  source 1..27: mol_type = other RNA
caccccaccagccatgtgtccctgctc

SEQ ID NO: 59850 - RNA, 27 nt, synthetic construct
  misc_feature 1..27: note = Cytoplasmic dynein 1 heavy chain 1 (331-339)
  source 1..27: mol_type = other RNA
cacagactgctccttatccaggccttc

SEQ ID NO: 59851 - RNA, 27 nt, synthetic construct
  misc_feature 1..27: note = Chromodomain-helicase-DNA-binding protein 3 (1077-1085)
  source 1..27: mol_type = other RNA
cacagagtgctgatcttcagccagatg

SEQ ID NO: 59852 - RNA, 27 nt, synthetic construct
  misc_feature 1..27: note = Helicase SRCAP (1801-1809)
  source 1..27: mol_type = other RNA
cacagagtgctgatcttcacccagatg

SEQ ID NO: 59853 - RNA, 27 nt, synthetic construct
  misc_feature 1..27: note = Endothelial PAS domain-containing protein 1 (15-23)
  source 1..27: mol_type = other RNA
cacagcatggacatgaagttcacctac

SEQ ID NO: 59854 - RNA, 30 nt, synthetic construct; identical to SEQ ID NO: 35627
  misc_feature 1..30: note = Histone-binding protein RBBP7 (375-384)
  source 1..30: mol_type = other RNA

SEQ ID NO: 59855 - RNA, 27 nt, synthetic construct
  misc_feature 1..27: note = Adenylyl cyclase-associated protein 1 (23-31)
  source 1..27: mol_type = other RNA
cacaccagcgacatgcatagaggctac

SEQ ID NO: 59856 - RNA, 27 nt, synthetic construct
  misc_feature 1..27: note = POTE ankyrin domain family member I (78-86)
  source 1..27: mol_type = other RNA
cacaccgtgcccatctacgagggctat

SEQ ID NO: 59857 - RNA, 30 nt, synthetic construct
  misc_feature 1..30: note = Thioredoxin-interacting protein (164-173)
  source 1..30: mol_type = other RNA
cacacctacctggccaacggccagacaaag

SEQ ID NO: 59858 - RNA, 27 nt, synthetic construct
  misc_feature 1..27: note = Activity-dependent neuroprotector homeobox protein (162-170)
  source 1..27: mol_type = other RNA
cacgtggccgctccctacatcgcaaag

SEQ ID NO: 59859 - RNA, 27 nt, synthetic construct
  misc_feature 1..27: note = DNA-binding protein inhibitor ID-4 (93-101)
  source 1..27: mol_type = other RNA
cacgtgatcgactacattctggatctc

SEQ ID NO: 59860 - RNA, 30 nt, synthetic construct
  misc_feature 1..30: note = Secernin-2 (133-142)
  source 1..30: mol_type = other RNA
cacgtgatcaccggcctgctcgagcattac

SEQ ID NO: 59861 - RNA, 33 nt, synthetic construct; identical to SEQ ID NO: 35634
  misc_feature 1..33: note = ETS-related transcription factor Elf-1 (38-48)
  source 1..33: mol_type = other RNA

SEQ ID NO: 59862 - RNA, 30 nt, synthetic construct
  misc_feature 1..30: note = Cholinesterase (154-163)
  source 1..30: mol_type = other RNA
cacgtgtacgacggcaagttcctggccaga

SEQ ID NO: 59863 - RNA, 27 nt, synthetic construct
  misc_feature 1..27: note = TCDD-inducible poly (ADP-ribose) polymerase (387-395)
  source 1..27: mol_type = other RNA
cactacatcctgcataacagcttcttt

SEQ ID NO: 59864 - RNA, 27 nt, synthetic construct
  misc_feature 1..27: note = Proliferation-associated protein 2G4 (20-28)
  source 1..27: mol_type = other RNA
atcgccttccccaccagcatttccgtg

SEQ ID NO: 59865 - RNA, 27 nt, synthetic construct
  misc_feature 1..27: note = Growth hormone-inducible transmembrane protein (143-151)
  source 1..27: mol_type = other RNA
atcgccattagcagaacccccgtgctg

SEQ ID NO: 59866 - RNA, 30 nt, synthetic construct
  misc_feature 1..30: note = TRPM8 channel-associated factor 1 (376-385)
  source 1..30: mol_type = other RNA
atcgccctgtggccccctgtgagagagaag

SEQ ID NO: 59867 - RNA, 27 nt, synthetic construct
  misc_feature 1..27: note = Kinesin-like protein KIF18B (388-396)
  source 1..27: mol_type = other RNA
atcgccagactgcccagctccaccctc

SEQ ID NO: 59868 - RNA, 27 nt, synthetic construct
  misc_feature 1..27: note = Eukaryotic initiation factor 4A-II (97-105)
  source 1..27: mol_type = other RNA
atcgagttcaaggaaacccaggccctg

SEQ ID NO: 59869 - RNA, 33 nt, synthetic construct
  misc_feature 1..33: note = Casein kinase II subunit alpha (263-273)
  source 1..33: mol_type = other RNA
atcgagctggaccccagattcaacgatattctc

SEQ ID NO: 59870 - RNA, 27 nt, synthetic construct
  misc_feature 1..27: note = Methionine adenosyltransferase 2 subunit beta (82-90)
  source 1..27: mol_type = other RNA
atccacgacttccagccccatgtgatt

SEQ ID NO: 59871 - RNA, 27 nt, synthetic construct
  misc_feature 1..27: note = Ubiquitin-like protein 5 (62-70)
  source 1..27: mol_type = other RNA
atccacgacggcatgaacctggagctc

SEQ ID NO: 59872 - RNA, 33 nt, synthetic construct
  misc_feature 1..33: note = NudC domain-containing protein 1 (119-129)
  source 1..33: mol_type = other RNA
atccacttcagctcctctacctgggtgacactg

SEQ ID NO: 59873 - RNA, 27 nt, synthetic construct
  misc_feature 1..27: note = DNA topoisomerase 2-alpha (557-565)
  source 1..27: mol_type = other RNA
atccaccataactggcccagcctgctc

SEQ ID NO: 59874 - RNA, 30 nt, synthetic construct
  misc_feature 1..30: note = Probable ATP-dependent RNA helicase DDX5 (298-307)
  source 1..30: mol_type = other RNA
atccacattaacataggcgccctggagctc

SEQ ID NO: 59875 - RNA, 27 nt, synthetic construct
  misc_feature 1..27: note = Nucleolar protein 58 (107-115)
  source 1..27: mol_type = other RNA
atccacagccccgtggtcaacgagctg

SEQ ID NO: 59876 - RNA, 27 nt, synthetic construct
  misc_feature 1..27: note = ATPase family AAA domain-containing protein 2B (521-529)
  source 1..27: mol_type = other RNA
atccacagctccattgtgtctaccctg

SEQ ID NO: 59877 - RNA, 27 nt, synthetic construct
  misc_feature 1..27: note = RNA polymerase II-associated protein 3 (126-134)
  source 1..27: mol_type = other RNA
atccacgtggacagccagaaggccctg

SEQ ID NO: 59878 - RNA, 27 nt, synthetic construct
  misc_feature 1..27: note = Cytochrome c oxidase subunit 1 (311-319)
  source 1..27: mol_type = other RNA
atcattgccatacccaccggcgtgaag

SEQ ID NO: 59879 - RNA, 27 nt, synthetic construct
  misc_feature 1..27: note = 40S ribosomal protein S7 (59-67)
  source 1..27: mol_type = other RNA
atcattttcgtgcccgtccctcagctg

SEQ ID NO: 59880 - RNA, 27 nt, synthetic construct
  misc_feature 1..27: note = Zinc fingers and homeoboxes protein 3 (566-574)
  source 1..27: mol_type = other RNA
atcattatagacagcgtgcccgaggtc

SEQ ID NO: 59881 - RNA, 27 nt, synthetic construct
  misc_feature 1..27: note = Dedicator of cytokinesis protein 7 (1109-1117)
  source 1..27: mol_type = other RNA
atcattatggagaccgtgccccagctg

SEQ ID NO: 59882 - RNA, 27 nt, synthetic construct
  misc_feature 1..27: note = Ras GTPase-activating-like protein IQGAP1 (1302-1310)
  source 1..27: mol_type = other RNA
atcattaacacccacacactgctcctt

SEQ ID NO: 59883 - RNA, 27 nt, synthetic construct
  misc_feature 1..27: note = Intron-binding protein aquarius (273-281)
  source 1..27: mol_type = other RNA
atcctggacgatagccacctccttgtg

SEQ ID NO: 59884 - RNA, 27 nt, synthetic construct
  misc_feature 1..27: note = Coatomer subunit zeta-1 (5-13)
  source 1..27: mol_type = other RNA
atcctggagcccagcctctacaccgtg

SEQ ID NO: 59885 - RNA, 30 nt, synthetic construct
  misc_feature 1..30: note = Methylmalonyl-CoA mutase, mitochondrial (172-181)
  source 1..30: mol_type = other RNA
atcctgttcgacggcattcccctcgagaag

SEQ ID NO: 59886 - RNA, 27 nt, synthetic construct
  misc_feature 1..27: note = Asparagine synthetase (glutamine-hydrolyzing) (154-162)
  source 1..27: mol_type = other RNA
atcctgttcaacaatgccgtgaagaaa

SEQ ID NO: 59887 - RNA, 27 nt, synthetic construct
  misc_feature 1..27: note = Protein SCAF8 (920-928)
  source 1..27: mol_type = other RNA
atcctgggcattcagccccctagcgtg

SEQ ID NO: 59888 - RNA, 27 nt, synthetic construct
  misc_feature 1..27: note = CREB-binding protein (26-34)
  source 1..27: mol_type = other RNA
atcctgattggctacctcgagtatgtg

SEQ ID NO: 59889 - RNA, 27 nt, synthetic construct
  misc_feature 1..27: note = Protein RRNAD1 (424-432)
  source 1..27: mol_type = other RNA
atcctgctcgacagacttctgtacttg

SEQ ID NO: 59890 - RNA, 24 nt, synthetic construct
  misc_feature 1..24: note = MAU2 chromatid cohesion factor homolog (246-253)
  source 1..24: mol_type = other RNA
atcctgctcgagcacattataatg

SEQ ID NO: 59891 - RNA, 27 nt, synthetic construct
  misc_feature 1..27: note = Phospholipase A-2-activating protein (517-525)
  source 1..27: mol_type = other RNA
atcctgctcgagaagattcttagcctg

SEQ ID NO: 59892 - RNA, 27 nt, synthetic construct
  misc_feature 1..27: note = Serine-protein kinase ATM (144-152)
  source 1..27: mol_type = other RNA
atcctgctcaaggacattcttagcgtg

SEQ ID NO: 59893 - RNA, 27 nt, synthetic construct
  misc_feature 1..27: note = Glycerol-3-phosphate acyltransferase 3 (22-30)
  source 1..27: mol_type = other RNA
atcctgctccccagcgtgttcggcgtc

SEQ ID NO: 59894 - RNA, 27 nt, synthetic construct
  misc_feature 1..27: note = Protein FAM122B (239-247)
  source 1..27: mol_type = other RNA
atcctgatggacgatctcagccccaag

SEQ ID NO: 59895 - RNA, 30 nt, synthetic construct
  misc_feature 1..30: note = DNA (cytosine-5)-methyltransferase 1 (382-391)
  source 1..30: mol_type = other RNA
atcctgatggaccccagccctgagtacgcc

SEQ ID NO: 59896 - RNA, 27 nt, synthetic construct
  misc_feature 1..27: note = A-kinase anchor protein 8-like (529-537)
  source 1..27: mol_type = other RNA
atcctgaacaataagctcattagcaaa

SEQ ID NO: 59897 - RNA, 27 nt, synthetic construct
  misc_feature 1..27: note = Protein TASOR (898-906)
  source 1..27: mol_type = other RNA
atcctgaaccccgaggtggtcaccgtt

SEQ ID NO: 59898 - RNA, 30 nt, synthetic construct; identical to SEQ ID NO: 35671
  misc_feature 1..30: note = Anaphase-promoting complex subunit 1 (57-66)
  source 1..30: mol_type = other RNA

SEQ ID NO: 59899 - RNA, 27 nt, synthetic construct
  misc_feature 1..27: note = Uncharacterized protein KIAA1109 (858-866)
  source 1..27: mol_type = other RNA
atcctgagccccctcaacgtgttcgtc

SEQ ID NO: 59900 - RNA, 27 nt, synthetic construct
  misc_feature 1..27: note = General vesicular transport factor p115 (329-337)
  source 1..27: mol_type = other RNA
atcctgaccgagacaattaacactgtg

SEQ ID NO: 59901 - RNA, 27 nt, synthetic construct
  misc_feature 1..27: note = ORM1-like protein 2 (28-36)
  source 1..27: mol_type = other RNA
atcctggtgggcctccttcacatggtc

SEQ ID NO: 59902 - RNA, 27 nt, synthetic construct
  misc_feature 1..27: note = Fibronectin type III domain-containing protein 3B (1072-1080)
  source 1..27: mol_type = other RNA
atcctgtgggagaccgtgcccagcatg

SEQ ID NO: 59903 - RNA, 30 nt, synthetic construct
  misc_feature 1..30: note = Phenylalanine-tRNA ligase, mitochondrial (215-224)
  source 1..30: mol_type = other RNA
atcctgtacgacattcccgatataagactc

SEQ ID NO: 59904 - RNA, 27 nt, synthetic construct
  misc_feature 1..27: note = Serine/threonine-protein phosphatase 2B catalytic subunit alpha isoform (138-146)
  source 1..27: mol_type = other RNA
atcctgtaccccaagaccctcttcctt

SEQ ID NO: 59905 - RNA, 27 nt, synthetic construct
  misc_feature 1..27: note = Serine/threonine-protein phosphatase 2B catalytic subunit beta isoform (165-173)
  source 1..27: mol_type = other RNA
atcctgtaccccagcaccctcttcctt

SEQ ID NO: 59906 - RNA, 27 nt, synthetic construct
  misc_feature 1..27: note = Proteasome activator complex subunit 4 (38-46)
  source 1..27: mol_type = other RNA
atcctgtacagcaagaccgagcacctc

SEQ ID NO: 59907 - RNA, 27 nt, synthetic construct
  misc_feature 1..27: note = Vigilin (627-635)
  source 1..27: mol_type = other RNA
atccccgccaagctgcacaacagcctc

SEQ ID NO: 59908 - RNA, 27 nt, synthetic construct
  misc_feature 1..27: note = Thioredoxin domain-containing protein 11 (92-100)
  source 1..27: mol_type = other RNA
atccccgccaagcctccagtgagcttc

SEQ ID NO: 59909 - RNA, 27 nt, synthetic construct
  misc_feature 1..27: note = RNA-binding protein 12B (28-36)
  source 1..27: mol_type = other RNA
atccccgacggcggggtgcacattata

SEQ ID NO: 59910 - RNA, 27 nt, synthetic construct
  misc_feature 1..27: note = Bifunctional glutamate/proline-tRNA ligase (709-717)
  source 1..27: mol_type = other RNA
atccccgacggccacaccaaggagatg

SEQ ID NO: 59911 - RNA, 27 nt, synthetic construct
  misc_feature 1..27: note = Plectin (3582-3590)
  source 1..27: mol_type = other RNA
atccccgaggaacagagagcccaactg

SEQ ID NO: 59912 - RNA, 24 nt, synthetic construct
  misc_feature 1..24: note = Filamin-A (1600-1607)
  source 1..24: mol_type = other RNA
atccccttcagcccttacagagtg

SEQ ID NO: 59913 - RNA, 27 nt, synthetic construct
  misc_feature 1..27: note = Coatomer subunit beta' (567-575)
  source 1..27: mol_type = other RNA
atccccaaggacaacagactgtacctc

SEQ ID NO: 59914 - RNA, 27 nt, synthetic construct
  misc_feature 1..27: note = Bladder cancer-associated protein (13-21)
  source 1..27: mol_type = other RNA
atccccaagcctctgaacccagccctc

SEQ ID NO: 59915 - RNA, 27 nt, synthetic construct
  misc_feature 1..27: note = Integrin beta-1 (92-100)
  source 1..27: mol_type = other RNA
atccccaagagcgccgtgggcaccctg

SEQ ID NO: 59916 - RNA, 30 nt, synthetic construct
  misc_feature 1..30: note = Sodium/potassium-transporting ATPase subunit alpha-1 (601-610)
  source 1..30: mol_type = other RNA
atccccctgcctctcggcaccgtgacaatt

SEQ ID NO: 59917 - RNA, 27 nt, synthetic construct
  misc_feature 1..27: note = Tubulin beta chain (365-373)
  source 1..27: mol_type = other RNA
atccccaacaatgtgaagaccgccgtc

SEQ ID NO: 59918 - RNA, 27 nt, synthetic construct
  misc_feature 1..27: note = Membrane cofactor protein (71-79)
  source 1..27: mol_type = other RNA
atcccccctctggccacccacacaatt

SEQ ID NO: 59919 - RNA, 24 nt, synthetic construct
  misc_feature 1..24: note = Chromodomain-helicase-DNA-binding protein 4 (1903-1910)
  source 1..24: mol_type = other RNA
atcccccctgtggccgtcagactg

SEQ ID NO: 59920 - RNA, 30 nt, synthetic construct
  misc_feature 1..30: note = V-type proton ATPase catalytic subunit A (118-127)
  source 1..30: mol_type = other RNA
atccccagaggcgtgaacgtcagcgccctg

SEQ ID NO: 59921 - RNA, 27 nt, synthetic construct
  misc_feature 1..27: note = Ubiquitin-associated domain-containing protein 2 (32-40)
  source 1..27: mol_type = other RNA
atccccagagtgcaggtcgcccaaatt

SEQ ID NO: 59922 - RNA, 27 nt, synthetic construct
  misc_feature 1..27: note = Probable ubiquitin carboxyl-terminal hydrolase FAF-X (1578-1586)
  source 1..27: mol_type = other RNA
atccccagcattagaaacggcatactg

SEQ ID NO: 59923 - RNA, 27 nt, synthetic construct
  misc_feature 1..27: note = Patatin-like phospholipase domain-containing protein 2 (212-220)
  source 1..27: mol_type = other RNA
atccagttcaacctgagaaatctctac

SEQ ID NO: 59924 - RNA, 27 nt, synthetic construct
  misc_feature 1..27: note = Hypoxia-inducible factor 1-alpha (370-378)
  source 1..27: mol_type = other RNA
atccagcacgacctgattttcagcctc

SEQ ID NO: 59925 - RNA, 27 nt, synthetic construct
  misc_feature 1..27: note = AN1-type zinc finger protein 5 (198-206)
  source 1..27: mol_type = other RNA
atcagaaaggagaaccccgtggtcgtt

SEQ ID NO: 59926 - RNA, 27 nt, synthetic construct
  misc_feature 1..27: note = Plectin (3944-3952)
  source 1..27: mol_type = other RNA
atcagacccggcaccgccttcgagctg

SEQ ID NO: 59927 - RNA, 27 nt, synthetic construct
  misc_feature 1..27: note = Nuclear factor of activated T-cells, cytoplasmic 2 (431-439)
  source 1..27: mol_type = other RNA
atcagaacccccgtgaaggtcaacttc

SEQ ID NO: 59928 - RNA, 27 nt, synthetic construct
  misc_feature 1..27: note = Cytospin-A (888-896)
  source 1..27: mol_type = other RNA
atcagcggccccatttccacctctaag

SEQ ID NO: 59929 - RNA, 33 nt, synthetic construct
  misc_feature 1..33: note = Endothelin-converting enzyme 1 (719-729)
  source 1..33: mol_type = other RNA
atcaccgacccccacagcccttccagattcagg

SEQ ID NO: 59930 - RNA, 27 nt, synthetic construct
  misc_feature 1..27: note = TRAF2 and NCK-interacting protein kinase (425-433)
  source 1..27: mol_type = other RNA
atcaccaaggacgtggtcctgcagtgg

SEQ ID NO: 59931 - RNA, 30 nt, synthetic construct
  misc_feature 1..30: note = Heat shock protein HSP 90-alpha (91-100)
  source 1..30: mol_type = other RNA
atcgtggacaccggcattgggatgacaaag

SEQ ID NO: 59932 - RNA, 27 nt, synthetic construct
  misc_feature 1..27: note = Smith-Magenis syndrome chromosomal region candidate gene 8 protein (742-750)
  source 1..27: mol_type = other RNA
atcgtgagaaagctggtcaccgccctc

SEQ ID NO: 59933 - RNA, 30 nt, synthetic construct
  misc_feature 1..30: note = Actin, cytoplasmic 2 (75-84)
  source 1..30: mol_type = other RNA
atcgtgaccaactgggacgatatggagaag

SEQ ID NO: 59934 - RNA, 27 nt, synthetic construct
  misc_feature 1..27: note = Importin subunit alpha-5 (492-500)
  source 1..27: mol_type = other RNA
atctaccagaaggccttcgacctgatt

SEQ ID NO: 59935 - RNA, 30 nt, synthetic construct
  misc_feature 1..30: note = Krueppel-like factor 3 (37-46)
  source 1..30: mol_type = other RNA
atctacagcacccccctgcctgagaagttc

SEQ ID NO: 59936 - RNA, 27 nt, synthetic construct
  misc_feature 1..27: note = Butyrophilin subfamily 3 member A3 secreted isoform (315-323)
  source 1..27: mol_type = other RNA
atctacaccttcccccacgccagcttt

SEQ ID NO: 59937 - RNA, 27 nt, synthetic construct
  misc_feature 1..27: note = Probable C-mannosyltransferase DPY19L1 (119-127)
  source 1..27: mol_type = other RNA
atctacaccaagattatggacctgata

SEQ ID NO: 59938 - RNA, 27 nt, synthetic construct
  misc_feature 1..27: note = Basic leucine zipper and W2 domain-containing protein 2 (358-366)
  source 1..27: mol_type = other RNA
aaggccttccagaaaatcgtggtcctg

SEQ ID NO: 59939 - RNA, 27 nt, synthetic construct
  misc_feature 1..27: note = Structural maintenance of chromosomes protein 1A (1026-1034)
  source 1..27: mol_type = other RNA
aaggccatggagaaactggaaagcgtg

SEQ ID NO: 59940 - RNA, 27 nt, synthetic construct
  misc_feature 1..27: note = Histone H2B type 1-K (58-66)
  source 1..27: mol_type = other RNA
aaggccatgggcatcatgaacagcttc

SEQ ID NO: 59941 - RNA, 27 nt, synthetic construct
  misc_feature 1..27: note = Replication protein A 70 kDa DNA-binding subunit (157-165)
  source 1..27: mol_type = other RNA
aaggcctacggcgctagcaaaaccttc

SEQ ID NO: 59942 - RNA, 27 nt, synthetic construct
  misc_feature 1..27: note = Protein arginine N-methyltransferase 3 (98-106)
  source 1..27: mol_type = other RNA
aaggaggaatacctgaaacccgtgctc

SEQ ID NO: 59943 - RNA, 33 nt, synthetic construct
  misc_feature 1..33: note = Heat shock protein HSP 90-alpha (656-666)
  source 1..33: mol_type = other RNA
aaggagttcgaaggcaaaaccctggtgagcgtc

SEQ ID NO: 59944 - RNA, 30 nt, synthetic construct
  misc_feature 1..30: note = Nuclear autoantigenic sperm protein (298-307)
  source 1..30: mol_type = other RNA
aaggagatcgaagagctgaaagaactcctt

SEQ ID NO: 59945 - RNA, 30 nt, synthetic construct
  misc_feature 1..30: note = Nucleoporin GLE1 (442-451)
  source 1..30: mol_type = other RNA
aaggagatcttcgacaaaattcacagcctg

SEQ ID NO: 59946 - RNA, 33 nt, synthetic construct
  misc_feature 1..33: note = CDK5 and ABL1 enzyme substrate 1 (180-190)
  source 1..33: mol_type = other RNA
aaggagatcattggcctggaaggggtggagctc

SEQ ID NO: 59947 - RNA, 33 nt, synthetic construct
  misc_feature 1..33: note = 40S ribosomal protein S14 (7-17)
  source 1..33: mol_type = other RNA
aaggagaaaaaggaagagcaggtgatcagcctg

SEQ ID NO: 59948 - RNA, 33 nt, synthetic construct
  misc_feature 1..33: note = 14-3-3 protein theta (158-168)
  source 1..33: mol_type = other RNA
aaggagatgcagcccacccaccctatcagactg

SEQ ID NO: 59949 - RNA, 30 nt, synthetic construct
  misc_feature 1..30: note = Store-operated calcium entry-associated regulatory factor (86-95)
  source 1..30: mol_type = other RNA
aagggctgggacgggtacgatgtgcagtgg

SEQ ID NO: 59950 - RNA, 27 nt, synthetic construct
  misc_feature 1..27: note = Midasin (3076-3084)
  source 1..27: mol_type = other RNA
aagatcgcccagttcctggagagcgtg

SEQ ID NO: 59951 - RNA, 27 nt, synthetic construct
  misc_feature 1..27: note = Heme oxygenase 1 (149-157)
  source 1..27: mol_type = other RNA
aagatcgcccagaaagctctggacctc

SEQ ID NO: 59952 - RNA, 27 nt, synthetic construct
  misc_feature 1..27: note = WD repeat-containing protein 82 (84-92)
  source 1..27: mol_type = other RNA
aagatcgacgataccattagatacctg

SEQ ID NO: 59953 - RNA, 33 nt, synthetic construct
  misc_feature 1..33: note = Cytochrome c oxidase subunit 2 (217-227)
  source 1..33: mol_type = other RNA
aagatcttcgagatgggccccgtgtttaccctg

SEQ ID NO: 59954 - RNA, 27 nt, synthetic construct
  misc_feature 1..27: note = Poly (ADP-ribose) polymerase 14 (1060-1068)
  source 1..27: mol_type = other RNA
aagatcggcagcattatattccaggtg

SEQ ID NO: 59955 - RNA, 33 nt, synthetic construct
  misc_feature 1..33: note = KH domain-containing, RNA-binding, signal transduction-associated protein 1 (175-185)
  source 1..33: mol_type = other RNA
aagatcctgggcccccaggggaacaccattaaa

SEQ ID NO: 59956 - RNA, 27 nt, synthetic construct
  misc_feature 1..27: note = Nucleolar pre-ribosomal-associated protein 1 (278-286)
  source 1..27: mol_type = other RNA
aagatcctgcccgacctcaacaccgtg

SEQ ID NO: 59957 - RNA, 27 nt, synthetic construct
  misc_feature 1..27: note = Protein SON (1565-1573)
  source 1..27: mol_type = other RNA
aagatcctgcccaccagcgagacaaaa

SEQ ID NO: 59958 - RNA, 27 nt, synthetic construct
  misc_feature 1..27: note = Phosphatidylinositol 4-phosphate 5-kinase type-1 beta (263-271)
  source 1..27: mol_type = other RNA
aagatcatggactacagcctgctcctt

SEQ ID NO: 59959 - RNA, 30 nt, synthetic construct
  misc_feature 1..30: note = Heat shock protein HSP 90-alpha (389-398)
  source 1..30: mol_type = other RNA
aagatcatgaaagacattctggagaagaaa

SEQ ID NO: 59960 - RNA, 27 nt, synthetic construct
  misc_feature 1..27: note = Mitotic checkpoint serine/threonine-protein kinase BUB1 beta (908-916)
  source 1..27: mol_type = other RNA
aagatcgtggacttcagctactccgtc

SEQ ID NO: 59961 - RNA, 27 nt, synthetic construct
  misc_feature 1..27: note = Tripeptidyl-peptidase 2 (81-89)
  source 1..27: mol_type = other RNA
aagatctgggaccccgtgcacagagtc

SEQ ID NO: 59962 - RNA, 33 nt, synthetic construct
  misc_feature 1..33: note = Cyclin-dependent kinase 16 (375-385)
  source 1..33: mol_type = other RNA
aagctggccgacttcggcctcgctagagcaaaa

SEQ ID NO: 59963 - RNA, 30 nt, synthetic construct
  misc_feature 1..30: note = Probable RNA-binding protein 23 (357-366)
  source 1..30: mol_type = other RNA
aagctggccgagggcgctgggatccagctc

SEQ ID NO: 59964 - RNA, 30 nt, synthetic construct
  misc_feature 1..30: note = SAP domain-containing ribonucleoprotein (19-28)
  source 1..30: mol_type = other RNA
aagctggccgagctcaaacaggaatgcctt

SEQ ID NO: 59965 - RNA, 27 nt, synthetic construct
  misc_feature 1..27: note = LIM and senescent cell antigen-like-containing domain protein 1 (317-325)
  source 1..27: mol_type = other RNA
aagctggccgagaccctcggcagaaaa

SEQ ID NO: 59966 - RNA, 27 nt, synthetic construct
  misc_feature 1..27: note = Protein NDRG1 (209-217)
  source 1..27: mol_type = other RNA
aagctggaccccaccaaaacaactctc

SEQ ID NO: 59967 - RNA, 33 nt, synthetic construct
  misc_feature 1..33: note = SEC14-like protein 1 (60-70)
  source 1..33: mol_type = other RNA
aagctggacgtggatgcccccagactccttaaa

SEQ ID NO: 59968 - RNA, 27 nt, synthetic construct
  misc_feature 1..27: note = B-cell receptor-associated protein 31 (167-175)
  source 1..27: mol_type = other RNA
aagctggacgtgggcaacgccgaggtc

SEQ ID NO: 59969 - RNA, 27 nt, synthetic construct
  misc_feature 1..27: note = WAS protein family homolog 1 (210-218)
  source 1..27: mol_type = other RNA
aagctgttcgacgcccccctcagcatc

SEQ ID NO: 59970 - RNA, 33 nt, synthetic construct
  misc_feature 1..33: note = Putative WAS protein family homolog 3 (208-218)
  source 1..33: mol_type = other RNA
aagctgttcgacgcccccctcagcatctccaaa

SEQ ID NO: 59971 - RNA, 30 nt, synthetic construct
  misc_feature 1..30: note = Oxysterol-binding protein-related protein 9 (138-147)
  source 1..30: mol_type = other RNA
aagctgttcgacgataaactccagaactgc

SEQ ID NO: 59972 - RNA, 30 nt, synthetic construct
  misc_feature 1..30: note = FACT complex subunit SSRP1 (413-422)
  source 1..30: mol_type = other RNA
aagctgttcgactttgtgaacgccaaaaag

SEQ ID NO: 59973 - RNA, 36 nt, synthetic construct
  misc_feature 1..36: note = Eukaryotic translation initiation factor 3 subunit I (213-224)
  source 1..36: mol_type = other RNA
aagctgttcgacagcaccacactcgagcaccagaaa

SEQ ID NO: 59974 - RNA, 27 nt, synthetic construct
  misc_feature 1..27: note = Interferon regulatory factor 4 (356-364)
  source 1..27: mol_type = other RNA
aagctgttcgacacccagcaatttctc

SEQ ID NO: 59975 - RNA, 27 nt, synthetic construct
  misc_feature 1..27: note = Protein transport protein Sec61 subunit alpha isoform 2 (95-103)
  source 1..27: mol_type = other RNA
aagctgttcggcatgatcattaccata

SEQ ID NO: 59976 - RNA, 27 nt, synthetic construct
  misc_feature 1..27: note = Vacuolar fusion protein CCZ1 homolog (146-154)
  source 1..27: mol_type = other RNA
aagctgttcaacggcacctttctcaaa

SEQ ID NO: 59977 - RNA, 27 nt, synthetic construct
  misc_feature 1..27: note = Iron-responsive element-binding protein 2 (746-754)
  source 1..27: mol_type = other RNA
aagctgttcaacaaatttatcggcaag

SEQ ID NO: 59978 - RNA, 30 nt, synthetic construct
  misc_feature 1..30: note = Interleukin enhancer-binding factor 3 (591-600)
  source 1..30: mol_type = other RNA
aagctgttccccgacacccctctcgccctt

SEQ ID NO: 59979 - RNA, 27 nt, synthetic construct
  misc_feature 1..27: note = DNA-directed DNA/RNA polymerase mu (238-246)
  source 1..27: mol_type = other RNA
aagctgttcacccagatctttggcgtg

SEQ ID NO: 59980 - RNA, 33 nt, synthetic construct
  misc_feature 1..33: note = Serine/threonine-protein phosphatase 2A 65 kDa regulatory subunit A alpha isoform (188-198)
  source 1..33: mol_type = other RNA
aagctgggcgagttcgccaaagtgctcgaactt

SEQ ID NO: 59981 - RNA, 27 nt, synthetic construct
  misc_feature 1..27: note = ADP-ribosylation factor 5 (38-46)
  source 1..27: mol_type = other RNA
aagctgggcgagatcgtgaccacaatt

SEQ ID NO: 59982 - RNA, 24 nt, synthetic construct
  misc_feature 1..24: note = Ras GTPase-activating-like protein IQGAP2 (158-165)
  source 1..24: mol_type = other RNA
aagctgggcatcgccccccagatt

SEQ ID NO: 59983 - RNA, 27 nt, synthetic construct
  misc_feature 1..27: note = Actin-like protein 6A (337-345)
  source 1..27: mol_type = other RNA
aagctgatcgccaacaataccacagtg

SEQ ID NO: 59984 - RNA, 33 nt, synthetic construct
  misc_feature 1..33: note = Serine/threonine-protein kinase pim-2 (179-189)
  source 1..33: mol_type = other RNA
aagctgatcgacttcggcagcggggccctcctt

SEQ ID NO: 59985 - RNA, 36 nt, synthetic construct
  misc_feature 1..36: note = Serine/threonine-protein kinase pim-1 (274-285)
  source 1..36: mol_type = other RNA
aagctgatcgacttcggcagcggggccctccttaaa

SEQ ID NO: 59986 - RNA, 27 nt, synthetic construct
  misc_feature 1..27: note = Dedicator of cytokinesis protein 4 (165-173)
  source 1..27: mol_type = other RNA
aagctgatcgacaaactcgatagcctt

SEQ ID NO: 59987 - RNA, 27 nt, synthetic construct
  misc_feature 1..27: note = Protein furry homolog (375-383)
  source 1..27: mol_type = other RNA
aagctgatcggccaggtgcacgaggtc

SEQ ID NO: 59988 - RNA, 27 nt, synthetic construct
  misc_feature 1..27: note = Nodal modulator 3 (764-772)
  source 1..27: mol_type = other RNA
aagctgatccccctccttctgcagttg

SEQ ID NO: 59989 - RNA, 30 nt, synthetic construct
  misc_feature 1..30: note = Nucleolar pre-ribosomal-associated protein 1 (172-181)
  source 1..30: mol_type = other RNA
aagctgatccagctccccgtggtctacgtt

SEQ ID NO: 59990 - RNA, 27 nt, synthetic construct
  misc_feature 1..27: note = Telomere-associated protein RIF1 (232-240)
  source 1..27: mol_type = other RNA
aagctgatcagcgagctccagaaactt

SEQ ID NO: 59991 - RNA, 30 nt, synthetic construct
  misc_feature 1..30: note = 26S protease regulatory subunit 6A (109-118)
  source 1..30: mol_type = other RNA
aagctgaaacccggcgacctcgtgggggtc

SEQ ID NO: 59992 - RNA, 33 nt, synthetic construct
  misc_feature 1..33: note = Ras association domain-containing protein 1 (139-149)
  source 1..33: mol_type = other RNA
aagctgctcgacgatgagcagccccttagactg

SEQ ID NO: 59993 - RNA, 27 nt, synthetic construct
  misc_feature 1..27: note = Cytochrome P450 2J2 (182-190)
  source 1..27: mol_type = other RNA
aagctgctcgacgaggtgacctacctt

SEQ ID NO: 59994 - RNA, 30 nt, synthetic construct
  misc_feature 1..30: note = Phosphopantothenoylcysteine decarboxylase (39-48)
  source 1..30: mol_type = other RNA
aagctgctcgacatccccggccttgaggtg

SEQ ID NO: 59995 - RNA, 30 nt, synthetic construct
  misc_feature 1..30: note = Protein scribble homolog (779-788)
  source 1..30: mol_type = other RNA
aagctgctcgaggtgaacggcgtcgccctt

SEQ ID NO: 59996 - RNA, 27 nt, synthetic construct
  misc_feature 1..27: note = Integrator complex subunit 4-like protein 2 isoform X2 (94-102)
  source 1..27: mol_type = other RNA
aagctgctcggcagcatggagcaggtg

SEQ ID NO: 59997 - RNA, 27 nt, synthetic construct
  misc_feature 1..27: note = Nucleolar pre-ribosomal-associated protein 1 (170-178)
  source 1..27: mol_type = other RNA
aagctgctcaacaaaatctacgaggcc

SEQ ID NO: 59998 - RNA, 27 nt, synthetic construct
  misc_feature 1..27: note = Acidic leucine-rich nuclear phosphoprotein 32 family member A (137-145)
  source 1..27: mol_type = other RNA
aagctgctcccccagcttacctacctg

SEQ ID NO: 59999 - RNA, 27 nt, synthetic construct
  misc_feature 1..27: note = Proheparin-binding EGF-like growth factor (2-10)
  source 1..27: mol_type = other RNA
aagctgctccccagcgtggtccttaaa

SEQ ID NO: 60000 - RNA, 30 nt, synthetic construct; identical to SEQ ID NO: 35773
  misc_feature 1..30: note = Transmembrane protein 43 (13-22)
  source 1..30: mol_type = other RNA

SEQ ID NO: 60001 - RNA, 27 nt, synthetic construct
  misc_feature 1..27: note = Ubiquitin carboxyl-terminal hydrolase 48 (231-239)
  source 1..27: mol_type = other RNA
aagctgctcagcaaattctacgagctt

SEQ ID NO: 60002 - RNA, 33 nt, synthetic construct
  misc_feature 1..33: note = Cytosolic acyl coenzyme A thioester hydrolase (210-220)
  source 1..33: mol_type = other RNA
aagctgatggacgaggtggccggcatcgtcgct

SEQ ID NO: 60003 - RNA, 27 nt, synthetic construct
  misc_feature 1..27: note = N-alpha-acetyltransferase 20 (79-87)
  source 1..27: mol_type = other RNA
aagctgatggagctccttgaagagatc

SEQ ID NO: 60004 - RNA, 27 nt, synthetic construct
  misc_feature 1..27: note = Transcription intermediary factor 1-alpha (341-349)
  source 1..27: mol_type = other RNA
aagctgatgcagcaacagcaggaggtg

SEQ ID NO: 60005 - RNA, 27 nt, synthetic construct
  misc_feature 1..27: note = Cohesin subunit SA-1 (228-236)
  source 1..27: mol_type = other RNA
aagctgatgaccgccctcgtgaacgtc

SEQ ID NO: 60006 - RNA, 27 nt, synthetic construct
  misc_feature 1..27: note = Proteasome subunit alpha type-5 (151-159)
  source 1..27: mol_type = other RNA
aagctgaacgccaccaatatcgagctc

SEQ ID NO: 60007 - RNA, 27 nt, synthetic construct
  misc_feature 1..27: note = Myomegalin (424-432)
  source 1..27: mol_type = other RNA
aagctgaacgagatgagctacgaactc

SEQ ID NO: 60008 - RNA, 27 nt, synthetic construct
  misc_feature 1..27: note = Twinfilin-1 (192-200)
  source 1..27: mol_type = other RNA
aagctgaacaatagacagctcaactac

SEQ ID NO: 60009 - RNA, 30 nt, synthetic construct
  misc_feature 1..30: note = Stromal interaction molecule 1 (571-580)
  source 1..30: mol_type = other RNA
aagctgcccgacagccctgccctcgctaaa

SEQ ID NO: 60010 - RNA, 27 nt, synthetic construct
  misc_feature 1..27: note = Probable U3 small nucleolar RNA-associated protein 11 (5-13)
  source 1..27: mol_type = other RNA
aagctgcaggacggcgtgcacatcatt

SEQ ID NO: 60011 - RNA, 27 nt, synthetic construct
  misc_feature 1..27: note = Hyaluronan mediated motility receptor (672-680)
  source 1..27: mol_type = other RNA
aagctgcaggaggaactcaacaaagtg

SEQ ID NO: 60012 - RNA, 27 nt, synthetic construct
  misc_feature 1..27: note = Centromere-associated protein E (1817-1825)
  source 1..27: mol_type = other RNA
aagctgcaggagaaaatccaagaactc

SEQ ID NO: 60013 - RNA, 27 nt, synthetic construct
  misc_feature 1..27: note = Zinc finger C3H1 domain-containing protein (891-899)
  source 1..27: mol_type = other RNA
aagctgcaggagcaaatccacagagtg

SEQ ID NO: 60014 - RNA, 30 nt, synthetic construct
  misc_feature 1..30: note = Transmembrane protein 131 (929-938)
  source 1..30: mol_type = other RNA
aagctgagagagcccaacttcaccctcaaa

SEQ ID NO: 60015 - RNA, 27 nt, synthetic construct
  misc_feature 1..27: note = EF-hand domain-containing protein D1 (174-182)
  source 1..27: mol_type = other RNA
aagctgagcgagatcgacgtggccctc

SEQ ID NO: 60016 - RNA, 27 nt, synthetic construct
  misc_feature 1..27: note = Keratin, type II cytoskeletal 8 (148-156)
  source 1..27: mol_type = other RNA
aagctgagcgagctcgaagccgctctt

SEQ ID NO: 60017 - RNA, 27 nt, synthetic construct
  misc_feature 1..27: note = 78 kDa glucose-regulated protein (2-10)
  source 1..27: mol_type = other RNA
aagctgagcctcgtggccgctatgctt

SEQ ID NO: 60018 - RNA, 27 nt, synthetic construct
  misc_feature 1..27: note = Retrotransposon-derived protein PEG10 (112-120)
  source 1..27: mol_type = other RNA
aagctgaccgaggaaaacacaactctc

SEQ ID NO: 60019 - RNA, 27 nt, synthetic construct
  misc_feature 1..27: note = Zinc finger MYM-type protein 2 (166-174)
  source 1..27: mol_type = other RNA
aagctgaccgagatcagacacgaagtg

SEQ ID NO: 60020 - RNA, 30 nt, synthetic construct
  misc_feature 1..30: note = Cyclin-dependent kinase 2 (24-33)
  source 1..30: mol_type = other RNA
aagctgaccggcgaggtggtcgccctcaaa

SEQ ID NO: 60021 - RNA, 30 nt, synthetic construct
  misc_feature 1..30: note = Transforming acidic coiled-coil-containing protein 3 (599-608)
  source 1..30: mol_type = other RNA
aagctggtggagttcgactttctcggcgcc

SEQ ID NO: 60022 - RNA, 27 nt, synthetic construct
  misc_feature 1..27: note = Adenylyl cyclase-associated protein 1 (465-473)
  source 1..27: mol_type = other RNA
aagctggtgaccacagtcactgagatc

SEQ ID NO: 60023 - RNA, 27 nt, synthetic construct
  misc_feature 1..27: note = Inactive hydroxysteroid dehydrogenase-like protein 1 (148-156)
  source 1..27: mol_type = other RNA
aagctgtgggacatcattaacgtgaat

SEQ ID NO: 60024 - RNA, 27 nt, synthetic construct
  misc_feature 1..27: note = UBX domain-containing protein 11 (82-90)
  source 1..27: mol_type = other RNA
aagctgtgggacctcgagcagcaagtg

SEQ ID NO: 60025 - RNA, 27 nt, synthetic construct
  misc_feature 1..27: note = Pecanex-like protein 3 (1234-1242)
  source 1..27: mol_type = other RNA
aagctgtgggacctcctttacaaactg

SEQ ID NO: 60026 - RNA, 27 nt, synthetic construct
  misc_feature 1..27: note = MORF4 family-associated protein 1-like 1 (56-64)
  source 1..27: mol_type = other RNA
aagctgtgggagatggacaacatgctc

SEQ ID NO: 60027 - RNA, 30 nt, synthetic construct; identical to SEQ ID NO: 35800
  misc_feature 1..30: note = MORF4 family-associated protein 1-like 1 (56-65)
  source 1..30: mol_type = other RNA

SEQ ID NO: 60028 - RNA, 33 nt, synthetic construct; identical to SEQ ID NO: 35801
  misc_feature 1..33: note = MORF4 family-associated protein 1-like 1 (56-66)
  source 1..33: mol_type = other RNA

SEQ ID NO: 60029 - RNA, 27 nt, synthetic construct
  misc_feature 1..27: note = Rho guanine nucleotide exchange factor 3 (108-116)
  source 1..27: mol_type = other RNA
aagctgtggagcgagaccttcgacgtg

SEQ ID NO: 60030 - RNA, 27 nt, synthetic construct
  misc_feature 1..27: note = ADP-ribosylation factor-like protein 4C (157-165)
  source 1..27: mol_type = other RNA
aagctgtacgagatgatcctcaaaaga

SEQ ID NO: 60031 - RNA, 27 nt, synthetic construct
  misc_feature 1..27: note = Splicing factor 3B subunit 4 (78-86)
  source 1..27: mol_type = other RNA
aagctgtacggcaaacccatcagagtg

SEQ ID NO: 60032 - RNA, 27 nt, synthetic construct
  misc_feature 1..27: note = Tuberin (574-582)
  source 1..27: mol_type = other RNA
aagctgtacaccctccccgccagccac

SEQ ID NO: 60033 - RNA, 33 nt, synthetic construct
  misc_feature 1..33: note = E3 ubiquitin-protein ligase BRE1A (694-704)
  source 1..33: mol_type = other RNA
aagatggccgacgaggatgctctgagaaaaatc

SEQ ID NO: 60034 - RNA, 27 nt, synthetic construct
  misc_feature 1..27: note = Melanoma-associated antigen 12 (112-120)
  source 1..27: mol_type = other RNA
aagatggccgagctggtgcacttcctc

SEQ ID NO: 60035 - RNA, 33 nt, synthetic construct
  misc_feature 1..33: note = Ribosome biogenesis protein BOP1 (115-125)
  source 1..33: mol_type = other RNA
aagatggacgatcccgactactggagaaccgtg

SEQ ID NO: 60036 - RNA, 27 nt, synthetic construct
  misc_feature 1..27: note = Talin-1 (535-543)
  source 1..27: mol_type = other RNA
aagatggacgagagcaaacacgaaatc

SEQ ID NO: 60037 - RNA, 27 nt, synthetic construct
  misc_feature 1..27: note = KDEL motif-containing protein 2 (215-223)
  source 1..27: mol_type = other RNA
aagatgttcagcgacgagatcctgctc

SEQ ID NO: 60038 - RNA, 30 nt, synthetic construct
  misc_feature 1..30: note = Structural maintenance of chromosomes protein 5 (378-387)
  source 1..30: mol_type = other RNA
aagatgatcgaggacctgcagaacgaactc

SEQ ID NO: 60039 - RNA, 36 nt, synthetic construct
  misc_feature 1..36: note = UPF0428 protein CXorf56 (70-81)
  source 1..36: mol_type = other RNA
aagatgaaaggcaccctgatcgacaaccagttcaag

SEQ ID NO: 60040 - RNA, 33 nt, synthetic construct
  misc_feature 1..33: note = Tropomodulin-3 (307-317)
  source 1..33: mol_type = other RNA
aagatgctggaggaaaacaccaatatcctcaaa

SEQ ID NO: 60041 - RNA, 27 nt, synthetic construct
  misc_feature 1..27: note = HEAT repeat-containing protein 1 (682-690)
  source 1..27: mol_type = other RNA
aagatggtggaggacctgatcagcgtc

SEQ ID NO: 60042 - RNA, 27 nt, synthetic construct
  misc_feature 1..27: note = cAMP-dependent protein kinase type I-beta regulatory subunit (244-252)
  source 1..27: mol_type = other RNA
aagatgtacgaggaattcctgagcaaa

SEQ ID NO: 60043 - RNA, 30 nt, synthetic construct
  misc_feature 1..30: note = La-related protein 4B (374-383)
  source 1..30: mol_type = other RNA
aagcccgccgctagccctctgacctccctc

SEQ ID NO: 60044 - RNA, 27 nt, synthetic construct
  misc_feature 1..27: note = Myosin-9 (517-525)
  source 1..27: mol_type = other RNA
aagcccgccggccctccagggatcctg

SEQ ID NO: 60045 - RNA, 27 nt, synthetic construct
  misc_feature 1..27: note = Serine/threonine-protein kinase Nek6 (199-207)
  source 1..27: mol_type = other RNA
aagcccgccaacgtgttcatcaccgct

SEQ ID NO: 60046 - RNA, 27 nt, synthetic construct
  misc_feature 1..27: note = Acid ceramidase (209-217)
  source 1..27: mol_type = other RNA
aagcccggcctgttcagcctcaccctt

SEQ ID NO: 60047 - RNA, 27 nt, synthetic construct
  misc_feature 1..27: note = BAG family molecular chaperone regulator 3 (324-332)
  source 1..27: mol_type = other RNA
aagcccggccctgtggggccagagctg

SEQ ID NO: 60048 - RNA, 27 nt, synthetic construct
  misc_feature 1..27: note = Proteasome assembly chaperone 1 (230-238)
  source 1..27: mol_type = other RNA
aagcccatcctgagcaccagatccctc

SEQ ID NO: 60049 - RNA, 30 nt, synthetic construct
  misc_feature 1..30: note = Radixin (3-12)
  source 1..30: mol_type = other RNA
aagcccatcaacgtgagagtcaccacaatg

SEQ ID NO: 60050 - RNA, 27 nt, synthetic construct
  misc_feature 1..27: note = Retinoblastoma-binding protein 5 (324-332)
  source 1..27: mol_type = other RNA
aagcccaaaaccacaaacatcgagctg

SEQ ID NO: 60051 - RNA, 27 nt, synthetic construct
  misc_feature 1..27: note = Transketolase (451-459)
  source 1..27: mol_type = other RNA
aagcccctggacagaaaactcatcctt

SEQ ID NO: 60052 - RNA, 27 nt, synthetic construct
  misc_feature 1..27: note = Forkhead box protein N2 (170-178)
  source 1..27: mol_type = other RNA
aagcccctgcctctcaaaaccgccctt

SEQ ID NO: 60053 - RNA, 33 nt, synthetic construct
  misc_feature 1..33: note = Galectin-3 (139-149)
  source 1..33: mol_type = other RNA
aagcccaacgccaatagaatcgctctggacttc

SEQ ID NO: 60054 - RNA, 27 nt, synthetic construct
  misc_feature 1..27: note = Catenin beta-1 (666-674)
  source 1..27: mol_type = other RNA
aagccccaggactacaaaaagagactg

SEQ ID NO: 60055 - RNA, 33 nt, synthetic construct
  misc_feature 1..33: note = Catenin beta-1 (666-676)
  source 1..33: mol_type = other RNA
aagccccaggactacaaaaagagactgagcgtg

SEQ ID NO: 60056 - RNA, 27 nt, synthetic construct
  misc_feature 1..27: note = Serine/threonine-protein kinase tousled-like 2 (155-163)
  source 1..27: mol_type = other RNA
aagcccagactggacaccgagcagctc

SEQ ID NO: 60057 - RNA, 27 nt, synthetic construct
  misc_feature 1..27: note = Retrotransposon-derived protein PEG10 (325-333)
  source 1..27: mol_type = other RNA
aagcccagaagccctccaagggccctg

SEQ ID NO: 60058 - RNA, 33 nt, synthetic construct
  misc_feature 1..33: note = Retrotransposon-derived protein PEG10 (325-335)
  source 1..33: mol_type = other RNA
aagcccagaagccctccaagggccctggtgctc

SEQ ID NO: 60059 - RNA, 27 nt, synthetic construct
  misc_feature 1..27: note = rRNA-processing protein UTP23 homolog (149-157)
  source 1..27: mol_type = other RNA
aagcccagccctaaaaccatcgccttc

SEQ ID NO: 60060 - RNA, 27 nt, synthetic construct
  misc_feature 1..27: note = 60S ribosomal protein L13a (130-138)
  source 1..27: mol_type = other RNA
aagcccaccagaaaattcgcctacctg

SEQ ID NO: 60061 - RNA, 30 nt, synthetic construct; identical to SEQ ID NO: 35834
  misc_feature 1..30: note = U3 small nucleolar ribonucleoprotein protein IMP3 (14-23)
  source 1..30: mol_type = other RNA

SEQ ID NO: 60062 - RNA, 27 nt, synthetic construct
  misc_feature 1..27: note = Src kinase-associated phosphoprotein 2 (319-327)
  source 1..27: mol_type = other RNA
aagagaggcgacgtgatctacattctg

SEQ ID NO: 60063 - RNA, 30 nt, synthetic construct
  misc_feature 1..30: note = Guanylate-binding protein 4 (305-314)
  source 1..30: mol_type = other RNA
aagagactgggcaccctcgtggtcacatac

SEQ ID NO: 60064 - RNA, 33 nt, synthetic construct
  misc_feature 1..33: note = Eukaryotic translation initiation factor 4 gamma 1 (570-580)
  source 1..33: mol_type = other RNA
aagagatacgacagggagttcctgctcggcttt

SEQ ID NO: 60065 - RNA, 30 nt, synthetic construct
  misc_feature 1..30: note = Hom s 1 (791-800)
  source 1..30: mol_type = other RNA
aagagcatgaacgccaataccatcacaaaa

SEQ ID NO: 60066 - RNA, 33 nt, synthetic construct
  misc_feature 1..33: note = Prefoldin subunit 5 (107-117)
  source 1..33: mol_type = other RNA
aagaccgccgaggacgctaaagatttctttaag

SEQ ID NO: 60067 - RNA, 33 nt, synthetic construct
  misc_feature 1..33: note = Death-inducer obliterator 1 (585-595)
  source 1..33: mol_type = other RNA
aagaccgccccccctggcagcgctgtggggaaa

SEQ ID NO: 60068 - RNA, 27 nt, synthetic construct
  misc_feature 1..27: note = Volume-regulated anion channel subunit LRRC8C (100-108)
  source 1..27: mol_type = other RNA
aagaccgacctggatctccagcaatac

SEQ ID NO: 60069 - RNA, 27 nt, synthetic construct
  misc_feature 1..27: note = Activating transcription factor 7-interacting protein 1 (394-402)
  source 1..27: mol_type = other RNA
aagaccatcgacgccagcgtgtccaaa

SEQ ID NO: 60070 - RNA, 30 nt, synthetic construct
  misc_feature 1..30: note = Arfaptin-1 (216-225)
  source 1..30: mol_type = other RNA
aagaccatcgaggacacactgatgactgtg

SEQ ID NO: 60071 - RNA, 36 nt, synthetic construct
  misc_feature 1..36: note = UPF0769 protein C21orf59 (114-125)
  source 1..36: mol_type = other RNA
aagaccatcgaggaagccaaagctattataagcaag

SEQ ID NO: 60072 - RNA, 33 nt, synthetic construct
  misc_feature 1..33: note = Acyl-CoA dehydrogenase family member 9, mitochondrial (521-531)
  source 1..33: mol_type = other RNA
aagaccatcatggaggaacagctggtgctcaaa

SEQ ID NO: 60073 - RNA, 27 nt, synthetic construct
  misc_feature 1..27: note = Beta-synuclein (32-40)
  source 1..27: mol_type = other RNA
aagaccaaagagggcgtgctgtacgtc

SEQ ID NO: 60074 - RNA, 27 nt, synthetic construct
  misc_feature 1..27: note = Transcriptional repressor protein YY1 (213-221)
  source 1..27: mol_type = other RNA
aagaccctggagggcgaattcagcgtg

SEQ ID NO: 60075 - RNA, 30 nt, synthetic construct
  misc_feature 1..30: note = SWI/SNF-related matrix-associated actin-dependent regulator of chromatin subfamily A member 5 (112-121)
  source 1..30: mol_type = other RNA
aagacccccacaagccctctgaaaatgaag

SEQ ID NO: 60076 - RNA, 27 nt, synthetic construct
  misc_feature 1..27: note = Short coiled-coil protein (97-105)
  source 1..27: mol_type = other RNA
aagaccagactgatcaaccaggtgctc

SEQ ID NO: 60077 - RNA, 27 nt, synthetic construct
  misc_feature 1..27: note = Collagen alpha-2(VI) chain (132-140)
  source 1..27: mol_type = other RNA
aagaccagagtgttcgccgtcgttatc

SEQ ID NO: 60078 - RNA, 27 nt, synthetic construct
  misc_feature 1..27: note = Ubinuclein-2 (526-534)
  source 1..27: mol_type = other RNA
aagaccagcgacaaacccctgatgtac

SEQ ID NO: 60079 - RNA, 27 nt, synthetic construct
  misc_feature 1..27: note = 26S proteasome non-ATPase regulatory subunit 6 (126-134)
  source 1..27: mol_type = other RNA
aagacctacgacaaaacagtggccctg

SEQ ID NO: 60080 - RNA, 30 nt, synthetic construct
  misc_feature 1..30: note = Coiled-coil domain-containing protein 14 (522-531)
  source 1..30: mol_type = other RNA
aagacctacgagaacgtgctgagctccaga

SEQ ID NO: 60081 - RNA, 30 nt, synthetic construct
  misc_feature 1..30: note = Heterogeneous nuclear ribonucleoprotein L-like (486-495)
  source 1..30: mol_type = other RNA
aaggtgttcgacgccaaacccagcgctaag

SEQ ID NO: 60082 - RNA, 27 nt, synthetic construct
  misc_feature 1..27: note = Dihydroxyacetone phosphate acyltransferase (128-136)
  source 1..27: mol_type = other RNA
aaggtgttcaaacagatctttagcaag

SEQ ID NO: 60083 - RNA, 30 nt, synthetic construct
  misc_feature 1..30: note = Ubiquitin carboxyl-terminal hydrolase 11 (139-148)
  source 1..30: mol_type = other RNA
aaggtgatcgagctgcccaacattcagaaa

SEQ ID NO: 60084 - RNA, 27 nt, synthetic construct
  misc_feature 1..27: note = Syntenin-1 (14-22)
  source 1..27: mol_type = other RNA
aaggtgatccaggcccaaaccgctttc

SEQ ID NO: 60085 - RNA, 27 nt, synthetic construct
  misc_feature 1..27: note = Plasmalemma vesicle-associated protein (164-172)
  source 1..27: mol_type = other RNA
aaggtgaaaaccctggaggtcgaaatc

SEQ ID NO: 60086 - RNA, 27 nt, synthetic construct
  misc_feature 1..27: note = Mitofusin-2 (84-92)
  source 1..27: mol_type = other RNA
aaggtgagaggcatcagcgaggtcctg

SEQ ID NO: 60087 - RNA, 27 nt, synthetic construct
  misc_feature 1..27: note = Heterogeneous nuclear ribonucleoprotein R isoform 7 (155-163)
  source 1..27: mol_type = other RNA
aaggtgtggggcaacgtcgttaccgtg

SEQ ID NO: 60088 - RNA, 30 nt, synthetic construct
  misc_feature 1..30: note = Small integral membrane protein 20 (58-67)
  source 1..30: mol_type = other RNA
aaggtgtggagcgaccccttcggcagaaaa

SEQ ID NO: 60089 - RNA, 27 nt, synthetic construct
  misc_feature 1..27: note = Stromal interaction molecule 2 (478-486)
  source 1..27: mol_type = other RNA
aaggtgtacaacggcatcctggagaaa

SEQ ID NO: 60090 - RNA, 27 nt, synthetic construct
  misc_feature 1..27: note = Homeobox-containing protein 1 (325-333)
  source 1..27: mol_type = other RNA
aaggtgtacaactggttcgccaataga

SEQ ID NO: 60091 - RNA, 27 nt, synthetic construct
  misc_feature 1..27: note = Threonylcarbamoyladenosine tRNA methylthiotransferase (405-413)
  source 1..27: mol_type = other RNA
aaggtgtacacccccagcatctccaaa

SEQ ID NO: 60092 - RNA, 27 nt, synthetic construct
  misc_feature 1..27: note = WD repeat-containing protein 1 (65-73)
  source 1..27: mol_type = other RNA
aagtacgcccccagcggcttctatatc

SEQ ID NO: 60093 - RNA, 27 nt, synthetic construct
  misc_feature 1..27: note = Alpha-soluble NSF attachment protein (227-235)
  source 1..27: mol_type = other RNA
aagtacgaggaactgttccccgccttt

SEQ ID NO: 60094 - RNA, 27 nt, synthetic construct
  misc_feature 1..27: note = Putative E3 ubiquitin-protein ligase UBR7 (125-133)
  source 1..27: mol_type = other RNA
aagtacaacgacaatttctttggcctg

SEQ ID NO: 60095 - RNA, 27 nt, synthetic construct
  misc_feature 1..27: note = Rho guanine nucleotide exchange factor 1 (516-524)
  source 1..27: mol_type = other RNA
aagtaccccctgctccttcagagcatc

SEQ ID NO: 60096 - RNA, 27 nt, synthetic construct
  misc_feature 1..27: note = Zinc finger MYND domain-containing protein 11 (415-423)
  source 1..27: mol_type = other RNA
aagtacaccaaaatcttcaacgacttt

SEQ ID NO: 60097 - RNA, 24 nt, synthetic construct
  misc_feature 1..24: note = Transformation/transcription domain-associated protein (379-386)
  source 1..24: mol_type = other RNA
ctggccgacctcgtgcaccatgtc

SEQ ID NO: 60098 - RNA, 24 nt, synthetic construct
  misc_feature 1..24: note = Ras GTPase-activating-like protein IQGAP1 (1072-1079)
  source 1..24: mol_type = other RNA
ctggcccccgtggtcaaggagatc

SEQ ID NO: 60099 - RNA, 27 nt, synthetic construct
  misc_feature 1..27: note = Vimentin (124-132)
  source 1..27: mol_type = other RNA
ctggagcagcaaaacaagatcctcctt

SEQ ID NO: 60100 - RNA, 27 nt, synthetic construct
  misc_feature 1..27: note = HLA class II histocompatibility antigen, DRB1-15 beta chain (48-56)
  source 1..27: mol_type = other RNA
ctgggcagacccgacgccgagtactgg

SEQ ID NO: 60101 - RNA, 27 nt, synthetic construct
  misc_feature 1..27: note = U5 small nuclear ribonucleoprotein 200 kDa helicase (620-628)
  source 1..27: mol_type = other RNA
ctgcacgacgatagaggccccgtgctc

SEQ ID NO: 60102 - RNA, 24 nt, synthetic construct
  misc_feature 1..24: note = Elongation factor 2 (218-225)
  source 1..24: mol_type = other RNA
ctgcacggctgggccttcaccctc

SEQ ID NO: 60103 - RNA, 27 nt, synthetic construct
  misc_feature 1..27: note = Importin subunit alpha-1 (260-268)
  source 1..27: mol_type = other RNA
ctgcaccatgacgatcccgaggtgctc

SEQ ID NO: 60104 - RNA, 27 nt, synthetic construct
  misc_feature 1..27: note = Protein kinase C delta type (286-294)
  source 1..27: mol_type = other RNA
ctgctcgccgaggctcttaaccaggtg

SEQ ID NO: 60105 - RNA, 27 nt, synthetic construct
  misc_feature 1..27: note = Protein sel-1 homolog 1 (580-588)
  source 1..27: mol_type = other RNA
ctgctcgccgagcagggctacgaagtg

SEQ ID NO: 60106 - RNA, 27 nt, synthetic construct
  misc_feature 1..27: note = BRCA1-associated ATM activator 1 (541-549)
  source 1..27: mol_type = other RNA
ctgctcgccagcgaggtgccccagctt

SEQ ID NO: 60107 - RNA, 27 nt, synthetic construct
  misc_feature 1..27: note = 15 kDa selenoprotein (21-29)
  source 1..27: mol_type = other RNA
ctgctcgccaccgtgcttcaggctgtc

SEQ ID NO: 60108 - RNA, 27 nt, synthetic construct
  misc_feature 1..27: note = Talin-1 (2250-2258)
  source 1..27: mol_type = other RNA
ctgctcgaccacgtgcttctgaccttg

SEQ ID NO: 60109 - RNA, 24 nt, synthetic construct
  misc_feature 1..24: note = Annexin A11 (433-440)
  source 1..24: mol_type = other RNA
ctgctcgacatcagaagcgagtac

SEQ ID NO: 60110 - RNA, 24 nt, synthetic construct
  misc_feature 1..24: note = U3 small nucleolar ribonucleoprotein protein IMP3 (79-86)
  source 1..24: mol_type = other RNA
ctgctcgacaagctttacgccctg

SEQ ID NO: 60111 - RNA, 27 nt, synthetic construct
  misc_feature 1..27: note = WD repeat-containing protein 36 (605-613)
  source 1..27: mol_type = other RNA
ctgctcgacagcgccccccttaacgtg

SEQ ID NO: 60112 - RNA, 27 nt, synthetic construct
  misc_feature 1..27: note = Group XIIA secretory phospholipase A2 (158-166)
  source 1..27: mol_type = other RNA
ctgctcttcgacagcgtgatccacctt

SEQ ID NO: 60113 - RNA, 27 nt, synthetic construct
  misc_feature 1..27: note = Ras-related GTP-binding protein A (204-212)
  source 1..27: mol_type = other RNA
ctgctcttcgagagagccacctttctt

SEQ ID NO: 60114 - RNA, 27 nt, synthetic construct
  misc_feature 1..27: note = Transcription factor 20 (837-845)
  source 1..27: mol_type = other RNA
ctgctccacgaggaaaacttcagcgtg

SEQ ID NO: 60115 - RNA, 27 nt, synthetic construct
  misc_feature 1..27: note = NADH dehydrogenase (ubiquinone) 1 alpha subcomplex subunit 1 (16-24)
  source 1..27: mol_type = other RNA
ctgctcatccccggccttgccaccgct

SEQ ID NO: 60116 - RNA, 27 nt, synthetic construct
  misc_feature 1..27: note = ERO1-like protein alpha (260-268)
  source 1..27: mol_type = other RNA
ctgctccttgagatcctgcacgaaatt

SEQ ID NO: 60117 - RNA, 27 nt, synthetic construct
  misc_feature 1..27: note = Staphylococcal nuclease domain-containing protein 1 (186-194)
  source 1..27: mol_type = other RNA
ctgctccttcccgactactatctggtg

SEQ ID NO: 60118 - RNA, 33 nt, synthetic construct
  misc_feature 1..33: note = Staphylococcal nuclease domain-containing protein 1 (186-196)
  source 1..33: mol_type = other RNA
ctgctccttcccgactactatctggtgaccgtc

SEQ ID NO: 60119 - RNA, 27 nt, synthetic construct
  misc_feature 1..27: note = Histone H2B type 2-F (101-109)
  source 1..27: mol_type = other RNA
ctgctccttcccggcgagctggccaag

SEQ ID NO: 60120 - RNA, 27 nt, synthetic construct
  misc_feature 1..27: note = Clathrin heavy chain 1 (1422-1430)
  source 1..27: mol_type = other RNA
ctgctcatggtgcttagccccagactg

SEQ ID NO: 60121 - RNA, 27 nt, synthetic construct
  misc_feature 1..27: note = DNA-dependent protein kinase catalytic subunit (2454-2462)
  source 1..27: mol_type = other RNA
ctgctcaaccccgtggtcgagttcgtt

SEQ ID NO: 60122 - RNA, 27 nt, synthetic construct
  misc_feature 1..27: note = Superkiller viralicidic activity 2-like 2 (273-281)
  source 1..27: mol_type = other RNA
ctgctccccgacaacgtgcactacgtc

SEQ ID NO: 60123 - RNA, 27 nt, synthetic construct
  misc_feature 1..27: note = Homocysteine-responsive endoplasmic reticulum-resident ubiquitin-like domain member 1 protein (222-230)
  source 1..27: mol_type = other RNA
ctgctccccgagggccctccagccatc

SEQ ID NO: 60124 - RNA, 27 nt, synthetic construct
  misc_feature 1..27: note = Potassium channel subfamily K member 4 (365-373)
  source 1..27: mol_type = other RNA
ctgctcccccctccaccgtgccccgcc

SEQ ID NO: 60125 - RNA, 27 nt, synthetic construct
  misc_feature 1..27: note = Casein kinase I isoform alpha (57-65)
  source 1..27: mol_type = other RNA
ctgctctacgagagcaagctttataaa

SEQ ID NO: 60126 - RNA, 27 nt, synthetic construct
  misc_feature 1..27: note = Syntenin-1 (290-298)
  source 1..27: mol_type = other RNA
ctgatggaccacaccatccccgaggtg

SEQ ID NO: 60127 - RNA, 27 nt, synthetic construct
  misc_feature 1..27: note = Bombesin receptor-activated protein C6orf89 (120-128)
  source 1..27: mol_type = other RNA
ctgatgagcctccccatcgccaagaaa

SEQ ID NO: 60128 - RNA, 27 nt, synthetic construct
  misc_feature 1..27: note = Constitutive coactivator of PPAR-gamma-like protein 1 (567-575)
  source 1..27: mol_type = other RNA
ctgatgtacccctatatcttccacgtg

SEQ ID NO: 60129 - RNA, 27 nt, synthetic construct
  misc_feature 1..27: note = Peripheral plasma membrane protein CASK (705-713)
  source 1..27: mol_type = other RNA
ctgcccgccttcaagagaaaaaccctc

SEQ ID NO: 60130 - RNA, 27 nt, synthetic construct
  misc_feature 1..27: note = Butyrophilin subfamily 3 member A3 secreted isoform (388-396)
  source 1..27: mol_type = other RNA
ctgcccgcccaccctggcgctgaggtg

SEQ ID NO: 60131 - RNA, 27 nt, synthetic construct
  misc_feature 1..27: note = FERM domain-containing protein 4A (166-174)
  source 1..27: mol_type = other RNA
ctgcccgccctccctacccaggctctt

SEQ ID NO: 60132 - RNA, 27 nt, synthetic construct
  misc_feature 1..27: note = Proline-rich protein PRCC (42-50)
  source 1..27: mol_type = other RNA
ctgcccgcccctaagggcccagctctc

SEQ ID NO: 60133 - RNA, 27 nt, synthetic construct
  misc_feature 1..27: note = Serine/threonine-protein kinase SIK2 (446-454)
  source 1..27: mol_type = other RNA
ctgcccgccagcgtgcaccctcagctc

SEQ ID NO: 60134 - RNA, 33 nt, synthetic construct
  misc_feature 1..33: note = Host cell factor 1 (1377-1387)
  source 1..33: mol_type = other RNA
ctgcccgacgccaccagctcccacagaacagtg

SEQ ID NO: 60135 - RNA, 27 nt, synthetic construct
  misc_feature 1..27: note = Actin-related protein 2 (246-254)
  source 1..27: mol_type = other RNA
ctgcccgacggcagaatcattaaggtg

SEQ ID NO: 60136 - RNA, 27 nt, synthetic construct
  misc_feature 1..27: note = Transducin-like enhancer protein 4 (517-525)
  source 1..27: mol_type = other RNA
ctgcccgacggcagaaccctcatcgtg

SEQ ID NO: 60137 - RNA, 33 nt, synthetic construct
  misc_feature 1..33: note = Biogenesis of lysosome-related organelles complex 1 subunit 6 (61-71)
  source 1..33: mol_type = other RNA
ctgcccgacctccagagaagcaagcaagccctt

SEQ ID NO: 60138 - RNA, 27 nt, synthetic construct
  misc_feature 1..27: note = Integrator complex subunit 11 (441-449)
  source 1..27: mol_type = other RNA
ctgcccgaggccaagaaacctagactc

SEQ ID NO: 60139 - RNA, 27 nt, synthetic construct
  misc_feature 1..27: note = Queuine tRNA-ribosyltransferase subunit QTRTD1 (120-128)
  source 1..27: mol_type = other RNA
ctgcccgaggacaagcctagactcatc

SEQ ID NO: 60140 - RNA, 27 nt, synthetic construct
  misc_feature 1..27: note = Tyrosine-protein phosphatase non-receptor type 11 (283-291)
  source 1..27: mol_type = other RNA
ctgcccttcgaccacaccagagtggtc

SEQ ID NO: 60141 - RNA, 27 nt, synthetic construct
  misc_feature 1..27: note = Polypyrimidine tract-binding protein 2 (91-99)
  source 1..27: mol_type = other RNA
ctgcccttcggcaaggtgaccaacatc

SEQ ID NO: 60142 - RNA, 27 nt, synthetic construct
  misc_feature 1..27: note = Nodal modulator 3 (615-623)
  source 1..27: mol_type = other RNA
ctgccccaccatagagtgatcgaggtc

SEQ ID NO: 60143 - RNA, 27 nt, synthetic construct
  misc_feature 1..27: note = RNA-binding protein 33 (711-719)
  source 1..27: mol_type = other RNA
ctgcccatcgcccctagccacgtgatt

SEQ ID NO: 60144 - RNA, 27 nt, synthetic construct
  misc_feature 1..27: note = Leucine-rich repeat-containing protein 59 (38-46)
  source 1..27: mol_type = other RNA
ctgcccaaggccaccatcctcgacctt

SEQ ID NO: 60145 - RNA, 27 nt, synthetic construct
  misc_feature 1..27: note = 26S proteasome non-ATPase regulatory subunit 6 (11-19)
  source 1..27: mol_type = other RNA
ctgcccaagaaccctgacctcagaatc

SEQ ID NO: 60146 - RNA, 27 nt, synthetic construct
  misc_feature 1..27: note = Telomerase protein component 1 (671-679)
  source 1..27: mol_type = other RNA
ctgcccctccttcctggcagaaccgtg

SEQ ID NO: 60147 - RNA, 27 nt, synthetic construct
  misc_feature 1..27: note = Transcription factor Sp3 (515-523)
  source 1..27: mol_type = other RNA
ctgcccaacctccagaccgtgacagtc

SEQ ID NO: 60148 - RNA, 27 nt, synthetic construct
  misc_feature 1..27: note = Eukaryotic initiation factor 4A-III (354-362)
  source 1..27: mol_type = other RNA
ctgcccaacaatagagagctctacatc

SEQ ID NO: 60149 - RNA, 24 nt, synthetic construct
  misc_feature 1..24: note = eIF-2-alpha kinase activator GCN1 (1363-1370)
  source 1..24: mol_type = other RNA
ctgccccctctcgtgccagccatc

SEQ ID NO: 60150 - RNA, 27 nt, synthetic construct
  misc_feature 1..27: note = E3 ubiquitin-protein ligase RNF181 (50-58)
  source 1..27: mol_type = other RNA
ctgccccctccagccgctaagaccgtg

SEQ ID NO: 60151 - RNA, 27 nt, synthetic construct
  misc_feature 1..27: note = Mediator of RNA polymerase II transcription subunit 7 (10-18)
  source 1..27: mol_type = other RNA
ctgccccctccaccgatgcagtacatc

SEQ ID NO: 60152 - RNA, 27 nt, synthetic construct
  misc_feature 1..27: note = Crooked neck-like protein 1 (45-53)
  source 1..27: mol_type = other RNA
ctgccccctccaccgcagcaaaagatc

SEQ ID NO: 60153 - RNA, 27 nt, synthetic construct
  misc_feature 1..27: note = Terminal uridylyltransferase 7 (284-292)
  source 1..27: mol_type = other RNA
ctgccccctccaaccccgagccagatc

SEQ ID NO: 60154 - RNA, 27 nt, synthetic construct
  misc_feature 1..27: note = Transcription elongation factor SPT4 (93-101)
  source 1..27: mol_type = other RNA
ctgccccagggcatcgtgagagagctc

SEQ ID NO: 60155 - RNA, 30 nt, synthetic construct
  misc_feature 1..30: note = Homeobox protein TGIF2 (105-114)
  source 1..30: mol_type = other RNA
ctgcccagaggcagctccccttctgtgctc

SEQ ID NO: 60156 - RNA, 27 nt, synthetic construct
  misc_feature 1..27: note = ATP-dependent RNA helicase DHX36 (300-308)
  source 1..27: mol_type = other RNA
ctgcccagaaagcagggcagcatcctc

SEQ ID NO: 60157 - RNA, 27 nt, synthetic construct
  misc_feature 1..27: note = Carnitine O-palmitoyltransferase 1, liver isoform (171-179)
  source 1..27: mol_type = other RNA
ctgcccagactccctgtgccagccgtc

SEQ ID NO: 60158 - RNA, 30 nt, synthetic construct
  misc_feature 1..30: note = Beta-hexosaminidase subunit beta (8-17)
  source 1..30: mol_type = other RNA
ctgcccagacctccaatgctccttgccctg

SEQ ID NO: 60159 - RNA, 27 nt, synthetic construct
  misc_feature 1..27: note = cGMP-inhibited 3',5'-cyclic phosphodiesterase B (240-248)
  source 1..27: mol_type = other RNA
ctgcccagcgccctcagacctcttctg

SEQ ID NO: 60160 - RNA, 30 nt, synthetic construct
  misc_feature 1..30: note = Polymerase delta-interacting protein 3 (241-250)
  source 1..30: mol_type = other RNA
ctgcccagctccatcagaaccaaggccctc

SEQ ID NO: 60161 - RNA, 24 nt, synthetic construct
  misc_feature 1..24: note = Runt-related transcription factor 2 (116-123)
  source 1..24: mol_type = other RNA
ctgcccgtggccttcaaggtcgtt

SEQ ID NO: 60162 - RNA, 27 nt, synthetic construct
  misc_feature 1..27: note = THUMP domain-containing protein 3 (124-132)
  source 1..27: mol_type = other RNA
ctgccctggagcaaccctctcaaggtg

SEQ ID NO: 60163 - RNA, 27 nt, synthetic construct
  misc_feature 1..27: note = Peptidyl-prolyl cis-trans isomerase FKBP4 (200-208)
  source 1..27: mol_type = other RNA
ctgccctacggcctcgagagagccatc

SEQ ID NO: 60164 - RNA, 24 nt, synthetic construct
  misc_feature 1..24: note = eIF-2-alpha kinase activator GCN1 (2077-2084)
  source 1..24: mol_type = other RNA
ctgccctacctcgtgcctaagctt

SEQ ID NO: 60165 - RNA, 24 nt, synthetic construct
  misc_feature 1..24: note = E3 ubiquitin-protein ligase UBR4 (260-267)
  source 1..24: mol_type = other RNA
ctgccctaccagatcaagaaaatt

SEQ ID NO: 60166 - RNA, 30 nt, synthetic construct
  misc_feature 1..30: note = Lysyl oxidase homolog 3 (408-417)
  source 1..30: mol_type = other RNA
ctgccctacaccggcgccgagacaagaatc

SEQ ID NO: 60167 - RNA, 27 nt, synthetic construct
  misc_feature 1..27: note = Histone acetyltransferase KAT6B (711-719)
  source 1..27: mol_type = other RNA
ctgagcgacctcggcagactttcctac

SEQ ID NO: 60168 - RNA, 27 nt, synthetic construct
  misc_feature 1..27: note = Phosphatidylinositide phosphatase SAC2 (667-675)
  source 1..27: mol_type = other RNA
ctgagcctcgagaaccttgaaaagatc

SEQ ID NO: 60169 - RNA, 33 nt, synthetic construct
  misc_feature 1..33: note = Serpin B6 (76-86)
  source 1..33: mol_type = other RNA
ctgaccgaggtgaacaagacaggcactcagtac

SEQ ID NO: 60170 - RNA, 30 nt, synthetic construct
  misc_feature 1..30: note = Heat shock-related 70 kDa protein 2 (213-222)
  source 1..30: mol_type = other RNA
ctgaccatcgaggacggcattttcgaagtg

SEQ ID NO: 60171 - RNA, 30 nt, synthetic construct
  misc_feature 1..30: note = Heat shock protein HSP 90-beta (36-45)
  source 1..30: mol_type = other RNA
ctggtggacaccggcatcgggatgacaaag

SEQ ID NO: 60172 - RNA, 27 nt, synthetic construct
  misc_feature 1..27: note = Interleukin-32 (97-105)
  source 1..27: mol_type = other RNA
ctggtgcacgccgtccaggctctctgg

SEQ ID NO: 60173 - RNA, 27 nt, synthetic construct
  misc_feature 1..27: note = Protein diaphanous homolog 1 (1090-1098)
  source 1..27: mol_type = other RNA
ctgtacaaggagctcggcgaatatttc

SEQ ID NO: 60174 - RNA, 27 nt, synthetic construct
  misc_feature 1..27: note = AKT-interacting protein (116-124)
  source 1..27: mol_type = other RNA
ctgtaccaggacggcgtgttcaagttt

SEQ ID NO: 60175 - RNA, 24 nt, synthetic construct
  misc_feature 1..24: note = HLA class I histocompatibility antigen, Cw-3 alpha chain (4-11)
  source 1..24: mol_type = other RNA
atggcccccagaaccctgatcctc

SEQ ID NO: 60176 - RNA, 27 nt, synthetic construct
  misc_feature 1..27: note = Charged multivesicular body protein 2a (127-135)
  source 1..27: mol_type = other RNA
atggagttcgaaagacaggccgagatc

SEQ ID NO: 60177 - RNA, 27 nt, synthetic construct
  misc_feature 1..27: note = Bifunctional glutamate/proline-tRNA ligase (487-495)
  source 1..27: mol_type = other RNA
atggagtgggacaagatctgggccttc

SEQ ID NO: 60178 - RNA, 27 nt, synthetic construct
  misc_feature 1..27: note = Sodium-coupled neutral amino acid transporter 1 (2-10)
  source 1..27: mol_type = other RNA
atgcacttcaagagcggcctggagctc

SEQ ID NO: 60179 - RNA, 27 nt, synthetic construct
  misc_feature 1..27: note = Nucleoside diphosphate kinase A (68-76)
  source 1..27: mol_type = other RNA
atgcacagcggccccgtggtcgccatg

SEQ ID NO: 60180 - RNA, 33 nt, synthetic construct
  misc_feature 1..33: note = Cytochrome b (53-63)
  source 1..33: mol_type = other RNA
atgcactacagccccgacgcctccaccgctttc

SEQ ID NO: 60181 - RNA, 27 nt, synthetic construct
  misc_feature 1..27: note = Lysosomal protective protein (1-9)
  source 1..27: mol_type = other RNA
atgatcagagccgctccccctccactg

SEQ ID NO: 60182 - RNA, 27 nt, synthetic construct
  misc_feature 1..27: note = 78 kDa glucose-regulated protein (1-9)
  source 1..27: mol_type = other RNA
atgaagctgagcctcgtggccgctatg

SEQ ID NO: 60183 - RNA, 27 nt, synthetic construct
  misc_feature 1..27: note = Putative uncharacterized protein ZNF436-AS1 (1-9)
  source 1..27: mol_type = other RNA
atgctggccgtgcccgtcagactcaag

SEQ ID NO: 60184 - RNA, 27 nt, synthetic construct
  misc_feature 1..27: note = Transformation/transcription domain-associated protein (1824-1832)
  source 1..27: mol_type = other RNA
atgctggacagcctcagaatctacctt

SEQ ID NO: 60185 - RNA, 33 nt, synthetic construct
  misc_feature 1..33: note = Ubiquitin carboxyl-terminal hydrolase 11 (568-578)
  source 1..33: mol_type = other RNA
atgctgttcggccaccccctccttgtgagcgtc

SEQ ID NO: 60186 - RNA, 24 nt, synthetic construct
  misc_feature 1..24: note = Beta-1-syntrophin (41-48)
  source 1..24: mol_type = other RNA
atgcccatcctgattagcaagata

SEQ ID NO: 60187 - RNA, 27 nt, synthetic construct
  misc_feature 1..27: note = Neuroblast differentiation-associated protein AHNAK (882-890)
  source 1..27: mol_type = other RNA
atgcccaagttcagcatgcctggcttt

SEQ ID NO: 60188 - RNA, 27 nt, synthetic construct
  misc_feature 1..27: note = Neuroblast differentiation-associated protein AHNAK (2766-2774)
  source 1..27: mol_type = other RNA
atgcccaagatcaaaatgcctaagatt

SEQ ID NO: 60189 - RNA, 27 nt, synthetic construct
  misc_feature 1..27: note = Synergin gamma (422-430)
  source 1..27: mol_type = other RNA
atgcccctgcctggcaccaaggccctc

SEQ ID NO: 60190 - RNA, 27 nt, synthetic construct
  misc_feature 1..27: note = Cyclin-dependent kinase 6 (54-62)
  source 1..27: mol_type = other RNA
atgcccctgagcaccatcagagaggtg

SEQ ID NO: 60191 - RNA, 27 nt, synthetic construct
  misc_feature 1..27: note = Type II inositol 3,4-bisphosphate 4-phosphatase (788-796)
  source 1..27: mol_type = other RNA
atgccccctgactacatcagccacttc

SEQ ID NO: 60192 - RNA, 27 nt, synthetic construct
  misc_feature 1..27: note = Double-strand-break repair protein rad21 homolog (468-476)
  source 1..27: mol_type = other RNA
atgccccctccaccgccccagggcgtg

SEQ ID NO: 60193 - RNA, 27 nt, synthetic construct
  misc_feature 1..27: note = Eukaryotic initiation factor 4A-III (311-319)
  source 1..27: mol_type = other RNA
atgccccagaaggagagagaaagcatc

SEQ ID NO: 60194 - RNA, 30 nt, synthetic construct
  misc_feature 1..30: note = Mitotic-spindle organizing protein 2A (99-108)
  source 1..30: mol_type = other RNA
atgcccagacagcctagcgccaccaggctg

SEQ ID NO: 60195 - RNA, 27 nt, synthetic construct
  misc_feature 1..27: note = UDP-N-acetylglucosamine-peptide N-acetylglucosaminyltransferase 110 kDa subunit (774-782)
  source 1..27: mol_type = other RNA
atgcccgtgatccctatgaacaccatt

SEQ ID NO: 60196 - RNA, 27 nt, synthetic construct
  misc_feature 1..27: note = Protein diaphanous homolog 1 (845-853)
  source 1..27: mol_type = other RNA
atgccctaccaggagatcaagaacgtg

SEQ ID NO: 60197 - RNA, 27 nt, synthetic construct
  misc_feature 1..27: note = Prelamin-A/C (199-207)
  source 1..27: mol_type = other RNA
atgagagccaggatgcagcaacagctg

SEQ ID NO: 60198 - RNA, 27 nt, synthetic construct
  misc_feature 1..27: note = Transcobalamin-2 (1-9)
  source 1..27: mol_type = other RNA
atgagacacctgggcgccttcctcttt

SEQ ID NO: 60199 - RNA, 27 nt, synthetic construct
  misc_feature 1..27: note = Suppressor of SWI4 1 homolog (100-108)
  source 1..27: mol_type = other RNA
atgagactgcccggcgggcctaccctc

SEQ ID NO: 60200 - RNA, 27 nt, synthetic construct
  misc_feature 1..27: note = Calcium/calmodulin-dependent protein kinase II inhibitor 1 (17-25)
  source 1..27: mol_type = other RNA
atgaccgacaaggccccccctggcgtg

SEQ ID NO: 60201 - RNA, 27 nt, synthetic construct
  misc_feature 1..27: note = Insulin receptor substrate 2 (543-551)
  source 1..27: mol_type = other RNA
atgaccatggacagacccctgagccac

SEQ ID NO: 60202 - RNA, 27 nt, synthetic construct
  misc_feature 1..27: note = Necdin (58-66)
  source 1..27: mol_type = other RNA
atggtgaaggacgtcatcggcagctac

SEQ ID NO: 60203 - RNA, 36 nt, synthetic construct
  misc_feature 1..36: note = ATP-citrate synthase (529-540)
  source 1..36: mol_type = other RNA
atggtgtaccccttcaccggcgaccacaagcagaaa

SEQ ID NO: 60204 - RNA, 27 nt, synthetic construct
  misc_feature 1..27: note = Melanoma-associated antigen D2 (110-118)
  source 1..27: mol_type = other RNA
aacgccgacccccaggctgtgaccatg

SEQ ID NO: 60205 - RNA, 27 nt, synthetic construct
  misc_feature 1..27: note = FERM domain-containing protein 8 (198-206)
  source 1..27: mol_type = other RNA
aacgcctacagacaggtgcaagaggtc

SEQ ID NO: 60206 - RNA, 27 nt, synthetic construct
  misc_feature 1..27: note = Rapamycin-insensitive companion of mTOR (139-147)
  source 1..27: mol_type = other RNA
aacgaggtggaaagaacccaggccctg

SEQ ID NO: 60207 - RNA, 27 nt, synthetic construct
  misc_feature 1..27: note = 26S protease regulatory subunit 4 (119-127)
  source 1..27: mol_type = other RNA
aaccacgccatcgtgagcacctccgtc

SEQ ID NO: 60208 - RNA, 24 nt, synthetic construct
  misc_feature 1..24: note = Serine/threonine-protein phosphatase 2A catalytic subunit beta isoform (229-236)
  source 1..24: mol_type = other RNA
aaccacgccaatggcctgaccctc

SEQ ID NO: 60209 - RNA, 30 nt, synthetic construct
  misc_feature 1..30: note = Transcription factor 4 (402-411)
  source 1..30: mol_type = other RNA
aaccacgccgtgggccccagcaccgctatg

SEQ ID NO: 60210 - RNA, 27 nt, synthetic construct
  misc_feature 1..27: note = Translationally-controlled tumor protein (75-83)
  source 1..27: mol_type = other RNA
aaccaccatctgcaggagaccagcttc

SEQ ID NO: 60211 - RNA, 27 nt, synthetic construct
  misc_feature 1..27: note = SHC-transforming protein 4 (284-292)
  source 1..27: mol_type = other RNA
aaccaccatatgcagagcatctccttc

SEQ ID NO: 60212 - RNA, 27 nt, synthetic construct
  misc_feature 1..27: note = E3 ubiquitin-protein ligase synoviolin (308-316)
  source 1..27: mol_type = other RNA
aaccacatcttccataccagctgcctg

SEQ ID NO: 60213 - RNA, 27 nt, synthetic construct
  misc_feature 1..27: note = Dedicator of cytokinesis protein 8 (737-745)
  source 1..27: mol_type = other RNA
aaccacctggagaagttctttaccctc

SEQ ID NO: 60214 - RNA, 27 nt, synthetic construct
  misc_feature 1..27: note = Cytochrome c oxidase subunit 6C (21-29)
  source 1..27: mol_type = other RNA
aaccacatggccgtggctttcgtcctg

SEQ ID NO: 60215 - RNA, 27 nt, synthetic construct
  misc_feature 1..27: note = Ankyrin repeat domain-containing protein 54 (187-195)
  source 1..27: mol_type = other RNA
aaccacgtgcccgtcatcaccacactg

SEQ ID NO: 60216 - RNA, 30 nt, synthetic construct
  misc_feature 1..30: note = Transcription factor jun-B (150-159)
  source 1..30: mol_type = other RNA
aaccacgtgaccccccctaatgtcagcctg

SEQ ID NO: 60217 - RNA, 27 nt, synthetic construct
  misc_feature 1..27: note = Periodic tryptophan protein 2 homolog (866-874)
  source 1..27: mol_type = other RNA
aaccactacaatatgcagtatgccctg

SEQ ID NO: 60218 - RNA, 27 nt, synthetic construct
  misc_feature 1..27: note = Alpha-2-macroglobulin receptor-associated protein (292-300)
  source 1..27: mol_type = other RNA
aaccactaccagaagcaactggagatc

SEQ ID NO: 60219 - RNA, 27 nt, synthetic construct
  misc_feature 1..27: note = Protein SCAF11 (912-920)
  source 1..27: mol_type = other RNA
aacatcttcccctaccctgtgggcgtc

SEQ ID NO: 60220 - RNA, 27 nt, synthetic construct
  misc_feature 1..27: note = RUS1 family protein C16orf58 (197-205)
  source 1..27: mol_type = other RNA
aacctggccaagtgcatcgtgagcgtc

SEQ ID NO: 60221 - RNA, 27 nt, synthetic construct
  misc_feature 1..27: note = Pterin-4-alpha-carbinolamine dehydratase (19-27)
  source 1..27: mol_type = other RNA
aacctggccagcttcatcgagcaggtg

SEQ ID NO: 60222 - RNA, 27 nt, synthetic construct
  misc_feature 1..27: note = E3 ubiquitin-protein ligase RNF123 (595-603)
  source 1..27: mol_type = other RNA
aacctgttcgacagagtggtcaccctc

SEQ ID NO: 60223 - RNA, 27 nt, synthetic construct
  misc_feature 1..27: note = Plastin-3 (327-335)
  source 1..27: mol_type = other RNA
aacctgttcaataagtaccccgccctc

SEQ ID NO: 60224 - RNA, 30 nt, synthetic construct
  misc_feature 1..30: note = THO complex subunit 2 (162-171)
  source 1..30: mol_type = other RNA
aacctgatcgacctcgatgacctttacgtg

SEQ ID NO: 60225 - RNA, 27 nt, synthetic construct
  misc_feature 1..27: note = Tyrosine-protein phosphatase non-receptor type 13 (472-480)
  source 1..27: mol_type = other RNA
aacctgatcaatcaggagattatgctc

SEQ ID NO: 60226 - RNA, 27 nt, synthetic construct
  misc_feature 1..27: note = Trifunctional purine biosynthetic protein adenosine-3 (39-47)
  source 1..27: mol_type = other RNA
aacctgatcagcgccctcgaggaagct

SEQ ID NO: 60227 - RNA, 27 nt, synthetic construct
  misc_feature 1..27: note = Protein virilizer homolog (623-631)
  source 1..27: mol_type = other RNA
aacctgctcgaggaagtgttccacctt

SEQ ID NO: 60228 - RNA, 27 nt, synthetic construct
  misc_feature 1..27: note = Chloride intracellular channel protein 5 (187-195)
  source 1..27: mol_type = other RNA
aacctgctccccaagcttcacgtggtc

SEQ ID NO: 60229 - RNA, 27 nt, synthetic construct
  misc_feature 1..27: note = PHD finger protein 20-like protein 1 (210-218)
  source 1..27: mol_type = other RNA
aacctgctcacccacatcgagaatgtg

SEQ ID NO: 60230 - RNA, 27 nt, synthetic construct
  misc_feature 1..27: note = AP-3 complex subunit mu-2 (268-276)
  source 1..27: mol_type = other RNA
aacctggtggccatccccgtctacgtt

SEQ ID NO: 60231 - RNA, 30 nt, synthetic construct
  misc_feature 1..30: note = 55 kDa erythrocyte membrane protein (337-346)
  source 1..30: mol_type = other RNA
aacatgttcggcaccaagtttgagacagtg

SEQ ID NO: 60232 - RNA, 27 nt, synthetic construct
  misc_feature 1..27: note = Tetratricopeptide repeat protein 4 (260-268)
  source 1..27: mol_type = other RNA
aacccccacggcgccagactgagcctc

SEQ ID NO: 60233 - RNA, 27 nt, synthetic construct
  misc_feature 1..27: note = General transcription factor 3C polypeptide 1 (336-344)
  source 1..27: mol_type = other RNA
aaccccaaggagagctcctcttcactg

SEQ ID NO: 60234 - RNA, 33 nt, synthetic construct
  misc_feature 1..33: note = Talin-1 (1623-1633)
  source 1..33: mol_type = other RNA
aaccccagagaccctccaagctggtccgtgctg

SEQ ID NO: 60235 - RNA, 33 nt, synthetic construct
  misc_feature 1..33: note = Roundabout homolog 1 (1497-1507)
  source 1..33: mol_type = other RNA
aaccccagagaccctagctcctcttcaagtatg

SEQ ID NO: 60236 - RNA, 27 nt, synthetic construct
  misc_feature 1..27: note = Clathrin interactor 1 (379-387)
  source 1..27: mol_type = other RNA
aaccaggcccccagcggccctgtggct

SEQ ID NO: 60237 - RNA, 27 nt, synthetic construct
  misc_feature 1..27: note = Coiled-coil domain-containing protein 134 (154-162)
  source 1..27: mol_type = other RNA
aaccagggcccccacagccctatcctg

SEQ ID NO: 60238 - RNA, 27 nt, synthetic construct
  misc_feature 1..27: note = Transcription factor p65 (186-194)
  source 1..27: mol_type = other RNA
aacagagcccccaataccgctgagctg

SEQ ID NO: 60239 - RNA, 27 nt, synthetic construct
  misc_feature 1..27: note = Putative methyltransferase NSUN3 (57-65)
  source 1..27: mol_type = other RNA
aacagattcaattacccctttgagctg

SEQ ID NO: 60240 - RNA, 27 nt, synthetic construct
  misc_feature 1..27: note = Toll-like receptor 9 (425-433)
  source 1..27: mol_type = other RNA
aacagaatcagcggcgcctccgagctg

SEQ ID NO: 60241 - RNA, 27 nt, synthetic construct
  misc_feature 1..27: note Dolichyl-diphosphooligosaccharide-proteinosyltransferase subunit 2 (618-626)
  source 1..27: mol_type = other RNA
aacagaatgctggcccagcaagctgtg

SEQ ID NO: 60242 - RNA, 27 nt, synthetic construct
  misc_feature 1..27: note Dolichyl-diphosphooligosaccharide-proteinosyltransferase subunit 2 (358-366)
  source 1..27: mol_type = other RNA
aacgtggccgacgtcgttatcaagttc

SEQ ID NO: 60243 - RNA, 27 nt, synthetic construct
  misc_feature 1..27: note = Calcium homeostasis endoplasmic reticulum protein (14-22)
  source 1..27: mol_type = other RNA
aacgtgatcgacaagctggcccagttc

SEQ ID NO: 60244 - RNA, 30 nt, synthetic construct; identical to SEQ ID NO: 36017
  misc_feature 1..30: note = E3 ubiquitin-protein ligase DTX3L (376-385)
  source 1..30: mol_type = other RNA

SEQ ID NO: 60245 - RNA, 27 nt, synthetic construct
  misc_feature 1..27: note = U5 small nuclear ribonucleoprotein 200 kDa helicase (1517-1525)
  source 1..27: mol_type = other RNA
aacgtgagacccgtccctctggagctc

SEQ ID NO: 60246 - RNA, 27 nt, synthetic construct
  misc_feature 1..27: note = Arf-GAP with SH3 domain, ANK repeat and PH domain-containing protein 1 (87-95)
  source 1..27: mol_type = other RNA
aactacgcccaggtgctggacaagttc

SEQ ID NO: 60247 - RNA, 27 nt, synthetic construct
  misc_feature 1..27: note = GRB2-related adapter protein (100-108)
  source 1..27: mol_type = other RNA
aactacggcgaccaggtgcaacacttc

SEQ ID NO: 60248 - RNA, 27 nt, synthetic construct
  misc_feature 1..27: note = Heat shock protein HSP 90-alpha (249-257)
  source 1..27: mol_type = other RNA
aactacaagaaattctatgagcagttt

SEQ ID NO: 60249 - RNA, 27 nt, synthetic construct
  misc_feature 1..27: note = Fructosamine-3-kinase (284-292)
  source 1..27: mol_type = other RNA
aactacctgaatcactggaaccatttc

SEQ ID NO: 60250 - RNA, 33 nt, synthetic construct
  misc_feature 1..33: note = SEC14-like protein 1 (424-434)
  source 1..33: mol_type = other RNA
aactaccccgagaccctgggcagactccttatc

SEQ ID NO: 60251 - RNA, 30 nt, synthetic construct
  misc_feature 1..30: note = TATA element modulatory factor (751-760)
  source 1..30: mol_type = other RNA
caggaggccgaaaacagaaatcaagagctg

SEQ ID NO: 60252 - RNA, 27 nt, synthetic construct
  misc_feature 1..27: note = Threonine-tRNA ligase, cytoplasmic (318-326)
  source 1..27: mol_type = other RNA
caggagctgtacttctttcacgaactc

SEQ ID NO: 60253 - RNA, 30 nt, synthetic construct
  misc_feature 1..30: note = Nuclear autoantigen Sp-100 (132-141)
  source 1..30: mol_type = other RNA
caggagtaccccgacctgatccacatttat

SEQ ID NO: 60254 - RNA, 27 nt, synthetic construct
  misc_feature 1..27: note = Myosin-9 (709-717)
  source 1..27: mol_type = other RNA
cagggcttccccaacagagtggtcttt

SEQ ID NO: 60255 - RNA, 27 nt, synthetic construct
  misc_feature 1..27: note = MOB kinase activator 1A (165-173)
  source 1..27: mol_type = other RNA
cagcacttcgacagcgtgatgcaactg

SEQ ID NO: 60256 - RNA, 27 nt, synthetic construct
  misc_feature 1..27: note = ATP-citrate synthase (996-1004)
  source 1..27: mol_type = other RNA
cagcacttccccgccacccctctgctc

SEQ ID NO: 60257 - RNA, 30 nt, synthetic construct
  misc_feature 1..30: note = Cullin-3 (489-498)
  source 1..30: mol_type = other RNA
cagcacctgcaagccaccggcgtgagcctc

SEQ ID NO: 60258 - RNA, 27 nt, synthetic construct
  misc_feature 1..27: note = Angio-associated migratory cell protein (356-364)
  source 1..27: mol_type = other RNA
cagcaccaaagcggcatcgtgcagctg

SEQ ID NO: 60259 - RNA, 27 nt, synthetic construct
  misc_feature 1..27: note = Protein PML (767-775)
  source 1..27: mol_type = other RNA
cagcacgtgtaccccttcagctccctg

SEQ ID NO: 60260 - RNA, 27 nt, synthetic construct
  misc_feature 1..27: note = Solute carrier family 41 member 3 (91-99)
  source 1..27: mol_type = other RNA
cagcactggcccgtgttcgtcgaggtt

SEQ ID NO: 60261 - RNA, 27 nt, synthetic construct
  misc_feature 1..27: note = Putative Polycomb group protein ASXL2 (1383-1391)
  source 1..27: mol_type = other RNA
cagatcctgcccaagcctctcaccaaa

SEQ ID NO: 60262 - RNA, 27 nt, synthetic construct
  misc_feature 1..27: note = Programmed cell death 6-interacting protein (435-443)
  source 1..27: mol_type = other RNA
cagctgatcaaggagctccccgaactt

SEQ ID NO: 60263 - RNA, 27 nt, synthetic construct
  misc_feature 1..27: note = Dynactin subunit 1 (1167-1175)
  source 1..27: mol_type = other RNA
cagctgatggagcaagtggcccagctc

SEQ ID NO: 60264 - RNA, 27 nt, synthetic construct
  misc_feature 1..27: note = E3 ubiquitin-protein ligase DTX3L (447-455)
  source 1..27: mol_type = other RNA
cagctgatgagagaggtgctccttctg

SEQ ID NO: 60265 - RNA, 27 nt, synthetic construct
  misc_feature 1..27: note = Non-specific lipid-transfer protein (539-547)
  source 1..27: mol_type = other RNA
cagctgcaacccggcaacgccaagctc

SEQ ID NO: 60266 - RNA, 27 nt, synthetic construct
  misc_feature 1..27: note = Poly (ADP-ribose) polymerase 14 (218-226)
  source 1..27: mol_type = other RNA
cagctgagccccagactccttgaggtg

SEQ ID NO: 60267 - RNA, 27 nt, synthetic construct
  misc_feature 1..27: note = Protein ZGRF1 (2047-2055)
  source 1..27: mol_type = other RNA
cagctgtggggcagagtgatccaacac

SEQ ID NO: 60268 - RNA, 27 nt, synthetic construct
  misc_feature 1..27: note = Myosin-10 (655-663)
  source 1..27: mol_type = other RNA
cagctgtacaaggagagcctcaccaaa

SEQ ID NO: 60269 - RNA, 27 nt, synthetic construct
  misc_feature 1..27: note = Signal recognition particle subunit SRP72 (247-255)
  source 1..27: mol_type = other RNA
cagctgtacaaccaaatcattaagctc

SEQ ID NO: 60270 - RNA, 27 nt, synthetic construct
  misc_feature 1..27: note = Casein kinase I isoform alpha (119-127)
  source 1..27: mol_type = other RNA
cagatgatcagcagaattgagtacgtg

SEQ ID NO: 60271 - RNA, 30 nt, synthetic construct
  misc_feature 1..30: note = rRNA 2'-O-methyltransferase fibrillarin (236-245)
  source 1..30: mol_type = other RNA
cagcccgaccaaaccagaatcgtggccctg

SEQ ID NO: 60272 - RNA, 27 nt, synthetic construct
  misc_feature 1..27: note = Eukaryotic translation initiation factor 4 gamma 3 (664-672)
  source 1..27: mol_type = other RNA
cagcccaagctgcctatgagaaccctc

SEQ ID NO: 60273 - RNA, 27 nt, synthetic construct
  misc_feature 1..27: note = Activating transcription factor 7-interacting protein 1 (787-795)
  source 1..27: mol_type = other RNA
cagcccctgcctgtgatcctccacgtc

SEQ ID NO: 60274 - RNA, 27 nt, synthetic construct
  misc_feature 1..27: note = Transmembrane emp24 domain-containing protein 5 (50-58)
  source 1..27: mol_type = other RNA
cagcccatgcctctgaaggccagcctc

SEQ ID NO: 60275 - RNA, 27 nt, synthetic construct
  misc_feature 1..27: note = E3 ubiquitin-protein ligase RNF31 (125-133)
  source 1..27: mol_type = other RNA
cagcccagacctcaaagcacctccctg

SEQ ID NO: 60276 - RNA, 30 nt, synthetic construct
  misc_feature 1..30: note = Nuclear factor of activated T-cells, cytoplasmic 2 (486-495)
  source 1..30: mol_type = other RNA
cagccctactatcctcaacacccaatggtg

SEQ ID NO: 60277 - RNA, 27 nt, synthetic construct
  misc_feature 1..27: note = Threonylcarbamoyladenosine tRNA methylthiotransferase (88-96)
  source 1..27: mol_type = other RNA
cagcaaatcgacagagtggtcgaggtt

SEQ ID NO: 60278 - RNA, 27 nt, synthetic construct
  misc_feature 1..27: note = 60S ribosomal protein L26 (65-73)
  source 1..27: mol_type = other RNA
cagcaaatcggcaaggtggtccaggtt

SEQ ID NO: 60279 - RNA, 27 nt, synthetic construct
  misc_feature 1..27: note = Long-chain-fatty-acid-CoA ligase 3 (405-413)
  source 1..27: mol_type = other RNA
cagagaaacctgttcatcctcgcctac

SEQ ID NO: 60280 - RNA, 27 nt, synthetic construct
  misc_feature 1..27: note = B-cell receptor-associated protein 29 (101-109)
  source 1..27: mol_type = other RNA
cagagaaacctgtacatcagcggcttc

SEQ ID NO: 60281 - RNA, 33 nt, synthetic construct
  misc_feature 1..33: note = Nucleolar RNA helicase 2 (558-568)
  source 1..33: mol_type = other RNA
cagagaagcctgatcaactccaatgtgggcttc

SEQ ID NO: 60282 - RNA, 27 nt, synthetic construct
  misc_feature 1..27: note = GPI transamidase component PIG-T (351-359)
  source 1..27: mol_type = other RNA
cagagatacgtgagcggctatgggctg

SEQ ID NO: 60283 - RNA, 36 nt, synthetic construct
  misc_feature 1..36: note = Zinc finger protein 143 (64-75)
  source 1..36: mol_type = other RNA
caggtgatccaactggaggacggcagcgccgcttac

SEQ ID NO: 60284 - RNA, 27 nt, synthetic construct
  misc_feature 1..27: note = mRNA cap guanine-N7 methyltransferase (448-456)
  source 1..27: mol_type = other RNA
caggtgagactgcccctcggcaccctt

SEQ ID NO: 60285 - RNA, 27 nt, synthetic construct
  misc_feature 1..27: note = Elongation of very long chain fatty acids protein 1 (201-209)
  source 1..27: mol_type = other RNA
cagtaccccgtgatcattcacctgata

SEQ ID NO: 60286 - RNA, 27 nt, synthetic construct
  misc_feature 1..27: note = Arf-GAP with SH3 domain, ANK repeat and PH domain-containing protein 2 (74-82)
  source 1..27: mol_type = other RNA
cagtacacccaagccctggagaagttc

SEQ ID NO: 60287 - RNA, 27 nt, synthetic construct
  misc_feature 1..27: note = Telomerase protein component 1 (820-828)
  source 1..27: mol_type = other RNA
agagccgctccccacaggatcagcctg

SEQ ID NO: 60288 - RNA, 27 nt, synthetic construct
  misc_feature 1..27: note = MICOS complex subunit MIC60 (432-440)
  source 1..27: mol_type = other RNA
agagccttcgacagcgctgtggcaaag

SEQ ID NO: 60289 - RNA, 30 nt, synthetic construct
  misc_feature 1..30: note = Uromodulin (615-624)
  source 1..30: mol_type = other RNA
agagccttcagctccctgggcctccttaag

SEQ ID NO: 60290 - RNA, 27 nt, synthetic construct
  misc_feature 1..27: note = Signal transducer CD24 (3-11)
  source 1..27: mol_type = other RNA
agagccatggtggctaggctgggcctc

SEQ ID NO: 60291 - RNA, 27 nt, synthetic construct
  misc_feature 1..27: note = Eukaryotic translation initiation factor 4H (185-193)
  source 1..27: mol_type = other RNA
agagcccagaggccccggctgcaactc

SEQ ID NO: 60292 - RNA, 27 nt, synthetic construct
  misc_feature 1..27: note = Cytochrome b-c1 complex subunit 8 (25-33)
  source 1..27: mol_type = other RNA
agagcctacccccacgtgttcaccaag

SEQ ID NO: 60293 - RNA, 30 nt, synthetic construct
  misc_feature 1..30: note = CLIP-associating protein 1 (519-528)
  source 1..30: mol_type = other RNA
agagaggccgaacacctgtaccataccctc

SEQ ID NO: 60294 - RNA, 27 nt, synthetic construct
  misc_feature 1..27: note = Integrin alpha-6 (29-37)
  source 1..27: mol_type = other RNA
agagaggacaacgtgatcaggaagtac

SEQ ID NO: 60295 - RNA, 27 nt, synthetic construct
  misc_feature 1..27: note = Eukaryotic initiation factor 4A-III (260-268)
  source 1..27: mol_type = other RNA
agagaggaatggaagttcgacaccctg

SEQ ID NO: 60296 - RNA, 33 nt, synthetic construct
  misc_feature 1..33: note = TCF3 fusion partner (90-100)
  source 1..33: mol_type = other RNA
agagagatcgaacaggtgaacgagagggtcctg

SEQ ID NO: 60297 - RNA, 33 nt, synthetic construct
  misc_feature 1..33: note = Ataxin-2-like protein (324-334)
  source 1..33: mol_type = other RNA
agagagatcgaaagctccccccagtacaggctg

SEQ ID NO: 60298 - RNA, 33 nt, synthetic construct
  misc_feature 1..33: note = NF-kappa-B essential modulator (319-329)
  source 1..33: mol_type = other RNA
agagagaagctggccgaaaaaaaggagctcctt

SEQ ID NO: 60299 - RNA, 30 nt, synthetic construct
  misc_feature 1..30: note = ER membrane protein complex subunit 7 (192-201)
  source 1..30: mol_type = other RNA
agagagatggaacagagcatgaacatgctg

SEQ ID NO: 60300 - RNA, 33 nt, synthetic construct
  misc_feature 1..33: note = HMG box-containing protein 1 (104-114)
  source 1..33: mol_type = other RNA
agagagaacgaagtggactggctgaccgagctc

SEQ ID NO: 60301 - RNA, 30 nt, synthetic construct
  misc_feature 1..30: note = Kinesin-like protein KIFC1 (639-648)
  source 1..30: mol_type = other RNA
agagagacccaggccatcaacagctccctg

SEQ ID NO: 60302 - RNA, 27 nt, synthetic construct
  misc_feature 1..27: note = Translation machinery-associated protein 16 (109-117)
  source 1..27: mol_type = other RNA
agagagaccgtgatcaagcagacaatg

SEQ ID NO: 60303 - RNA, 30 nt, synthetic construct
  misc_feature 1..30: note = Protein timeless homolog (623-632)
  source 1..30: mol_type = other RNA
agagaggtgtggcccgaaggcgacgtcttc

SEQ ID NO: 60304 - RNA, 27 nt, synthetic construct
  misc_feature 1..27: note = E3 SUMO-protein ligase PIAS3 (145-153)
  source 1..27: mol_type = other RNA
agattcgaggaagcccactttaccttc

SEQ ID NO: 60305 - RNA, 27 nt, synthetic construct
  misc_feature 1..27: note = Tubulin alpha-1C chain (334-342)
  source 1..27: mol_type = other RNA
agaatccacttccccctggccacctac

SEQ ID NO: 60306 - RNA, 27 nt, synthetic construct
  misc_feature 1..27: note = Poly (ADP-ribose) polymerase 4 (631-639)
  source 1..27: mol_type = other RNA
agaatcattgacaccgtggcccaggtc

SEQ ID NO: 60307 - RNA, 27 nt, synthetic construct
  misc_feature 1..27: note = Moesin (275-283)
  source 1..27: mol_type = other RNA
agaatcaacaagaggattctggccctc

SEQ ID NO: 60308 - RNA, 27 nt, synthetic construct
  misc_feature 1..27: note = Valine-tRNA ligase (530-538)
  source 1..27: mol_type = other RNA
agaatccccgcctacttcgtgaccgtc

SEQ ID NO: 60309 - RNA, 36 nt, synthetic construct
  misc_feature 1..36: note = COMM domain-containing protein 9 (145-156)
  source 1..36: mol_type = other RNA
agaatcagggaccagctgagcgccgtggcttccaag

SEQ ID NO: 60310 - RNA, 27 nt, synthetic construct
  misc_feature 1..27: note = SUN domain-containing protein 2 (117-125)
  source 1..27: mol_type = other RNA
agaatcaggcccaccgccgtgacactg

SEQ ID NO: 60311 - RNA, 30 nt, synthetic construct
  misc_feature 1..30: note = 28S ribosomal protein S21, mitochondrial (50-59)
  source 1..30: mol_type = other RNA
agaatctacaacatggagatggccaggaag

SEQ ID NO: 60312 - RNA, 30 nt, synthetic construct
  misc_feature 1..30: note = Heterogeneous nuclear ribonucleoprotein A1 (14-23)
  source 1..30: mol_type = other RNA
agaaagctgttcatcggcgggctcagcttt

SEQ ID NO: 60313 - RNA, 30 nt, synthetic construct
  misc_feature 1..30: note = Catenin beta-1 (124-133)
  source 1..30: mol_type = other RNA
agactggccgagcccagccagatgctcaag

SEQ ID NO: 60314 - RNA, 27 nt, synthetic construct
  misc_feature 1..27: note = Kalirin (2002-2010)
  source 1..27: mol_type = other RNA
agactggcccagctcttcatcaagcac

SEQ ID NO: 60315 - RNA, 27 nt, synthetic construct
  misc_feature 1..27: note = Thyroid adenoma-associated protein (345-353)
  source 1..27: mol_type = other RNA
agactggccagcaaggtgatctcccac

SEQ ID NO: 60316 - RNA, 27 nt, synthetic construct
  misc_feature 1..27: note = Prostaglandin F2 receptor negative regulator (3-11)
  source 1..27: mol_type = other RNA
agactggccagcaggcccctccttctg

SEQ ID NO: 60317 - RNA, 27 nt, synthetic construct
  misc_feature 1..27: note = Transcription factor 4 (368-376)
  source 1..27: mol_type = other RNA
agactggacgatgccatccacgtgctc

SEQ ID NO: 60318 - RNA, 27 nt, synthetic construct
  misc_feature 1..27: note = Fanconi anemia group D2 protein (253-261)
  source 1..27: mol_type = other RNA
agactggaccccaacttcctccttaag

SEQ ID NO: 60319 - RNA, 33 nt, synthetic construct
  misc_feature 1..33: note = Ubiquitin carboxyl-terminal hydrolase 19 (1354-1364)
  source 1..33: mol_type = other RNA
agactgttcgacgatagcaccgtgacaactgtc

SEQ ID NO: 60320 - RNA, 33 nt, synthetic construct
  misc_feature 1..33: note = BTB/POZ domain-containing protein 2 (2-12)
  source 1..33: mol_type = other RNA
agactgttcgacgagccccagctcgccagcctt

SEQ ID NO: 60321 - RNA, 27 nt, synthetic construct
  misc_feature 1..27: note = Heat shock protein beta-1 (27-35)
  source 1..27: mol_type = other RNA
agactgttcgaccaggcctttggcctc

SEQ ID NO: 60322 - RNA, 27 nt, synthetic construct
  misc_feature 1..27: note = V-type proton ATPase subunit S1 (315-323)
  source 1..27: mol_type = other RNA
agactgttcggcaccacagtgactttt

SEQ ID NO: 60323 - RNA, 30 nt, synthetic construct
  misc_feature 1..30: note = V-type proton ATPase subunit S1 (225-234)
  source 1..30: mol_type = other RNA
agactgttcggcaccacagtgacttttaag

SEQ ID NO: 60324 - RNA, 30 nt, synthetic construct
  misc_feature 1..30: note = Dol-P-Man:Man(5)GlcNAc(2)-PP-Dol alpha-1,3-mannosyltransferase (123-132)
  source 1..30: mol_type = other RNA
agactgttcaacgaccccgtggccatggtc

SEQ ID NO: 60325 - RNA, 27 nt, synthetic construct
  misc_feature 1..27: note = tRNA-dihydrouridine(20) synthase (NAD(P)+)-like (362-370)
  source 1..27: mol_type = other RNA
agactgttcagctccatcgtgaccgtc

SEQ ID NO: 60326 - RNA, 27 nt, synthetic construct
  misc_feature 1..27: note = Surfeit locus protein 6 (121-129)
  source 1..27: mol_type = other RNA
agactgcacgagaagatccaggaagcc

SEQ ID NO: 60327 - RNA, 27 nt, synthetic construct
  misc_feature 1..27: note = Proteasome subunit alpha type-4 (20-28)
  source 1..27: mol_type = other RNA
agactgatcgcccagaggtacctcctt

SEQ ID NO: 60328 - RNA, 27 nt, synthetic construct
  misc_feature 1..27: note = Lysine-specific demethylase 5B (975-983)
  source 1..27: mol_type = other RNA
agactgatcgacctcggcgtggggctt

SEQ ID NO: 60329 - RNA, 30 nt, synthetic construct
  misc_feature 1..30: note = Rho GTPase-activating protein 19 (65-74)
  source 1..30: mol_type = other RNA
agactgatcgacctccccggcaccgagctt

SEQ ID NO: 60330 - RNA, 27 nt, synthetic construct
  misc_feature 1..27: note = General transcription factor 3C polypeptide 1 (377-385)
  source 1..27: mol_type = other RNA
agactgatcgagagcctcttcaccatt

SEQ ID NO: 60331 - RNA, 33 nt, synthetic construct
  misc_feature 1..33: note = Heat shock 70 kDa protein 1-like (51-61)
  source 1..33: mol_type = other RNA
agactgatcggcgacgccgctaagaaccaggtg

SEQ ID NO: 60332 - RNA, 27 nt, synthetic construct
  misc_feature 1..27: note = Short coiled-coil protein (55-63)
  source 1..27: mol_type = other RNA
agactgatcaaccaggtgctcgagctt

SEQ ID NO: 60333 - RNA, 27 nt, synthetic construct
  misc_feature 1..27: note = Importin-9 (241-249)
  source 1..27: mol_type = other RNA
agactgatccccaccctcgtgagcatt

SEQ ID NO: 60334 - RNA, 27 nt, synthetic construct
  misc_feature 1..27: note = Eukaryotic translation initiation factor 4E (61-69)
  source 1..27: mol_type = other RNA
agactgatcagcaagttcgacaccgtg

SEQ ID NO: 60335 - RNA, 27 nt, synthetic construct
  misc_feature 1..27: note = C-X-C motif chemokine 14 (14-22)
  source 1..27: mol_type = other RNA
agactgctcgccgctgcacttctgttg

SEQ ID NO: 60336 - RNA, 30 nt, synthetic construct
  misc_feature 1..30: note = Engulfment and cell motility protein 1 (697-706)
  source 1..30: mol_type = other RNA
agactgctcgaccttgagaacatccagatt

SEQ ID NO: 60337 - RNA, 27 nt, synthetic construct
  misc_feature 1..27: note = PX domain-containing protein kinase-like protein (219-227)
  source 1..27: mol_type = other RNA
agactgctcgaccttgagaacagcctg

SEQ ID NO: 60338 - RNA, 27 nt, synthetic construct
  misc_feature 1..27: note = Collagen alpha-1(XVIII) chain (14-22)
  source 1..27: mol_type = other RNA
agactgctcgacgtgcttgcccccctg

SEQ ID NO: 60339 - RNA, 27 nt, synthetic construct
  misc_feature 1..27: note = Baculoviral IAP repeat-containing protein 6 (2177-2185)
  source 1..27: mol_type = other RNA
agactgctcgactacgtggccaccgtc

SEQ ID NO: 60340 - RNA, 27 nt, synthetic construct
  misc_feature 1..27: note = Lysine-specific histone demethylase 1A (180-188)
  source 1..27: mol_type = other RNA
agactgctcgaggccaccagctacctt

SEQ ID NO: 60341 - RNA, 27 nt, synthetic construct
  misc_feature 1..27: note = Isochorismatase domain-containing protein 2 (49-57)
  source 1..27: mol_type = other RNA
agactgctcgaggtgcccgtcatgctt

SEQ ID NO: 60342 - RNA, 36 nt, synthetic construct
  misc_feature 1..36: note = Histone H2B type 1-K (100-111)
  source 1..36: mol_type = other RNA
agactgctccttcccggcgagctggccaagcacgct

SEQ ID NO: 60343 - RNA, 30 nt, synthetic construct
  misc_feature 1..30: note = Attractin (51-60)
  source 1..30: mol_type = other RNA
agactgctcagcccccctcttaggccacgg

SEQ ID NO: 60344 - RNA, 27 nt, synthetic construct
  misc_feature 1..27: note = Heat shock protein 105 kDa (183-191)
  source 1..27: mol_type = other RNA
agactgatgaacgacatgaccgccgtg

SEQ ID NO: 60345 - RNA, 27 nt, synthetic construct
  misc_feature 1..27: note = Heat shock 70 kDa protein 4L (128-136)
  source 1..27: mol_type = other RNA
agactgatgaacgagaccacagccgtg

SEQ ID NO: 60346 - RNA, 33 nt, synthetic construct
  misc_feature 1..33: note = Heat shock 70 kDa protein 4L (128-138)
  source 1..33: mol_type = other RNA
agactgatgaacgagaccacagccgtggctctc

SEQ ID NO: 60347 - RNA, 27 nt, synthetic construct
  misc_feature 1..27: note = Cyclin-D1-binding protein 1 (55-63)
  source 1..27: mol_type = other RNA
agactgaacgaggccgctgtgaccgtc

SEQ ID NO: 60348 - RNA, 30 nt, synthetic construct
  misc_feature 1..30: note = Coatomer subunit gamma-2 (708-717)
  source 1..30: mol_type = other RNA
agactgcccgacgatgaccctaccgccgtg

SEQ ID NO: 60349 - RNA, 27 nt, synthetic construct
  misc_feature 1..27: note = Glyoxylate reductase/hydroxypyruvate reductase (125-133)
  source 1..27: mol_type = other RNA
agactgcccgaggccatcgaagaggtg

SEQ ID NO: 60350 - RNA, 27 nt, synthetic construct
  misc_feature 1..27: note = EH domain-containing protein 4 (337-345)
  source 1..27: mol_type = other RNA
agactgcccgagatctacattcagctc

SEQ ID NO: 60351 - RNA, 27 nt, synthetic construct
  misc_feature 1..27: note = Sorting nexin-1 (13-21)
  source 1..27: mol_type = other RNA
agactgccccctccattcccgggcctc

SEQ ID NO: 60352 - RNA, 27 nt, synthetic construct
  misc_feature 1..27: note = DNA-directed RNA polymerase III subunit RPC1 (218-226)
  source 1..27: mol_type = other RNA
agactgccccctccaaccatcctcaag

SEQ ID NO: 60353 - RNA, 27 nt, synthetic construct
  misc_feature 1..27: note = Kazrin (78-86)
  source 1..27: mol_type = other RNA
agactgcaggaggaagtgcacctcctt

SEQ ID NO: 60354 - RNA, 33 nt, synthetic construct
  misc_feature 1..33: note = Synaptojanin-2-binding protein (58-68)
  source 1..33: mol_type = other RNA
agactgcaggagggcgacaagatcctcagcgtg

SEQ ID NO: 60355 - RNA, 27 nt, synthetic construct
  misc_feature 1..27: note = Centrosomal protein of 85 kDa (243-251)
  source 1..27: mol_type = other RNA
agactgcagatggagcaaatgcagctc

SEQ ID NO: 60356 - RNA, 36 nt, synthetic construct
  misc_feature 1..36: note = KIF1-binding protein (494-505)
  source 1..36: mol_type = other RNA
agactgagggaccccgatagccacatcgtgaagaaa

SEQ ID NO: 60357 - RNA, 27 nt, synthetic construct
  misc_feature 1..27: note = Transmembrane protein 69 (146-154)
  source 1..27: mol_type = other RNA
agactgagcgaggccatcgtgaccgtc

SEQ ID NO: 60358 - RNA, 30 nt, synthetic construct
  misc_feature 1..30: note = WASH complex subunit strumpellin (31-40)
  source 1..30: mol_type = other RNA
agactgagcgagttcatccccgccgtgttt

SEQ ID NO: 60359 - RNA, 27 nt, synthetic construct
  misc_feature 1..27: note = COP9 signalosome complex subunit 8 (199-207)
  source 1..27: mol_type = other RNA
agactgaccgactacgtggccttcctc

SEQ ID NO: 60360 - RNA, 27 nt, synthetic construct
  misc_feature 1..27: note = Proliferating cell nuclear antigen (5-13)
  source 1..27: mol_type = other RNA
agactggtgcagggcagcatcctcaag

SEQ ID NO: 60361 - RNA, 33 nt, synthetic construct
  misc_feature 1..33: note = Serine-threonine kinase receptor-associated protein (167-177)
  source 1..33: mol_type = other RNA
agactgtgggaccacgccaccatgacagaggtg

SEQ ID NO: 60362 - RNA, 27 nt, synthetic construct
  misc_feature 1..27: note = Probable ubiquitin carboxyl-terminal hydrolase FAF-Y (1674-1682)
  source 1..27: mol_type = other RNA
agactgtggggcgagcccgtgaacctc

SEQ ID NO: 60363 - RNA, 33 nt, synthetic construct
  misc_feature 1..33: note = Lariat debranching enzyme (301-311)
  source 1..33: mol_type = other RNA
agactgtggaacatgcccgagaataacggcctc

SEQ ID NO: 60364 - RNA, 27 nt, synthetic construct
  misc_feature 1..27: note = DNA damage-inducible transcript 4 protein (184-192)
  source 1..27: mol_type = other RNA
agactgtggcccaagatccagggcctc

SEQ ID NO: 60365 - RNA, 30 nt, synthetic construct
  misc_feature 1..30: note = Serine/threonine-protein kinase mTOR (2035-2044)
  source 1..30: mol_type = other RNA
agactgtacttcggcgagaggaacgtgaag

SEQ ID NO: 60366 - RNA, 30 nt, synthetic construct
  misc_feature 1..30: note = Filamin-A (142-151)
  source 1..30: mol_type = other RNA
agactgtacagcgtgtcctatctccttaag

SEQ ID NO: 60367 - RNA, 27 nt, synthetic construct
  misc_feature 1..27: note = C-1-tetrahydrofolate synthase, cytoplasmic (746-754)
  source 1..27: mol_type = other RNA
agaatgttcggcatccccgtggtcgtt

SEQ ID NO: 60368 - RNA, 30 nt, synthetic construct
  misc_feature 1..30: note = Hemoglobin subunit alpha (3-12)
  source 1..30: mol_type = other RNA
agaatgttcctgagctttcccaccacaaag

SEQ ID NO: 60369 - RNA, 27 nt, synthetic construct
  misc_feature 1..27: note = Transaldolase (28-36)
  source 1..27: mol_type = other RNA
agaatgttcaacgccgagaatggcaag

SEQ ID NO: 60370 - RNA, 27 nt, synthetic construct
  misc_feature 1..27: note = Receptor activity-modifying protein 2 (21-29)
  source 1..27: mol_type = other RNA
agacccgccgctctgaggctccttctg

SEQ ID NO: 60371 - RNA, 33 nt, synthetic construct
  misc_feature 1..33: note = Nucleolar protein 11 (53-63)
  source 1..33: mol_type = other RNA
agacccgccgaccctgagaagaaccagagcctg

SEQ ID NO: 60372 - RNA, 27 nt, synthetic construct
  misc_feature 1..27: note = F-box only protein 32 (160-168)
  source 1..27: mol_type = other RNA
agacccgccttcaagggcctgaccttt

SEQ ID NO: 60373 - RNA, 27 nt, synthetic construct
  misc_feature 1..27: note = Transcription cofactor vestigial-like protein 4 (144-152)
  source 1..27: mol_type = other RNA
agacccgccggcctgagccctaccctc

SEQ ID NO: 60374 - RNA, 30 nt, synthetic construct
  misc_feature 1..30: note = 26S proteasome non-ATPase regulatory subunit 13 (284-293)
  source 1..30: mol_type = other RNA
agacccgccaaccacaggcagctgaccttc

SEQ ID NO: 60375 - RNA, 27 nt, synthetic construct
  misc_feature 1..27: note = SH3 domain-binding protein 1 (567-575)
  source 1..27: mol_type = other RNA
agacccgcccctgctaggccaaccatg

SEQ ID NO: 60376 - RNA, 27 nt, synthetic construct
  misc_feature 1..27: note = Epsin-2 (471-479)
  source 1..27: mol_type = other RNA
agacccgcccctccagctcagagcctg

SEQ ID NO: 60377 - RNA, 27 nt, synthetic construct
  misc_feature 1..27: note = Sterol regulatory element-binding protein 2 (1026-1034)
  source 1..27: mol_type = other RNA
agacccgcctacaggaaggtgttcctg

SEQ ID NO: 60378 - RNA, 30 nt, synthetic construct
  misc_feature 1..30: note = Protein O-GlcNAcase (828-837)
  source 1..30: mol_type = other RNA
agacccgacgataagaggatcctggagttc

SEQ ID NO: 60379 - RNA, 27 nt, synthetic construct
  misc_feature 1..27: note = Transcription factor 25 (211-219)
  source 1..27: mol_type = other RNA
agacccgagaacaggagcttctacctg

SEQ ID NO: 60380 - RNA, 27 nt, synthetic construct
  misc_feature 1..27: note = NFX1-type zinc finger-containing protein 1 (350-358)
  source 1..27: mol_type = other RNA
agacccttcctgaggcctaacatcatt

SEQ ID NO: 60381 - RNA, 27 nt, synthetic construct
  misc_feature 1..27: note = Procollagen-lysine,2-oxoglutarate 5-dioxygenase 2 (137-145)
  source 1..27: mol_type = other RNA
agaccccaccatgacgccagcaccttc

SEQ ID NO: 60382 - RNA, 27 nt, synthetic construct
  misc_feature 1..27: note = Transducin beta-like protein 3 (564-572)
  source 1..27: mol_type = other RNA
agaccccacaccgtgctgacagtcatc

SEQ ID NO: 60383 - RNA, 30 nt, synthetic construct
  misc_feature 1..30: note = Mitogen-activated protein kinase 3 (229-238)
  source 1..30: mol_type = other RNA
agacccatcttccctggcaagcactacctg

SEQ ID NO: 60384 - RNA, 27 nt, synthetic construct
  misc_feature 1..27: note = Ragulator complex protein LAMTOR2 (3-11)
  source 1..27: mol_type = other RNA
agacccaaggccctgacccaggtgctc

SEQ ID NO: 60385 - RNA, 30 nt, synthetic construct
  misc_feature 1..30: note = Pre-mRNA-processing factor 19 (62-71)
  source 1..30: mol_type = other RNA
agacccaagcctccaagcgccacctccatc

SEQ ID NO: 60386 - RNA, 30 nt, synthetic construct
  misc_feature 1..30: note = Poly(rC)-binding protein 2 (183-192)
  source 1..30: mol_type = other RNA
agacccaagcctagctcctctccagtgatc

SEQ ID NO: 60387 - RNA, 27 nt, synthetic construct
  misc_feature 1..27: note = Mitogen-activated protein kinase 9 (263-271)
  source 1..27: mol_type = other RNA
agacccaagtaccctggcatcaaattc

SEQ ID NO: 60388 - RNA, 27 nt, synthetic construct
  misc_feature 1..27: note = Probable ATP-dependent RNA helicase DDX27 (196-204)
  source 1..27: mol_type = other RNA
agacccctgctcaaggccatcaccgct

SEQ ID NO: 60389 - RNA, 30 nt, synthetic construct
  misc_feature 1..30: note = Protein transport protein Sec23B (243-252)
  source 1..30: mol_type = other RNA
agacccctgaggagcaccggcgtggccctc

SEQ ID NO: 60390 - RNA, 27 nt, synthetic construct
  misc_feature 1..27: note = RNA-binding protein 39 (297-305)
  source 1..27: mol_type = other RNA
agacccatgaaggtgggccacgtcacc

SEQ ID NO: 60391 - RNA, 27 nt, synthetic construct
  misc_feature 1..27: note = UAP56-interacting factor (71-79)
  source 1..27: mol_type = other RNA
agacccaacggcgtgatcaccgggctg

SEQ ID NO: 60392 - RNA, 27 nt, synthetic construct
  misc_feature 1..27: note = Adipocyte plasma membrane-associated protein (337-345)
  source 1..27: mol_type = other RNA
agacccaaccctggcttcagcatgctg

SEQ ID NO: 60393 - RNA, 27 nt, synthetic construct
  misc_feature 1..27: note = Induced myeloid leukemia cell differentiation protein Mcl-1 (78-86)
  source 1..27: mol_type = other RNA
agaccccctccaatcggcgccgaggtg

SEQ ID NO: 60394 - RNA, 27 nt, synthetic construct
  misc_feature 1..27: note = Sterol regulatory element-binding protein 1 (1003-1011)
  source 1..27: mol_type = other RNA
agaccccaggccagcgctctggagctc

SEQ ID NO: 60395 - RNA, 27 nt, synthetic construct
  misc_feature 1..27: note = (Pyruvate dehydrogenase (acetyl-transferring))-phosphatase 1, mitochondrial (443-451)
  source 1..27: mol_type = other RNA
agaccccaggacaagttcctggtgctc

SEQ ID NO: 60396 - RNA, 27 nt, synthetic construct
  misc_feature 1..27: note = RuvB-like 1 (249-257)
  source 1..27: mol_type = other RNA
agaccccagggcgggcaagacatcctg

SEQ ID NO: 60397 - RNA, 27 nt, synthetic construct
  misc_feature 1..27: note = 28S ribosomal protein S12, mitochondrial (55-63)
  source 1..27: mol_type = other RNA
agaccccagctgaagggcgtggtcctc

SEQ ID NO: 60398 - RNA, 30 nt, synthetic construct
  misc_feature 1..30: note = WD repeat and FYVE domain-containing protein 1 (8-17)
  source 1..30: mol_type = other RNA
agaccccagagctccaggcctgtgctgctc

SEQ ID NO: 60399 - RNA, 27 nt, synthetic construct
  misc_feature 1..27: note = Renin receptor (59-67)
  source 1..27: mol_type = other RNA
agacccagggccaccgtgatggtcatg

SEQ ID NO: 60400 - RNA, 30 nt, synthetic construct
  misc_feature 1..30: note = Protein OS-9 (186-195)
  source 1..30: mol_type = other RNA
agacccagggaggccgaagtgcggttcctg

SEQ ID NO: 60401 - RNA, 24 nt, synthetic construct
  misc_feature 1..24: note = Protein disulfide-isomerase A4 (2-9)
  source 1..24: mol_type = other RNA
agacccaggaaggccttcctgctc

SEQ ID NO: 60402 - RNA, 30 nt, synthetic construct
  misc_feature 1..30: note = Protein disulfide-isomerase A4 (2-11)
  source 1..30: mol_type = other RNA
agacccaggaaggccttcctgctccttctg

SEQ ID NO: 60403 - RNA, 33 nt, synthetic construct
  misc_feature 1..33: note = Glycogen synthase kinase-3 beta (306-316)
  source 1..33: mol_type = other RNA
agacccaggacccctccagaggccatcgctctg

SEQ ID NO: 60404 - RNA, 30 nt, synthetic construct
  misc_feature 1..30: note = Apolipoprotein L1 (285-294)
  source 1..30: mol_type = other RNA
agacccagggtgaccgagcctatcagcgcc

SEQ ID NO: 60405 - RNA, 27 nt, synthetic construct
  misc_feature 1..27: note = ATP-dependent RNA helicase A (272-280)
  source 1..27: mol_type = other RNA
agacccagcgccgctggcatcaacctg

SEQ ID NO: 60406 - RNA, 27 nt, synthetic construct
  misc_feature 1..27: note = Protein DEPP (195-203)
  source 1..27: mol_type = other RNA
agacccagctccgtgctgaggaccctc

SEQ ID NO: 60407 - RNA, 27 nt, synthetic construct
  misc_feature 1..27: note = Filamin-B (69-77)
  source 1..27: mol_type = other RNA
agacccaccttcaggcagatgcaactg

SEQ ID NO: 60408 - RNA, 27 nt, synthetic construct
  misc_feature 1..27: note = Antigen peptide transporter 2 (168-176)
  source 1..27: mol_type = other RNA
agacccgtgctgaagggcctcaccttc

SEQ ID NO: 60409 - RNA, 27 nt, synthetic construct
  misc_feature 1..27: note = FAS-associated factor 1 (77-85)
  source 1..27: mol_type = other RNA
agacccgtgatgcctagcaggcagatc

SEQ ID NO: 60410 - RNA, 27 nt, synthetic construct
  misc_feature 1..27: note = CDC42 small effector protein 1 (69-77)
  source 1..27: mol_type = other RNA
agaccctggagcaactccaggggcctg

SEQ ID NO: 60411 - RNA, 30 nt, synthetic construct
  misc_feature 1..30: note = Cyclin-dependent kinase 13 (254-263)
  source 1..30: mol_type = other RNA
agaccctacaccaacaaggtgatcacactg

SEQ ID NO: 60412 - RNA, 36 nt, synthetic construct
  misc_feature 1..36: note = Rac GTPase-activating protein 1 (547-558)
  source 1..36: mol_type = other RNA
agacagggcaacttctttgccagccccatgctgaag

SEQ ID NO: 60413 - RNA, 33 nt, synthetic construct
  misc_feature 1..33: note = SEC14-like protein 1 (168-178)
  source 1..33: mol_type = other RNA
agacagctggaggaagagggcatcaccttcgtg

SEQ ID NO: 60414 - RNA, 30 nt, synthetic construct
  misc_feature 1..30: note = Ubiquitin carboxyl-terminal hydrolase 22 (419-428)
  source 1..30: mol_type = other RNA
agaaggaagatcaccacatacgtgagcttc

SEQ ID NO: 60415 - RNA, 27 nt, synthetic construct
  misc_feature 1..27: note = MICOS complex subunit MIC10 (38-46)
  source 1..27: mol_type = other RNA
agaaggatgtggcccctggccttcggc

SEQ ID NO: 60416 - RNA, 27 nt, synthetic construct
  misc_feature 1..27: note = Protein transport protein Sec23B (569-577)
  source 1..27: mol_type = other RNA
agaaggagccccttcctgcaggtgttt

SEQ ID NO: 60417 - RNA, 27 nt, synthetic construct
  misc_feature 1..27: note = Protein transport protein Sec23A (585-593)
  source 1..27: mol_type = other RNA
agaaggagctccttcctgcaggtgttt

SEQ ID NO: 60418 - RNA, 27 nt, synthetic construct
  misc_feature 1..27: note = Nicastrin (225-233)
  source 1..27: mol_type = other RNA
agaaggagctccatccagtctaccttc

SEQ ID NO: 60419 - RNA, 27 nt, synthetic construct
  misc_feature 1..27: note = Protein FAM73A (222-230)
  source 1..27: mol_type = other RNA
agaaggtgggagcaggccctgaccttc

SEQ ID NO: 60420 - RNA, 27 nt, synthetic construct
  misc_feature 1..27: note = Complement C1q subcomponent subunit C (184-192)
  source 1..27: mol_type = other RNA
agaagcggcgtgaaggtcgttaccttc

SEQ ID NO: 60421 - RNA, 33 nt, synthetic construct
  misc_feature 1..33: note = RNA polymerase II subunit A C-terminal domain phosphatase SSU72 (18-28)
  source 1..33: mol_type = other RNA
agaagcatggaggcccacaacatcctgtccaag

SEQ ID NO: 60422 - RNA, 30 nt, synthetic construct
  misc_feature 1..30: note = Heterogeneous nuclear ribonucleoproteins A2/B1 (60-69)
  source 1..30: mol_type = other RNA
agaagcaggggcttcgggtttgtgaccttc

SEQ ID NO: 60423 - RNA, 27 nt, synthetic construct
  misc_feature 1..27: note = Dynamin-2 (199-207)
  source 1..27: mol_type = other RNA
agaaccatcggcgtgattacaaagctg

SEQ ID NO: 60424 - RNA, 33 nt, synthetic construct
  misc_feature 1..33: note = Profilin-1 (87-97)
  source 1..33: mol_type = other RNA
agaaccaagagcacaggcggggcccccactttc

SEQ ID NO: 60425 - RNA, 33 nt, synthetic construct
  misc_feature 1..33: note = 28S ribosomal protein S7, mitochondrial (198-208)
  source 1..33: mol_type = other RNA
agaaccctgatgcccgagaagctcagccacaaa

SEQ ID NO: 60426 - RNA, 30 nt, synthetic construct
  misc_feature 1..30: note = Protein SDA1 homolog (403-412)
  source 1..30: mol_type = other RNA
agaaccctgaacccccagatgctccaaaag

SEQ ID NO: 60427 - RNA, 27 nt, synthetic construct
  misc_feature 1..27: note = Serine/threonine-protein kinase TAO1 (49-57)
  source 1..27: mol_type = other RNA
agaaccaacgaggtggtcgccatcaag

SEQ ID NO: 60428 - RNA, 30 nt, synthetic construct
  misc_feature 1..30: note = Serine/threonine-protein kinase TAO1 (49-58)
  source 1..30: mol_type = other RNA
agaaccaacgaggtggtcgccatcaagaaa

SEQ ID NO: 60429 - RNA, 30 nt, synthetic construct
  misc_feature 1..30: note = Ras GTPase-activating protein 3 (360-369)
  source 1..30: mol_type = other RNA
agaacccaggaccccaacacaatcttcagg

SEQ ID NO: 60430 - RNA, 33 nt, synthetic construct
  misc_feature 1..33: note = Zinc finger protein 706 (45-55)
  source 1..33: mol_type = other RNA
agaacccagatgcccgaccctaagacattcaaa

SEQ ID NO: 60431 - RNA, 36 nt, synthetic construct
  misc_feature 1..36: note = Fructose-bisphosphate aldolase A (259-270)
  source 1..36: mol_type = other RNA
agaaccgtgccccctgccgtcacaggcatcactttc

SEQ ID NO: 60432 - RNA, 27 nt, synthetic construct
  misc_feature 1..27: note = Protein LDOC1L (175-183)
  source 1..27: mol_type = other RNA
agaacctacaagagccccctgaggcac

SEQ ID NO: 60433 - RNA, 33 nt, synthetic construct
  misc_feature 1..33: note = Sorting nexin-4 (243-253)
  source 1..33: mol_type = other RNA
agagtggccgacaggctgtacggcgtctataag

SEQ ID NO: 60434 - RNA, 27 nt, synthetic construct
  misc_feature 1..27: note = Cell division cycle and apoptosis regulator protein 1 (148-156)
  source 1..27: mol_type = other RNA
agagtgttcaccggcgtcgttacaaag

SEQ ID NO: 60435 - RNA, 30 nt, synthetic construct
  misc_feature 1..30: note = Centrosomal protein of 57 kDa (325-334)
  source 1..30: mol_type = other RNA
agagtgatcaacagcattcccctggccaag

SEQ ID NO: 60436 - RNA, 27 nt, synthetic construct
  misc_feature 1..27: note = Hom s 1 (22-30)
  source 1..27: mol_type = other RNA
agagtgaaggcccccaacaaaagcctg

SEQ ID NO: 60437 - RNA, 27 nt, synthetic construct
  misc_feature 1..27: note = Cytosolic 10-formyltetrahydrofolate dehydrogenase (894-902)
  source 1..27: mol_type = other RNA
agagtgaagaccgtcacattcgagtac

SEQ ID NO: 60438 - RNA, 30 nt, synthetic construct
  misc_feature 1..30: note = E3 ubiquitin-protein ligase HUWE1 (812-821)
  source 1..30: mol_type = other RNA
agagtgctggacttcgatgtcaagaggaaa

SEQ ID NO: 60439 - RNA, 30 nt, synthetic construct
  misc_feature 1..30: note = Eukaryotic translation initiation factor 4 gamma 3 (1045-1054)
  source 1..30: mol_type = other RNA
agagtgctggaccccagcaagttcctcaaa

SEQ ID NO: 60440 - RNA, 27 nt, synthetic construct
  misc_feature 1..27: note = Paired amphipathic helix protein Sin3a (631-639)
  source 1..27: mol_type = other RNA
agagtgctggaggccatccagaagaaa

SEQ ID NO: 60441 - RNA, 30 nt, synthetic construct
  misc_feature 1..30: note = Smoothelin (476-485)
  source 1..30: mol_type = other RNA
agagtgctgctccccaccggcaaccagagg

SEQ ID NO: 60442 - RNA, 36 nt, synthetic construct
  misc_feature 1..36: note = 40S ribosomal protein S18 (14-25)
  source 1..36: mol_type = other RNA
agagtgctgaacaccaatatcgacggcaggcggaag

SEQ ID NO: 60443 - RNA, 27 nt, synthetic construct
  misc_feature 1..27: note = WASH complex subunit strumpellin (573-581)
  source 1..27: mol_type = other RNA
agagtgaaccccagcatggtcaccaag

SEQ ID NO: 60444 - RNA, 27 nt, synthetic construct
  misc_feature 1..27: note = Transcription factor 4 (552-560)
  source 1..27: mol_type = other RNA
agagtgagggacatcaacgaggccttc

SEQ ID NO: 60445 - RNA, 27 nt, synthetic construct
  misc_feature 1..27: note = WW domain-binding protein 5 (82-90)
  source 1..27: mol_type = other RNA
agagtgaggaacaagctgatcgtcatg

SEQ ID NO: 60446 - RNA, 33 nt, synthetic construct
  misc_feature 1..33: note = Phosphatidylinositide phosphatase SAC1 (35-45)
  source 1..33: mol_type = other RNA
agagtgagcaccgaggtcacactggccgttaag

SEQ ID NO: 60447 - RNA, 33 nt, synthetic construct
  misc_feature 1..33: note = Periodic tryptophan protein 1 homolog (244-254)
  source 1..33: mol_type = other RNA
agagtgtgggacatcagcaccgtctcctctgtt

SEQ ID NO: 60448 - RNA, 33 nt, synthetic construct
  misc_feature 1..33: note = 39S ribosomal protein L3, mitochondrial (250-260)
  source 1..33: mol_type = other RNA
agagtgtggcccggcaccaagatgcctgggaaa

SEQ ID NO: 60449 - RNA, 27 nt, synthetic construct
  misc_feature 1..27: note = Inositol-trisphosphate 3-kinase B (33-41)
  source 1..27: mol_type = other RNA
agagtgtggcagggcaccatggagaag

SEQ ID NO: 60450 - RNA, 30 nt, synthetic construct
  misc_feature 1..30: note = Guanine nucleotide-binding protein subunit beta-2-like 1 (308-317)
  source 1..30: mol_type = other RNA
agagtgtggcaggtcaccatcggcacaagg

SEQ ID NO: 60451 - RNA, 27 nt, synthetic construct
  misc_feature 1..27: note = Cip1-interacting zinc finger protein (591-599)
  source 1..27: mol_type = other RNA
agatacttcaagacccccaggaaattt

SEQ ID NO: 60452 - RNA, 27 nt, synthetic construct
  misc_feature 1..27: note = Signal transducer and activator of transcription 3 (93-101)
  source 1..27: mol_type = other RNA
agatacctggagaagcccatggaaatc

SEQ ID NO: 60453 - RNA, 27 nt, synthetic construct
  misc_feature 1..27: note = Erythrocyte band 7 integral membrane protein (251-259)
  source 1..27: mol_type = other RNA
agatacctgcagaccctcacaactatc

SEQ ID NO: 60454 - RNA, 27 nt, synthetic construct
  misc_feature 1..27: note = Telomerase protein component 1 (464-472)
  source 1..27: mol_type = other RNA
agataccccagcaacctgcagctcttc

SEQ ID NO: 60455 - RNA, 27 nt, synthetic construct
  misc_feature 1..27: note = Histone H3.1 (41-49)
  source 1..27: mol_type = other RNA
agatacaggcccggcaccgtggccctg

SEQ ID NO: 60456 - RNA, 27 nt, synthetic construct
  misc_feature 1..27: note = 26S proteasome non-ATPase regulatory subunit 6 (267-275)
  source 1..27: mol_type = other RNA
agatacagcgtgttctttcagtccctg

SEQ ID NO: 60457 - RNA, 27 nt, synthetic construct
  misc_feature 1..27: note = G1/S-specific cyclin-D3 (37-45)
  source 1..27: mol_type = other RNA
agatacgtgcccagggccagctatttc

SEQ ID NO: 60458 - RNA, 24 nt, synthetic construct
  misc_feature 1..24: note = Heterogeneous nuclear ribonucleoprotein H (23-30)
  source 1..24: mol_type = other RNA
agcgccgacgaggtgcagagattc

SEQ ID NO: 60459 - RNA, 27 nt, synthetic construct
  misc_feature 1..27: note = Solute carrier family 35 member E1 (53-61)
  source 1..27: mol_type = other RNA
agcgccttcccctttcctgtgaccgtc

SEQ ID NO: 60460 - RNA, 33 nt, synthetic construct
  misc_feature 1..33: note = Probable 28S rRNA (cytosine(4447)-C(5))-methyltransferase (511-521)
  source 1..33: mol_type = other RNA
agcgccatcgactccgtgaacgctacctctaag

SEQ ID NO: 60461 - RNA, 27 nt, synthetic construct
  misc_feature 1..27: note = Catenin alpha-2 (667-675)
  source 1..27: mol_type = other RNA
agcgccagagctatcatggcacagctg

SEQ ID NO: 60462 - RNA, 27 nt, synthetic construct
  misc_feature 1..27: note = Large proline-rich protein BAG6 (145-153)
  source 1..27: mol_type = other RNA
agcgccgtggacgtccacatcaacatg

SEQ ID NO: 60463 - RNA, 27 nt, synthetic construct
  misc_feature 1..27: note = Gamma-interferon-inducible protein 16 (280-288)
  source 1..27: mol_type = other RNA
agcgaggccggccccaaccagaccttc

SEQ ID NO: 60464 - RNA, 27 nt, synthetic construct
  misc_feature 1..27: note = Y-box-binding protein 3 (149-157)
  source 1..27: mol_type = other RNA
agcgaggacgccgaaaagaaagtgctg

SEQ ID NO: 60465 - RNA, 27 nt, synthetic construct
  misc_feature 1..27: note = Proline-, glutamic acid- and leucine-rich protein 1 (231-239)
  source 1..27: mol_type = other RNA
agcgaggacggcgatgcccacgtgctg

SEQ ID NO: 60466 - RNA, 33 nt, synthetic construct
  misc_feature 1..33: note = Vacuolar protein sorting-associated protein 35 (500-510)
  source 1..33: mol_type = other RNA
agcgaggaccccgatcagcaatacctgatcctc

SEQ ID NO: 60467 - RNA, 36 nt, synthetic construct
  misc_feature 1..36: note = Actin-binding protein anillin (796-807)
  source 1..36: mol_type = other RNA
agcgagttcatgccctccaagggctctgtgaccctg

SEQ ID NO: 60468 - RNA, 27 nt, synthetic construct
  misc_feature 1..27: note = Actin-related protein 2 (295-303)
  source 1..27: mol_type = other RNA
agcgagttctacaagcacatcgtgctg

SEQ ID NO: 60469 - RNA, 30 nt, synthetic construct
  misc_feature 1..30: note = Neutral amino acid transporter A (22-31)
  source 1..30: mol_type = other RNA
agcgagggcgaagacctgatcagattcttt

SEQ ID NO: 60470 - RNA, 30 nt, synthetic construct
  misc_feature 1..30: note = HCLS1-binding protein 3 (72-81)
  source 1..30: mol_type = other RNA
agcgagatcgaagagttctaccagaagctg

SEQ ID NO: 60471 - RNA, 27 nt, synthetic construct
  misc_feature 1..27: note = Poly (ADP-ribose) polymerase 1 (25-33)
  source 1..27: mol_type = other RNA
agcgagtccatccccaaggactctctg

SEQ ID NO: 60472 - RNA, 33 nt, synthetic construct
  misc_feature 1..33: note = ATP-citrate synthase (769-779)
  source 1..33: mol_type = other RNA
agcgagaccgccgtggctaagaaccaggcactg

SEQ ID NO: 60473 - RNA, 33 nt, synthetic construct
  misc_feature 1..33: note = Antigen KI-67 (2326-2336)
  source 1..33: mol_type = other RNA
agcgagacctccggccacacacaggaatctctg

SEQ ID NO: 60474 - RNA, 24 nt, synthetic construct
  misc_feature 1..24: note = 40S ribosomal protein S23 (45-52)
  source 1..24: mol_type = other RNA
agccacgccaagggcatcgtgctg

SEQ ID NO: 60475 - RNA, 27 nt, synthetic construct
  misc_feature 1..27: note = Mitogen-activated protein kinase kinase kinase 1 (497-505)
  source 1..27: mol_type = other RNA
agccacgacttctactcccatgagctg

SEQ ID NO: 60476 - RNA, 33 nt, synthetic construct
  misc_feature 1..33: note = Bax inhibitor 1 (17-27)
  source 1..33: mol_type = other RNA
agccacatcaccccctccacacagcaacatctg

SEQ ID NO: 60477 - RNA, 27 nt, synthetic construct
  misc_feature 1..27: note = Hypoxia-inducible factor 1-alpha (52-60)
  source 1..27: mol_type = other RNA
agccacctggacaaggcctccgtgatg

SEQ ID NO: 60478 - RNA, 27 nt, synthetic construct
  misc_feature 1..27: note = Ubiquitin carboxyl-terminal hydrolase 37 (54-62)
  source 1..27: mol_type = other RNA
agccacaacatcaagaatgtggtcctg

SEQ ID NO: 60479 - RNA, 27 nt, synthetic construct
  misc_feature 1..27: note = Protein-L-isoaspartate(D-aspartate) O-methyltransferase (9-17)
  source 1..27: mol_type = other RNA
agccactccgagctgatccataacctc

SEQ ID NO: 60480 - RNA, 27 nt, synthetic construct
  misc_feature 1..27: note = Cyclin-T1 (431-439)
  source 1..27: mol_type = other RNA
agccactcctctgtgatcctgaagatg

SEQ ID NO: 60481 - RNA, 27 nt, synthetic construct
  misc_feature 1..27: note = Transcriptional activator Myb (257-265)
  source 1..27: mol_type = other RNA
agccacgtgccctaccctgtcgccctg

SEQ ID NO: 60482 - RNA, 27 nt, synthetic construct
  misc_feature 1..27: note = Ubiquitin carboxyl-terminal hydrolase 22 (354-362)
  source 1..27: mol_type = other RNA
agccacgtgtccggcaccacaactctg

SEQ ID NO: 60483 - RNA, 27 nt, synthetic construct
  misc_feature 1..27: note = MAP kinase-activating death domain protein (181-189)
  source 1..27: mol_type = other RNA
agccactaccccttcttttccaccttc

SEQ ID NO: 60484 - RNA, 27 nt, synthetic construct
  misc_feature 1..27: note = Abnormal spindle-like microcephaly-associated protein (532-540)
  source 1..27: mol_type = other RNA
agcatcttcagaacccccatttccaag

SEQ ID NO: 60485 - RNA, 27 nt, synthetic construct
  misc_feature 1..27: note = ATPase family AAA domain-containing protein 5 (1793-1801)
  source 1..27: mol_type = other RNA
agcatcattgagtacctgcccaccctc

SEQ ID NO: 60486 - RNA, 27 nt, synthetic construct
  misc_feature 1..27: note = Exportin-4 (345-353)
  source 1..27: mol_type = other RNA
agcatcatttccaacctgataaccgtg

SEQ ID NO: 60487 - RNA, 27 nt, synthetic construct
  misc_feature 1..27: note = LIM domain and actin-binding protein 1 (168-176)
  source 1..27: mol_type = other RNA
agcatcaaggacagaatggccaaatac

SEQ ID NO: 60488 - RNA, 27 nt, synthetic construct
  misc_feature 1..27: note = GMP reductase 1 (115-123)
  source 1..27: mol_type = other RNA
agcatcctggaggccgtgccccaggtc

SEQ ID NO: 60489 - RNA, 27 nt, synthetic construct
  misc_feature 1..27: note = DNA replication licensing factor MCM4 (252-260)
  source 1..27: mol_type = other RNA
agcatcctggagcaccagattcaagtg

SEQ ID NO: 60490 - RNA, 27 nt, synthetic construct
  misc_feature 1..27: note = Sperm-associated antigen 7 (79-87)
  source 1..27: mol_type = other RNA
agcatcctgcacgacgtggtcgaggtt

SEQ ID NO: 60491 - RNA, 27 nt, synthetic construct
  misc_feature 1..27: note = Regulation of nuclear pre-mRNA domain-containing protein 2 (432-440)
  source 1..27: mol_type = other RNA
agcatcctgtcctctctcacctcagtg

SEQ ID NO: 60492 - RNA, 27 nt, synthetic construct
  misc_feature 1..27: note = E3 ubiquitin-protein ligase TRIP12 (580-588)
  source 1..27: mol_type = other RNA
agcatcaacgcccagagaaatgctctg

SEQ ID NO: 60493 - RNA, 27 nt, synthetic construct
  misc_feature 1..27: note = Pre-mRNA-processing-splicing factor 8 (1693-1701)
  source 1..27: mol_type = other RNA
agcatctacccctcccctaccggcgtg

SEQ ID NO: 60494 - RNA, 30 nt, synthetic construct
  misc_feature 1..30: note = 40S ribosomal protein S3a (70-79)
  source 1..30: mol_type = other RNA
agcctggccgacctccagaacgatgaggtg

SEQ ID NO: 60495 - RNA, 27 nt, synthetic construct
  misc_feature 1..27: note = All-trans-retinol 13,14-reductase (241-249)
  source 1..27: mol_type = other RNA
agcctggccgaggtgctccagcaactt

SEQ ID NO: 60496 - RNA, 33 nt, synthetic construct
  misc_feature 1..33: note = Condensin complex subunit 1 (928-938)
  source 1..33: mol_type = other RNA
agcctggccggcgacgtggctctccagcaactt

SEQ ID NO: 60497 - RNA, 27 nt, synthetic construct
  misc_feature 1..27: note = AP-3 complex subunit delta-1 (220-228)
  source 1..27: mol_type = other RNA
agcctggcccccctcttctttaagctt

SEQ ID NO: 60498 - RNA, 27 nt, synthetic construct
  misc_feature 1..27: note = Poly(rC)-binding protein 1 (337-345)
  source 1..27: mol_type = other RNA
agcctggcccagtacctcatcaacgct

SEQ ID NO: 60499 - RNA, 33 nt, synthetic construct
  misc_feature 1..33: note = Tyrosine-protein kinase Fer (665-675)
  source 1..33: mol_type = other RNA
agcctggacgccgctgcaggcatgctctacctt

SEQ ID NO: 60500 - RNA, 27 nt, synthetic construct
  misc_feature 1..27: note = Hemoglobin subunit alpha (29-37)
  source 1..27: mol_type = other RNA
agcctggacaagttcctcgcctccgtg

SEQ ID NO: 60501 - RNA, 27 nt, synthetic construct
  misc_feature 1..27: note = General transcription factor 3C polypeptide 1 (202-210)
  source 1..27: mol_type = other RNA
agcctggacaagacctcccactctgtg

SEQ ID NO: 60502 - RNA, 27 nt, synthetic construct
  misc_feature 1..27: note = Regulator of nonsense transcripts 1 (683-691)
  source 1..27: mol_type = other RNA
agcctgttcgagagactcgtggtcctt

SEQ ID NO: 60503 - RNA, 27 nt, synthetic construct
  misc_feature 1..27: note = MKL/myocardin-like protein 2 (820-828)
  source 1..27: mol_type = other RNA
agcctgttcggctcccccgtggccaag

SEQ ID NO: 60504 - RNA, 30 nt, synthetic construct; identical to SEQ ID NO: 36277
  misc_feature 1..30: note = Protein flightless-1 homolog (1009-1018)
  source 1..30: mol_type = other RNA

SEQ ID NO: 60505 - RNA, 30 nt, synthetic construct; identical to SEQ ID NO: 36278
  misc_feature 1..30: note = Cip1-interacting zinc finger protein (720-729)
  source 1..30: mol_type = other RNA

SEQ ID NO: 60506 - RNA, 27 nt, synthetic construct
  misc_feature 1..27: note = T-complex protein 1 subunit eta (301-309)
  source 1..27: mol_type = other RNA
agcctgcacgacgccatcatgattgtg

SEQ ID NO: 60507 - RNA, 30 nt, synthetic construct; identical to SEQ ID NO: 36280
  misc_feature 1..30: note = Coronin-1B (173-182)
  source 1..30: mol_type = other RNA

SEQ ID NO: 60508 - RNA, 27 nt, synthetic construct
  misc_feature 1..27: note = T-complex protein 1 subunit zeta-2 (75-83)
  source 1..27: mol_type = other RNA
agcctgatcgccaaggtggctaccgca

SEQ ID NO: 60509 - RNA, 27 nt, synthetic construct
  misc_feature 1..27: note = Tyrosine-protein kinase JAK2 (367-375)
  source 1..27: mol_type = other RNA
agcctgatcgacggctactatagactc

SEQ ID NO: 60510 - RNA, 30 nt, synthetic construct
  misc_feature 1..30: note = Acidic leucine-rich nuclear phosphoprotein 32 family member B (48-57)
  source 1..30: mol_type = other RNA
agcctgatcaacgtgggcctcatttccgtc

SEQ ID NO: 60511 - RNA, 27 nt, synthetic construct
  misc_feature 1..27: note = Protein Smaug homolog 2 (238-246)
  source 1..27: mol_type = other RNA
agcctgatccccacctcccctcaggtg

SEQ ID NO: 60512 - RNA, 27 nt, synthetic construct
  misc_feature 1..27: note = Syntaxin-binding protein 2 (433-441)
  source 1..27: mol_type = other RNA
agcctgatcagaaacctcgagcagctt

SEQ ID NO: 60513 - RNA, 27 nt, synthetic construct
  misc_feature 1..27: note = Phospholipase A-2-activating protein (670-678)
  source 1..27: mol_type = other RNA
agcctgatctccaccattctcgaggtg

SEQ ID NO: 60514 - RNA, 27 nt, synthetic construct
  misc_feature 1..27: note = Serine/threonine-protein phosphatase PP1-beta catalytic subunit (10-18)
  source 1..27: mol_type = other RNA
agcctgatcaccagactccttgaggtg

SEQ ID NO: 60515 - RNA, 27 nt, synthetic construct
  misc_feature 1..27: note = Schlafen family member 5 (473-481)
  source 1..27: mol_type = other RNA
agcctgaagcagaaactcgtgaacaag

SEQ ID NO: 60516 - RNA, 27 nt, synthetic construct
  misc_feature 1..27: note = Caprin-1 (184-192)
  source 1..27: mol_type = other RNA
agcctgctcgacgagttctacaagctt

SEQ ID NO: 60517 - RNA, 30 nt, synthetic construct
  misc_feature 1..30: note = Macrophage erythroblast attacher (64-73)
  source 1..30: mol_type = other RNA
agcctgctcgacggcgtggtcgagaagctt

SEQ ID NO: 60518 - RNA, 24 nt, synthetic construct
  misc_feature 1..24: note = Cyclin-I (71-78)
  source 1..24: mol_type = other RNA
agcctgctcgacagattccttgcc

SEQ ID NO: 60519 - RNA, 30 nt, synthetic construct
  misc_feature 1..30: note = Cyclin-I (71-80)
  source 1..30: mol_type = other RNA
agcctgctcgacagattccttgccaccgtg

SEQ ID NO: 60520 - RNA, 33 nt, synthetic construct
  misc_feature 1..33: note = Splicing factor 3B subunit 3 (509-519)
  source 1..33: mol_type = other RNA
agcctgctcggcgacgatgcccttgtgcaggtc

SEQ ID NO: 60521 - RNA, 27 nt, synthetic construct
  misc_feature 1..27: note = Histidine triad nucleotide-binding protein 1 (72-80)
  source 1..27: mol_type = other RNA
agcctgctcggccaccttatgatcgtg

SEQ ID NO: 60522 - RNA, 33 nt, synthetic construct
  misc_feature 1..33: note = Acyl-CoA desaturase (80-90)
  source 1..33: mol_type = other RNA
agcctgctccaccttggcgccctgtacgggatc

SEQ ID NO: 60523 - RNA, 27 nt, synthetic construct
  misc_feature 1..27: note = Splicing factor 3B subunit 1 (643-651)
  source 1..27: mol_type = other RNA
agcctgctccccttccttaaggccgtg

SEQ ID NO: 60524 - RNA, 27 nt, synthetic construct
  misc_feature 1..27: note = Transformation/transcription domain-associated protein (819-827)
  source 1..27: mol_type = other RNA
agcctgctcccctaccttcctatgctg

SEQ ID NO: 60525 - RNA, 27 nt, synthetic construct
  misc_feature 1..27: note = Histone acetyltransferase KAT2A (320-328)
  source 1..27: mol_type = other RNA
agcctgctcagatccatcttcaccgtg

SEQ ID NO: 60526 - RNA, 27 nt, synthetic construct
  misc_feature 1..27: note = Mitotic spindle assembly checkpoint protein MAD2B (114-122)
  source 1..27: mol_type = other RNA
agcctgctctcccacgtggagcagctt

SEQ ID NO: 60527 - RNA, 27 nt, synthetic construct
  misc_feature 1..27: note = Gamma-secretase C-terminal fragment 59 (436-444)
  source 1..27: mol_type = other RNA
agcctgctctacaacgtgcccgccgtc

SEQ ID NO: 60528 - RNA, 30 nt, synthetic construct; identical to SEQ ID NO: 36301
  misc_feature 1..30: note = Syntenin-1 (289-298)
  source 1..30: mol_type = other RNA

SEQ ID NO: 60529 - RNA, 27 nt, synthetic construct
  misc_feature 1..27: note = DNA topoisomerase 2-alpha (763-771)
  source 1..27: mol_type = other RNA
agcctgatgatgaccatcattaacctc

SEQ ID NO: 60530 - RNA, 27 nt, synthetic construct
  misc_feature 1..27: note = Phospholipase A-2-activating protein (625-633)
  source 1..27: mol_type = other RNA
agcctgatgtcccacgccatcgagctc

SEQ ID NO: 60531 - RNA, 27 nt, synthetic construct
  misc_feature 1..27: note = RecQ-mediated genome instability protein 1 (437-445)
  source 1..27: mol_type = other RNA
agcctgaacaataagatcctcaacaga

SEQ ID NO: 60532 - RNA, 30 nt, synthetic construct
  misc_feature 1..30: note = A-kinase anchor protein 13 (131-140)
  source 1..30: mol_type = other RNA
agcctgcccaccgtgatcatgagaaacaag

SEQ ID NO: 60533 - RNA, 27 nt, synthetic construct
  misc_feature 1..27: note = Lon protease homolog 2, peroxisomal (51-59)
  source 1..27: mol_type = other RNA
agcctgcagtccaccatcctcggcgtg

SEQ ID NO: 60534 - RNA, 27 nt, synthetic construct
  misc_feature 1..27: note = Up-regulator of cell proliferation (550-558)
  source 1..27: mol_type = other RNA
agcctgtccgagaagcagtacttcctc

SEQ ID NO: 60535 - RNA, 27 nt, synthetic construct
  misc_feature 1..27: note = Pleiotropic regulator 1 (232-240)
  source 1..27: mol_type = other RNA
agcctgaccggccacatctccacagtg

SEQ ID NO: 60536 - RNA, 27 nt, synthetic construct
  misc_feature 1..27: note = Tyrosine-protein kinase JAK1 (405-413)
  source 1..27: mol_type = other RNA
agcctggtggacggctacttcagactc

SEQ ID NO: 60537 - RNA, 27 nt, synthetic construct
  misc_feature 1..27: note = Long-chain-fatty-acid-CoA ligase 1 (410-418)
  source 1..27: mol_type = other RNA
agcctgtgggacagactcatcttccac

SEQ ID NO: 60538 - RNA, 27 nt, synthetic construct
  misc_feature 1..27: note = Nucleoside diphosphate kinase (246-254)
  source 1..27: mol_type = other RNA
agcctgtggttcaagcccgaggaactc

SEQ ID NO: 60539 - RNA, 27 nt, synthetic construct
  misc_feature 1..27: note = Eukaryotic translation initiation factor 3 subunit C-like protein (382-390)
  source 1..27: mol_type = other RNA
agcctgtacgactataaccccaatctc

SEQ ID NO: 60540 - RNA, 27 nt, synthetic construct
  misc_feature 1..27: note = DNA repair and recombination protein RAD54B (618-626)
  source 1..27: mol_type = other RNA
agcctgtacaagggcctcctttccgtg

SEQ ID NO: 60541 - RNA, 27 nt, synthetic construct
  misc_feature 1..27: note = C-myc promoter-binding protein (1841-1849)
  source 1..27: mol_type = other RNA
agcctgtacagagagatcctcttcctt

SEQ ID NO: 60542 - RNA, 27 nt, synthetic construct
  misc_feature 1..27: note = Molybdate-anion transporter (297-305)
  source 1..27: mol_type = other RNA
agcctgtacagaatcgccacctccaag

SEQ ID NO: 60543 - RNA, 33 nt, synthetic construct; identical to SEQ ID NO: 36316
  misc_feature 1..33: note = 60S ribosome subunit biogenesis protein NIP7 homolog (135-145)
  source 1..33: mol_type = other RNA

SEQ ID NO: 60544 - RNA, 27 nt, synthetic construct
  misc_feature 1..27: note = Eukaryotic translation initiation factor 3 subunit L (348-356)
  source 1..27: mol_type = other RNA
agcatgttccagagaaccacatacaag

SEQ ID NO: 60545 - RNA, 27 nt, synthetic construct
  misc_feature 1..27: note = Probable ATP-dependent RNA helicase DDX6 (451-459)
  source 1..27: mol_type = other RNA
agcaacatcgacaagtccctgtacgtg

SEQ ID NO: 60546 - RNA, 27 nt, synthetic construct
  misc_feature 1..27: note = Integrator complex subunit 5 (495-503)
  source 1..27: mol_type = other RNA
agccccgccggcctgaaggctgtgctc

SEQ ID NO: 60547 - RNA, 27 nt, synthetic construct
  misc_feature 1..27: note = Centrosomal protein of 170 kDa (1260-1268)
  source 1..27: mol_type = other RNA
agccccgccctgaagaccacaagactc

SEQ ID NO: 60548 - RNA, 24 nt, synthetic construct
  misc_feature 1..24: note = Cellular tumor antigen p53 (2-9)
  source 1..24: mol_type = other RNA
agccccgccctgaacaagatgttc

SEQ ID NO: 60549 - RNA, 27 nt, synthetic construct
  misc_feature 1..27: note = E3 ubiquitin-protein ligase HUWE1 (376-384)
  source 1..27: mol_type = other RNA
agccccgcccctaccatcacatccctg

SEQ ID NO: 60550 - RNA, 27 nt, synthetic construct
  misc_feature 1..27: note = Type II inositol 3,4-bisphosphate 4-phosphatase (439-447)
  source 1..27: mol_type = other RNA
agccccgactccctgaagaactctctc

SEQ ID NO: 60551 - RNA, 27 nt, synthetic construct
  misc_feature 1..27: note = N6-adenosine-methyltransferase 70 kDa subunit (525-533)
  source 1..27: mol_type = other RNA
agccccggcaccagaaagatcgagctg

SEQ ID NO: 60552 - RNA, 27 nt, synthetic construct
  misc_feature 1..27: note = Integrator complex subunit 1 (254-262)
  source 1..27: mol_type = other RNA
agcccccacggcggggccctggtgatg

SEQ ID NO: 60553 - RNA, 27 nt, synthetic construct
  misc_feature 1..27: note = Protein CASC5 (837-845)
  source 1..27: mol_type = other RNA
agccccatcgagaagtccggcgtgctg

SEQ ID NO: 60554 - RNA, 27 nt, synthetic construct
  misc_feature 1..27: note = Ephrin-A4 (18-26)
  source 1..27: mol_type = other RNA
agccccctgagaggcgggtcctctctc

SEQ ID NO: 60555 - RNA, 27 nt, synthetic construct
  misc_feature 1..27: note = Cullin-7 (801-809)
  source 1..27: mol_type = other RNA
agccccaacaccgacagagaggtgctg

SEQ ID NO: 60556 - RNA, 27 nt, synthetic construct
  misc_feature 1..27: note = Tumor suppressor p53-binding protein 1 (1028-1036)
  source 1..27: mol_type = other RNA
agcccccagaagaccatgtccgtgctg

SEQ ID NO: 60557 - RNA, 27 nt, synthetic construct
  misc_feature 1..27: note = Stromal interaction molecule 2 (531-539)
  source 1..27: mol_type = other RNA
agcccccagcctcaaagagcccagctg

SEQ ID NO: 60558 - RNA, 30 nt, synthetic construct
  misc_feature 1..30: note = Polyadenylate-binding protein-interacting protein 1 (120-129)
  source 1..30: mol_type = other RNA
agcccccagtccggcaacttcagacaactg

SEQ ID NO: 60559 - RNA, 27 nt, synthetic construct
  misc_feature 1..27: note = Proteasomal ATPase-associated factor 1 (195-203)
  source 1..27: mol_type = other RNA
agccccagagcccctgtgcaggtcatc

SEQ ID NO: 60560 - RNA, 30 nt, synthetic construct
  misc_feature 1..30: note = Gephyrin (270-279)
  source 1..30: mol_type = other RNA
agccccagagcccaggctacctccaggctg

SEQ ID NO: 60561 - RNA, 27 nt, synthetic construct
  misc_feature 1..27: note = Tumor suppressor p53-binding protein 1 (1656-1664)
  source 1..27: mol_type = other RNA
agccccagagcctccatgggcgtgctg

SEQ ID NO: 60562 - RNA, 30 nt, synthetic construct
  misc_feature 1..30: note = Ras-related protein Rab-7a (111-120)
  source 1..30: mol_type = other RNA
agccccagagaccctgagaacttcccattt

SEQ ID NO: 60563 - RNA, 27 nt, synthetic construct
  misc_feature 1..27: note = Ankyrin repeat and LEM domain-containing protein 2 (512-520)
  source 1..27: mol_type = other RNA
agccccagagaccctgtgctgaccctc

SEQ ID NO: 60564 - RNA, 27 nt, synthetic construct
  misc_feature 1..27: note = Helicase SKI2W (1016-1024)
  source 1..27: mol_type = other RNA
agccccagattccctgcccagtacctg

SEQ ID NO: 60565 - RNA, 33 nt, synthetic construct
  misc_feature 1..33: note = Pleckstrin homology domain-containing family G member 2 (45-55)
  source 1..33: mol_type = other RNA
agccccagaggctccgggtcttcaaccagtctg

SEQ ID NO: 60566 - RNA, 27 nt, synthetic construct
  misc_feature 1..27: note = Serine/threonine-protein kinase receptor R3 (5-13)
  source 1..27: mol_type = other RNA
agccccagaaagggcctgctcatgctt

SEQ ID NO: 60567 - RNA, 27 nt, synthetic construct
  misc_feature 1..27: note = Procollagen-lysine,2-oxoglutarate 5-dioxygenase 2 (174-182)
  source 1..27: mol_type = other RNA
agccccagaaagggctggtccttcatg

SEQ ID NO: 60568 - RNA, 27 nt, synthetic construct
  misc_feature 1..27: note = Tyrosine-protein kinase BAZ1B (197-205)
  source 1..27: mol_type = other RNA
agccccagaaagctgcctacctccctc

SEQ ID NO: 60569 - RNA, 27 nt, synthetic construct
  misc_feature 1..27: note = Mitochondrial carrier homolog 1 (89-97)
  source 1..27: mol_type = other RNA
agccccagactgatgtccaacgccctc

SEQ ID NO: 60570 - RNA, 30 nt, synthetic construct
  misc_feature 1..30: note = Intercellular adhesion molecule 1 (5-14)
  source 1..30: mol_type = other RNA
agccccagacctgccctgccagctctcctt

SEQ ID NO: 60571 - RNA, 27 nt, synthetic construct
  misc_feature 1..27: note = AP-5 complex subunit mu-1 (117-125)
  source 1..27: mol_type = other RNA
agccccagacctccactgatctccgtg

SEQ ID NO: 60572 - RNA, 27 nt, synthetic construct
  misc_feature 1..27: note = Integrator complex subunit 1 (211-219)
  source 1..27: mol_type = other RNA
agccccagacctgtggccctggctctc

SEQ ID NO: 60573 - RNA, 33 nt, synthetic construct
  misc_feature 1..33: note = Nuclear receptor subfamily 1 group D member 1 (405-415)
  source 1..33: mol_type = other RNA
agccccagacagggcaactccaagaatgtgctg

SEQ ID NO: 60574 - RNA, 27 nt, synthetic construct
  misc_feature 1..27: note = Sorbin and SH3 domain-containing protein 2 (230-238)
  source 1..27: mol_type = other RNA
agccccagatcctactcttcaaccctg

SEQ ID NO: 60575 - RNA, 27 nt, synthetic construct
  misc_feature 1..27: note = Baculoviral IAP repeat-containing protein 6 (4258-4266)
  source 1..27: mol_type = other RNA
agccccagagtgcctaactcctctgtc

SEQ ID NO: 60576 - RNA, 33 nt, synthetic construct
  misc_feature 1..33: note = Thymidine kinase, cytosolic (13-23)
  source 1..33: mol_type = other RNA
agcccctccaagaccagaggccagatccaagtg

SEQ ID NO: 60577 - RNA, 27 nt, synthetic construct
  misc_feature 1..27: note = Histone deacetylase 9 (322-330)
  source 1..27: mol_type = other RNA
agcccctccctgcctaacatcaccctc

SEQ ID NO: 60578 - RNA, 24 nt, synthetic construct
  misc_feature 1..24: note = Nucleolin (67-74)
  source 1..24: mol_type = other RNA
agccccaccaagaaagtggccgtc

SEQ ID NO: 60579 - RNA, 27 nt, synthetic construct
  misc_feature 1..27: note = Nucleolar protein 11 (166-174)
  source 1..27: mol_type = other RNA
agccaggaccccggcacccacgtggtc

SEQ ID NO: 60580 - RNA, 27 nt, synthetic construct
  misc_feature 1..27: note = Unconventional myosin-If (124-132)
  source 1..27: mol_type = other RNA
agcagattcggcaagtactttgagatc

SEQ ID NO: 60581 - RNA, 30 nt, synthetic construct
  misc_feature 1..30: note = DnaJ homolog subfamily B member 2 (131-140)
  source 1..30: mol_type = other RNA
agcagacactccggccccttctttaccttc

SEQ ID NO: 60582 - RNA, 27 nt, synthetic construct
  misc_feature 1..27: note = Hyccin (228-236)
  source 1..27: mol_type = other RNA
agcagaatccccgtgtcctctggcttc

SEQ ID NO: 60583 - RNA, 27 nt, synthetic construct
  misc_feature 1..27: note = Merlin (587-595)
  source 1..27: mol_type = other RNA
agcagagtggccttctttgaggaactg

SEQ ID NO: 60584 - RNA, 27 nt, synthetic construct
  misc_feature 1..27: note = Catenin beta-1 (341-349)
  source 1..27: mol_type = other RNA
agcagagtgctgaaggtcctctccgtt

SEQ ID NO: 60585 - RNA, 33 nt, synthetic construct
  misc_feature 1..33: note = Stomatin-like protein 2, mitochondrial (29-39)
  source 1..33: mol_type = other RNA
agctccggcctgcccagaaacaccgtggtcctc

SEQ ID NO: 60586 - RNA, 27 nt, synthetic construct
  misc_feature 1..27: note = General transcription factor 3C polypeptide 2 (775-783)
  source 1..27: mol_type = other RNA
agctccggcgtgcccaaccctccaaag

SEQ ID NO: 60587 - RNA, 30 nt, synthetic construct
  misc_feature 1..30: note = 60S ribosomal protein L10a (2-11)
  source 1..30: mol_type = other RNA
agctccaaggtgtctagagacaccctgtac

SEQ ID NO: 60588 - RNA, 27 nt, synthetic construct
  misc_feature 1..27: note = Ashwin (155-163)
  source 1..27: mol_type = other RNA
agctccaacctgcccgtgaataacaag

SEQ ID NO: 60589 - RNA, 27 nt, synthetic construct
  misc_feature 1..27: note = Transmembrane protein 176A (50-58)
  source 1..27: mol_type = other RNA
agctccagactgctcgtggcctcttgg

SEQ ID NO: 60590 - RNA, 27 nt, synthetic construct
  misc_feature 1..27: note = Vimentin (72-80)
  source 1..27: mol_type = other RNA
agctccgtgcccggcgtcagactgctc

SEQ ID NO: 60591 - RNA, 27 nt, synthetic construct
  misc_feature 1..27: note = Synaptotagmin-like protein 2 (282-290)
  source 1..27: mol_type = other RNA
agcaccgactccgagacactgagatac

SEQ ID NO: 60592 - RNA, 27 nt, synthetic construct
  misc_feature 1..27: note = Ribosomal protein S6 kinase alpha-3 (327-335)
  source 1..27: mol_type = other RNA
agcaccatcgactggaacaagctgtac

SEQ ID NO: 60593 - RNA, 33 nt, synthetic construct
  misc_feature 1..33: note = Serine/threonine-protein kinase RIO2 (494-504)
  source 1..33: mol_type = other RNA
agcaccatcccccctgagctggtgaagcagaaa

SEQ ID NO: 60594 - RNA, 36 nt, synthetic construct
  misc_feature 1..36: note = AP-3 complex subunit beta-1 (26-37)
  source 1..36: mol_type = other RNA
agcaccatctccccctctggcgccttcgggctgttt

SEQ ID NO: 60595 - RNA, 33 nt, synthetic construct
  misc_feature 1..33: note = Forkhead box protein O1 (544-554)
  source 1..33: mol_type = other RNA
agcaccatgccccacacatccggcatgaacaga

SEQ ID NO: 60596 - RNA, 27 nt, synthetic construct
  misc_feature 1..27: note = ATP-dependent RNA helicase DDX3X (410-418)
  source 1..27: mol_type = other RNA
agcacctccgagaacatcacacagaag

SEQ ID NO: 60597 - RNA, 30 nt, synthetic construct
  misc_feature 1..30: note = Elongation factor 1-alpha 1 (21-30)
  source 1..30: mol_type = other RNA
agcaccacaactggccacctgatctacaag

SEQ ID NO: 60598 - RNA, 27 nt, synthetic construct
  misc_feature 1..27: note = Protein STON1-GTF2A1L (339-347)
  source 1..27: mol_type = other RNA
agcgtggccggcaagatccacaccgtc

SEQ ID NO: 60599 - RNA, 30 nt, synthetic construct
  misc_feature 1..30: note = Lysine-specific demethylase 7A (208-217)
  source 1..30: mol_type = other RNA
agcgtgttccccaagccttttgtccagaaa

SEQ ID NO: 60600 - RNA, 30 nt, synthetic construct
  misc_feature 1..30: note = Round spermatid basic protein 1-like protein (733-742)
  source 1..30: mol_type = other RNA
agcgtgttctccgacaagctgcactctaaa

SEQ ID NO: 60601 - RNA, 30 nt, synthetic construct
  misc_feature 1..30: note = Disintegrin and metalloproteinase domain-containing protein 10 (118-127)
  source 1..30: mol_type = other RNA
agcgtgatcgacggcagattcgaggggttt

SEQ ID NO: 60602 - RNA, 27 nt, synthetic construct
  misc_feature 1..27: note = Inactive phospholipase C-like protein 2 (372-380)
  source 1..27: mol_type = other RNA
agcgtgatcgacattataaacaagtac

SEQ ID NO: 60603 - RNA, 27 nt, synthetic construct
  misc_feature 1..27: note = E3 ubiquitin-protein ligase UBR2 (812-820)
  source 1..27: mol_type = other RNA
agcgtgatcgaggccgtcgctcacttc

SEQ ID NO: 60604 - RNA, 27 nt, synthetic construct
  misc_feature 1..27: note = Transcription factor MafG (149-157)
  source 1..27: mol_type = other RNA
agcgtgatcaccattgtcaagtccaaa

SEQ ID NO: 60605 - RNA, 30 nt, synthetic construct
  misc_feature 1..30: note = Probable E3 ubiquitin-protein ligase HERC4 (549-558)
  source 1..30: mol_type = other RNA
agcgtgctggagccccctctcttccttaag

SEQ ID NO: 60606 - RNA, 30 nt, synthetic construct
  misc_feature 1..30: note = 40S ribosomal protein S6 (105-114)
  source 1..30: mol_type = other RNA
agcgtgctgaacctcgtcatcgttaagaaa

SEQ ID NO: 60607 - RNA, 30 nt, synthetic construct
  misc_feature 1..30: note = Pumilio homolog 1 (183-192)
  source 1..30: mol_type = other RNA
agcgtgtcccagcccatcatggtccaaaga

SEQ ID NO: 60608 - RNA, 27 nt, synthetic construct
  misc_feature 1..27: note = Phosphatidylinositol 3-kinase regulatory subunit gamma (51-59)
  source 1..27: mol_type = other RNA
agcgtggtcgagctgatcaaccactac

SEQ ID NO: 60609 - RNA, 27 nt, synthetic construct
  misc_feature 1..27: note Dolichyl-diphosphooligosaccharide-proteinosyltransferase subunit DAD1 (4-12)
  source 1..27: mol_type = other RNA
agcgtggtctccgttatctctagattc

SEQ ID NO: 60610 - RNA, 27 nt, synthetic construct
  misc_feature 1..27: note = Protein TBRG4 (151-159)
  source 1..27: mol_type = other RNA
agcgtgtggcacggcaccctgtccaag

SEQ ID NO: 60611 - RNA, 27 nt, synthetic construct
  misc_feature 1..27: note = Nesprin-1 (4541-4549)
  source 1..27: mol_type = other RNA
agcgtgtacgactccgtcctgcagaag

SEQ ID NO: 60612 - RNA, 33 nt, synthetic construct
  misc_feature 1..33: note = Protein ELYS (1415-1425)
  source 1..33: mol_type = other RNA
agcgtgtacgagggcaagatcttcacccagaaa

SEQ ID NO: 60613 - RNA, 30 nt, synthetic construct; identical to SEQ ID NO: 36386
  misc_feature 1..30: note = ATPase family AAA domain-containing protein 2 (757-766)
  source 1..30: mol_type = other RNA

SEQ ID NO: 60614 - RNA, 27 nt, synthetic construct
  misc_feature 1..27: note = Type I inositol 1,4,5-trisphosphate 5-phosphatase (94-102)
  source 1..27: mol_type = other RNA
agcgtgtactccggcatcagacacaag

SEQ ID NO: 60615 - RNA, 27 nt, synthetic construct
  misc_feature 1..27: note = Disks large homolog 3 (45-53)
  source 1..27: mol_type = other RNA
agctacggcgacatcctgcacgtgatt

SEQ ID NO: 60616 - RNA, 27 nt, synthetic construct
  misc_feature 1..27: note = Long-chain-fatty-acid-CoA ligase 5 (359-367)
  source 1..27: mol_type = other RNA
agctacctgcccctcgcccacatgttc

SEQ ID NO: 60617 - RNA, 27 nt, synthetic construct
  misc_feature 1..27: note = Trafficking protein particle complex subunit 1 (132-140)
  source 1..27: mol_type = other RNA
agctacgtgagatccctgcccttcttt

SEQ ID NO: 60618 - RNA, 27 nt, synthetic construct
  misc_feature 1..27: note = HLA class I histocompatibility antigen, B-15 alpha chain (158-166)
  source 1..27: mol_type = other RNA
accgccgctgacacagcagcccagatc

SEQ ID NO: 60619 - RNA, 27 nt, synthetic construct
  misc_feature 1..27: note = Bromodomain testis-specific protein (144-152)
  source 1..27: mol_type = other RNA
accgccgctccccctgcacagccactg

SEQ ID NO: 60620 - RNA, 24 nt, synthetic construct
  misc_feature 1..24: note = Heterochromatin protein 1-binding protein 3 (363-370)
  source 1..24: mol_type = other RNA
accgccctgaagaaatacgtgctc

SEQ ID NO: 60621 - RNA, 24 nt, synthetic construct
  misc_feature 1..24: note = Probable E3 ubiquitin-protein ligase HERC4 (592-599)
  source 1..24: mol_type = other RNA
accgccctgaaggtgctcgagatc

SEQ ID NO: 60622 - RNA, 24 nt, synthetic construct
  misc_feature 1..24: note = Histone H1.3 (4-11)
  source 1..24: mol_type = other RNA
accgcccccctggctcctacaatc

SEQ ID NO: 60623 - RNA, 27 nt, synthetic construct
  misc_feature 1..27: note = Malectin (10-18)
  source 1..27: mol_type = other RNA
accgccgtggctctgctcagacttctg

SEQ ID NO: 60624 - RNA, 27 nt, synthetic construct
  misc_feature 1..27: note = Glyoxalase domain-containing protein 4 (117-125)
  source 1..27: mol_type = other RNA
accgaggcccccggcgggtacaagttc

SEQ ID NO: 60625 - RNA, 27 nt, synthetic construct
  misc_feature 1..27: note = SRSF protein kinase 2 (529-537)
  source 1..27: mol_type = other RNA
accgaggacatccagacaagacaatac

SEQ ID NO: 60626 - RNA, 36 nt, synthetic construct
  misc_feature 1..36: note = Twinfilin-2 (164-175)
  source 1..36: mol_type = other RNA
accgagatcagcgtggaatccaagcaccagacactg

SEQ ID NO: 60627 - RNA, 27 nt, synthetic construct
  misc_feature 1..27: note = Nucleolar protein 14 (741-749)
  source 1..27: mol_type = other RNA
accgagatggaaagccagaagcaactg

SEQ ID NO: 60628 - RNA, 27 nt, synthetic construct
  misc_feature 1..27: note = ATPase WRNIP1 (477-485)
  source 1..27: mol_type = other RNA
accgagaacgacgtgaaggaaggcctg

SEQ ID NO: 60629 - RNA, 30 nt, synthetic construct
  misc_feature 1..30: note = 4F2 cell-surface antigen heavy chain (5-14)
  source 1..30: mol_type = other RNA
accgaggtggacatgaaggaagtcgagctg

SEQ ID NO: 60630 - RNA, 27 nt, synthetic construct
  misc_feature 1..27: note = Transgelin (191-199)
  source 1..27: mol_type = other RNA
accggctacgggagacccaggcagatc

SEQ ID NO: 60631 - RNA, 27 nt, synthetic construct
  misc_feature 1..27: note = Splicing factor 3A subunit 3 (238-246)
  source 1..27: mol_type = other RNA
acccacgccggcgctcatctggacctc

SEQ ID NO: 60632 - RNA, 27 nt, synthetic construct
  misc_feature 1..27: note = Histone-binding protein RBBP4 (37-45)
  source 1..27: mol_type = other RNA
acccacgccctggagtggcccagcctc

SEQ ID NO: 60633 - RNA, 27 nt, synthetic construct
  misc_feature 1..27: note = Bifunctional glutamate/proline-tRNA ligase (614-622)
  source 1..27: mol_type = other RNA
acccacgccctgcccatccctgtgatt

SEQ ID NO: 60634 - RNA, 27 nt, synthetic construct
  misc_feature 1..27: note = Activator of 90 kDa heat shock protein ATPase homolog 1 (236-244)
  source 1..27: mol_type = other RNA
acccacgcccccgctacactggaggca

SEQ ID NO: 60635 - RNA, 27 nt, synthetic construct
  misc_feature 1..27: note = Integrin beta-7 (446-454)
  source 1..27: mol_type = other RNA
acccactgcctgcccgagcctcatctc

SEQ ID NO: 60636 - RNA, 30 nt, synthetic construct
  misc_feature 1..30: note = Echinoderm microtubule-associated protein-like 3 (848-857)
  source 1..30: mol_type = other RNA
acccacgacgatagccatctggtgtccctc

SEQ ID NO: 60637 - RNA, 27 nt, synthetic construct
  misc_feature 1..27: note = Double-stranded RNA-specific adenosine deaminase (1054-1062)
  source 1..27: mol_type = other RNA
acccacttcctgcagcccatctacctc

SEQ ID NO: 60638 - RNA, 27 nt, synthetic construct
  misc_feature 1..27: note = Histone deacetylase complex subunit SAP18 (85-93)
  source 1..27: mol_type = other RNA
acccacttcaactttgccatcgtgttc

SEQ ID NO: 60639 - RNA, 27 nt, synthetic construct
  misc_feature 1..27: note = Ubiquitin carboxyl-terminal hydrolase 34 (2105-2113)
  source 1..27: mol_type = other RNA
acccacttcagctttcccctgagactc

SEQ ID NO: 60640 - RNA, 27 nt, synthetic construct
  misc_feature 1..27: note = Syntaxin-binding protein 1 (570-578)
  source 1..27: mol_type = other RNA
acccacatcctgacaccccagaagctc

SEQ ID NO: 60641 - RNA, 30 nt, synthetic construct
  misc_feature 1..30: note = Telomere-associated protein RIF1 (62-71)
  source 1..30: mol_type = other RNA
acccacatcagctcccagaactctgagctg

SEQ ID NO: 60642 - RNA, 30 nt, synthetic construct
  misc_feature 1..30: note = RE1-silencing transcription factor (917-926)
  source 1..30: mol_type = other RNA
acccacatcagctcctctggccagaacctg

SEQ ID NO: 60643 - RNA, 27 nt, synthetic construct
  misc_feature 1..27: note = Microtubule-actin cross-linking factor 1, isoforms 1/2/3/5 (6374-6382)
  source 1..27: mol_type = other RNA
acccacatggagctgtacagccagctc

SEQ ID NO: 60644 - RNA, 27 nt, synthetic construct
  misc_feature 1..27: note = ATP-citrate synthase (409-417)
  source 1..27: mol_type = other RNA
acccacatgacagccatcgtgggcatg

SEQ ID NO: 60645 - RNA, 27 nt, synthetic construct
  misc_feature 1..27: note = Protein tyrosine phosphatase type IVA 1 (22-30)
  source 1..27: mol_type = other RNA
acccacaaccccacaaatgccactctg

SEQ ID NO: 60646 - RNA, 27 nt, synthetic construct
  misc_feature 1..27: note = Phospholipase D3 (389-397)
  source 1..27: mol_type = other RNA
acccacagcgacatccaggtgaagctg

SEQ ID NO: 60647 - RNA, 27 nt, synthetic construct
  misc_feature 1..27: note = General transcription factor IIH subunit 5 (41-49)
  source 1..27: mol_type = other RNA
acccacgtgttcgtcatcgccgagctg

SEQ ID NO: 60648 - RNA, 30 nt, synthetic construct
  misc_feature 1..30: note = DNA replication licensing factor MCM6 (781-790)
  source 1..30: mol_type = other RNA
acccactacgaccatgtgctgatcgagctc

SEQ ID NO: 60649 - RNA, 27 nt, synthetic construct
  misc_feature 1..27: note = Microfibrillar-associated protein 1 (372-380)
  source 1..27: mol_type = other RNA
accatcctgcccaaggtgatgcaggtc

SEQ ID NO: 60650 - RNA, 27 nt, synthetic construct
  misc_feature 1..27: note = Putative protein arginine N-methyltransferase 9 (164-172)
  source 1..27: mol_type = other RNA
accatctacaacgccgctattcagaag

SEQ ID NO: 60651 - RNA, 27 nt, synthetic construct
  misc_feature 1..27: note = Protein NYNRIN (1487-1495)
  source 1..27: mol_type = other RNA
accctggccgacatcattgctagactc

SEQ ID NO: 60652 - RNA, 27 nt, synthetic construct
  misc_feature 1..27: note = Ankyrin repeat and KH domain-containing protein 1 (1028-1036)
  source 1..27: mol_type = other RNA
accctggacgatctcatcgccgctgtg

SEQ ID NO: 60653 - RNA, 27 nt, synthetic construct
  misc_feature 1..27: note = TGF-beta-activated kinase 1 and MAP3K7-binding protein 1 (426-434)
  source 1..27: mol_type = other RNA
accctggacgaggccacacccactctc

SEQ ID NO: 60654 - RNA, 27 nt, synthetic construct
  misc_feature 1..27: note = Exocyst complex component 1 (91-99)
  source 1..27: mol_type = other RNA
accctgggcaacgtgctcgtcacagtt

SEQ ID NO: 60655 - RNA, 30 nt, synthetic construct
  misc_feature 1..30: note = Spliceosome RNA helicase DDX39B (114-123)
  source 1..30: mol_type = other RNA
accctgcacggcctccagcaatactatgtg

SEQ ID NO: 60656 - RNA, 27 nt, synthetic construct
  misc_feature 1..27: note = Hexokinase-1 (35-43)
  source 1..27: mol_type = other RNA
accctgatcgacattatgacaagattc

SEQ ID NO: 60657 - RNA, 27 nt, synthetic construct
  misc_feature 1..27: note = Short transient receptor potential channel 4-associated protein (209-217)
  source 1..27: mol_type = other RNA
accctgatcgaggacattctcggcgtg

SEQ ID NO: 60658 - RNA, 27 nt, synthetic construct
  misc_feature 1..27: note = Cullin-7 (386-394)
  source 1..27: mol_type = other RNA
accctgatcagcgagctcgtgcaggcc

SEQ ID NO: 60659 - RNA, 33 nt, synthetic construct
  misc_feature 1..33: note = T-complex protein 1 subunit eta (11-21)
  source 1..33: mol_type = other RNA
accctgctcgccgctgagttccttaagcaggtg

SEQ ID NO: 60660 - RNA, 33 nt, synthetic construct
  misc_feature 1..33: note = NADH-cytochrome b5 reductase 1 (39-49)
  source 1..33: mol_type = other RNA
accctgctcgaccccaacgagaagtaccttctg

SEQ ID NO: 60661 - RNA, 27 nt, synthetic construct
  misc_feature 1..27: note = Centrosomal protein POC5 (254-262)
  source 1..27: mol_type = other RNA
accctgctcaagaaagtgtggaaggtc

SEQ ID NO: 60662 - RNA, 27 nt, synthetic construct
  misc_feature 1..27: note = Protrudin (88-96)
  source 1..27: mol_type = other RNA
accctgctcaacagcacacttttcctg

SEQ ID NO: 60663 - RNA, 27 nt, synthetic construct
  misc_feature 1..27: note = Eukaryotic translation initiation factor 3 subunit M (163-171)
  source 1..27: mol_type = other RNA
accctgctcagacttctgtacgaggcc

SEQ ID NO: 60664 - RNA, 27 nt, synthetic construct
  misc_feature 1..27: note = DNA mismatch repair protein Msh6 (739-747)
  source 1..27: mol_type = other RNA
accctgaacaatctcgagatcttcctt

SEQ ID NO: 60665 - RNA, 27 nt, synthetic construct
  misc_feature 1..27: note = Protein SDA1 homolog (404-412)
  source 1..27: mol_type = other RNA
accctgaacccccagatgctccaaaag

SEQ ID NO: 60666 - RNA, 27 nt, synthetic construct
  misc_feature 1..27: note = Testis-expressed sequence 10 protein (436-444)
  source 1..27: mol_type = other RNA
accctgagcgacatcatggtgtccctc

SEQ ID NO: 60667 - RNA, 27 nt, synthetic construct
  misc_feature 1..27: note = Transcription initiation factor TFIID subunit 8 (89-97)
  source 1..27: mol_type = other RNA
accctgagcgacatcgtggtcacactc

SEQ ID NO: 60668 - RNA, 27 nt, synthetic construct
  misc_feature 1..27: note = Serine/threonine-protein kinase SIK2 (269-277)
  source 1..27: mol_type = other RNA
accctgagcgaggtgacaaaccagctc

SEQ ID NO: 60669 - RNA, 27 nt, synthetic construct
  misc_feature 1..27: note = MAP kinase-activating death domain protein (291-299)
  source 1..27: mol_type = other RNA
accctggtggacttccccctccacctt

SEQ ID NO: 60670 - RNA, 33 nt, synthetic construct
  misc_feature 1..33: note = Motile sperm domain-containing protein 1 (39-49)
  source 1..33: mol_type = other RNA
accctgtacaacccctatgagttcgccctcaag

SEQ ID NO: 60671 - RNA, 27 nt, synthetic construct
  misc_feature 1..27: note = Chondroitin sulfate proteoglycan 4 (21-29)
  source 1..27: mol_type = other RNA
accatgctggccagactcgctagcgca

SEQ ID NO: 60672 - RNA, 27 nt, synthetic construct
  misc_feature 1..27: note = Poly (ADP-ribose) polymerase 14 (1511-1519)
  source 1..27: mol_type = other RNA
accatgaacgagaagcagctgttccac

SEQ ID NO: 60673 - RNA, 27 nt, synthetic construct
  misc_feature 1..27: note = ATP-binding cassette sub-family F member 2 (218-226)
  source 1..27: mol_type = other RNA
acccccgccatgcagagaaagaaactg

SEQ ID NO: 60674 - RNA, 27 nt, synthetic construct
  misc_feature 1..27: note = Splicing factor, arginine/serine-rich 19 (1147-1155)
  source 1..27: mol_type = other RNA
acccccgcccctgtgccaacaagcctg

SEQ ID NO: 60675 - RNA, 27 nt, synthetic construct
  misc_feature 1..27: note = SCAN domain-containing protein 1 (132-140)
  source 1..27: mol_type = other RNA
acccccggccctgccgggagcagactg

SEQ ID NO: 60676 - RNA, 27 nt, synthetic construct
  misc_feature 1..27: note Dolichyl-diphosphooligosaccharide-proteinosyltransferase subunit 2 (291-299)
  source 1..27: mol_type = other RNA
accccccaccagacattcgtgagactg

SEQ ID NO: 60677 - RNA, 27 nt, synthetic construct
  misc_feature 1..27: note = Protein ELYS (1773-1781)
  source 1..27: mol_type = other RNA
acccccaagatgcctggccagagcgtg

SEQ ID NO: 60678 - RNA, 27 nt, synthetic construct
  misc_feature 1..27: note = Microtubule-associated protein 4 (892-900)
  source 1..27: mol_type = other RNA
acccccatgcctagcagaccatccaca

SEQ ID NO: 60679 - RNA, 24 nt, synthetic construct
  misc_feature 1..24: note = Nucleophosmin (95-102)
  source 1..24: mol_type = other RNA
accccccctgtggtcctgagactc

SEQ ID NO: 60680 - RNA, 33 nt, synthetic construct
  misc_feature 1..33: note = Filamin-A (812-822)
  source 1..33: mol_type = other RNA
acccccagaggcgccgggagctacacaatcatg

SEQ ID NO: 60681 - RNA, 33 nt, synthetic construct
  misc_feature 1..33: note = 40S ribosomal protein S9 (15-25)
  source 1..33: mol_type = other RNA
acccccagaaggcctttcgagaagagccggctg

SEQ ID NO: 60682 - RNA, 27 nt, synthetic construct
  misc_feature 1..27: note = BTB/POZ domain-containing adapter for CUL3-mediated RhoA degradation protein 2 (290-298)
  source 1..27: mol_type = other RNA
acccccagagtgcctgacaacagcctg

SEQ ID NO: 60683 - RNA, 27 nt, synthetic construct
  misc_feature 1..27: note = Sentrin-specific protease 3 (353-361)
  source 1..27: mol_type = other RNA
acccccagcagaaagggcctggtgctc

SEQ ID NO: 60684 - RNA, 24 nt, synthetic construct
  misc_feature 1..24: note = Interferon regulatory factor 1 (54-61)
  source 1..24: mol_type = other RNA
acccccgtgagactgcctagcatc

SEQ ID NO: 60685 - RNA, 27 nt, synthetic construct
  misc_feature 1..27: note = Replication protein A 70 kDa DNA-binding subunit (191-199)
  source 1..27: mol_type = other RNA
accccctaccagagcaagtggacaatc

SEQ ID NO: 60686 - RNA, 27 nt, synthetic construct
  misc_feature 1..27: note = Splicing factor U2AF 65 kDa subunit (179-187)
  source 1..27: mol_type = other RNA
acccaggcccccggcaaccctgtgctg

SEQ ID NO: 60687 - RNA, 27 nt, synthetic construct
  misc_feature 1..27: note = GPN-loop GTPase 1 (88-96)
  source 1..27: mol_type = other RNA
accagattcgaccaggtgatgaagttt

SEQ ID NO: 60688 - RNA, 27 nt, synthetic construct
  misc_feature 1..27: note = RuvB-like 2 (391-399)
  source 1..27: mol_type = other RNA
accagaatcggcctggagacaagcctc

SEQ ID NO: 60689 - RNA, 27 nt, synthetic construct
  misc_feature 1..27: note = 40S ribosomal protein S4, Y isoform 2 (220-228)
  source 1..27: mol_type = other RNA
accagaatcagcaacattttcgtgata

SEQ ID NO: 60690 - RNA, 27 nt, synthetic construct
  misc_feature 1..27: note = 40S ribosomal protein S4, X isoform (201-209)
  source 1..27: mol_type = other RNA
accagactgagcaacatcttcgtgatt

SEQ ID NO: 60691 - RNA, 27 nt, synthetic construct
  misc_feature 1..27: note = Transmembrane protein 147 (157-165)
  source 1..27: mol_type = other RNA
accagatacgacctgtatcacacattc

SEQ ID NO: 60692 - RNA, 30 nt, synthetic construct; identical to SEQ ID NO: 36465
  misc_feature 1..30: note = Transcriptional regulator Kaiso (365-374)
  source 1..30: mol_type = other RNA

SEQ ID NO: 60693 - RNA, 24 nt, synthetic construct
  misc_feature 1..24: note = HCG2043421, isoform CRA_c (58-65)
  source 1..24: mol_type = other RNA
accagcaagcagcccgtgggcttc

SEQ ID NO: 60694 - RNA, 27 nt, synthetic construct
  misc_feature 1..27: note = WD repeat-containing protein 78 (675-683)
  source 1..27: mol_type = other RNA
accagcgtggtctacgacgttgcctgg

SEQ ID NO: 60695 - RNA, 27 nt, synthetic construct
  misc_feature 1..27: note = Non-POU domain-containing octamer-binding protein (127-135)
  source 1..27: mol_type = other RNA
accacattccccagacctgtgactgtc

SEQ ID NO: 60696 - RNA, 33 nt, synthetic construct
  misc_feature 1..33: note = Nicotinamide phosphoribosyltransferase (220-230)
  source 1..33: mol_type = other RNA
accgtggccggcctggctctcatcaagaaatac

SEQ ID NO: 60697 - RNA, 27 nt, synthetic construct
  misc_feature 1..27: note = 1,2-dihydroxy-3-keto-5-methylthiopentene dioxygenase (150-158)
  source 1..27: mol_type = other RNA
accgtggacgagaagaactacacaaaa

SEQ ID NO: 60698 - RNA, 30 nt, synthetic construct
  misc_feature 1..30: note = Aldehyde dehydrogenase family 16 member A1 (661-670)
  source 1..30: mol_type = other RNA
accgtgttccccgccggcctggctaacgtc

SEQ ID NO: 60699 - RNA, 27 nt, synthetic construct
  misc_feature 1..27: note = Protein phosphatase 1D (261-269)
  source 1..27: mol_type = other RNA
accgtgatcgaccagattcccttcctg

SEQ ID NO: 60700 - RNA, 27 nt, synthetic construct
  misc_feature 1..27: note = Integrin beta-7 (200-208)
  source 1..27: mol_type = other RNA
accgtgctgcccttcgtcagcacagtt

SEQ ID NO: 60701 - RNA, 27 nt, synthetic construct
  misc_feature 1..27: note = Caspase-1 (49-57)
  source 1..27: mol_type = other RNA
accgtgatggacaagacaagagccctg

SEQ ID NO: 60702 - RNA, 27 nt, synthetic construct
  misc_feature 1..27: note = Kelch-like protein 8 (200-208)
  source 1..27: mol_type = other RNA
accgtgatgggcaagatcttcgccgtc

SEQ ID NO: 60703 - RNA, 27 nt, synthetic construct
  misc_feature 1..27: note CMP-N-acetylneuraminate-beta-galactosamide-alpha-2,3-sialyl transf erase 1 (229-237)
  source 1..27: mol_type = other RNA
acctacatccccgtgcctgccaagatt

SEQ ID NO: 60704 - RNA, 27 nt, synthetic construct
  misc_feature 1..27: note = Vacuolar protein sorting-associated protein 13C (2564-2572)
  source 1..27: mol_type = other RNA
acctacatcagctggaaggaggaactg

SEQ ID NO: 60705 - RNA, 27 nt, synthetic construct
  misc_feature 1..27: note = Rho GTPase-activating protein 18 (597-605)
  source 1..27: mol_type = other RNA
acctacatgaaggacctgtatcagctc

SEQ ID NO: 60706 - RNA, 27 nt, synthetic construct
  misc_feature 1..27: note = Plexin-B2 (1279-1287)
  source 1..27: mol_type = other RNA
acctacacagacagagtgttctttctg

SEQ ID NO: 60707 - RNA, 27 nt, synthetic construct
  misc_feature 1..27: note = Poly (ADP-ribose) polymerase 14 (1544-1552)
  source 1..27: mol_type = other RNA
gtggcctacggcaaggggacctatttc

SEQ ID NO: 60708 - RNA, 27 nt, synthetic construct
  misc_feature 1..27: note = Zinc finger SWIM domain-containing protein 1 (322-330)
  source 1..27: mol_type = other RNA
gtggagagccacatccagcattccctg

SEQ ID NO: 60709 - RNA, 27 nt, synthetic construct
  misc_feature 1..27: note = Putative 40S ribosomal protein S10-like (27-35)
  source 1..27: mol_type = other RNA
gtgcacatgcccaagcatcctgagctg

SEQ ID NO: 60710 - RNA, 30 nt, synthetic construct
  misc_feature 1..30: note = Inosine-5'-monophosphate dehydrogenase 2 (361-370)
  source 1..30: mol_type = other RNA
gtgatcgccgacggcgggattcagaacgtc

SEQ ID NO: 60711 - RNA, 27 nt, synthetic construct
  misc_feature 1..27: note = Protein DENND6A (261-269)
  source 1..27: mol_type = other RNA
gtgatcctgcccaccgtccacgaggtt

SEQ ID NO: 60712 - RNA, 27 nt, synthetic construct
  misc_feature 1..27: note = N-glycosylase/DNA lyase (58-66)
  source 1..27: mol_type = other RNA
gtgctggccgaccaggtctggaccctc

SEQ ID NO: 60713 - RNA, 27 nt, synthetic construct
  misc_feature 1..27: note = CREB-binding protein (238-246)
  source 1..27: mol_type = other RNA
gtgctggccgagaccctcacacaggtc

SEQ ID NO: 60714 - RNA, 27 nt, synthetic construct
  misc_feature 1..27: note = Transmembrane protein 209 (29-37)
  source 1..27: mol_type = other RNA
gtgctggcctggggcctccttaacgtc

SEQ ID NO: 60715 - RNA, 27 nt, synthetic construct
  misc_feature 1..27: note = Kelch-like protein 5 (324-332)
  source 1..27: mol_type = other RNA
gtgctggacgataagctctacgtcgtt

SEQ ID NO: 60716 - RNA, 27 nt, synthetic construct
  misc_feature 1..27: note = RNA-binding protein 40 (490-498)
  source 1..27: mol_type = other RNA
gtgctgttcggcaagcccatggtcgtt

SEQ ID NO: 60717 - RNA, 27 nt, synthetic construct
  misc_feature 1..27: note = Pre-mRNA-splicing factor ATP-dependent RNA helicase PRP16 (663-671)
  source 1..27: mol_type = other RNA
gtgctgttcggcctccttagagaggtc

SEQ ID NO: 60718 - RNA, 36 nt, synthetic construct
  misc_feature 1..36: note = Translocon-associated protein subunit alpha (19-30)
  source 1..36: mol_type = other RNA
gtgctgttcagaggcgggcccaggggactccttgcc

SEQ ID NO: 60719 - RNA, 36 nt, synthetic construct
  misc_feature 1..36: note = Translocon-associated protein subunit alpha (19-30)
  source 1..36: mol_type = other RNA
gtgctgttcagaggcgggcccaggggaagcctcgcc

SEQ ID NO: 60720 - RNA, 33 nt, synthetic construct
  misc_feature 1..33: note = Major prion protein (226-236)
  source 1..33: mol_type = other RNA
gtgctgttcagctccccccctgtcatcctcctt

SEQ ID NO: 60721 - RNA, 27 nt, synthetic construct
  misc_feature 1..27: note = Fibroblast growth factor receptor substrate 2 (252-260)
  source 1..27: mol_type = other RNA
gtgctgggccccacccctgtccagaag

SEQ ID NO: 60722 - RNA, 30 nt, synthetic construct
  misc_feature 1..30: note = Actin-related protein 2/3 complex subunit 4 (61-70)
  source 1..30: mol_type = other RNA
gtgctgatcgagggcagcattaactccgtc

SEQ ID NO: 60723 - RNA, 30 nt, synthetic construct
  misc_feature 1..30: note = mRNA cap guanine-N7 methyltransferase (182-191)
  source 1..30: mol_type = other RNA
gtgctgatcggcgagttcctcgaaaaggtc

SEQ ID NO: 60724 - RNA, 30 nt, synthetic construct
  misc_feature 1..30: note = Trabeculin-alpha (4505-4514)
  source 1..30: mol_type = other RNA
gtgctgatcaagaacctccttgtcagcgtt

SEQ ID NO: 60725 - RNA, 27 nt, synthetic construct
  misc_feature 1..27: note = ATP-binding cassette sub-family F member 3 (85-93)
  source 1..27: mol_type = other RNA
gtgctgctcgacgcccccatccagctt

SEQ ID NO: 60726 - RNA, 27 nt, synthetic construct
  misc_feature 1..27: note = Vacuolar protein sorting-associated protein 8 homolog (414-422)
  source 1..27: mol_type = other RNA
gtgctgctcgacagcgtcgagaagctt

SEQ ID NO: 60727 - RNA, 30 nt, synthetic construct
  misc_feature 1..30: note = Fragile X mental retardation protein 1 (19-28)
  source 1..30: mol_type = other RNA
gtgctgctcgactaccaccttaactatctg

SEQ ID NO: 60728 - RNA, 27 nt, synthetic construct
  misc_feature 1..27: note = Signal recognition particle 14 kDa protein (2-10)
  source 1..27: mol_type = other RNA
gtgctgctcgagagcgaacagttcctt

SEQ ID NO: 60729 - RNA, 36 nt, synthetic construct
  misc_feature 1..36: note = Signal recognition particle 14 kDa protein (2-13)
  source 1..36: mol_type = other RNA
gtgctgctcgagagcgaacagttccttaccgagctg

SEQ ID NO: 60730 - RNA, 27 nt, synthetic construct
  misc_feature 1..27: note = Leucine-tRNA ligase, cytoplasmic (328-336)
  source 1..27: mol_type = other RNA
gtgctgatggagaacatcgtctacctc

SEQ ID NO: 60731 - RNA, 30 nt, synthetic construct
  misc_feature 1..30: note = E3 ubiquitin-protein ligase MARCH6 (457-466)
  source 1..30: mol_type = other RNA
gtgctgcccaacttcctcccttacaatgtc

SEQ ID NO: 60732 - RNA, 27 nt, synthetic construct
  misc_feature 1..27: note = DNA replication licensing factor MCM5 (120-128)
  source 1..27: mol_type = other RNA
gtgctgcaggacatccaagtcatgctc

SEQ ID NO: 60733 - RNA, 27 nt, synthetic construct
  misc_feature 1..27: note = Sarcolemmal membrane-associated protein (140-148)
  source 1..27: mol_type = other RNA
gtgctgcaggagaagatcgaagtcgtt

SEQ ID NO: 60734 - RNA, 27 nt, synthetic construct
  misc_feature 1..27: note = Trabeculin-alpha (2088-2096)
  source 1..27: mol_type = other RNA
gtgctgcagggcaagctcgccgaggtc

SEQ ID NO: 60735 - RNA, 27 nt, synthetic construct
  misc_feature 1..27: note = Cytoplasmic dynein 1 heavy chain 1 (1781-1789)
  source 1..27: mol_type = other RNA
gtgctgagcaacgtcgaggttaccctc

SEQ ID NO: 60736 - RNA, 27 nt, synthetic construct
  misc_feature 1..27: note = 5-formyltetrahydrofolate cyclo-ligase (35-43)
  source 1..27: mol_type = other RNA
gtgctgagccagaaggtcatcgcccac

SEQ ID NO: 60737 - RNA, 24 nt, synthetic construct
  misc_feature 1..24: note = Signal transducer and activator of transcription 1-alpha/beta (300-307)
  source 1..24: mol_type = other RNA
gtgctgtgggacagaaccttcagc

SEQ ID NO: 60738 - RNA, 30 nt, synthetic construct
  misc_feature 1..30: note = Signal transducer and activator of transcription 1-alpha/beta (300-309)
  source 1..30: mol_type = other RNA
gtgctgtgggacagaaccttcagcctcttt

SEQ ID NO: 60739 - RNA, 27 nt, synthetic construct
  misc_feature 1..27: note = Pre-rRNA-processing protein TSR1 homolog (678-686)
  source 1..27: mol_type = other RNA
gtgctgtggttcaagcccgtcgagctc

SEQ ID NO: 60740 - RNA, 27 nt, synthetic construct
  misc_feature 1..27: note = Dolichol-phosphate mannosyltransferase subunit 3 (58-66)
  source 1..27: mol_type = other RNA
gtgctgtggcccctccctgcctacctt

SEQ ID NO: 60741 - RNA, 33 nt, synthetic construct
  misc_feature 1..33: note = Msx2-interacting protein (557-567)
  source 1..33: mol_type = other RNA
gtgctgtacaacgagatcgaatatgcccaggct

SEQ ID NO: 60742 - RNA, 27 nt, synthetic construct
  misc_feature 1..27: note = 2',5'-phosphodiesterase 12 (419-427)
  source 1..27: mol_type = other RNA
gtgctgtaccccagcgcccaggagaag

SEQ ID NO: 60743 - RNA, 27 nt, synthetic construct
  misc_feature 1..27: note = Serine/threonine-protein kinase ATR (2265-2273)
  source 1..27: mol_type = other RNA
gtgatgatccccaccctgcctagcatt

SEQ ID NO: 60744 - RNA, 27 nt, synthetic construct
  misc_feature 1..27: note = Receptor-type tyrosine-protein phosphatase U (975-983)
  source 1..27: mol_type = other RNA
gtgatgatcaccaagctggtcgaggtt

SEQ ID NO: 60745 - RNA, 27 nt, synthetic construct
  misc_feature 1..27: note = Translocon-associated protein subunit gamma (64-72)
  source 1..27: mol_type = other RNA
gtgatgaccctggtcagcacatacctc

SEQ ID NO: 60746 - RNA, 24 nt, synthetic construct
  misc_feature 1..24: note = 60S ribosomal protein L13a (120-127)
  source 1..24: mol_type = other RNA
gtgcccgccgctctgaaggtcgtt

SEQ ID NO: 60747 - RNA, 27 nt, synthetic construct
  misc_feature 1..27: note = Ankyrin repeat and KH domain-containing protein 1 (1721-1729)
  source 1..27: mol_type = other RNA
gtgcccgccagcgtcgtttccagaatc

SEQ ID NO: 60748 - RNA, 27 nt, synthetic construct
  misc_feature 1..27: note = Protein UXT (95-103)
  source 1..27: mol_type = other RNA
gtgcccgacaccagcagaatctacgtc

SEQ ID NO: 60749 - RNA, 27 nt, synthetic construct
  misc_feature 1..27: note = Guanine nucleotide-binding protein-like 3 (295-303)
  source 1..27: mol_type = other RNA
gtgcccctggacaagcagatcaccatt

SEQ ID NO: 60750 - RNA, 27 nt, synthetic construct
  misc_feature 1..27: note = Pumilio homolog 1 (345-353)
  source 1..27: mol_type = other RNA
gtgcccctggaccctatggagcacgtc

SEQ ID NO: 60751 - RNA, 27 nt, synthetic construct
  misc_feature 1..27: note = Myotubularin (85-93)
  source 1..27: mol_type = other RNA
gtgcccctgggcgtcatcagcagaatt

SEQ ID NO: 60752 - RNA, 24 nt, synthetic construct
  misc_feature 1..24: note = Ran-binding protein 6 (956-963)
  source 1..24: mol_type = other RNA
gtgcccctgctcgtcaaggttatc

SEQ ID NO: 60753 - RNA, 27 nt, synthetic construct
  misc_feature 1..27: note = Cytoplasmic dynein 1 heavy chain 1 (2524-2532)
  source 1..27: mol_type = other RNA
gtgcccctgcctaccgccccaaacatc

SEQ ID NO: 60754 - RNA, 27 nt, synthetic construct
  misc_feature 1..27: note = Transcriptional regulator Kaiso (118-126)
  source 1..27: mol_type = other RNA
gtgcccctgagccaggtcaagtccatc

SEQ ID NO: 60755 - RNA, 27 nt, synthetic construct
  misc_feature 1..27: note = Transcription factor Sp4 (217-225)
  source 1..27: mol_type = other RNA
gtgcccaacctgcagaccgtcagcgtt

SEQ ID NO: 60756 - RNA, 27 nt, synthetic construct
  misc_feature 1..27: note = L-lactate dehydrogenase B chain (19-27)
  source 1..27: mol_type = other RNA
gtgcccaacaataagatcaccgtcgtt

SEQ ID NO: 60757 - RNA, 27 nt, synthetic construct
  misc_feature 1..27: note = Histone deacetylase complex subunit SAP130 (800-808)
  source 1..27: mol_type = other RNA
gtgccccctctggccaccaacacagtc

SEQ ID NO: 60758 - RNA, 30 nt, synthetic construct
  misc_feature 1..30: note = Endoplasmic reticulum resident protein 29 (5-14)
  source 1..30: mol_type = other RNA
gtgcccagagccgctttcctgagccctctc

SEQ ID NO: 60759 - RNA, 27 nt, synthetic construct
  misc_feature 1..27: note = Myotubularin (35-43)
  source 1..27: mol_type = other RNA
gtgcccagactgcctggcgagaccctc

SEQ ID NO: 60760 - RNA, 27 nt, synthetic construct
  misc_feature 1..27: note = Adapter protein CIKS (387-395)
  source 1..27: mol_type = other RNA
gtgcccagacctccaagcaacccgccc

SEQ ID NO: 60761 - RNA, 27 nt, synthetic construct
  misc_feature 1..27: note = Histone H2A deubiquitinase MYSM1 (446-454)
  source 1..27: mol_type = other RNA
gtgcccagacctaccaagagctccttc

SEQ ID NO: 60762 - RNA, 30 nt, synthetic construct
  misc_feature 1..30: note = PDZ and LIM domain protein 5 (203-212)
  source 1..30: mol_type = other RNA
gtgcccagacagcctaccgtcacaagcgtt

SEQ ID NO: 60763 - RNA, 33 nt, synthetic construct
  misc_feature 1..33: note = Filamin-A (1503-1513)
  source 1..33: mol_type = other RNA
gtgcccagaagccctttcaaggtcaaagttctg

SEQ ID NO: 60764 - RNA, 27 nt, synthetic construct
  misc_feature 1..27: note = Ankyrin repeat domain-containing protein 40 (223-231)
  source 1..27: mol_type = other RNA
gtgcccagcaagcctccaatgtccctg

SEQ ID NO: 60765 - RNA, 27 nt, synthetic construct
  misc_feature 1..27: note = Uroporphyrinogen decarboxylase (106-114)
  source 1..27: mol_type = other RNA
gtgccctacctggtcggccaggttgtg

SEQ ID NO: 60766 - RNA, 24 nt, synthetic construct
  misc_feature 1..24: note = Puromycin-sensitive aminopeptidase-like protein (298-305)
  source 1..24: mol_type = other RNA
gtgccctaccctctgccaaagatc

SEQ ID NO: 60767 - RNA, 36 nt, synthetic construct
  misc_feature 1..36: note = Elongation factor 1-beta (214-225)
  source 1..36: mol_type = other RNA
gtgcagagcatggacgtcgccgctttcaacaagatc

SEQ ID NO: 60768 - RNA, 30 nt, synthetic construct
  misc_feature 1..30: note = DNA repair protein RAD51 homolog 3 (23-32)
  source 1..30: mol_type = other RNA
gtgagagtcaagctggttagcgccggcttc

SEQ ID NO: 60769 - RNA, 27 nt, synthetic construct
  misc_feature 1..27: note = CGG triplet repeat-binding protein 1 (6-14)
  source 1..27: mol_type = other RNA
gtgaccgccccccctgctagaaacagg

SEQ ID NO: 60770 - RNA, 27 nt, synthetic construct
  misc_feature 1..27: note = UDP-N-acetylhexosamine pyrophosphorylase-like protein 1 (35-43)
  source 1..27: mol_type = other RNA
gtgacctaccccaagggcatgtataga

SEQ ID NO: 60771 - RNA, 27 nt, synthetic construct
  misc_feature 1..27: note = Transformation/transcription domain-associated protein (246-254)
  source 1..27: mol_type = other RNA
gtggtcgccgagttcgttcccctgatc

SEQ ID NO: 60772 - RNA, 27 nt, synthetic construct
  misc_feature 1..27: note = Ubiquitin carboxyl-terminal hydrolase BAP1 (172-180)
  source 1..27: mol_type = other RNA
gtggtcaagccccctggcagctccctg

SEQ ID NO: 60773 - RNA, 27 nt, synthetic construct
  misc_feature 1..27: note = Ran-binding protein 9 (33-41)
  source 1..27: mol_type = other RNA
gtggtcctgcccgcccctccagctgtt

SEQ ID NO: 60774 - RNA, 30 nt, synthetic construct
  misc_feature 1..30: note = ATP-dependent DNA helicase Q1 (430-439)
  source 1..30: mol_type = other RNA
gtggtcatggagaacgttggccagcaaaag

SEQ ID NO: 60775 - RNA, 27 nt, synthetic construct
  misc_feature 1..27: note = Heterogeneous nuclear ribonucleoprotein A1 (44-52)
  source 1..27: mol_type = other RNA
gtggtcatgagagaccccaacaccaag

SEQ ID NO: 60776 - RNA, 30 nt, synthetic construct
  misc_feature 1..30: note = G2/mitotic-specific cyclin-B1 (387-396)
  source 1..30: mol_type = other RNA
gtggtcatggttaaccagggcctgaccaag

SEQ ID NO: 60777 - RNA, 27 nt, synthetic construct
  misc_feature 1..27: note = Ral GTPase-activating protein subunit beta (37-45)
  source 1..27: mol_type = other RNA
gtggtcagacccctgggccaggttctc

SEQ ID NO: 60778 - RNA, 27 nt, synthetic construct
  misc_feature 1..27: note = CTD small phosphatase-like protein 2 (354-362)
  source 1..27: mol_type = other RNA
gtgtacgccgacaagctgctcaacatc

SEQ ID NO: 60779 - RNA, 27 nt, synthetic construct
  misc_feature 1..27: note = Sorting nexin-8 (400-408)
  source 1..27: mol_type = other RNA
gtgtacctgcccctcaccagccacatc

SEQ ID NO: 60780 - RNA, 27 nt, synthetic construct
  misc_feature 1..27: note = Tuftelin-interacting protein 11 (428-436)
  source 1..27: mol_type = other RNA
gtgtaccccctgatgaaggagtatttc

SEQ ID NO: 60781 - RNA, 27 nt, synthetic construct
  misc_feature 1..27: note = Syntaxin-binding protein 6 (92-100)
  source 1..27: mol_type = other RNA
tggatgctggagcagctcagacaagtg

SEQ ID NO: 60782 - RNA, 27 nt, synthetic construct
  misc_feature 1..27: note = Protein syndesmos (33-41)
  source 1..27: mol_type = other RNA
tacgccgctaaccccggccagctgttc

SEQ ID NO: 60783 - RNA, 27 nt, synthetic construct
  misc_feature 1..27: note = Heat shock cognate 71 kDa protein (545-553)
  source 1..27: mol_type = other RNA
tacgccttcaacatgaaggctaccgtg

SEQ ID NO: 60784 - RNA, 27 nt, synthetic construct
  misc_feature 1..27: note = HLA class I histocompatibility antigen, alpha chain G (115-123)
  source 1..27: mol_type = other RNA
tacgcctatgacggcaaggattacctg

SEQ ID NO: 60785 - RNA, 30 nt, synthetic construct
  misc_feature 1..30: note = RHO/RAC effector protein (1011-1020)
  source 1..30: mol_type = other RNA
tacgagatcgacatgaagcagtataccctg

SEQ ID NO: 60786 - RNA, 27 nt, synthetic construct
  misc_feature 1..27: note = Actin, alpha skeletal muscle (36-44)
  source 1..27: mol_type = other RNA
tacgagctgcccgacggccaggtgatc

SEQ ID NO: 60787 - RNA, 36 nt, synthetic construct
  misc_feature 1..36: note = Mitogen-activated protein kinase kinase kinase 6 (112-123)
  source 1..36: mol_type = other RNA
tacgagtataccgaaacaggcgagagactggtgctc

SEQ ID NO: 60788 - RNA, 27 nt, synthetic construct
  misc_feature 1..27: note = Gametogenetin-binding protein 2 (25-33)
  source 1..27: mol_type = other RNA
tacatcgacgataccctgacaatggtg

SEQ ID NO: 60789 - RNA, 27 nt, synthetic construct
  misc_feature 1..27: note = ATP-dependent 6-phosphofructokinase, muscle type (292-300)
  source 1..27: mol_type = other RNA
tacatcttcgaggaaccctttaccatt

SEQ ID NO: 60790 - RNA, 27 nt, synthetic construct
  misc_feature 1..27: note = Sphingomyelin phosphodiesterase 4 (105-113)
  source 1..27: mol_type = other RNA
tacaagttcgactttcccgtgagctat

SEQ ID NO: 60791 - RNA, 27 nt, synthetic construct
  misc_feature 1..27: note = Microsomal glutathione S-transferase 3 (36-44)
  source 1..27: mol_type = other RNA
tacaaggtggagtatcccatcatgtac

SEQ ID NO: 60792 - RNA, 27 nt, synthetic construct
  misc_feature 1..27: note = Zinc finger BED domain-containing protein 5 (476-484)
  source 1..27: mol_type = other RNA
tacctggccgacatcttcaccaagctc

SEQ ID NO: 60793 - RNA, 27 nt, synthetic construct
  misc_feature 1..27: note = SH3 domain-binding protein 1 (145-153)
  source 1..27: mol_type = other RNA
tacctggccgacctctatcacttcgtg

SEQ ID NO: 60794 - RNA, 27 nt, synthetic construct
  misc_feature 1..27: note = E3 ubiquitin-protein ligase UBR4 (824-832)
  source 1..27: mol_type = other RNA
tacctggccgacgtgaccaacgctctc

SEQ ID NO: 60795 - RNA, 27 nt, synthetic construct
  misc_feature 1..27: note = Exportin-4 (318-326)
  source 1..27: mol_type = other RNA
tacctggcccacttcatcgagggcctc

SEQ ID NO: 60796 - RNA, 27 nt, synthetic construct
  misc_feature 1..27: note = ATP-dependent RNA helicase DHX8 (756-764)
  source 1..27: mol_type = other RNA
tacctggacgccagcctcatcaccgtg

SEQ ID NO: 60797 - RNA, 30 nt, synthetic construct; identical to SEQ ID NO: 36570
  misc_feature 1..30: note = ADP-ribosylation factor-like protein 6-interacting protein 1 (32-41)
  source 1..30: mol_type = other RNA

SEQ ID NO: 60798 - RNA, 33 nt, synthetic construct
  misc_feature 1..33: note = Protein dpy-30 homolog (56-66)
  source 1..33: mol_type = other RNA
tacctggaccagaccgtggtccccatcctcctt

SEQ ID NO: 60799 - RNA, 30 nt, synthetic construct
  misc_feature 1..30: note = Trafficking protein particle complex subunit 1 (7-16)
  source 1..30: mol_type = other RNA
tacctgttcgacagaaacggcgtgtgcctc

SEQ ID NO: 60800 - RNA, 24 nt, synthetic construct
  misc_feature 1..24: note = Sphingomyelin phosphodiesterase 2 (372-379)
  source 1..24: mol_type = other RNA
tacctgttccacgtgcaggaggtc

SEQ ID NO: 60801 - RNA, 27 nt, synthetic construct
  misc_feature 1..27: note = Protein yippee-like 1 (49-57)
  source 1..27: mol_type = other RNA
tacctgttcaacagcgtggtcaatgtt

SEQ ID NO: 60802 - RNA, 27 nt, synthetic construct
  misc_feature 1..27: note = Coatomer subunit alpha (738-746)
  source 1..27: mol_type = other RNA
tacctgggcgacgtgagcgagagagtc

SEQ ID NO: 60803 - RNA, 27 nt, synthetic construct
  misc_feature 1..27: note = 26S protease regulatory subunit 6B (239-247)
  source 1..27: mol_type = other RNA
tacctgggcgaggggcccagaatggtg

SEQ ID NO: 60804 - RNA, 27 nt, synthetic construct
  misc_feature 1..27: note = U2 snRNP-associated SURP motif-containing protein (276-284)
  source 1..27: mol_type = other RNA
tacctgggcaacatcaatccccagatg

SEQ ID NO: 60805 - RNA, 27 nt, synthetic construct
  misc_feature 1..27: note = Mortality factor 4-like protein 1 (290-298)
  source 1..27: mol_type = other RNA
tacctgcacgacttcctcaagtatctt

SEQ ID NO: 60806 - RNA, 33 nt, synthetic construct
  misc_feature 1..33: note = Coatomer subunit epsilon (127-137)
  source 1..33: mol_type = other RNA
tacctgcacgaccagaaccccgatgccgctctc

SEQ ID NO: 60807 - RNA, 27 nt, synthetic construct
  misc_feature 1..27: note = Antigen peptide transporter 2 (25-33)
  source 1..27: mol_type = other RNA
tacctgcacagccaggtggtctccgtt

SEQ ID NO: 60808 - RNA, 27 nt, synthetic construct
  misc_feature 1..27: note = Signal recognition particle subunit SRP68 (347-355)
  source 1..27: mol_type = other RNA
tacctgcacagctatctcacctacatc

SEQ ID NO: 60809 - RNA, 30 nt, synthetic construct
  misc_feature 1..30: note = ATP-binding cassette sub-family E member 1 (483-492)
  source 1..30: mol_type = other RNA
tacctgatcgacgagcccagcgcctatctc

SEQ ID NO: 60810 - RNA, 27 nt, synthetic construct
  misc_feature 1..27: note = Probable ATP-dependent RNA helicase DDX6 (139-147)
  source 1..27: mol_type = other RNA
tacctgatccccctccttgagagactg

SEQ ID NO: 60811 - RNA, 27 nt, synthetic construct
  misc_feature 1..27: note = Mitotic checkpoint serine/threonine-protein kinase BUB1 (44-52)
  source 1..27: mol_type = other RNA
tacctgatcaccctccttgagcacctg

SEQ ID NO: 60812 - RNA, 27 nt, synthetic construct
  misc_feature 1..27: note = 60S ribosomal protein L19 (105-113)
  source 1..27: mol_type = other RNA
tacctgaaggtgaaaggcaacgtcttc

SEQ ID NO: 60813 - RNA, 27 nt, synthetic construct
  misc_feature 1..27: note = E3 ubiquitin-protein ligase MARCH6 (514-522)
  source 1..27: mol_type = other RNA
tacctgctcgaccttcacagctatctg

SEQ ID NO: 60814 - RNA, 27 nt, synthetic construct
  misc_feature 1..27: note = Ras-like protein family member 11A (22-30)
  source 1..27: mol_type = other RNA
tacctgctccccaaggacatcaaactt

SEQ ID NO: 60815 - RNA, 27 nt, synthetic construct
  misc_feature 1..27: note = Nuclear pore complex protein Nup160 (542-550)
  source 1..27: mol_type = other RNA
tacctgctcccctatgagaaccttctg

SEQ ID NO: 60816 - RNA, 27 nt, synthetic construct
  misc_feature 1..27: note = E3 ubiquitin-protein ligase MGRN1 (248-256)
  source 1..27: mol_type = other RNA
tacctgctccaggagatctatggcatt

SEQ ID NO: 60817 - RNA, 27 nt, synthetic construct
  misc_feature 1..27: note = Eukaryotic initiation factor 4A-III (207-215)
  source 1..27: mol_type = other RNA
tacctgccccctgccacccaggtggtc

SEQ ID NO: 60818 - RNA, 27 nt, synthetic construct
  misc_feature 1..27: note = COP9 signalosome complex subunit 1 (211-219)
  source 1..27: mol_type = other RNA
tacctgcagaactggagccacgtgctc

SEQ ID NO: 60819 - RNA, 33 nt, synthetic construct; identical to SEQ ID NO: 36592
  misc_feature 1..33: note = Leucyl-cystinyl aminopeptidase (548-558)
  source 1..33: mol_type = other RNA

SEQ ID NO: 60820 - RNA, 27 nt, synthetic construct
  misc_feature 1..27: note = Core histone macro-H2A.1 (55-63)
  source 1..27: mol_type = other RNA
tacctgaccgccgagatcctcgaactt

SEQ ID NO: 60821 - RNA, 27 nt, synthetic construct
  misc_feature 1..27: note = U1 small nuclear ribonucleoprotein C (12-20)
  source 1..27: mol_type = other RNA
tacctgacccacgacagcccctccgtg

SEQ ID NO: 60822 - RNA, 27 nt, synthetic construct
  misc_feature 1..27: note = Cohesin subunit SA-2 (775-783)
  source 1..27: mol_type = other RNA
tacctgaccaacgtgaatacaactgtc

SEQ ID NO: 60823 - RNA, 27 nt, synthetic construct
  misc_feature 1..27: note = Vacuolar protein sorting-associated protein 16 homolog (308-316)
  source 1..27: mol_type = other RNA
tacctggtgcccgagctcgacggcgtc

SEQ ID NO: 60824 - RNA, 27 nt, synthetic construct
  misc_feature 1..27: note = Lamin-B receptor (474-482)
  source 1..27: mol_type = other RNA
tacctggtgagccaccccaacgaggtc

SEQ ID NO: 60825 - RNA, 30 nt, synthetic construct
  misc_feature 1..30: note = DNA topoisomerase 2-alpha (684-693)
  source 1..30: mol_type = other RNA
tacctgtatggccagaccacaacttacctc

SEQ ID NO: 60826 - RNA, 27 nt, synthetic construct
  misc_feature 1..27: note = ER lumen protein-retaining receptor 2 (196-204)
  source 1..27: mol_type = other RNA
tacctgtatatcaccaaggtgctcaaa

SEQ ID NO: 60827 - RNA, 27 nt, synthetic construct
  misc_feature 1..27: note = V-type proton ATPase subunit d 1 (27-35)
  source 1..27: mol_type = other RNA
tacatgatcgacaacgtgattctgctc

SEQ ID NO: 60828 - RNA, 27 nt, synthetic construct
  misc_feature 1..27: note = Ras GTPase-activating protein-binding protein 2 (294-302)
  source 1..27: mol_type = other RNA
taccccgacagccaccagctgttcgtg

SEQ ID NO: 60829 - RNA, 27 nt, synthetic construct
  misc_feature 1..27: note = Transcription factor p65 (479-487)
  source 1..27: mol_type = other RNA
taccccgaggccatcaccagactggtg

SEQ ID NO: 60830 - RNA, 27 nt, synthetic construct
  misc_feature 1..27: note = Neuropathy target esterase (299-307)
  source 1..27: mol_type = other RNA
taccccgagagcctggtgagagtcgtt

SEQ ID NO: 60831 - RNA, 27 nt, synthetic construct
  misc_feature 1..27: note = Ral GTPase-activating protein subunit beta (25-33)
  source 1..27: mol_type = other RNA
taccccgagagcgtgggcagagaagtc

SEQ ID NO: 60832 - RNA, 24 nt, synthetic construct
  misc_feature 1..24: note = Ubiquitin-conjugating enzyme E2 L3 (61-68)
  source 1..24: mol_type = other RNA
taccccttcaagcctccaaaaatc

SEQ ID NO: 60833 - RNA, 24 nt, synthetic construct
  misc_feature 1..24: note = Phosphatidate cytidylyltransferase 1 (350-357)
  source 1..24: mol_type = other RNA
taccccttccagatccacagcatt

SEQ ID NO: 60834 - RNA, 27 nt, synthetic construct
  misc_feature 1..27: note = LIM and SH3 domain protein 1 (57-65)
  source 1..27: mol_type = other RNA
taccccaagcagagcttcaccatggtg

SEQ ID NO: 60835 - RNA, 27 nt, synthetic construct
  misc_feature 1..27: note = Pumilio homolog 1 (841-849)
  source 1..27: mol_type = other RNA
taccccaacctgcagctcagagagatc

SEQ ID NO: 60836 - RNA, 27 nt, synthetic construct
  misc_feature 1..27: note = Ubiquitin-associated protein 2-like (268-276)
  source 1..27: mol_type = other RNA
tacccccctgccccattcatgcacatc

SEQ ID NO: 60837 - RNA, 27 nt, synthetic construct
  misc_feature 1..27: note = Splicing factor 3A subunit 1 (44-52)
  source 1..27: mol_type = other RNA
tacccccctccagaggtgagaaacatc

SEQ ID NO: 60838 - RNA, 27 nt, synthetic construct
  misc_feature 1..27: note = Putative oxidoreductase GLYR1 (19-27)
  source 1..27: mol_type = other RNA
taccccccttggccaggcaagatcgtg

SEQ ID NO: 60839 - RNA, 27 nt, synthetic construct
  misc_feature 1..27: note = ETS-related transcription factor Elf-1 (354-362)
  source 1..27: mol_type = other RNA
taccccacccagctgttcagaacagtg

SEQ ID NO: 60840 - RNA, 27 nt, synthetic construct
  misc_feature 1..27: note = 39S ribosomal protein L37, mitochondrial (283-291)
  source 1..27: mol_type = other RNA
tacccctatccttacccacacaccctg

SEQ ID NO: 60841 - RNA, 27 nt, synthetic construct
  misc_feature 1..27: note = LEM domain-containing protein 2 (134-142)
  source 1..27: mol_type = other RNA
tacccctatgtgggcatcctgcacgtc

SEQ ID NO: 60842 - RNA, 27 nt, synthetic construct
  misc_feature 1..27: note = HLA class II histocompatibility antigen, DQ beta 1 chain (78-86)
  source 1..27: mol_type = other RNA
taccagctggagctcagaaccacactt

SEQ ID NO: 60843 - RNA, 27 nt, synthetic construct
  misc_feature 1..27: note = Farnesyl pyrophosphate synthase (158-166)
  source 1..27: mol_type = other RNA
taccagaccgagatcggccaaacactg

SEQ ID NO: 60844 - RNA, 24 nt, synthetic construct
  misc_feature 1..24: note = Mitogen-activated protein kinase 14 (188-195)
  source 1..24: mol_type = other RNA
tacagagcccccgagatcatgctg

SEQ ID NO: 60845 - RNA, 24 nt, synthetic construct
  misc_feature 1..24: note = Mitogen-activated protein kinase 7 (227-234)
  source 1..24: mol_type = other RNA
tacagagcccccgagctgatgctc

SEQ ID NO: 60846 - RNA, 27 nt, synthetic construct
  misc_feature 1..27: note = Endoplasmic reticulum lectin 1 (115-123)
  source 1..27: mol_type = other RNA
tacagaatcgagagctattggacctac

SEQ ID NO: 60847 - RNA, 27 nt, synthetic construct
  misc_feature 1..27: note = Transmembrane protein 258 (9-17)
  source 1..27: mol_type = other RNA
tacaccagccccgtgaaccctgccgtc

SEQ ID NO: 60848 - RNA, 27 nt, synthetic construct
  misc_feature 1..27: note = Protein SZT2 (2368-2376)
  source 1..27: mol_type = other RNA
tacgtggccgaccacgctagctcctat

SEQ ID NO: 60849 - RNA, 30 nt, synthetic construct
  misc_feature 1..30: note = DDB1- and CUL4-associated factor 8 (338-347)
  source 1..30: mol_type = other RNA
tacgtgaaccccgccaatacccaccagttc

SEQ ID NO: 60850 - RNA, 24 nt, synthetic construct
  misc_feature 1..24: note = Tubulin beta chain (79-86)
  source 1..24: mol_type = other RNA
tacgtgcccagagccatcctggtc

SEQ ID NO: 60851 - RNA, 27 nt, synthetic construct
  misc_feature 1..27: note = E3 ubiquitin-protein ligase MARCH7 (172-180)
  source 1..27: mol_type = other RNA
tacgtgcaggacagagtccccagctat

SEQ ID NO: 60852 - RNA, 27 nt, synthetic construct
  misc_feature 1..27: note = Single-stranded DNA-binding protein 2 (25-33)
  source 1..27: mol_type = other RNA
tacgtgtatgagtacctgctccacgtc

SEQ ID NO: 60853 - RNA, 27 nt, synthetic construct
  misc_feature 1..27: note = Tyrosine-protein kinase Fyn (213-221)
  source 1..27: mol_type = other RNA
tactatatcaccacaagagcccagttc

SEQ ID NO: 60854 - RNA, 27 nt, synthetic construct
  misc_feature 1..27: note = Heat shock cognate 71 kDa protein (16-24)
  source 1..27: mol_type = other RNA
gccatgaaccccaccaatacagtgttc

SEQ ID NO: 60855 - RNA, 27 nt, synthetic construct
  misc_feature 1..27: note = HLA class II histocompatibility antigen, DP alpha 1 chain (32-40)
  source 1..27: mol_type = other RNA
atcaaggccgaccacgtgagcacctac

SEQ ID NO: 60856 - RNA, 27 nt, synthetic construct
  misc_feature 1..27: note = Protein SSX2 (41-49)
  source 1..27: mol_type = other RNA
aaggccagcgagaaaatcttctacgtg

SEQ ID NO: 60857 - RNA, 27 nt, synthetic construct
  misc_feature 1..27: note = Paired amphipathic helix protein Sin3a (790-798)
  source 1..27: mol_type = other RNA
gccgctgcactgatcattcaccatgtg

SEQ ID NO: 60858 - RNA, 27 nt, synthetic construct
  misc_feature 1..27: note = Rho GTPase-activating protein 17 (420-428)
  source 1..27: mol_type = other RNA
gccgctgcaaccagcgtgcacgtcgtt

SEQ ID NO: 60859 - RNA, 33 nt, synthetic construct
  misc_feature 1..33: note = Abhydrolase domain-containing protein 2 (342-352)
  source 1..33: mol_type = other RNA
gccgctgacgatcccctggtgcacgagagcctc

SEQ ID NO: 60860 - RNA, 27 nt, synthetic construct
  misc_feature 1..27: note = Pre-mRNA-processing factor 19 (410-418)
  source 1..27: mol_type = other RNA
gccgctgacgatagctccgtgaagctg

SEQ ID NO: 60861 - RNA, 27 nt, synthetic construct
  misc_feature 1..27: note = Ubiquitin carboxyl-terminal hydrolase 4 (677-685)
  source 1..27: mol_type = other RNA
gccgctgacggcaagctgctcaaactt

SEQ ID NO: 60862 - RNA, 33 nt, synthetic construct
  misc_feature 1..33: note = EP300-interacting inhibitor of differentiation 1 (69-79)
  source 1..33: mol_type = other RNA
gccgctctggaggaagcagacaagatgttcctc

SEQ ID NO: 60863 - RNA, 27 nt, synthetic construct
  misc_feature 1..27: note = Vacuolar protein sorting-associated protein 51 homolog (131-139)
  source 1..27: mol_type = other RNA
gccgctaccgagatcgtggaaagagtc

SEQ ID NO: 60864 - RNA, 30 nt, synthetic construct
  misc_feature 1..30: note = Codanin-1 (412-421)
  source 1..30: mol_type = other RNA
gccgcttacgagggcagcgtggcaaaggtc

SEQ ID NO: 60865 - RNA, 27 nt, synthetic construct
  misc_feature 1..27: note = Tetratricopeptide repeat protein 19, mitochondrial (92-100)
  source 1..27: mol_type = other RNA
gccgaggctgaaatcattcagctgctc

SEQ ID NO: 60866 - RNA, 33 nt, synthetic construct
  misc_feature 1..33: note = 40S ribosomal protein S10 (140-150)
  source 1..33: mol_type = other RNA
gccgaggctggcgcagggagcgccaccgaattc

SEQ ID NO: 60867 - RNA, 27 nt, synthetic construct
  misc_feature 1..27: note = A-kinase anchor protein 11 (1199-1207)
  source 1..27: mol_type = other RNA
gccgaggctctggcaacccacatcctc

SEQ ID NO: 60868 - RNA, 27 nt, synthetic construct
  misc_feature 1..27: note = Staphylococcal nuclease domain-containing protein 1 (426-434)
  source 1..27: mol_type = other RNA
gccgaggctctggtgagcaagggcctc

SEQ ID NO: 60869 - RNA, 27 nt, synthetic construct
  misc_feature 1..27: note = DnaJ homolog subfamily C member 3 (124-132)
  source 1..27: mol_type = other RNA
gccgaggacgatttcaagaaagtgctg

SEQ ID NO: 60870 - RNA, 27 nt, synthetic construct
  misc_feature 1..27: note = Cyclin-dependent kinase 11B (701-709)
  source 1..27: mol_type = other RNA
gccgaggacggcctgaagcacgaatac

SEQ ID NO: 60871 - RNA, 30 nt, synthetic construct
  misc_feature 1..30: note = High affinity cationic amino acid transporter 1 (354-363)
  source 1..30: mol_type = other RNA
gccgaggacggcctgctcttcaagtttctt

SEQ ID NO: 60872 - RNA, 30 nt, synthetic construct
  misc_feature 1..30: note = Protein strawberry notch homolog 2 (92-101)
  source 1..30: mol_type = other RNA
gccgaggaactgggccacaccgagacatac

SEQ ID NO: 60873 - RNA, 30 nt, synthetic construct
  misc_feature 1..30: note = Casein kinase II subunit alpha (179-188)
  source 1..30: mol_type = other RNA
gccgagttctaccaccccggccaggaatat

SEQ ID NO: 60874 - RNA, 30 nt, synthetic construct
  misc_feature 1..30: note = Probable E3 ubiquitin-protein ligase HERC4 (886-895)
  source 1..30: mol_type = other RNA
gccgagcaccccaccatcaagattttctgg

SEQ ID NO: 60875 - RNA, 24 nt, synthetic construct
  misc_feature 1..24: note = Rabankyrin-5 (229-236)
  source 1..24: mol_type = other RNA
gccgagatcattgctagccactgg

SEQ ID NO: 60876 - RNA, 30 nt, synthetic construct
  misc_feature 1..30: note = 26S proteasome non-ATPase regulatory subunit 6 (244-253)
  source 1..30: mol_type = other RNA
gccgagatcctggaagtgctccacagcctt

SEQ ID NO: 60877 - RNA, 30 nt, synthetic construct
  misc_feature 1..30: note = Son of sevenless homolog 2 (963-972)
  source 1..30: mol_type = other RNA
gccgagatcaccggcgaaattcagcaatac

SEQ ID NO: 60878 - RNA, 27 nt, synthetic construct
  misc_feature 1..27: note = Leucine-rich repeat and calponin homology domain-containing protein 3 (340-348)
  source 1..27: mol_type = other RNA
gccgagatcaccaaggaacagagactg

SEQ ID NO: 60879 - RNA, 30 nt, synthetic construct
  misc_feature 1..30: note = HEAT repeat-containing protein 6 (209-218)
  source 1..30: mol_type = other RNA
gccgagaaggacggcgtgagctcctctttc

SEQ ID NO: 60880 - RNA, 27 nt, synthetic construct
  misc_feature 1..27: note = Transformation/transcription domain-associated protein (2625-2633)
  source 1..27: mol_type = other RNA
gccgagaagacctgggtgcagctgttc

SEQ ID NO: 60881 - RNA, 33 nt, synthetic construct
  misc_feature 1..33: note = Glycerol-3-phosphate acyltransferase 3 (4-14)
  source 1..33: mol_type = other RNA
gccgagctggctggcaagatcctcagcacctgg

SEQ ID NO: 60882 - RNA, 27 nt, synthetic construct
  misc_feature 1..27: note = Hom s 1 (495-503)
  source 1..27: mol_type = other RNA
gccgagctggaactccagaagcaactt

SEQ ID NO: 60883 - RNA, 27 nt, synthetic construct
  misc_feature 1..27: note = HEAT repeat-containing protein 1 (617-625)
  source 1..27: mol_type = other RNA
gccgagatgaagatcgctatttacctg

SEQ ID NO: 60884 - RNA, 27 nt, synthetic construct
  misc_feature 1..27: note = Mitochondrial antiviral-signaling protein (471-479)
  source 1..27: mol_type = other RNA
gccgagaaccccagcatccagctgctc

SEQ ID NO: 60885 - RNA, 30 nt, synthetic construct
  misc_feature 1..30: note = Exocyst complex component 1 (513-522)
  source 1..30: mol_type = other RNA
gccgagcaggacttcatcagcaagtttttc

SEQ ID NO: 60886 - RNA, 27 nt, synthetic construct
  misc_feature 1..27: note = Liprin-alpha-1 (374-382)
  source 1..27: mol_type = other RNA
gccgagcagaagctgcaacagaccctc

SEQ ID NO: 60887 - RNA, 27 nt, synthetic construct
  misc_feature 1..27: note = Chromodomain-helicase-DNA-binding protein 9 (618-626)
  source 1..27: mol_type = other RNA
gccgagcagatgccccaacacaccctg

SEQ ID NO: 60888 - RNA, 30 nt, synthetic construct
  misc_feature 1..30: note = F-box DNA helicase 1 (868-877)
  source 1..30: mol_type = other RNA
gccgagcagagaatcggccccctggctttc

SEQ ID NO: 60889 - RNA, 33 nt, synthetic construct
  misc_feature 1..33: note = Nuclear cap-binding protein subunit 1 (577-587)
  source 1..33: mol_type = other RNA
gccgagagcgacgaaggcaagctgcacgtgctc

SEQ ID NO: 60890 - RNA, 33 nt, synthetic construct
  misc_feature 1..33: note = Ras-specific guanine nucleotide-releasing factor RalGPS2 (418-428)
  source 1..33: mol_type = other RNA
gccgagagcgaagacctggctgtgcacctctac

SEQ ID NO: 60891 - RNA, 27 nt, synthetic construct
  misc_feature 1..27: note = Transmembrane 9 superfamily member 1 (89-97)
  source 1..27: mol_type = other RNA
gccgagagcctgtacgaaatcagattc

SEQ ID NO: 60892 - RNA, 30 nt, synthetic construct
  misc_feature 1..30: note = Glycerol-3-phosphate dehydrogenase, mitochondrial (535-544)
  source 1..30: mol_type = other RNA
gccgaggtgaagtacggcatcaaagaatat

SEQ ID NO: 60893 - RNA, 30 nt, synthetic construct
  misc_feature 1..30: note = Protein PRRC2C (2815-2824)
  source 1..30: mol_type = other RNA
gccgaggtgctgcagagcacccaaagattc

SEQ ID NO: 60894 - RNA, 24 nt, synthetic construct
  misc_feature 1..24: note = Eukaryotic translation initiation factor 3 subunit D (442-449)
  source 1..24: mol_type = other RNA
gccggcagcgagtacctgaagctc

SEQ ID NO: 60895 - RNA, 27 nt, synthetic construct
  misc_feature 1..27: note = Coatomer subunit gamma-2 (147-155)
  source 1..27: mol_type = other RNA
gccatcgtggacaaggtcagctccgtt

SEQ ID NO: 60896 - RNA, 33 nt, synthetic construct
  misc_feature 1..33: note = Dipeptidyl peptidase 2 (134-144)
  source 1..33: mol_type = other RNA
gccctggctgacttcgcagagctccttagagcc

SEQ ID NO: 60897 - RNA, 27 nt, synthetic construct
  misc_feature 1..27: note = Mediator of RNA polymerase II transcription subunit 23 (388-396)
  source 1..27: mol_type = other RNA
gccctggctgacttcctccccgtgatg

SEQ ID NO: 60898 - RNA, 30 nt, synthetic construct
  misc_feature 1..30: note = Coatomer subunit gamma-2 (844-853)
  source 1..30: mol_type = other RNA
gccctggctgacggcgtgaccatgcaggtc

SEQ ID NO: 60899 - RNA, 27 nt, synthetic construct
  misc_feature 1..27: note = Nicastrin (466-474)
  source 1..27: mol_type = other RNA
gccctggctgacgtggcaaccgtcctc

SEQ ID NO: 60900 - RNA, 27 nt, synthetic construct
  misc_feature 1..27: note = Lysophosphatidylcholine acyltransferase 1 (178-186)
  source 1..27: mol_type = other RNA
gccctggctgagggccagctcagactt

SEQ ID NO: 60901 - RNA, 27 nt, synthetic construct
  misc_feature 1..27: note = Filamin-A (1713-1721)
  source 1..27: mol_type = other RNA
gccctggctggcgaccagcccagcgtg

SEQ ID NO: 60902 - RNA, 27 nt, synthetic construct
  misc_feature 1..27: note = CAD protein (1492-1500)
  source 1..27: mol_type = other RNA
gccctggctggcgggatcaccatggtg

SEQ ID NO: 60903 - RNA, 27 nt, synthetic construct
  misc_feature 1..27: note = Microtubule-associated protein 4 (259-267)
  source 1..27: mol_type = other RNA
gccctggctaaggacatggcactcgcc

SEQ ID NO: 60904 - RNA, 30 nt, synthetic construct
  misc_feature 1..30: note = E1A-binding protein p400 (910-919)
  source 1..30: mol_type = other RNA
gccctggctaagccccctgtggtcagcgtt

SEQ ID NO: 60905 - RNA, 27 nt, synthetic construct
  misc_feature 1..27: note = Transcription factor p65 (361-369)
  source 1..27: mol_type = other RNA
gccctggctcccgcacctccacaggtg

SEQ ID NO: 60906 - RNA, 27 nt, synthetic construct
  misc_feature 1..27: note = HEAT repeat-containing protein 2 (159-167)
  source 1..27: mol_type = other RNA
gccctggctccccacctcgacgatgca

SEQ ID NO: 60907 - RNA, 27 nt, synthetic construct
  misc_feature 1..27: note = DNA fragmentation factor subunit alpha (236-244)
  source 1..27: mol_type = other RNA
gccctggctagccacatcctcaccgca

SEQ ID NO: 60908 - RNA, 27 nt, synthetic construct
  misc_feature 1..27: note = DNA mismatch repair protein Mlh1 (103-111)
  source 1..27: mol_type = other RNA
gccctggctagcatctcccacgtggca

SEQ ID NO: 60909 - RNA, 27 nt, synthetic construct
  misc_feature 1..27: note = Intraflagellar transport protein 81 homolog (503-511)
  source 1..27: mol_type = other RNA
gccctggctagcgtgatcaaggagctc

SEQ ID NO: 60910 - RNA, 27 nt, synthetic construct
  misc_feature 1..27: note = T-complex protein 1 subunit zeta (19-27)
  source 1..27: mol_type = other RNA
gccctggctgtgaacatcagcgcagcc

SEQ ID NO: 60911 - RNA, 30 nt, synthetic construct
  misc_feature 1..30: note = Elongation factor 2 (191-200)
  source 1..30: mol_type = other RNA
gccctgtgcgaggaaaacatgagaggcgtg

SEQ ID NO: 60912 - RNA, 27 nt, synthetic construct
  misc_feature 1..27: note = DNA repair protein RAD50 (1090-1098)
  source 1..27: mol_type = other RNA
gccctggacgagcccaccacaaacctc

SEQ ID NO: 60913 - RNA, 27 nt, synthetic construct
  misc_feature 1..27: note = Perilipin-3 (400-408)
  source 1..27: mol_type = other RNA
gccctggaccacatggtggagtacgtc

SEQ ID NO: 60914 - RNA, 33 nt, synthetic construct
  misc_feature 1..33: note = Receptor-interacting serine/threonine-protein kinase 4 (482-492)
  source 1..33: mol_type = other RNA
gccctggacagcggcgcttccctccttcacctg

SEQ ID NO: 60915 - RNA, 27 nt, synthetic construct
  misc_feature 1..27: note = Centrosomal protein of 104 kDa (617-625)
  source 1..27: mol_type = other RNA
gccctggagcacagagtgtacgaagtc

SEQ ID NO: 60916 - RNA, 27 nt, synthetic construct
  misc_feature 1..27: note = Alpha-tubulin N-acetyltransferase 1 (9-17)
  source 1..27: mol_type = other RNA
gccctgttccccgagagaatcaccgtg

SEQ ID NO: 60917 - RNA, 33 nt, synthetic construct
  misc_feature 1..33: note = SEC14-like protein 1 (357-367)
  source 1..33: mol_type = other RNA
gccctgggcgaggaagctctccttagatacgtg

SEQ ID NO: 60918 - RNA, 33 nt, synthetic construct
  misc_feature 1..33: note = HLA class I histocompatibility antigen, B-40 alpha chain (204-214)
  source 1..33: mol_type = other RNA
gccctgggcttctaccccgctgagatcaccctc

SEQ ID NO: 60919 - RNA, 30 nt, synthetic construct
  misc_feature 1..30: note = Dystonin (3724-3733)
  source 1..30: mol_type = other RNA
gccctgatcgagcagaagctcaacgaagct

SEQ ID NO: 60920 - RNA, 27 nt, synthetic construct
  misc_feature 1..27: note = RILP-like protein 1 (221-229)
  source 1..27: mol_type = other RNA
gccctgatcgagcagaaggtggaactc

SEQ ID NO: 60921 - RNA, 33 nt, synthetic construct
  misc_feature 1..33: note = Aminopeptidase B (193-203)
  source 1..33: mol_type = other RNA
gccctgatcgaggtgcccgacggcttcaccgct

SEQ ID NO: 60922 - RNA, 33 nt, synthetic construct
  misc_feature 1..33: note = Coatomer subunit zeta-1 (3-13)
  source 1..33: mol_type = other RNA
gccctgatcctcgagcccagcctttacaccgtg

SEQ ID NO: 60923 - RNA, 33 nt, synthetic construct
  misc_feature 1..33: note = Protein fem-1 homolog A (362-372)
  source 1..33: mol_type = other RNA
gccctgatcaccgaccccgatgagatgagaatg

SEQ ID NO: 60924 - RNA, 27 nt, synthetic construct
  misc_feature 1..27: note = Rapamycin-insensitive companion of mTOR (226-234)
  source 1..27: mol_type = other RNA
gccctgatcaccacaattctccacctt

SEQ ID NO: 60925 - RNA, 27 nt, synthetic construct
  misc_feature 1..27: note = DNA polymerase alpha catalytic subunit (520-528)
  source 1..27: mol_type = other RNA
gccctgaagcccgacctcgtgaacgtc

SEQ ID NO: 60926 - RNA, 27 nt, synthetic construct
  misc_feature 1..27: note = Agrin (1405-1413)
  source 1..27: mol_type = other RNA
gccctgctcgacggcagagtgcagctt

SEQ ID NO: 60927 - RNA, 30 nt, synthetic construct; identical to SEQ ID NO: 36700
  misc_feature 1..30: note = Protein DGCR6L (54-63)
  source 1..30: mol_type = other RNA

SEQ ID NO: 60928 - RNA, 30 nt, synthetic construct
  misc_feature 1..30: note = Trabeculin-alpha (3432-3441)
  source 1..30: mol_type = other RNA
gccctgctcgaccaggctcttagcaacgca

SEQ ID NO: 60929 - RNA, 27 nt, synthetic construct
  misc_feature 1..27: note = Talin-1 (1760-1768)
  source 1..27: mol_type = other RNA
gccctgctcgaccagaccaagacactt

SEQ ID NO: 60930 - RNA, 33 nt, synthetic construct
  misc_feature 1..33: note = Histone deacetylase 10 (587-597)
  source 1..33: mol_type = other RNA
gccctgctcgaggaaaacagcaccccccagctt

SEQ ID NO: 60931 - RNA, 27 nt, synthetic construct
  misc_feature 1..27: note = LEM domain-containing protein 2 (268-276)
  source 1..27: mol_type = other RNA
gccctgctcgagcttctgcacgaattg

SEQ ID NO: 60932 - RNA, 30 nt, synthetic construct
  misc_feature 1..30: note = Dystonin (5785-5794)
  source 1..30: mol_type = other RNA
gccctgctcgagcttgtgccctggagagct

SEQ ID NO: 60933 - RNA, 33 nt, synthetic construct
  misc_feature 1..33: note = Telomerase protein component 1 (281-291)
  source 1..33: mol_type = other RNA
gccctgctcgagcccgaattcatccttaaggct

SEQ ID NO: 60934 - RNA, 33 nt, synthetic construct
  misc_feature 1..33: note = Midasin (2257-2267)
  source 1..33: mol_type = other RNA
gccctgctcgagcccggcggggtgcttaccatc

SEQ ID NO: 60935 - RNA, 30 nt, synthetic construct
  misc_feature 1..30: note = DENN domain-containing protein 4B (1391-1400)
  source 1..30: mol_type = other RNA
gccctgctcgagagcgtgcttagacacgtc

SEQ ID NO: 60936 - RNA, 27 nt, synthetic construct
  misc_feature 1..27: note = Transmembrane protein 102 (468-476)
  source 1..27: mol_type = other RNA
gccctgctcggcgagcttgctagactg

SEQ ID NO: 60937 - RNA, 27 nt, synthetic construct
  misc_feature 1..27: note = Inhibitor of growth protein 4 (58-66)
  source 1..27: mol_type = other RNA
gccctgctcaagcagatccaagaggct

SEQ ID NO: 60938 - RNA, 27 nt, synthetic construct
  misc_feature 1..27: note = Sorting and assembly machinery component 50 homolog (277-285)
  source 1..27: mol_type = other RNA
gccctgctcaaggtgaaccaggagctt

SEQ ID NO: 60939 - RNA, 27 nt, synthetic construct
  misc_feature 1..27: note = ATP-dependent RNA helicase A (638-646)
  source 1..27: mol_type = other RNA
gccctgctcaagtacatcgagaccctt

SEQ ID NO: 60940 - RNA, 30 nt, synthetic construct
  misc_feature 1..30: note = Nucleolar protein 11 (404-413)
  source 1..30: mol_type = other RNA
gccctgctcaacgctatccttcacagcgca

SEQ ID NO: 60941 - RNA, 27 nt, synthetic construct
  misc_feature 1..27: note = Rapamycin-insensitive companion of mTOR (91-99)
  source 1..27: mol_type = other RNA
gccctgctcaacgaggctaaggaagtg

SEQ ID NO: 60942 - RNA, 27 nt, synthetic construct
  misc_feature 1..27: note = Lysosomal alpha-glucosidase (501-509)
  source 1..27: mol_type = other RNA
gccctgctcccccacctttacaccctg

SEQ ID NO: 60943 - RNA, 27 nt, synthetic construct
  misc_feature 1..27: note = Coiled-coil domain-containing protein 189 isoform 2 (146-154)
  source 1..27: mol_type = other RNA
gccctgctccaggaccttcacaaggct

SEQ ID NO: 60944 - RNA, 27 nt, synthetic construct
  misc_feature 1..27: note = Cell differentiation protein RCD1 homolog (65-73)
  source 1..27: mol_type = other RNA
gccctgctccaggagatcgtgaacatt

SEQ ID NO: 60945 - RNA, 27 nt, synthetic construct
  misc_feature 1..27: note = GSK3-beta interaction protein (125-133)
  source 1..27: mol_type = other RNA
gccctgctccagagacttgaggctctg

SEQ ID NO: 60946 - RNA, 27 nt, synthetic construct
  misc_feature 1..27: note = Mitochondrial import receptor subunit TOM5 homolog (36-44)
  source 1..27: mol_type = other RNA
gccctgctcagagtgacccccttcatc

SEQ ID NO: 60947 - RNA, 27 nt, synthetic construct
  misc_feature 1..27: note = Catenin alpha-1 (130-138)
  source 1..27: mol_type = other RNA
gccctgctcagcgctgtgaccagactt

SEQ ID NO: 60948 - RNA, 30 nt, synthetic construct
  misc_feature 1..30: note = DNA-dependent protein kinase catalytic subunit (2867-2876)
  source 1..30: mol_type = other RNA
gccctgctcagccttgaccccgctgcagtg

SEQ ID NO: 60949 - RNA, 27 nt, synthetic construct
  misc_feature 1..27: note = Multiple inositol polyphosphate phosphatase 1 (26-34)
  source 1..27: mol_type = other RNA
gccctgctcagctcccttgctagatgc

SEQ ID NO: 60950 - RNA, 27 nt, synthetic construct
  misc_feature 1..27: note = DNA-directed RNA polymerase I subunit RPA1 (343-351)
  source 1..27: mol_type = other RNA
gccctgatggctcaggagcaaaagctc

SEQ ID NO: 60951 - RNA, 27 nt, synthetic construct
  misc_feature 1..27: note = Brefeldin A-inhibited guanine nucleotide-exchange protein 1 (924-932)
  source 1..27: mol_type = other RNA
gccctgatggaggctgtgagccacgtc

SEQ ID NO: 60952 - RNA, 30 nt, synthetic construct
  misc_feature 1..30: note = THAP domain-containing protein 11 (268-277)
  source 1..30: mol_type = other RNA
gccctgatggaggtgaagatgaaagaaatg

SEQ ID NO: 60953 - RNA, 27 nt, synthetic construct
  misc_feature 1..27: note = Junction plakoglobin (178-186)
  source 1..27: mol_type = other RNA
gccctgatgggcagcccccagctcgtg

SEQ ID NO: 60954 - RNA, 27 nt, synthetic construct
  misc_feature 1..27: note = Probable E3 ubiquitin-protein ligase HECTD4 (327-335)
  source 1..27: mol_type = other RNA
gccctgatgccccagctcgtgcaactt

SEQ ID NO: 60955 - RNA, 33 nt, synthetic construct
  misc_feature 1..33: note = Synaptosomal-associated protein 29 (65-75)
  source 1..33: mol_type = other RNA
gccctgatgtacgagagcgaaaaggtgggcgtc

SEQ ID NO: 60956 - RNA, 27 nt, synthetic construct
  misc_feature 1..27: note = F-box only protein 21 (284-292)
  source 1..27: mol_type = other RNA
gccctgaacctctacatgcaccaggtg

SEQ ID NO: 60957 - RNA, 30 nt, synthetic construct
  misc_feature 1..30: note = Immunoglobulin-binding protein 1 (279-288)
  source 1..30: mol_type = other RNA
gccctgcccgaccagggcatcgctaaggca

SEQ ID NO: 60958 - RNA, 30 nt, synthetic construct
  misc_feature 1..30: note = Coatomer subunit gamma-1 (711-720)
  source 1..30: mol_type = other RNA
gccctgcccaaggaggaccctaccgctgtg

SEQ ID NO: 60959 - RNA, 27 nt, synthetic construct
  misc_feature 1..27: note = EVI5-like protein (617-625)
  source 1..27: mol_type = other RNA
gccctgcaggagaagctccaatacctt

SEQ ID NO: 60960 - RNA, 27 nt, synthetic construct
  misc_feature 1..27: note = Signal recognition particle receptor subunit alpha (360-368)
  source 1..27: mol_type = other RNA
gccctgcaggagagcctcgtgcaaatc

SEQ ID NO: 60961 - RNA, 27 nt, synthetic construct
  misc_feature 1..27: note Dolichyl-diphosphooligosaccharide-proteinosyltransferase subunit 2 (5-13)
  source 1..27: mol_type = other RNA
gccctgagcgctctcaccgcaagactt

SEQ ID NO: 60962 - RNA, 27 nt, synthetic construct
  misc_feature 1..27: note = Fas apoptotic inhibitory molecule 1 (45-53)
  source 1..27: mol_type = other RNA
gccctgagcgacggcgtgcacaagatc

SEQ ID NO: 60963 - RNA, 30 nt, synthetic construct
  misc_feature 1..30: note = T-complex protein 1 subunit delta (308-317)
  source 1..30: mol_type = other RNA
gccctgagcgacctcgctcttcacttcctg

SEQ ID NO: 60964 - RNA, 27 nt, synthetic construct
  misc_feature 1..27: note = Coiled-coil domain-containing protein 93 (85-93)
  source 1..27: mol_type = other RNA
gccctgagcgagaagatcgtgtccgtc

SEQ ID NO: 60965 - RNA, 27 nt, synthetic construct
  misc_feature 1..27: note = Uncharacterized protein C1orf43 (148-156)
  source 1..27: mol_type = other RNA
gccctgagcgagctcgctaccgcagtg

SEQ ID NO: 60966 - RNA, 27 nt, synthetic construct
  misc_feature 1..27: note = Lanosterol 14-alpha demethylase (197-205)
  source 1..27: mol_type = other RNA
gccctgagcgagctcatcattcttacc

SEQ ID NO: 60967 - RNA, 27 nt, synthetic construct
  misc_feature 1..27: note = 26S proteasome non-ATPase regulatory subunit 14 (135-143)
  source 1..27: mol_type = other RNA
gccctgagcgagagagctgtggcagtc

SEQ ID NO: 60968 - RNA, 27 nt, synthetic construct
  misc_feature 1..27: note = Inversin (365-373)
  source 1..27: mol_type = other RNA
gccctgagcggccacgtgtccaccgtc

SEQ ID NO: 60969 - RNA, 27 nt, synthetic construct
  misc_feature 1..27: note = Small integral membrane protein 10 (21-29)
  source 1..27: mol_type = other RNA
gccctgagcggcctcgctgtgagactt

SEQ ID NO: 60970 - RNA, 27 nt, synthetic construct
  misc_feature 1..27: note = Kinesin light chain 1 (87-95)
  source 1..27: mol_type = other RNA
gccctgagcaaccacctcaatgctgtg

SEQ ID NO: 60971 - RNA, 27 nt, synthetic construct
  misc_feature 1..27: note = tRNA-splicing endonuclease subunit Sen2 (347-355)
  source 1..27: mol_type = other RNA
gccctgagcagagtgtccgtcaacgtt

SEQ ID NO: 60972 - RNA, 27 nt, synthetic construct
  misc_feature 1..27: note = FAST kinase domain-containing protein 2 (485-493)
  source 1..27: mol_type = other RNA
gccctgaccggctacctccacacaatc

SEQ ID NO: 60973 - RNA, 27 nt, synthetic construct
  misc_feature 1..27: note = Putative phospholipase B-like 2 (16-24)
  source 1..27: mol_type = other RNA
gccctgaccagagctctcgcacttgcc

SEQ ID NO: 60974 - RNA, 27 nt, synthetic construct
  misc_feature 1..27: note = AP-1 complex subunit gamma-1 (331-339)
  source 1..27: mol_type = other RNA
gccctgaccagcctccttaagacagtg

SEQ ID NO: 60975 - RNA, 30 nt, synthetic construct
  misc_feature 1..30: note = E3 ubiquitin-protein ligase RFWD2 (46-55)
  source 1..30: mol_type = other RNA
gccctggtgagcggcggggtcgctcaggca

SEQ ID NO: 60976 - RNA, 27 nt, synthetic construct
  misc_feature 1..27: note = Nesprin-2 (3479-3487)
  source 1..27: mol_type = other RNA
gccctgtgggagaagtggctcagcctt

SEQ ID NO: 60977 - RNA, 27 nt, synthetic construct
  misc_feature 1..27: note = Integrin alpha-X (412-420)
  source 1..27: mol_type = other RNA
gccctgtggaagggcgtgcagagcctc

SEQ ID NO: 60978 - RNA, 27 nt, synthetic construct
  misc_feature 1..27: note = Helicase with zinc finger domain 2 (1826-1834)
  source 1..27: mol_type = other RNA
gccctgtggaagcagctccttgagctg

SEQ ID NO: 60979 - RNA, 27 nt, synthetic construct
  misc_feature 1..27: note = Rabankyrin-5 (638-646)
  source 1..27: mol_type = other RNA
gccctgtggaccggcatgcacacaatc

SEQ ID NO: 60980 - RNA, 30 nt, synthetic construct
  misc_feature 1..30: note = CDK5 regulatory subunit-associated protein 3 (102-111)
  source 1..30: mol_type = other RNA
gccctgtacgagaaggacaacacctatctc

SEQ ID NO: 60981 - RNA, 27 nt, synthetic construct
  misc_feature 1..27: note = Small subunit processome component 20 homolog (799-807)
  source 1..27: mol_type = other RNA
gccctgtaccacgagcagctcgctctt

SEQ ID NO: 60982 - RNA, 33 nt, synthetic construct
  misc_feature 1..33: note = Prohibitin (26-36)
  source 1..33: mol_type = other RNA
gccctgtacaacgtggacgctggccacagagca

SEQ ID NO: 60983 - RNA, 27 nt, synthetic construct
  misc_feature 1..27: note = Receptor expression-enhancing protein 3 (46-54)
  source 1..27: mol_type = other RNA
gccctgtacaccgtgatcgagacagtc

SEQ ID NO: 60984 - RNA, 27 nt, synthetic construct
  misc_feature 1..27: note = Heterogeneous nuclear ribonucleoproteins A2/B1 (66-74)
  source 1..27: mol_type = other RNA
gccatggctgcaagaccccacagcatc

SEQ ID NO: 60985 - RNA, 30 nt, synthetic construct
  misc_feature 1..30: note = Leucine-tRNA ligase, cytoplasmic (67-76)
  source 1..30: mol_type = other RNA
gccatggctgacgcaggcatcctgagactc

SEQ ID NO: 60986 - RNA, 33 nt, synthetic construct
  misc_feature 1..33: note = Translocon-associated protein subunit delta (3-13)
  source 1..33: mol_type = other RNA
gccatggctagcctgggcgcactcgcccttctg

SEQ ID NO: 60987 - RNA, 33 nt, synthetic construct
  misc_feature 1..33: note = Phosphatidylinositol 4-kinase alpha (1043-1053)
  source 1..33: mol_type = other RNA
gccatggctaccgagagcatcctgcacttcgca

SEQ ID NO: 60988 - RNA, 27 nt, synthetic construct
  misc_feature 1..27: note = Nuclear cap-binding protein subunit 1 (147-155)
  source 1..27: mol_type = other RNA
gccatgttcgagaactttgtgagcgtc

SEQ ID NO: 60989 - RNA, 30 nt, synthetic construct
  misc_feature 1..30: note = Eukaryotic translation initiation factor 3 subunit K (2-11)
  source 1..30: mol_type = other RNA
gccatgttcgagcagatgagagctaacgtg

SEQ ID NO: 60990 - RNA, 27 nt, synthetic construct
  misc_feature 1..27: note = U4/U6 small nuclear ribonucleoprotein Prp3 (237-245)
  source 1..27: mol_type = other RNA
gccatgggcatcgctccccctaaggtg

SEQ ID NO: 60991 - RNA, 27 nt, synthetic construct
  misc_feature 1..27: note = Chitobiosyldiphosphodolichol beta-mannosyltransferase (57-65)
  source 1..27: mol_type = other RNA
gccatgcacggcttcagcgtgaccctg

SEQ ID NO: 60992 - RNA, 27 nt, synthetic construct
  misc_feature 1..27: note = Tripartite motif-containing protein 44 (233-241)
  source 1..27: mol_type = other RNA
gccatgatcgagctggtggaaagactc

SEQ ID NO: 60993 - RNA, 27 nt, synthetic construct
  misc_feature 1..27: note = Importin subunit beta-1 (122-130)
  source 1..27: mol_type = other RNA
gccatgaagagcgacatcgatgaggtg

SEQ ID NO: 60994 - RNA, 27 nt, synthetic construct
  misc_feature 1..27: note = Intraflagellar transport protein 172 homolog (30-38)
  source 1..27: mol_type = other RNA
gccatgctggagaagaactacaaactc

SEQ ID NO: 60995 - RNA, 27 nt, synthetic construct
  misc_feature 1..27: note = E3 ubiquitin-protein ligase RNF31 (159-167)
  source 1..27: mol_type = other RNA
gccatgctgaacgagccctgggctgtg

SEQ ID NO: 60996 - RNA, 30 nt, synthetic construct
  misc_feature 1..30: note = HLA class II histocompatibility antigen, DQ beta 1 chain (23-32)
  source 1..30: mol_type = other RNA
gccatgctgagcacccccgtggctgagggc

SEQ ID NO: 60997 - RNA, 27 nt, synthetic construct
  misc_feature 1..27: note = AP-1 complex subunit gamma-1 (266-274)
  source 1..27: mol_type = other RNA
gccatgaacgacatcctggctcaggtg

SEQ ID NO: 60998 - RNA, 27 nt, synthetic construct
  misc_feature 1..27: note = Splicing factor 3A subunit 3 (45-53)
  source 1..27: mol_type = other RNA
gccatgcaggacagatacatggaggtg

SEQ ID NO: 60999 - RNA, 33 nt, synthetic construct
  misc_feature 1..33: note = Guanine nucleotide-binding protein G(s) subunit alpha isoforms short (95-105)
  source 1..33: mol_type = other RNA
gccatgagcaacctggtgccccctgtcgagctc

SEQ ID NO: 61000 - RNA, 27 nt, synthetic construct
  misc_feature 1..27: note = Heat shock 70 kDa protein 1-like (450-458)
  source 1..27: mol_type = other RNA
gccatgaccaaggacaacaatctgctc

SEQ ID NO: 61001 - RNA, 27 nt, synthetic construct
  misc_feature 1..27: note = F-box only protein 21 (416-424)
  source 1..27: mol_type = other RNA
gccatgtaccccgaccaggtgcaactg

SEQ ID NO: 61002 - RNA, 30 nt, synthetic construct
  misc_feature 1..30: note = Vascular endothelial growth factor A (130-139)
  source 1..30: mol_type = other RNA
gcccccgctgcaagagcccctcaggcgctg

SEQ ID NO: 61003 - RNA, 27 nt, synthetic construct
  misc_feature 1..27: note = Sister chromatid cohesion protein PDS5 homolog A (368-376)
  source 1..27: mol_type = other RNA
gcccccgctgagagacagatcgacctg

SEQ ID NO: 61004 - RNA, 27 nt, synthetic construct
  misc_feature 1..27: note = Host cell factor 1 (810-818)
  source 1..27: mol_type = other RNA
gcccccgctaagatcattaccgcagtg

SEQ ID NO: 61005 - RNA, 30 nt, synthetic construct
  misc_feature 1..30: note = Histone H1.4 (11-20)
  source 1..30: mol_type = other RNA
gcccccgctcctgcagagaagaccccagtg

SEQ ID NO: 61006 - RNA, 27 nt, synthetic construct
  misc_feature 1..27: note = Zinc finger protein 428 (123-131)
  source 1..27: mol_type = other RNA
gcccccgctcctgagggcagagcactg

SEQ ID NO: 61007 - RNA, 30 nt, synthetic construct
  misc_feature 1..30: note = Pleckstrin homology domain-containing family B member 2 (137-146)
  source 1..30: mol_type = other RNA
gcccccgctcctgaggtgggcagaaccctg

SEQ ID NO: 61008 - RNA, 33 nt, synthetic construct
  misc_feature 1..33: note = Cathepsin D (16-26)
  source 1..33: mol_type = other RNA
gcccccgctagcgcactggtgagaatccctctc

SEQ ID NO: 61009 - RNA, 27 nt, synthetic construct
  misc_feature 1..27: note = Liprin-beta-1 (819-827)
  source 1..27: mol_type = other RNA
gcccccaacctgagaggcagcggggtg

SEQ ID NO: 61010 - RNA, 33 nt, synthetic construct
  misc_feature 1..33: note = Double-stranded RNA-binding protein Staufen homolog 1 (362-372)
  source 1..33: mol_type = other RNA
gcccccaaccctgctaaggcaaccgtgacagcc

SEQ ID NO: 61011 - RNA, 30 nt, synthetic construct
  misc_feature 1..30: note = Zinc finger HIT domain-containing protein 2 (59-68)
  source 1..30: mol_type = other RNA
gccccccctagcagactggcttccgcactc

SEQ ID NO: 61012 - RNA, 33 nt, synthetic construct
  misc_feature 1..33: note = Putative sodium-coupled neutral amino acid transporter 10 (841-851)
  source 1..33: mol_type = other RNA
gcccccagagctgcaggcaccgtgaaggagctg

SEQ ID NO: 61013 - RNA, 33 nt, synthetic construct
  misc_feature 1..33: note = RELT-like protein 1 (2-12)
  source 1..33: mol_type = other RNA
gcccccagagctctgcctggcagcgcagtgctc

SEQ ID NO: 61014 - RNA, 27 nt, synthetic construct
  misc_feature 1..27: note = Rhotekin (385-393)
  source 1..27: mol_type = other RNA
gcccccagaaagcctccacaggctctg

SEQ ID NO: 61015 - RNA, 27 nt, synthetic construct
  misc_feature 1..27: note = Long-chain fatty acid transport protein 1 (264-272)
  source 1..27: mol_type = other RNA
gccccctacgctagacctatcttcctg

SEQ ID NO: 61016 - RNA, 27 nt, synthetic construct
  misc_feature 1..27: note = Coiled-coil domain-containing protein 50 (69-77)
  source 1..27: mol_type = other RNA
gcccaggctcaactgcagaagagatac

SEQ ID NO: 61017 - RNA, 27 nt, synthetic construct
  misc_feature 1..27: note = Pumilio homolog 2 (180-188)
  source 1..27: mol_type = other RNA
gcccagcaaccccacatcgctggcgtg

SEQ ID NO: 61018 - RNA, 27 nt, synthetic construct
  misc_feature 1..27: note = E3 ubiquitin-protein ligase HUWE1 (1181-1189)
  source 1..27: mol_type = other RNA
gcccaggtggctctggtcaacgaggtt

SEQ ID NO: 61019 - RNA, 27 nt, synthetic construct
  misc_feature 1..27: note = Unconventional myosin-If (36-44)
  source 1..27: mol_type = other RNA
gcccagtacgagaacccccctcacatc

SEQ ID NO: 61020 - RNA, 33 nt, synthetic construct
  misc_feature 1..33: note = Alpha-actinin-1 (231-241)
  source 1..33: mol_type = other RNA
gccagacccgacgagaaggctatcatgacctac

SEQ ID NO: 61021 - RNA, 27 nt, synthetic construct
  misc_feature 1..27: note = Vacuolar protein sorting-associated protein 54 (467-475)
  source 1..27: mol_type = other RNA
gccaccctgaacatcattcacagcgtg

SEQ ID NO: 61022 - RNA, 30 nt, synthetic construct
  misc_feature 1..30: note = Cullin-2 (577-586)
  source 1..30: mol_type = other RNA
gccgtggacgaggatagaaagatgtacctg

SEQ ID NO: 61023 - RNA, 33 nt, synthetic construct
  misc_feature 1..33: note = Erlin-1 (214-224)
  source 1..33: mol_type = other RNA
gccgtgatcgaggctgaaaagattgcacaggtc

SEQ ID NO: 61024 - RNA, 27 nt, synthetic construct
  misc_feature 1..27: note = Ubiquitin carboxyl-terminal hydrolase 28 (743-751)
  source 1..27: mol_type = other RNA
gccgtgatggagagcatccagggcgtc

SEQ ID NO: 61025 - RNA, 27 nt, synthetic construct
  misc_feature 1..27: note = 40S ribosomal protein S5 (172-180)
  source 1..27: mol_type = other RNA
tgcctggccgacgagctcatcaacgct

SEQ ID NO: 61026 - RNA, 30 nt, synthetic construct
  misc_feature 1..30: note = Protein transport protein Sec23B (288-297)
  source 1..30: mol_type = other RNA
gacgagctgaagatccccattagaagctgg

SEQ ID NO: 61027 - RNA, 30 nt, synthetic construct
  misc_feature 1..30: note = Serine/threonine-protein kinase 11-interacting protein (963-972)
  source 1..30: mol_type = other RNA
gacgaggtgagcagactggaatccttctgg

SEQ ID NO: 61028 - RNA, 27 nt, synthetic construct
  misc_feature 1..27: note = Guanine nucleotide-binding protein G(I)/G(S)/G(T) subunit beta-2 (170-178)
  source 1..27: mol_type = other RNA
gacatcgagaccggccagcaaacagtg

SEQ ID NO: 61029 - RNA, 24 nt, synthetic construct
  misc_feature 1..24: note = Tuberin (529-536)
  source 1..24: mol_type = other RNA
gacatcattgagaaggtgatggcc

SEQ ID NO: 61030 - RNA, 24 nt, synthetic construct
  misc_feature 1..24: note = E3 ubiquitin-protein ligase RNF213 (2081-2088)
  source 1..24: mol_type = other RNA
gacatcaacggcaagatgtggctg

SEQ ID NO: 61031 - RNA, 27 nt, synthetic construct
  misc_feature 1..27: note = Echinoderm microtubule-associated protein-like 5 (1134-1142)
  source 1..27: mol_type = other RNA
gacatcagaggcaagctgctccaggtg

SEQ ID NO: 61032 - RNA, 24 nt, synthetic construct
  misc_feature 1..24: note = Negative elongation factor A (258-265)
  source 1..24: mol_type = other RNA
gacatcagcgagctggatatggtg

SEQ ID NO: 61033 - RNA, 27 nt, synthetic construct
  misc_feature 1..27: note = Golgin subfamily A member 4 (852-860)
  source 1..27: mol_type = other RNA
gacctggagaccgaaagaatcctcctt

SEQ ID NO: 61034 - RNA, 30 nt, synthetic construct
  misc_feature 1..30: note = GRB2-associated-binding protein 1 (123-132)
  source 1..30: mol_type = other RNA
gaccccgtgaagcctccaggcagctccctg

SEQ ID NO: 61035 - RNA, 27 nt, synthetic construct
  misc_feature 1..27: note = Signal recognition particle 54 kDa protein (388-396)
  source 1..27: mol_type = other RNA
gacagcaccgatggcgccaaggtgttc

SEQ ID NO: 61036 - RNA, 27 nt, synthetic construct
  misc_feature 1..27: note = Protein BANP (72-80)
  source 1..27: mol_type = other RNA
gaggccaagctgcaggctctcgaagca

SEQ ID NO: 61037 - RNA, 27 nt, synthetic construct
  misc_feature 1..27: note = Endothelial differentiation-related factor 1 (36-44)
  source 1..27: mol_type = other RNA
gaggacgtggaaaccagcaagaaatgg

SEQ ID NO: 61038 - RNA, 30 nt, synthetic construct
  misc_feature 1..30: note = Clathrin heavy chain 1 (1066-1075)
  source 1..30: mol_type = other RNA
gaggaagccttcgctatctttagaaagttc

SEQ ID NO: 61039 - RNA, 30 nt, synthetic construct
  misc_feature 1..30: note = DNA excision repair protein ERCC-1 (203-212)
  source 1..30: mol_type = other RNA
gaggaagccggcagatacctggagacctat

SEQ ID NO: 61040 - RNA, 27 nt, synthetic construct
  misc_feature 1..27: note = cAMP-dependent protein kinase type I-alpha regulatory subunit (60-68)
  source 1..27: mol_type = other RNA
gaggaagccaagcagatccaaaacctg

SEQ ID NO: 61041 - RNA, 27 nt, synthetic construct
  misc_feature 1..27: note = Zinc finger protein 548 (56-64)
  source 1..27: mol_type = other RNA
gaggaagcccccagccagcaaggcttc

SEQ ID NO: 61042 - RNA, 30 nt, synthetic construct
  misc_feature 1..30: note = Zinc finger and BTB domain-containing protein 17 (715-724)
  source 1..30: mol_type = other RNA
gaggaagaccccaacacccacatcctgtac

SEQ ID NO: 61043 - RNA, 30 nt, synthetic construct
  misc_feature 1..30: note = Cullin-4A (268-277)
  source 1..30: mol_type = other RNA
gaggaagagggcgacagagtgatcacctac

SEQ ID NO: 61044 - RNA, 27 nt, synthetic construct
  misc_feature 1..27: note = S-phase kinase-associated protein 1 (120-128)
  source 1..27: mol_type = other RNA
gaggaaatcagaaagaccttcaacatt

SEQ ID NO: 61045 - RNA, 24 nt, synthetic construct
  misc_feature 1..24: note = Nuclear transcription factor Y subunit gamma (28-35)
  source 1..24: mol_type = other RNA
gaggaaatcagaaacctgaccgtg

SEQ ID NO: 61046 - RNA, 30 nt, synthetic construct
  misc_feature 1..30: note = Flotillin-1 (118-127)
  source 1..30: mol_type = other RNA
gaggaaatctacaaggacagacagaaattc

SEQ ID NO: 61047 - RNA, 27 nt, synthetic construct
  misc_feature 1..27: note = Microtubule-associated protein 4 (105-113)
  source 1..27: mol_type = other RNA
gaggaaaagatggcctaccaggagtat

SEQ ID NO: 61048 - RNA, 27 nt, synthetic construct
  misc_feature 1..27: note = Eukaryotic translation initiation factor 3 subunit D (172-180)
  source 1..27: mol_type = other RNA
gaggaaatggacttcccccagctgatg

SEQ ID NO: 61049 - RNA, 30 nt, synthetic construct
  misc_feature 1..30: note = HEAT repeat-containing protein 1 (411-420)
  source 1..30: mol_type = other RNA
gaggaaatggacagcaacaaggtgtccctg

SEQ ID NO: 61050 - RNA, 27 nt, synthetic construct
  misc_feature 1..27: note = BRISC and BRCA1-A complex member 1 (257-265)
  source 1..27: mol_type = other RNA
gaggaaatgagctggaaggacatgttc

SEQ ID NO: 61051 - RNA, 30 nt, synthetic construct
  misc_feature 1..30: note = Mitotic checkpoint serine/threonine-protein kinase BUB1 (35-44)
  source 1..30: mol_type = other RNA
gaggaaaacttccccgagaataaggaatac

SEQ ID NO: 61052 - RNA, 30 nt, synthetic construct
  misc_feature 1..30: note = Autophagy-related protein 16-1 (158-167)
  source 1..30: mol_type = other RNA
gaggaaaaccaggagctggtgaccagatgg

SEQ ID NO: 61053 - RNA, 27 nt, synthetic construct
  misc_feature 1..27: note = Eukaryotic translation initiation factor 3 subunit C-like protein (786-794)
  source 1..27: mol_type = other RNA
gaggaaagcctgagaacctacctcttc

SEQ ID NO: 61054 - RNA, 27 nt, synthetic construct
  misc_feature 1..27: note = Segment polarity protein dishevelled homolog DVL-2 (23-31)
  source 1..27: mol_type = other RNA
gaggaaaccccctacctggtgaagatc

SEQ ID NO: 61055 - RNA, 30 nt, synthetic construct
  misc_feature 1..30: note = GRIP1-associated protein 1 (706-715)
  source 1..30: mol_type = other RNA
gaggaagtggccgagctgttccagagactc

SEQ ID NO: 61056 - RNA, 27 nt, synthetic construct
  misc_feature 1..27: note = Glutaredoxin-3 (9-17)
  source 1..27: mol_type = other RNA
gagctggccaaggaactcccccaggtg

SEQ ID NO: 61057 - RNA, 27 nt, synthetic construct
  misc_feature 1..27: note = Nuclear factor of activated T-cells 5 (953-961)
  source 1..27: mol_type = other RNA
gagctgttcagctccccccctgccgtg

SEQ ID NO: 61058 - RNA, 24 nt, synthetic construct
  misc_feature 1..24: note = Cyclin-J-like protein (62-69)
  source 1..24: mol_type = other RNA
gagcagctgagactccaagaactt

SEQ ID NO: 61059 - RNA, 27 nt, synthetic construct
  misc_feature 1..27: note = Nucleolar RNA helicase 2 (172-180)
  source 1..27: mol_type = other RNA
ttcgccatccccctgattgagaagctc

SEQ ID NO: 61060 - RNA, 27 nt, synthetic construct
  misc_feature 1..27: note = Tristetraprolin (304-312)
  source 1..27: mol_type = other RNA
ttcgccccccctcagccagtggctgca

SEQ ID NO: 61061 - RNA, 30 nt, synthetic construct
  misc_feature 1..30: note = Laminin subunit gamma-1 (1227-1236)
  source 1..30: mol_type = other RNA
ttcgagatcgaagagctgaacagaaagtac

SEQ ID NO: 61062 - RNA, 27 nt, synthetic construct
  misc_feature 1..27: note = Nucleolar pre-ribosomal-associated protein 1 (1554-1562)
  source 1..27: mol_type = other RNA
ttcgagcagaagaccgaacaaaaatgg

SEQ ID NO: 61063 - RNA, 27 nt, synthetic construct
  misc_feature 1..27: note = Non-POU domain-containing octamer-binding protein (174-182)
  source 1..27: mol_type = other RNA
ttcgagtacgaatatgccatgagatgg

SEQ ID NO: 61064 - RNA, 27 nt, synthetic construct
  misc_feature 1..27: note = Antizyme inhibitor 1 (4-12)
  source 1..27: mol_type = other RNA
ttcatcgacgatgccaactacagcgtg

SEQ ID NO: 61065 - RNA, 30 nt, synthetic construct
  misc_feature 1..30: note = Activator of 90 kDa heat shock protein ATPase homolog 1 (215-224)
  source 1..30: mol_type = other RNA
ttcatcgacaagaacggcgagaccgaactg

SEQ ID NO: 61066 - RNA, 27 nt, synthetic construct
  misc_feature 1..27: note = Ral GTPase-activating protein subunit alpha-1 (86-94)
  source 1..27: mol_type = other RNA
ttcatctttgagaagattctgcagctc

SEQ ID NO: 61067 - RNA, 27 nt, synthetic construct
  misc_feature 1..27: note = DENN domain-containing protein 5B (1150-1158)
  source 1..27: mol_type = other RNA
ttcatctgggactttattgagaaggtg

SEQ ID NO: 61068 - RNA, 30 nt, synthetic construct
  misc_feature 1..30: note = Dipeptidyl peptidase 8 (19-28)
  source 1..30: mol_type = other RNA
ttcatctacggcgggccccaggtgcaactg

SEQ ID NO: 61069 - RNA, 27 nt, synthetic construct
  misc_feature 1..27: note = Caspase recruitment domain-containing protein 19 (155-163)
  source 1..27: mol_type = other RNA
ttcctggccgacgatctcggcgggctt

SEQ ID NO: 61070 - RNA, 33 nt, synthetic construct
  misc_feature 1..33: note = Protein YIF1B (55-65)
  source 1..33: mol_type = other RNA
ttcctggccgaccccgtgagcaacatggctatg

SEQ ID NO: 61071 - RNA, 27 nt, synthetic construct
  misc_feature 1..27: note = Interferon-induced GTP-binding protein Mx2 (30-38)
  source 1..27: mol_type = other RNA
ttcctggccaaggactttaacttcctc

SEQ ID NO: 61072 - RNA, 27 nt, synthetic construct
  misc_feature 1..27: note = Eukaryotic translation initiation factor 4 gamma 2 (315-323)
  source 1..27: mol_type = other RNA
ttcctggacaacggccccaagaccatc

SEQ ID NO: 61073 - RNA, 27 nt, synthetic construct
  misc_feature 1..27: note = Phospholipase DDHD1 (681-689)
  source 1..27: mol_type = other RNA
ttcctggacagcgcctactttagactc

SEQ ID NO: 61074 - RNA, 27 nt, synthetic construct
  misc_feature 1..27: note = Condensin complex subunit 3 (699-707)
  source 1..27: mol_type = other RNA
ttcctggacagcgaggtgtccgaactc

SEQ ID NO: 61075 - RNA, 27 nt, synthetic construct
  misc_feature 1..27: note = Microtubule-associated protein 1B (32-40)
  source 1..27: mol_type = other RNA
ttcctggacagcaagttttacctcctt

SEQ ID NO: 61076 - RNA, 27 nt, synthetic construct
  misc_feature 1..27: note = Catenin alpha-2 (392-400)
  source 1..27: mol_type = other RNA
ttcctggagaccaacgtgcccctcctt

SEQ ID NO: 61077 - RNA, 30 nt, synthetic construct
  misc_feature 1..30: note = Calnexin (139-148)
  source 1..30: mol_type = other RNA
ttcctgtttgacaccaagcccctcatcgtg

SEQ ID NO: 61078 - RNA, 27 nt, synthetic construct
  misc_feature 1..27: note = Vacuolar protein sorting-associated protein 51 homolog (106-114)
  source 1..27: mol_type = other RNA
ttcctgtttgagctccccagcagactt

SEQ ID NO: 61079 - RNA, 30 nt, synthetic construct
  misc_feature 1..30: note = Ankyrin repeat and LEM domain-containing protein 2 (825-834)
  source 1..30: mol_type = other RNA
ttcctgtttggcgaggaacccagcaagctc

SEQ ID NO: 61080 - RNA, 27 nt, synthetic construct
  misc_feature 1..27: note = Cullin-4B (289-297)
  source 1..27: mol_type = other RNA
ttcctgtttctcgacagaacctacgtg

SEQ ID NO: 61081 - RNA, 27 nt, synthetic construct
  misc_feature 1..27: note = Elongation of very long chain fatty acids protein 1 (87-95)
  source 1..27: mol_type = other RNA
ttcctgtttagcaagttcatcgagctc

SEQ ID NO: 61082 - RNA, 24 nt, synthetic construct
  misc_feature 1..24: note = Sacsin (645-652)
  source 1..24: mol_type = other RNA
ttcctgggcaagatctaccagatt

SEQ ID NO: 61083 - RNA, 27 nt, synthetic construct
  misc_feature 1..27: note = UDP-N-acetylglucosamine-dolichyl-phosphate N-acetylglucosaminephosphotransferase (221-229)
  source 1..27: mol_type = other RNA
ttcctgggcacctttatcctcaaggtg

SEQ ID NO: 61084 - RNA, 27 nt, synthetic construct
  misc_feature 1..27: note = DNA ligase 3 (616-624)
  source 1..27: mol_type = other RNA
ttcctgcacgacaacatggtggagatc

SEQ ID NO: 61085 - RNA, 27 nt, synthetic construct
  misc_feature 1..27: note = Major facilitator superfamily domain-containing protein 1 (150-158)
  source 1..27: mol_type = other RNA
ttcctgatcgacagagtgtttggcatt

SEQ ID NO: 61086 - RNA, 27 nt, synthetic construct
  misc_feature 1..27: note = ATP-dependent RNA helicase DHX36 (519-527)
  source 1..27: mol_type = other RNA
ttcctgatcattcccctccacagcctt

SEQ ID NO: 61087 - RNA, 30 nt, synthetic construct
  misc_feature 1..30: note = Beta-glucuronidase (117-126)
  source 1..30: mol_type = other RNA
ttcctgatcaacggcaagcccttttacttc

SEQ ID NO: 61088 - RNA, 27 nt, synthetic construct
  misc_feature 1..27: note = Isoleucine-tRNA ligase, cytoplasmic (662-670)
  source 1..27: mol_type = other RNA
ttcctgatccagaacgtgctcagactt

SEQ ID NO: 61089 - RNA, 27 nt, synthetic construct
  misc_feature 1..27: note = Puromycin-sensitive aminopeptidase (846-854)
  source 1..27: mol_type = other RNA
ttcctgatcagcagactcattaagctt

SEQ ID NO: 61090 - RNA, 27 nt, synthetic construct
  misc_feature 1..27: note = Myotubularin-related protein 2 (121-129)
  source 1..27: mol_type = other RNA
ttcctgatcaccattctcgaccacctt

SEQ ID NO: 61091 - RNA, 27 nt, synthetic construct
  misc_feature 1..27: note = Putative protein PLEKHA9 (298-306)
  source 1..27: mol_type = other RNA
ttcctgaagggctttctcaccgaggtg

SEQ ID NO: 61092 - RNA, 30 nt, synthetic construct
  misc_feature 1..30: note = Regulator of nonsense transcripts 1 (192-201)
  source 1..30: mol_type = other RNA
ttcctgctcggctttatccccgccaaggct

SEQ ID NO: 61093 - RNA, 30 nt, synthetic construct
  misc_feature 1..30: note = Alpha-N-acetylglucosaminidase (616-625)
  source 1..30: mol_type = other RNA
ttcctgctcggcagctggcttgagcaggcc

SEQ ID NO: 61094 - RNA, 27 nt, synthetic construct
  misc_feature 1..27: note = Probable ATP-dependent RNA helicase DDX59 (257-265)
  source 1..27: mol_type = other RNA
ttcctgctccccgtgatcatgagagcc

SEQ ID NO: 61095 - RNA, 30 nt, synthetic construct
  misc_feature 1..30: note = HLA class II histocompatibility antigen, DP alpha 1 chain (22-31)
  source 1..30: mol_type = other RNA
ttcctgctcagccttagaggcgccggggct

SEQ ID NO: 61096 - RNA, 27 nt, synthetic construct
  misc_feature 1..27: note = Putative histone H2B type 2-D (86-94)
  source 1..27: mol_type = other RNA
ttcctgaacgacatctttgagagaatt

SEQ ID NO: 61097 - RNA, 27 nt, synthetic construct
  misc_feature 1..27: note = A-kinase anchor protein 9 (956-964)
  source 1..27: mol_type = other RNA
ttcctgaacgaggaagtgaagagcctc

SEQ ID NO: 61098 - RNA, 27 nt, synthetic construct
  misc_feature 1..27: note = Osteopetrosis-associated transmembrane protein 1 (171-179)
  source 1..27: mol_type = other RNA
ttcctgaacctctttaatcacaccctt

SEQ ID NO: 61099 - RNA, 30 nt, synthetic construct
  misc_feature 1..30: note = Structure-specific endonuclease subunit SLX1 (220-229)
  source 1..30: mol_type = other RNA
ttcctgcaggaggaacccggccaactcctt

SEQ ID NO: 61100 - RNA, 27 nt, synthetic construct
  misc_feature 1..27: note = Golgin subfamily A member 4 (1152-1160)
  source 1..27: mol_type = other RNA
ttcctgcaggagcaactcgtggaactt

SEQ ID NO: 61101 - RNA, 27 nt, synthetic construct
  misc_feature 1..27: note = Endoplasmic reticulum-Golgi intermediate compartment protein 3 (5-13)
  source 1..27: mol_type = other RNA
ttcctgagcgagctccagtactatctt

SEQ ID NO: 61102 - RNA, 27 nt, synthetic construct
  misc_feature 1..27: note = Nicalin (262-270)
  source 1..27: mol_type = other RNA
ttcctgagcaccctcgagcaccatctt

SEQ ID NO: 61103 - RNA, 27 nt, synthetic construct
  misc_feature 1..27: note = Uncharacterized protein KIAA1109 (19-27)
  source 1..27: mol_type = other RNA
ttcctgaccgagcacaacagcaatgtg

SEQ ID NO: 61104 - RNA, 27 nt, synthetic construct
  misc_feature 1..27: note = Zinc finger BED domain-containing protein 5 (533-541)
  source 1..27: mol_type = other RNA
ttcctgaccgagatcaacagcacagtg

SEQ ID NO: 61105 - RNA, 30 nt, synthetic construct
  misc_feature 1..30: note = Signal transducer and activator of transcription 6 (163-172)
  source 1..30: mol_type = other RNA
ttcctggtggagaagcagccccctcaagtc

SEQ ID NO: 61106 - RNA, 30 nt, synthetic construct
  misc_feature 1..30: note = Phospholipase D3 (58-67)
  source 1..30: mol_type = other RNA
ttcctgtgggagtacggcgacctccacctt

SEQ ID NO: 61107 - RNA, 27 nt, synthetic construct
  misc_feature 1..27: note = Transcription factor 25 (382-390)
  source 1..27: mol_type = other RNA
ttcctgtggaaggagcccgccaccatg

SEQ ID NO: 61108 - RNA, 27 nt, synthetic construct
  misc_feature 1..27: note = Cytochrome b (107-115)
  source 1..27: mol_type = other RNA
ttcctgtacagcgagacctggaacatc

SEQ ID NO: 61109 - RNA, 30 nt, synthetic construct
  misc_feature 1..30: note = E3 ubiquitin-protein ligase XIAP (52-61)
  source 1..30: mol_type = other RNA
ttcctgtacaccggcgagggggacacagtg

SEQ ID NO: 61110 - RNA, 27 nt, synthetic construct
  misc_feature 1..27: note = Putative oxidoreductase GLYR1 (382-390)
  source 1..27: mol_type = other RNA
ttcatggccaccatcgctgagggcctg

SEQ ID NO: 61111 - RNA, 27 nt, synthetic construct
  misc_feature 1..27: note = Probable helicase senataxin (266-274)
  source 1..27: mol_type = other RNA
ttcatgcagagcatcctgcacaccatg

SEQ ID NO: 61112 - RNA, 27 nt, synthetic construct
  misc_feature 1..27: note = Alpha-adducin (97-105)
  source 1..27: mol_type = other RNA
ttcatgaccacaaacgtgcccaatgtc

SEQ ID NO: 61113 - RNA, 27 nt, synthetic construct
  misc_feature 1..27: note = Ubiquitin carboxyl-terminal hydrolase 11 (94-102)
  source 1..27: mol_type = other RNA
ttccaggacgagatcaactggagactg

SEQ ID NO: 61114 - RNA, 33 nt, synthetic construct
  misc_feature 1..33: note = E3 ubiquitin-protein ligase TRIP12 (633-643)
  source 1..33: mol_type = other RNA
ttccagcacgaggaaaacctgctccaacaggtg

SEQ ID NO: 61115 - RNA, 27 nt, synthetic construct
  misc_feature 1..27: note = Threonine-tRNA ligase, cytoplasmic (598-606)
  source 1..27: mol_type = other RNA
ttccagctgcccatcagatttaacctc

SEQ ID NO: 61116 - RNA, 27 nt, synthetic construct
  misc_feature 1..27: note = RNA-binding protein EWS (267-275)
  source 1..27: mol_type = other RNA
ttcagacaggaccaccccagctccatg

SEQ ID NO: 61117 - RNA, 24 nt, synthetic construct
  misc_feature 1..24: note = Spliceosome RNA helicase DDX39B (106-113)
  source 1..24: mol_type = other RNA
ttcgtggacgatgagaccaagctg

SEQ ID NO: 61118 - RNA, 27 nt, synthetic construct
  misc_feature 1..27: note = Cytoplasmic dynein 1 heavy chain 1 (4145-4153)
  source 1..27: mol_type = other RNA
ttcgtgtttgagccccctccaggcgtc

SEQ ID NO: 61119 - RNA, 27 nt, synthetic construct
  misc_feature 1..27: note = General transcription factor IIH subunit 5 (44-52)
  source 1..27: mol_type = other RNA
ttcgtgatcgccgagctggtcaacgtt

SEQ ID NO: 61120 - RNA, 27 nt, synthetic construct
  misc_feature 1..27: note = Transmembrane protein 147 (181-189)
  source 1..27: mol_type = other RNA
ttcgtgatggagacctttgtccacctg

SEQ ID NO: 61121 - RNA, 27 nt, synthetic construct
  misc_feature 1..27: note = Rhomboid domain-containing protein 2 (68-76)
  source 1..27: mol_type = other RNA
ttcgtgtacgagaaccccatcagcctg

SEQ ID NO: 61122 - RNA, 27 nt, synthetic construct
  misc_feature 1..27: note = ER degradation-enhancing alpha-mannosidase-like protein 1 (33-41)
  source 1..27: mol_type = other RNA
ttctaccagagatttcccctgagcttc

SEQ ID NO: 61123 - RNA, 27 nt, synthetic construct
  misc_feature 1..27: note = Filamin-A (998-1006)
  source 1..27: mol_type = other RNA
ggcgccgacaacagcgtggtcagattc

SEQ ID NO: 61124 - RNA, 27 nt, synthetic construct
  misc_feature 1..27: note = FACT complex subunit SPT16 (233-241)
  source 1..27: mol_type = other RNA
ggcgccgaccccagcaccgtggagatg

SEQ ID NO: 61125 - RNA, 30 nt, synthetic construct
  misc_feature 1..30: note = Telomere length regulation protein TEL2 homolog (189-198)
  source 1..30: mol_type = other RNA
ggcgaggaagtggtcagagttctgcaggcc

SEQ ID NO: 61126 - RNA, 30 nt, synthetic construct
  misc_feature 1..30: note = Leucine-rich repeat serine/threonine-protein kinase 2 (1802-1811)
  source 1..30: mol_type = other RNA
ggcgagggggaaaccctgctcaagaaatgg

SEQ ID NO: 61127 - RNA, 30 nt, synthetic construct
  misc_feature 1..30: note = Nuclear factor erythroid 2-related factor 2 (521-530)
  source 1..30: mol_type = other RNA
ggcgagaacgacaagagcctgcacctcctt

SEQ ID NO: 61128 - RNA, 27 nt, synthetic construct
  misc_feature 1..27: note = AT-rich interactive domain-containing protein 2 (80-88)
  source 1..27: mol_type = other RNA
ggcgagagctccctgatcaagcagctc

SEQ ID NO: 61129 - RNA, 30 nt, synthetic construct
  misc_feature 1..30: note = Acetyl-CoA carboxylase 1 (1979-1988)
  source 1..30: mol_type = other RNA
ggcgggatccccgtgggagtcgttgccgtg

SEQ ID NO: 61130 - RNA, 24 nt, synthetic construct
  misc_feature 1..24: note = DNA damage-binding protein 1 (59-66)
  source 1..24: mol_type = other RNA
ggcaagatcgccgtgatggagctg

SEQ ID NO: 61131 - RNA, 27 nt, synthetic construct
  misc_feature 1..27: note = Cyclin-dependent kinase 12 (1103-1111)
  source 1..27: mol_type = other RNA
ggcctggccgacatcacccagcaactc

SEQ ID NO: 61132 - RNA, 33 nt, synthetic construct
  misc_feature 1..33: note = ATPase WRNIP1 (548-558)
  source 1..33: mol_type = other RNA
ggcctggccgaccccagcgctctcacccaggca

SEQ ID NO: 61133 - RNA, 30 nt, synthetic construct
  misc_feature 1..30: note = Negative regulator of reactive oxygen species (203-212)
  source 1..30: mol_type = other RNA
ggcctggccgagctcagacaccttaacctg

SEQ ID NO: 61134 - RNA, 27 nt, synthetic construct
  misc_feature 1..27: note = Flap endonuclease 1 (5-13)
  source 1..27: mol_type = other RNA
ggcctggccaagctcatcgctgacgtg

SEQ ID NO: 61135 - RNA, 27 nt, synthetic construct
  misc_feature 1..27: note = GPN-loop GTPase 1 (234-242)
  source 1..27: mol_type = other RNA
ggcctggacgagctcttcgtgcaggtc

SEQ ID NO: 61136 - RNA, 30 nt, synthetic construct; identical to SEQ ID NO: 36909
  misc_feature 1..30: note = Probable ATP-dependent RNA helicase DDX27 (497-506)
  source 1..30: mol_type = other RNA

SEQ ID NO: 61137 - RNA, 33 nt, synthetic construct; identical to SEQ ID NO: 36910
  misc_feature 1..33: note = U3 small nucleolar RNA-associated protein 18 homolog (107-117)
  source 1..33: mol_type = other RNA

SEQ ID NO: 61138 - RNA, 27 nt, synthetic construct
  misc_feature 1..27: note = 26S protease regulatory subunit 4 (189-197)
  source 1..27: mol_type = other RNA
ggcctggacaaccagatccaagagatt

SEQ ID NO: 61139 - RNA, 30 nt, synthetic construct
  misc_feature 1..30: note = DNA mismatch repair protein Msh2 (438-447)
  source 1..30: mol_type = other RNA
ggcctggaccccgggaagcagatcaaactc

SEQ ID NO: 61140 - RNA, 27 nt, synthetic construct
  misc_feature 1..27: note = CAP-Gly domain-containing linker protein 1 (270-278)
  source 1..27: mol_type = other RNA
ggcctgttcgcccccgtgcacaaggtc

SEQ ID NO: 61141 - RNA, 33 nt, synthetic construct
  misc_feature 1..33: note = Ras suppressor protein 1 (35-45)
  source 1..33: mol_type = other RNA
ggcctgttcaccctcagccacatcacacagctt

SEQ ID NO: 61142 - RNA, 33 nt, synthetic construct
  misc_feature 1..33: note = Autophagy-related protein 13 (84-94)
  source 1..33: mol_type = other RNA
ggcctgggggagggattccagaccgtgagagtc

SEQ ID NO: 61143 - RNA, 33 nt, synthetic construct
  misc_feature 1..33: note = WD repeat and FYVE domain-containing protein 3 (1077-1087)
  source 1..33: mol_type = other RNA
ggcctgatcgacggggccgtggtcagcggaatt

SEQ ID NO: 61144 - RNA, 33 nt, synthetic construct
  misc_feature 1..33: note = Structural maintenance of chromosomes flexible hinge domain-containing protein 1 (829-839)
  source 1..33: mol_type = other RNA
ggcctgctcgaccttcccttcagagtgggggtc

SEQ ID NO: 61145 - RNA, 30 nt, synthetic construct; identical to SEQ ID NO: 36918
  misc_feature 1..30: note = Nucleolar complex protein 4 homolog (332-341)
  source 1..30: mol_type = other RNA

SEQ ID NO: 61146 - RNA, 27 nt, synthetic construct
  misc_feature 1..27: note = Transcription initiation factor TFIID subunit 4B (694-702)
  source 1..27: mol_type = other RNA
ggcctgctcgagaagcttaccgccatc

SEQ ID NO: 61147 - RNA, 27 nt, synthetic construct
  misc_feature 1..27: note = Vigilin (1000-1008)
  source 1..27: mol_type = other RNA
ggcctgctcgagagagtgaaggaactt

SEQ ID NO: 61148 - RNA, 33 nt, synthetic construct
  misc_feature 1..33: note = Vigilin (354-364)
  source 1..33: mol_type = other RNA
ggcctgctcgagagagtgaaggaacttcaggcc

SEQ ID NO: 61149 - RNA, 27 nt, synthetic construct
  misc_feature 1..27: note = Phosphatidylinositol N-acetylglucosaminyltransferase subunit H (75-83)
  source 1..27: mol_type = other RNA
ggcctgctcgggtaccttcacttcgtg

SEQ ID NO: 61150 - RNA, 27 nt, synthetic construct
  misc_feature 1..27: note = Thyroid adenoma-associated protein (229-237)
  source 1..27: mol_type = other RNA
ggcctgctcagcatcttcaccaaggtg

SEQ ID NO: 61151 - RNA, 33 nt, synthetic construct
  misc_feature 1..33: note = Trafficking protein particle complex subunit 2-like protein (29-39)
  source 1..33: mol_type = other RNA
ggcctgctctaccccaccgaggactataaggtg

SEQ ID NO: 61152 - RNA, 27 nt, synthetic construct
  misc_feature 1..27: note = Nuclear receptor corepressor 1 (313-321)
  source 1..27: mol_type = other RNA
ggcctgatggaggaccccatgaaggtg

SEQ ID NO: 61153 - RNA, 33 nt, synthetic construct
  misc_feature 1..33: note = Importin-4 (301-311)
  source 1..33: mol_type = other RNA
ggcctgatgggggagggactcgccccccacctt

SEQ ID NO: 61154 - RNA, 27 nt, synthetic construct
  misc_feature 1..27: note = Adiponectin receptor protein 2 (286-294)
  source 1..27: mol_type = other RNA
ggcctgagcgggatcattcccaccctc

SEQ ID NO: 61155 - RNA, 27 nt, synthetic construct
  misc_feature 1..27: note = Protein GPR107 (398-406)
  source 1..27: mol_type = other RNA
ggcctgtggaaggacagcctcttcctt

SEQ ID NO: 61156 - RNA, 27 nt, synthetic construct
  misc_feature 1..27: note = Chromodomain-helicase-DNA-binding protein 8 (115-123)
  source 1..27: mol_type = other RNA
ggcatggacgagaaggaattcaccgtg

SEQ ID NO: 61157 - RNA, 27 nt, synthetic construct
  misc_feature 1..27: note = DnaJ homolog subfamily A member 1 (168-176)
  source 1..27: mol_type = other RNA
ggcatggtgcagcaaatccagagcgtc

SEQ ID NO: 61158 - RNA, 30 nt, synthetic construct
  misc_feature 1..30: note = Cysteine and histidine-rich protein 1 (139-148)
  source 1..30: mol_type = other RNA
ggcatgtgggggggagccatgctgggtgtg

SEQ ID NO: 61159 - RNA, 33 nt, synthetic construct
  misc_feature 1..33: note = Rab GTPase-activating protein 1-like (35-45)
  source 1..33: mol_type = other RNA
ggcatgtggaaccccaatgcccctgtgttcctg

SEQ ID NO: 61160 - RNA, 27 nt, synthetic construct
  misc_feature 1..27: note = Tumor protein p53-inducible protein 13 (212-220)
  source 1..27: mol_type = other RNA
ggcccccagcctaccagaagcgccctg

SEQ ID NO: 61161 - RNA, 27 nt, synthetic construct
  misc_feature 1..27: note = Ubiquitin carboxyl-terminal hydrolase 48 (545-553)
  source 1..27: mol_type = other RNA
ggccccagactgaccgtgaaggccctc

SEQ ID NO: 61162 - RNA, 30 nt, synthetic construct
  misc_feature 1..30: note = Filamin-A (2186-2195)
  source 1..30: mol_type = other RNA
ggccccagactggtgagcaaccactccctc

SEQ ID NO: 61163 - RNA, 27 nt, synthetic construct
  misc_feature 1..27: note = Apoptosis-stimulating of p53 protein 2 (99-107)
  source 1..27: mol_type = other RNA
ggccccagaagccaggacccttccctg

SEQ ID NO: 61164 - RNA, 27 nt, synthetic construct
  misc_feature 1..27: note = Interleukin-6 receptor subunit beta (849-857)
  source 1..27: mol_type = other RNA
ggccaggtggagagattcgaaaccgtc

SEQ ID NO: 61165 - RNA, 30 nt, synthetic construct
  misc_feature 1..30: note = HLA class I histocompatibility antigen, B-15 alpha chain (25-34)
  source 1..30: mol_type = other RNA
ggcagccactccatgagatacttctatacc

SEQ ID NO: 61166 - RNA, 30 nt, synthetic construct
  misc_feature 1..30: note = Nucleolar protein 56 (116-125)
  source 1..30: mol_type = other RNA
ggcgtgatcgccgagattctgagaggggtc

SEQ ID NO: 61167 - RNA, 30 nt, synthetic construct; identical to SEQ ID NO: 36940
  misc_feature 1..30: note = Perilipin-2 (347-356)
  source 1..30: mol_type = other RNA

SEQ ID NO: 61168 - RNA, 33 nt, synthetic construct
  misc_feature 1..33: note = Golgi resident protein GCP60 (488-498)
  source 1..33: mol_type = other RNA
cacgaggaagtgtacgccggcagccatcagtat

SEQ ID NO: 61169 - RNA, 27 nt, synthetic construct
  misc_feature 1..27: note = Small subunit processome component 20 homolog (748-756)
  source 1..27: mol_type = other RNA
cacgagatggaaaacaagcagttctgg

SEQ ID NO: 61170 - RNA, 27 nt, synthetic construct
  misc_feature 1..27: note = Kelch domain-containing protein 3 (196-204)
  source 1..27: mol_type = other RNA
cacatcctggacttcagcccctccctc

SEQ ID NO: 61171 - RNA, 33 nt, synthetic construct
  misc_feature 1..33: note = Leucine-rich repeat and calponin homology domain-containing protein 3 (744-754)
  source 1..33: mol_type = other RNA
cacatcctggaggaaaagggcctcagccaggtg

SEQ ID NO: 61172 - RNA, 33 nt, synthetic construct
  misc_feature 1..33: note = Leucine-rich repeat and calponin homology domain-containing protein 1 (668-678)
  source 1..33: mol_type = other RNA
cacatcctggaggaaaagggcctcgtgaaagtc

SEQ ID NO: 61173 - RNA, 30 nt, synthetic construct
  misc_feature 1..30: note = Vascular endothelial growth factor receptor 1 (327-336)
  source 1..30: mol_type = other RNA
cacatctacgacaaggccttcattaccgtg

SEQ ID NO: 61174 - RNA, 33 nt, synthetic construct
  misc_feature 1..33: note = Phenylalanine-tRNA ligase alpha subunit (365-375)
  source 1..33: mol_type = other RNA
cacctggccgagttccatcagatcgaaggcgtg

SEQ ID NO: 61175 - RNA, 27 nt, synthetic construct
  misc_feature 1..27: note = ZW10 interactor (166-174)
  source 1..27: mol_type = other RNA
cacctggccgaggtgagcgctgaagtc

SEQ ID NO: 61176 - RNA, 27 nt, synthetic construct
  misc_feature 1..27: note = Gamma-adducin (155-163)
  source 1..27: mol_type = other RNA
cacctggccaacacctacatcagcgtg

SEQ ID NO: 61177 - RNA, 27 nt, synthetic construct
  misc_feature 1..27: note = Transcription factor E2-alpha (182-190)
  source 1..27: mol_type = other RNA
cacctggacgaggccatccatgtgctc

SEQ ID NO: 61178 - RNA, 27 nt, synthetic construct
  misc_feature 1..27: note = Pre-mRNA-processing factor 17 (71-79)
  source 1..27: mol_type = other RNA
cacctggaccccgccgtgaaggaggtc

SEQ ID NO: 61179 - RNA, 27 nt, synthetic construct
  misc_feature 1..27: note = Membrane-associated tyrosine- and threonine-specific cdc2-inhibitory kinase (162-170)
  source 1..27: mol_type = other RNA
cacctggacgtgaagcccgccaacatc

SEQ ID NO: 61180 - RNA, 27 nt, synthetic construct
  misc_feature 1..27: note = DEP domain-containing protein 1B (290-298)
  source 1..27: mol_type = other RNA
cacctgttcgacgcctttgtgagcgtc

SEQ ID NO: 61181 - RNA, 27 nt, synthetic construct
  misc_feature 1..27: note = Clathrin heavy chain 1 (1233-1241)
  source 1..27: mol_type = other RNA
cacctgggcgagtaccaggccgctgtg

SEQ ID NO: 61182 - RNA, 27 nt, synthetic construct
  misc_feature 1..27: note = Neutral alpha-glucosidase AB (77-85)
  source 1..27: mol_type = other RNA
cacctgatccatgaggtgaccaaggtc

SEQ ID NO: 61183 - RNA, 30 nt, synthetic construct
  misc_feature 1..30: note = Heat shock protein HSP 90-beta (110-119)
  source 1..30: mol_type = other RNA
cacctgaaggaggaccagaccgaatacctc

SEQ ID NO: 61184 - RNA, 27 nt, synthetic construct
  misc_feature 1..27: note = Centromere protein F (2031-2039)
  source 1..27: mol_type = other RNA
cacctgcaggagaagctccaaagcctt

SEQ ID NO: 61185 - RNA, 27 nt, synthetic construct
  misc_feature 1..27: note = Late secretory pathway protein AVL9 homolog (517-525)
  source 1..27: mol_type = other RNA
cacctgagcgacgccatcgtggaggtc

SEQ ID NO: 61186 - RNA, 27 nt, synthetic construct
  misc_feature 1..27: note = Leupaxin (99-107)
  source 1..27: mol_type = other RNA
cacctgaccgagatgcaggccaaggtg

SEQ ID NO: 61187 - RNA, 33 nt, synthetic construct; identical to SEQ ID NO: 36960
  misc_feature 1..33: note = Transmembrane protein 2 (1314-1324)
  source 1..33: mol_type = other RNA

SEQ ID NO: 61188 - RNA, 27 nt, synthetic construct
  misc_feature 1..27: note = Huntingtin-interacting protein 1 (192-200)
  source 1..27: mol_type = other RNA
cacctgtacgactataccgtgaagctc

SEQ ID NO: 61189 - RNA, 27 nt, synthetic construct
  misc_feature 1..27: note = Beta-lactamase-like protein 2 (145-153)
  source 1..27: mol_type = other RNA
cacaccgacgatcatatggccctgctc

SEQ ID NO: 61190 - RNA, 24 nt, synthetic construct
  misc_feature 1..24: note = DNA topoisomerase 2-beta (834-841)
  source 1..24: mol_type = other RNA
cacaccgacacaactgtgaagttc

SEQ ID NO: 61191 - RNA, 27 nt, synthetic construct
  misc_feature 1..27: note = NIPA-like protein 3 (122-130)
  source 1..27: mol_type = other RNA
atcgccattaccgctggcgcaatattc

SEQ ID NO: 61192 - RNA, 27 nt, synthetic construct
  misc_feature 1..27: note = Cyclin-dependent kinase 1 (136-144)
  source 1..27: mol_type = other RNA
atcgacgataagggcaccattaaactg

SEQ ID NO: 61193 - RNA, 27 nt, synthetic construct
  misc_feature 1..27: note = Glucosamine-6-phosphate isomerase 2 (146-154)
  source 1..27: mol_type = other RNA
atcgaggaaggcgtgaaccacatgtgg

SEQ ID NO: 61194 - RNA, 30 nt, synthetic construct
  misc_feature 1..30: note = Zinc finger protein ZPR1 (195-204)
  source 1..30: mol_type = other RNA
atcattgacgatcccagcggcaactccttc

SEQ ID NO: 61195 - RNA, 27 nt, synthetic construct
  misc_feature 1..27: note = U5 small nuclear ribonucleoprotein 200 kDa helicase (612-620)
  source 1..27: mol_type = other RNA
atcattctggacgagatacacctcctt

SEQ ID NO: 61196 - RNA, 27 nt, synthetic construct
  misc_feature 1..27: note = ATP-dependent RNA helicase DDX1 (707-715)
  source 1..27: mol_type = other RNA
atcctggcccccaccgtgcaggagctc

SEQ ID NO: 61197 - RNA, 30 nt, synthetic construct
  misc_feature 1..30: note = Prohibitin (164-173)
  source 1..30: mol_type = other RNA
atcctggacgatgtgagcctcacccacctt

SEQ ID NO: 61198 - RNA, 27 nt, synthetic construct
  misc_feature 1..27: note = Dihydroxyacetone phosphate acyltransferase (106-114)
  source 1..27: mol_type = other RNA
atcctggacgagatgagccacaagctc

SEQ ID NO: 61199 - RNA, 27 nt, synthetic construct
  misc_feature 1..27: note = ATP-binding cassette sub-family F member 3 (633-641)
  source 1..27: mol_type = other RNA
atcctggacgagcccaccaaccacctc

SEQ ID NO: 61200 - RNA, 27 nt, synthetic construct
  misc_feature 1..27: note = ATP-binding cassette sub-family F member 1 (765-773)
  source 1..27: mol_type = other RNA
atcctggacgagcccaccaacaatctc

SEQ ID NO: 61201 - RNA, 27 nt, synthetic construct
  misc_feature 1..27: note = U6 snRNA-associated Sm-like protein LSm8 (16-24)
  source 1..27: mol_type = other RNA
atcctggacgagagccacgaaagagtg

SEQ ID NO: 61202 - RNA, 27 nt, synthetic construct
  misc_feature 1..27: note = Coiled-coil domain-containing protein 66 (307-315)
  source 1..27: mol_type = other RNA
atcctggaccagagcagagagaccgtg

SEQ ID NO: 61203 - RNA, 27 nt, synthetic construct
  misc_feature 1..27: note = Heterogeneous nuclear ribonucleoprotein U (458-466)
  source 1..27: mol_type = other RNA
atcctggaccagaccaacgtgagcgcc

SEQ ID NO: 61204 - RNA, 30 nt, synthetic construct
  misc_feature 1..30: note = Actin-like protein 6A (127-136)
  source 1..30: mol_type = other RNA
atcctggacagcggcgccacccacacaact

SEQ ID NO: 61205 - RNA, 27 nt, synthetic construct
  misc_feature 1..27: note = Putative pre-mRNA-splicing factor ATP-dependent RNA helicase DHX16 (531-539)
  source 1..27: mol_type = other RNA
atcctgttcggcctcattaaggacgtg

SEQ ID NO: 61206 - RNA, 27 nt, synthetic construct
  misc_feature 1..27: note = Pecanex-like protein 1 (1442-1450)
  source 1..27: mol_type = other RNA
atcctgttcaacaagctctgggagctt

SEQ ID NO: 61207 - RNA, 33 nt, synthetic construct
  misc_feature 1..33: note = Copper chaperone for superoxide dismutase (92-102)
  source 1..33: mol_type = other RNA
atcctgggcgggcccggaaccgtgcagggtgtc

SEQ ID NO: 61208 - RNA, 27 nt, synthetic construct
  misc_feature 1..27: note = Major facilitator superfamily domain-containing protein 8 (444-452)
  source 1..27: mol_type = other RNA
atcctgggccccaagcctcagggggtg

SEQ ID NO: 61209 - RNA, 33 nt, synthetic construct
  misc_feature 1..33: note = Matrin-3 (67-77)
  source 1..33: mol_type = other RNA
atcctgggcccccctccaccgagcttccacctc

SEQ ID NO: 61210 - RNA, 27 nt, synthetic construct
  misc_feature 1..27: note = Integrator complex subunit 7 (849-857)
  source 1..27: mol_type = other RNA
atcctgggcacccacaacattacagtg

SEQ ID NO: 61211 - RNA, 27 nt, synthetic construct
  misc_feature 1..27: note = Cytoplasmic dynein 1 light intermediate chain 2 (245-253)
  source 1..27: mol_type = other RNA
atcctgcacgagaacttcaccacagtg

SEQ ID NO: 61212 - RNA, 33 nt, synthetic construct
  misc_feature 1..33: note = Adenosylhomocysteinase (339-349)
  source 1..33: mol_type = other RNA
atcctgctcgccgagggcagacttgtgaacctg

SEQ ID NO: 61213 - RNA, 27 nt, synthetic construct
  misc_feature 1..27: note = Protein angel homolog 1 (409-417)
  source 1..27: mol_type = other RNA
atcctgctcgccgaggtggacaaggtc

SEQ ID NO: 61214 - RNA, 33 nt, synthetic construct
  misc_feature 1..33: note = Arginine-tRNA ligase, cytoplasmic (564-574)
  source 1..33: mol_type = other RNA
atcctgctcgaccacgagaaggaatggaaactt

SEQ ID NO: 61215 - RNA, 27 nt, synthetic construct
  misc_feature 1..27: note = MAP kinase-activating death domain protein (316-324)
  source 1..27: mol_type = other RNA
atcctgctcgagcacaaggtggtcctt

SEQ ID NO: 61216 - RNA, 27 nt, synthetic construct
  misc_feature 1..27: note = Eukaryotic translation initiation factor 3 subunit K (69-77)
  source 1..27: mol_type = other RNA
atcctgctcaaggcccttaccaacctg

SEQ ID NO: 61217 - RNA, 33 nt, synthetic construct
  misc_feature 1..33: note = Serine/threonine-protein kinase TAO1 (157-167)
  source 1..33: mol_type = other RNA
atcctgctcaccgagcccggccaggtgaagctt

SEQ ID NO: 61218 - RNA, 27 nt, synthetic construct
  misc_feature 1..27: note = Ubiquitin carboxyl-terminal hydrolase 34 (46-54)
  source 1..27: mol_type = other RNA
atcctgatggacgagagaaccttcctc

SEQ ID NO: 61219 - RNA, 30 nt, synthetic construct; identical to SEQ ID NO: 36992
  misc_feature 1..30: note = Protein BIVM-ERCC5 (1331-1340)
  source 1..30: mol_type = other RNA

SEQ ID NO: 61220 - RNA, 30 nt, synthetic construct; identical to SEQ ID NO: 36993
  misc_feature 1..30: note = Unconventional myosin-Ic (579-588)
  source 1..30: mol_type = other RNA

SEQ ID NO: 61221 - RNA, 27 nt, synthetic construct
  misc_feature 1..27: note = Cohesin subunit SA-2 (1002-1010)
  source 1..27: mol_type = other RNA
atcctgagcgagttctcctctaagctc

SEQ ID NO: 61222 - RNA, 27 nt, synthetic construct
  misc_feature 1..27: note = TELO2-interacting protein 1 homolog (373-381)
  source 1..27: mol_type = other RNA
atcctgagcgagtccctccactctctt

SEQ ID NO: 61223 - RNA, 27 nt, synthetic construct
  misc_feature 1..27: note = Nuclear pore complex protein Nup153 (39-47)
  source 1..27: mol_type = other RNA
atcctgagcagagtgaccgagtccgtc

SEQ ID NO: 61224 - RNA, 27 nt, synthetic construct
  misc_feature 1..27: note = XAGE1D protein (105-113)
  source 1..27: mol_type = other RNA
atcctgaccagcattcagtccctcctt

SEQ ID NO: 61225 - RNA, 27 nt, synthetic construct
  misc_feature 1..27: note = Importin-11 (663-671)
  source 1..27: mol_type = other RNA
atcctgaccacactcattcaccttgtg

SEQ ID NO: 61226 - RNA, 27 nt, synthetic construct
  misc_feature 1..27: note = A-kinase anchor protein 10, mitochondrial (437-445)
  source 1..27: mol_type = other RNA
atcctgtacgacaagtatttcagcctc

SEQ ID NO: 61227 - RNA, 27 nt, synthetic construct
  misc_feature 1..27: note = Signal transducer and activator of transcription 3 (96-104)
  source 1..27: mol_type = other RNA
atcatggacgccaccaacattctggtg

SEQ ID NO: 61228 - RNA, 27 nt, synthetic construct
  misc_feature 1..27: note = Long-chain-fatty-acid-CoA ligase 3 (386-394)
  source 1..27: mol_type = other RNA
atcatggacagaatttacaagaacgtg

SEQ ID NO: 61229 - RNA, 33 nt, synthetic construct
  misc_feature 1..33: note = Syntaxin-binding protein 6 (160-170)
  source 1..33: mol_type = other RNA
atcatgggcgggaacagcattctgcactccgcc

SEQ ID NO: 61230 - RNA, 30 nt, synthetic construct
  misc_feature 1..30: note = Small nuclear ribonucleoprotein E (64-73)
  source 1..30: mol_type = other RNA
atcatgctgaagggcgacaacattaccctc

SEQ ID NO: 61231 - RNA, 27 nt, synthetic construct
  misc_feature 1..27: note = Talin-1 (100-108)
  source 1..27: mol_type = other RNA
atcatggtggacgatagcaagaccgtc

SEQ ID NO: 61232 - RNA, 27 nt, synthetic construct
  misc_feature 1..27: note = Zinc finger MIZ domain-containing protein 1 (736-744)
  source 1..27: mol_type = other RNA
atccagcacagcgagttcgaagaggtg

SEQ ID NO: 61233 - RNA, 27 nt, synthetic construct
  misc_feature 1..27: note = L-lactate dehydrogenase A chain (329-337)
  source 1..27: mol_type = other RNA
atcagcgacctggtgaaggtcaccctc

SEQ ID NO: 61234 - RNA, 27 nt, synthetic construct
  misc_feature 1..27: note = Protein cramped-like (737-745)
  source 1..27: mol_type = other RNA
atcagcaccgaggtgaaccccaagctg

SEQ ID NO: 61235 - RNA, 27 nt, synthetic construct
  misc_feature 1..27: note = Transmembrane protein 261 (13-21)
  source 1..27: mol_type = other RNA
atcaccgccccccctggcacagctgca

SEQ ID NO: 61236 - RNA, 30 nt, synthetic construct; identical to SEQ ID NO: 37009
  misc_feature 1..30: note = Apoptosis-resistant E3 ubiquitin protein ligase 1 (140-149)
  source 1..30: mol_type = other RNA

SEQ ID NO: 61237 - RNA, 27 nt, synthetic construct
  misc_feature 1..27: note = Alpha-adducin (206-214)
  source 1..27: mol_type = other RNA
atcgtggacagaggcagcaccaacctg

SEQ ID NO: 61238 - RNA, 24 nt, synthetic construct
  misc_feature 1..24: note = NADH dehydrogenase (ubiquinone) 1 beta subcomplex subunit 10 (34-41)
  source 1..24: mol_type = other RNA
atcgtggacagacccgtcaccctg

SEQ ID NO: 61239 - RNA, 27 nt, synthetic construct
  misc_feature 1..27: note = 1-phosphatidylinositol 3-phosphate 5-kinase (742-750)
  source 1..27: mol_type = other RNA
atcgtggacgtcagacccaccctggtt

SEQ ID NO: 61240 - RNA, 27 nt, synthetic construct
  misc_feature 1..27: note = Cytoplasmic dynein 1 heavy chain 1 (132-140)
  source 1..27: mol_type = other RNA
atcgtgatgcaggaggtcgaaaccgtt

SEQ ID NO: 61241 - RNA, 27 nt, synthetic construct
  misc_feature 1..27: note = Eukaryotic translation initiation factor 3 subunit B (187-195)
  source 1..27: mol_type = other RNA
atcgtggtcgacaacgttccccaggtg

SEQ ID NO: 61242 - RNA, 27 nt, synthetic construct
  misc_feature 1..27: note = Trifunctional purine biosynthetic protein adenosine-3 (125-133)
  source 1..27: mol_type = other RNA
aaggccttcaccaaacccgaggaagct

SEQ ID NO: 61243 - RNA, 27 nt, synthetic construct
  misc_feature 1..27: note = T-complex protein 1 subunit zeta (84-92)
  source 1..27: mol_type = other RNA
aaggccctgcagttcctcgaggaagtg

SEQ ID NO: 61244 - RNA, 27 nt, synthetic construct
  misc_feature 1..27: note = Endonuclease G, mitochondrial (153-161)
  source 1..27: mol_type = other RNA
aaggccatggacgataccttctacctg

SEQ ID NO: 61245 - RNA, 27 nt, synthetic construct
  misc_feature 1..27: note = Histone-lysine N-methyltransferase NSD2 (573-581)
  source 1..27: mol_type = other RNA
aaggccatggaggctgcaagctccctg

SEQ ID NO: 61246 - RNA, 27 nt, synthetic construct
  misc_feature 1..27: note = Tubulin alpha-1C chain (350-358)
  source 1..27: mol_type = other RNA
aaggcctaccacgagcagctgaccgtg

SEQ ID NO: 61247 - RNA, 30 nt, synthetic construct; identical to SEQ ID NO: 37020
  misc_feature 1..30: note = Melanoma-associated antigen 1 (160-169)
  source 1..30: mol_type = other RNA

SEQ ID NO: 61248 - RNA, 30 nt, synthetic construct
  misc_feature 1..30: note = Melanoma-associated antigen D2 (337-346)
  source 1..30: mol_type = other RNA
aaggagatcgacaaaaacgatcacctgtac

SEQ ID NO: 61249 - RNA, 27 nt, synthetic construct
  misc_feature 1..27: note = Lysine-specific demethylase 5A (1136-1144)
  source 1..27: mol_type = other RNA
aaggagatcgaagccatgcacagcctg

SEQ ID NO: 61250 - RNA, 27 nt, synthetic construct
  misc_feature 1..27: note = Something about silencing protein 10 (380-388)
  source 1..27: mol_type = other RNA
aaggagatcgaagacagacagaaactg

SEQ ID NO: 61251 - RNA, 30 nt, synthetic construct
  misc_feature 1..30: note = Plectin (705-714)
  source 1..30: mol_type = other RNA
aaggagaacgccgcttacttccagtttttc

SEQ ID NO: 61252 - RNA, 27 nt, synthetic construct
  misc_feature 1..27: note = ATP-binding cassette sub-family F member 3 (472-480)
  source 1..27: mol_type = other RNA
aaggagagcgaagtggtcatgaaattc

SEQ ID NO: 61253 - RNA, 27 nt, synthetic construct
  misc_feature 1..27: note = Kinetochore protein Nuf2 (447-455)
  source 1..27: mol_type = other RNA
aagatcgacgagaaaaccgccgaactg

SEQ ID NO: 61254 - RNA, 33 nt, synthetic construct; identical to SEQ ID NO: 37027
  misc_feature 1..33: note = Interferon-induced, double-stranded RNA-activated protein kinase (388-398)
  source 1..33: mol_type = other RNA

SEQ ID NO: 61255 - RNA, 27 nt, synthetic construct
  misc_feature 1..27: note = Cyclin-dependent kinase 1 (9-17)
  source 1..27: mol_type = other RNA
aagatcggcgaggggacctacggagtg

SEQ ID NO: 61256 - RNA, 27 nt, synthetic construct
  misc_feature 1..27: note = DNA mismatch repair protein Msh6 (740-748)
  source 1..27: mol_type = other RNA
aagatcattggcataatggaggaagtg

SEQ ID NO: 61257 - RNA, 33 nt, synthetic construct
  misc_feature 1..33: note = Arginine-tRNA ligase, cytoplasmic (587-597)
  source 1..33: mol_type = other RNA
aagatcctggacgatctcttccttcacaccctg

SEQ ID NO: 61258 - RNA, 30 nt, synthetic construct
  misc_feature 1..30: note = Vacuolar protein sorting-associated protein 41 homolog (318-327)
  source 1..30: mol_type = other RNA
aagatcctggacattggcctcgcctacata

SEQ ID NO: 61259 - RNA, 30 nt, synthetic construct
  misc_feature 1..30: note = Signal transducer and activator of transcription 3 (658-667)
  source 1..30: mol_type = other RNA
aagatcatggacgccaccaacattctggtg

SEQ ID NO: 61260 - RNA, 27 nt, synthetic construct
  misc_feature 1..27: note = UPF0568 protein C14orf166 (218-226)
  source 1..27: mol_type = other RNA
aagatcaacgaggccattgtggctgtc

SEQ ID NO: 61261 - RNA, 27 nt, synthetic construct
  misc_feature 1..27: note = Cell division cycle protein 27 homolog (380-388)
  source 1..27: mol_type = other RNA
aagatcagcaccattacaccccagata

SEQ ID NO: 61262 - RNA, 27 nt, synthetic construct
  misc_feature 1..27: note = Calpain-7 (56-64)
  source 1..27: mol_type = other RNA
aagatcaccgagtacctggaaagagtg

SEQ ID NO: 61263 - RNA, 33 nt, synthetic construct
  misc_feature 1..33: note = Pre-mRNA-processing factor 19 (375-385)
  source 1..33: mol_type = other RNA
aagatctgggacctgaaagagagaaccaacgtg

SEQ ID NO: 61264 - RNA, 33 nt, synthetic construct
  misc_feature 1..33: note = Probable ATP-dependent RNA helicase DDX60 (16-26)
  source 1..33: mol_type = other RNA
aagctggccgacatgaaccaggagtaccaactc

SEQ ID NO: 61265 - RNA, 27 nt, synthetic construct
  misc_feature 1..27: note = WD repeat-containing protein 11 (1062-1070)
  source 1..27: mol_type = other RNA
aagctggccgagggcgtgcagctcctt

SEQ ID NO: 61266 - RNA, 27 nt, synthetic construct
  misc_feature 1..27: note = KAT8 regulatory NSL complex subunit 1 (21-29)
  source 1..27: mol_type = other RNA
aagctggccccccctagctccaccctc

SEQ ID NO: 61267 - RNA, 27 nt, synthetic construct
  misc_feature 1..27: note = Dolichol-phosphate mannosyltransferase subunit 3 (24-32)
  source 1..27: mol_type = other RNA
aagctggcccagtggctctggggcctt

SEQ ID NO: 61268 - RNA, 27 nt, synthetic construct
  misc_feature 1..27: note = DnaJ homolog subfamily C member 7 (322-330)
  source 1..27: mol_type = other RNA
aagctggacgatacctacatcaaagcc

SEQ ID NO: 61269 - RNA, 27 nt, synthetic construct
  misc_feature 1..27: note = Nuclear transcription factor Y subunit gamma (53-61)
  source 1..27: mol_type = other RNA
aagctggacgaggatgtgaaaatgatc

SEQ ID NO: 61270 - RNA, 27 nt, synthetic construct
  misc_feature 1..27: note = Coronin-1C (493-501)
  source 1..27: mol_type = other RNA
aagctggacgagatcctcaaagaaatt

SEQ ID NO: 61271 - RNA, 27 nt, synthetic construct
  misc_feature 1..27: note = Protein LAP2 (759-767)
  source 1..27: mol_type = other RNA
aagctggaccacatcaacatgaatctc

SEQ ID NO: 61272 - RNA, 27 nt, synthetic construct
  misc_feature 1..27: note = Protein NPAT (88-96)
  source 1..27: mol_type = other RNA
aagctggaccacaccctcagccagatc

SEQ ID NO: 61273 - RNA, 27 nt, synthetic construct
  misc_feature 1..27: note = Rab3 GTPase-activating protein catalytic subunit (784-792)
  source 1..27: mol_type = other RNA
aagctggaggaaatcattcaccagata

SEQ ID NO: 61274 - RNA, 30 nt, synthetic construct
  misc_feature 1..30: note = Vacuolar protein sorting-associated protein 35 (323-332)
  source 1..30: mol_type = other RNA
aagctgttcgacatctttagccagcaagtg

SEQ ID NO: 61275 - RNA, 27 nt, synthetic construct
  misc_feature 1..27: note = Transmembrane protein 223 (189-197)
  source 1..27: mol_type = other RNA
aagctgttcgacaacaccgtgggcgcc

SEQ ID NO: 61276 - RNA, 27 nt, synthetic construct
  misc_feature 1..27: note = tRNA wybutosine-synthesizing protein 2 homolog (32-40)
  source 1..27: mol_type = other RNA
aagctgttcgacacccagcacagagtg

SEQ ID NO: 61277 - RNA, 33 nt, synthetic construct
  misc_feature 1..33: note = Testin (65-75)
  source 1..33: mol_type = other RNA
aagctgttcgaggacaccaaatacacaactctc

SEQ ID NO: 61278 - RNA, 27 nt, synthetic construct
  misc_feature 1..27: note = T-complex protein 11-like protein 2 (131-139)
  source 1..27: mol_type = other RNA
aagctgttcgaggaaatcagagagatt

SEQ ID NO: 61279 - RNA, 27 nt, synthetic construct
  misc_feature 1..27: note = Exportin-1 (568-576)
  source 1..27: mol_type = other RNA
aagctgttcgagtttatgcacgaaacc

SEQ ID NO: 61280 - RNA, 27 nt, synthetic construct
  misc_feature 1..27: note = TATA box-binding protein-associated factor RNA polymerase I subunit B (312-320)
  source 1..27: mol_type = other RNA
aagctgttcgagaaaaagtacagcgtg

SEQ ID NO: 61281 - RNA, 33 nt, synthetic construct
  misc_feature 1..33: note = Retinoic acid-induced protein 1 (1841-1851)
  source 1..33: mol_type = other RNA
aagctgttcggcctccaggaggccatgaaagtg

SEQ ID NO: 61282 - RNA, 27 nt, synthetic construct
  misc_feature 1..27: note = Rab-like protein 2A (105-113)
  source 1..27: mol_type = other RNA
aagctgttcaacgacgccatcagactc

SEQ ID NO: 61283 - RNA, 27 nt, synthetic construct
  misc_feature 1..27: note = WD repeat-containing protein 3 (837-845)
  source 1..27: mol_type = other RNA
aagctgttcaacgagtttatccagctc

SEQ ID NO: 61284 - RNA, 33 nt, synthetic construct
  misc_feature 1..33: note = Asparagine synthetase (glutamine-hydrolyzing) (138-148)
  source 1..33: mol_type = other RNA
aagctgttccccggctttgagatcgaaaccgtg

SEQ ID NO: 61285 - RNA, 27 nt, synthetic construct
  misc_feature 1..27: note = Splicing factor 3B subunit 3 (769-777)
  source 1..27: mol_type = other RNA
aagctgggcgccgtgttcaaccaggtc

SEQ ID NO: 61286 - RNA, 27 nt, synthetic construct
  misc_feature 1..27: note = Membrane-associated tyrosine- and threonine-specific cdc2-inhibitory kinase (179-187)
  source 1..27: mol_type = other RNA
aagctgggcgacttcgggctccttgtg

SEQ ID NO: 61287 - RNA, 24 nt, synthetic construct
  misc_feature 1..24: note = Pre-mRNA-splicing factor ATP-dependent RNA helicase PRP16 (474-481)
  source 1..24: mol_type = other RNA
aagctgggcgacatcatgggggtg

SEQ ID NO: 61288 - RNA, 27 nt, synthetic construct
  misc_feature 1..27: note = Inactive ubiquitin carboxyl-terminal hydrolase 54 (272-280)
  source 1..27: mol_type = other RNA
aagctgggcgacctcttctttagagtg

SEQ ID NO: 61289 - RNA, 27 nt, synthetic construct
  misc_feature 1..27: note = Probable ATP-dependent RNA helicase DHX37 (678-686)
  source 1..27: mol_type = other RNA
aagctgggcgacctcatggtgcttctg

SEQ ID NO: 61290 - RNA, 24 nt, synthetic construct
  misc_feature 1..24: note = Ras GTPase-activating-like protein IQGAP1 (161-168)
  source 1..24: mol_type = other RNA
aagctgggcctcgccccccagatc

SEQ ID NO: 61291 - RNA, 27 nt, synthetic construct
  misc_feature 1..27: note = Neutral amino acid transporter B(0) (45-53)
  source 1..27: mol_type = other RNA
aagctgggccccgagggggaactcctt

SEQ ID NO: 61292 - RNA, 30 nt, synthetic construct
  misc_feature 1..30: note = Nicotinamide phosphoribosyltransferase (189-198)
  source 1..30: mol_type = other RNA
aagctgcacgacttcggctacagaggggtg

SEQ ID NO: 61293 - RNA, 27 nt, synthetic construct
  misc_feature 1..27: note = AP-2 complex subunit beta (147-155)
  source 1..27: mol_type = other RNA
aagctgcacgacatcaacgcccagatg

SEQ ID NO: 61294 - RNA, 27 nt, synthetic construct
  misc_feature 1..27: note = Inner nuclear membrane protein Man1 (532-540)
  source 1..27: mol_type = other RNA
aagctgcacgacagactcgcccagctt

SEQ ID NO: 61295 - RNA, 27 nt, synthetic construct
  misc_feature 1..27: note = Ribosomal protein S6 kinase alpha-4 (94-102)
  source 1..27: mol_type = other RNA
aagctgcacctcatccttgactacgtg

SEQ ID NO: 61296 - RNA, 27 nt, synthetic construct
  misc_feature 1..27: note = E3 ubiquitin-protein ligase HECTD1 (525-533)
  source 1..27: mol_type = other RNA
aagctgatcgccgtgctcgagagcatt

SEQ ID NO: 61297 - RNA, 27 nt, synthetic construct
  misc_feature 1..27: note = Serine/threonine-protein phosphatase 6 regulatory subunit 3 (43-51)
  source 1..27: mol_type = other RNA
aagctgatcgagttcctccttaaagcc

SEQ ID NO: 61298 - RNA, 27 nt, synthetic construct
  misc_feature 1..27: note = ATP-dependent RNA helicase DDX18 (507-515)
  source 1..27: mol_type = other RNA
aagctgatcgagaaaaactacttcctc

SEQ ID NO: 61299 - RNA, 27 nt, synthetic construct
  misc_feature 1..27: note = Early endosome antigen 1 (1075-1083)
  source 1..27: mol_type = other RNA
aagctgatccaggagctcaaaaccgcc

SEQ ID NO: 61300 - RNA, 27 nt, synthetic construct
  misc_feature 1..27: note = Centrosomal protein of 57 kDa (383-391)
  source 1..27: mol_type = other RNA
aagctgatccaggagagccccaccgtg

SEQ ID NO: 61301 - RNA, 27 nt, synthetic construct
  misc_feature 1..27: note = Transmembrane protein 209 (50-58)
  source 1..27: mol_type = other RNA
aagctgatcagctcctactataacgtg

SEQ ID NO: 61302 - RNA, 27 nt, synthetic construct
  misc_feature 1..27: note = Kelch-like protein 7 (25-33)
  source 1..27: mol_type = other RNA
aagctgctcgccggcttcatgggggtg

SEQ ID NO: 61303 - RNA, 30 nt, synthetic construct
  misc_feature 1..30: note = Vacuolar protein sorting-associated protein 35 (14-23)
  source 1..30: mol_type = other RNA
aagctgctcgacgaggccatccaggctgtg

SEQ ID NO: 61304 - RNA, 33 nt, synthetic construct
  misc_feature 1..33: note = 40S ribosomal protein S17 (107-117)
  source 1..33: mol_type = other RNA
aagctgctcgacttcggcagcctttccaacctg

SEQ ID NO: 61305 - RNA, 27 nt, synthetic construct
  misc_feature 1..27: note = Ligand of Numb protein X 2 (105-113)
  source 1..27: mol_type = other RNA
aagctgctcgacaaacttctggtgttg

SEQ ID NO: 61306 - RNA, 33 nt, synthetic construct
  misc_feature 1..33: note = DDB1- and CUL4-associated factor 16 (79-89)
  source 1..33: mol_type = other RNA
aagctgctcgaccccagcacccctgtgcacatc

SEQ ID NO: 61307 - RNA, 33 nt, synthetic construct
  misc_feature 1..33: note = HCG2044777 (36-46)
  source 1..33: mol_type = other RNA
aagctgctcgacaccatggtggatacattcctt

SEQ ID NO: 61308 - RNA, 33 nt, synthetic construct
  misc_feature 1..33: note = E3 ubiquitin-protein ligase DTX3L (386-396)
  source 1..33: mol_type = other RNA
aagctgctcgagaccgaacttctgcaggagatc

SEQ ID NO: 61309 - RNA, 27 nt, synthetic construct
  misc_feature 1..27: note = GRIP and coiled-coil domain-containing protein 2 (1083-1091)
  source 1..27: mol_type = other RNA
aagctgctcgaggtgcagatccttgaa

SEQ ID NO: 61310 - RNA, 30 nt, synthetic construct
  misc_feature 1..30: note = GRIP and coiled-coil domain-containing protein 2 (1083-1092)
  source 1..30: mol_type = other RNA
aagctgctcgaggtgcagatccttgaagtc

SEQ ID NO: 61311 - RNA, 33 nt, synthetic construct
  misc_feature 1..33: note = V-type proton ATPase subunit H (396-406)
  source 1..33: mol_type = other RNA
aagctgctcgaggtgagcgacgatccccaggtc

SEQ ID NO: 61312 - RNA, 27 nt, synthetic construct
  misc_feature 1..27: note = TELO2-interacting protein 2 (122-130)
  source 1..27: mol_type = other RNA
aagctgctcggcaaagtggagaccgcc

SEQ ID NO: 61313 - RNA, 30 nt, synthetic construct
  misc_feature 1..30: note = TELO2-interacting protein 1 homolog (409-418)
  source 1..30: mol_type = other RNA
aagctgctcggccccaaaatcaacttcgtg

SEQ ID NO: 61314 - RNA, 27 nt, synthetic construct
  misc_feature 1..27: note = Bromodomain-containing protein 9 (476-484)
  source 1..27: mol_type = other RNA
aagctgctccaggaccttcacgaggcc

SEQ ID NO: 61315 - RNA, 27 nt, synthetic construct
  misc_feature 1..27: note = Zinc finger protein 644 (475-483)
  source 1..27: mol_type = other RNA
aagctgatggaggaaatcagagagctc

SEQ ID NO: 61316 - RNA, 27 nt, synthetic construct
  misc_feature 1..27: note = ATP-binding cassette sub-family F member 2 (188-196)
  source 1..27: mol_type = other RNA
aagctgatggagctctacgaaagactt

SEQ ID NO: 61317 - RNA, 27 nt, synthetic construct
  misc_feature 1..27: note = Dual specificity protein phosphatase 10 (474-482)
  source 1..27: mol_type = other RNA
aagctgatgggcgtggagaccgtcgtt

SEQ ID NO: 61318 - RNA, 27 nt, synthetic construct
  misc_feature 1..27: note = Tax1-binding protein 1 (296-304)
  source 1..27: mol_type = other RNA
aagctgatgagcgaggtgcagaccctc

SEQ ID NO: 61319 - RNA, 27 nt, synthetic construct
  misc_feature 1..27: note = S-adenosylmethionine synthase isoform type-2 (159-167)
  source 1..27: mol_type = other RNA
aagctgaacgccaaactcgctgagctt

SEQ ID NO: 61320 - RNA, 27 nt, synthetic construct
  misc_feature 1..27: note = Coatomer subunit alpha (1002-1010)
  source 1..27: mol_type = other RNA
aagctgaacgacctcatccagagactt

SEQ ID NO: 61321 - RNA, 27 nt, synthetic construct
  misc_feature 1..27: note = THAP domain-containing protein 4 (389-397)
  source 1..27: mol_type = other RNA
aagctgcaggagaaactcgacgaactt

SEQ ID NO: 61322 - RNA, 27 nt, synthetic construct
  misc_feature 1..27: note = E3 ubiquitin-protein ligase BRE1A (194-202)
  source 1..27: mol_type = other RNA
aagctgcaggagaaagtggaactcctt

SEQ ID NO: 61323 - RNA, 27 nt, synthetic construct
  misc_feature 1..27: note = DNA topoisomerase I, mitochondrial (529-537)
  source 1..27: mol_type = other RNA
aagctgcaggagcaactcgcccagctt

SEQ ID NO: 61324 - RNA, 33 nt, synthetic construct
  misc_feature 1..33: note = Ectopic P granules protein 5 homolog (535-545)
  source 1..33: mol_type = other RNA
aagctgcagcccacccctggcatccaaaaagtg

SEQ ID NO: 61325 - RNA, 27 nt, synthetic construct
  misc_feature 1..27: note = Unconventional myosin-Id (406-414)
  source 1..27: mol_type = other RNA
aagctgcagcaactcttcatccagctt

SEQ ID NO: 61326 - RNA, 27 nt, synthetic construct
  misc_feature 1..27: note = NFATC2-interacting protein (17-25)
  source 1..27: mol_type = other RNA
aagctgagcgaggtgaacaaaagactc

SEQ ID NO: 61327 - RNA, 27 nt, synthetic construct
  misc_feature 1..27: note = ATPase family AAA domain-containing protein 1 (68-76)
  source 1..27: mol_type = other RNA
aagctgagcgagtacgaaatgtccatc

SEQ ID NO: 61328 - RNA, 27 nt, synthetic construct
  misc_feature 1..27: note = Serpin H1 (262-270)
  source 1..27: mol_type = other RNA
aagctgagctccctcatcattcttatg

SEQ ID NO: 61329 - RNA, 27 nt, synthetic construct
  misc_feature 1..27: note = Coiled-coil domain-containing protein 93 (26-34)
  source 1..27: mol_type = other RNA
aagctgaccgagatcctcgaacttctg

SEQ ID NO: 61330 - RNA, 27 nt, synthetic construct
  misc_feature 1..27: note = Protein Hook homolog 1 (556-564)
  source 1..27: mol_type = other RNA
aagctgaccgaggtgcacgaagagctc

SEQ ID NO: 61331 - RNA, 27 nt, synthetic construct
  misc_feature 1..27: note = Polypeptide N-acetylgalactosaminyltransferase 18 (204-212)
  source 1..27: mol_type = other RNA
aagctgaccgagtacgtggacaaagtc

SEQ ID NO: 61332 - RNA, 27 nt, synthetic construct
  misc_feature 1..27: note = Kinesin-like protein KIF1C (839-847)
  source 1..27: mol_type = other RNA
aagctgaccggcatcctccaggaggtg

SEQ ID NO: 61333 - RNA, 27 nt, synthetic construct
  misc_feature 1..27: note = Actin-related protein 2/3 complex subunit 4 (130-138)
  source 1..27: mol_type = other RNA
aagctggtggacttcgtcatccacttt

SEQ ID NO: 61334 - RNA, 33 nt, synthetic construct
  misc_feature 1..33: note = Caprin-1 (191-201)
  source 1..33: mol_type = other RNA
aagctggtggaccccgagagagatatgagcctc

SEQ ID NO: 61335 - RNA, 27 nt, synthetic construct
  misc_feature 1..27: note = Lysine-tRNA ligase (474-482)
  source 1..27: mol_type = other RNA
aagctggtgggcgagttcctcgaagtc

SEQ ID NO: 61336 - RNA, 27 nt, synthetic construct
  misc_feature 1..27: note = Baculoviral IAP repeat-containing protein 6 (860-868)
  source 1..27: mol_type = other RNA
aagctggtgaacatcctcgtccagctt

SEQ ID NO: 61337 - RNA, 27 nt, synthetic construct
  misc_feature 1..27: note = Eukaryotic peptide chain release factor GTP-binding subunit ERF3A (239-247)
  source 1..27: mol_type = other RNA
aagctggtgcccttcctcaaaaaggtc

SEQ ID NO: 61338 - RNA, 27 nt, synthetic construct
  misc_feature 1..27: note = Trafficking protein particle complex subunit 11 (245-253)
  source 1..27: mol_type = other RNA
aagctgtgggccgacagaatcagcctc

SEQ ID NO: 61339 - RNA, 27 nt, synthetic construct
  misc_feature 1..27: note = Pecanex-like protein 1 (1446-1454)
  source 1..27: mol_type = other RNA
aagctgtgggagctcctttacaaactg

SEQ ID NO: 61340 - RNA, 27 nt, synthetic construct
  misc_feature 1..27: note = Intraflagellar transport protein 27 homolog (77-85)
  source 1..27: mol_type = other RNA
aagctgtgggagagccccaacgtgctc

SEQ ID NO: 61341 - RNA, 33 nt, synthetic construct
  misc_feature 1..33: note = Transducin-like enhancer protein 4 (308-318)
  source 1..33: mol_type = other RNA
aagctgtggaccggcgggctcgacaacacagtg

SEQ ID NO: 61342 - RNA, 30 nt, synthetic construct
  misc_feature 1..30: note = Cytochrome P450 4V2 (91-100)
  source 1..30: mol_type = other RNA
aagctgtgggtgggccccgtccctatggtt

SEQ ID NO: 61343 - RNA, 27 nt, synthetic construct
  misc_feature 1..27: note = Intraflagellar transport protein 172 homolog (352-360)
  source 1..27: mol_type = other RNA
aagctgtacgacgatatgatcagactc

SEQ ID NO: 61344 - RNA, 27 nt, synthetic construct
  misc_feature 1..27: note = General transcription factor II-I repeat domain-containing protein 2B (841-849)
  source 1..27: mol_type = other RNA
aagctgtacgagagcgaactcaccctt

SEQ ID NO: 61345 - RNA, 27 nt, synthetic construct
  misc_feature 1..27: note = DNA-directed RNA polymerase I subunit RPA1 (386-394)
  source 1..27: mol_type = other RNA
aagctgtacaacatctggattagactc

SEQ ID NO: 61346 - RNA, 33 nt, synthetic construct
  misc_feature 1..33: note = Regulator of nonsense transcripts 1 (816-826)
  source 1..33: mol_type = other RNA
aagctgtaccaggaggtggaaatcgccagcgtc

SEQ ID NO: 61347 - RNA, 27 nt, synthetic construct
  misc_feature 1..27: note = Glutamine-tRNA ligase (401-409)
  source 1..27: mol_type = other RNA
aagatggaccccgtggcctacagagtc

SEQ ID NO: 61348 - RNA, 27 nt, synthetic construct
  misc_feature 1..27: note = Adiponectin receptor protein 1 (79-87)
  source 1..27: mol_type = other RNA
aagatggaggaattcgtgtacaaagtc

SEQ ID NO: 61349 - RNA, 27 nt, synthetic construct
  misc_feature 1..27: note = NADH dehydrogenase (ubiquinone) iron-sulfur protein 2, mitochondrial (1-9)
  source 1..27: mol_type = other RNA
aagatgttcgagttttacgaaagagtg

SEQ ID NO: 61350 - RNA, 30 nt, synthetic construct
  misc_feature 1..30: note = cAMP-dependent protein kinase type II-alpha regulatory subunit (222-231)
  source 1..30: mol_type = other RNA
aagatgttcgagagctttatcgaatccgtg

SEQ ID NO: 61351 - RNA, 30 nt, synthetic construct
  misc_feature 1..30: note = 3-hydroxy-3-methylglutaryl-coenzyme A reductase (314-323)
  source 1..30: mol_type = other RNA
aagatgatcagcatggacattgagcaggtg

SEQ ID NO: 61352 - RNA, 33 nt, synthetic construct
  misc_feature 1..33: note = Serine/threonine-protein kinase SIK2 (72-82)
  source 1..33: mol_type = other RNA
aagatgctggaccacccccatatcattaaactc

SEQ ID NO: 61353 - RNA, 27 nt, synthetic construct
  misc_feature 1..27: note = Transmembrane protein 245 (455-463)
  source 1..27: mol_type = other RNA
aagatgctggacaaaatcattagcata

SEQ ID NO: 61354 - RNA, 30 nt, synthetic construct
  misc_feature 1..30: note = Acetyl-CoA acetyltransferase, mitochondrial (365-374)
  source 1..30: mol_type = other RNA
aagatgctggagatcgacccccagaaagtg

SEQ ID NO: 61355 - RNA, 33 nt, synthetic construct
  misc_feature 1..33: note = HLA class II histocompatibility antigen, DQ beta 1 chain (229-239)
  source 1..33: mol_type = other RNA
aagatgctgagcggcatcgggggattcgtgctc

SEQ ID NO: 61356 - RNA, 33 nt, synthetic construct
  misc_feature 1..33: note = HLA class II histocompatibility antigen, DRB1-11 beta chain (227-237)
  source 1..33: mol_type = other RNA
aagatgctgagcggcgtggggggattcgtcctc

SEQ ID NO: 61357 - RNA, 27 nt, synthetic construct
  misc_feature 1..27: note = DNA replication licensing factor MCM4 (578-586)
  source 1..27: mol_type = other RNA
aagatgaacgagagcaccagatccgtg

SEQ ID NO: 61358 - RNA, 27 nt, synthetic construct
  misc_feature 1..27: note = MAP kinase-activating death domain protein (389-397)
  source 1..27: mol_type = other RNA
aagatgcccgacgatgtgtggctggtc

SEQ ID NO: 61359 - RNA, 27 nt, synthetic construct
  misc_feature 1..27: note = Mitotic spindle assembly checkpoint protein MAD1 (294-302)
  source 1..27: mol_type = other RNA
aagatgcaggagaccctggtgggcctc

SEQ ID NO: 61360 - RNA, 27 nt, synthetic construct
  misc_feature 1..27: note = Rho GTPase-activating protein 5 (514-522)
  source 1..27: mol_type = other RNA
aagatgagcgagatccacaccgtgctg

SEQ ID NO: 61361 - RNA, 27 nt, synthetic construct
  misc_feature 1..27: note = Centromere protein F (1431-1439)
  source 1..27: mol_type = other RNA
aagatgagcgagctgcagacctacgtg

SEQ ID NO: 61362 - RNA, 27 nt, synthetic construct
  misc_feature 1..27: note = Nucleolar protein 56 (288-296)
  source 1..27: mol_type = other RNA
aagatgagccaggtggccccctccctg

SEQ ID NO: 61363 - RNA, 27 nt, synthetic construct
  misc_feature 1..27: note = AP-1 complex subunit sigma-1A (29-37)
  source 1..27: mol_type = other RNA
aagatggtgagagagctgatgcaggtc

SEQ ID NO: 61364 - RNA, 33 nt, synthetic construct; identical to SEQ ID NO: 37137
  misc_feature 1..33: note = mRNA export factor (111-121)
  source 1..33: mol_type = other RNA

SEQ ID NO: 61365 - RNA, 27 nt, synthetic construct
  misc_feature 1..27: note = Ski oncogene (28-36)
  source 1..27: mol_type = other RNA
aagcccagctcctggctgagaaccctc

SEQ ID NO: 61366 - RNA, 27 nt, synthetic construct
  misc_feature 1..27: note = Breast cancer type 2 susceptibility protein (1180-1188)
  source 1..27: mol_type = other RNA
aagcagttcgagggcaccgtggaaatc

SEQ ID NO: 61367 - RNA, 27 nt, synthetic construct
  misc_feature 1..27: note = E3 UFM1-protein ligase 1 (402-410)
  source 1..27: mol_type = other RNA
aagcagatcagcaccctggagtccgtg

SEQ ID NO: 61368 - RNA, 27 nt, synthetic construct
  misc_feature 1..27: note = General transcription factor II-I (532-540)
  source 1..27: mol_type = other RNA
aagcaggtggaggaaatcttcaacctg

SEQ ID NO: 61369 - RNA, 27 nt, synthetic construct
  misc_feature 1..27: note = Ribonuclease H2 subunit B (295-303)
  source 1..27: mol_type = other RNA
aagagcatcgacaccttctttggcgtg

SEQ ID NO: 61370 - RNA, 27 nt, synthetic construct
  misc_feature 1..27: note = Zinc finger MYM-type protein 3 (414-422)
  source 1..27: mol_type = other RNA
aagaccggcgaggtgctgcacgaagtc

SEQ ID NO: 61371 - RNA, 33 nt, synthetic construct
  misc_feature 1..33: note = PRELI domain-containing protein 1, mitochondrial (157-167)
  source 1..33: mol_type = other RNA
aagaccatgaaaggcttcgagtacatcctggcc

SEQ ID NO: 61372 - RNA, 27 nt, synthetic construct
  misc_feature 1..27: note = Sister chromatid cohesion protein PDS5 homolog A (1070-1078)
  source 1..27: mol_type = other RNA
aagaccaacgagaaactgtacacagtg

SEQ ID NO: 61373 - RNA, 27 nt, synthetic construct
  misc_feature 1..27: note = Pre-rRNA-processing protein TSR1 homolog (106-114)
  source 1..27: mol_type = other RNA
aaggtggccgacaccatcctgttcctc

SEQ ID NO: 61374 - RNA, 27 nt, synthetic construct
  misc_feature 1..27: note = TNFAIP3-interacting protein 2 (330-338)
  source 1..27: mol_type = other RNA
aaggtggccagcctgctccaccaggtc

SEQ ID NO: 61375 - RNA, 27 nt, synthetic construct
  misc_feature 1..27: note = Polyadenylate-binding protein 4 (602-610)
  source 1..27: mol_type = other RNA
aaggtggacgaggccgtcgctgttctg

SEQ ID NO: 61376 - RNA, 30 nt, synthetic construct
  misc_feature 1..30: note = Beta-secretase 2 (314-323)
  source 1..30: mol_type = other RNA
aaggtgttcgacgccgtcgttgaggctgtg

SEQ ID NO: 61377 - RNA, 27 nt, synthetic construct
  misc_feature 1..27: note = Melanoma inhibitory activity protein 3 (259-267)
  source 1..27: mol_type = other RNA
aaggtgctggacaaagtcttcagagcc

SEQ ID NO: 61378 - RNA, 27 nt, synthetic construct
  misc_feature 1..27: note = Lipopolysaccharide-responsive and beige-like anchor protein (136-144)
  source 1..27: mol_type = other RNA
aaggtgctgggcaaaatcgagaaggtc

SEQ ID NO: 61379 - RNA, 27 nt, synthetic construct
  misc_feature 1..27: note = Protein SET (137-145)
  source 1..27: mol_type = other RNA
aaggtgctgagcaaagagttccacctc

SEQ ID NO: 61380 - RNA, 33 nt, synthetic construct
  misc_feature 1..33: note = E3 ubiquitin-protein ligase RNF213 (3249-3259)
  source 1..33: mol_type = other RNA
aaggtgagcgaggaagccaaatccatcctgctc

SEQ ID NO: 61381 - RNA, 30 nt, synthetic construct
  misc_feature 1..30: note = T-complex protein 1 subunit delta (232-241)
  source 1..30: mol_type = other RNA
aaggtgagcaactccggcatcaccagagtc

SEQ ID NO: 61382 - RNA, 30 nt, synthetic construct
  misc_feature 1..30: note = Inhibitor of nuclear factor kappa-B kinase subunit alpha (394-403)
  source 1..30: mol_type = other RNA
aaggtgtgggccgaggctgtccactacgtt

SEQ ID NO: 61383 - RNA, 27 nt, synthetic construct
  misc_feature 1..27: note = TRIO and F-actin-binding protein (548-556)
  source 1..27: mol_type = other RNA
aagtaccaggacgtgtatgtcgagctg

SEQ ID NO: 61384 - RNA, 27 nt, synthetic construct
  misc_feature 1..27: note = Growth arrest-specific protein 7 (317-325)
  source 1..27: mol_type = other RNA
ctggccgacgaggctgaagtgcacctc

SEQ ID NO: 61385 - RNA, 24 nt, synthetic construct
  misc_feature 1..24: note = Heat shock protein HSP 90-beta (497-504)
  source 1..24: mol_type = other RNA
ctggacaagaaagtggagaaggtc

SEQ ID NO: 61386 - RNA, 27 nt, synthetic construct
  misc_feature 1..27: note = Glutamine-tRNA ligase (170-178)
  source 1..27: mol_type = other RNA
ctggaggccgacctcgaaaagaaattc

SEQ ID NO: 61387 - RNA, 27 nt, synthetic construct
  misc_feature 1..27: note = GRIP and coiled-coil domain-containing protein 2 (490-498)
  source 1..27: mol_type = other RNA
ctggagaacgaacaggtgcaaaagctc

SEQ ID NO: 61388 - RNA, 27 nt, synthetic construct
  misc_feature 1..27: note = ERO1-like protein alpha (69-77)
  source 1..27: mol_type = other RNA
ctggagagcgactacttcagatattac

SEQ ID NO: 61389 - RNA, 33 nt, synthetic construct
  misc_feature 1..33: note = Lethal(2) giant larvae protein homolog 2 (69-79)
  source 1..33: mol_type = other RNA
ctgcaccaggagaacaatgccgtgacccaaatc

SEQ ID NO: 61390 - RNA, 27 nt, synthetic construct
  misc_feature 1..27: note = Beta-hexosaminidase subunit beta (194-202)
  source 1..27: mol_type = other RNA
ctgatcgacaccagcagacactacctc

SEQ ID NO: 61391 - RNA, 27 nt, synthetic construct
  misc_feature 1..27: note = mRNA cap guanine-N7 methyltransferase (183-191)
  source 1..27: mol_type = other RNA
ctgatcggcgagttcctcgaaaaggtg

SEQ ID NO: 61392 - RNA, 27 nt, synthetic construct
  misc_feature 1..27: note = Activating signal cointegrator 1 complex subunit 3 (1174-1182)
  source 1..27: mol_type = other RNA
ctgatcattgacgagatacacctcctt

SEQ ID NO: 61393 - RNA, 27 nt, synthetic construct
  misc_feature 1..27: note = Elongation factor 2 (292-300)
  source 1..27: mol_type = other RNA
ctgatcctcgaccccattttcaaggtg

SEQ ID NO: 61394 - RNA, 27 nt, synthetic construct
  misc_feature 1..27: note = Zinc finger protein 532 (468-476)
  source 1..27: mol_type = other RNA
ctgaagctcgccaacaataccacagtg

SEQ ID NO: 61395 - RNA, 27 nt, synthetic construct
  misc_feature 1..27: note = Protein TBRG4 (214-222)
  source 1..27: mol_type = other RNA
ctgctcgccgagcttctgacccacttg

SEQ ID NO: 61396 - RNA, 27 nt, synthetic construct
  misc_feature 1..27: note = Cytoplasmic dynein 1 heavy chain 1 (1716-1724)
  source 1..27: mol_type = other RNA
ctgctcgccgagagcgtgaccgaagtc

SEQ ID NO: 61397 - RNA, 27 nt, synthetic construct
  misc_feature 1..27: note = m7GpppX diphosphatase (297-305)
  source 1..27: mol_type = other RNA
ctgctcgccgaggtgatcgaaaacctt

SEQ ID NO: 61398 - RNA, 27 nt, synthetic construct
  misc_feature 1..27: note = E3 ubiquitin-protein ligase UBR2 (617-625)
  source 1..27: mol_type = other RNA
ctgctcgccggccttcacgtgctgttg

SEQ ID NO: 61399 - RNA, 33 nt, synthetic construct
  misc_feature 1..33: note = MAP kinase-activating death domain protein (367-377)
  source 1..33: mol_type = other RNA
ctgctcgcccccaccccttacatcattggcgtg

SEQ ID NO: 61400 - RNA, 27 nt, synthetic construct
  misc_feature 1..27: note = Peroxiredoxin-5, mitochondrial (164-172)
  source 1..27: mol_type = other RNA
ctgctcgacgatagccttgtgtccatc

SEQ ID NO: 61401 - RNA, 30 nt, synthetic construct
  misc_feature 1..30: note = Beta-adrenergic receptor kinase 1 (324-333)
  source 1..30: mol_type = other RNA
ctgctcgacgagcacggccatgtgagaatc

SEQ ID NO: 61402 - RNA, 27 nt, synthetic construct
  misc_feature 1..27: note = Lon protease homolog 2, peroxisomal (678-686)
  source 1..27: mol_type = other RNA
ctgctcgacaacaccgatatccacctt

SEQ ID NO: 61403 - RNA, 27 nt, synthetic construct
  misc_feature 1..27: note = Coatomer subunit gamma-1 (848-856)
  source 1..27: mol_type = other RNA
ctgctcgacaccgtgacaatgcaggtc

SEQ ID NO: 61404 - RNA, 27 nt, synthetic construct
  misc_feature 1..27: note = Serine-protein kinase ATM (1590-1598)
  source 1..27: mol_type = other RNA
ctgctcgaggaaatcaaccacttcctt

SEQ ID NO: 61405 - RNA, 33 nt, synthetic construct
  misc_feature 1..33: note = DNA-directed RNA polymerase II subunit RPB11-a (11-21)
  source 1..33: mol_type = other RNA
ctgctcttcgagggcgaaaagaaaatcaccatt

SEQ ID NO: 61406 - RNA, 27 nt, synthetic construct
  misc_feature 1..27: note = GCN1 general control of amino-acid synthesis 1-like 1 (1599-1607)
  source 1..27: mol_type = other RNA
ctgctcggcgaccttctgttccacatc

SEQ ID NO: 61407 - RNA, 27 nt, synthetic construct
  misc_feature 1..27: note = Transport and Golgi organization protein 6 homolog (991-999)
  source 1..27: mol_type = other RNA
ctgctcggcagcgtggtccacgaggtt

SEQ ID NO: 61408 - RNA, 27 nt, synthetic construct
  misc_feature 1..27: note = Nucleoprotein TPR (1158-1166)
  source 1..27: mol_type = other RNA
ctgctccacgaccagatcgagaagctt

SEQ ID NO: 61409 - RNA, 27 nt, synthetic construct
  misc_feature 1..27: note = Sentrin-specific protease 5 (328-336)
  source 1..27: mol_type = other RNA
ctgctcatccccattcaccttgaggtg

SEQ ID NO: 61410 - RNA, 27 nt, synthetic construct
  misc_feature 1..27: note = cAMP-dependent protein kinase type I-alpha regulatory subunit (30-38)
  source 1..27: mol_type = other RNA
ctgctcaaggacagcatcgtgcagctt

SEQ ID NO: 61411 - RNA, 30 nt, synthetic construct
  misc_feature 1..30: note = Coatomer subunit gamma-1 (847-856)
  source 1..30: mol_type = other RNA
ctgctccttgacaccgtgacaatgcaggtc

SEQ ID NO: 61412 - RNA, 27 nt, synthetic construct
  misc_feature 1..27: note = ATP-binding cassette sub-family B member 8, mitochondrial (150-158)
  source 1..27: mol_type = other RNA
ctgctccttggccagctggtggaggtc

SEQ ID NO: 61413 - RNA, 33 nt, synthetic construct
  misc_feature 1..33: note = Ubiquitin/ISG15-conjugating enzyme E2 L6 (38-48)
  source 1..33: mol_type = other RNA
ctgctccttcccgaccagcctccataccacctg

SEQ ID NO: 61414 - RNA, 33 nt, synthetic construct
  misc_feature 1..33: note = E3 ubiquitin-protein ligase listerin (646-656)
  source 1..33: mol_type = other RNA
ctgctcatgcccagctccgaggaccttctgttg

SEQ ID NO: 61415 - RNA, 27 nt, synthetic construct
  misc_feature 1..27: note = Kelch-like protein 12 (470-478)
  source 1..27: mol_type = other RNA
ctgctcaacgaccacatctacgtggtc

SEQ ID NO: 61416 - RNA, 27 nt, synthetic construct
  misc_feature 1..27: note = Polyadenylate-binding protein 4 (162-170)
  source 1..27: mol_type = other RNA
ctgctcaacgacagaaaggtgttcgtc

SEQ ID NO: 61417 - RNA, 30 nt, synthetic construct
  misc_feature 1..30: note = Staphylococcal nuclease domain-containing protein 1 (187-196)
  source 1..30: mol_type = other RNA
ctgctccccgactactatcttgtgaccgtc

SEQ ID NO: 61418 - RNA, 30 nt, synthetic construct
  misc_feature 1..30: note = tRNA-dihydrouridine(47) synthase (NAD(P)(+))-like (208-217)
  source 1..30: mol_type = other RNA
ctgctccccgagcttagagactggggcgtg

SEQ ID NO: 61419 - RNA, 27 nt, synthetic construct
  misc_feature 1..27: note = Activating molecule in BECN1-regulated autophagy protein 1 (810-818)
  source 1..27: mol_type = other RNA
ctgctccccgagtaccttccttatgcc

SEQ ID NO: 61420 - RNA, 27 nt, synthetic construct
  misc_feature 1..27: note = Transportin-1 (394-402)
  source 1..27: mol_type = other RNA
ctgctcccccacatccttcctctgttg

SEQ ID NO: 61421 - RNA, 27 nt, synthetic construct
  misc_feature 1..27: note = Angiomotin-like protein 1 (845-853)
  source 1..27: mol_type = other RNA
ctgctcccccctccaccgaccagcgcc

SEQ ID NO: 61422 - RNA, 27 nt, synthetic construct
  misc_feature 1..27: note = ATP-citrate synthase (43-51)
  source 1..27: mol_type = other RNA
ctgctccaggaccacccctggcttctg

SEQ ID NO: 61423 - RNA, 27 nt, synthetic construct
  misc_feature 1..27: note = Pleckstrin homology domain-containing family A member 4 (400-408)
  source 1..27: mol_type = other RNA
ctgctccaggacagacttgtgagcgtc

SEQ ID NO: 61424 - RNA, 27 nt, synthetic construct
  misc_feature 1..27: note = T-complex protein 1 subunit epsilon (314-322)
  source 1..27: mol_type = other RNA
ctgctccagaacaatcttcccgccgtg

SEQ ID NO: 61425 - RNA, 27 nt, synthetic construct
  misc_feature 1..27: note = Nuclear factor erythroid 2-related factor 1 (371-379)
  source 1..27: mol_type = other RNA
ctgctcagagagaaggtggaattcctt

SEQ ID NO: 61426 - RNA, 27 nt, synthetic construct
  misc_feature 1..27: note = Eukaryotic translation initiation factor 4 gamma 3 (1361-1369)
  source 1..27: mol_type = other RNA
ctgctcagcgagatccttcacctgttg

SEQ ID NO: 61427 - RNA, 27 nt, synthetic construct
  misc_feature 1..27: note = Liprin-alpha-3 (437-445)
  source 1..27: mol_type = other RNA
ctgctcagcgagtccaacgaaagactt

SEQ ID NO: 61428 - RNA, 30 nt, synthetic construct
  misc_feature 1..30: note = Cyclin-dependent kinase 11B (556-565)
  source 1..30: mol_type = other RNA
ctgctcagccacgccggcatccttaaggtg

SEQ ID NO: 61429 - RNA, 27 nt, synthetic construct
  misc_feature 1..27: note = TATA-binding protein-associated factor 172 (43-51)
  source 1..27: mol_type = other RNA
ctgctcagcaaggtgcttatctacctg

SEQ ID NO: 61430 - RNA, 27 nt, synthetic construct
  misc_feature 1..27: note = Ras GTPase-activating protein-binding protein 1 (97-105)
  source 1..27: mol_type = other RNA
ctgctcagcaacaataaccaggccctt

SEQ ID NO: 61431 - RNA, 27 nt, synthetic construct
  misc_feature 1..27: note = Fasciculation and elongation protein zeta-2 (365-373)
  source 1..27: mol_type = other RNA
ctgctcaccgactacatccttaaggtg

SEQ ID NO: 61432 - RNA, 27 nt, synthetic construct
  misc_feature 1..27: note = 5'-nucleotidase domain-containing protein 3 (276-284)
  source 1..27: mol_type = other RNA
ctgctctgggacaagatccacaaactt

SEQ ID NO: 61433 - RNA, 30 nt, synthetic construct
  misc_feature 1..30: note = Cyclic AMP-dependent transcription factor ATF-6 beta (206-215)
  source 1..30: mol_type = other RNA
ctgctctgggacgtgcccgcccctagcctt

SEQ ID NO: 61434 - RNA, 33 nt, synthetic construct
  misc_feature 1..33: note = Protein KIAA0100 (525-535)
  source 1..33: mol_type = other RNA
ctgctctggagcccccctgaccacatgtacctt

SEQ ID NO: 61435 - RNA, 27 nt, synthetic construct
  misc_feature 1..27: note = Growth arrest-specific protein 8 (22-30)
  source 1..27: mol_type = other RNA
ctgctctacgagcaccagaacaatctt

SEQ ID NO: 61436 - RNA, 30 nt, synthetic construct
  misc_feature 1..30: note = ATP-dependent RNA helicase DHX29 (149-158)
  source 1..30: mol_type = other RNA
ctgctctacggcggggaccttcacagcgcc

SEQ ID NO: 61437 - RNA, 27 nt, synthetic construct
  misc_feature 1..27: note = Catenin alpha-1 (702-710)
  source 1..27: mol_type = other RNA
ctgatgaacgccgtggtccagaccgtt

SEQ ID NO: 61438 - RNA, 27 nt, synthetic construct
  misc_feature 1..27: note = Transient receptor potential cation channel subfamily V member 2 (644-652)
  source 1..27: mol_type = other RNA
ctgatgagcgagaccgtgaactccgtc

SEQ ID NO: 61439 - RNA, 27 nt, synthetic construct
  misc_feature 1..27: note = 5'-3' exoribonuclease 2 (347-355)
  source 1..27: mol_type = other RNA
ctgccccacctccctagccttgagatc

SEQ ID NO: 61440 - RNA, 27 nt, synthetic construct
  misc_feature 1..27: note = Exosome component 10 (544-552)
  source 1..27: mol_type = other RNA
ctgcccaaggagcctcagggcatcatt

SEQ ID NO: 61441 - RNA, 24 nt, synthetic construct
  misc_feature 1..24: note = Girdin (733-740)
  source 1..24: mol_type = other RNA
ctgcccagagccagctccgtgatc

SEQ ID NO: 61442 - RNA, 27 nt, synthetic construct
  misc_feature 1..27: note = Cytoskeleton-associated protein 5 (598-606)
  source 1..27: mol_type = other RNA
ctgccctggaccgccgagcaggtggtc

SEQ ID NO: 61443 - RNA, 27 nt, synthetic construct
  misc_feature 1..27: note = SLIT-ROBO Rho GTPase-activating protein 2 (519-527)
  source 1..27: mol_type = other RNA
ctgcagcacgagggcatcttcagagtg

SEQ ID NO: 61444 - RNA, 33 nt, synthetic construct
  misc_feature 1..33: note = DNA dC-dU-editing enzyme APOBEC-3A (64-74)
  source 1..33: mol_type = other RNA
ctgcagctcgaccccgcccaaatctacagagtg

SEQ ID NO: 61445 - RNA, 27 nt, synthetic construct
  misc_feature 1..27: note = N-acetylgalactosamine kinase (236-244)
  source 1..27: mol_type = other RNA
ctgcagtgggacaaggtgctcagactt

SEQ ID NO: 61446 - RNA, 27 nt, synthetic construct
  misc_feature 1..27: note = ATP-binding cassette sub-family A member 7 (407-415)
  source 1..27: mol_type = other RNA
ctgagcctcgacaagcttgaggccgct

SEQ ID NO: 61447 - RNA, 27 nt, synthetic construct
  misc_feature 1..27: note = U6 snRNA-associated Sm-like protein LSm4 (4-12)
  source 1..27: mol_type = other RNA
ctgagcctccttaagaccgcccagaac

SEQ ID NO: 61448 - RNA, 27 nt, synthetic construct
  misc_feature 1..27: note = Pre-mRNA-processing-splicing factor 8 (249-257)
  source 1..27: mol_type = other RNA
ctggtggacgataactacttctatctc

SEQ ID NO: 61449 - RNA, 30 nt, synthetic construct
  misc_feature 1..30: note = Protein PRRC2B (148-157)
  source 1..30: mol_type = other RNA
ctggtgtacgagggccagctcagccaagcc

SEQ ID NO: 61450 - RNA, 27 nt, synthetic construct
  misc_feature 1..27: note = E3 ubiquitin-protein ligase Hakai (268-276)
  source 1..27: mol_type = other RNA
atggccccccctccaccgagaagcgtg

SEQ ID NO: 61451 - RNA, 27 nt, synthetic construct
  misc_feature 1..27: note = Eukaryotic translation initiation factor 4 gamma 1 (1290-1298)
  source 1..27: mol_type = other RNA
atggagatcgacattccccacgtgtgg

SEQ ID NO: 61452 - RNA, 30 nt, synthetic construct
  misc_feature 1..30: note = Keratinocyte-associated transmembrane protein 2 (176-185)
  source 1..30: mol_type = other RNA
atggagatcgaacagagcgtgaagtccttc

SEQ ID NO: 61453 - RNA, 27 nt, synthetic construct
  misc_feature 1..27: note = E3 ubiquitin-protein ligase UBR1 (380-388)
  source 1..27: mol_type = other RNA
atggagatggaatacaagaaactgttc

SEQ ID NO: 61454 - RNA, 27 nt, synthetic construct
  misc_feature 1..27: note = Intron-binding protein aquarius (94-102)
  source 1..27: mol_type = other RNA
atggagcagagcctgttcaccagattt

SEQ ID NO: 61455 - RNA, 27 nt, synthetic construct
  misc_feature 1..27: note = Riboflavin kinase (85-93)
  source 1..27: mol_type = other RNA
atggagacccacatcatgcatacattc

SEQ ID NO: 61456 - RNA, 27 nt, synthetic construct
  misc_feature 1..27: note = Adenosylhomocysteinase (210-218)
  source 1..27: mol_type = other RNA
atgatcgccggcaaggtggctgtcgtt

SEQ ID NO: 61457 - RNA, 27 nt, synthetic construct
  misc_feature 1..27: note = TFIIH basal transcription factor complex helicase XPB subunit (438-446)
  source 1..27: mol_type = other RNA
atgatcctggacgaggtgcacaccatt

SEQ ID NO: 61458 - RNA, 27 nt, synthetic construct
  misc_feature 1..27: note = GPN-loop GTPase 3 (162-170)
  source 1..27: mol_type = other RNA
atgatcagcctggagattccccaggtg

SEQ ID NO: 61459 - RNA, 27 nt, synthetic construct
  misc_feature 1..27: note = DNA replication licensing factor MCM5 (531-539)
  source 1..27: mol_type = other RNA
atgctggccaagcacgtgatcaccctc

SEQ ID NO: 61460 - RNA, 27 nt, synthetic construct
  misc_feature 1..27: note = Microtubule-associated protein RP/EB family member 1 (20-28)
  source 1..27: mol_type = other RNA
atgctggcctggatcaacgagagcctc

SEQ ID NO: 61461 - RNA, 27 nt, synthetic construct
  misc_feature 1..27: note = Protein SSXT (28-36)
  source 1..27: mol_type = other RNA
atgctggacgataacaatcacctcatc

SEQ ID NO: 61462 - RNA, 27 nt, synthetic construct
  misc_feature 1..27: note = Nucleoporin NUP188 homolog (296-304)
  source 1..27: mol_type = other RNA
atgctggacgatagagcctacctcgtg

SEQ ID NO: 61463 - RNA, 27 nt, synthetic construct
  misc_feature 1..27: note = Nitrogen permease regulator 3-like protein (542-550)
  source 1..27: mol_type = other RNA
atgctgttcgacaagtttagaagcgtg

SEQ ID NO: 61464 - RNA, 33 nt, synthetic construct
  misc_feature 1..33: note = Protein zyg-11 homolog B (424-434)
  source 1..33: mol_type = other RNA
atgctgatcgaggaaggcgggctccagcacctt

SEQ ID NO: 61465 - RNA, 27 nt, synthetic construct
  misc_feature 1..27: note = AP-3 complex subunit beta-1 (138-146)
  source 1..27: mol_type = other RNA
atgctgatcgaggtgattgaaaagctc

SEQ ID NO: 61466 - RNA, 27 nt, synthetic construct
  misc_feature 1..27: note = 1-phosphatidylinositol 3-phosphate 5-kinase (763-771)
  source 1..27: mol_type = other RNA
atgctgctcgagcacggcatcaccctt

SEQ ID NO: 61467 - RNA, 30 nt, synthetic construct
  misc_feature 1..30: note = Eukaryotic translation initiation factor 3 subunit C-like protein (692-701)
  source 1..30: mol_type = other RNA
atgctgctcgagatcccctacatggccgct

SEQ ID NO: 61468 - RNA, 27 nt, synthetic construct
  misc_feature 1..27: note = Mitochondrial import receptor subunit TOM20 homolog (121-129)
  source 1..27: mol_type = other RNA
atgctgctcaccaagcttcccacaatc

SEQ ID NO: 61469 - RNA, 27 nt, synthetic construct
  misc_feature 1..27: note = Beta-2-syntrophin (451-459)
  source 1..27: mol_type = other RNA
atgctgaacggccaggaggtgagactc

SEQ ID NO: 61470 - RNA, 30 nt, synthetic construct; identical to SEQ ID NO: 37243
  misc_feature 1..30: note = SH3KBP1-binding protein 1 (437-446)
  source 1..30: mol_type = other RNA

SEQ ID NO: 61471 - RNA, 27 nt, synthetic construct
  misc_feature 1..27: note = BRCA1-A complex subunit BRE (13-21)
  source 1..27: mol_type = other RNA
atgctgagccccttcatctcctctgtg

SEQ ID NO: 61472 - RNA, 27 nt, synthetic construct
  misc_feature 1..27: note = Nesprin-2 (4298-4306)
  source 1..27: mol_type = other RNA
atgctgaccgagatcgaacacaaggtg

SEQ ID NO: 61473 - RNA, 27 nt, synthetic construct
  misc_feature 1..27: note = T-complex protein 1 subunit eta (97-105)
  source 1..27: mol_type = other RNA
atgatgctggacgatctccttcagctg

SEQ ID NO: 61474 - RNA, 27 nt, synthetic construct
  misc_feature 1..27: note = ATP-dependent RNA helicase DDX18 (187-195)
  source 1..27: mol_type = other RNA
atgcccagaaacggcaccggggtgctg

SEQ ID NO: 61475 - RNA, 33 nt, synthetic construct
  misc_feature 1..33: note = Abhydrolase domain-containing protein 2 (301-311)
  source 1..33: mol_type = other RNA
atgcagatcgacgataacgtgatgagaaagttc

SEQ ID NO: 61476 - RNA, 27 nt, synthetic construct
  misc_feature 1..27: note = Bifunctional glutamate/proline-tRNA ligase (589-597)
  source 1..27: mol_type = other RNA
aacgccgacggcaagatcattagcctg

SEQ ID NO: 61477 - RNA, 27 nt, synthetic construct
  misc_feature 1..27: note = HEAT repeat-containing protein 1 (1568-1576)
  source 1..27: mol_type = other RNA
aacgccgacaagctgaccgtgaaattc

SEQ ID NO: 61478 - RNA, 24 nt, synthetic construct
  misc_feature 1..24: note = Eukaryotic translation initiation factor 3 subunit C-like protein (434-441)
  source 1..24: mol_type = other RNA
aacgccgaccagcccctgagagtg

SEQ ID NO: 61479 - RNA, 27 nt, synthetic construct
  misc_feature 1..27: note = Inner centromere protein (178-186)
  source 1..27: mol_type = other RNA
aacgccgagcagcacgtgacccaactg

SEQ ID NO: 61480 - RNA, 27 nt, synthetic construct
  misc_feature 1..27: note = Serine/threonine-protein phosphatase 4 regulatory subunit 3B (168-176)
  source 1..27: mol_type = other RNA
aacgagggctacatcaagaaactgctc

SEQ ID NO: 61481 - RNA, 24 nt, synthetic construct
  misc_feature 1..24: note = tRNA (cytosine(34)-C(5))-methyltransferase (262-269)
  source 1..24: mol_type = other RNA
aacgagctgcccggcctcaagtgg

SEQ ID NO: 61482 - RNA, 27 nt, synthetic construct
  misc_feature 1..27: note = Nuclear factor erythroid 2-related factor 2 (459-467)
  source 1..27: mol_type = other RNA
aacgagatgatgagcaaggaacagttc

SEQ ID NO: 61483 - RNA, 30 nt, synthetic construct
  misc_feature 1..30: note = DDB1- and CUL4-associated factor 8 (367-376)
  source 1..30: mol_type = other RNA
aacgagaataacggcgtgctgaagaaattc

SEQ ID NO: 61484 - RNA, 27 nt, synthetic construct
  misc_feature 1..27: note = Syntaxin-binding protein 3 (434-442)
  source 1..27: mol_type = other RNA
aacgagagcgacatgatcagaaattgg

SEQ ID NO: 61485 - RNA, 27 nt, synthetic construct
  misc_feature 1..27: note = Unconventional myosin-XVIIIa (417-425)
  source 1..27: mol_type = other RNA
aacgagagctccgtgctgcacaccctc

SEQ ID NO: 61486 - RNA, 33 nt, synthetic construct
  misc_feature 1..33: note = FACT complex subunit SPT16 (585-595)
  source 1..33: mol_type = other RNA
aacatcttccccaatcctgaggccacctttgtg

SEQ ID NO: 61487 - RNA, 27 nt, synthetic construct
  misc_feature 1..27: note = Ras GTPase-activating-like protein IQGAP3 (896-904)
  source 1..27: mol_type = other RNA
aacatcatggacattaagataggcctg

SEQ ID NO: 61488 - RNA, 27 nt, synthetic construct
  misc_feature 1..27: note = Protein TRIM6-TRIM34 (430-438)
  source 1..27: mol_type = other RNA
aacatcgtggagagactgaaggaagtc

SEQ ID NO: 61489 - RNA, 24 nt, synthetic construct
  misc_feature 1..24: note = Calponin-2 (7-14)
  source 1..24: mol_type = other RNA
aacaagggccccagctacgggctg

SEQ ID NO: 61490 - RNA, 27 nt, synthetic construct
  misc_feature 1..27: note = Developmentally-regulated GTP-binding protein 1 (83-91)
  source 1..27: mol_type = other RNA
aacctggccggcgtgtacagcgaggtc

SEQ ID NO: 61491 - RNA, 27 nt, synthetic construct
  misc_feature 1..27: note = Nodal modulator 3 (667-675)
  source 1..27: mol_type = other RNA
aacctggacaatcccatccagaccgtg

SEQ ID NO: 61492 - RNA, 27 nt, synthetic construct
  misc_feature 1..27: note = Ubiquitin-conjugating enzyme E2 J1 (44-52)
  source 1..27: mol_type = other RNA
aacctgttcgagtggcactttaccgtg

SEQ ID NO: 61493 - RNA, 27 nt, synthetic construct
  misc_feature 1..27: note = Transcription initiation factor TFIID subunit 1 (767-775)
  source 1..27: mol_type = other RNA
aacctgttcagagcccccatctacctc

SEQ ID NO: 61494 - RNA, 27 nt, synthetic construct
  misc_feature 1..27: note = Vacuolar fusion protein CCZ1 homolog (460-468)
  source 1..27: mol_type = other RNA
aacctgatcgaggtgaatgaagaggtc

SEQ ID NO: 61495 - RNA, 27 nt, synthetic construct
  misc_feature 1..27: note = GCN1 general control of amino-acid synthesis 1-like 1 (846-854)
  source 1..27: mol_type = other RNA
aacctgctcagaaggctttgggtggtc

SEQ ID NO: 61496 - RNA, 27 nt, synthetic construct
  misc_feature 1..27: note = Ras GTPase-activating-like protein IQGAP2 (826-834)
  source 1..27: mol_type = other RNA
aacctgatggacatcaagattggcctc

SEQ ID NO: 61497 - RNA, 27 nt, synthetic construct
  misc_feature 1..27: note = Iron-responsive element-binding protein 2 (380-388)
  source 1..27: mol_type = other RNA
aacctgaatagcatcgtgccctccgtc

SEQ ID NO: 61498 - RNA, 27 nt, synthetic construct
  misc_feature 1..27: note = Phosphoserine aminotransferase (58-66)
  source 1..27: mol_type = other RNA
aacctggtgagagagctccttgccgtc

SEQ ID NO: 61499 - RNA, 27 nt, synthetic construct
  misc_feature 1..27: note = Zinc finger BED domain-containing protein 4 (1063-1071)
  source 1..27: mol_type = other RNA
aacctgtggagcctcgtggccaaggtc

SEQ ID NO: 61500 - RNA, 27 nt, synthetic construct
  misc_feature 1..27: note = Ubiquitin-like modifier-activating enzyme 7 (733-741)
  source 1..27: mol_type = other RNA
aacctgtacgcccagatgcacggcctc

SEQ ID NO: 61501 - RNA, 27 nt, synthetic construct
  misc_feature 1..27: note = Rho guanine nucleotide exchange factor 2 (717-725)
  source 1..27: mol_type = other RNA
aacctgtacggcctccttcacgggctg

SEQ ID NO: 61502 - RNA, 27 nt, synthetic construct
  misc_feature 1..27: note = RRP12-like protein (634-642)
  source 1..27: mol_type = other RNA
aacctgtacggccagcccgtggccgct

SEQ ID NO: 61503 - RNA, 33 nt, synthetic construct
  misc_feature 1..33: note = Splicing factor 3A subunit 1 (774-784)
  source 1..33: mol_type = other RNA
aacatggccaatggcgctgtgatccacctggca

SEQ ID NO: 61504 - RNA, 27 nt, synthetic construct
  misc_feature 1..27: note = Protein C12orf4 (534-542)
  source 1..27: mol_type = other RNA
aacatgctgccccagatcttcagagtg

SEQ ID NO: 61505 - RNA, 27 nt, synthetic construct
  misc_feature 1..27: note = Casein kinase II subunit alpha (350-358)
  source 1..27: mol_type = other RNA
aacatgatgagcggcatctcctctgtg

SEQ ID NO: 61506 - RNA, 33 nt, synthetic construct
  misc_feature 1..33: note = Prefoldin subunit 1 (59-69)
  source 1..33: mol_type = other RNA
aacatgtacgagggcgtggggagaatgttcatc

SEQ ID NO: 61507 - RNA, 27 nt, synthetic construct
  misc_feature 1..27: note = Putative pre-mRNA-splicing factor ATP-dependent RNA helicase DHX16 (701-709)
  source 1..27: mol_type = other RNA
aaccccagaaccggcatggagagcctg

SEQ ID NO: 61508 - RNA, 27 nt, synthetic construct
  misc_feature 1..27: note = Histone acetyltransferase p300 (478-486)
  source 1..27: mol_type = other RNA
aaccagatgcccacccaacctcaggtg

SEQ ID NO: 61509 - RNA, 27 nt, synthetic construct
  misc_feature 1..27: note = Phosphatidate phosphatase LPIN1 (800-808)
  source 1..27: mol_type = other RNA
aacagacccgccgacgtgtacagctat

SEQ ID NO: 61510 - RNA, 33 nt, synthetic construct
  misc_feature 1..33: note = Nuclear valosin-containing protein-like isoform 4 (634-644)
  source 1..33: mol_type = other RNA
aacagacccgacatcattgatcctgccatactg

SEQ ID NO: 61511 - RNA, 27 nt, synthetic construct
  misc_feature 1..27: note = Glyceraldehyde-3-phosphate dehydrogenase (287-295)
  source 1..27: mol_type = other RNA
aacagcgacacccactcctctacattc

SEQ ID NO: 61512 - RNA, 27 nt, synthetic construct
  misc_feature 1..27: note = Myosin regulatory light chain 12B (155-163)
  source 1..27: mol_type = other RNA
aactacatcgagttcaccagaattctg

SEQ ID NO: 61513 - RNA, 27 nt, synthetic construct
  misc_feature 1..27: note = N-acetyllactosaminide beta-1,3-N-acetylglucosaminyltransferase 2 (208-216)
  source 1..27: mol_type = other RNA
aactacagagacaccttctttaatctg

SEQ ID NO: 61514 - RNA, 24 nt, synthetic construct
  misc_feature 1..24: note = Vigilin (628-635)
  source 1..24: mol_type = other RNA
cccgccaagctgcacaacagcctc

SEQ ID NO: 61515 - RNA, 27 nt, synthetic construct
  misc_feature 1..27: note = Leucine-rich repeat-containing protein 47 (93-101)
  source 1..27: mol_type = other RNA
cccgagctgggccctctcccagccctt

SEQ ID NO: 61516 - RNA, 27 nt, synthetic construct
  misc_feature 1..27: note = Mitochondrial fission regulator 1 (152-160)
  source 1..27: mol_type = other RNA
ccccaccctccaccgccccctccaccc

SEQ ID NO: 61517 - RNA, 27 nt, synthetic construct
  misc_feature 1..27: note = SCAN domain-containing protein 1 (113-121)
  source 1..27: mol_type = other RNA
cccctgggccctgccccagtgagcgtc

SEQ ID NO: 61518 - RNA, 24 nt, synthetic construct
  misc_feature 1..24: note = Long-chain-fatty-acid-CoA ligase 4 (577-584)
  source 1..24: mol_type = other RNA
cccaaccagaagagactgaccctc

SEQ ID NO: 61519 - RNA, 27 nt, synthetic construct
  misc_feature 1..27: note = Long-chain-fatty-acid-CoA ligase 4 (577-585)
  source 1..27: mol_type = other RNA
cccaaccagaagagactgaccctcctt

SEQ ID NO: 61520 - RNA, 30 nt, synthetic construct
  misc_feature 1..30: note = Proline-rich nuclear receptor coactivator 2 (6-15)
  source 1..30: mol_type = other RNA
cccagactgaacagcgccgacaggcctatg

SEQ ID NO: 61521 - RNA, 24 nt, synthetic construct
  misc_feature 1..24: note = Protein flightless-1 homolog (882-889)
  source 1..24: mol_type = other RNA
cccagacagcctccaatgagcctg

SEQ ID NO: 61522 - RNA, 24 nt, synthetic construct
  misc_feature 1..24: note = RHO/RAC effector protein (1130-1137)
  source 1..24: mol_type = other RNA
cccagatacctgggccctgccatc

SEQ ID NO: 61523 - RNA, 27 nt, synthetic construct
  misc_feature 1..27: note = Palladin (86-94)
  source 1..27: mol_type = other RNA
cccagccctccaccgccccctccaccc

SEQ ID NO: 61524 - RNA, 27 nt, synthetic construct
  misc_feature 1..27: note = Forkhead box protein J3 (438-446)
  source 1..27: mol_type = other RNA
caggccccccctccaccgcaacaggtg

SEQ ID NO: 61525 - RNA, 30 nt, synthetic construct; identical to SEQ ID NO: 37298
  misc_feature 1..30: note = AT-rich interactive domain-containing protein 1A (1477-1486)
  source 1..30: mol_type = other RNA

SEQ ID NO: 61526 - RNA, 30 nt, synthetic construct
  misc_feature 1..30: note = Rho GTPase-activating protein 35 (914-923)
  source 1..30: mol_type = other RNA
caggagatcgacggcagattcaccagcatt

SEQ ID NO: 61527 - RNA, 33 nt, synthetic construct
  misc_feature 1..33: note = Translin-associated protein X (106-116)
  source 1..33: mol_type = other RNA
caggagctgagcggcgaagacatgcaccaattc

SEQ ID NO: 61528 - RNA, 27 nt, synthetic construct
  misc_feature 1..27: note = Acetyl-CoA carboxylase 1 (270-278)
  source 1..27: mol_type = other RNA
caggagaacgacttcagcaagagaatc

SEQ ID NO: 61529 - RNA, 30 nt, synthetic construct
  misc_feature 1..30: note = Lamin-B receptor (157-166)
  source 1..30: mol_type = other RNA
caggagagctcctacatcgccacccaatat

SEQ ID NO: 61530 - RNA, 27 nt, synthetic construct
  misc_feature 1..27: note = Death-associated protein kinase 3 (122-130)
  source 1..27: mol_type = other RNA
cagatcctggacggcgtgcactacctc

SEQ ID NO: 61531 - RNA, 27 nt, synthetic construct
  misc_feature 1..27: note = Dynamin-like 120 kDa protein, mitochondrial (953-961)
  source 1..27: mol_type = other RNA
cagctggccgaggacctcaagaaagtg

SEQ ID NO: 61532 - RNA, 27 nt, synthetic construct
  misc_feature 1..27: note = Epidermal growth factor receptor kinase substrate 8 (455-463)
  source 1..27: mol_type = other RNA
cagctggccgagagcgtggctaacgtc

SEQ ID NO: 61533 - RNA, 30 nt, synthetic construct
  misc_feature 1..30: note = Transforming acidic coiled-coil-containing protein 3 (776-785)
  source 1..30: mol_type = other RNA
cagctggccaacgaggaaatcgctcaagtg

SEQ ID NO: 61534 - RNA, 30 nt, synthetic construct
  misc_feature 1..30: note = E3 ubiquitin-protein ligase BRE1B (68-77)
  source 1..30: mol_type = other RNA
cagctggacgaggccagaggcctccttctg

SEQ ID NO: 61535 - RNA, 27 nt, synthetic construct
  misc_feature 1..27: note = Tyrosine-protein phosphatase non-receptor type 12 (162-170)
  source 1..27: mol_type = other RNA
cagctgttcgagaagcaactccagctt

SEQ ID NO: 61536 - RNA, 30 nt, synthetic construct
  misc_feature 1..30: note = Phospholipase A1 member A (177-186)
  source 1..30: mol_type = other RNA
cagctgttcggcgggcaactcggacagatc

SEQ ID NO: 61537 - RNA, 27 nt, synthetic construct
  misc_feature 1..27: note = CDK5 regulatory subunit-associated protein 2 (1222-1230)
  source 1..27: mol_type = other RNA
cagctgttcagcgagatccacaacctc

SEQ ID NO: 61538 - RNA, 27 nt, synthetic construct
  misc_feature 1..27: note = Trinucleotide repeat-containing gene 18 protein (900-908)
  source 1..27: mol_type = other RNA
cagctgttcagccaacagcactttctc

SEQ ID NO: 61539 - RNA, 27 nt, synthetic construct
  misc_feature 1..27: note = Dual specificity protein phosphatase 14 (157-165)
  source 1..27: mol_type = other RNA
cagctgatcgactacgagagacaactc

SEQ ID NO: 61540 - RNA, 27 nt, synthetic construct
  misc_feature 1..27: note = Eyes absent homolog 2 (420-428)
  source 1..27: mol_type = other RNA
cagctgatccccgccctcgctaaggtg

SEQ ID NO: 61541 - RNA, 27 nt, synthetic construct
  misc_feature 1..27: note = Dual specificity protein phosphatase 6 (193-201)
  source 1..27: mol_type = other RNA
cagctgctcgacttcgagagaaccctt

SEQ ID NO: 61542 - RNA, 30 nt, synthetic construct
  misc_feature 1..30: note = Circadian clock protein PASD1 (39-48)
  source 1..30: mol_type = other RNA
cagctgctcgacggcttcatgatcaccctt

SEQ ID NO: 61543 - RNA, 27 nt, synthetic construct
  misc_feature 1..27: note = Transport and Golgi organization protein 6 homolog (720-728)
  source 1..27: mol_type = other RNA
cagctgctcccccttctggagaaggtg

SEQ ID NO: 61544 - RNA, 27 nt, synthetic construct
  misc_feature 1..27: note = AP-1 complex subunit beta-1 (483-491)
  source 1..27: mol_type = other RNA
cagctgctcaccgccatcgtgaagctt

SEQ ID NO: 61545 - RNA, 27 nt, synthetic construct
  misc_feature 1..27: note = tRNA (guanine(26)-N(2))-dimethyltransferase (198-206)
  source 1..27: mol_type = other RNA
cagctgaacgacgtggcccacctcgtc

SEQ ID NO: 61546 - RNA, 27 nt, synthetic construct
  misc_feature 1..27: note = WD repeat-containing protein 36 (690-698)
  source 1..27: mol_type = other RNA
cagctgaacgagcaactcgtgaccctt

SEQ ID NO: 61547 - RNA, 27 nt, synthetic construct
  misc_feature 1..27: note = COMM domain-containing protein 8 (116-124)
  source 1..27: mol_type = other RNA
cagctgcaagacttcgattggcaggtg

SEQ ID NO: 61548 - RNA, 27 nt, synthetic construct
  misc_feature 1..27: note = Thyroid receptor-interacting protein 11 (1241-1249)
  source 1..27: mol_type = other RNA
cagctgcaagaggaactccaccagctt

SEQ ID NO: 61549 - RNA, 27 nt, synthetic construct
  misc_feature 1..27: note = Golgin subfamily A member 4 (1397-1405)
  source 1..27: mol_type = other RNA
cagctgaccgacctcaacgtgcaactt

SEQ ID NO: 61550 - RNA, 27 nt, synthetic construct
  misc_feature 1..27: note = Eyes absent homolog 3 (439-447)
  source 1..27: mol_type = other RNA
cagctggtgcccgccctcgctaaggtc

SEQ ID NO: 61551 - RNA, 27 nt, synthetic construct
  misc_feature 1..27: note = Nuclear factor NF-kappa-B p105 subunit (558-566)
  source 1..27: mol_type = other RNA
cagctggtgagagacctccttgaggtc

SEQ ID NO: 61552 - RNA, 27 nt, synthetic construct
  misc_feature 1..27: note = Ketosamine-3-kinase (140-148)
  source 1..27: mol_type = other RNA
cagctgtaccaactcttccactatctt

SEQ ID NO: 61553 - RNA, 27 nt, synthetic construct
  misc_feature 1..27: note = T-complex protein 1 subunit epsilon (184-192)
  source 1..27: mol_type = other RNA
cagatggccgagatcgctgtgaacgca

SEQ ID NO: 61554 - RNA, 27 nt, synthetic construct
  misc_feature 1..27: note = Spectrin beta chain, non-erythrocytic 1 (1423-1431)
  source 1..27: mol_type = other RNA
cagatgctggagaaccaaatggaagtg

SEQ ID NO: 61555 - RNA, 33 nt, synthetic construct
  misc_feature 1..33: note = Signal transducer and activator of transcription 1-alpha/beta (8-18)
  source 1..33: mol_type = other RNA
cagcaactggacagcaagttcctcgagcaggtg

SEQ ID NO: 61556 - RNA, 33 nt, synthetic construct
  misc_feature 1..33: note = E1A-binding protein p400 (1051-1061)
  source 1..33: mol_type = other RNA
cagcaaacccccgtggccagcatccagcaggtc

SEQ ID NO: 61557 - RNA, 24 nt, synthetic construct
  misc_feature 1..24: note = E3 ubiquitin-protein ligase RLIM (173-180)
  source 1..24: mol_type = other RNA
cagagaccccctaccatcgtgctg

SEQ ID NO: 61558 - RNA, 27 nt, synthetic construct
  misc_feature 1..27: note = Cell division cycle protein 27 homolog (580-588)
  source 1..27: mol_type = other RNA
agagagcacgacatcgccattaagttc

SEQ ID NO: 61559 - RNA, 27 nt, synthetic construct
  misc_feature 1..27: note = Small nuclear ribonucleoprotein Sm D2 (102-110)
  source 1..27: mol_type = other RNA
agaggcgacagcgtgatcgtcgttctg

SEQ ID NO: 61560 - RNA, 33 nt, synthetic construct
  misc_feature 1..33: note = DNA topoisomerase 1 (376-386)
  source 1..33: mol_type = other RNA
agaatcatgcccgaggacattataatcaactgc

SEQ ID NO: 61561 - RNA, 27 nt, synthetic construct
  misc_feature 1..27: note = Cyclin-L2 (140-148)
  source 1..27: mol_type = other RNA
agaatcagggacgtgattaacgtcttc

SEQ ID NO: 61562 - RNA, 27 nt, synthetic construct
  misc_feature 1..27: note = Prelamin-A/C (91-99)
  source 1..27: mol_type = other RNA
agactggccgacgctctccaggagctt

SEQ ID NO: 61563 - RNA, 27 nt, synthetic construct
  misc_feature 1..27: note = Clathrin heavy chain 1 (1182-1190)
  source 1..27: mol_type = other RNA
agactggccgagctcgaagagttcatc

SEQ ID NO: 61564 - RNA, 30 nt, synthetic construct
  misc_feature 1..30: note = tRNA (cytosine(34)-C(5))-methyltransferase (514-523)
  source 1..30: mol_type = other RNA
agactggcccaggagggcatctacaccctc

SEQ ID NO: 61565 - RNA, 30 nt, synthetic construct
  misc_feature 1..30: note = RUS1 family protein C16orf58 (165-174)
  source 1..30: mol_type = other RNA
agactgttcgccgacatcctcaacgatgtg

SEQ ID NO: 61566 - RNA, 27 nt, synthetic construct
  misc_feature 1..27: note = HEAT repeat-containing protein 2 (253-261)
  source 1..27: mol_type = other RNA
agactgttcgacgatgtgccccaggtc

SEQ ID NO: 61567 - RNA, 27 nt, synthetic construct
  misc_feature 1..27: note = BTB/POZ domain-containing protein 2 (2-10)
  source 1..27: mol_type = other RNA
agactgttcgacgagccccagctcgcc

SEQ ID NO: 61568 - RNA, 33 nt, synthetic construct
  misc_feature 1..33: note = WD repeat domain phosphoinositide-interacting protein 4 (219-229)
  source 1..33: mol_type = other RNA
agactgttcgacacccagagcaaggagaaactc

SEQ ID NO: 61569 - RNA, 33 nt, synthetic construct
  misc_feature 1..33: note = DDB1- and CUL4-associated factor 4-like protein 1 (246-256)
  source 1..33: mol_type = other RNA
agactgttccacgacagcgccgtgacctccgtc

SEQ ID NO: 61570 - RNA, 33 nt, synthetic construct
  misc_feature 1..33: note = Histone-lysine N-methyltransferase setd3 (468-478)
  source 1..33: mol_type = other RNA
agactgggcgagaaggaaatcctcgagaaagcc

SEQ ID NO: 61571 - RNA, 27 nt, synthetic construct
  misc_feature 1..27: note = Plectin (462-470)
  source 1..27: mol_type = other RNA
agactgcacgagaggctcgtggccatc

SEQ ID NO: 61572 - RNA, 27 nt, synthetic construct
  misc_feature 1..27: note = Probable ATP-dependent RNA helicase DDX47 (147-155)
  source 1..27: mol_type = other RNA
agactgatcgaccacctcgagaacacc

SEQ ID NO: 61573 - RNA, 27 nt, synthetic construct
  misc_feature 1..27: note = Nuclear pore complex protein Nup160 (575-583)
  source 1..27: mol_type = other RNA
agactgatcgaggaaagcgtgaccgtc

SEQ ID NO: 61574 - RNA, 30 nt, synthetic construct
  misc_feature 1..30: note = Partitioning defective 3 homolog (510-519)
  source 1..30: mol_type = other RNA
agactgatcgaggtgaacggcgtcgacctc

SEQ ID NO: 61575 - RNA, 27 nt, synthetic construct
  misc_feature 1..27: note = 3-ketodihydrosphingosine reductase (236-244)
  source 1..27: mol_type = other RNA
agactgatcagcgagaccacatccgtg

SEQ ID NO: 61576 - RNA, 27 nt, synthetic construct
  misc_feature 1..27: note = Eukaryotic translation initiation factor 4 gamma 1 (840-848)
  source 1..27: mol_type = other RNA
agactgaaggaggaactcgaggaagcc

SEQ ID NO: 61577 - RNA, 33 nt, synthetic construct
  misc_feature 1..33: note = Upstream-binding protein 1 (145-155)
  source 1..33: mol_type = other RNA
agactgctcgaccttgatatccccatgagcgtg

SEQ ID NO: 61578 - RNA, 33 nt, synthetic construct
  misc_feature 1..33: note = Cytochrome c oxidase subunit 2 (134-144)
  source 1..33: mol_type = other RNA
agactgctcgacgtggataacagggtcgttctt

SEQ ID NO: 61579 - RNA, 27 nt, synthetic construct
  misc_feature 1..27: note = Pyridoxal-dependent decarboxylase domain-containing protein 1 (603-611)
  source 1..27: mol_type = other RNA
agactgctcgagaacatgaccgaagtg

SEQ ID NO: 61580 - RNA, 33 nt, synthetic construct
  misc_feature 1..33: note = Xyloside xylosyltransferase 1 (295-305)
  source 1..33: mol_type = other RNA
agactgctcgagcccgcccaggtgcaacagctt

SEQ ID NO: 61581 - RNA, 30 nt, synthetic construct
  misc_feature 1..30: note = Telomere length regulation protein TEL2 homolog (186-195)
  source 1..30: mol_type = other RNA
agactgctcggcgaggaagtggtcagggtt

SEQ ID NO: 61582 - RNA, 27 nt, synthetic construct
  misc_feature 1..27: note = Suppressor APC domain-containing protein 2 (290-298)
  source 1..27: mol_type = other RNA
agactgctccccaaggtgcaggaggtc

SEQ ID NO: 61583 - RNA, 27 nt, synthetic construct
  misc_feature 1..27: note = Translocon-associated protein subunit beta (2-10)
  source 1..27: mol_type = other RNA
agactgctcagcttcgtggtccttgcc

SEQ ID NO: 61584 - RNA, 27 nt, synthetic construct
  misc_feature 1..27: note = Vacuolar protein sorting-associated protein 33B (607-615)
  source 1..27: mol_type = other RNA
agactgatggaggccatgagcgaagtg

SEQ ID NO: 61585 - RNA, 33 nt, synthetic construct
  misc_feature 1..33: note = Probable inactiveosyltransferase 25 family member 3 (351-361)
  source 1..33: mol_type = other RNA
agactgatggaggacgtggaagccgagaagctc

SEQ ID NO: 61586 - RNA, 33 nt, synthetic construct
  misc_feature 1..33: note = Vacuolar protein sorting-associated protein 13D (1845-1855)
  source 1..33: mol_type = other RNA
agactgccccctgagggcatcctccacaacgtg

SEQ ID NO: 61587 - RNA, 27 nt, synthetic construct
  misc_feature 1..27: note = Ribosome-binding protein 1 (569-577)
  source 1..27: mol_type = other RNA
agactgcaggaggaactcgagaagctt

SEQ ID NO: 61588 - RNA, 33 nt, synthetic construct
  misc_feature 1..33: note = HMG domain-containing protein 4 (432-442)
  source 1..33: mol_type = other RNA
agactgcaggagaccgaaggcatggtggccgtc

SEQ ID NO: 61589 - RNA, 27 nt, synthetic construct
  misc_feature 1..27: note = Protein orai-3 (287-295)
  source 1..27: mol_type = other RNA
agactgcagggcgagctccaagccgtg

SEQ ID NO: 61590 - RNA, 27 nt, synthetic construct
  misc_feature 1..27: note = C-1-tetrahydrofolate synthase, cytoplasmic (478-486)
  source 1..27: mol_type = other RNA
agactggtgcccagcgtcaacggcgtt

SEQ ID NO: 61591 - RNA, 33 nt, synthetic construct
  misc_feature 1..33: note = Guanine nucleotide-binding protein subunit beta-2-like 1 (88-98)
  source 1..33: mol_type = other RNA
agactgtgggacctcaccacaggcactacgacc

SEQ ID NO: 61592 - RNA, 24 nt, synthetic construct
  misc_feature 1..24: note = Circadian clock protein PASD1 (691-698)
  source 1..24: mol_type = other RNA
agactgtggcaggagctcagcgac

SEQ ID NO: 61593 - RNA, 27 nt, synthetic construct
  misc_feature 1..27: note = Ubiquitin carboxyl-terminal hydrolase 11 (210-218)
  source 1..27: mol_type = other RNA
agactgtacgacacccacatcacagtg

SEQ ID NO: 61594 - RNA, 33 nt, synthetic construct
  misc_feature 1..33: note = TIP41-like protein (200-210)
  source 1..33: mol_type = other RNA
agactgtaccacgaggccgacaagacctatatg

SEQ ID NO: 61595 - RNA, 27 nt, synthetic construct
  misc_feature 1..27: note = N-acetyllactosaminide beta-1,3-N-acetylglucosaminyltransferase 2 (314-322)
  source 1..27: mol_type = other RNA
agactgtaccacatcaccgaccaggtg

SEQ ID NO: 61596 - RNA, 33 nt, synthetic construct
  misc_feature 1..33: note = Heterogeneous nuclear ribonucleoprotein M (511-521)
  source 1..33: mol_type = other RNA
agaatggccaccggcctggagaggatgggggct

SEQ ID NO: 61597 - RNA, 33 nt, synthetic construct
  misc_feature 1..33: note = Eukaryotic translation initiation factor 3 subunit A (752-762)
  source 1..33: mol_type = other RNA
agaatgctggaggacagggatctcttcgtgatg

SEQ ID NO: 61598 - RNA, 33 nt, synthetic construct
  misc_feature 1..33: note = N-alpha-acetyltransferase 38, NatC auxiliary subunit (104-114)
  source 1..33: mol_type = other RNA
agaatgaccgacggcaggacactggtggggtgc

SEQ ID NO: 61599 - RNA, 33 nt, synthetic construct
  misc_feature 1..33: note = Nucleophosmin (277-287)
  source 1..33: mol_type = other RNA
agaatgaccgaccaggaggccatccaagatctg

SEQ ID NO: 61600 - RNA, 30 nt, synthetic construct
  misc_feature 1..30: note = Copine-3 (121-130)
  source 1..30: mol_type = other RNA
agacccgccggcaaggggagcatcaccatt

SEQ ID NO: 61601 - RNA, 27 nt, synthetic construct
  misc_feature 1..27: note = Myeloid-derived growth factor (146-154)
  source 1..27: mol_type = other RNA
agacccggcgccttcaaggctgagctg

SEQ ID NO: 61602 - RNA, 27 nt, synthetic construct
  misc_feature 1..27: note = BTB/POZ domain-containing adapter for CUL3-mediated RhoA degradation protein 1 (319-327)
  source 1..27: mol_type = other RNA
agaccccacggccagcaaatcgtgttc

SEQ ID NO: 61603 - RNA, 27 nt, synthetic construct
  misc_feature 1..27: note = Histone-lysine N-methyltransferase 2C (1906-1914)
  source 1..27: mol_type = other RNA
agaccccctccagtgggccacagcttc

SEQ ID NO: 61604 - RNA, 27 nt, synthetic construct
  misc_feature 1..27: note = Calcium-independent phospholipase A2-gamma (321-329)
  source 1..27: mol_type = other RNA
agacccaccgagggcgtgcaggccctg

SEQ ID NO: 61605 - RNA, 27 nt, synthetic construct
  misc_feature 1..27: note = Sperm-specific antigen 2 (241-249)
  source 1..27: mol_type = other RNA
agacagatcgaggtgctgaccacagtc

SEQ ID NO: 61606 - RNA, 30 nt, synthetic construct
  misc_feature 1..30: note Dolichyl-diphosphooligosaccharide-proteinosyltransferase subunit 1 (268-277)
  source 1..30: mol_type = other RNA
agacagcccgacagcggcatctcctctatt

SEQ ID NO: 61607 - RNA, 27 nt, synthetic construct
  misc_feature 1..27: note = DNA ligase 1 (294-302)
  source 1..27: mol_type = other RNA
agaaccttcgagaagatcgaagaggtg

SEQ ID NO: 61608 - RNA, 27 nt, synthetic construct
  misc_feature 1..27: note = Trifunctional enzyme subunit alpha, mitochondrial (235-243)
  source 1..27: mol_type = other RNA
agaaccatcgagtacctggaagaggtg

SEQ ID NO: 61609 - RNA, 27 nt, synthetic construct
  misc_feature 1..27: note = Sorting nexin-4 (243-251)
  source 1..27: mol_type = other RNA
agagtggccgacaggctgtacggcgtc

SEQ ID NO: 61610 - RNA, 30 nt, synthetic construct
  misc_feature 1..30: note = THO complex subunit 2 (904-913)
  source 1..30: mol_type = other RNA
agagtgttcagcgacatcatttacaccgtc

SEQ ID NO: 61611 - RNA, 27 nt, synthetic construct
  misc_feature 1..27: note = Glycerol-3-phosphate acyltransferase 1, mitochondrial (138-146)
  source 1..27: mol_type = other RNA
agagtgcaggaggccatcgctgaagtc

SEQ ID NO: 61612 - RNA, 27 nt, synthetic construct
  misc_feature 1..27: note = Putative eukaryotic translation initiation factor 2 subunit 3-like protein (416-424)
  source 1..27: mol_type = other RNA
agagtgagcgccgtcaaggctgacctg

SEQ ID NO: 61613 - RNA, 27 nt, synthetic construct
  misc_feature 1..27: note = Regulation of nuclear pre-mRNA domain-containing protein 1A (271-279)
  source 1..27: mol_type = other RNA
agagtgagcctggtcaggaaggagctc

SEQ ID NO: 61614 - RNA, 30 nt, synthetic construct
  misc_feature 1..30: note = Nuclear receptor corepressor 2 (2392-2401)
  source 1..30: mol_type = other RNA
agagtgtgggaggacaggcccagctccgcc

SEQ ID NO: 61615 - RNA, 27 nt, synthetic construct
  misc_feature 1..27: note = Replication initiator 1 (328-336)
  source 1..27: mol_type = other RNA
agcgccgctgagcccacccctgcagtg

SEQ ID NO: 61616 - RNA, 27 nt, synthetic construct
  misc_feature 1..27: note = DAZ-associated protein 2 (62-70)
  source 1..27: mol_type = other RNA
agcgccgctttccccggcgcatccctg

SEQ ID NO: 61617 - RNA, 27 nt, synthetic construct
  misc_feature 1..27: note = Serine-threonine kinase receptor-associated protein (160-168)
  source 1..27: mol_type = other RNA
agcgccgacgataagaccgtgagactg

SEQ ID NO: 61618 - RNA, 27 nt, synthetic construct
  misc_feature 1..27: note = Poly (ADP-ribose) polymerase 1 (385-393)
  source 1..27: mol_type = other RNA
agcgccgacaagcccctgtccaacatg

SEQ ID NO: 61619 - RNA, 27 nt, synthetic construct
  misc_feature 1..27: note = Uncharacterized protein C15orf39 (994-1002)
  source 1..27: mol_type = other RNA
agcgcctccccccctggcccaaccctg

SEQ ID NO: 61620 - RNA, 33 nt, synthetic construct
  misc_feature 1..33: note = Replication protein A 32 kDa subunit (93-103)
  source 1..33: mol_type = other RNA
agcgaggccggcaacttcgggggaaattccttt

SEQ ID NO: 61621 - RNA, 27 nt, synthetic construct
  misc_feature 1..27: note = Kelch repeat and BTB domain-containing protein 6 (137-145)
  source 1..27: mol_type = other RNA
agcgaggccaacgtggaaagactgtac

SEQ ID NO: 61622 - RNA, 27 nt, synthetic construct
  misc_feature 1..27: note = Protein PRRC2C (867-875)
  source 1..27: mol_type = other RNA
agcgaggcccaggtgcaaaagttcctg

SEQ ID NO: 61623 - RNA, 30 nt, synthetic construct
  misc_feature 1..30: note = Non-POU domain-containing octamer-binding protein (120-129)
  source 1..30: mol_type = other RNA
agcgagggctccttcctgctcaccacattt

SEQ ID NO: 61624 - RNA, 30 nt, synthetic construct
  misc_feature 1..30: note = Cyclin-dependent kinase 11B (629-638)
  source 1..30: mol_type = other RNA
agcgagatcgaccagattaacaaggtgttc

SEQ ID NO: 61625 - RNA, 27 nt, synthetic construct
  misc_feature 1..27: note = Uncharacterized protein C5orf34 (564-572)
  source 1..27: mol_type = other RNA
agcgagctggaaaagatccagaaattc

SEQ ID NO: 61626 - RNA, 30 nt, synthetic construct
  misc_feature 1..30: note = V-type proton ATPase subunit H (357-366)
  source 1..30: mol_type = other RNA
agcgagctgaagtccggcagactcgaatgg

SEQ ID NO: 61627 - RNA, 27 nt, synthetic construct
  misc_feature 1..27: note = Myomegalin (838-846)
  source 1..27: mol_type = other RNA
agcgagctgcaggccctcagacaatac

SEQ ID NO: 61628 - RNA, 30 nt, synthetic construct
  misc_feature 1..30: note = Small subunit processome component 20 homolog (777-786)
  source 1..30: mol_type = other RNA
agcgagcaggaccccctgctcaagaacctt

SEQ ID NO: 61629 - RNA, 30 nt, synthetic construct
  misc_feature 1..30: note = ATP-citrate synthase (7-16)
  source 1..30: mol_type = other RNA
agcgagcagaccggcaaggaactgctctac

SEQ ID NO: 61630 - RNA, 27 nt, synthetic construct
  misc_feature 1..27: note = PERQ amino acid-rich with GYF domain-containing protein 2 (199-207)
  source 1..27: mol_type = other RNA
agcgagtccgaaaactggagaatcttc

SEQ ID NO: 61631 - RNA, 27 nt, synthetic construct
  misc_feature 1..27: note = FACT complex subunit SSRP1 (657-665)
  source 1..27: mol_type = other RNA
agcgagtccttcaagtctaaagaattt

SEQ ID NO: 61632 - RNA, 27 nt, synthetic construct
  misc_feature 1..27: note = FAD synthase (193-201)
  source 1..27: mol_type = other RNA
agcatcgcccccattctggctgaggca

SEQ ID NO: 61633 - RNA, 33 nt, synthetic construct
  misc_feature 1..33: note = Coatomer subunit beta (249-259)
  source 1..33: mol_type = other RNA
agcatcttcggcgaggacgccctggctaacgtg

SEQ ID NO: 61634 - RNA, 27 nt, synthetic construct
  misc_feature 1..27: note = Inhibitor of Bruton tyrosine kinase (562-570)
  source 1..27: mol_type = other RNA
agcatccacgacgtgaccttccaggtc

SEQ ID NO: 61635 - RNA, 27 nt, synthetic construct
  misc_feature 1..27: note = Cell growth-regulating nucleolar protein (128-136)
  source 1..27: mol_type = other RNA
agcatcctggaccaggtgtggaacatt

SEQ ID NO: 61636 - RNA, 27 nt, synthetic construct
  misc_feature 1..27: note = Poly (ADP-ribose) polymerase 1 (711-719)
  source 1..27: mol_type = other RNA
agcatcctgtccgaggtgcagcaagcc

SEQ ID NO: 61637 - RNA, 24 nt, synthetic construct
  misc_feature 1..24: note = EF-hand domain-containing protein 1 (48-55)
  source 1..24: mol_type = other RNA
agcaaggcccccgtgctgacctac

SEQ ID NO: 61638 - RNA, 27 nt, synthetic construct
  misc_feature 1..27: note = CCR4-NOT transcription complex subunit 1 (254-262)
  source 1..27: mol_type = other RNA
agcctggccgacttcatgcaggaggtg

SEQ ID NO: 61639 - RNA, 27 nt, synthetic construct
  misc_feature 1..27: note = DNA replication licensing factor MCM7 (208-216)
  source 1..27: mol_type = other RNA
agcctggccgactacatcaccgctgca

SEQ ID NO: 61640 - RNA, 27 nt, synthetic construct
  misc_feature 1..27: note = Ubiquitin carboxyl-terminal hydrolase 7 (543-551)
  source 1..27: mol_type = other RNA
agcctggccgagttcgtgcagtccctc

SEQ ID NO: 61641 - RNA, 30 nt, synthetic construct
  misc_feature 1..30: note = X-ray repair cross-complementing protein 5 (580-589)
  source 1..30: mol_type = other RNA
agcctggccgagggctccgtgacctctgtc

SEQ ID NO: 61642 - RNA, 27 nt, synthetic construct
  misc_feature 1..27: note = Exosome complex exonuclease RRP44 (720-728)
  source 1..27: mol_type = other RNA
agcctggccgagtccctcgaccaggct

SEQ ID NO: 61643 - RNA, 30 nt, synthetic construct
  misc_feature 1..30: note = Phosphatidylinositol 3,4,5-trisphosphate-dependent Rac exchanger 1 protein (655-664)
  source 1..30: mol_type = other RNA
agcctggccgaggtggctggcctccaggtc

SEQ ID NO: 61644 - RNA, 27 nt, synthetic construct
  misc_feature 1..27: note = Centrosome-associated protein CEP250 (112-120)
  source 1..27: mol_type = other RNA
agcctggccgaggtgaacacccagctc

SEQ ID NO: 61645 - RNA, 27 nt, synthetic construct
  misc_feature 1..27: note = Apolipoprotein L1 (249-257)
  source 1..27: mol_type = other RNA
agcctggccggcaacacctaccagctc

SEQ ID NO: 61646 - RNA, 27 nt, synthetic construct
  misc_feature 1..27: note = SH3 domain and tetratricopeptide repeat-containing protein 1 (740-748)
  source 1..27: mol_type = other RNA
agcctggccggctccctcagatctgtg

SEQ ID NO: 61647 - RNA, 33 nt, synthetic construct
  misc_feature 1..33: note = Kelch-like protein 21 (506-516)
  source 1..33: mol_type = other RNA
agcctggccgtgctcggcgggaagctttacgtc

SEQ ID NO: 61648 - RNA, 30 nt, synthetic construct
  misc_feature 1..30: note = Insulin-degrading enzyme (224-233)
  source 1..30: mol_type = other RNA
agcctggacgatctcaccaaccttgtggtc

SEQ ID NO: 61649 - RNA, 27 nt, synthetic construct
  misc_feature 1..27: note = Bone morphogenetic protein receptor type-2 (221-229)
  source 1..27: mol_type = other RNA
agcctggacgagagacccgtggccgtc

SEQ ID NO: 61650 - RNA, 30 nt, synthetic construct
  misc_feature 1..30: note = Glycogen debranching enzyme (835-844)
  source 1..30: mol_type = other RNA
agcctggacccccacgcccaggtggctgtc

SEQ ID NO: 61651 - RNA, 27 nt, synthetic construct
  misc_feature 1..27: note = Cullin-9 (676-684)
  source 1..27: mol_type = other RNA
agcctggaccagcacgtggccgctgtc

SEQ ID NO: 61652 - RNA, 27 nt, synthetic construct
  misc_feature 1..27: note = Protein RMD5 homolog B (28-36)
  source 1..27: mol_type = other RNA
agcctggaggaactccttcactacgtg

SEQ ID NO: 61653 - RNA, 27 nt, synthetic construct
  misc_feature 1..27: note = NAD(P)H dehydrogenase (quinone) 1 (155-163)
  source 1..27: mol_type = other RNA
agcctgttcgacctcaactttcaggcc

SEQ ID NO: 61654 - RNA, 27 nt, synthetic construct
  misc_feature 1..27: note = Signal recognition particle 54 kDa protein (200-208)
  source 1..27: mol_type = other RNA
agcctgttcgaggaaatgctccaggtg

SEQ ID NO: 61655 - RNA, 30 nt, synthetic construct; identical to SEQ ID NO: 37428
  misc_feature 1..30: note = Zinc finger protein 451 (454-463)
  source 1..30: mol_type = other RNA

SEQ ID NO: 61656 - RNA, 27 nt, synthetic construct
  misc_feature 1..27: note = Importin-8 (243-251)
  source 1..27: mol_type = other RNA
agcctgttcaaggaccagatggagctc

SEQ ID NO: 61657 - RNA, 27 nt, synthetic construct
  misc_feature 1..27: note = Optineurin (302-310)
  source 1..27: mol_type = other RNA
agcctgttcaaggagctccaggaagcc

SEQ ID NO: 61658 - RNA, 24 nt, synthetic construct
  misc_feature 1..24: note = Kelch domain-containing protein 10 (353-360)
  source 1..24: mol_type = other RNA
agcctgttcaagatctggctcgtg

SEQ ID NO: 61659 - RNA, 27 nt, synthetic construct
  misc_feature 1..27: note = Telomere-associated protein RIF1 (802-810)
  source 1..27: mol_type = other RNA
agcctgttcaagctcatcgtgaaagtc

SEQ ID NO: 61660 - RNA, 27 nt, synthetic construct
  misc_feature 1..27: note = DNA polymerase alpha subunit B (295-303)
  source 1..27: mol_type = other RNA
agcctgttccccggccaggtggtcatc

SEQ ID NO: 61661 - RNA, 33 nt, synthetic construct
  misc_feature 1..33: note = Lamin-B receptor (312-322)
  source 1..33: mol_type = other RNA
agcctgttccagggcgtggagtttcactacgtc

SEQ ID NO: 61662 - RNA, 33 nt, synthetic construct
  misc_feature 1..33: note = Renin receptor (103-113)
  source 1..33: mol_type = other RNA
agcctgttctccgaggaaacccccgtggtcctc

SEQ ID NO: 61663 - RNA, 30 nt, synthetic construct
  misc_feature 1..30: note = Ubiquitin-protein ligase E3C (505-514)
  source 1..30: mol_type = other RNA
agcctgttctcccactctctcatctcaatt

SEQ ID NO: 61664 - RNA, 27 nt, synthetic construct
  misc_feature 1..27: note = Cytoplasmic dynein 1 heavy chain 1 (2457-2465)
  source 1..27: mol_type = other RNA
agcctgttctccatgctccaccaggcc

SEQ ID NO: 61665 - RNA, 27 nt, synthetic construct
  misc_feature 1..27: note = Kelch-like protein 12 (364-372)
  source 1..27: mol_type = other RNA
agcctgcacgacagaatctacgtgatt

SEQ ID NO: 61666 - RNA, 27 nt, synthetic construct
  misc_feature 1..27: note = Cytochrome P450 20A1 (53-61)
  source 1..27: mol_type = other RNA
agcctgcacgagttcctcgtgaacctt

SEQ ID NO: 61667 - RNA, 27 nt, synthetic construct
  misc_feature 1..27: note = Ectopic P granules protein 5 homolog (837-845)
  source 1..27: mol_type = other RNA
agcctgcactccgtgatcattcagctc

SEQ ID NO: 61668 - RNA, 27 nt, synthetic construct
  misc_feature 1..27: note = DNA-directed RNA polymerase I subunit RPA1 (382-390)
  source 1..27: mol_type = other RNA
agcctgatcgacaagctctacaacatt

SEQ ID NO: 61669 - RNA, 33 nt, synthetic construct
  misc_feature 1..33: note = Structural maintenance of chromosomes protein 6 (601-611)
  source 1..33: mol_type = other RNA
agcctgatcgacatgagaggcattgagaccgtg

SEQ ID NO: 61670 - RNA, 27 nt, synthetic construct
  misc_feature 1..27: note = Transmembrane protein 209 (11-19)
  source 1..27: mol_type = other RNA
agcctgatcgacagaaccattaagatg

SEQ ID NO: 61671 - RNA, 27 nt, synthetic construct
  misc_feature 1..27: note = Cation channel sperm-associated protein 2 (33-41)
  source 1..27: mol_type = other RNA
agcctgatcgagcacctccagggcctt

SEQ ID NO: 61672 - RNA, 27 nt, synthetic construct
  misc_feature 1..27: note = Mediator of RNA polymerase II transcription subunit 19 (129-137)
  source 1..27: mol_type = other RNA
agcctgatcgagaagccccctattctc

SEQ ID NO: 61673 - RNA, 27 nt, synthetic construct
  misc_feature 1..27: note = Nucleolar pre-ribosomal-associated protein 1 (1761-1769)
  source 1..27: mol_type = other RNA
agcctgatcgagagagacctcaagctt

SEQ ID NO: 61674 - RNA, 27 nt, synthetic construct
  misc_feature 1..27: note = Solute carrier family 35 member C2 (14-22)
  source 1..27: mol_type = other RNA
agcctgatcttcaagctcgaggaactt

SEQ ID NO: 61675 - RNA, 27 nt, synthetic construct
  misc_feature 1..27: note = Solute carrier family 35 member E1 (24-32)
  source 1..27: mol_type = other RNA
agcctgatccccattatatccggcgtg

SEQ ID NO: 61676 - RNA, 27 nt, synthetic construct
  misc_feature 1..27: note = Putative Polycomb group protein ASXL2 (835-843)
  source 1..27: mol_type = other RNA
agcctgatcagaattgtgcccgtcgtt

SEQ ID NO: 61677 - RNA, 27 nt, synthetic construct
  misc_feature 1..27: note = Carboxypeptidase D (372-380)
  source 1..27: mol_type = other RNA
agcctgatcaccctcattgagaaggtg

SEQ ID NO: 61678 - RNA, 27 nt, synthetic construct
  misc_feature 1..27: note = Peroxisomal biogenesis factor 3 (201-209)
  source 1..27: mol_type = other RNA
agcctgctcgaccttgagcagaagctg

SEQ ID NO: 61679 - RNA, 27 nt, synthetic construct
  misc_feature 1..27: note = Zinc finger BED domain-containing protein 1 (280-288)
  source 1..27: mol_type = other RNA
agcctgctcgacgtggccgtccacatg

SEQ ID NO: 61680 - RNA, 27 nt, synthetic construct
  misc_feature 1..27: note = Kinesin-like protein KIF3A (470-478)
  source 1..27: mol_type = other RNA
agcctgctcgagaagctttccgccctg

SEQ ID NO: 61681 - RNA, 27 nt, synthetic construct
  misc_feature 1..27: note = Kinesin-like protein (557-565)
  source 1..27: mol_type = other RNA
agcctgctcaaggaccttgccgagatc

SEQ ID NO: 61682 - RNA, 27 nt, synthetic construct
  misc_feature 1..27: note = Phosphatidylinositol 4-phosphate 5-kinase type-1 alpha (312-320)
  source 1..27: mol_type = other RNA
agcctgctcatgtccatccacaacatt

SEQ ID NO: 61683 - RNA, 27 nt, synthetic construct
  misc_feature 1..27: note = Claspin (1254-1262)
  source 1..27: mol_type = other RNA
agcctgctcaaccagcccaaggccgtg

SEQ ID NO: 61684 - RNA, 33 nt, synthetic construct
  misc_feature 1..33: note = Sister chromatid cohesion protein PDS5 homolog A (36-46)
  source 1..33: mol_type = other RNA
agcctgctccccgagtacgtggtcccttatatg

SEQ ID NO: 61685 - RNA, 33 nt, synthetic construct
  misc_feature 1..33: note = Inositol 1,4,5-trisphosphate receptor type 1 (1393-1403)
  source 1..33: mol_type = other RNA
agcctgctcccccttgacgatatcgtgagagtc

SEQ ID NO: 61686 - RNA, 27 nt, synthetic construct
  misc_feature 1..27: note = Lysosomal-trafficking regulator (78-86)
  source 1..27: mol_type = other RNA
agcctgctcccccttgtgtggaagatc

SEQ ID NO: 61687 - RNA, 33 nt, synthetic construct
  misc_feature 1..33: note = Signal transducer and activator of transcription 2 (25-35)
  source 1..33: mol_type = other RNA
agcctgctccccgtggacatcagacagtacctt

SEQ ID NO: 61688 - RNA, 27 nt, synthetic construct
  misc_feature 1..27: note = Cytoplasmic dynein 1 heavy chain 1 (3748-3756)
  source 1..27: mol_type = other RNA
agcctgctccaggcccttaacgaggtg

SEQ ID NO: 61689 - RNA, 27 nt, synthetic construct
  misc_feature 1..27: note = Melanoma antigen preferentially expressed in tumors (425-433)
  source 1..27: mol_type = other RNA
agcctgctccagcaccttatcggcctg

SEQ ID NO: 61690 - RNA, 30 nt, synthetic construct
  misc_feature 1..30: note = SH3KBP1-binding protein 1 (47-56)
  source 1..30: mol_type = other RNA
agcctgctctccggcagaatctctaccctt

SEQ ID NO: 61691 - RNA, 27 nt, synthetic construct
  misc_feature 1..27: note = Uncharacterized aarF domain-containing protein kinase 2 (132-140)
  source 1..27: mol_type = other RNA
agcctgctctcctctgtgttcaagctt

SEQ ID NO: 61692 - RNA, 27 nt, synthetic construct
  misc_feature 1..27: note = Transportin-3 (89-97)
  source 1..27: mol_type = other RNA
agcctgctcacccacatccagaacctt

SEQ ID NO: 61693 - RNA, 27 nt, synthetic construct
  misc_feature 1..27: note = E3 ubiquitin-protein ligase TRIP12 (971-979)
  source 1..27: mol_type = other RNA
agcctgctcacctccccccctaaggcc

SEQ ID NO: 61694 - RNA, 30 nt, synthetic construct
  misc_feature 1..30: note = Mediator of RNA polymerase II transcription subunit 24 (800-809)
  source 1..30: mol_type = other RNA
agcctgatggacccccctggcaccgccctc

SEQ ID NO: 61695 - RNA, 27 nt, synthetic construct
  misc_feature 1..27: note = CAP-Gly domain-containing linker protein 2 (873-881)
  source 1..27: mol_type = other RNA
agcctgaacgagctcagagtgcttctg

SEQ ID NO: 61696 - RNA, 27 nt, synthetic construct
  misc_feature 1..27: note = Solute carrier family 35 member E4 (65-73)
  source 1..27: mol_type = other RNA
agcctgaacaagtggatcttcaccgtg

SEQ ID NO: 61697 - RNA, 27 nt, synthetic construct
  misc_feature 1..27: note = Sestrin-3 (47-55)
  source 1..27: mol_type = other RNA
agcctgcccgagctcgtgcacgccgtc

SEQ ID NO: 61698 - RNA, 27 nt, synthetic construct
  misc_feature 1..27: note = Transmembrane protein 214 (435-443)
  source 1..27: mol_type = other RNA
agcctgcaggagaccatccaatccctc

SEQ ID NO: 61699 - RNA, 27 nt, synthetic construct
  misc_feature 1..27: note = Centrosome-associated protein CEP250 (2189-2197)
  source 1..27: mol_type = other RNA
agcctgcaggaggtggccatgttcctc

SEQ ID NO: 61700 - RNA, 27 nt, synthetic construct
  misc_feature 1..27: note = Heat shock protein HSP 90-beta (394-402)
  source 1..27: mol_type = other RNA
agcctgtccgagtacgtgtctagaatg

SEQ ID NO: 61701 - RNA, 27 nt, synthetic construct
  misc_feature 1..27: note = Cell division cycle and apoptosis regulator protein 1 (1078-1086)
  source 1..27: mol_type = other RNA
agcctgtccggcgagctcagagaagtg

SEQ ID NO: 61702 - RNA, 27 nt, synthetic construct
  misc_feature 1..27: note = RNA-binding protein 12B (105-113)
  source 1..27: mol_type = other RNA
agcctgtccaacttcatcgagtctgtg

SEQ ID NO: 61703 - RNA, 27 nt, synthetic construct
  misc_feature 1..27: note = Bromodomain adjacent to zinc finger domain protein 1A (1093-1101)
  source 1..27: mol_type = other RNA
agcctgtcccaggtgttcctccacctt

SEQ ID NO: 61704 - RNA, 27 nt, synthetic construct
  misc_feature 1..27: note = Dehydrogenase/reductase SDR family member 1 (277-285)
  source 1..27: mol_type = other RNA
agcctgtcctctgtgctctcacacgtc

SEQ ID NO: 61705 - RNA, 27 nt, synthetic construct
  misc_feature 1..27: note = Spectrin beta chain, erythrocytic (333-341)
  source 1..27: mol_type = other RNA
agcctgaccggcgtgcagcaacagctc

SEQ ID NO: 61706 - RNA, 30 nt, synthetic construct
  misc_feature 1..30: note = Conserved oligomeric Golgi complex subunit 4 (458-467)
  source 1..30: mol_type = other RNA
agcctggtggccgtcgagctcgaaaaggtt

SEQ ID NO: 61707 - RNA, 30 nt, synthetic construct
  misc_feature 1..30: note = Phospholipase A1 member A (341-350)
  source 1..30: mol_type = other RNA
agcctggtggagttccacctcaaggaactt

SEQ ID NO: 61708 - RNA, 27 nt, synthetic construct
  misc_feature 1..27: note = 26S proteasome non-ATPase regulatory subunit 13 (75-83)
  source 1..27: mol_type = other RNA
agcctggtggagatcattctccacgtc

SEQ ID NO: 61709 - RNA, 27 nt, synthetic construct
  misc_feature 1..27: note = Cyclin-dependent-like kinase 5 (247-255)
  source 1..27: mol_type = other RNA
agcctggtgaacgtcgttcccaagctc

SEQ ID NO: 61710 - RNA, 27 nt, synthetic construct
  misc_feature 1..27: note = Heat shock factor protein 2 (156-164)
  source 1..27: mol_type = other RNA
agcctgtggaaggaggtgtccgaactc

SEQ ID NO: 61711 - RNA, 27 nt, synthetic construct
  misc_feature 1..27: note = GRIP and coiled-coil domain-containing protein 2 (689-697)
  source 1..27: mol_type = other RNA
agcctgtacgaggaaaacaataagctc

SEQ ID NO: 61712 - RNA, 27 nt, synthetic construct
  misc_feature 1..27: note = Centrosome-associated protein CEP250 (1184-1192)
  source 1..27: mol_type = other RNA
agcctgtactccgccctccagcaagct

SEQ ID NO: 61713 - RNA, 27 nt, synthetic construct
  misc_feature 1..27: note = Serine/threonine-protein kinase TBK1 (413-421)
  source 1..27: mol_type = other RNA
agcatggccaaggctatcaccggcgtg

SEQ ID NO: 61714 - RNA, 33 nt, synthetic construct
  misc_feature 1..33: note = Erlin-2 (158-168)
  source 1..33: mol_type = other RNA
agcatggcccccggcctggtgatccaggctgtc

SEQ ID NO: 61715 - RNA, 27 nt, synthetic construct
  misc_feature 1..27: note = SEC14-like protein 1 (203-211)
  source 1..27: mol_type = other RNA
agcatggccgtggtcatccccgaggct

SEQ ID NO: 61716 - RNA, 27 nt, synthetic construct
  misc_feature 1..27: note = Cullin-1 (79-87)
  source 1..27: mol_type = other RNA
agcatgatctccaagctgaaacaggcc

SEQ ID NO: 61717 - RNA, 27 nt, synthetic construct
  misc_feature 1..27: note = Ubiquitin conjugation factor E4 B (1278-1286)
  source 1..27: mol_type = other RNA
agcatgctggagcccgtgcctgaactc

SEQ ID NO: 61718 - RNA, 27 nt, synthetic construct
  misc_feature 1..27: note = Antizyme inhibitor 1 (152-160)
  source 1..27: mol_type = other RNA
agcatgatgaagaacttctttttcgtg

SEQ ID NO: 61719 - RNA, 27 nt, synthetic construct
  misc_feature 1..27: note = Large proline-rich protein BAG6 (763-771)
  source 1..27: mol_type = other RNA
agcatggtggacgtcgttatgctgctc

SEQ ID NO: 61720 - RNA, 30 nt, synthetic construct
  misc_feature 1..30: note = Band 4.1-like protein 3 (185-194)
  source 1..30: mol_type = other RNA
agcatgtacggcgtggacctgcaccatgcc

SEQ ID NO: 61721 - RNA, 30 nt, synthetic construct; identical to SEQ ID NO: 37494
  misc_feature 1..30: note = Protein 4.1 (185-194)
  source 1..30: mol_type = other RNA

SEQ ID NO: 61722 - RNA, 27 nt, synthetic construct
  misc_feature 1..27: note = A-kinase anchor protein 10, mitochondrial (278-286)
  source 1..27: mol_type = other RNA
agccccgcctcccctctgaaggagctc

SEQ ID NO: 61723 - RNA, 30 nt, synthetic construct; identical to SEQ ID NO: 37496
  misc_feature 1..30: note = Beta-1-syntrophin (175-184)
  source 1..30: mol_type = other RNA

SEQ ID NO: 61724 - RNA, 30 nt, synthetic construct
  misc_feature 1..30: note = Cytoplasmic dynein 1 heavy chain 1 (577-586)
  source 1..30: mol_type = other RNA
agccccgacaagatcccttggtccgccctg

SEQ ID NO: 61725 - RNA, 27 nt, synthetic construct
  misc_feature 1..27: note = Ubiquitin carboxyl-terminal hydrolase 22 (237-245)
  source 1..27: mol_type = other RNA
agcccccacatcccttacaagctgctc

SEQ ID NO: 61726 - RNA, 30 nt, synthetic construct
  misc_feature 1..30: note = ADNP homeobox protein 2 (336-345)
  source 1..30: mol_type = other RNA
agccccctgcctgtgggccagaactccctc

SEQ ID NO: 61727 - RNA, 33 nt, synthetic construct
  misc_feature 1..33: note = COUP transcription factor 2 (278-288)
  source 1..33: mol_type = other RNA
agccccatgtccgccgacagagtggtcgctttc

SEQ ID NO: 61728 - RNA, 27 nt, synthetic construct
  misc_feature 1..27: note = Ubiquitin carboxyl-terminal hydrolase 6 (1192-1200)
  source 1..27: mol_type = other RNA
agccccaactcctctcctagaaccctg

SEQ ID NO: 61729 - RNA, 27 nt, synthetic construct
  misc_feature 1..27: note = Ubiquitin-associated protein 2-like (477-485)
  source 1..27: mol_type = other RNA
agcccccagcctgcccaacagaagctg

SEQ ID NO: 61730 - RNA, 30 nt, synthetic construct
  misc_feature 1..30: note = Acyl-CoA desaturase (281-290)
  source 1..30: mol_type = other RNA
agccccagagagaacatcctggtgtccctc

SEQ ID NO: 61731 - RNA, 27 nt, synthetic construct
  misc_feature 1..27: note = U3 small nucleolar RNA-associated protein 18 homolog (367-375)
  source 1..27: mol_type = other RNA
agccccagatccggctacttcgccctg

SEQ ID NO: 61732 - RNA, 30 nt, synthetic construct
  misc_feature 1..30: note = Integrator complex subunit 7 (289-298)
  source 1..30: mol_type = other RNA
agccccagatcctctgacctggtgaagctc

SEQ ID NO: 61733 - RNA, 27 nt, synthetic construct
  misc_feature 1..27: note = Protein Wiz (5-13)
  source 1..27: mol_type = other RNA
agcccctccctgcctaagaaatctctc

SEQ ID NO: 61734 - RNA, 27 nt, synthetic construct
  misc_feature 1..27: note = Mediator of DNA damage checkpoint protein 1 (1786-1794)
  source 1..27: mol_type = other RNA
agccagatccaaaaggtggagcccgcc

SEQ ID NO: 61735 - RNA, 30 nt, synthetic construct
  misc_feature 1..30: note = DNA-directed RNA polymerases I, II, and III subunit RPABC3 (47-56)
  source 1..30: mol_type = other RNA
agcagagccgaccagttcgagtacgtgatg

SEQ ID NO: 61736 - RNA, 27 nt, synthetic construct
  misc_feature 1..27: note = Mitochondrial fission factor (5-13)
  source 1..27: mol_type = other RNA
agcagaatccagtacgagatggaatat

SEQ ID NO: 61737 - RNA, 27 nt, synthetic construct
  misc_feature 1..27: note = Histone H2B type 2-F (33-41)
  source 1..27: mol_type = other RNA
agcagaaaggagtcctactctgtgtat

SEQ ID NO: 61738 - RNA, 33 nt, synthetic construct
  misc_feature 1..33: note = Solute carrier family 35 member E1 (251-261)
  source 1..33: mol_type = other RNA
agcagacagtcctaccccaactcttattcactg

SEQ ID NO: 61739 - RNA, 27 nt, synthetic construct
  misc_feature 1..27: note = Mucin-1 (950-958)
  source 1..27: mol_type = other RNA
agcaccgccccccctgtgcacaacgtc

SEQ ID NO: 61740 - RNA, 33 nt, synthetic construct; identical to SEQ ID NO: 37513
  misc_feature 1..33: note = T-complex protein 1 subunit beta (333-343)
  source 1..33: mol_type = other RNA

SEQ ID NO: 61741 - RNA, 27 nt, synthetic construct
  misc_feature 1..27: note = Exosome complex component RRP4 (55-63)
  source 1..27: mol_type = other RNA
agcgtggccggctccgtcgagagagtt

SEQ ID NO: 61742 - RNA, 27 nt, synthetic construct
  misc_feature 1..27: note = Rho guanine nucleotide exchange factor 18 (538-546)
  source 1..27: mol_type = other RNA
agcgtggactccaagccccctgtcatc

SEQ ID NO: 61743 - RNA, 27 nt, synthetic construct
  misc_feature 1..27: note = PDZ domain-containing protein GIPC1 (87-95)
  source 1..27: mol_type = other RNA
agcgtgatcgaccacattcatctgata

SEQ ID NO: 61744 - RNA, 33 nt, synthetic construct
  misc_feature 1..33: note = Programmed cell death 6-interacting protein (423-433)
  source 1..33: mol_type = other RNA
agcgtgatcgagcagggcgggattcaaaccgtc

SEQ ID NO: 61745 - RNA, 27 nt, synthetic construct
  misc_feature 1..27: note = Nucleolar pre-ribosomal-associated protein 1 (1313-1321)
  source 1..27: mol_type = other RNA
agcgtgctggaccagaagatcctcctt

SEQ ID NO: 61746 - RNA, 27 nt, synthetic construct
  misc_feature 1..27: note = Serine incorporator 1 (244-252)
  source 1..27: mol_type = other RNA
agcgtgatgtccatcctgcccaagatt

SEQ ID NO: 61747 - RNA, 27 nt, synthetic construct
  misc_feature 1..27: note = Heterogeneous nuclear ribonucleoprotein K (372-380)
  source 1..27: mol_type = other RNA
agctacgccggcgggagaggatcctat

SEQ ID NO: 61748 - RNA, 27 nt, synthetic construct
  misc_feature 1..27: note = Nectin-2 (494-502)
  source 1..27: mol_type = other RNA
agctaccagggcaaggggttcgtgatg

SEQ ID NO: 61749 - RNA, 27 nt, synthetic construct
  misc_feature 1..27: note = Transcription intermediary factor 1-beta (33-41)
  source 1..27: mol_type = other RNA
accgccgacagccagccccctgtgttc

SEQ ID NO: 61750 - RNA, 27 nt, synthetic construct
  misc_feature 1..27: note = Phosphatidylinositol 4-kinase alpha (299-307)
  source 1..27: mol_type = other RNA
accgagatcgaaagactgattacatgg

SEQ ID NO: 61751 - RNA, 30 nt, synthetic construct
  misc_feature 1..30: note = Phosphatidylinositol 4-kinase alpha (299-308)
  source 1..30: mol_type = other RNA
accgagatcgaaagactgattacatggtac

SEQ ID NO: 61752 - RNA, 33 nt, synthetic construct
  misc_feature 1..33: note = Putative oxidoreductase GLYR1 (385-395)
  source 1..33: mol_type = other RNA
accatcgccgagggcctgacactcgctcaggtg

SEQ ID NO: 61753 - RNA, 27 nt, synthetic construct
  misc_feature 1..27: note = Phosphopantothenate-cysteine ligase (151-159)
  source 1..27: mol_type = other RNA
accctggccgactacctccaccttctg

SEQ ID NO: 61754 - RNA, 30 nt, synthetic construct
  misc_feature 1..30: note = Paraspeckle component 1 (128-137)
  source 1..30: mol_type = other RNA
accctggccgagatcgctaaggcagaactc

SEQ ID NO: 61755 - RNA, 27 nt, synthetic construct
  misc_feature 1..27: note = Tumor necrosis factor receptor superfamily member 6 (305-313)
  source 1..27: mol_type = other RNA
accctggccgagaagatccagacaatt

SEQ ID NO: 61756 - RNA, 27 nt, synthetic construct
  misc_feature 1..27: note = Vacuolar protein sorting-associated protein 29 (57-65)
  source 1..27: mol_type = other RNA
accctggccggcgacgtgcacatcgtc

SEQ ID NO: 61757 - RNA, 27 nt, synthetic construct
  misc_feature 1..27: note = Nuclear transcription factor Y subunit gamma (147-155)
  source 1..27: mol_type = other RNA
accctggcccagcaacccacagctgtg

SEQ ID NO: 61758 - RNA, 30 nt, synthetic construct
  misc_feature 1..30: note = Pre-mRNA-splicing factor ATP-dependent RNA helicase DHX15 (266-275)
  source 1..30: mol_type = other RNA
accctggccacagacatcctcatgggcgtg

SEQ ID NO: 61759 - RNA, 27 nt, synthetic construct
  misc_feature 1..27: note = Heat shock cognate 71 kDa protein (313-321)
  source 1..27: mol_type = other RNA
accctggaccccgtggagaaggccctc

SEQ ID NO: 61760 - RNA, 27 nt, synthetic construct
  misc_feature 1..27: note = EMILIN-2 (411-419)
  source 1..27: mol_type = other RNA
accctggaccagaagatcgagagagtg

SEQ ID NO: 61761 - RNA, 27 nt, synthetic construct
  misc_feature 1..27: note = Ubiquitin carboxyl-terminal hydrolase 33 (252-260)
  source 1..27: mol_type = other RNA
accctgttccagggcatcaagacagtg

SEQ ID NO: 61762 - RNA, 27 nt, synthetic construct
  misc_feature 1..27: note = Cyclic AMP-responsive element-binding protein 1 (213-221)
  source 1..27: mol_type = other RNA
accctgatcgaggaactcaaggccctt

SEQ ID NO: 61763 - RNA, 30 nt, synthetic construct
  misc_feature 1..30: note = Mediator of RNA polymerase II transcription subunit 14 (53-62)
  source 1..30: mol_type = other RNA
accctgatcgagttcctccttcacagagcc

SEQ ID NO: 61764 - RNA, 27 nt, synthetic construct
  misc_feature 1..27: note = Histone-lysine N-methyltransferase 2B (517-525)
  source 1..27: mol_type = other RNA
accctgatcgagaaggtgcaggaagcc

SEQ ID NO: 61765 - RNA, 30 nt, synthetic construct
  misc_feature 1..30: note = Protein arginine N-methyltransferase 3 (288-297)
  source 1..30: mol_type = other RNA
accctgatcaagggcaaaattgaggaagtg

SEQ ID NO: 61766 - RNA, 27 nt, synthetic construct
  misc_feature 1..27: note = UDP-N-acetylglucosamine-dolichyl-phosphate N-acetylglucosaminephosphotransferase (255-263)
  source 1..27: mol_type = other RNA
accctgatcaacctccttctgaaggtg

SEQ ID NO: 61767 - RNA, 33 nt, synthetic construct
  misc_feature 1..33: note = Peroxisomal acyl-coenzyme A oxidase 1 (597-607)
  source 1..33: mol_type = other RNA
accctgatcagaagcgacgccgtggctctcgtc

SEQ ID NO: 61768 - RNA, 27 nt, synthetic construct
  misc_feature 1..27: note = Ubiquitin-like modifier-activating enzyme 6 (967-975)
  source 1..27: mol_type = other RNA
accctgctcgacttcatcaacgccgtg

SEQ ID NO: 61769 - RNA, 27 nt, synthetic construct
  misc_feature 1..27: note = Coronin (508-516)
  source 1..27: mol_type = other RNA
accctgctcgaggaaatcaaggccctt

SEQ ID NO: 61770 - RNA, 27 nt, synthetic construct
  misc_feature 1..27: note = Signal-induced proliferation-associated protein 1 (365-373)
  source 1..27: mol_type = other RNA
accctgctcggcgacgtggtcagactt

SEQ ID NO: 61771 - RNA, 27 nt, synthetic construct
  misc_feature 1..27: note = 2-hydroxyacyl-CoA lyase 1 (238-246)
  source 1..27: mol_type = other RNA
accctgctcggcaacatccacgccgtg

SEQ ID NO: 61772 - RNA, 30 nt, synthetic construct
  misc_feature 1..30: note = Pecanex-like protein 1 (955-964)
  source 1..30: mol_type = other RNA
accctgctcatcggcagccccctttccctg

SEQ ID NO: 61773 - RNA, 27 nt, synthetic construct
  misc_feature 1..27: note = Kelch-like protein 22 (490-498)
  source 1..27: mol_type = other RNA
accctgctcaacaagctttacgtgatc

SEQ ID NO: 61774 - RNA, 27 nt, synthetic construct
  misc_feature 1..27: note = AP-2 complex subunit beta (483-491)
  source 1..27: mol_type = other RNA
accctgctcacagccatcgtgaagctt

SEQ ID NO: 61775 - RNA, 27 nt, synthetic construct
  misc_feature 1..27: note = Vacuolar protein sorting-associated protein 11 homolog (911-919)
  source 1..27: mol_type = other RNA
accctgctcacagacccccctactgcc

SEQ ID NO: 61776 - RNA, 27 nt, synthetic construct
  misc_feature 1..27: note = Fanconi anemia group I protein (1140-1148)
  source 1..27: mol_type = other RNA
accctgctcacattctttcacgagctt

SEQ ID NO: 61777 - RNA, 27 nt, synthetic construct
  misc_feature 1..27: note = 1-phosphatidylinositol 4,5-bisphosphate phosphodiesterase gamma-1 (436-444)
  source 1..27: mol_type = other RNA
accctgctcacaaagcccgtggagatc

SEQ ID NO: 61778 - RNA, 30 nt, synthetic construct
  misc_feature 1..30: note = Pre-mRNA-processing factor 6 (249-258)
  source 1..30: mol_type = other RNA
accctgatggacatgagactcagccaggtg

SEQ ID NO: 61779 - RNA, 30 nt, synthetic construct
  misc_feature 1..30: note = Transgelin-2 (128-137)
  source 1..30: mol_type = other RNA
accctgatgaacctcggcgggcttgccgtg

SEQ ID NO: 61780 - RNA, 27 nt, synthetic construct
  misc_feature 1..27: note = Cleft lip and palate transmembrane protein 1 (101-109)
  source 1..27: mol_type = other RNA
accctgatgaacctccacgtgtacatc

SEQ ID NO: 61781 - RNA, 27 nt, synthetic construct
  misc_feature 1..27: note = Nuclear receptor-binding protein (524-532)
  source 1..27: mol_type = other RNA
accctgaacagcgccgctgtgacagtc

SEQ ID NO: 61782 - RNA, 27 nt, synthetic construct
  misc_feature 1..27: note = Acylglycerol kinase, mitochondrial (127-135)
  source 1..27: mol_type = other RNA
accctgcaggaggtggtcacaggcgtt

SEQ ID NO: 61783 - RNA, 27 nt, synthetic construct
  misc_feature 1..27: note = Baculoviral IAP repeat-containing protein 6 (1801-1809)
  source 1..27: mol_type = other RNA
accctgagcgacgtgctcgatagagtc

SEQ ID NO: 61784 - RNA, 27 nt, synthetic construct
  misc_feature 1..27: note = Lysine-specific demethylase 5C (849-857)
  source 1..27: mol_type = other RNA
accctgacagagctcagagccttcctt

SEQ ID NO: 61785 - RNA, 27 nt, synthetic construct
  misc_feature 1..27: note = Cytochrome b-c1 complex subunit 9 (5-13)
  source 1..27: mol_type = other RNA
accctgacaagcaagctctactccctt

SEQ ID NO: 61786 - RNA, 27 nt, synthetic construct
  misc_feature 1..27: note = Putative helicase MOV-10 (131-139)
  source 1..27: mol_type = other RNA
accctggtggaggccatcaagcaggtc

SEQ ID NO: 61787 - RNA, 27 nt, synthetic construct
  misc_feature 1..27: note = Transmembrane protein 9B (3-11)
  source 1..27: mol_type = other RNA
accctgtggggcgggctccttagactg

SEQ ID NO: 61788 - RNA, 27 nt, synthetic construct
  misc_feature 1..27: note = Trafficking protein particle complex subunit 9 (207-215)
  source 1..27: mol_type = other RNA
accctgtacgacagcagactcttcgtg

SEQ ID NO: 61789 - RNA, 30 nt, synthetic construct
  misc_feature 1..30: note = Transmembrane protein 214 (42-51)
  source 1..30: mol_type = other RNA
accctgtacgagagaggcttcgaaaacatc

SEQ ID NO: 61790 - RNA, 27 nt, synthetic construct
  misc_feature 1..27: note = Exportin-6 (594-602)
  source 1..27: mol_type = other RNA
accctgtacggcagccagatcaagctc

SEQ ID NO: 61791 - RNA, 33 nt, synthetic construct
  misc_feature 1..33: note = Insulin-like growth factor 2 mRNA-binding protein 1 (319-329)
  source 1..33: mol_type = other RNA
accctgtacaaccccgagagaacaatcactgtg

SEQ ID NO: 61792 - RNA, 30 nt, synthetic construct
  misc_feature 1..30: note = AP-1 complex subunit beta-1 (827-836)
  source 1..30: mol_type = other RNA
accctgtaccccctccacatccttttcgtg

SEQ ID NO: 61793 - RNA, 27 nt, synthetic construct
  misc_feature 1..27: note = Syntaxin-binding protein 3 (176-184)
  source 1..27: mol_type = other RNA
accatggccgaccagatcgtgacagtc

SEQ ID NO: 61794 - RNA, 27 nt, synthetic construct
  misc_feature 1..27: note = Actin-like protein 6A (279-287)
  source 1..27: mol_type = other RNA
accatgctgggcgtgagccacgtcgtt

SEQ ID NO: 61795 - RNA, 27 nt, synthetic construct
  misc_feature 1..27: note = Tartrate-resistant acid phosphatase type 5 (23-31)
  source 1..27: mol_type = other RNA
acccccgccctgagattcgtggctgtc

SEQ ID NO: 61796 - RNA, 30 nt, synthetic construct
  misc_feature 1..30: note = Eukaryotic translation initiation factor 2A (542-551)
  source 1..30: mol_type = other RNA
acccccagaaacacagtgagccagtccatc

SEQ ID NO: 61797 - RNA, 27 nt, synthetic construct
  misc_feature 1..27: note = Intron-binding protein aquarius (396-404)
  source 1..27: mol_type = other RNA
accacattcgacaaggagtttctgctc

SEQ ID NO: 61798 - RNA, 33 nt, synthetic construct
  misc_feature 1..33: note = Elongation factor 2 (486-496)
  source 1..33: mol_type = other RNA
accacattcgagcacgcccataacatgagagtg

SEQ ID NO: 61799 - RNA, 27 nt, synthetic construct
  misc_feature 1..27: note = Nuclear factor of activated T-cells, cytoplasmic 1 (325-333)
  source 1..27: mol_type = other RNA
accacactggagcagccccctagcgtg

SEQ ID NO: 61800 - RNA, 27 nt, synthetic construct
  misc_feature 1..27: note = Chromatin complexes subunit BAP18 (72-80)
  source 1..27: mol_type = other RNA
accgtggcccagatcaaggctacagtc

SEQ ID NO: 61801 - RNA, 27 nt, synthetic construct
  misc_feature 1..27: note = Kelch-like protein 18 (361-369)
  source 1..27: mol_type = other RNA
accgtgttcgagggcagaatctacgtc

SEQ ID NO: 61802 - RNA, 27 nt, synthetic construct
  misc_feature 1..27: note = Ubiquitin carboxyl-terminal hydrolase 10 (731-739)
  source 1..27: mol_type = other RNA
acctacagactgttcgccgtggtctat

SEQ ID NO: 61803 - RNA, 27 nt, synthetic construct
  misc_feature 1..27: note Dolichyl-diphosphooligosaccharide-proteinosyltransferase 48 kDa subunit (203-211)
  source 1..27: mol_type = other RNA
gtggccgaccccgataaccctctggtc

SEQ ID NO: 61804 - RNA, 30 nt, synthetic construct
  misc_feature 1..30: note = Chromodomain-helicase-DNA-binding protein 4 (243-252)
  source 1..30: mol_type = other RNA
gtggccccccctccaccgcccgtcgaggtt

SEQ ID NO: 61805 - RNA, 30 nt, synthetic construct
  misc_feature 1..30: note = Glycogen phosphorylase, liver form (207-216)
  source 1..30: mol_type = other RNA
gtggagcacaccaacacaggcactaagtgg

SEQ ID NO: 61806 - RNA, 33 nt, synthetic construct
  misc_feature 1..33: note = Prelamin-A/C (78-88)
  source 1..33: mol_type = other RNA
gtggagatcgacaacggcaagcagagagaattc

SEQ ID NO: 61807 - RNA, 27 nt, synthetic construct
  misc_feature 1..27: note = GPI transamidase component PIG-T (292-300)
  source 1..27: mol_type = other RNA
gtgcacccccctccaaccacaacttac

SEQ ID NO: 61808 - RNA, 27 nt, synthetic construct
  misc_feature 1..27: note = Probable ATP-dependent RNA helicase DDX60-like (866-874)
  source 1..27: mol_type = other RNA
gtgatcttcgacgaggtccactacctg

SEQ ID NO: 61809 - RNA, 27 nt, synthetic construct
  misc_feature 1..27: note = Platelet-activating factor acetylhydrolase IB subunit alpha (114-122)
  source 1..27: mol_type = other RNA
gtgatcttccaccccgtctttagcgtt

SEQ ID NO: 61810 - RNA, 27 nt, synthetic construct
  misc_feature 1..27: note = ORM1-like protein 2 (54-62)
  source 1..27: mol_type = other RNA
gtgatccacaacctggccacctacgtc

SEQ ID NO: 61811 - RNA, 27 nt, synthetic construct
  misc_feature 1..27: note = Mediator of RNA polymerase II transcription subunit 23 (140-148)
  source 1..27: mol_type = other RNA
gtgatcctggagaagattctcaccata

SEQ ID NO: 61812 - RNA, 27 nt, synthetic construct
  misc_feature 1..27: note = Protein Mis18-beta (88-96)
  source 1..27: mol_type = other RNA
gtgctggccgacagcgtccacctcgct

SEQ ID NO: 61813 - RNA, 33 nt, synthetic construct
  misc_feature 1..33: note = Guanine nucleotide-binding protein G(i) subunit alpha-1 (233-243)
  source 1..33: mol_type = other RNA
gtgctggccgaggacgaagagatgaacagaatg

SEQ ID NO: 61814 - RNA, 27 nt, synthetic construct
  misc_feature 1..27: note = Bromodomain adjacent to zinc finger domain protein 2A (972-980)
  source 1..27: mol_type = other RNA
gtgctggccttcctcgtccacgagctt

SEQ ID NO: 61815 - RNA, 33 nt, synthetic construct
  misc_feature 1..33: note = Disheveled-associated activator of morphogenesis 2 (194-204)
  source 1..33: mol_type = other RNA
gtgctggcccagcccgaggctatcagcaccatt

SEQ ID NO: 61816 - RNA, 27 nt, synthetic construct
  misc_feature 1..27: note = DNA repair protein RAD50 (1068-1076)
  source 1..27: mol_type = other RNA
gtgctggccagcctcatcattagactt

SEQ ID NO: 61817 - RNA, 30 nt, synthetic construct
  misc_feature 1..30: note = Cytoplasmic dynein 1 heavy chain 1 (2318-2327)
  source 1..30: mol_type = other RNA
gtgctggacgataacaagctccttaccctg

SEQ ID NO: 61818 - RNA, 30 nt, synthetic construct
  misc_feature 1..30: note = Cytoplasmic FMR1-interacting protein 2 (170-179)
  source 1..30: mol_type = other RNA
gtgctggacgagctcaagaacatgaaatgc

SEQ ID NO: 61819 - RNA, 27 nt, synthetic construct
  misc_feature 1..27: note = Serrate RNA effector molecule homolog (161-169)
  source 1..27: mol_type = other RNA
gtgctggacaagctccttctgtacttg

SEQ ID NO: 61820 - RNA, 27 nt, synthetic construct
  misc_feature 1..27: note = Protein transport protein Sec61 subunit alpha isoform 1 (354-362)
  source 1..27: mol_type = other RNA
gtgctggaggaccccgtccacgccgtt

SEQ ID NO: 61821 - RNA, 30 nt, synthetic construct
  misc_feature 1..30: note = HLA class I histocompatibility antigen, A-2 alpha chain (291-300)
  source 1..30: mol_type = other RNA
gtgctgttcggcgccgtcatcaccggggct

SEQ ID NO: 61822 - RNA, 30 nt, synthetic construct; identical to SEQ ID NO: 37595
  misc_feature 1..30: note = Fatty acid synthase (743-752)
  source 1..30: mol_type = other RNA

SEQ ID NO: 61823 - RNA, 27 nt, synthetic construct
  misc_feature 1..27: note = Protein VAC14 homolog (32-40)
  source 1..27: mol_type = other RNA
gtgctgggcgagttcctcaaggaaatc

SEQ ID NO: 61824 - RNA, 27 nt, synthetic construct
  misc_feature 1..27: note = Mediator of RNA polymerase II transcription subunit 23 (1163-1171)
  source 1..27: mol_type = other RNA
gtgctgcacgacagaatcgtcagcgtt

SEQ ID NO: 61825 - RNA, 33 nt, synthetic construct
  misc_feature 1..33: note = GPN-loop GTPase 1 (103-113)
  source 1..33: mol_type = other RNA
gtgctgatcgacacccccggccagattgaggtc

SEQ ID NO: 61826 - RNA, 27 nt, synthetic construct
  misc_feature 1..27: note = Adenosylhomocysteinase (62-70)
  source 1..27: mol_type = other RNA
gtgctgatcgagaccctcgtcacactt

SEQ ID NO: 61827 - RNA, 33 nt, synthetic construct
  misc_feature 1..33: note = Splicing factor 3B subunit 3 (959-969)
  source 1..33: mol_type = other RNA
gtgctgatcggcgtcgggaagctccttagagtt

SEQ ID NO: 61828 - RNA, 30 nt, synthetic construct
  misc_feature 1..30: note = Membrane-bound transcription factor site-2 protease (164-173)
  source 1..30: mol_type = other RNA
gtgctgatcagcggcgtcgttcacgagatt

SEQ ID NO: 61829 - RNA, 27 nt, synthetic construct
  misc_feature 1..27: note = Cytoplasmic FMR1-interacting protein 2 (505-513)
  source 1..27: mol_type = other RNA
gtgctgatcagcgtcctccaggccatt

SEQ ID NO: 61830 - RNA, 27 nt, synthetic construct
  misc_feature 1..27: note = Putative helicase MOV-10 (216-224)
  source 1..27: mol_type = other RNA
gtgctgatcaccacactcattactgcc

SEQ ID NO: 61831 - RNA, 33 nt, synthetic construct
  misc_feature 1..33: note = Ubiquitin-like protein 4A (77-87)
  source 1..33: mol_type = other RNA
gtgctgctcgaggaaggcgaggcccagagactt

SEQ ID NO: 61832 - RNA, 33 nt, synthetic construct
  misc_feature 1..33: note = Cleavage stimulation factor subunit 1 (368-378)
  source 1..33: mol_type = other RNA
gtgctgctccccgacgagagaaccatcagcctt

SEQ ID NO: 61833 - RNA, 27 nt, synthetic construct
  misc_feature 1..27: note = Glycerol-3-phosphate acyltransferase 3 (155-163)
  source 1..27: mol_type = other RNA
gtgctgctcccccttagagtcaccctg

SEQ ID NO: 61834 - RNA, 27 nt, synthetic construct
  misc_feature 1..27: note = Eukaryotic translation initiation factor 4 gamma 3 (1360-1368)
  source 1..27: mol_type = other RNA
gtgctgctcagcgagatccttcacctg

SEQ ID NO: 61835 - RNA, 27 nt, synthetic construct
  misc_feature 1..27: note = Vesicle-trafficking protein SEC22b (2-10)
  source 1..27: mol_type = other RNA
gtgctgctcaccatgatcgccagagtc

SEQ ID NO: 61836 - RNA, 27 nt, synthetic construct
  misc_feature 1..27: note = Probable ATP-dependent RNA helicase DDX41 (543-551)
  source 1..27: mol_type = other RNA
gtgctgatggacctcaaggcccttctg

SEQ ID NO: 61837 - RNA, 30 nt, synthetic construct
  misc_feature 1..30: note = Probable ATP-dependent RNA helicase DDX41 (543-552)
  source 1..30: mol_type = other RNA
gtgctgatggacctcaaggcccttctgttg

SEQ ID NO: 61838 - RNA, 30 nt, synthetic construct
  misc_feature 1..30: note = Sterol regulatory element-binding protein 1 (412-421)
  source 1..30: mol_type = other RNA
gtgctgatggagggcgtcaagaccgaagtt

SEQ ID NO: 61839 - RNA, 27 nt, synthetic construct
  misc_feature 1..27: note = Cytoskeleton-associated protein 5 (1259-1267)
  source 1..27: mol_type = other RNA
gtgctgatgaaggccctcgagtacctt

SEQ ID NO: 61840 - RNA, 27 nt, synthetic construct
  misc_feature 1..27: note = Eukaryotic translation initiation factor 4 gamma 1 (187-195)
  source 1..27: mol_type = other RNA
gtgctgatgaaccagccccctcaaatc

SEQ ID NO: 61841 - RNA, 30 nt, synthetic construct
  misc_feature 1..30: note = Ubiquitin-like protein 7 (159-168)
  source 1..30: mol_type = other RNA
gtgctgcaggacaaggatctcttcagcgtc

SEQ ID NO: 61842 - RNA, 27 nt, synthetic construct
  misc_feature 1..27: note = Zinc finger CCCH-type antiviral protein 1 (112-120)
  source 1..27: mol_type = other RNA
gtgctgagcgaggaaaacttcaaggtc

SEQ ID NO: 61843 - RNA, 27 nt, synthetic construct
  misc_feature 1..27: note = Probable ubiquitin carboxyl-terminal hydrolase FAF-X (2317-2325)
  source 1..27: mol_type = other RNA
gtgctgagcgagctcctttggcaggtc

SEQ ID NO: 61844 - RNA, 27 nt, synthetic construct
  misc_feature 1..27: note = Phosphatidylinositol N-acetylglucosaminyltransferase subunit A (165-173)
  source 1..27: mol_type = other RNA
gtgctgaccaacaagctccttacagtc

SEQ ID NO: 61845 - RNA, 27 nt, synthetic construct
  misc_feature 1..27: note = UPF0505 protein C16orf62 (670-678)
  source 1..27: mol_type = other RNA
gtgctggtccagctcatccacagcgtt

SEQ ID NO: 61846 - RNA, 30 nt, synthetic construct
  misc_feature 1..30: note = Coiled-coil domain-containing protein 84 (84-93)
  source 1..30: mol_type = other RNA
gtgctgtacggcgggctccttgagcacctg

SEQ ID NO: 61847 - RNA, 30 nt, synthetic construct
  misc_feature 1..30: note = Signal recognition particle subunit SRP68 (231-240)
  source 1..30: mol_type = other RNA
gtgctgtacaaccagagagtcgaggaaatc

SEQ ID NO: 61848 - RNA, 27 nt, synthetic construct
  misc_feature 1..27: note = BTB/POZ domain-containing protein 2 (212-220)
  source 1..27: mol_type = other RNA
gtgatgttcaaggagcccgtcgaagtt

SEQ ID NO: 61849 - RNA, 30 nt, synthetic construct; identical to SEQ ID NO: 37622
  misc_feature 1..30: note = Ligand-dependent nuclear receptor-interacting factor 1 (358-367)
  source 1..30: mol_type = other RNA

SEQ ID NO: 61850 - RNA, 30 nt, synthetic construct
  misc_feature 1..30: note = Poly(rC)-binding protein 2 (165-174)
  source 1..30: mol_type = other RNA
gtgatgctggagagcccccctaagggcgtc

SEQ ID NO: 61851 - RNA, 27 nt, synthetic construct
  misc_feature 1..27: note = Vesicle-associated membrane protein 4 (66-74)
  source 1..27: mol_type = other RNA
gtgatgcaggagaacatcaccaaggtc

SEQ ID NO: 61852 - RNA, 30 nt, synthetic construct
  misc_feature 1..30: note = Transient receptor potential cation channel subfamily V member 2 (730-739)
  source 1..30: mol_type = other RNA
gtgcccagaaccctggagaaccctgtcctc

SEQ ID NO: 61853 - RNA, 27 nt, synthetic construct
  misc_feature 1..27: note = UPF0606 protein KIAA1549L (15-23)
  source 1..27: mol_type = other RNA
gtgcccagcctgcacatcaccacactc

SEQ ID NO: 61854 - RNA, 27 nt, synthetic construct
  misc_feature 1..27: note = Cholinesterase (308-316)
  source 1..27: mol_type = other RNA
gtgccctacggcacccctctgagcgtc

SEQ ID NO: 61855 - RNA, 27 nt, synthetic construct
  misc_feature 1..27: note = Phosphatidylglycerophosphatase and protein-tyrosine phosphatase 1 (6-14)
  source 1..27: mol_type = other RNA
gtgcaggacgagaacgtcagaggcgtt

SEQ ID NO: 61856 - RNA, 30 nt, synthetic construct
  misc_feature 1..30: note = Pre-mRNA-processing-splicing factor 8 (1168-1177)
  source 1..30: mol_type = other RNA
gtgcagtgggagaacagcttcgtctccgtt

SEQ ID NO: 61857 - RNA, 24 nt, synthetic construct
  misc_feature 1..24: note = Nucleoprotein TPR (1846-1853)
  source 1..24: mol_type = other RNA
gtgagcgacgataccgtcgagatg

SEQ ID NO: 61858 - RNA, 24 nt, synthetic construct
  misc_feature 1..24: note = Proliferating cell nuclear antigen (111-118)
  source 1..24: mol_type = other RNA
gtgagcgactacgagatgaagctg

SEQ ID NO: 61859 - RNA, 27 nt, synthetic construct
  misc_feature 1..27: note = SHC-transforming protein 1 (77-85)
  source 1..27: mol_type = other RNA
gtgaccagagaggccatcagcctggtc

SEQ ID NO: 61860 - RNA, 27 nt, synthetic construct
  misc_feature 1..27: note = Uncharacterized protein C11orf24 (396-404)
  source 1..27: mol_type = other RNA
gtggtcgacaagaccctgctccttgtt

SEQ ID NO: 61861 - RNA, 27 nt, synthetic construct
  misc_feature 1..27: note = Protein SZT2 (1295-1303)
  source 1..27: mol_type = other RNA
gtggtctggggcaccgttatcagagtg

SEQ ID NO: 61862 - RNA, 27 nt, synthetic construct
  misc_feature 1..27: note = N-alpha-acetyltransferase 20 (118-126)
  source 1..27: mol_type = other RNA
gtgtacagaaccgtcatcgagtattac

SEQ ID NO: 61863 - RNA, 27 nt, synthetic construct
  misc_feature 1..27: note = E3 ubiquitin-protein ligase UBR5 (446-454)
  source 1..27: mol_type = other RNA
tgggtggacgagaccctgagctccgtc

SEQ ID NO: 61864 - RNA, 27 nt, synthetic construct
  misc_feature 1..27: note = 60S ribosomal protein L32 (95-103)
  source 1..27: mol_type = other RNA
tactgcgccgagatcgctcacaacgtg

SEQ ID NO: 61865 - RNA, 27 nt, synthetic construct
  misc_feature 1..27: note = EF-hand calcium-binding domain-containing protein 7 (548-556)
  source 1..27: mol_type = other RNA
tacgagaacatcattgtgcacacctat

SEQ ID NO: 61866 - RNA, 27 nt, synthetic construct
  misc_feature 1..27: note = Catenin beta-1 (489-497)
  source 1..27: mol_type = other RNA
tacggcctgcccgtggtcgttaagctc

SEQ ID NO: 61867 - RNA, 30 nt, synthetic construct
  misc_feature 1..30: note = Signal recognition particle subunit SRP68 (333-342)
  source 1..30: mol_type = other RNA
tacatcctggagggcgaacccgggaaggtg

SEQ ID NO: 61868 - RNA, 27 nt, synthetic construct
  misc_feature 1..27: note = Protein timeless homolog (772-780)
  source 1..27: mol_type = other RNA
tacatcctgggcaagttctttgccctc

SEQ ID NO: 61869 - RNA, 27 nt, synthetic construct
  misc_feature 1..27: note = Glucose-fructose oxidoreductase domain-containing protein 2 (181-189)
  source 1..27: mol_type = other RNA
tacatcgtggacctgctcacccacctt

SEQ ID NO: 61870 - RNA, 27 nt, synthetic construct
  misc_feature 1..27: note = Kelch repeat and BTB domain-containing protein 4 (141-149)
  source 1..27: mol_type = other RNA
tacatctatcacggcaccgtgaagctg

SEQ ID NO: 61871 - RNA, 27 nt, synthetic construct
  misc_feature 1..27: note = FACT complex subunit SSRP1 (232-240)
  source 1..27: mol_type = other RNA
tacaagatcccctataccacagtgctg

SEQ ID NO: 61872 - RNA, 27 nt, synthetic construct
  misc_feature 1..27: note = Nucleolar protein 6 (206-214)
  source 1..27: mol_type = other RNA
tacctggcccacctcgctcatcacctt

SEQ ID NO: 61873 - RNA, 30 nt, synthetic construct
  misc_feature 1..30: note = NAD kinase (302-311)
  source 1..30: mol_type = other RNA
tacctggacggccacctcatcaccacagtg

SEQ ID NO: 61874 - RNA, 30 nt, synthetic construct
  misc_feature 1..30: note = S-phase kinase-associated protein 1 (33-42)
  source 1..30: mol_type = other RNA
tacctggacatcaagggcctccttgatgtg

SEQ ID NO: 61875 - RNA, 27 nt, synthetic construct
  misc_feature 1..27: note = Transcription cofactor vestigial-like protein 4 (13-21)
  source 1..27: mol_type = other RNA
tacctggacaagatgaacaataacatc

SEQ ID NO: 61876 - RNA, 27 nt, synthetic construct
  misc_feature 1..27: note = Zinc finger protein 655 (93-101)
  source 1..27: mol_type = other RNA
tacctggaccccgtgcagagagatctc

SEQ ID NO: 61877 - RNA, 30 nt, synthetic construct
  misc_feature 1..30: note = Methyltransferase-like protein 9 (41-50)
  source 1..30: mol_type = other RNA
tacctggaccagggcacccaaatcttcctc

SEQ ID NO: 61878 - RNA, 27 nt, synthetic construct
  misc_feature 1..27: note = Ubiquitin-conjugating enzyme E2 variant 3 (132-140)
  source 1..27: mol_type = other RNA
tacctggacgtggtccagagcaacgtt

SEQ ID NO: 61879 - RNA, 27 nt, synthetic construct
  misc_feature 1..27: note = Nuclear factor erythroid 2-related factor 3 (299-307)
  source 1..27: mol_type = other RNA
tacctggaggacaccgatagaaacctc

SEQ ID NO: 61880 - RNA, 27 nt, synthetic construct
  misc_feature 1..27: note = MKI67 FHA domain-interacting nucleolar phosphoprotein (43-51)
  source 1..27: mol_type = other RNA
tacctgttcggcgagagactccttgaa

SEQ ID NO: 61881 - RNA, 33 nt, synthetic construct
  misc_feature 1..33: note = Pyridoxal-dependent decarboxylase domain-containing protein 1 (347-357)
  source 1..33: mol_type = other RNA
tacctgggcctcgacgggttcgtggagagaatc

SEQ ID NO: 61882 - RNA, 30 nt, synthetic construct
  misc_feature 1..30: note = Unconventional myosin-Id (612-621)
  source 1..30: mol_type = other RNA
tacctgggcctccttgagaacgtgagagtc

SEQ ID NO: 61883 - RNA, 27 nt, synthetic construct
  misc_feature 1..27: note = 60S ribosomal protein L13a (137-145)
  source 1..27: mol_type = other RNA
tacctgggcagactcgcccacgaggtg

SEQ ID NO: 61884 - RNA, 27 nt, synthetic construct
  misc_feature 1..27: note = Ubiquitin-like domain-containing CTD phosphatase 1 (165-173)
  source 1..27: mol_type = other RNA
tacctgcacgagttcctcaccagcgcc

SEQ ID NO: 61885 - RNA, 27 nt, synthetic construct
  misc_feature 1..27: note = Vam6/Vps39-like protein (368-376)
  source 1..27: mol_type = other RNA
tacctgcacaccaacgtggccctcgtc

SEQ ID NO: 61886 - RNA, 27 nt, synthetic construct
  misc_feature 1..27: note = GTP-binding protein 2 (227-235)
  source 1..27: mol_type = other RNA
tacctgcacaccacaatcttcggcctc

SEQ ID NO: 61887 - RNA, 30 nt, synthetic construct
  misc_feature 1..30: note = Isoleucine-tRNA ligase, cytoplasmic (626-635)
  source 1..30: mol_type = other RNA
tacctgatcaacagccccgtggtcagagcc

SEQ ID NO: 61888 - RNA, 30 nt, synthetic construct
  misc_feature 1..30: note = Pre-mRNA-processing-splicing factor 8 (794-803)
  source 1..30: mol_type = other RNA
tacctgaaggacggcccctatatcaccgcc

SEQ ID NO: 61889 - RNA, 30 nt, synthetic construct
  misc_feature 1..30: note = E3 ubiquitin-protein ligase MARCH6 (514-523)
  source 1..30: mol_type = other RNA
tacctgctcgaccttcacagctatctgttg

SEQ ID NO: 61890 - RNA, 30 nt, synthetic construct
  misc_feature 1..30: note = Ninein (544-553)
  source 1..30: mol_type = other RNA
tacctgctcgaggaaaagatcgccagcctt

SEQ ID NO: 61891 - RNA, 27 nt, synthetic construct
  misc_feature 1..27: note = Unconventional myosin-Va (242-250)
  source 1..27: mol_type = other RNA
tacctgctcgagaagagcagagtggtc

SEQ ID NO: 61892 - RNA, 30 nt, synthetic construct; identical to SEQ ID NO: 37665
  misc_feature 1..30: note = EH domain-containing protein 4 (80-89)
  source 1..30: mol_type = other RNA

SEQ ID NO: 61893 - RNA, 27 nt, synthetic construct
  misc_feature 1..27: note = Protein fem-1 homolog A (168-176)
  source 1..27: mol_type = other RNA
tacctgctcgagcagggcgcccaagtg

SEQ ID NO: 61894 - RNA, 27 nt, synthetic construct
  misc_feature 1..27: note = PCI domain-containing protein 2 (252-260)
  source 1..27: mol_type = other RNA
tacctgctccccgtgaagatgcttctg

SEQ ID NO: 61895 - RNA, 27 nt, synthetic construct
  misc_feature 1..27: note = Pecanex-like protein 3 (1380-1388)
  source 1..27: mol_type = other RNA
tacctgaacgccctcgtgcaccttatc

SEQ ID NO: 61896 - RNA, 27 nt, synthetic construct
  misc_feature 1..27: note = Malignant T-cell-amplified sequence 1 (170-178)
  source 1..27: mol_type = other RNA
tacctgaacgacggcctctggcacatg

SEQ ID NO: 61897 - RNA, 27 nt, synthetic construct
  misc_feature 1..27: note = Elongation factor 2 (171-179)
  source 1..27: mol_type = other RNA
tacctgaacgagatcaaggacagcgtg

SEQ ID NO: 61898 - RNA, 33 nt, synthetic construct
  misc_feature 1..33: note = H/ACA ribonucleoprotein complex subunit 3 (6-16)
  source 1..33: mol_type = other RNA
tacctgaacgagcagggcgacagagtgtatacc

SEQ ID NO: 61899 - RNA, 27 nt, synthetic construct
  misc_feature 1..27: note = Ferritin heavy chain (11-19)
  source 1..27: mol_type = other RNA
tacctgaacgagcaggtgaaggccatc

SEQ ID NO: 61900 - RNA, 30 nt, synthetic construct; identical to SEQ ID NO: 37673
  misc_feature 1..30: note = T-complex protein 1 subunit theta (278-287)
  source 1..30: mol_type = other RNA

SEQ ID NO: 61901 - RNA, 27 nt, synthetic construct
  misc_feature 1..27: note = Probable C-mannosyltransferase DPY19L1 (356-364)
  source 1..27: mol_type = other RNA
tacctgaccagcaagatcttcggcatt

SEQ ID NO: 61902 - RNA, 27 nt, synthetic construct
  misc_feature 1..27: note = Circadian clock protein PASD1 (168-176)
  source 1..27: mol_type = other RNA
tacctggtgggcaacgtctgcatcctc

SEQ ID NO: 61903 - RNA, 27 nt, synthetic construct
  misc_feature 1..27: note = Protocadherin beta-6 (446-454)
  source 1..27: mol_type = other RNA
tacctggtgaccaaggtcgttgccgtg

SEQ ID NO: 61904 - RNA, 27 nt, synthetic construct
  misc_feature 1..27: note = Myotubularin-related protein 4 (250-258)
  source 1..27: mol_type = other RNA
tacctggtgaccagcatcgccaaggct

SEQ ID NO: 61905 - RNA, 30 nt, synthetic construct
  misc_feature 1..30: note = F-actin-capping protein subunit beta (120-129)
  source 1..30: mol_type = other RNA
tacctgtgggacctcgatcacggcttcgcc

SEQ ID NO: 61906 - RNA, 27 nt, synthetic construct
  misc_feature 1..27: note = Growth arrest and DNA damage-inducible protein GADD45 alpha (118-126)
  source 1..27: mol_type = other RNA
tacatggaccagtgggtgcccgtcatc

SEQ ID NO: 61907 - RNA, 27 nt, synthetic construct
  misc_feature 1..27: note = Signal transducing adapter molecule 2 (404-412)
  source 1..27: mol_type = other RNA
tacatgggccagagcatccaccaagtg

SEQ ID NO: 61908 - RNA, 33 nt, synthetic construct
  misc_feature 1..33: note = SWI/SNF-related matrix-associated actin-dependent regulator of chromatin subfamily B member 1 (26-36)
  source 1..33: mol_type = other RNA
tacatgatcggcagcgaggtggggaactatctg

SEQ ID NO: 61909 - RNA, 30 nt, synthetic construct
  misc_feature 1..30: note = Serine palmitoyltransferase small subunit A (24-33)
  source 1..30: mol_type = other RNA
tacatgctggagccctgggaaagaaccgtg

SEQ ID NO: 61910 - RNA, 27 nt, synthetic construct
  misc_feature 1..27: note = Kinetochore protein Nuf2 (65-73)
  source 1..27: mol_type = other RNA
tacatgatgcccgtgaacagcgaggtc

SEQ ID NO: 61911 - RNA, 27 nt, synthetic construct
  misc_feature 1..27: note = G patch domain-containing protein 11 (33-41)
  source 1..27: mol_type = other RNA
tacatgagcgactccttcatcaacgtg

SEQ ID NO: 61912 - RNA, 27 nt, synthetic construct
  misc_feature 1..27: note = Transcription factor SOX-8 (6-14)
  source 1..27: mol_type = other RNA
tacccccacctgcataacgccgagctc

SEQ ID NO: 61913 - RNA, 27 nt, synthetic construct
  misc_feature 1..27: note = Immunoglobulin-binding protein 1 (259-267)
  source 1..27: mol_type = other RNA
taccccagcctgcctaccatgacagtg

SEQ ID NO: 61914 - RNA, 33 nt, synthetic construct
  misc_feature 1..33: note = RNA-binding motif protein 22 (253-263)
  source 1..33: mol_type = other RNA
taccagttcggcgagatcagaaccattacagtg

SEQ ID NO: 61915 - RNA, 27 nt, synthetic construct
  misc_feature 1..27: note = NADH dehydrogenase (ubiquinone) iron-sulfur protein 2, mitochondrial (245-253)
  source 1..27: mol_type = other RNA
taccagttcagcaagaacttttccctg

SEQ ID NO: 61916 - RNA, 27 nt, synthetic construct
  misc_feature 1..27: note = GRB2-associated-binding protein 2 (324-332)
  source 1..27: mol_type = other RNA
taccagatccccagaaccttcacactg

SEQ ID NO: 61917 - RNA, 27 nt, synthetic construct
  misc_feature 1..27: note = Copper-transporting ATPase 1 (1410-1418)
  source 1..27: mol_type = other RNA
tacagaaagcccacctatgagagctac

SEQ ID NO: 61918 - RNA, 33 nt, synthetic construct
  misc_feature 1..33: note = Tuberin (602-612)
  source 1..33: mol_type = other RNA
tacaccctgcccatcgccagctccattagactc

SEQ ID NO: 61919 - RNA, 27 nt, synthetic construct
  misc_feature 1..27: note = Heterogeneous nuclear ribonucleoprotein U-like protein 1 (797-805)
  source 1..27: mol_type = other RNA
tacaccccccctccaccgcccacagcc

SEQ ID NO: 61920 - RNA, 27 nt, synthetic construct
  misc_feature 1..27: note = PAS domain-containing serine/threonine-protein kinase (890-898)
  source 1..27: mol_type = other RNA
tacacctgggaggaagtgttcagagtc

SEQ ID NO: 61921 - RNA, 48 nt, synthetic construct
  misc_feature 1..48: note = Selenoprotein H (51-66)
  source 1..48: mol_type = other RNA
gccgctgcactgagccaggccctcagacttgaggcgcccgaactgcct

SEQ ID NO: 61922 - RNA, 45 nt, synthetic construct
  misc_feature 1..45: note = 40S ribosomal protein S26 (47-61)
  source 1..45: mol_type = other RNA
gccgctgcagtgagagacatcagcgaggcctccgtcttcgatgcg

SEQ ID NO: 61923 - RNA, 51 nt, synthetic construct
  misc_feature 1..51: note = Profilin-1 (33-49)
  source 1..51: mol_type = other RNA
gccgctgtgcccggcaagaccttcgtcaacatcacacctgcagaggttggg

SEQ ID NO: 61924 - RNA, 39 nt, synthetic construct
  misc_feature 1..39: note = Calmodulin (58-70)
  source 1..39: mol_type = other RNA
gccgacggcaacgggaccatcgatttccccgagtttctg

SEQ ID NO: 61925 - RNA, 39 nt, synthetic construct
  misc_feature 1..39: note = Coiled-coil and C2 domain-containing protein 2A (1275-1287)
  source 1..39: mol_type = other RNA
gccgagtgcgctctgaagttccccaacagacagtgtctc

SEQ ID NO: 61926 - RNA, 30 nt, synthetic construct
  misc_feature 1..30: note = Helicase ARIP4 (881-890)
  source 1..30: mol_type = other RNA
gccgagaagaaagctgcaaagaaaagctac

SEQ ID NO: 61927 - RNA, 36 nt, synthetic construct
  misc_feature 1..36: note = NHP2-like protein 1 (60-71)
  source 1..36: mol_type = other RNA
gccgagcccctggaaatcattctccaccttcctctg

SEQ ID NO: 61928 - RNA, 42 nt, synthetic construct
  misc_feature 1..42: note = Uncharacterized protein C20orf144 (70-83)
  source 1..42: mol_type = other RNA
gccggcctggggagccccgctgcacctagactcaggggagcc

SEQ ID NO: 61929 - RNA, 39 nt, synthetic construct
  misc_feature 1..39: note = ATP synthase mitochondrial F1 complex assembly factor 1 (20-32)
  source 1..39: mol_type = other RNA
gccggcctgtacagagggctctgcgctgtgaggagccgg

SEQ ID NO: 61930 - RNA, 60 nt, synthetic construct
  misc_feature 1..60: note = Gamma-soluble NSF attachment protein (267-286)
  source 1..60: mol_type = other RNA
gccaagctgggcctcagccttgtggtccccgggggaggtatcaaaaagaaatcccctgct

SEQ ID NO: 61931 - RNA, 54 nt, synthetic construct
  misc_feature 1..54: note = Deoxyuridine 5'-triphosphate nucleotidohydrolase, mitochondrial (124-141)
  source 1..54: mol_type = other RNA
gccctggacgataccgagagaggcagcgggggattcggttccacaggcaagaac

SEQ ID NO: 61932 - RNA, 30 nt, synthetic construct
  misc_feature 1..30: note = Lysine-specific demethylase 6A (1264-1273)
  source 1..30: mol_type = other RNA
gccctgatcgctgcaggcaaggagattata

SEQ ID NO: 61933 - RNA, 30 nt, synthetic construct
  misc_feature 1..30: note = Protein S100-A6 (81-90)
  source 1..30: mol_type = other RNA
gccctgatctacaacgaggctctcaagggc

SEQ ID NO: 61934 - RNA, 42 nt, synthetic construct
  misc_feature 1..42: note = Collagen alpha-2(VIII) chain (568-581)
  source 1..42: mol_type = other RNA
gccctgtacaagaacaatgtgcccgctacctatacatacgac

SEQ ID NO: 61935 - RNA, 39 nt, synthetic construct
  misc_feature 1..39: note = Peroxiredoxin-5, mitochondrial (54-66)
  source 1..39: mol_type = other RNA
gcccccatcaaggtgggcgacgctattcctgcagtcgag

SEQ ID NO: 61936 - RNA, 33 nt, synthetic construct
  misc_feature 1..33: note = Neuroblast differentiation-associated protein AHNAK (105-115)
  source 1..33: mol_type = other RNA
gcccccaagatcagcatgcctgacattgatctg

SEQ ID NO: 61937 - RNA, 33 nt, synthetic construct
  misc_feature 1..33: note = Ephrin type-B receptor 1 (422-432)
  source 1..33: mol_type = other RNA
gcccccagcaccgtgcctatcatgcaccaggtc

SEQ ID NO: 61938 - RNA, 51 nt, synthetic construct
  misc_feature 1..51: note = Fer-1-like protein 5 (176-192)
  source 1..51: mol_type = other RNA
gccagacagctgatgggcaacaatatcaagcccgtggtcaaagttagcatt

SEQ ID NO: 61939 - RNA, 39 nt, synthetic construct
  misc_feature 1..39: note = Molybdenum cofactor sulfurase (561-573)
  source 1..39: mol_type = other RNA
gccagaacccagcccacacctagcgagaaggctgcaggc

SEQ ID NO: 61940 - RNA, 48 nt, synthetic construct
  misc_feature 1..48: note = Protein LAP2 (1003-1018)
  source 1..48: mol_type = other RNA
gccagcttcccccctcagctgctcccaagatccgagtctaccgaaaac

SEQ ID NO: 61941 - RNA, 45 nt, synthetic construct
  misc_feature 1..45: note = Cysteine-rich protein 2 (59-73)
  source 1..45: mol_type = other RNA
gccaccctgttcggccccaagggggtgaacatcggaggtgctggc

SEQ ID NO: 61942 - RNA, 48 nt, synthetic construct
  misc_feature 1..48: note = Sodium channel and clathrin linker 1 (424-439)
  source 1..48: mol_type = other RNA
gccgtggaggaagagctggaaaagatctacagagagggcagggggaac

SEQ ID NO: 61943 - RNA, 36 nt, synthetic construct
  misc_feature 1..36: note = Interferon-induced protein with tetratricopeptide repeats 2 (285-296)
  source 1..36: mol_type = other RNA
tgccagatcggctgttgctacagagccaaggtgttc

SEQ ID NO: 61944 - RNA, 75 nt, synthetic construct
  misc_feature 1..75: note = Fas-binding factor 1 (99-123)
  source 1..75: mol_type = other RNA
gacgccgatatcctgggcctcaagaaaagcaactccgctccctctaagaaagcagccaaggaccctgggaaagga

SEQ ID NO: 61945 - RNA, 51 nt, synthetic construct
  misc_feature 1..51: note = IQ motif and SEC7 domain-containing protein 2 (977-993)
  source 1..51: mol_type = other RNA
gacttcatcaagaacctgagaggcgtggataatggggaggacattcccagg

SEQ ID NO: 61946 - RNA, 39 nt, synthetic construct
  misc_feature 1..39: note = Peptidyl-prolyl cis-trans isomerase A (9-21)
  source 1..39: mol_type = other RNA
gacatcgccgtggatggcgagcccctggggagagtcagc

SEQ ID NO: 61947 - RNA, 48 nt, synthetic construct
  misc_feature 1..48: note = Peptidyl-prolyl cis-trans isomerase A (9-24)
  source 1..48: mol_type = other RNA
gacatcgccgtggatggcgagcccctggggagagtcagcttcgaactc

SEQ ID NO: 61948 - RNA, 45 nt, synthetic construct
  misc_feature 1..45: note = Beta-secretase 1 (93-107)
  source 1..45: mol_type = other RNA
gacaccggcagctccaacttcgccgtgggggctgcaccccaccct

SEQ ID NO: 61949 - RNA, 42 nt, synthetic construct
  misc_feature 1..42: note = Elongation factor 1-alpha 1 (252-265)
  source 1..42: mol_type = other RNA
gacgtgtacaagatcggcgggattggaaccgtccccgttggt

SEQ ID NO: 61950 - RNA, 42 nt, synthetic construct
  misc_feature 1..42: note = GDNF family receptor alpha-1 (117-130)
  source 1..42: mol_type = other RNA
gaggacagcccctacgaacctgtgaactccagactgtctgat

SEQ ID NO: 61951 - RNA, 30 nt, synthetic construct
  misc_feature 1..30: note = H/ACA ribonucleoprotein complex subunit 2 (144-153)
  source 1..30: mol_type = other RNA
gaggaagtgcagagcctgcccctccctctt

SEQ ID NO: 61952 - RNA, 42 nt, synthetic construct
  misc_feature 1..42: note = Rho guanine nucleotide exchange factor 17 (425-438)
  source 1..42: mol_type = other RNA
gagggcctgctcagaagccaggccaggacccgggctaagggg

SEQ ID NO: 61953 - RNA, 42 nt, synthetic construct
  misc_feature 1..42: note = Uncharacterized protein C2orf15 (95-108)
  source 1..42: mol_type = other RNA
gagggcaccgggacaggaagcctgtccggtaaggccctcggc

SEQ ID NO: 61954 - RNA, 36 nt, synthetic construct
  misc_feature 1..36: note = Nesprin-3 (221-232)
  source 1..36: mol_type = other RNA
gagcacgaagagtaccaggccggcgtggacgaattc

SEQ ID NO: 61955 - RNA, 45 nt, synthetic construct
  misc_feature 1..45: note = Ankyrin repeat domain-containing protein 35 (351-365)
  source 1..45: mol_type = other RNA
gagcccagagccagcggcaagcaggggtcctctctgaggcctgga

SEQ ID NO: 61956 - RNA, 36 nt, synthetic construct
  misc_feature 1..36: note = Probable ATP-dependent RNA helicase DDX53 (502-513)
  source 1..36: mol_type = other RNA
gagcagagcgaccaagaaagagccgtggaggatttc

SEQ ID NO: 61957 - RNA, 54 nt, synthetic construct
  misc_feature 1..54: note = DNA-binding protein RFX6 (414-431)
  source 1..54: mol_type = other RNA
gagagagtggacctgaacagcatcggctcccaggccctccttaccatttctggg

SEQ ID NO: 61958 - RNA, 39 nt, synthetic construct
  misc_feature 1..39: note = Annexin A2 (242-254)
  source 1..39: mol_type = other RNA
gagagcatcagaaaggaagtgaaaggcgacctggagaac

SEQ ID NO: 61959 - RNA, 42 nt, synthetic construct
  misc_feature 1..42: note = Annexin A2 (242-255)
  source 1..42: mol_type = other RNA
gagagcatcagaaaggaagtgaaaggcgacctggagaacgcc

SEQ ID NO: 61960 - RNA, 33 nt, synthetic construct
  misc_feature 1..33: note = Elongation factor 1-alpha 1 (280-290)
  source 1..33: mol_type = other RNA
ttcgcccccgtgaacgtcaccacagaggttaag

SEQ ID NO: 61961 - RNA, 33 nt, synthetic construct
  misc_feature 1..33: note = Plasminogen activator inhibitor 1 RNA-binding protein (21-31)
  source 1..33: mol_type = other RNA
ttcgacgatgagagcgacccctttgaagtgctg

SEQ ID NO: 61962 - RNA, 42 nt, synthetic construct
  misc_feature 1..42: note = Peptidyl-prolyl cis-trans isomerase A (8-21)
  source 1..42: mol_type = other RNA
ttcgacatcgccgtggatggcgagcccctggggagagtcagc

SEQ ID NO: 61963 - RNA, 48 nt, synthetic construct
  misc_feature 1..48: note = Peptidyl-prolyl cis-trans isomerase A (8-23)
  source 1..48: mol_type = other RNA
ttcgacatcgccgtggatggcgagcccctggggagagtcagctttgaa

SEQ ID NO: 61964 - RNA, 27 nt, synthetic construct
  misc_feature 1..27: note = Alpha-2-macroglobulin receptor-associated protein (252-260)
  source 1..27: mol_type = other RNA
ttcgaggaacccagagtgatcgacctg

SEQ ID NO: 61965 - RNA, 45 nt, synthetic construct
  misc_feature 1..45: note = BTB/POZ domain-containing protein KCTD7 (96-110)
  source 1..45: mol_type = other RNA
ttcatcgacagagatggcacccactttggggacgtgctgaacttc

SEQ ID NO: 61966 - RNA, 33 nt, synthetic construct
  misc_feature 1..33: note = Small nuclear ribonucleoprotein Sm D1 (74-84)
  source 1..33: mol_type = other RNA
ttcatcctgcccgacagcctccctcttgatacc

SEQ ID NO: 61967 - RNA, 27 nt, synthetic construct
  misc_feature 1..27: note = Proteasome activator complex subunit 2 (35-43)
  source 1..27: mol_type = other RNA
ttcctgccccagaagatcatttacctc

SEQ ID NO: 61968 - RNA, 36 nt, synthetic construct
  misc_feature 1..36: note = Triosephosphate isomerase (230-241)
  source 1..36: mol_type = other RNA
ttcctggtgggcggggccagcctcaagcccgagttt

SEQ ID NO: 61969 - RNA, 36 nt, synthetic construct
  misc_feature 1..36: note = Protein FAM208B (156-167)
  source 1..36: mol_type = other RNA
ttcagaagccccctgtccaccggcgtgaaggacctc

SEQ ID NO: 61970 - RNA, 72 nt, synthetic construct
  misc_feature 1..72: note = Elongation factor 1-alpha 1 (190-213)
  source 1..72: mol_type = other RNA
ttcgtgcccatcagcggctggaacggggacaatatgctggagccttccgccaacatgccatggtttaaggga

SEQ ID NO: 61971 - RNA, 42 nt, synthetic construct
  misc_feature 1..42: note = Fanconi anemia group M protein (201-214)
  source 1..42: mol_type = other RNA
ggcgcctgccccgctgcagagatcaagtgtctggtgattgac

SEQ ID NO: 61972 - RNA, 24 nt, synthetic construct
  misc_feature 1..24: note = Collagen alpha-4(IV) chain (170-177)
  source 1..24: mol_type = other RNA
ggcgagaaggggaacagcgtgttc

SEQ ID NO: 61973 - RNA, 63 nt, synthetic construct
  misc_feature 1..63: note = Heterogeneous nuclear ribonucleoproteins A2/B1 (333-353)
  source 1..63: mol_type = other RNA
ggcgggaactacggacccggtggcagcgggggatccggcggttatgggggaagatctaggtac

SEQ ID NO: 61974 - RNA, 39 nt, synthetic construct
  misc_feature 1..39: note = Structural maintenance of chromosomes protein 4 (528-540)
  source 1..39: mol_type = other RNA
ggcatctacgggagactgggagacctcggtgccattgat

SEQ ID NO: 61975 - RNA, 54 nt, synthetic construct
  misc_feature 1..54: note = 60S ribosomal protein L5 (207-224)
  source 1..54: mol_type = other RNA
ggcaaggagaccagccccctgcagacacctgtggtcccagaaaacagattcccg

SEQ ID NO: 61976 - RNA, 45 nt, synthetic construct
  misc_feature 1..45: note = Charged multivesicular body protein 7 (48-62)
  source 1..45: mol_type = other RNA
ggcctggccaccgtgctccaggaccttctgagaaggggggagttg

SEQ ID NO: 61977 - RNA, 39 nt, synthetic construct
  misc_feature 1..39: note = Complement C4-A (1353-1365)
  source 1..39: mol_type = other RNA
ggcctggaggaagagctccagttcagccttgggtccaag

SEQ ID NO: 61978 - RNA, 51 nt, synthetic construct
  misc_feature 1..51: note = Complement C4-A (1353-1369)
  source 1..51: mol_type = other RNA
ggcctggaggaagagctccagttcagccttgggtccaagatcaacgtgaaa

SEQ ID NO: 61979 - RNA, 69 nt, synthetic construct
  misc_feature 1..69: note = Collagen alpha-1(XIX) chain (351-373)
  source 1..69: mol_type = other RNA
ggcctgaagggggacaaaggagagaccggtctccccggcttccctgggagcgtgggaccaaagggccag

SEQ ID NO: 61980 - RNA, 60 nt, synthetic construct
  misc_feature 1..60: note = Neuronal tyrosine-phosphorylated phosphoinositide-3-kinase adapter 2 (33-52)
  source 1..60: mol_type = other RNA
ggcctggtgatccagaacgccagcgacattgctagagagaatgataggctccggaacgaa

SEQ ID NO: 61981 - RNA, 60 nt, synthetic construct
  misc_feature 1..60: note = Kinesin-like protein KIF27 (84-103)
  source 1..60: mol_type = other RNA
ggccagaccgggagcggaaagacatacactatcggtggcgggcacattgcctccgtggtc

SEQ ID NO: 61982 - RNA, 39 nt, synthetic construct
  misc_feature 1..39: note = Helicase SKI2W (705-717)
  source 1..39: mol_type = other RNA
ggcagaagggggctggaccccaccggaacagtgatcctc

SEQ ID NO: 61983 - RNA, 30 nt, synthetic construct
  misc_feature 1..30: note = E3 ubiquitin-protein ligase HUWE1 (757-766)
  source 1..30: mol_type = other RNA
ggcaccgaggaaagaatccccattcctctg

SEQ ID NO: 61984 - RNA, 39 nt, synthetic construct
  misc_feature 1..39: note = Ankyrin repeat domain-containing protein 11 (421-433)
  source 1..39: mol_type = other RNA
ggcaccggggagaagctgagactcagcgcccacacaatc

SEQ ID NO: 61985 - RNA, 39 nt, synthetic construct
  misc_feature 1..39: note = US7745391-778469 (29-41)
  source 1..39: mol_type = other RNA
ggcgtggccctggctcccagacctctcgggaccagcttc

SEQ ID NO: 61986 - RNA, 51 nt, synthetic construct
  misc_feature 1..51: note = Meprin A subunit beta (617-633)
  source 1..51: mol_type = other RNA
ggcgtgtgcaccgtcagagacgggaaggccgagtgtaggtgccagagcgga

SEQ ID NO: 61987 - RNA, 87 nt, synthetic construct
  misc_feature 1..87: note = F-box/LRR-repeat protein 4 (227-255)
  source 1..87: mol_type = other RNA
ggcgtgaaggacaaacccgtcctgagcctcaagacctcccttatcgatatgaacgacattgaggatgacgcctacgctgaaaaagat

SEQ ID NO: 61988 - RNA, 42 nt, synthetic construct
  misc_feature 1..42: note = PHD finger protein 14 (609-622)
  source 1..42: mol_type = other RNA
cacttcggctgcctggacccccctctcaagaaaagcccaaag

SEQ ID NO: 61989 - RNA, 45 nt, synthetic construct
  misc_feature 1..45: note = Arylsulfatase E (503-517)
  source 1..45: mol_type = other RNA
caccagagaaccctgagccccgtgcctctccaacttgacaggctg

SEQ ID NO: 61990 - RNA, 51 nt, synthetic construct
  misc_feature 1..51: note = NACHT, LRR and PYD domains-containing protein 9 (146-162)
  source 1..51: mol_type = other RNA
cacaccgtggtcctggagggccccgacgggatcggaaagacaactctcctt

SEQ ID NO: 61991 - RNA, 33 nt, synthetic construct
  misc_feature 1..33: note = 60S ribosomal protein L8 (31-41)
  source 1..33: mol_type = other RNA
atcgccgctgagggcattcacaccgggcagttc

SEQ ID NO: 61992 - RNA, 48 nt, synthetic construct
  misc_feature 1..48: note = Kelch-like protein 2 (479-494)
  source 1..48: mol_type = other RNA
atcgccgagatgagcaccagaaggtccggcgctggggtgggagtcctg

SEQ ID NO: 61993 - RNA, 36 nt, synthetic construct
  misc_feature 1..36: note = Protein RER1 (80-91)
  source 1..36: mol_type = other RNA
atcgccttcctgagccccaaggtggacccttccctc

SEQ ID NO: 61994 - RNA, 39 nt, synthetic construct
  misc_feature 1..39: note = Peptidyl-prolyl cis-trans isomerase A (10-22)
  source 1..39: mol_type = other RNA
atcgccgtggacggcgagcccctggggagagtcagcttc

SEQ ID NO: 61995 - RNA, 42 nt, synthetic construct
  misc_feature 1..42: note = Dedicator of cytokinesis protein 4 (1742-1755)
  source 1..42: mol_type = other RNA
atcggcgacggggccctgcccagaagcgatcctaacctctcc

SEQ ID NO: 61996 - RNA, 30 nt, synthetic construct
  misc_feature 1..30: note = L-lactate dehydrogenase A-like 6B (183-192)
  source 1..30: mol_type = other RNA
atcattgtgagcaaccccgtcgacatactg

SEQ ID NO: 61997 - RNA, 60 nt, synthetic construct
  misc_feature 1..60: note = Carboxy-terminal domain RNA polymerase II polypeptide A small phosphatase 2 (215-234)
  source 1..60: mol_type = other RNA
atcctggacaacagccccgcctcctacgtgttccacaccgagaatgctgtccctgttcag

SEQ ID NO: 61998 - RNA, 39 nt, synthetic construct
  misc_feature 1..39: note = Heat shock cognate 71 kDa protein (379-391)
  source 1..39: mol_type = other RNA
atcctgagcggcgacaagtccgagaacgtgcaggatctc

SEQ ID NO: 61999 - RNA, 63 nt, synthetic construct
  misc_feature 1..63: note = Poly(rC)-binding protein 2 (38-58)
  source 1..63: mol_type = other RNA
atcaacattagcgagggcaattgccccgaaagaataatcaccctggccgggcctacaaacgct

SEQ ID NO: 62000 - RNA, 36 nt, synthetic construct
  misc_feature 1..36: note = Diacylglycerol O-acyltransferase 2 (253-264)
  source 1..36: mol_type = other RNA
atccccaagctggagcaccctacccagcaagacatt

SEQ ID NO: 62001 - RNA, 45 nt, synthetic construct
  misc_feature 1..45: note = Elongation factor 1-alpha 1 (115-129)
  source 1..45: mol_type = other RNA
atcgtggccgctggcgtcggggagttcgaagcaggaattagcaag

SEQ ID NO: 62002 - RNA, 51 nt, synthetic construct
  misc_feature 1..51: note = Macrophage migration inhibitory factor (3-19)
  source 1..51: mol_type = other RNA
atcgtgaacaccaatgtccccagagccagcgttcctgacggcttcctgtcc

SEQ ID NO: 62003 - RNA, 30 nt, synthetic construct
  misc_feature 1..30: note = L-lactate dehydrogenase A chain (135-144)
  source 1..30: mol_type = other RNA
atcgtgagcaaccccgtcgacattctgacc

SEQ ID NO: 62004 - RNA, 48 nt, synthetic construct
  misc_feature 1..48: note = Fructose-bisphosphate aldolase A (153-168)
  source 1..48: mol_type = other RNA
aagatcggcgagcacacccccagcgccctggctattatggaaaacgca

SEQ ID NO: 62005 - RNA, 33 nt, synthetic construct
  misc_feature 1..33: note = PWWP domain-containing protein 2B (191-201)
  source 1..33: mol_type = other RNA
aagatccccagcagagtgcacggctccctggag

SEQ ID NO: 62006 - RNA, 51 nt, synthetic construct
  misc_feature 1..51: note = DNA mismatch repair protein Mlh3 (135-151)
  source 1..51: mol_type = other RNA
aagctgctcagctccacccttatcccccctctggagattacagtgactgaa

SEQ ID NO: 62007 - RNA, 36 nt, synthetic construct
  misc_feature 1..36: note = Cathepsin K (314-325)
  source 1..36: mol_type = other RNA
aagaacaatgcctgcggcatcgctaacctggcaagc

SEQ ID NO: 62008 - RNA, 51 nt, synthetic construct
  misc_feature 1..51: note = Integrator complex subunit 12 (329-345)
  source 1..51: mol_type = other RNA
aagcccgtgggcctgaccgggctcgccacaagctccaaaggaggtatcggc

SEQ ID NO: 62009 - RNA, 39 nt, synthetic construct
  misc_feature 1..39: note = Synaptojanin-1 (1453-1465)
  source 1..39: mol_type = other RNA
aagagcagagcctcctcttcactggacggcttcaaagat

SEQ ID NO: 62010 - RNA, 39 nt, synthetic construct
  misc_feature 1..39: note = Thymidylate synthase (284-296)
  source 1..39: mol_type = other RNA
aaggtggagaaaatcgacgatttcaaggccgaagacttt

SEQ ID NO: 62011 - RNA, 30 nt, synthetic construct
  misc_feature 1..30: note = Zinc finger MYND domain-containing protein 15 (138-147)
  source 1..30: mol_type = other RNA
aaggtggagcccgaagaggacagagaactg

SEQ ID NO: 62012 - RNA, 36 nt, synthetic construct
  misc_feature 1..36: note = Glyceraldehyde-3-phosphate dehydrogenase (219-230)
  source 1..36: mol_type = other RNA
aaggtgatccccgagctgaacggcaaactcaccggg

SEQ ID NO: 62013 - RNA, 39 nt, synthetic construct
  misc_feature 1..39: note = Alpha-enolase (343-355)
  source 1..39: mol_type = other RNA
aaggtgaaccagatcggcagcgtcaccgagtccctgcaa

SEQ ID NO: 62014 - RNA, 45 nt, synthetic construct
  misc_feature 1..45: note = Histone H2A type 2-A (100-114)
  source 1..45: mol_type = other RNA
aaggtgaccatcgcccagggcggggtcctgcccaacattcaagct

SEQ ID NO: 62015 - RNA, 27 nt, synthetic construct
  misc_feature 1..27: note = D-dopachrome decarboxylase (89-97)
  source 1..27: mol_type = other RNA
ctggccctcggccaggacagaatcctt

SEQ ID NO: 62016 - RNA, 33 nt, synthetic construct
  misc_feature 1..33: note = Acidic fibroblast growth factor intracellular-binding protein (169-179)
  source 1..33: mol_type = other RNA
ctggccagagactacgctgcaatcgtgttcttt

SEQ ID NO: 62017 - RNA, 54 nt, synthetic construct
  misc_feature 1..54: note = FAST kinase domain-containing protein 1 (497-514)
  source 1..54: mol_type = other RNA
ctggacctccttagaaaggagctgaaaagcttgaagggcaacaccttccccgaa

SEQ ID NO: 62018 - RNA, 42 nt, synthetic construct
  misc_feature 1..42: note = F-box only protein 41 (284-297)
  source 1..42: mol_type = other RNA
ctggagagcctccttaaggccgctggcgggaacctgttgatc

SEQ ID NO: 62019 - RNA, 30 nt, synthetic construct
  misc_feature 1..30: note = Eukaryotic initiation factor 4A-III (110-119)
  source 1..30: mol_type = other RNA
ctgatcctcgcccccaccagagagcttgct

SEQ ID NO: 62020 - RNA, 39 nt, synthetic construct; identical to SEQ ID NO: 37793
  misc_feature 1..39: note = Alpha-enolase (342-354)
  source 1..39: mol_type = other RNA

SEQ ID NO: 62021 - RNA, 33 nt, synthetic construct
  misc_feature 1..33: note = Threonine synthase-like 1 (295-305)
  source 1..33: mol_type = other RNA
ctgctcgagagatgcatccaccccgccgacatt

SEQ ID NO: 62022 - RNA, 30 nt, synthetic construct
  misc_feature 1..30: note = Beta-1,4-galactosyltransferase 7 (20-29)
  source 1..30: mol_type = other RNA
ctgctcagcggcgggcttcccagaaagtgc

SEQ ID NO: 62023 - RNA, 30 nt, synthetic construct
  misc_feature 1..30: note = Protein S100-A11 (40-49)
  source 1..30: mol_type = other RNA
ctgagcttcatgaacaccgagctcgccgct

SEQ ID NO: 62024 - RNA, 45 nt, synthetic construct
  misc_feature 1..45: note = 4F2 cell-surface antigen heavy chain (496-510)
  source 1..45: mol_type = other RNA
ctgagcacccagcccggcagagaggaagggtcccctctcgagctt

SEQ ID NO: 62025 - RNA, 36 nt, synthetic construct
  misc_feature 1..36: note = L-lactate dehydrogenase A chain (254-265)
  source 1..36: mol_type = other RNA
ctgagcgtggccgacctcgctgagtccatcatgaag

SEQ ID NO: 62026 - RNA, 27 nt, synthetic construct
  misc_feature 1..27: note = Complement C4-A (1202-1210)
  source 1..27: mol_type = other RNA
ctgaccaaggcccccgtggacctcctt

SEQ ID NO: 62027 - RNA, 36 nt, synthetic construct
  misc_feature 1..36: note = Usherin (3700-3711)
  source 1..36: mol_type = other RNA
ctgtactggagcctccccgagaagcctaacggcctt

SEQ ID NO: 62028 - RNA, 33 nt, synthetic construct
  misc_feature 1..33: note = Phosphopantothenoylcysteine decarboxylase (1-11)
  source 1..33: mol_type = other RNA
atggagcccaaggccagctgccctgctgcagcc

SEQ ID NO: 62029 - RNA, 42 nt, synthetic construct
  misc_feature 1..42: note = DEAD/H box polypeptide 11 like 12 (1-14)
  source 1..42: mol_type = other RNA
atgggcctgatctgcagagaccccgccaccaaggtgaaacct

SEQ ID NO: 62030 - RNA, 39 nt, synthetic construct
  misc_feature 1..39: note = Elongation factor 1-alpha 1 (201-213)
  source 1..39: mol_type = other RNA
atgctggagcccagcgccaacatgccttggttcaagggc

SEQ ID NO: 62031 - RNA, 42 nt, synthetic construct
  misc_feature 1..42: note = Transgelin-2 (130-143)
  source 1..42: mol_type = other RNA
atgaacctgggcgggctcgccgtggctagagacgatggactt

SEQ ID NO: 62032 - RNA, 30 nt, synthetic construct
  misc_feature 1..30: note = Nucleoside diphosphate kinase B (76-85)
  source 1..30: mol_type = other RNA
atggtgtgggagggcctgaacgtcgttaag

SEQ ID NO: 62033 - RNA, 33 nt, synthetic construct
  misc_feature 1..33: note = Endoplasmic reticulum aminopeptidase 2 (861-869)
  source 1..33: mol_type = other RNA
aacgccatcagcagaattcccaagggccaggtg

SEQ ID NO: 62034 - RNA, 60 nt, synthetic construct
  misc_feature 1..60: note = Wiskott-Aldrich syndrome protein (262-281)
  source 1..60: mol_type = other RNA
aacctggaccccgatctcagaagccttttctccagggccggcatctctgaggctcagctg

SEQ ID NO: 62035 - RNA, 27 nt, synthetic construct
  misc_feature 1..27: note = Cartilage intermediate layer protein 1 (779-787)
  source 1..27: mol_type = other RNA
aacctggagcccagaaccggcttcctc

SEQ ID NO: 62036 - RNA, 27 nt, synthetic construct
  misc_feature 1..27: note = Probable phosphoglycerate mutase 4 (209-217)
  source 1..27: mol_type = other RNA
aacctgcccaccggcatccctattgtg

SEQ ID NO: 62037 - RNA, 42 nt, synthetic construct
  misc_feature 1..42: note = Nuclear receptor subfamily 1 group D member 1 (343-356)
  source 1..42: mol_type = other RNA
aacaataccctggccgctcagagacacaacgaggcactcaat

SEQ ID NO: 62038 - RNA, 54 nt, synthetic construct
  misc_feature 1..54: note = Tumor protein D52 (212-229)
  source 1..54: mol_type = other RNA
aacagcgccgctaatgcatccgccaccacaactgagcccctgcctgaaaagacg

SEQ ID NO: 62039 - RNA, 60 nt, synthetic construct
  misc_feature 1..60: note = Tumor protein D52 (212-231)
  source 1..60: mol_type = other RNA
aacagcgccgctaatgcatccgccaccacaactgagcccctgcctgaaaagacgcaggag

SEQ ID NO: 62040 - RNA, 69 nt, synthetic construct
  misc_feature 1..69: note = Replication initiator 1 (10-32)
  source 1..69: mol_type = other RNA
cccgccgctgaggtgagacctggccaggggaggggagcaaccgccggtccacggggcgcggctccgccc

SEQ ID NO: 62041 - RNA, 45 nt, synthetic construct
  misc_feature 1..45: note = Histidine protein methyltransferase 1 homolog (142-156)
  source 1..45: mol_type = other RNA
cccggcgagaacatcgtgagcaagtccttctcttcacacagtgac

SEQ ID NO: 62042 - RNA, 57 nt, synthetic construct
  misc_feature 1..57: note = Glutaredoxin-2, mitochondrial (32-50)
  source 1..57: mol_type = other RNA
cccggcagaaccaggagcgccgctcggcgcatggagtccaacacatcttcaagtctg

SEQ ID NO: 62043 - RNA, 57 nt, synthetic construct
  misc_feature 1..57: note = Insulin receptor substrate 2 (989-1007)
  source 1..57: mol_type = other RNA
cccaagcctggcgccccaagcgggcacccggtgggatccctggacggtctcctttct

SEQ ID NO: 62044 - RNA, 33 nt, synthetic construct
  misc_feature 1..33: note = Polycystin-1 (4192-4202)
  source 1..33: mol_type = other RNA
cagctggacggcctcagcgtgtcccttgggaga

SEQ ID NO: 62045 - RNA, 33 nt, synthetic construct
  misc_feature 1..33: note = Keratin, type II cytoskeletal 8 (226-236)
  source 1..33: mol_type = other RNA
cagctgtacgaggaagagatcagagaactccaa

SEQ ID NO: 62046 - RNA, 93 nt, synthetic construct
  misc_feature 1..93: note = Cilia- and flagella-associated protein 52 (145-175)
  source 1..93: mol_type = other RNA
agagacgccatctgcggcagccccgctgcagggctgaacgtgggaaatgccaccaacgtcattttctccaggtgtcgggatgagatgtttatg

SEQ ID NO: 62047 - RNA, 45 nt, synthetic construct
  misc_feature 1..45: note = Histone H3.3 (84-98)
  source 1..45: mol_type = other RNA
agattccagagcgccgctatcggcgcactgcaagaggcctccgaa

SEQ ID NO: 62048 - RNA, 78 nt, synthetic construct
  misc_feature 1..78: note = keratin 8, isoform CRA (125-150)
  source 1..78: mol_type = other RNA
agaggcgggctgggaggtggctacgggggagccagcggcatgggtgggatcaccgctgtgatggtcaaccagaatctc

SEQ ID NO: 62049 - RNA, 33 nt, synthetic construct
  misc_feature 1..33: note = Oxysterol-binding protein 2 (60-70)
  source 1..33: mol_type = other RNA
agaggcaccatcaacctgagcacagcccacatt

SEQ ID NO: 62050 - RNA, 39 nt, synthetic construct
  misc_feature 1..39: note = F-actin-capping protein subunit alpha-2 (100-112)
  source 1..39: mol_type = other RNA
agaaaggaggccaccgaccccaggccttgcgaagtggag

SEQ ID NO: 62051 - RNA, 57 nt, synthetic construct
  misc_feature 1..57: note = kelch repeat and BTB domain-containing protein 6 (1-18)
  source 1..57: mol_type = other RNA
agaaaggtgctgagggaggacgatcccagctccgtccggctcgcctctccttcaagt

SEQ ID NO: 62052 - RNA, 42 nt, synthetic construct
  misc_feature 1..42: note = UV excision repair protein RAD23 homolog B (268-281)
  source 1..42: mol_type = other RNA
agacagatcattcaacagaaccccagcctgctccctgccctt

SEQ ID NO: 62053 - RNA, 72 nt, synthetic construct
  misc_feature 1..72: note = Protein boule-like (35-58)
  source 1..72: mol_type = other RNA
agcgcccccagatacggcaccgtgatccctaacaggattttcgtcgggggaatagactttaagacaaatgag

SEQ ID NO: 62054 - RNA, 54 nt, synthetic construct
  misc_feature 1..54: note = Beta-1,3-galactosyltransferase 6 (23-40)
  source 1..54: mol_type = other RNA
agcgcccagcccctgagagacgctaggtgcgcactcgcccctggcgatccacgg

SEQ ID NO: 62055 - RNA, 39 nt, synthetic construct
  misc_feature 1..39: note = Structure-specific endonuclease subunit SLX4 (603-615)
  source 1..39: mol_type = other RNA
agcgcctcccagagagagcaccaagctctgcaggacctc

SEQ ID NO: 62056 - RNA, 45 nt, synthetic construct
  misc_feature 1..45: note = Elongation factor 1-alpha 1 (396-410)
  source 1..45: mol_type = other RNA
agcggcgacgccgctatcgtggatatggtccccgggaagcctatg

SEQ ID NO: 62057 - RNA, 39 nt, synthetic construct
  misc_feature 1..39: note = Fructose-bisphosphate aldolase A (272-284)
  source 1..39: mol_type = other RNA
agcggcgggcagtccgaggaagaggcctctatcaacctg

SEQ ID NO: 62058 - RNA, 42 nt, synthetic construct
  misc_feature 1..42: note = Sodium-coupled monocarboxylate transporter 2 (343-356)
  source 1..42: mol_type = other RNA
agcggcaccctgtccacagtggcctcttcaatcaacgctctc

SEQ ID NO: 62059 - RNA, 39 nt, synthetic construct
  misc_feature 1..39: note = Poly(rC)-binding protein 1 (223-235)
  source 1..39: mol_type = other RNA
agcatccagggccaacacaccatttcccccctggacctc

SEQ ID NO: 62060 - RNA, 51 nt, synthetic construct
  misc_feature 1..51: note = DNA ligase 3 (790-806)
  source 1..51: mol_type = other RNA
agcaagtccgaggcccacaccgctgacggcatctctattagattccccagg

SEQ ID NO: 62061 - RNA, 36 nt, synthetic construct
  misc_feature 1..36: note = Keratin, type II cytoskeletal 8 (253-264)
  source 1..36: mol_type = other RNA
agcctggacatggattccatcattgccgaggtgaag

SEQ ID NO: 62062 - RNA, 36 nt, synthetic construct
  misc_feature 1..36: note = Rabenosyn-5 (541-552)
  source 1..36: mol_type = other RNA
agcctgcacaccagaacaaggtccctcgacttccgg

SEQ ID NO: 62063 - RNA, 36 nt, synthetic construct
  misc_feature 1..36: note = Leucine-rich repeat-containing protein 28 (186-197)
  source 1..36: mol_type = other RNA
agcatggccggcaacagactggctttcctccccctt

SEQ ID NO: 62064 - RNA, 30 nt, synthetic construct
  misc_feature 1..30: note = NUAK family SNF1-like kinase 2 (446-455)
  source 1..30: mol_type = other RNA
agcaacctgaagctccccaaaggcatcctt

SEQ ID NO: 62065 - RNA, 36 nt, synthetic construct
  misc_feature 1..36: note = Keratin, type I cytoskeletal 18 (272-283)
  source 1..36: mol_type = other RNA
agccagcaaatcgaggaatccaccacagtggtcact

SEQ ID NO: 62066 - RNA, 66 nt, synthetic construct
  misc_feature 1..66: note = Striated muscle preferentially expressed protein kinase isoform X10 (928-946)
  source 1..66: mol_type = other RNA
agccaggtgctgagagagggctccaaggccgggggaggtaccctcctttgcctgcccttggctgaa

SEQ ID NO: 62067 - RNA, 30 nt, synthetic construct
  misc_feature 1..30: note = Vimentin (72-81)
  source 1..30: mol_type = other RNA
agctccgtgcccggcgtcagactgctccag

SEQ ID NO: 62068 - RNA, 42 nt, synthetic construct
  misc_feature 1..42: note = 4F2 cell-surface antigen heavy chain (497-510)
  source 1..42: mol_type = other RNA
agcacccagcccggcagagaggaagggtcccctctggagctc

SEQ ID NO: 62069 - RNA, 51 nt, synthetic construct
  misc_feature 1..51: note = Laminin subunit alpha-4 (1023-1039)
  source 1..51: mol_type = other RNA
agcacctccgtgccctgcgccagagacaagctggctttcacacagtctagg

SEQ ID NO: 62070 - RNA, 39 nt, synthetic construct
  misc_feature 1..39: note = Otoferlin (965-977)
  source 1..39: mol_type = other RNA
accgagctgagagtgatcattggcaagcccctccttagc

SEQ ID NO: 62071 - RNA, 42 nt, synthetic construct
  misc_feature 1..42: note = Procollagen-lysine,2-oxoglutarate 5-dioxygenase 1 (388-401)
  source 1..42: mol_type = other RNA
accgagcccaacagcctgagactccttatccagcaaaataag

SEQ ID NO: 62072 - RNA, 51 nt, synthetic construct
  misc_feature 1..51: note = Galectin-1 (71-87)
  source 1..51: mol_type = other RNA
accgagcagagagaagccgtgttcccctttcaacctggcagcgtcgctgag

SEQ ID NO: 62073 - RNA, 57 nt, synthetic construct
  misc_feature 1..57: note = Ovochymase-1 (314-332)
  source 1..57: mol_type = other RNA
accaaggccctgagctccgtgcaggaggtcaacggctctcaaagagggaaaggaatc

SEQ ID NO: 62074 - RNA, 72 nt, synthetic construct
  misc_feature 1..72: note = Envoplakin (1400-1423)
  source 1..72: mol_type = other RNA
acccagaaggaccccaaactgagagaggaacacagcaggctctccggctctcttgatgaggaagtggggcgg

SEQ ID NO: 62075 - RNA, 36 nt, synthetic construct
  misc_feature 1..36: note = Neuron navigator 2 (450-461)
  source 1..36: mol_type = other RNA
accacagtgggccccgccagctcctctcctaagatc

SEQ ID NO: 62076 - RNA, 57 nt, synthetic construct
  misc_feature 1..57: note = Bifunctional heparan sulfate N-deacetylase/N-sulfotransferase 3 isoform X3 (310-335)
  source 1..57: mol_type = other RNA
gtggccatcctggtcagcaaggagggcgctagaatggggctcgacacccacacaccc

SEQ ID NO: 62077 - RNA, 36 nt, synthetic construct
  misc_feature 1..36: note = VIP peptides (52-63)
  source 1..36: mol_type = other RNA
gtgttcaccgacaactacacaagactgaggaagcag

SEQ ID NO: 62078 - RNA, 27 nt, synthetic construct
  misc_feature 1..27: note = 60S acidic ribosomal protein P2 (54-62)
  source 1..27: mol_type = other RNA
gtgatcgcccagggcattgggaagctg

SEQ ID NO: 62079 - RNA, 54 nt, synthetic construct
  misc_feature 1..54: note = Elongation factor 1-alpha 1 (344-361)
  source 1..54: mol_type = other RNA
gtgatcattctgaaccaccccggccagataagcgccgggtacgctcctgtcctc

SEQ ID NO: 62080 - RNA, 51 nt, synthetic construct
  misc_feature 1..51: note = Activin receptor type-2A (262-278)
  source 1..51: mol_type = other RNA
gtgctggagggcgccatcaacttccagagagacgcttttctcaggattgat

SEQ ID NO: 62081 - RNA, 57 nt, synthetic construct
  misc_feature 1..57: note = Serine/threonine-protein phosphatase with EF-hands 1 (308-326)
  source 1..57: mol_type = other RNA
gtgctgatcccccctaccgagacaaacagagaccacgatactgacagcaagcataat

SEQ ID NO: 62082 - RNA, 33 nt, synthetic construct
  misc_feature 1..33: note = Galectin-1 (31-41)
  source 1..33: mol_type = other RNA
gtgctgaacctcggcaaggacagcaataacctt

SEQ ID NO: 62083 - RNA, 39 nt, synthetic construct
  misc_feature 1..39: note = Profilin-1 (41-53)
  source 1..39: mol_type = other RNA
gtgaacatcacccccgccgaggtcggcgttctggtgggg

SEQ ID NO: 62084 - RNA, 54 nt, synthetic construct
  misc_feature 1..54: note = Kin of IRRE-like protein 3 (402-419)
  source 1..54: mol_type = other RNA
gtgcccagagtcggcgccggggagagggaagttaccctgacagtgaacggacct

SEQ ID NO: 62085 - RNA, 39 nt, synthetic construct
  misc_feature 1..39: note = Keratin, type II cytoskeletal 8 (66-78)
  source 1..39: mol_type = other RNA
gtgaccgtcaaccagagcctgctctccccccttgttctg

SEQ ID NO: 62086 - RNA, 45 nt, synthetic construct
  misc_feature 1..45: note = Enhancer of rudimentary homolog (71-85)
  source 1..45: mol_type = other RNA
gtgtacagagccgacacccagacatatcaaccctacaacaaggat

SEQ ID NO: 62087 - RNA, 48 nt, synthetic construct
  misc_feature 1..48: note = Ankyrin repeat domain-containing protein 26 (168-183)
  source 1..48: mol_type = other RNA
tacgacgccaacatcgaggctaagaataaagatgacctgacccccctc

SEQ ID NO: 62088 - RNA, 51 nt, synthetic construct
  misc_feature 1..51: note = 78 kDa glucose-regulated protein (635-651)
  source 1..51: mol_type = other RNA
tacggcagcgccgggccccctccaaccggagaggaagacacagctgagaag

SEQ ID NO: 62089 - RNA, 57 nt, synthetic construct
  misc_feature 1..57: note = 78 kDa glucose-regulated protein (635-653)
  source 1..57: mol_type = other RNA
tacggcagcgccgggccccctccaaccggagaggaagacacagctgagaaggatgaa

SEQ ID NO: 62090 - RNA, 36 nt, synthetic construct
  misc_feature 1..36: note = Alpha-enolase (270-281)
  source 1..36: mol_type = other RNA
tacatcagccccgaccagctggccgatctctataag

SEQ ID NO: 62091 - RNA, 36 nt, synthetic construct
  misc_feature 1..36: note = Microsomal glutathione S-transferase 1 (121-132)
  source 1..36: mol_type = other RNA
tacctgacccccctccctcagccaaacagagccctt

SEQ ID NO: 62092 - RNA, 42 nt, synthetic construct
  misc_feature 1..42: note = Beta-actin-like protein 2 (8-21)
  source 1..42: mol_type = other RNA
tacaacgagctgagagtggcccccgacgaacaccctatcctc

SEQ ID NO: 62093 - RNA, 63 nt, synthetic construct
  misc_feature 1..63: note = Gamma-enolase (25-45)
  source 1..63: mol_type = other RNA
tacaccgccaagggcctgttcagagctgcagtgcccagcggggcctccacaggaatctatgag

SEQ ID NO: 62094 - RNA, 42 nt, synthetic construct
  misc_feature 1..42: note = Polypyrimidine tract-binding protein 1 (114-127)
  source 1..42: mol_type = other RNA
tacaccagcgtgacacccgtcctgagaggccagcctatctat

SEQ ID NO: 62095 - RNA, 27 nt, synthetic construct
  misc_feature 1..27: note = HLA class I histocompatibility antigen, B-13 alpha chain (26-34)
  source 1..27: mol_type = other RNA
tacgtggacgatacccagttcgtcaga

SEQ ID NO: 62096 - RNA, 39 nt, synthetic construct
  misc_feature 1..39: note = Matrix-remodeling-associated protein 5 (34-46)
  source 1..39: mol_type = other RNA
tacgtgcccagcgaggtccactgcaccttcagatccctg

SEQ ID NO: 62097 - RNA, 27 nt, synthetic construct
  misc_feature 1..27: note = Flotillin-2 (156-164)
  source 1..27: mol_type = other RNA
gacgtgtacgataaggtcgactatctg

SEQ ID NO: 62098 - RNA, 27 nt, synthetic construct
  misc_feature 1..27: note = Gamma-adducin (305-313)
  source 1..27: mol_type = other RNA
gaggccttccactacatctttaacgtg

SEQ ID NO: 62099 - RNA, 27 nt, synthetic construct
  misc_feature 1..27: note = Nucleoporin GLE1 (443-451)
  source 1..27: mol_type = other RNA
gagatcttcgacaagattcacagcctg

SEQ ID NO: 62100 - RNA, 27 nt, synthetic construct
  misc_feature 1..27: note = GRIP1-associated protein 1 (707-715)
  source 1..27: mol_type = other RNA
gaggtggccgaactgttccagagactc

SEQ ID NO: 62101 - RNA, 27 nt, synthetic construct
  misc_feature 1..27: note = HMG domain-containing protein 3 (954-962)
  source 1..27: mol_type = other RNA
gaggtgttcgccctgatccacgaactc

SEQ ID NO: 62102 - RNA, 30 nt, synthetic construct
  misc_feature 1..30: note = Beta-hexosaminidase subunit beta (330-339)
  source 1..30: mol_type = other RNA
gaggtgttccccgaccagtttatccacctg

SEQ ID NO: 62103 - RNA, 27 nt, synthetic construct
  misc_feature 1..27: note = Selenide, water dikinase 2 (336-344)
  source 1..27: mol_type = other RNA
gaggtgagcttcgtcatccacaacctg

SEQ ID NO: 62104 - RNA, 27 nt, synthetic construct
  misc_feature 1..27: note = ATPase family AAA domain-containing protein 1 (15-23)
  source 1..27: mol_type = other RNA
gaggtggtcggcctgatcttcagactc

SEQ ID NO: 62105 - RNA, 27 nt, synthetic construct
  misc_feature 1..27: note = MOB kinase activator 3A (64-72)
  source 1..27: mol_type = other RNA
cacgtggtcgacttctttaacagagtt

SEQ ID NO: 62106 - RNA, 27 nt, synthetic construct
  misc_feature 1..27: note = Transmembraneoprotein NMB (539-547)
  source 1..27: mol_type = other RNA
aagggcctgagcgtgttcctcaacaga

SEQ ID NO: 62107 - RNA, 33 nt, synthetic construct
  misc_feature 1..33: note = Cytochrome b-245 light chain (78-88)
  source 1..33: mol_type = other RNA
aagctgttcggcccctttaccagaaactactat

SEQ ID NO: 62108 - RNA, 27 nt, synthetic construct
  misc_feature 1..27: note = Syntenin-1 (270-278)
  source 1..27: mol_type = other RNA
atgcccgccttcatctttgagcacatt

SEQ ID NO: 62109 - RNA, 30 nt, synthetic construct
  misc_feature 1..30: note = Transcription factor 7-like 2 (366-375)
  source 1..30: mol_type = other RNA
agagaggaacaggccaagtactatgagctg

SEQ ID NO: 62110 - RNA, 27 nt, synthetic construct
  misc_feature 1..27: note = Tumor protein p63-regulated gene 1-like protein (59-67)
  source 1..27: mol_type = other RNA
agagtgaaggagtacttcgtctttagg

SEQ ID NO: 62111 - RNA, 27 nt, synthetic construct
  misc_feature 1..27: note = Clathrin heavy chain 1 (1342-1350)
  source 1..27: mol_type = other RNA
agagtgaacatccccaaggtcctgagg

SEQ ID NO: 62112 - RNA, 30 nt, synthetic construct
  misc_feature 1..30: note = COP9 signalosome complex subunit 6 (311-320)
  source 1..30: mol_type = other RNA
gtgctgtacgacagacagggcatcgggagg

SEQ ID NO: 62113 - RNA, 54 nt, synthetic construct
  misc_feature 1..54: note = GTP-binding nuclear protein Ran (203-220)
  source 1..54: mol_type = other RNA
gccccccctgaggtggtcatggacccagctctggcagcccagtacgaacacgat

SEQ ID NO: 62114 - RNA, 27 nt, synthetic construct
  misc_feature 1..27: note = Ubiquitin carboxyl-terminal hydrolase 48 (534-542)
  source 1..27: mol_type = other RNA
gccgctgacatcttctacagcagatat

SEQ ID NO: 62115 - RNA, 27 nt, synthetic construct
  misc_feature 1..27: note = Transmembrane protein 141 (30-38)
  source 1..27: mol_type = other RNA
gccttcatgaagggcgtgtttaccttc

SEQ ID NO: 62116 - RNA, 30 nt, synthetic construct
  misc_feature 1..30: note = DNA replication licensing factor MCM4 (846-855)
  source 1..30: mol_type = other RNA
gccctggctgacgatgacttcctcaccgtg

SEQ ID NO: 62117 - RNA, 27 nt, synthetic construct
  misc_feature 1..27: note = Protein FAM188B (498-506)
  source 1..27: mol_type = other RNA
gccctggctgacatcgtgtggagagca

SEQ ID NO: 62118 - RNA, 27 nt, synthetic construct
  misc_feature 1..27: note = Protein TANC1 (1389-1397)
  source 1..27: mol_type = other RNA
gccctggctgacctccaggaggcagtg

SEQ ID NO: 62119 - RNA, 33 nt, synthetic construct
  misc_feature 1..33: note = Protein TANC1 (1389-1399)
  source 1..33: mol_type = other RNA
gccctggctgacctccaggaggcagtgaagctt

SEQ ID NO: 62120 - RNA, 27 nt, synthetic construct
  misc_feature 1..27: note = 5-oxoprolinase (523-531)
  source 1..27: mol_type = other RNA
gccctggctgacgtggtccacgaggca

SEQ ID NO: 62121 - RNA, 27 nt, synthetic construct
  misc_feature 1..27: note = Nodal modulator 3 (459-467)
  source 1..27: mol_type = other RNA
gccctggctggcgtgagcttcgagatc

SEQ ID NO: 62122 - RNA, 30 nt, synthetic construct
  misc_feature 1..30: note = Midasin (1405-1414)
  source 1..30: mol_type = other RNA
gccctggctaaccagaagctctacagcgtg

SEQ ID NO: 62123 - RNA, 27 nt, synthetic construct
  misc_feature 1..27: note = WD repeat-containing protein 36 (542-550)
  source 1..27: mol_type = other RNA
gccctggacgatttcagcatctccgtg

SEQ ID NO: 62124 - RNA, 30 nt, synthetic construct; identical to SEQ ID NO: 37897
  misc_feature 1..30: note = EP300-interacting inhibitor of differentiation 1 (85-94)
  source 1..30: mol_type = other RNA

SEQ ID NO: 62125 - RNA, 27 nt, synthetic construct
  misc_feature 1..27: note = Elongation factor 2 (350-358)
  source 1..27: mol_type = other RNA
gccctggacaacttcctcgataagctt

SEQ ID NO: 62126 - RNA, 27 nt, synthetic construct
  misc_feature 1..27: note = Inverted formin-2 (131-139)
  source 1..27: mol_type = other RNA
gccctggacaccagcaacgtgatggtc

SEQ ID NO: 62127 - RNA, 33 nt, synthetic construct
  misc_feature 1..33: note = Keratinocyte-associated protein 2 (108-118)
  source 1..33: mol_type = other RNA
gccctgttcgctagcggcctcatccacagagtg

SEQ ID NO: 62128 - RNA, 36 nt, synthetic construct
  misc_feature 1..36: note = Exportin-2 (684-695)
  source 1..36: mol_type = other RNA
gccctgttcccccacctccttcagcctgtgctgtgg

SEQ ID NO: 62129 - RNA, 24 nt, synthetic construct
  misc_feature 1..24: note = Activating signal cointegrator 1 complex subunit 3 (627-634)
  source 1..24: mol_type = other RNA
gccctgggcaccgtgacaaacgtc

SEQ ID NO: 62130 - RNA, 27 nt, synthetic construct
  misc_feature 1..27: note = Replication factor C subunit 5 (276-284)
  source 1..27: mol_type = other RNA
gccctgcacgacatcctcaccgagatt

SEQ ID NO: 62131 - RNA, 30 nt, synthetic construct
  misc_feature 1..30: note = Tryptophan-tRNA ligase, cytoplasmic (433-442)
  source 1..30: mol_type = other RNA
gccctgatcgaggtgctccagccccttatt

SEQ ID NO: 62132 - RNA, 30 nt, synthetic construct
  misc_feature 1..30: note = Tight junction protein ZO-1 (692-701)
  source 1..30: mol_type = other RNA
gccctgctcgacgtgacccccaacgctgtc

SEQ ID NO: 62133 - RNA, 27 nt, synthetic construct
  misc_feature 1..27: note = Polypeptide N-acetylgalactosaminyltransferase 2 (185-193)
  source 1..27: mol_type = other RNA
gccctgctcggcaagatcgagaaagtg

SEQ ID NO: 62134 - RNA, 27 nt, synthetic construct
  misc_feature 1..27: note = Bifunctional glutamate/proline-tRNA ligase (218-226)
  source 1..27: mol_type = other RNA
gccctgctcaaccagcactaccaagtg

SEQ ID NO: 62135 - RNA, 27 nt, synthetic construct
  misc_feature 1..27: note = LEM domain-containing protein 2 (70-78)
  source 1..27: mol_type = other RNA
gccctgctcaccgctgtgacaaacgtc

SEQ ID NO: 62136 - RNA, 30 nt, synthetic construct
  misc_feature 1..30: note = Nuclear pore complex protein Nup205 (494-503)
  source 1..30: mol_type = other RNA
gccctgctcaccggcatcattagcaaggct

SEQ ID NO: 62137 - RNA, 30 nt, synthetic construct
  misc_feature 1..30: note = LYST-interacting protein LIP6 (84-93)
  source 1..30: mol_type = other RNA
gccctgatggacggcaaggtgtacgatatc

SEQ ID NO: 62138 - RNA, 33 nt, synthetic construct
  misc_feature 1..33: note = Leishmanolysin-like peptidase (353-363)
  source 1..33: mol_type = other RNA
gccctgatggaggacaccggcagacagatgctc

SEQ ID NO: 62139 - RNA, 27 nt, synthetic construct
  misc_feature 1..27: note = Kinesin-like protein KIF7 (91-99)
  source 1..27: mol_type = other RNA
gccctgaacgaggacatcgtgagagtc

SEQ ID NO: 62140 - RNA, 27 nt, synthetic construct
  misc_feature 1..27: note = 40S ribosomal protein S12 (17-25)
  source 1..27: mol_type = other RNA
gccctgcaggaggtgctcaagaccgct

SEQ ID NO: 62141 - RNA, 27 nt, synthetic construct
  misc_feature 1..27: note = Anthrax toxin receptor 1 (207-215)
  source 1..27: mol_type = other RNA
gccctgcagggcatcattcacagcata

SEQ ID NO: 62142 - RNA, 30 nt, synthetic construct; identical to SEQ ID NO: 37915
  misc_feature 1..30: note = Probable ATP-dependent RNA helicase DDX5 (128-137)
  source 1..30: mol_type = other RNA

SEQ ID NO: 62143 - RNA, 27 nt, synthetic construct
  misc_feature 1..27: note = Actin-related protein 2/3 complex subunit 1A (24-32)
  source 1..27: mol_type = other RNA
gccctgagccccaacaatcacgaggtg

SEQ ID NO: 62144 - RNA, 27 nt, synthetic construct
  misc_feature 1..27: note = DNA-dependent protein kinase catalytic subunit (3134-3142)
  source 1..27: mol_type = other RNA
gccctgaccgagatccaggaattcatt

SEQ ID NO: 62145 - RNA, 27 nt, synthetic construct
  misc_feature 1..27: note = Annexin A1 (99-107)
  source 1..27: mol_type = other RNA
gccctgaccggccacctcgaggaagtg

SEQ ID NO: 62146 - RNA, 30 nt, synthetic construct
  misc_feature 1..30: note = Cyclin-dependent kinase 2 (95-104)
  source 1..30: mol_type = other RNA
gccctgaccggcatccccctccctcttatt

SEQ ID NO: 62147 - RNA, 30 nt, synthetic construct
  misc_feature 1..30: note = Staphylococcal nuclease domain-containing protein 1 (428-437)
  source 1..30: mol_type = other RNA
gccctggtgagcaagggcctcgctaccgtc

SEQ ID NO: 62148 - RNA, 27 nt, synthetic construct
  misc_feature 1..27: note = Nicotinate-nucleotide pyrophosphorylase (carboxylating) (45-53)
  source 1..27: mol_type = other RNA
gccctgtgggctaagagccccggcgtg

SEQ ID NO: 62149 - RNA, 33 nt, synthetic construct
  misc_feature 1..33: note = Guanine nucleotide-binding protein G(I)/G(S)/G(T) subunit beta-1 (74-84)
  source 1..33: mol_type = other RNA
gccctgtgggacatcgagaccggccagcaaaca

SEQ ID NO: 62150 - RNA, 27 nt, synthetic construct
  misc_feature 1..27: note = Centrosome-associated protein CEP250 (656-664)
  source 1..27: mol_type = other RNA
gccctgtgggagaagaacacccacctc

SEQ ID NO: 62151 - RNA, 36 nt, synthetic construct
  misc_feature 1..36: note = Nuclear pore complex protein Nup160 (372-383)
  source 1..36: mol_type = other RNA
gccctgtggcacgacgctgagaaccagaccgtggtc

SEQ ID NO: 62152 - RNA, 36 nt, synthetic construct
  misc_feature 1..36: note = Tyrosine-protein kinase JAK1 (79-90)
  source 1..36: mol_type = other RNA
gccctgtacgacgagaacaccaagctctggtatgct

SEQ ID NO: 62153 - RNA, 33 nt, synthetic construct
  misc_feature 1..33: note = Caskin-2 (147-157)
  source 1..33: mol_type = other RNA
gccctgtacggcaagaccgaggtggtcagactc

SEQ ID NO: 62154 - RNA, 27 nt, synthetic construct
  misc_feature 1..27: note = Probable dolichyl pyrophosphate Glc1Man9GlcNAc2 alpha-1,3-glucosyltransferase (287-295)
  source 1..27: mol_type = other RNA
gccctgtacaacgctctcgacaaggtg

SEQ ID NO: 62155 - RNA, 27 nt, synthetic construct
  misc_feature 1..27: note = Nuclear pore complex protein Nup155 (1038-1046)
  source 1..27: mol_type = other RNA
gccctgtacaactggctcatccaggtg

SEQ ID NO: 62156 - RNA, 39 nt, synthetic construct
  misc_feature 1..39: note = Lysine-tRNA ligase (583-595)
  source 1..39: mol_type = other RNA
gccatgttcctgaccgacagcaacaatatcaaggaggtg

SEQ ID NO: 62157 - RNA, 27 nt, synthetic construct
  misc_feature 1..27: note = Protein GPR107 (189-197)
  source 1..27: mol_type = other RNA
gccatgggcgagaagagcttctccgtg

SEQ ID NO: 62158 - RNA, 27 nt, synthetic construct
  misc_feature 1..27: note = Probable cation-transporting ATPase 13A3 (829-837)
  source 1..27: mol_type = other RNA
gccatgaacggcaagagcttctccgtg

SEQ ID NO: 62159 - RNA, 27 nt, synthetic construct
  misc_feature 1..27: note = Protein Wnt-5a (20-28)
  source 1..27: mol_type = other RNA
gccatgagctccaagttctttctggtg

SEQ ID NO: 62160 - RNA, 24 nt, synthetic construct
  misc_feature 1..24: note = Syndecan-4 (2-9)
  source 1..24: mol_type = other RNA
gcccccgctagactgttcgcactc

SEQ ID NO: 62161 - RNA, 27 nt, synthetic construct
  misc_feature 1..27: note = Dehydrogenase/reductase SDR family member 4 (110-118)
  source 1..27: mol_type = other RNA
gcccccggcctgatcaagaccagcttc

SEQ ID NO: 62162 - RNA, 27 nt, synthetic construct
  misc_feature 1..27: note = Filamin-A (1687-1695)
  source 1..27: mol_type = other RNA
gccccccagcctggcaagtacgtgatc

SEQ ID NO: 62163 - RNA, 27 nt, synthetic construct
  misc_feature 1..27: note = U1 small nuclear ribonucleoprotein 70 kDa (14-22)
  source 1..27: mol_type = other RNA
gcccccagagaccctatcccatacctg

SEQ ID NO: 62164 - RNA, 27 nt, synthetic construct
  misc_feature 1..27: note = Vacuolar protein sorting-associated protein 16 homolog (41-49)
  source 1..27: mol_type = other RNA
gccccctacggcgggcctatcgctctg

SEQ ID NO: 62165 - RNA, 27 nt, synthetic construct
  misc_feature 1..27: note = Fatty acid desaturase 1 (12-20)
  source 1..27: mol_type = other RNA
gcccagggccccacccctagatacttc

SEQ ID NO: 62166 - RNA, 30 nt, synthetic construct
  misc_feature 1..30: note = Elongation factor 1-gamma (19-28)
  source 1..30: mol_type = other RNA
gcccagtacagcggcgctcaagtgagagtc

SEQ ID NO: 62167 - RNA, 30 nt, synthetic construct
  misc_feature 1..30: note = Serine/threonine-protein kinase SMG1 (35-44)
  source 1..30: mol_type = other RNA
gccagcgctgaccccgataacctgaagtac

SEQ ID NO: 62168 - RNA, 30 nt, synthetic construct
  misc_feature 1..30: note = RalBP1-associated Eps domain-containing protein 1 (609-618)
  source 1..30: mol_type = other RNA
gccagcgaccccgcttcctctctgagagtg

SEQ ID NO: 62169 - RNA, 30 nt, synthetic construct
  misc_feature 1..30: note = Tryptophan-tRNA ligase, cytoplasmic (352-361)
  source 1..30: mol_type = other RNA
gccagcgaccccaactcctctatcttcctg

SEQ ID NO: 62170 - RNA, 39 nt, synthetic construct
  misc_feature 1..39: note = Extended synaptotagmin-2 (868-880)
  source 1..39: mol_type = other RNA
gccagcgaggaactggctaagggctggacccagtggtac

SEQ ID NO: 62171 - RNA, 30 nt, synthetic construct
  misc_feature 1..30: note = Alpha-enolase (78-87)
  source 1..30: mol_type = other RNA
gccagcgagttctttagatccggcaagtac

SEQ ID NO: 62172 - RNA, 36 nt, synthetic construct
  misc_feature 1..36: note = Unconventional myosin-Ib (243-254)
  source 1..36: mol_type = other RNA
gccagcgagctgttcaaggacaaaaaggctctctac

SEQ ID NO: 62173 - RNA, 36 nt, synthetic construct
  misc_feature 1..36: note = Protein-glutamate O-methyltransferase (421-432)
  source 1..36: mol_type = other RNA
gccagcgagccctcctggtggaccacaggcaagtac

SEQ ID NO: 62174 - RNA, 24 nt, synthetic construct
  misc_feature 1..24: note = Keratinocyte-associated protein 2 (111-118)
  source 1..24: mol_type = other RNA
gccagcggcctgatccacagagtg

SEQ ID NO: 62175 - RNA, 30 nt, synthetic construct
  misc_feature 1..30: note = Cadherin-5 (339-348)
  source 1..30: mol_type = other RNA
gccaccgaccccacaatcgatctgagatac

SEQ ID NO: 62176 - RNA, 30 nt, synthetic construct
  misc_feature 1..30: note = Mitogen-activated protein kinase kinase kinase MLT (111-120)
  source 1..30: mol_type = other RNA
gccaccgacgtggctaagggcatgcactac

SEQ ID NO: 62177 - RNA, 33 nt, synthetic construct
  misc_feature 1..33: note = Mitogen-activated protein kinase kinase kinase MLT (111-121)
  source 1..33: mol_type = other RNA
gccaccgacgtggctaagggcatgcactacctg

SEQ ID NO: 62178 - RNA, 30 nt, synthetic construct
  misc_feature 1..30: note = Coatomer subunit beta' (480-489)
  source 1..30: mol_type = other RNA
gccaccgaggaaagcttctttatcctgaag

SEQ ID NO: 62179 - RNA, 36 nt, synthetic construct
  misc_feature 1..36: note = Rho GTPase-activating protein 5 (908-919)
  source 1..36: mol_type = other RNA
gccaccgagatcacagctaagttcactgcactgtac

SEQ ID NO: 62180 - RNA, 27 nt, synthetic construct
  misc_feature 1..27: note = Transcription initiation protein SPT3 homolog (109-117)
  source 1..27: mol_type = other RNA
gccaccgagctgcagagcatgatgtac

SEQ ID NO: 62181 - RNA, 27 nt, synthetic construct
  misc_feature 1..27: note = Clathrin heavy chain 1 (1626-1634)
  source 1..27: mol_type = other RNA
gccaccgagacacagcccatcgtgtac

SEQ ID NO: 62182 - RNA, 27 nt, synthetic construct
  misc_feature 1..27: note = HEAT repeat-containing protein 5A (1311-1319)
  source 1..27: mol_type = other RNA
gccgtgaagctgcccggcgggcagctc

SEQ ID NO: 62183 - RNA, 33 nt, synthetic construct
  misc_feature 1..33: note = L-lactate dehydrogenase B chain (200-210)
  source 1..33: mol_type = other RNA
gccgtgtggagcggcgtcaacgttgctggggtg

SEQ ID NO: 62184 - RNA, 30 nt, synthetic construct
  misc_feature 1..30: note = Myotrophin (75-84)
  source 1..30: mol_type = other RNA
gccgtgtacgagggccacgtcagctgcgtt

SEQ ID NO: 62185 - RNA, 30 nt, synthetic construct
  misc_feature 1..30: note = Ubiquitin carboxyl-terminal hydrolase 11 (318-327)
  source 1..30: mol_type = other RNA
gcctacgctgacctggtgaagcaggcatgg

SEQ ID NO: 62186 - RNA, 27 nt, synthetic construct
  misc_feature 1..27: note = Phosphoinositide 3-kinase regulatory subunit 4 (481-489)
  source 1..27: mol_type = other RNA
gcctacgctgagaacatcgcactgctc

SEQ ID NO: 62187 - RNA, 27 nt, synthetic construct
  misc_feature 1..27: note = Solute carrier family 26 member 6 (67-75)
  source 1..27: mol_type = other RNA
gcctacgctctgctccttcagcacctg

SEQ ID NO: 62188 - RNA, 27 nt, synthetic construct
  misc_feature 1..27: note = CD109 antigen (1146-1154)
  source 1..27: mol_type = other RNA
gcctacgctctgctcagccacttcctt

SEQ ID NO: 62189 - RNA, 30 nt, synthetic construct
  misc_feature 1..30: note = Stress-induced-phosphoprotein 1 (349-358)
  source 1..30: mol_type = other RNA
gcctacgctagaatcggcaacagctatttc

SEQ ID NO: 62190 - RNA, 27 nt, synthetic construct
  misc_feature 1..27: note = Nuclear receptor coactivator 7 (730-738)
  source 1..27: mol_type = other RNA
gcctacgctacccaccccttcaagttt

SEQ ID NO: 62191 - RNA, 27 nt, synthetic construct
  misc_feature 1..27: note = WD repeat-containing protein 36 (426-434)
  source 1..27: mol_type = other RNA
gcctacttcctgaagcccaaagagctc

SEQ ID NO: 62192 - RNA, 27 nt, synthetic construct
  misc_feature 1..27: note = Probable ATP-dependent RNA helicase DDX60 (93-101)
  source 1..27: mol_type = other RNA
gcctacttcaactttcccgagctgctc

SEQ ID NO: 62193 - RNA, 27 nt, synthetic construct
  misc_feature 1..27: note = Liprin-alpha-4 (952-960)
  source 1..27: mol_type = other RNA
gcctacggcgacatgaaccacgagtgg

SEQ ID NO: 62194 - RNA, 30 nt, synthetic construct
  misc_feature 1..30: note = S-adenosylmethionine synthase isoform type-2 (376-385)
  source 1..30: mol_type = other RNA
gcctacggccacttcgggagagacagcttt

SEQ ID NO: 62195 - RNA, 27 nt, synthetic construct
  misc_feature 1..27: note = Mesoderm induction early response protein 1 (319-327)
  source 1..27: mol_type = other RNA
gcctacggcaaggacttccacctgatc

SEQ ID NO: 62196 - RNA, 27 nt, synthetic construct
  misc_feature 1..27: note = WD repeat-containing protein 36 (84-92)
  source 1..27: mol_type = other RNA
gcctacggcaacgtgttcagcgctttt

SEQ ID NO: 62197 - RNA, 27 nt, synthetic construct
  misc_feature 1..27: note = Kynurenine-oxoglutarate transaminase 3 (134-142)
  source 1..27: mol_type = other RNA
gcctacggcagcctgttcaacaccatc

SEQ ID NO: 62198 - RNA, 27 nt, synthetic construct
  misc_feature 1..27: note = Cleavage stimulation factor subunit 3 (440-448)
  source 1..27: mol_type = other RNA
gcctacatcgactatctgagccacctc

SEQ ID NO: 62199 - RNA, 27 nt, synthetic construct
  misc_feature 1..27: note = Leucine-zipper-like transcriptional regulator 1 (75-83)
  source 1..27: mol_type = other RNA
gcctacaaggacgctatctatgtgttc

SEQ ID NO: 62200 - RNA, 27 nt, synthetic construct
  misc_feature 1..27: note = Small subunit processome component 20 homolog (1114-1122)
  source 1..27: mol_type = other RNA
gcctacctgcccaagatcctccagatt

SEQ ID NO: 62201 - RNA, 27 nt, synthetic construct
  misc_feature 1..27: note = Ubiquitin-like-conjugating enzyme ATG3 (65-73)
  source 1..27: mol_type = other RNA
gcctacctgcccaccggcaagcagttc

SEQ ID NO: 62202 - RNA, 33 nt, synthetic construct
  misc_feature 1..33: note = Elongation factor 2 (286-296)
  source 1..33: mol_type = other RNA
gcctacctgcccgtgaacgagagcttcggcttt

SEQ ID NO: 62203 - RNA, 30 nt, synthetic construct
  misc_feature 1..30: note = Protein shisa-5 (128-137)
  source 1..30: mol_type = other RNA
gcctacatggacgctcccaaggcagccctg

SEQ ID NO: 62204 - RNA, 30 nt, synthetic construct
  misc_feature 1..30: note = La-related protein 4B (250-259)
  source 1..30: mol_type = other RNA
gcctacaacgacaattggttcatcaccttt

SEQ ID NO: 62205 - RNA, 30 nt, synthetic construct
  misc_feature 1..30: note = Phosphatidylinositol-binding clathrin assembly protein (210-219)
  source 1..30: mol_type = other RNA
gcctacaacgagggcatcattaatctgctc

SEQ ID NO: 62206 - RNA, 30 nt, synthetic construct
  misc_feature 1..30: note = Beta-hexosaminidase subunit alpha (194-203)
  source 1..30: mol_type = other RNA
gcctacaacaagctgaatgtgttccactgg

SEQ ID NO: 62207 - RNA, 27 nt, synthetic construct
  misc_feature 1..27: note = Cirhin (34-42)
  source 1..27: mol_type = other RNA
gcctacaacaatcagagcaacagactg

SEQ ID NO: 62208 - RNA, 27 nt, synthetic construct
  misc_feature 1..27: note = Cell adhesion molecule-related/down-regulated by oncogenes (193-201)
  source 1..27: mol_type = other RNA
gcctacaaccccgtgacccaccagctg

SEQ ID NO: 62209 - RNA, 30 nt, synthetic construct
  misc_feature 1..30: note = Ubiquitin-associated protein 2-like (267-276)
  source 1..30: mol_type = other RNA
gcctacccccctgctccattcatgcacatc

SEQ ID NO: 62210 - RNA, 33 nt, synthetic construct
  misc_feature 1..33: note = Cathepsin D (202-212)
  source 1..33: mol_type = other RNA
gcctaccccagaatcagcgtgaacaatgtcctg

SEQ ID NO: 62211 - RNA, 27 nt, synthetic construct
  misc_feature 1..27: note = Ras GTPase-activating-like protein IQGAP1 (794-802)
  source 1..27: mol_type = other RNA
gcctaccaggacagactggcttatctc

SEQ ID NO: 62212 - RNA, 27 nt, synthetic construct
  misc_feature 1..27: note = Ras GTPase-activating-like protein IQGAP3 (955-963)
  source 1..27: mol_type = other RNA
gcctaccagcacctgttctatctcctt

SEQ ID NO: 62213 - RNA, 27 nt, synthetic construct
  misc_feature 1..27: note = 40S ribosomal protein S11 (9-17)
  source 1..27: mol_type = other RNA
gcctaccagaagcaacccaccatcttc

SEQ ID NO: 62214 - RNA, 27 nt, synthetic construct
  misc_feature 1..27: note = UDP-glucose:glycoprotein glucosyltransferase 2 (114-122)
  source 1..27: mol_type = other RNA
gcctacagccccgctatccagatgttc

SEQ ID NO: 62215 - RNA, 27 nt, synthetic construct
  misc_feature 1..27: note = Breast cancer anti-estrogen resistance protein 3 (211-219)
  source 1..27: mol_type = other RNA
gcctacagcagagtgcagtatcaattc

SEQ ID NO: 62216 - RNA, 33 nt, synthetic construct
  misc_feature 1..33: note = Eukaryotic translation initiation factor 4 gamma 1 (168-178)
  source 1..33: mol_type = other RNA
gcctactatcccgctcagggcgtgcaacagttc

SEQ ID NO: 62217 - RNA, 27 nt, synthetic construct
  misc_feature 1..27: note = Heterogeneous nuclear ribonucleoprotein L (387-395)
  source 1..27: mol_type = other RNA
tgcctgtacggcaacgtggagaaggtc

SEQ ID NO: 62218 - RNA, 27 nt, synthetic construct
  misc_feature 1..27: note = Structural maintenance of chromosomes protein 4 (1136-1144)
  source 1..27: mol_type = other RNA
gacgccgctctggatttcaagaacgtg

SEQ ID NO: 62219 - RNA, 27 nt, synthetic construct
  misc_feature 1..27: note = Phosphoacetylglucosamine mutase (288-296)
  source 1..27: mol_type = other RNA
gacgccgatggccacttccatctgatc

SEQ ID NO: 62220 - RNA, 27 nt, synthetic construct
  misc_feature 1..27: note = Nuclear cap-binding protein subunit 2 (93-101)
  source 1..27: mol_type = other RNA
gacgccgagaacgctatgagatacatc

SEQ ID NO: 62221 - RNA, 30 nt, synthetic construct
  misc_feature 1..30: note = Ras-related protein Rab-14 (163-172)
  source 1..30: mol_type = other RNA
gacgccttcctggaggctgcaaagaaaatc

SEQ ID NO: 62222 - RNA, 27 nt, synthetic construct
  misc_feature 1..27: note = Rho-associated protein kinase 1 (187-195)
  source 1..27: mol_type = other RNA
gacgccatccacagcatgggcttcatt

SEQ ID NO: 62223 - RNA, 27 nt, synthetic construct
  misc_feature 1..27: note = Elongation factor 2 (348-356)
  source 1..27: mol_type = other RNA
gacgccctgctccagatgatcaccatt

SEQ ID NO: 62224 - RNA, 27 nt, synthetic construct
  misc_feature 1..27: note = SRR1-like protein (237-245)
  source 1..27: mol_type = other RNA
gacgccctgagcaagatggtgatcatt

SEQ ID NO: 62225 - RNA, 27 nt, synthetic construct
  misc_feature 1..27: note = Carnitine O-palmitoyltransferase 1, liver isoform (477-485)
  source 1..27: mol_type = other RNA
gacgcccccatcgtggctcacctgtgg

SEQ ID NO: 62226 - RNA, 24 nt, synthetic construct
  misc_feature 1..24: note = ATP-binding cassette sub-family E member 1 (326-333)
  source 1..24: mol_type = other RNA
gacgccagcctggtgttcaaggtc

SEQ ID NO: 62227 - RNA, 30 nt, synthetic construct
  misc_feature 1..30: note = Glutamate receptor ionotropic, kainate 2 (325-334)
  source 1..30: mol_type = other RNA
gacgccgtgcacgtcgttagcgtggctgta

SEQ ID NO: 62228 - RNA, 27 nt, synthetic construct
  misc_feature 1..27: note = General transcription factor II-I repeat domain-containing protein 2B (818-826)
  source 1..27: mol_type = other RNA
gacggcctgaactacatccccaagatt

SEQ ID NO: 62229 - RNA, 30 nt, synthetic construct
  misc_feature 1..30: note = HLA class I histocompatibility antigen, A-1 alpha chain (89-98)
  source 1..30: mol_type = other RNA
gacggcagccacaccatccagattatgtac

SEQ ID NO: 62230 - RNA, 27 nt, synthetic construct
  misc_feature 1..27: note = Serine/threonine-protein kinase tousled-like 2 (313-321)
  source 1..27: mol_type = other RNA
gacggctacgccttccagaacctgatc

SEQ ID NO: 62231 - RNA, 27 nt, synthetic construct
  misc_feature 1..27: note = Heterogeneous nuclear ribonucleoprotein L (411-419)
  source 1..27: mol_type = other RNA
gacggctacgccgtggatagagctatc

SEQ ID NO: 62232 - RNA, 27 nt, synthetic construct
  misc_feature 1..27: note = T-complex protein 1 subunit epsilon (135-143)
  source 1..27: mol_type = other RNA
gacggctacgagcaggccgctagagtg

SEQ ID NO: 62233 - RNA, 27 nt, synthetic construct
  misc_feature 1..27: note = Ribosomal protein S6 kinase alpha-1 (416-424)
  source 1..27: mol_type = other RNA
gacggctacgtggtcaaggagaccatc

SEQ ID NO: 62234 - RNA, 24 nt, synthetic construct
  misc_feature 1..24: note = DNA-directed RNA polymerase III subunit RPC3 (186-193)
  source 1..24: mol_type = other RNA
gacatgtacctggtgcccaagctc

SEQ ID NO: 62235 - RNA, 27 nt, synthetic construct
  misc_feature 1..27: note = Cyclic AMP-responsive element-binding protein 3-like protein 2 (54-62)
  source 1..27: mol_type = other RNA
gaccccttcctgagcgagaagtccgtg

SEQ ID NO: 62236 - RNA, 33 nt, synthetic construct
  misc_feature 1..33: note = Tubulin beta chain (39-49)
  source 1..33: mol_type = other RNA
gacagcgatctgcagctcgacagaatctccgtg

SEQ ID NO: 62237 - RNA, 33 nt, synthetic construct
  misc_feature 1..33: note = Zinc finger MYND domain-containing protein 11 (140-150)
  source 1..33: mol_type = other RNA
gacagcgagcaggccgatatcgctagaatgctg

SEQ ID NO: 62238 - RNA, 24 nt, synthetic construct
  misc_feature 1..24: note = Negative elongation factor C/D (323-330)
  source 1..24: mol_type = other RNA
gacaccgatatcagcctgattaga

SEQ ID NO: 62239 - RNA, 27 nt, synthetic construct
  misc_feature 1..27: note = Kinectin (454-462)
  source 1..27: mol_type = other RNA
gactacgccagactggtgaacgagctc

SEQ ID NO: 62240 - RNA, 27 nt, synthetic construct
  misc_feature 1..27: note = Enhancer of polycomb homolog 1 (423-431)
  source 1..27: mol_type = other RNA
gactacgatagcgtgttccaccatctg

SEQ ID NO: 62241 - RNA, 27 nt, synthetic construct
  misc_feature 1..27: note = Histone deacetylase 1 (71-79)
  source 1..27: mol_type = other RNA
gactacatcaagttcctgagaagcatt

SEQ ID NO: 62242 - RNA, 27 nt, synthetic construct
  misc_feature 1..27: note = Protein KIAA0100 (885-893)
  source 1..27: mol_type = other RNA
gactaccccagatatctgttcgagatc

SEQ ID NO: 62243 - RNA, 27 nt, synthetic construct
  misc_feature 1..27: note = T-complex protein 1 subunit beta (509-517)
  source 1..27: mol_type = other RNA
gaggccgctgaagtgatcctgagagtc

SEQ ID NO: 62244 - RNA, 27 nt, synthetic construct
  misc_feature 1..27: note = DNA-dependent protein kinase catalytic subunit (1728-1736)
  source 1..27: mol_type = other RNA
gagttcccccctggcaccccaagattt

SEQ ID NO: 62245 - RNA, 33 nt, synthetic construct
  misc_feature 1..33: note = Nuclear protein 1 (26-36)
  source 1..33: mol_type = other RNA
gagagcgacctgtactccctcgcccactcttat

SEQ ID NO: 62246 - RNA, 30 nt, synthetic construct
  misc_feature 1..30: note = General transcription factor II-I (242-251)
  source 1..30: mol_type = other RNA
gagagcgaagaccccgattactatcagtac

SEQ ID NO: 62247 - RNA, 39 nt, synthetic construct
  misc_feature 1..39: note = E3 ubiquitin-protein ligase HUWE1 (969-981)
  source 1..39: mol_type = other RNA
gagagcgaagactaccacttctatcagggcctggtgtac

SEQ ID NO: 62248 - RNA, 27 nt, synthetic construct
  misc_feature 1..27: note = ATP-dependent RNA helicase DDX24 (571-579)
  source 1..27: mol_type = other RNA
gagaccgacgaaaaggatttctacctg

SEQ ID NO: 62249 - RNA, 33 nt, synthetic construct
  misc_feature 1..33: note = Serrate RNA effector molecule homolog (86-96)
  source 1..33: mol_type = other RNA
gagaccgaagccgtgaagagatacaacgactat

SEQ ID NO: 62250 - RNA, 30 nt, synthetic construct
  misc_feature 1..30: note = Probable ATP-dependent RNA helicase DDX56 (239-248)
  source 1..30: mol_type = other RNA
gagaccgaagaggacaagttcctgctcctt

SEQ ID NO: 62251 - RNA, 30 nt, synthetic construct
  misc_feature 1..30: note = Complement C4-A (1516-1525)
  source 1..30: mol_type = other RNA
gagaccgaaggcccccacgtgctgctctac

SEQ ID NO: 62252 - RNA, 27 nt, synthetic construct
  misc_feature 1..27: note = Copine-1 (269-277)
  source 1..27: mol_type = other RNA
gagaccgaatacagcttcctggactat

SEQ ID NO: 62253 - RNA, 27 nt, synthetic construct
  misc_feature 1..27: note = Melanoma-associated antigen 11 (252-260)
  source 1..27: mol_type = other RNA
gaggtggaccccaccagccactcctac

SEQ ID NO: 62254 - RNA, 27 nt, synthetic construct
  misc_feature 1..27: note = General transcription factor 3C polypeptide 2 (329-337)
  source 1..27: mol_type = other RNA
gagtggatccccctggcctggaagtgg

SEQ ID NO: 62255 - RNA, 33 nt, synthetic construct
  misc_feature 1..33: note = Influenza virus NS1A-binding protein (632-642)
  source 1..33: mol_type = other RNA
gagtggagcccctacaccaagatcttccagttt

SEQ ID NO: 62256 - RNA, 27 nt, synthetic construct
  misc_feature 1..27: note = Zinc finger protein 318 (408-416)
  source 1..27: mol_type = other RNA
gagtacgccaagatccacgacctgctc

SEQ ID NO: 62257 - RNA, 27 nt, synthetic construct
  misc_feature 1..27: note = CLIP-associating protein 1 (358-366)
  source 1..27: mol_type = other RNA
gagtacgacaacttctttcagcacctg

SEQ ID NO: 62258 - RNA, 27 nt, synthetic construct
  misc_feature 1..27: note = Pericentrin (3305-3313)
  source 1..27: mol_type = other RNA
gagtacatccaccatctggaagtgatt

SEQ ID NO: 62259 - RNA, 27 nt, synthetic construct
  misc_feature 1..27: note = Transcriptional regulator homolog RPD3 (72-80)
  source 1..27: mol_type = other RNA
gagtacatcaagttcctgagaagcatt

SEQ ID NO: 62260 - RNA, 30 nt, synthetic construct
  misc_feature 1..30: note = Rab GTPase-activating protein 1 (632-641)
  source 1..30: mol_type = other RNA
gagtacatccccgacctgtataaccacttc

SEQ ID NO: 62261 - RNA, 27 nt, synthetic construct
  misc_feature 1..27: note = Gem-associated protein 4 (892-900)
  source 1..27: mol_type = other RNA
gagtacatccagttcgtgcccctgctc

SEQ ID NO: 62262 - RNA, 27 nt, synthetic construct
  misc_feature 1..27: note = Inhibitor of growth protein 5 (48-56)
  source 1..27: mol_type = other RNA
gagtacatcagcaccgtgaagacactg

SEQ ID NO: 62263 - RNA, 27 nt, synthetic construct
  misc_feature 1..27: note = Inositol polyphosphate multikinase (290-298)
  source 1..27: mol_type = other RNA
gagtacaacaataacttccacgtgctg

SEQ ID NO: 62264 - RNA, 27 nt, synthetic construct
  misc_feature 1..27: note = Sorting nexin-18 (463-471)
  source 1..27: mol_type = other RNA
gagtaccagaaggtgggccaaagcttc

SEQ ID NO: 62265 - RNA, 27 nt, synthetic construct
  misc_feature 1..27: note = Poly (ADP-ribose) polymerase 12 (509-517)
  source 1..27: mol_type = other RNA
gagtaccagaaggtgtggaacctgttc

SEQ ID NO: 62266 - RNA, 27 nt, synthetic construct
  misc_feature 1..27: note = Poly (ADP-ribose) polymerase 4 (584-592)
  source 1..27: mol_type = other RNA
gagtacagacccgaattcagcaacttt

SEQ ID NO: 62267 - RNA, 27 nt, synthetic construct
  misc_feature 1..27: note = Ubiquitin-conjugating enzyme E2 K (161-169)
  source 1..27: mol_type = other RNA
gagtacaccaagaaaatcgaaaacctg

SEQ ID NO: 62268 - RNA, 27 nt, synthetic construct
  misc_feature 1..27: note = Leucine-rich repeats and immunoglobulin-like domains protein 2 (560-568)
  source 1..27: mol_type = other RNA
gagtacaccagcatcctgcacctcttc

SEQ ID NO: 62269 - RNA, 30 nt, synthetic construct
  misc_feature 1..30: note = HLA class I histocompatibility antigen, Cw-7 alpha chain (140-149)
  source 1..30: mol_type = other RNA
ttcgcctacgacggcaaggattatatcgct

SEQ ID NO: 62270 - RNA, 24 nt, synthetic construct
  misc_feature 1..24: note = 60S ribosomal protein L3 (362-369)
  source 1..24: mol_type = other RNA
ttcatcgacaccacaagcaagttt

SEQ ID NO: 62271 - RNA, 24 nt, synthetic construct
  misc_feature 1..24: note = Cysteine-rich protein 2-binding protein (155-162)
  source 1..24: mol_type = other RNA
ttcatcgagaagcactggaccttt

SEQ ID NO: 62272 - RNA, 27 nt, synthetic construct
  misc_feature 1..27: note = DNA replication licensing factor MCM5 (427-435)
  source 1..27: mol_type = other RNA
ttcatcatggagggcggggccatggtg

SEQ ID NO: 62273 - RNA, 27 nt, synthetic construct
  misc_feature 1..27: note = 60S acidic ribosomal protein P0 (108-116)
  source 1..27: mol_type = other RNA
ttcctggccgaccccagcgcttttgtg

SEQ ID NO: 62274 - RNA, 27 nt, synthetic construct
  misc_feature 1..27: note = Trifunctional enzyme subunit beta, mitochondrial (184-192)
  source 1..27: mol_type = other RNA
ttcctggcccccgagctccctgctgtg

SEQ ID NO: 62275 - RNA, 27 nt, synthetic construct
  misc_feature 1..27: note = Membrane-bound transcription factor site-2 protease (251-259)
  source 1..27: mol_type = other RNA
ttcctggacgccaccctcacaagcgtg

SEQ ID NO: 62276 - RNA, 30 nt, synthetic construct
  misc_feature 1..30: note = Glucosylceramidase (172-181)
  source 1..30: mol_type = other RNA
ttcctggacgcctacgctgagcacaagctc

SEQ ID NO: 62277 - RNA, 27 nt, synthetic construct
  misc_feature 1..27: note = Neutral alpha-glucosidase AB (604-612)
  source 1..27: mol_type = other RNA
ttcctggacgatggccacacctttaac

SEQ ID NO: 62278 - RNA, 30 nt, synthetic construct
  misc_feature 1..30: note = Cytoplasmic dynein 2 heavy chain 1 (42-51)
  source 1..30: mol_type = other RNA
ttcctggacgatggcaaccagatgctcctt

SEQ ID NO: 62279 - RNA, 27 nt, synthetic construct
  misc_feature 1..27: note = Thimet oligopeptidase (294-302)
  source 1..27: mol_type = other RNA
ttcctggacgagctcgcccagaagctt

SEQ ID NO: 62280 - RNA, 27 nt, synthetic construct
  misc_feature 1..27: note = Regulatory-associated protein of mTOR (240-248)
  source 1..27: mol_type = other RNA
ttcctggacctcggcccctgggccgtg

SEQ ID NO: 62281 - RNA, 27 nt, synthetic construct
  misc_feature 1..27: note = Protein FAM83H (343-351)
  source 1..27: mol_type = other RNA
ttcctggaccccgatagacactttctc

SEQ ID NO: 62282 - RNA, 30 nt, synthetic construct
  misc_feature 1..30: note = CAD protein (150-159)
  source 1..30: mol_type = other RNA
ttcctggaccccaacgccagacctctcgtg

SEQ ID NO: 62283 - RNA, 27 nt, synthetic construct
  misc_feature 1..27: note = DDB1- and CUL4-associated factor 12 (303-311)
  source 1..27: mol_type = other RNA
ttcctggaccccagacagcctagctac

SEQ ID NO: 62284 - RNA, 27 nt, synthetic construct
  misc_feature 1..27: note = Desmoplakin (1057-1065)
  source 1..27: mol_type = other RNA
ttcctggaccagaacctccaaaagtac

SEQ ID NO: 62285 - RNA, 30 nt, synthetic construct
  misc_feature 1..30: note = Basic leucine zipper and W2 domain-containing protein 2 (51-60)
  source 1..30: mol_type = other RNA
ttcctggacagcaccggctccagactcgat

SEQ ID NO: 62286 - RNA, 27 nt, synthetic construct
  misc_feature 1..27: note = Exportin-1 (1034-1042)
  source 1..27: mol_type = other RNA
ttcctggaggaaagagagatcgccctc

SEQ ID NO: 62287 - RNA, 30 nt, synthetic construct
  misc_feature 1..30: note = Creatine kinase M-type (192-201)
  source 1..30: mol_type = other RNA
ttcctgtttgacaagcccgtgagccctctc

SEQ ID NO: 62288 - RNA, 27 nt, synthetic construct
  misc_feature 1..27: note = Ras-related GTP-binding protein C (226-234)
  source 1..27: mol_type = other RNA
ttcctgtttgacgtggtcagcaagatc

SEQ ID NO: 62289 - RNA, 33 nt, synthetic construct
  misc_feature 1..33: note = Nestin (43-53)
  source 1..33: mol_type = other RNA
ttcctgtttcccggcaccgagaaccaggaactc

SEQ ID NO: 62290 - RNA, 33 nt, synthetic construct
  misc_feature 1..33: note = Unconventional myosin-Ib (362-372)
  source 1..33: mol_type = other RNA
ttcctgtttagctccgaccacctcatcgagatg

SEQ ID NO: 62291 - RNA, 33 nt, synthetic construct
  misc_feature 1..33: note = Glycogen phosphorylase, liver form (525-535)
  source 1..33: mol_type = other RNA
ttcctgggcgacgatgtgtttctcagagagctt

SEQ ID NO: 62292 - RNA, 27 nt, synthetic construct
  misc_feature 1..27: note = Lysosomal alpha-glucosidase (139-147)
  source 1..27: mol_type = other RNA
ttcctgggccccgagcctaagagcgtg

SEQ ID NO: 62293 - RNA, 27 nt, synthetic construct
  misc_feature 1..27: note = Sterol regulatory element-binding protein 1 (1036-1044)
  source 1..27: mol_type = other RNA
ttcctgcacgaggccaccgctagactc

SEQ ID NO: 62294 - RNA, 27 nt, synthetic construct
  misc_feature 1..27: note = DNA-dependent protein kinase catalytic subunit (319-327)
  source 1..27: mol_type = other RNA
ttcctgaagcaggtgagcaacatggtc

SEQ ID NO: 62295 - RNA, 27 nt, synthetic construct
  misc_feature 1..27: note = ADP-ribosylation factor-binding protein GGA1 (90-98)
  source 1..27: mol_type = other RNA
ttcctgaacgagctcatcaaggtggtc

SEQ ID NO: 62296 - RNA, 27 nt, synthetic construct
  misc_feature 1..27: note = CDK5 regulatory subunit-associated protein 2 (1316-1324)
  source 1..27: mol_type = other RNA
ttcctgaacggcaagagcgtgggggtc

SEQ ID NO: 62297 - RNA, 27 nt, synthetic construct
  misc_feature 1..27: note = Nestin (377-385)
  source 1..27: mol_type = other RNA
ttcctgcaggccagaacccccacactc

SEQ ID NO: 62298 - RNA, 27 nt, synthetic construct
  misc_feature 1..27: note = Plectin (2481-2489)
  source 1..27: mol_type = other RNA
ttcctgagcgagaaggactccctcctt

SEQ ID NO: 62299 - RNA, 27 nt, synthetic construct
  misc_feature 1..27: note = Hemoglobin subunit alpha (5-13)
  source 1..27: mol_type = other RNA
ttcctgagctttcccaccacaaagact

SEQ ID NO: 62300 - RNA, 27 nt, synthetic construct
  misc_feature 1..27: note = DDRGK domain-containing protein 1 (215-223)
  source 1..27: mol_type = other RNA
ttcctgaccgagtttatcaactacatt

SEQ ID NO: 62301 - RNA, 27 nt, synthetic construct
  misc_feature 1..27: note = Elongation factor 1-gamma (69-77)
  source 1..27: mol_type = other RNA
ttcctggtgggcgagagagtcaccctc

SEQ ID NO: 62302 - RNA, 36 nt, synthetic construct
  misc_feature 1..36: note = Laminin subunit alpha-1 (2178-2189)
  source 1..36: mol_type = other RNA
ttcctgtgggacctcggcagcgggtccaccagactt

SEQ ID NO: 62303 - RNA, 27 nt, synthetic construct
  misc_feature 1..27: note = Upstream stimulatory factor 1 (42-50)
  source 1..27: mol_type = other RNA
ttccccgaccctaacgtgaagtacgtc

SEQ ID NO: 62304 - RNA, 27 nt, synthetic construct
  misc_feature 1..27: note = Deubiquitinating protein VCIP135 (505-513)
  source 1..27: mol_type = other RNA
ttcccccacctgcctggcaagaccttt

SEQ ID NO: 62305 - RNA, 27 nt, synthetic construct
  misc_feature 1..27: note = Putative helicase MOV-10 (232-240)
  source 1..27: mol_type = other RNA
ttccccatcgaccactttacccatatt

SEQ ID NO: 62306 - RNA, 27 nt, synthetic construct
  misc_feature 1..27: note = NEDD4 family-interacting protein 1 (61-69)
  source 1..27: mol_type = other RNA
ttccccaagcctccaagctacaacgtg

SEQ ID NO: 62307 - RNA, 27 nt, synthetic construct
  misc_feature 1..27: note = Vacuolar fusion protein CCZ1 homolog (254-262)
  source 1..27: mol_type = other RNA
ttccccagacacatcgagcctgaactg

SEQ ID NO: 62308 - RNA, 24 nt, synthetic construct
  misc_feature 1..24: note = Retinoblastoma-binding protein 5 (81-88)
  source 1..24: mol_type = other RNA
ttccccagccctatcctgaaggtg

SEQ ID NO: 62309 - RNA, 27 nt, synthetic construct
  misc_feature 1..27: note = DNA polymerase alpha catalytic subunit (594-602)
  source 1..27: mol_type = other RNA
ttcccctacgcctttaaggaggtgatc

SEQ ID NO: 62310 - RNA, 24 nt, synthetic construct
  misc_feature 1..24: note = HEAT repeat-containing protein 1 (243-250)
  source 1..24: mol_type = other RNA
ttcccctacatccagaagggcctg

SEQ ID NO: 62311 - RNA, 27 nt, synthetic construct
  misc_feature 1..27: note = Reticulocalbin-3 (52-60)
  source 1..27: mol_type = other RNA
ttccagtacgaccacgaggcctttctg

SEQ ID NO: 62312 - RNA, 30 nt, synthetic construct
  misc_feature 1..30: note = Short transient receptor potential channel 4-associated protein (457-466)
  source 1..30: mol_type = other RNA
ttcagcgaccaccatgagaacaagtacctg

SEQ ID NO: 62313 - RNA, 27 nt, synthetic construct
  misc_feature 1..27: note = Phosphoinositide 3-kinase regulatory subunit 4 (20-28)
  source 1..27: mol_type = other RNA
ttcagcgacatccacgattttgagtac

SEQ ID NO: 62314 - RNA, 27 nt, synthetic construct
  misc_feature 1..27: note = Serine/threonine-protein kinase N2 (754-762)
  source 1..27: mol_type = other RNA
ttcagcgagcccagagccgtgttttac

SEQ ID NO: 62315 - RNA, 33 nt, synthetic construct
  misc_feature 1..33: note = Low-density lipoprotein receptor-related protein 4 (36-46)
  source 1..33: mol_type = other RNA
ttcaccgaccccggcatggggaacctgacatac

SEQ ID NO: 62316 - RNA, 27 nt, synthetic construct
  misc_feature 1..27: note = PR domain zinc finger protein 10 (81-89)
  source 1..27: mol_type = other RNA
ttcaccgaccccggccaggtggcctac

SEQ ID NO: 62317 - RNA, 27 nt, synthetic construct
  misc_feature 1..27: note = Unconventional myosin-Ib (229-237)
  source 1..27: mol_type = other RNA
ttcaccgaccagcaaaagctgatctac

SEQ ID NO: 62318 - RNA, 33 nt, synthetic construct
  misc_feature 1..33: note = Glutathione S-transferase Mu 3 (27-37)
  source 1..33: mol_type = other RNA
ttcaccgacacaagctacgaggaaaagagatat

SEQ ID NO: 62319 - RNA, 27 nt, synthetic construct
  misc_feature 1..27: note = Ribosomal protein S6 kinase alpha-5 (149-157)
  source 1..27: mol_type = other RNA
ttcaccgagcacgaagtgcagatctac

SEQ ID NO: 62320 - RNA, 30 nt, synthetic construct
  misc_feature 1..30: note = Unconventional myosin-Ib (526-535)
  source 1..30: mol_type = other RNA
ttcgtggacaagaacaatgatctgctctac

SEQ ID NO: 62321 - RNA, 27 nt, synthetic construct
  misc_feature 1..27: note = Heat shock 70 kDa protein 4 (200-208)
  source 1..27: mol_type = other RNA
ttcgtggacatgggccacagcgcctac

SEQ ID NO: 62322 - RNA, 27 nt, synthetic construct
  misc_feature 1..27: note = Talin-1 (1850-1858)
  source 1..27: mol_type = other RNA
ttcgtggactaccagaccacaatggtc

SEQ ID NO: 62323 - RNA, 33 nt, synthetic construct; identical to SEQ ID NO: 38096
  misc_feature 1..33: note = Trafficking protein particle complex subunit 3 (115-125)
  source 1..33: mol_type = other RNA

SEQ ID NO: 62324 - RNA, 27 nt, synthetic construct
  misc_feature 1..27: note = Serine/threonine-protein kinase Nek6 (272-280)
  source 1..27: mol_type = other RNA
ttctacggcgacaagatgaacctgttt

SEQ ID NO: 62325 - RNA, 27 nt, synthetic construct
  misc_feature 1..27: note = Myotubularin-related protein 5 (454-462)
  source 1..27: mol_type = other RNA
ttctacggcgacgtgcagacccacatc

SEQ ID NO: 62326 - RNA, 27 nt, synthetic construct
  misc_feature 1..27: note = Protein CLEC16A (161-169)
  source 1..27: mol_type = other RNA
ttctacaacgagcacaccaatgacttt

SEQ ID NO: 62327 - RNA, 27 nt, synthetic construct
  misc_feature 1..27: note = Fanconi anemia group I protein (922-930)
  source 1..27: mol_type = other RNA
ttctaccagcccaagatccaacagttt

SEQ ID NO: 62328 - RNA, 30 nt, synthetic construct
  misc_feature 1..30: note = Heat shock 70 kDa protein 1-like (295-304)
  source 1..30: mol_type = other RNA
ttctacaccagcatcacaagagccaggttt

SEQ ID NO: 62329 - RNA, 27 nt, synthetic construct
  misc_feature 1..27: note = Little elongation complex subunit 2 (213-221)
  source 1..27: mol_type = other RNA
ttctacgtgggccacatcgacgccttt

SEQ ID NO: 62330 - RNA, 27 nt, synthetic construct
  misc_feature 1..27: note = E3 ubiquitin-protein ligase MARCH6 (231-239)
  source 1..27: mol_type = other RNA
ggcctggacgggagcctcgtgttcctt

SEQ ID NO: 62331 - RNA, 27 nt, synthetic construct
  misc_feature 1..27: note = Malate dehydrogenase, mitochondrial (144-152)
  source 1..27: mol_type = other RNA
ggcctggaccccgccagagtgaacgtc

SEQ ID NO: 62332 - RNA, 27 nt, synthetic construct
  misc_feature 1..27: note = Asparagine synthetase (glutamine-hydrolyzing) (177-185)
  source 1..27: mol_type = other RNA
ggcctggacagctccctcgtggccgct

SEQ ID NO: 62333 - RNA, 33 nt, synthetic construct
  misc_feature 1..33: note = DNA damage-binding protein 1 (996-1006)
  source 1..33: mol_type = other RNA
ggcctgttccacctcggggagtttgtgaacgtc

SEQ ID NO: 62334 - RNA, 30 nt, synthetic construct
  misc_feature 1..30: note = Importin-9 (119-128)
  source 1..30: mol_type = other RNA
ggcctgcacgagacccagccccctagcgtg

SEQ ID NO: 62335 - RNA, 27 nt, synthetic construct
  misc_feature 1..27: note = HEAT repeat-containing protein 5A (449-457)
  source 1..27: mol_type = other RNA
ggcctgctcgacagcatcctttccgtg

SEQ ID NO: 62336 - RNA, 27 nt, synthetic construct
  misc_feature 1..27: note = HEAT repeat-containing protein 5B (445-453)
  source 1..27: mol_type = other RNA
ggcctgctcgagatcgtgaccagcgtc

SEQ ID NO: 62337 - RNA, 30 nt, synthetic construct
  misc_feature 1..30: note = Zinc transporter SLC39A7 (454-463)
  source 1..30: mol_type = other RNA
ggcctgctcgggggagtgatcatgatggtc

SEQ ID NO: 62338 - RNA, 33 nt, synthetic construct; identical to SEQ ID NO: 38111
  misc_feature 1..33: note = Protein SON (535-545)
  source 1..33: mol_type = other RNA

SEQ ID NO: 62339 - RNA, 27 nt, synthetic construct
  misc_feature 1..27: note = Nestin (273-281)
  source 1..27: mol_type = other RNA
ggcctgcagagccaaatcgcccaggtg

SEQ ID NO: 62340 - RNA, 27 nt, synthetic construct
  misc_feature 1..27: note = Armadillo repeat containing 8, isoform CRA_g (325-333)
  source 1..27: mol_type = other RNA
ggcctgagcgagtcctctgtgaaggtc

SEQ ID NO: 62341 - RNA, 27 nt, synthetic construct
  misc_feature 1..27: note = Eukaryotic translation initiation factor 3 subunit F (252-260)
  source 1..27: mol_type = other RNA
ggcctgagctccgacctccagcaagtg

SEQ ID NO: 62342 - RNA, 27 nt, synthetic construct
  misc_feature 1..27: note = Bifunctional glutamate/proline-tRNA ligase (1274-1282)
  source 1..27: mol_type = other RNA
ggcctgaccacaagaactatcggggtg

SEQ ID NO: 62343 - RNA, 27 nt, synthetic construct
  misc_feature 1..27: note = Glyceraldehyde-3-phosphate dehydrogenase (230-238)
  source 1..27: mol_type = other RNA
ggcatggccttcagagtgcccaccgct

SEQ ID NO: 62344 - RNA, 27 nt, synthetic construct
  misc_feature 1..27: note = WD repeat-containing protein 19 (311-319)
  source 1..27: mol_type = other RNA
ggccccgacgagctgagacctatgctc

SEQ ID NO: 62345 - RNA, 27 nt, synthetic construct
  misc_feature 1..27: note = Uncharacterized protein KIAA0355 (842-850)
  source 1..27: mol_type = other RNA
ggcagcgaccccgagttcgccagatac

SEQ ID NO: 62346 - RNA, 27 nt, synthetic construct
  misc_feature 1..27: note = Extended synaptotagmin-2 (388-396)
  source 1..27: mol_type = other RNA
ggcagcgacccctacgtgagaatgtat

SEQ ID NO: 62347 - RNA, 36 nt, synthetic construct; identical to SEQ ID NO: 38120
  misc_feature 1..36: note = YY1-associated protein 1 (203-214)
  source 1..36: mol_type = other RNA

SEQ ID NO: 62348 - RNA, 33 nt, synthetic construct
  misc_feature 1..33: note = Clustered mitochondria protein homolog (777-787)
  source 1..33: mol_type = other RNA
ggcaccgagcaccccaacacaatccaggaatac

SEQ ID NO: 62349 - RNA, 33 nt, synthetic construct
  misc_feature 1..33: note = Nucleolin (451-461)
  source 1..33: mol_type = other RNA
ggcaccgagatcgacgggagaagcatttccctg

SEQ ID NO: 62350 - RNA, 27 nt, synthetic construct
  misc_feature 1..27: note = DNA-dependent protein kinase catalytic subunit (1480-1488)
  source 1..27: mol_type = other RNA
ggcaccgagctgctcagccttgtgtac

SEQ ID NO: 62351 - RNA, 27 nt, synthetic construct
  misc_feature 1..27: note = Pecanex-like protein 3 (789-797)
  source 1..27: mol_type = other RNA
ggcgtgctggagaacatcttcggggtc

SEQ ID NO: 62352 - RNA, 33 nt, synthetic construct
  misc_feature 1..33: note = Ubiquitin-like protein 7 (158-168)
  source 1..33: mol_type = other RNA
ggcgtgctgcaggacaaggatctcttcagcgtc

SEQ ID NO: 62353 - RNA, 27 nt, synthetic construct
  misc_feature 1..27: note = Polypyrimidine tract-binding protein 2 (308-316)
  source 1..27: mol_type = other RNA
ggcgtgtacggggacgtccagagagtt

SEQ ID NO: 62354 - RNA, 33 nt, synthetic construct
  misc_feature 1..33: note = Caseinolytic peptidase B protein homolog (337-347)
  source 1..33: mol_type = other RNA
ggctggtacgacgaggaacaccccctggtgttc

SEQ ID NO: 62355 - RNA, 27 nt, synthetic construct
  misc_feature 1..27: note = Signal recognition particle subunit SRP68 (586-594)
  source 1..27: mol_type = other RNA
ggctacatcaaggggattttcggattt

SEQ ID NO: 62356 - RNA, 27 nt, synthetic construct
  misc_feature 1..27: note = Hypoxanthine-guanine phosphoribosyltransferase (173-181)
  source 1..27: mol_type = other RNA
ggctacaagcccgacttcgtggggttt

SEQ ID NO: 62357 - RNA, 27 nt, synthetic construct
  misc_feature 1..27: note = GMP reductase 2 (151-159)
  source 1..27: mol_type = other RNA
ggctacagcgagcacttcgtggaattt

SEQ ID NO: 62358 - RNA, 27 nt, synthetic construct
  misc_feature 1..27: note = Lysine-specific histone demethylase 1B (77-85)
  source 1..27: mol_type = other RNA
ggctacaccagcagatggtatcacctg

SEQ ID NO: 62359 - RNA, 30 nt, synthetic construct
  misc_feature 1..30: note = ATP-binding cassette sub-family E member 1 (315-324)
  source 1..30: mol_type = other RNA
ggctacgtgcccaccgagaacctgagattc

SEQ ID NO: 62360 - RNA, 27 nt, synthetic construct
  misc_feature 1..27: note = Ankyrin repeat domain-containing protein 17 (2149-2157)
  source 1..27: mol_type = other RNA
cacgccttctggggcgggagcgtggtc

SEQ ID NO: 62361 - RNA, 27 nt, synthetic construct
  misc_feature 1..27: note = CCR4-NOT transcription complex subunit 1 (1619-1627)
  source 1..27: mol_type = other RNA
cacgccatcccccctaccctggctatg

SEQ ID NO: 62362 - RNA, 27 nt, synthetic construct
  misc_feature 1..27: note = Syntaxin-binding protein 1 (295-303)
  source 1..27: mol_type = other RNA
cacatcgccgaggtgagccaggaagtc

SEQ ID NO: 62363 - RNA, 27 nt, synthetic construct
  misc_feature 1..27: note Dolichyl-diphosphooligosaccharide-proteinosyltransferase subunit 1 (45-53)
  source 1..27: mol_type = other RNA
cacctggccaaggtgaccgctgaggtc

SEQ ID NO: 62364 - RNA, 27 nt, synthetic construct
  misc_feature 1..27: note = ATP-binding cassette sub-family F member 1 (520-528)
  source 1..27: mol_type = other RNA
cacctggacgcccagagactccattac

SEQ ID NO: 62365 - RNA, 27 nt, synthetic construct
  misc_feature 1..27: note = T-complex protein 1 subunit epsilon (147-155)
  source 1..27: mol_type = other RNA
cacctggacaagatcagcgattccgtg

SEQ ID NO: 62366 - RNA, 30 nt, synthetic construct
  misc_feature 1..30: note = Pre-mRNA-processing-splicing factor 8 (1875-1884)
  source 1..30: mol_type = other RNA
cacctgctcgacttccccaacatcgtgatt

SEQ ID NO: 62367 - RNA, 27 nt, synthetic construct
  misc_feature 1..27: note = Polypyrimidine tract-binding protein 3 (383-391)
  source 1..27: mol_type = other RNA
cacctgagcaacatccccccttccgtg

SEQ ID NO: 62368 - RNA, 27 nt, synthetic construct
  misc_feature 1..27: note = Integrator complex subunit 4 (10-18)
  source 1..27: mol_type = other RNA
cacctgaccgacacaagccatggcgtg

SEQ ID NO: 62369 - RNA, 27 nt, synthetic construct
  misc_feature 1..27: note = Clathrin heavy chain 1 (1356-1364)
  source 1..27: mol_type = other RNA
cacctgtgggccgagctcgtgttcctt

SEQ ID NO: 62370 - RNA, 36 nt, synthetic construct
  misc_feature 1..36: note = LanC-like protein 1 (74-85)
  source 1..36: mol_type = other RNA
cacctgtacgacgtgttcggcgatcccgcctatctc

SEQ ID NO: 62371 - RNA, 27 nt, synthetic construct
  misc_feature 1..27: note = U3 small nucleolar RNA-associated protein 6 homolog (267-275)
  source 1..27: mol_type = other RNA
cacaccgacgatcccctgacatgggac

SEQ ID NO: 62372 - RNA, 27 nt, synthetic construct
  misc_feature 1..27: note = Ras GTPase-activating-like protein IQGAP3 (1072-1080)
  source 1..27: mol_type = other RNA
cacaccgaccccgtgcatctgtacaag

SEQ ID NO: 62373 - RNA, 30 nt, synthetic construct
  misc_feature 1..30: note = Receptor-type tyrosine-protein phosphatase F (1334-1343)
  source 1..30: mol_type = other RNA
cacaccgaggtgcccgccagaaacctgtac

SEQ ID NO: 62374 - RNA, 27 nt, synthetic construct
  misc_feature 1..27: note = Non-specific lipid-transfer protein (143-151)
  source 1..27: mol_type = other RNA
cacgtggacctgctcatcaacaagtac

SEQ ID NO: 62375 - RNA, 27 nt, synthetic construct
  misc_feature 1..27: note = Rhophilin-2 (351-359)
  source 1..27: mol_type = other RNA
cactacgccgctctggcacattatttc

SEQ ID NO: 62376 - RNA, 27 nt, synthetic construct
  misc_feature 1..27: note = Heat shock protein 105 kDa (739-747)
  source 1..27: mol_type = other RNA
cactacgccaagatcgctgcagacttc

SEQ ID NO: 62377 - RNA, 30 nt, synthetic construct
  misc_feature 1..30: note = Eukaryotic translation initiation factor 3 subunit I (312-321)
  source 1..30: mol_type = other RNA
cactacttcgacccccagtattttgagttc

SEQ ID NO: 62378 - RNA, 30 nt, synthetic construct
  misc_feature 1..30: note = General transcription factor 3C polypeptide 2 (687-696)
  source 1..30: mol_type = other RNA
cactacatcgacgccggctatctggggttc

SEQ ID NO: 62379 - RNA, 27 nt, synthetic construct
  misc_feature 1..27: note = Centrosomal protein of 192 kDa (2495-2503)
  source 1..27: mol_type = other RNA
cactacatcaacatgcccgtgcagttc

SEQ ID NO: 62380 - RNA, 27 nt, synthetic construct
  misc_feature 1..27: note = Tubulin gamma-1 chain (59-67)
  source 1..27: mol_type = other RNA
cactacatccccagagccgtgctgctc

SEQ ID NO: 62381 - RNA, 27 nt, synthetic construct
  misc_feature 1..27: note = Structural maintenance of chromosomes protein 4 (1123-1131)
  source 1..27: mol_type = other RNA
cactacaagcccacccctctgtatttc

SEQ ID NO: 62382 - RNA, 27 nt, synthetic construct
  misc_feature 1..27: note = Rho GTPase-activating protein 5 (207-215)
  source 1..27: mol_type = other RNA
cactacctgagagaggtgcaggccttc

SEQ ID NO: 62383 - RNA, 30 nt, synthetic construct
  misc_feature 1..30: note = E3 ubiquitin-protein ligase Arkadia (644-653)
  source 1..30: mol_type = other RNA
cactacatgccccctccatatgccagcctg

SEQ ID NO: 62384 - RNA, 33 nt, synthetic construct
  misc_feature 1..33: note = Rho-related BTB domain-containing protein 3 (239-249)
  source 1..33: mol_type = other RNA
cactacaacagcgacctgaataacctccttttc

SEQ ID NO: 62385 - RNA, 27 nt, synthetic construct
  misc_feature 1..27: note = DNA mismatch repair protein Msh6 (458-466)
  source 1..27: mol_type = other RNA
cactacccccctgtgcaggtcctgttc

SEQ ID NO: 62386 - RNA, 27 nt, synthetic construct
  misc_feature 1..27: note = Dedicator of cytokinesis protein 5 (968-976)
  source 1..27: mol_type = other RNA
cactacagccattatatctccaccttc

SEQ ID NO: 62387 - RNA, 27 nt, synthetic construct
  misc_feature 1..27: note = Dynein heavy chain 14, axonemal (48-56)
  source 1..27: mol_type = other RNA
atcgccgagaaggaaaccctggagtac

SEQ ID NO: 62388 - RNA, 27 nt, synthetic construct
  misc_feature 1..27: note = Inositol 1,4,5-trisphosphate receptor type 1 (2578-2586)
  source 1..27: mol_type = other RNA
atcttcggcgtgattatagacaccttt

SEQ ID NO: 62389 - RNA, 27 nt, synthetic construct
  misc_feature 1..27: note = U5 small nuclear ribonucleoprotein 40 kDa protein (217-225)
  source 1..27: mol_type = other RNA
atcttccagggcaacgtgcacaatttt

SEQ ID NO: 62390 - RNA, 27 nt, synthetic construct
  misc_feature 1..27: note = Progesterone-induced-blocking factor 1 (734-742)
  source 1..27: mol_type = other RNA
atcttcacccccaagcctacactgttt

SEQ ID NO: 62391 - RNA, 27 nt, synthetic construct
  misc_feature 1..27: note = Phosphoserine aminotransferase (281-289)
  source 1..27: mol_type = other RNA
atcattgacaacagccagggcttctac

SEQ ID NO: 62392 - RNA, 30 nt, synthetic construct
  misc_feature 1..30: note = Vesicle-associated membrane protein-associated protein A (60-69)
  source 1..30: mol_type = other RNA
atcattgaccccggcagcaccgtgacagtc

SEQ ID NO: 62393 - RNA, 27 nt, synthetic construct
  misc_feature 1..27: note = T-complex protein 1 subunit gamma (100-108)
  source 1..27: mol_type = other RNA
atcctggccggcgagatgctcagcgtg

SEQ ID NO: 62394 - RNA, 36 nt, synthetic construct
  misc_feature 1..36: note = Adenosylhomocysteinase 2 (196-207)
  source 1..36: mol_type = other RNA
atcctggacgatggcggggacctcacccactgggtg

SEQ ID NO: 62395 - RNA, 27 nt, synthetic construct
  misc_feature 1..27: note = Disabled homolog 2 (198-206)
  source 1..27: mol_type = other RNA
atcctggacgatcagaccaacaagctc

SEQ ID NO: 62396 - RNA, 27 nt, synthetic construct
  misc_feature 1..27: note = Switch-associated protein 70 (208-216)
  source 1..27: mol_type = other RNA
atcctggacgtgctcaagcagggctac

SEQ ID NO: 62397 - RNA, 27 nt, synthetic construct
  misc_feature 1..27: note = Protein SCAF8 (864-872)
  source 1..27: mol_type = other RNA
atcctgggcgggcagccccctaacgtg

SEQ ID NO: 62398 - RNA, 27 nt, synthetic construct
  misc_feature 1..27: note = Prolow-density lipoprotein receptor-related protein 1 (596-604)
  source 1..27: mol_type = other RNA
atcctgaaggacggcattcacaacgtg

SEQ ID NO: 62399 - RNA, 27 nt, synthetic construct
  misc_feature 1..27: note = Nucleoprotein TPR (616-624)
  source 1..27: mol_type = other RNA
atcctgctcagccagaccacaggcgtg

SEQ ID NO: 62400 - RNA, 30 nt, synthetic construct
  misc_feature 1..30: note = Noelin (14-23)
  source 1..30: mol_type = other RNA
atcctgatgggcaccgagctcacacaggtg

SEQ ID NO: 62401 - RNA, 30 nt, synthetic construct
  misc_feature 1..30: note = ATP-citrate synthase (1022-1031)
  source 1..30: mol_type = other RNA
atcctgaacgtggacggcctcattggggtc

SEQ ID NO: 62402 - RNA, 30 nt, synthetic construct
  misc_feature 1..30: note = D-3-phosphoglycerate dehydrogenase (22-31)
  source 1..30: mol_type = other RNA
atcctgcaggacggcgggctccaagtggtc

SEQ ID NO: 62403 - RNA, 27 nt, synthetic construct
  misc_feature 1..27: note = Poly (ADP-ribose) polymerase 1 (477-485)
  source 1..27: mol_type = other RNA
atcctgagcccctggggcgccgaggtg

SEQ ID NO: 62404 - RNA, 33 nt, synthetic construct
  misc_feature 1..33: note = Heat shock-related 70 kDa protein 2 (212-222)
  source 1..33: mol_type = other RNA
atcctgaccattgaggacggcatattcgaagtg

SEQ ID NO: 62405 - RNA, 33 nt, synthetic construct
  misc_feature 1..33: note = Proteasome subunit alpha type-2 (46-56)
  source 1..33: mol_type = other RNA
atcctgtacgacgagagaagcgtgcacaaggtc

SEQ ID NO: 62406 - RNA, 30 nt, synthetic construct
  misc_feature 1..30: note = Elongation factor 2 (203-212)
  source 1..30: mol_type = other RNA
atcatgattgaccccgtgctgggcaccgtc

SEQ ID NO: 62407 - RNA, 27 nt, synthetic construct
  misc_feature 1..27: note = Gem-associated protein 4 (471-479)
  source 1..27: mol_type = other RNA
atccccgagagccagattagacaagtg

SEQ ID NO: 62408 - RNA, 27 nt, synthetic construct
  misc_feature 1..27: note = Serine/threonine-protein kinase 24 (212-220)
  source 1..27: mol_type = other RNA
atccccaagaacaatcctccaaccctg

SEQ ID NO: 62409 - RNA, 27 nt, synthetic construct
  misc_feature 1..27: note = Cathepsin D (24-32)
  source 1..27: mol_type = other RNA
atccccctgcacaagttcaccagcatt

SEQ ID NO: 62410 - RNA, 24 nt, synthetic construct
  misc_feature 1..24: note = ATP-binding cassette sub-family F member 2 (391-398)
  source 1..24: mol_type = other RNA
atcccccctccagtgattatggtc

SEQ ID NO: 62411 - RNA, 27 nt, synthetic construct
  misc_feature 1..27: note = Serine protease HTRA1 (3-11)
  source 1..27: mol_type = other RNA
atccccagagccgctctgctccctctt

SEQ ID NO: 62412 - RNA, 30 nt, synthetic construct
  misc_feature 1..30: note = Serine protease HTRA1 (3-12)
  source 1..30: mol_type = other RNA
atccccagagccgctctgctccctcttctg

SEQ ID NO: 62413 - RNA, 24 nt, synthetic construct
  misc_feature 1..24: note = Lysine-specific demethylase 5D (1030-1037)
  source 1..24: mol_type = other RNA
atccccgtgcacctgcctaacatt

SEQ ID NO: 62414 - RNA, 24 nt, synthetic construct
  misc_feature 1..24: note = Pre-mRNA-processing-splicing factor 8 (724-731)
  source 1..24: mol_type = other RNA
atcccctggaaggtgcctggcctg

SEQ ID NO: 62415 - RNA, 24 nt, synthetic construct
  misc_feature 1..24: note = Serine-tRNA ligase, cytoplasmic (357-364)
  source 1..24: mol_type = other RNA
atcccctaccacattgtgaacata

SEQ ID NO: 62416 - RNA, 24 nt, synthetic construct
  misc_feature 1..24: note = T-complex protein 1 subunit gamma (296-303)
  source 1..24: mol_type = other RNA
atcagcgacctggcccagcactac

SEQ ID NO: 62417 - RNA, 27 nt, synthetic construct
  misc_feature 1..27: note = 39S ribosomal protein L12, mitochondrial (79-87)
  source 1..27: mol_type = other RNA
atcagcgacctgaacgagctccttaag

SEQ ID NO: 62418 - RNA, 27 nt, synthetic construct
  misc_feature 1..27: note = Junction plakoglobin (651-659)
  source 1..27: mol_type = other RNA
atcagcgaggacaagaaccccgattac

SEQ ID NO: 62419 - RNA, 30 nt, synthetic construct
  misc_feature 1..30: note = ATP-citrate synthase (6-15)
  source 1..30: mol_type = other RNA
atcagcgagcagaccggcaaggaactgctc

SEQ ID NO: 62420 - RNA, 30 nt, synthetic construct
  misc_feature 1..30: note = Peptidyl-prolyl cis-trans isomerase FKBP9 (274-283)
  source 1..30: mol_type = other RNA
atcagccagtccggcgacttcctgagatac

SEQ ID NO: 62421 - RNA, 24 nt, synthetic construct
  misc_feature 1..24: note = Staphylococcal nuclease domain-containing protein 1 (665-672)
  source 1..24: mol_type = other RNA
atcaccgacgatctgcacttctac

SEQ ID NO: 62422 - RNA, 27 nt, synthetic construct
  misc_feature 1..27: note = E3 ubiquitin-protein ligase TRIM21 (423-431)
  source 1..27: mol_type = other RNA
atcaccgaccacggcagcctgatttac

SEQ ID NO: 62423 - RNA, 33 nt, synthetic construct
  misc_feature 1..33: note = 5-oxoprolinase (1145-1155)
  source 1..33: mol_type = other RNA
atcaccgaccccgagattctggaaagcagatac

SEQ ID NO: 62424 - RNA, 30 nt, synthetic construct
  misc_feature 1..30: note = Wee1-like protein kinase (72-81)
  source 1..30: mol_type = other RNA
atcaccgagagcaacatgaagtccagatac

SEQ ID NO: 62425 - RNA, 27 nt, synthetic construct
  misc_feature 1..27: note = Interleukin enhancer-binding factor 2 (89-97)
  source 1..27: mol_type = other RNA
atcgtggcccccggcaccttcgaggtc

SEQ ID NO: 62426 - RNA, 27 nt, synthetic construct
  misc_feature 1..27: note = Pre-mRNA-processing-splicing factor 8 (1000-1008)
  source 1..27: mol_type = other RNA
atcgtggaccacaacattgccgattac

SEQ ID NO: 62427 - RNA, 27 nt, synthetic construct
  misc_feature 1..27: note = EKC/KEOPS complex subunit TPRKB (48-56)
  source 1..27: mol_type = other RNA
atcgtggaccccttccagattctggtc

SEQ ID NO: 62428 - RNA, 30 nt, synthetic construct
  misc_feature 1..30: note = Hydroxyacylglutathione hydrolase, mitochondrial (27-36)
  source 1..30: mol_type = other RNA
atcgtggaccccgtccagcctcaaaaggtt

SEQ ID NO: 62429 - RNA, 39 nt, synthetic construct
  misc_feature 1..39: note = POTE ankyrin domain family member F (851-863)
  source 1..39: mol_type = other RNA
atcgtgatggacagcggcgatggggtcacccacacagtt

SEQ ID NO: 62430 - RNA, 30 nt, synthetic construct
  misc_feature 1..30: note = Beta-secretase 2 (263-272)
  source 1..30: mol_type = other RNA
atctggtacacccccattaaggaggaatgg

SEQ ID NO: 62431 - RNA, 27 nt, synthetic construct
  misc_feature 1..27: note = Solute carrier family 12 member 4 (260-268)
  source 1..27: mol_type = other RNA
atctacgccggcgggattaagagcata

SEQ ID NO: 62432 - RNA, 33 nt, synthetic construct
  misc_feature 1..33: note = 1-phosphatidylinositol 4,5-bisphosphate phosphodiesterase gamma-2 (1124-1134)
  source 1..33: mol_type = other RNA
atctacgaccccaacctggccttcctcagattt

SEQ ID NO: 62433 - RNA, 30 nt, synthetic construct
  misc_feature 1..30: note = Cullin-4B (579-588)
  source 1..30: mol_type = other RNA
atctacggcaaggacgtgttcgaggccttt

SEQ ID NO: 62434 - RNA, 27 nt, synthetic construct
  misc_feature 1..27: note = ATP-dependent zinc metalloprotease YME1L1 (305-313)
  source 1..27: mol_type = other RNA
atctacggcctgctcaagaaccccttc

SEQ ID NO: 62435 - RNA, 27 nt, synthetic construct
  misc_feature 1..27: note = Protein transport protein Sec31A (147-155)
  source 1..27: mol_type = other RNA
atctacatttgggacctgaacaatttc

SEQ ID NO: 62436 - RNA, 27 nt, synthetic construct
  misc_feature 1..27: note = USP6 N-terminal-like protein (97-105)
  source 1..27: mol_type = other RNA
atctacaagggcattcccctgcagctc

SEQ ID NO: 62437 - RNA, 27 nt, synthetic construct
  misc_feature 1..27: note = Plectin (1069-1077)
  source 1..27: mol_type = other RNA
atctacctggagaagctcaaaaccatt

SEQ ID NO: 62438 - RNA, 27 nt, synthetic construct
  misc_feature 1..27: note = Tumor susceptibility gene 101 protein (109-117)
  source 1..27: mol_type = other RNA
atctacctgccctatctccacgagtgg

SEQ ID NO: 62439 - RNA, 27 nt, synthetic construct
  misc_feature 1..27: note = Ubiquitin-conjugating enzyme E2 variant 3 (109-117)
  source 1..27: mol_type = other RNA
atctacctgccctatctccagaactgg

SEQ ID NO: 62440 - RNA, 27 nt, synthetic construct
  misc_feature 1..27: note = Collagen alpha-1(XV) chain (1157-1165)
  source 1..27: mol_type = other RNA
atctacctgagagacagcaccgagttc

SEQ ID NO: 62441 - RNA, 27 nt, synthetic construct
  misc_feature 1..27: note = Disks large homolog 1 (868-876)
  source 1..27: mol_type = other RNA
atctacaaccaggtgaagcaaattata

SEQ ID NO: 62442 - RNA, 33 nt, synthetic construct; identical to SEQ ID NO: 38215
  misc_feature 1..33: note = Nuclear fragile X mental retardation-interacting protein 2 (473-483)
  source 1..33: mol_type = other RNA

SEQ ID NO: 62443 - RNA, 30 nt, synthetic construct
  misc_feature 1..30: note = Pre-mRNA-processing-splicing factor 8 (1694-1703)
  source 1..30: mol_type = other RNA
atctaccccagccctaccggcgtgctgatt

SEQ ID NO: 62444 - RNA, 30 nt, synthetic construct
  misc_feature 1..30: note = 5'-3' exoribonuclease 1 (610-619)
  source 1..30: mol_type = other RNA
atctaccccagcccttggccagagaagttc

SEQ ID NO: 62445 - RNA, 27 nt, synthetic construct
  misc_feature 1..27: note = Protein unc-119 homolog B (91-99)
  source 1..27: mol_type = other RNA
atctacagcattgacttcaccagattt

SEQ ID NO: 62446 - RNA, 24 nt, synthetic construct
  misc_feature 1..24: note = Serine-protein kinase ATM (121-128)
  source 1..24: mol_type = other RNA
atctacaccctgattcactatata

SEQ ID NO: 62447 - RNA, 27 nt, synthetic construct
  misc_feature 1..27: note = Exocyst complex component 6B (648-656)
  source 1..27: mol_type = other RNA
atctacaccaacctgaatcagaagatt

SEQ ID NO: 62448 - RNA, 27 nt, synthetic construct
  misc_feature 1..27: note = Aminoacylase-1 (390-398)
  source 1..27: mol_type = other RNA
atctacaccagactgctccccgccctt

SEQ ID NO: 62449 - RNA, 27 nt, synthetic construct
  misc_feature 1..27: note = Kelch domain-containing protein 7B (353-361)
  source 1..27: mol_type = other RNA
atctacgtgaccggcgggcacctgttc

SEQ ID NO: 62450 - RNA, 30 nt, synthetic construct
  misc_feature 1..30: note = RNA polymerase I-specific transcription initiation factor RRN3 (572-581)
  source 1..30: mol_type = other RNA
aagttcatcgaccccatttaccaggtgtgg

SEQ ID NO: 62451 - RNA, 30 nt, synthetic construct
  misc_feature 1..30: note = Ubiquitin carboxyl-terminal hydrolase 8 (551-560)
  source 1..30: mol_type = other RNA
aagttcctggaccccatcaccggcacattt

SEQ ID NO: 62452 - RNA, 27 nt, synthetic construct
  misc_feature 1..27: note = pre-rRNA processing protein FTSJ3 (64-72)
  source 1..27: mol_type = other RNA
aagttcatgcccgtgagctccctgatc

SEQ ID NO: 62453 - RNA, 27 nt, synthetic construct
  misc_feature 1..27: note = M-phase inducer phosphatase 2 (349-357)
  source 1..27: mol_type = other RNA
aagttcagcaacatcgtggacaaattt

SEQ ID NO: 62454 - RNA, 27 nt, synthetic construct
  misc_feature 1..27: note = Mitotic checkpoint protein BUB3 (21-29)
  source 1..27: mol_type = other RNA
aagttcagccccaacacctcccagttt

SEQ ID NO: 62455 - RNA, 27 nt, synthetic construct
  misc_feature 1..27: note = Protein SCAF11 (1039-1047)
  source 1..27: mol_type = other RNA
aagctggccgagagcaaagtgtccgtc

SEQ ID NO: 62456 - RNA, 27 nt, synthetic construct
  misc_feature 1..27: note = Neuroblast differentiation-associated protein AHNAK (2352-2360)
  source 1..27: mol_type = other RNA
aagctggacgccgatatgcccgaggtg

SEQ ID NO: 62457 - RNA, 27 nt, synthetic construct
  misc_feature 1..27: note = Ryanodine receptor 1 (3709-3717)
  source 1..27: mol_type = other RNA
aagctggacgaggattacctctatatg

SEQ ID NO: 62458 - RNA, 30 nt, synthetic construct
  misc_feature 1..30: note = Nucleobindin-1 (98-107)
  source 1..30: mol_type = other RNA
aagctggacgagctcaaaagacaggaagtg

SEQ ID NO: 62459 - RNA, 27 nt, synthetic construct
  misc_feature 1..27: note = Spectrin alpha chain, non-erythrocytic 1 (201-209)
  source 1..27: mol_type = other RNA
aagctggacgagaacagcgccttcctc

SEQ ID NO: 62460 - RNA, 27 nt, synthetic construct
  misc_feature 1..27: note = Striatin-3 (767-775)
  source 1..27: mol_type = other RNA
aagctggacgagagcatctacgatgtg

SEQ ID NO: 62461 - RNA, 27 nt, synthetic construct
  misc_feature 1..27: note = DNA topoisomerase 2-alpha (278-286)
  source 1..27: mol_type = other RNA
aagctggacgagaccggcaacagcctc

SEQ ID NO: 62462 - RNA, 27 nt, synthetic construct
  misc_feature 1..27: note = Eukaryotic initiation factor 4A-III (152-160)
  source 1..27: mol_type = other RNA
aagctggactacggccagcacgtggtc

SEQ ID NO: 62463 - RNA, 27 nt, synthetic construct
  misc_feature 1..27: note = HEAT repeat-containing protein 2 (624-632)
  source 1..27: mol_type = other RNA
aagctgttcagcatcctctccaccgtg

SEQ ID NO: 62464 - RNA, 27 nt, synthetic construct
  misc_feature 1..27: note = Helicase-like transcription factor (170-178)
  source 1..27: mol_type = other RNA
aagctgggccccgcccctaaaaccctc

SEQ ID NO: 62465 - RNA, 27 nt, synthetic construct
  misc_feature 1..27: note = Serine/threonine-protein kinase ULK4 (46-54)
  source 1..27: mol_type = other RNA
aagctgatccccctcattttcgaggtg

SEQ ID NO: 62466 - RNA, 33 nt, synthetic construct
  misc_feature 1..33: note = GTP-binding protein Rheb (102-112)
  source 1..33: mol_type = other RNA
aagctgctcgacatggtgggcaaagtccagatc

SEQ ID NO: 62467 - RNA, 27 nt, synthetic construct
  misc_feature 1..27: note = Probable E3 ubiquitin-protein ligase HERC3 (474-482)
  source 1..27: mol_type = other RNA
aagctgctcgagaaactttacaaggtg

SEQ ID NO: 62468 - RNA, 30 nt, synthetic construct
  misc_feature 1..30: note = Dedicator of cytokinesis protein 1 (386-395)
  source 1..30: mol_type = other RNA
aagctgctccccggcgacatccaccagatt

SEQ ID NO: 62469 - RNA, 27 nt, synthetic construct
  misc_feature 1..27: note = Adenosylhomocysteinase 2 (47-55)
  source 1..27: mol_type = other RNA
aagctgaacgaggtgatcagacaggtc

SEQ ID NO: 62470 - RNA, 27 nt, synthetic construct
  misc_feature 1..27: note = V-type proton ATPase catalytic subunit A (220-228)
  source 1..27: mol_type = other RNA
aagctgcccgccaaccaccctctcctt

SEQ ID NO: 62471 - RNA, 27 nt, synthetic construct
  misc_feature 1..27: note = Proline-rich protein 11 (128-136)
  source 1..27: mol_type = other RNA
aagctgcaggaggccctcaaaaccatc

SEQ ID NO: 62472 - RNA, 27 nt, synthetic construct
  misc_feature 1..27: note = Serine/threonine-protein kinase MRCK alpha (461-469)
  source 1..27: mol_type = other RNA
aagctgcaggagagcacccaaacagtg

SEQ ID NO: 62473 - RNA, 30 nt, synthetic construct
  misc_feature 1..30: note = Integrin alpha-V (338-347)
  source 1..30: mol_type = other RNA
aagctgcaggaggtgggccaagtcagcgtt

SEQ ID NO: 62474 - RNA, 33 nt, synthetic construct
  misc_feature 1..33: note = 78 kDa glucose-regulated protein (2-12)
  source 1..33: mol_type = other RNA
aagctgagcctcgtggccgctatgcttctgttg

SEQ ID NO: 62475 - RNA, 27 nt, synthetic construct
  misc_feature 1..27: note = Serum albumin (257-265)
  source 1..27: mol_type = other RNA
aagctggtgaccgacctcacaaaagtc

SEQ ID NO: 62476 - RNA, 27 nt, synthetic construct
  misc_feature 1..27: note = Zinc finger and BTB domain-containing protein 38 (661-669)
  source 1..27: mol_type = other RNA
aagatggacctggataacaatttctac

SEQ ID NO: 62477 - RNA, 27 nt, synthetic construct
  misc_feature 1..27: note = Sister chromatid cohesion protein PDS5 homolog B (1060-1068)
  source 1..27: mol_type = other RNA
aagatgaacgagaaactgtacaccgtg

SEQ ID NO: 62478 - RNA, 27 nt, synthetic construct
  misc_feature 1..27: note = Nucleophosmin (250-258)
  source 1..27: mol_type = other RNA
aagatgcaggccagcatcgagaaagct

SEQ ID NO: 62479 - RNA, 36 nt, synthetic construct
  misc_feature 1..36: note = Breast cancer anti-estrogen resistance protein 1 (335-346)
  source 1..36: mol_type = other RNA
aagcccttcgaccctgccagaaccccactggtgctc

SEQ ID NO: 62480 - RNA, 27 nt, synthetic construct
  misc_feature 1..27: note = Poly (ADP-ribose) polymerase 1 (388-396)
  source 1..27: mol_type = other RNA
aagcccctgagcaacatgaaaatcctc

SEQ ID NO: 62481 - RNA, 27 nt, synthetic construct
  misc_feature 1..27: note = Vitamin K-dependent protein S (29-37)
  source 1..27: mol_type = other RNA
aagcagcaagccagccaggtgctggtc

SEQ ID NO: 62482 - RNA, 27 nt, synthetic construct
  misc_feature 1..27: note = POZ-, AT hook-, and zinc finger-containing protein 1 (157-165)
  source 1..27: mol_type = other RNA
aagcagagcaacgtgcaaatcctggtc

SEQ ID NO: 62483 - RNA, 27 nt, synthetic construct
  misc_feature 1..27: note = Probable global transcription activator SNF2L1 (37-45)
  source 1..27: mol_type = other RNA
aagcagaccgagctgttcgcccacttt

SEQ ID NO: 62484 - RNA, 27 nt, synthetic construct
  misc_feature 1..27: note = Probable ATP-dependent RNA helicase DDX5 (451-459)
  source 1..27: mol_type = other RNA
aagcaggtgagcgacctgatctccgtc

SEQ ID NO: 62485 - RNA, 36 nt, synthetic construct
  misc_feature 1..36: note = Myosin-10 (296-307)
  source 1..36: mol_type = other RNA
aagagcgacctgctccttgagggcttcaacaattac

SEQ ID NO: 62486 - RNA, 27 nt, synthetic construct
  misc_feature 1..27: note = Importin-11 (549-557)
  source 1..27: mol_type = other RNA
aagagcgacctgagacccatgctctac

SEQ ID NO: 62487 - RNA, 30 nt, synthetic construct
  misc_feature 1..30: note = Hepatocyte growth factor receptor (32-41)
  source 1..30: mol_type = other RNA
aagagcgagatgaacgtgaatatgaaatac

SEQ ID NO: 62488 - RNA, 27 nt, synthetic construct
  misc_feature 1..27: note = Leucine-rich repeat-containing protein 42 (68-76)
  source 1..27: mol_type = other RNA
aagaccgaccacttcatctttacatac

SEQ ID NO: 62489 - RNA, 33 nt, synthetic construct
  misc_feature 1..33: note = AMP deaminase 2 (106-116)
  source 1..33: mol_type = other RNA
aagaccgacagcgattccgacctgcagctctac

SEQ ID NO: 62490 - RNA, 27 nt, synthetic construct
  misc_feature 1..27: note = pre-rRNA processing protein FTSJ3 (466-474)
  source 1..27: mol_type = other RNA
aagaccgagatcatgagccccctgtac

SEQ ID NO: 62491 - RNA, 27 nt, synthetic construct
  misc_feature 1..27: note = Fanconi anemia group I protein (402-410)
  source 1..27: mol_type = other RNA
aagaccatcgagacaagcccctccctg

SEQ ID NO: 62492 - RNA, 39 nt, synthetic construct
  misc_feature 1..39: note = Tubulin alpha-1C chain (5-17)
  source 1..39: mol_type = other RNA
aagaccatcggcgggggagacgatagcttcaacacattt

SEQ ID NO: 62493 - RNA, 36 nt, synthetic construct
  misc_feature 1..36: note = Calnexin (227-238)
  source 1..36: mol_type = other RNA
aagacctacttcacagacaaaaagactcacctgtat

SEQ ID NO: 62494 - RNA, 27 nt, synthetic construct
  misc_feature 1..27: note = General transcription factor 3C polypeptide 1 (135-143)
  source 1..27: mol_type = other RNA
aaggtggacgccggcaaactgcactac

SEQ ID NO: 62495 - RNA, 33 nt, synthetic construct
  misc_feature 1..33: note = Protein phosphatase Slingshot homolog 3 (281-291)
  source 1..33: mol_type = other RNA
aaggtgctggacgtcagcgatctcgagtccgtt

SEQ ID NO: 62496 - RNA, 27 nt, synthetic construct
  misc_feature 1..27: note = HEAT repeat-containing protein 5A (1475-1483)
  source 1..27: mol_type = other RNA
aaggtgctggagaccctcgtcacagtt

SEQ ID NO: 62497 - RNA, 30 nt, synthetic construct
  misc_feature 1..30: note = DNA-directed RNA polymerase II subunit RPB3 (175-184)
  source 1..30: mol_type = other RNA
aagtggaaccccaccgccggcgtggctttc

SEQ ID NO: 62498 - RNA, 27 nt, synthetic construct
  misc_feature 1..27: note = UDP-glucose:glycoprotein glucosyltransferase 2 (42-50)
  source 1..27: mol_type = other RNA
aagtggcccgagacccctctgctcctt

SEQ ID NO: 62499 - RNA, 27 nt, synthetic construct
  misc_feature 1..27: note = Serine/threonine-protein kinase PLK3 (427-435)
  source 1..27: mol_type = other RNA
aagtgggtggactacagcaacaaattc

SEQ ID NO: 62500 - RNA, 27 nt, synthetic construct
  misc_feature 1..27: note = Integrin alpha-V (188-196)
  source 1..27: mol_type = other RNA
aagtacgaccccaacgtgtatagcatc

SEQ ID NO: 62501 - RNA, 27 nt, synthetic construct
  misc_feature 1..27: note = Kinesin-like protein KIF7 (588-596)
  source 1..27: mol_type = other RNA
aagtacttcgacaaagtggtcaccctg

SEQ ID NO: 62502 - RNA, 27 nt, synthetic construct
  misc_feature 1..27: note = Putative deoxyribonuclease TATDN1 (130-138)
  source 1..27: mol_type = other RNA
aagtacttcgagaaacagtttgaactg

SEQ ID NO: 62503 - RNA, 33 nt, synthetic construct
  misc_feature 1..33: note = BTB/POZ domain-containing protein 3 (484-494)
  source 1..33: mol_type = other RNA
aagtacttcagcgacggctcctctaacaccttt

SEQ ID NO: 62504 - RNA, 27 nt, synthetic construct
  misc_feature 1..27: note = Ras GTPase-activating-like protein IQGAP1 (191-199)
  source 1..27: mol_type = other RNA
aagtacggcatccagatgcccgccttc

SEQ ID NO: 62505 - RNA, 27 nt, synthetic construct
  misc_feature 1..27: note = General transcription factor IIF subunit 1 (83-91)
  source 1..27: mol_type = other RNA
aagtacggcatcgtgctgaaagagttc

SEQ ID NO: 62506 - RNA, 24 nt, synthetic construct
  misc_feature 1..24: note = Protein SOGA1 (415-422)
  source 1..24: mol_type = other RNA
aagtacggcatcgtgcaggagttc

SEQ ID NO: 62507 - RNA, 27 nt, synthetic construct
  misc_feature 1..27: note = Tyrosine-protein phosphatase non-receptor type 13 (1101-1109)
  source 1..27: mol_type = other RNA
aagtacggcctggggttccagatcatt

SEQ ID NO: 62508 - RNA, 27 nt, synthetic construct
  misc_feature 1..27: note = Serine/threonine-protein kinase Kist (248-256)
  source 1..27: mol_type = other RNA
aagtacggccccgtggtcagcctgctc

SEQ ID NO: 62509 - RNA, 24 nt, synthetic construct
  misc_feature 1..24: note = Serine/threonine-protein phosphatase 4 catalytic subunit (133-140)
  source 1..24: mol_type = other RNA
aagtacggcagcgtgaccgtctgg

SEQ ID NO: 62510 - RNA, 27 nt, synthetic construct
  misc_feature 1..27: note = Magnesium transporter protein 1 (356-364)
  source 1..27: mol_type = other RNA
aagtaccacggctatccctacagcttc

SEQ ID NO: 62511 - RNA, 27 nt, synthetic construct
  misc_feature 1..27: note = Protein cramped-like (21-29)
  source 1..27: mol_type = other RNA
aagtacatcgacttcgatcacgtgttt

SEQ ID NO: 62512 - RNA, 27 nt, synthetic construct
  misc_feature 1..27: note = Ataxin-2-like protein (371-379)
  source 1..27: mol_type = other RNA
aagtacatccccctgcctcagagagtg

SEQ ID NO: 62513 - RNA, 30 nt, synthetic construct; identical to SEQ ID NO: 38286
  misc_feature 1..30: note = Programmed cell death protein 6 (90-99)
  source 1..30: mol_type = other RNA

SEQ ID NO: 62514 - RNA, 27 nt, synthetic construct
  misc_feature 1..27: note = Elongation of very long chain fatty acids protein 5 (200-208)
  source 1..27: mol_type = other RNA
aagtacatcacccagggccaactgctc

SEQ ID NO: 62515 - RNA, 27 nt, synthetic construct
  misc_feature 1..27: note = Muscleblind-like protein 3 (18-26)
  source 1..27: mol_type = other RNA
aagtacctgcacccccctccacatctc

SEQ ID NO: 62516 - RNA, 27 nt, synthetic construct
  misc_feature 1..27: note = Muscleblind-like protein 2 (67-75)
  source 1..27: mol_type = other RNA
aagtacctgcacccccctacccatctc

SEQ ID NO: 62517 - RNA, 27 nt, synthetic construct
  misc_feature 1..27: note = Nesprin-2 (895-903)
  source 1..27: mol_type = other RNA
aagtacctgaaagccgtggaggaactc

SEQ ID NO: 62518 - RNA, 27 nt, synthetic construct
  misc_feature 1..27: note = Presenilin-1 (239-247)
  source 1..27: mol_type = other RNA
aagtacctgcccgagtggaccgcctgg

SEQ ID NO: 62519 - RNA, 30 nt, synthetic construct
  misc_feature 1..30: note = ATP-dependent RNA helicase DDX24 (720-729)
  source 1..30: mol_type = other RNA
aagtacatggacgtggtcaaagagagaatc

SEQ ID NO: 62520 - RNA, 30 nt, synthetic construct
  misc_feature 1..30: note = Protein polybromo-1 (653-662)
  source 1..30: mol_type = other RNA
aagtacatgacccccatgcagcaaaaactg

SEQ ID NO: 62521 - RNA, 27 nt, synthetic construct
  misc_feature 1..27: note = Zinc finger protein 3 (173-181)
  source 1..27: mol_type = other RNA
aagtacaacgacttcggcaatagcttt

SEQ ID NO: 62522 - RNA, 30 nt, synthetic construct
  misc_feature 1..30: note = Putative endoplasmin-like protein (136-145)
  source 1..30: mol_type = other RNA
aagtacaacgacaccttctggaaagagttt

SEQ ID NO: 62523 - RNA, 27 nt, synthetic construct
  misc_feature 1..27: note = Sphingolipid delta(4)-desaturase DES1 (5-13)
  source 1..27: mol_type = other RNA
aagtaccccgagatcaaaagcctgatg

SEQ ID NO: 62524 - RNA, 27 nt, synthetic construct
  misc_feature 1..27: note = Neurolysin, mitochondrial (244-252)
  source 1..27: mol_type = other RNA
aagtacccccactatttccctgtgatg

SEQ ID NO: 62525 - RNA, 27 nt, synthetic construct
  misc_feature 1..27: note = Protein farnesyltransferase/geranylgeranyltransferase type-1 subunit alpha (288-296)
  source 1..27: mol_type = other RNA
aagtaccccaacctgctcaatcagctt

SEQ ID NO: 62526 - RNA, 27 nt, synthetic construct
  misc_feature 1..27: note = Protein ERGIC-53 (288-296)
  source 1..27: mol_type = other RNA
aagtaccaggaggaattcgagcacttt

SEQ ID NO: 62527 - RNA, 27 nt, synthetic construct
  misc_feature 1..27: note = T-box transcription factor TBX3 (227-235)
  source 1..27: mol_type = other RNA
aagtaccagcccagattccacatcgtg

SEQ ID NO: 62528 - RNA, 27 nt, synthetic construct
  misc_feature 1..27: note = Isoleucine-tRNA ligase, cytoplasmic (288-296)
  source 1..27: mol_type = other RNA
aagtacagacccctgttcgactatttt

SEQ ID NO: 62529 - RNA, 27 nt, synthetic construct
  misc_feature 1..27: note = Bardet-Biedl syndrome 10 protein (585-593)
  source 1..27: mol_type = other RNA
aagtacagcttcccccacacctatatc

SEQ ID NO: 62530 - RNA, 27 nt, synthetic construct
  misc_feature 1..27: note = Ubiquitin-conjugating enzyme E2 variant 3 (36-44)
  source 1..27: mol_type = other RNA
aagtacagcatggacacctatgtgttc

SEQ ID NO: 62531 - RNA, 27 nt, synthetic construct
  misc_feature 1..27: note = Inositol-trisphosphate 3-kinase C (318-326)
  source 1..27: mol_type = other RNA
aagtacagccccttcgtggtctccttt

SEQ ID NO: 62532 - RNA, 27 nt, synthetic construct
  misc_feature 1..27: note = Serine/threonine-protein phosphatase 5 (314-322)
  source 1..27: mol_type = other RNA
aagtacaccgcccagatgtatgagctg

SEQ ID NO: 62533 - RNA, 27 nt, synthetic construct
  misc_feature 1..27: note = FACT complex subunit SPT16 (92-100)
  source 1..27: mol_type = other RNA
aagtacaccgagggcgtgcagagcctg

SEQ ID NO: 62534 - RNA, 30 nt, synthetic construct
  misc_feature 1..30: note = Glycogen debranching enzyme (495-504)
  source 1..30: mol_type = other RNA
aagtacaccgagatcacagccacttatttc

SEQ ID NO: 62535 - RNA, 27 nt, synthetic construct
  misc_feature 1..27: note = Phospholipase DDHD2 (124-132)
  source 1..27: mol_type = other RNA
aagtacgtgccctatagcgagtccttc

SEQ ID NO: 62536 - RNA, 27 nt, synthetic construct
  misc_feature 1..27: note = Serine/threonine-protein kinase RIO1 (222-230)
  source 1..27: mol_type = other RNA
aagtacgtgagcggcgagttcagattt

SEQ ID NO: 62537 - RNA, 30 nt, synthetic construct
  misc_feature 1..30: note = Splicing factor U2AF 65 kDa subunit (90-99)
  source 1..30: mol_type = other RNA
aagtactgggacgtgccccctccaggcttc

SEQ ID NO: 62538 - RNA, 27 nt, synthetic construct
  misc_feature 1..27: note = Catenin alpha-1 (777-785)
  source 1..27: mol_type = other RNA
ctggcctacctccagagaatcgctctt

SEQ ID NO: 62539 - RNA, 24 nt, synthetic construct
  misc_feature 1..24: note = Heterogeneous nuclear ribonucleoprotein F (259-266)
  source 1..24: mol_type = other RNA
ctgttcggcagagacctcagctac

SEQ ID NO: 62540 - RNA, 27 nt, synthetic construct
  misc_feature 1..27: note = Tubulin beta-6 chain (312-320)
  source 1..27: mol_type = other RNA
ctgttcaagagaatcagcgagcagttt

SEQ ID NO: 62541 - RNA, 24 nt, synthetic construct
  misc_feature 1..24: note = Plectin (4148-4155)
  source 1..24: mol_type = other RNA
ctgatcgaccaccagacctacctc

SEQ ID NO: 62542 - RNA, 36 nt, synthetic construct
  misc_feature 1..36: note = Heat shock 70 kDa protein 1-like (198-209)
  source 1..36: mol_type = other RNA
ctgatcttcgacctcggcgggggaacctttgatgtg

SEQ ID NO: 62543 - RNA, 27 nt, synthetic construct
  misc_feature 1..27: note = ATP synthase subunit beta, mitochondrial (215-223)
  source 1..27: mol_type = other RNA
ctgatcatggagctcattaacaatgtg

SEQ ID NO: 62544 - RNA, 27 nt, synthetic construct
  misc_feature 1..27: note = DNA damage-binding protein 1 (880-888)
  source 1..27: mol_type = other RNA
ctgctcgccagcatcaactccaccgtg

SEQ ID NO: 62545 - RNA, 30 nt, synthetic construct
  misc_feature 1..30: note = Zinc finger protein 530 (30-39)
  source 1..30: mol_type = other RNA
ctgctcgacgagatgcagagacttctgtac

SEQ ID NO: 62546 - RNA, 27 nt, synthetic construct
  misc_feature 1..27: note = Phospholysine phosphohistidine inorganic pyrophosphate phosphatase (15-23)
  source 1..27: mol_type = other RNA
ctgctcgacatcagcggcgtgctttac

SEQ ID NO: 62547 - RNA, 27 nt, synthetic construct
  misc_feature 1..27: note = Vacuolar fusion protein CCZ1 homolog (130-138)
  source 1..27: mol_type = other RNA
ctgctcgacaaggtgtacagctccgtc

SEQ ID NO: 62548 - RNA, 27 nt, synthetic construct
  misc_feature 1..27: note = SPRY domain-containing SOCS box protein 1 (138-146)
  source 1..27: mol_type = other RNA
ctgctcgacatgccccctgtgagctac

SEQ ID NO: 62549 - RNA, 27 nt, synthetic construct
  misc_feature 1..27: note = Beta-hexosaminidase subunit alpha (173-181)
  source 1..27: mol_type = other RNA
ctgctcgacaccagcagacactacctt

SEQ ID NO: 62550 - RNA, 27 nt, synthetic construct
  misc_feature 1..27: note = Fragile X mental retardation protein 1 (20-28)
  source 1..27: mol_type = other RNA
ctgctcgactaccaccttaactatctg

SEQ ID NO: 62551 - RNA, 27 nt, synthetic construct
  misc_feature 1..27: note = Supervillin (34-42)
  source 1..27: mol_type = other RNA
ctgctcgaggaagacacccccagatac

SEQ ID NO: 62552 - RNA, 27 nt, synthetic construct
  misc_feature 1..27: note = LEM domain-containing protein 2 (269-277)
  source 1..27: mol_type = other RNA
ctgctcgagcttctgcacgaattgtac

SEQ ID NO: 62553 - RNA, 33 nt, synthetic construct
  misc_feature 1..33: note = UDP-N-acetylglucosamine/UDP-glucose/GDP-mannose transporter (133-143)
  source 1..33: mol_type = other RNA
ctgctcgagaccatcattcttggcaagcagtac

SEQ ID NO: 62554 - RNA, 33 nt, synthetic construct
  misc_feature 1..33: note = Complement decay-accelerating factor (9-19)
  source 1..33: mol_type = other RNA
ctgctcggcgagcttcccagactgttgttactg

SEQ ID NO: 62555 - RNA, 24 nt, synthetic construct
  misc_feature 1..24: note = Kelch-like protein 24 (405-412)
  source 1..24: mol_type = other RNA
ctgctcggcaaggtgtacgtcgtt

SEQ ID NO: 62556 - RNA, 27 nt, synthetic construct
  misc_feature 1..27: note = Myosin-9 (292-300)
  source 1..27: mol_type = other RNA
ctgctccttgagccctacaacaagtat

SEQ ID NO: 62557 - RNA, 33 nt, synthetic construct
  misc_feature 1..33: note = Plectin (3700-3710)
  source 1..33: mol_type = other RNA
ctgctcagcgccgaggtggctagacttctgttg

SEQ ID NO: 62558 - RNA, 27 nt, synthetic construct
  misc_feature 1..27: note = Integrin alpha-3 (830-838)
  source 1..27: mol_type = other RNA
ctgctctaccccaccgagatcacagtg

SEQ ID NO: 62559 - RNA, 27 nt, synthetic construct
  misc_feature 1..27: note = Putative heat shock protein HSP 90-beta 2 (24-32)
  source 1..27: mol_type = other RNA
ctgatgagcctcatcattaacaccttc

SEQ ID NO: 62560 - RNA, 27 nt, synthetic construct
  misc_feature 1..27: note = LIM and calponin homology domains-containing protein 1 (480-488)
  source 1..27: mol_type = other RNA
ctgaacgaccccaatcctatgaagtac

SEQ ID NO: 62561 - RNA, 27 nt, synthetic construct
  misc_feature 1..27: note = Leucine-rich repeat-containing protein 59 (77-85)
  source 1..27: mol_type = other RNA
ctgcccgccgacttcggcagactcgtg

SEQ ID NO: 62562 - RNA, 27 nt, synthetic construct
  misc_feature 1..27: note = DNA-directed RNA polymerase II subunit RPB2 (74-82)
  source 1..27: mol_type = other RNA
ctgcccgccggcatcaacagcattgtg

SEQ ID NO: 62563 - RNA, 27 nt, synthetic construct
  misc_feature 1..27: note = Lysosomal Pro-X carboxypeptidase (301-309)
  source 1..27: mol_type = other RNA
ctgcccgcctggcctatcaaggtggtc

SEQ ID NO: 62564 - RNA, 27 nt, synthetic construct
  misc_feature 1..27: note = Leucine-tRNA ligase, cytoplasmic (424-432)
  source 1..27: mol_type = other RNA
ctgcccttcgagcctgtgccagtcatc

SEQ ID NO: 62565 - RNA, 30 nt, synthetic construct
  misc_feature 1..30: note = RNA-binding protein 26 (329-338)
  source 1..30: mol_type = other RNA
ctgcccttccctgcccagccaccggtggtc

SEQ ID NO: 62566 - RNA, 30 nt, synthetic construct
  misc_feature 1..30: note = Putative RNA polymerase II subunit B1 CTD phosphatase RPAP2 (434-443)
  source 1..30: mol_type = other RNA
ctgcccttcagaggcagcgggaccgccatc

SEQ ID NO: 62567 - RNA, 27 nt, synthetic construct
  misc_feature 1..27: note = Major facilitator superfamily domain-containing protein 12 (308-316)
  source 1..27: mol_type = other RNA
ctgcccaagaaattcatcgccaccatt

SEQ ID NO: 62568 - RNA, 27 nt, synthetic construct
  misc_feature 1..27: note = Targeting protein for Xklp2 (528-536)
  source 1..27: mol_type = other RNA
ctgcccctccctcacttcgacaccatc

SEQ ID NO: 62569 - RNA, 27 nt, synthetic construct
  misc_feature 1..27: note = Heat shock 70 kDa protein 13 (26-34)
  source 1..27: mol_type = other RNA
ctgcccctccctaccccaaaggtgatc

SEQ ID NO: 62570 - RNA, 27 nt, synthetic construct
  misc_feature 1..27: note = Alpha/beta hydrolase domain-containing protein 14B (203-211)
  source 1..27: mol_type = other RNA
ctgcccaaccacagagtgctcatcatg

SEQ ID NO: 62571 - RNA, 27 nt, synthetic construct
  misc_feature 1..27: note = Ubiquitin carboxyl-terminal hydrolase 11 (143-151)
  source 1..27: mol_type = other RNA
ctgcccaacatccagaaggtggaggtc

SEQ ID NO: 62572 - RNA, 24 nt, synthetic construct
  misc_feature 1..24: note = Protein transport protein Sec61 subunit alpha isoform 2 (217-224)
  source 1..24: mol_type = other RNA
ctgcccaacctcatgaatcttatc

SEQ ID NO: 62573 - RNA, 24 nt, synthetic construct
  misc_feature 1..24: note = Unconventional myosin-X (129-136)
  source 1..24: mol_type = other RNA
ctgccccctcacatcttcgccatt

SEQ ID NO: 62574 - RNA, 27 nt, synthetic construct
  misc_feature 1..27: note = Mimitin, mitochondrial (121-129)
  source 1..27: mol_type = other RNA
ctgccccctccagtgcagacccaaatc

SEQ ID NO: 62575 - RNA, 27 nt, synthetic construct
  misc_feature 1..27: note = Phosphoglycerate kinase 1 (181-189)
  source 1..27: mol_type = other RNA
ctgccccagaaggccggcgggttcctc

SEQ ID NO: 62576 - RNA, 27 nt, synthetic construct
  misc_feature 1..27: note = Coatomer subunit beta' (762-770)
  source 1..27: mol_type = other RNA
ctgcccagccaggtgtccagagtcgtt

SEQ ID NO: 62577 - RNA, 27 nt, synthetic construct
  misc_feature 1..27: note = Neutral amino acid transporter B(0) (246-254)
  source 1..27: mol_type = other RNA
ctgcccgtggaccacatcagcctcatt

SEQ ID NO: 62578 - RNA, 27 nt, synthetic construct
  misc_feature 1..27: note = Protein TALPID3 (38-46)
  source 1..27: mol_type = other RNA
ctgcccgtgggcaccgggacaagcctc

SEQ ID NO: 62579 - RNA, 27 nt, synthetic construct
  misc_feature 1..27: note = Centrosomal protein of 63 kDa (446-454)
  source 1..27: mol_type = other RNA
ctgcccgtgagccctctcggctccatc

SEQ ID NO: 62580 - RNA, 24 nt, synthetic construct
  misc_feature 1..24: note = Clathrin heavy chain 1 (859-866)
  source 1..24: mol_type = other RNA
ctgccctggctcgaggccagaatc

SEQ ID NO: 62581 - RNA, 24 nt, synthetic construct
  misc_feature 1..24: note = Protein transport protein Sec16A (155-162)
  source 1..24: mol_type = other RNA
ctgccctacctccctcactatatc

SEQ ID NO: 62582 - RNA, 27 nt, synthetic construct
  misc_feature 1..27: note = Very-long-chain (3R)-3-hydroxyacyl-CoA dehydratase 3 (314-322)
  source 1..27: mol_type = other RNA
ctgccctaccctgtgaagatcaaagtc

SEQ ID NO: 62583 - RNA, 27 nt, synthetic construct
  misc_feature 1..27: note = HAUS augmin-like complex subunit 6 (131-139)
  source 1..27: mol_type = other RNA
ctgagcgacctcaagcacatgagatac

SEQ ID NO: 62584 - RNA, 27 nt, synthetic construct
  misc_feature 1..27: note = General transcription factor 3C polypeptide 1 (333-341)
  source 1..27: mol_type = other RNA
ctgagcgactcccagatgaagtcttac

SEQ ID NO: 62585 - RNA, 30 nt, synthetic construct; identical to SEQ ID NO: 38358
  misc_feature 1..30: note = Importin-7 (681-690)
  source 1..30: mol_type = other RNA

SEQ ID NO: 62586 - RNA, 27 nt, synthetic construct
  misc_feature 1..27: note = Cytoplasmic dynein 1 heavy chain 1 (2161-2169)
  source 1..27: mol_type = other RNA
ctgagcgacgtgttccccggcgtccag

SEQ ID NO: 62587 - RNA, 30 nt, synthetic construct; identical to SEQ ID NO: 38360
  misc_feature 1..30: note = Cytoplasmic dynein 1 heavy chain 1 (2161-2170)
  source 1..30: mol_type = other RNA

SEQ ID NO: 62588 - RNA, 39 nt, synthetic construct
  misc_feature 1..39: note = Creatine kinase B-type (162-174)
  source 1..39: mol_type = other RNA
ctgagctccctcgacggcgatcttgccgggagatactat

SEQ ID NO: 62589 - RNA, 27 nt, synthetic construct
  misc_feature 1..27: note = Pumilio homolog 2 (167-175)
  source 1..27: mol_type = other RNA
ctgaccgccgctcagcaacagcagtac

SEQ ID NO: 62590 - RNA, 27 nt, synthetic construct
  misc_feature 1..27: note = 26S proteasome non-ATPase regulatory subunit 2 (391-399)
  source 1..27: mol_type = other RNA
ctgaccgacgatggcaacaagtggctc

SEQ ID NO: 62591 - RNA, 30 nt, synthetic construct
  misc_feature 1..30: note = Neural cell adhesion molecule L1 (975-984)
  source 1..30: mol_type = other RNA
ctgaccgacctcagcccccaccttagatac

SEQ ID NO: 62592 - RNA, 30 nt, synthetic construct
  misc_feature 1..30: note = Pre-mRNA-processing-splicing factor 8 (246-255)
  source 1..30: mol_type = other RNA
ctgaccgacctcgtggatgacaactacttc

SEQ ID NO: 62593 - RNA, 27 nt, synthetic construct
  misc_feature 1..27: note = Exosome component 10 (356-364)
  source 1..27: mol_type = other RNA
ctgaccgaccccgccatcgtgaaggtc

SEQ ID NO: 62594 - RNA, 24 nt, synthetic construct
  misc_feature 1..24: note = Tubulin polyglutamylase complex subunit 2 (125-132)
  source 1..24: mol_type = other RNA
ctgaccgacacattcactgcctac

SEQ ID NO: 62595 - RNA, 27 nt, synthetic construct
  misc_feature 1..27: note = Alpha-N-acetylglucosaminidase (121-129)
  source 1..27: mol_type = other RNA
ctgaccgaggccacacccaacagatac

SEQ ID NO: 62596 - RNA, 27 nt, synthetic construct
  misc_feature 1..27: note = AF4/FMR2 family member 4 (1028-1036)
  source 1..27: mol_type = other RNA
ctgaccgagcacctcaagaacagctac

SEQ ID NO: 62597 - RNA, 33 nt, synthetic construct; identical to SEQ ID NO: 38370
  misc_feature 1..33: note = Unconventional myosin-X (71-81)
  source 1..33: mol_type = other RNA

SEQ ID NO: 62598 - RNA, 27 nt, synthetic construct
  misc_feature 1..27: note = Actin-like protein 6A (94-102)
  source 1..27: mol_type = other RNA
ctgaccgagctcatgttcgaacactac

SEQ ID NO: 62599 - RNA, 33 nt, synthetic construct
  misc_feature 1..33: note = Adenosylhomocysteinase 2 (192-202)
  source 1..33: mol_type = other RNA
ctgaccgagctcacagacgatcaggccaagtac

SEQ ID NO: 62600 - RNA, 27 nt, synthetic construct
  misc_feature 1..27: note = Semaphorin-4C (58-66)
  source 1..27: mol_type = other RNA
ctgaccgagcccacaggcctcctttac

SEQ ID NO: 62601 - RNA, 27 nt, synthetic construct
  misc_feature 1..27: note = Oxysterol-binding protein-related protein 1 (580-588)
  source 1..27: mol_type = other RNA
ctgaccgagtacatggaacacacatat

SEQ ID NO: 62602 - RNA, 39 nt, synthetic construct
  misc_feature 1..39: note = Melanoma-associated antigen 1 (239-251)
  source 1..39: mol_type = other RNA
ctgacccaggacctcgtgcaagagaagtaccttgaatat

SEQ ID NO: 62603 - RNA, 33 nt, synthetic construct
  misc_feature 1..33: note = Caspase recruitment domain-containing protein 8 (43-53)
  source 1..33: mol_type = other RNA
ctggtggacaacagcatcagagagctccagtac

SEQ ID NO: 62604 - RNA, 27 nt, synthetic construct
  misc_feature 1..27: note = Non-canonical poly(A) RNA polymerase PAPD5 (82-90)
  source 1..27: mol_type = other RNA
ctgtacggcagacacttcaactatctc

SEQ ID NO: 62605 - RNA, 27 nt, synthetic construct
  misc_feature 1..27: note = Ras-related protein Rap-2c (70-78)
  source 1..27: mol_type = other RNA
ctgtacatcaagaacggccaggggttc

SEQ ID NO: 62606 - RNA, 30 nt, synthetic construct
  misc_feature 1..30: note = Dedicator of cytokinesis protein 7 (456-465)
  source 1..30: mol_type = other RNA
ctgtacatctatccccagagcctcaacttc

SEQ ID NO: 62607 - RNA, 27 nt, synthetic construct
  misc_feature 1..27: note = Mitochondrial carrier homolog 1 (63-71)
  source 1..27: mol_type = other RNA
ctgtacctccccagcttctttacctat

SEQ ID NO: 62608 - RNA, 27 nt, synthetic construct
  misc_feature 1..27: note = Eukaryotic translation initiation factor 3 subunit C-like protein (609-617)
  source 1..27: mol_type = other RNA
ctgtacaacagaaccatggtgcagctc

SEQ ID NO: 62609 - RNA, 27 nt, synthetic construct
  misc_feature 1..27: note = Serine/threonine-protein phosphatase 5 (284-292)
  source 1..27: mol_type = other RNA
ctgtaccccgaccacttccatctcctt

SEQ ID NO: 62610 - RNA, 27 nt, synthetic construct
  misc_feature 1..27: note = ATPase family AAA domain-containing protein 2B (421-429)
  source 1..27: mol_type = other RNA
ctgtaccccgagatcttcgaaaagttt

SEQ ID NO: 62611 - RNA, 27 nt, synthetic construct
  misc_feature 1..27: note = Syntenin-1 (45-53)
  source 1..27: mol_type = other RNA
ctgtaccccagactctatcctgagctt

SEQ ID NO: 62612 - RNA, 27 nt, synthetic construct
  misc_feature 1..27: note = Nuclear factor erythroid 2-related factor 1 (392-400)
  source 1..27: mol_type = other RNA
ctgtaccaggaggtgttcggcagactc

SEQ ID NO: 62613 - RNA, 27 nt, synthetic construct
  misc_feature 1..27: note = Rapamycin-insensitive companion of mTOR (1676-1684)
  source 1..27: mol_type = other RNA
ctgtacagcgaggtgtcccacctcctt

SEQ ID NO: 62614 - RNA, 24 nt, synthetic construct
  misc_feature 1..24: note = Nuclear protein 1 (29-36)
  source 1..24: mol_type = other RNA
ctgtacagcctcgcccactcctat

SEQ ID NO: 62615 - RNA, 27 nt, synthetic construct
  misc_feature 1..27: note = Protein CLEC16A (171-179)
  source 1..27: mol_type = other RNA
ctgtacaccgaggccatcaagttcttt

SEQ ID NO: 62616 - RNA, 27 nt, synthetic construct
  misc_feature 1..27: note = UDP-glucose:glycoprotein glucosyltransferase 1 (1417-1425)
  source 1..27: mol_type = other RNA
ctgtacgtggtcgacctcaagaaattc

SEQ ID NO: 62617 - RNA, 27 nt, synthetic construct
  misc_feature 1..27: note = Sorting nexin-30 (408-416)
  source 1..27: mol_type = other RNA
atggccgacaagaacatccagtactat

SEQ ID NO: 62618 - RNA, 24 nt, synthetic construct
  misc_feature 1..24: note = HLA class I histocompatibility antigen, Cw-2 alpha chain (4-11)
  source 1..24: mol_type = other RNA
atggcccccagaaccctgctcctt

SEQ ID NO: 62619 - RNA, 24 nt, synthetic construct
  misc_feature 1..24: note = HLA class I histocompatibility antigen, A-23 alpha chain (4-11)
  source 1..24: mol_type = other RNA
atggcccccagaaccctggtgctc

SEQ ID NO: 62620 - RNA, 30 nt, synthetic construct
  misc_feature 1..30: note = Uroporphyrinogen decarboxylase (66-75)
  source 1..30: mol_type = other RNA
atgctggacgatttcggcccccacagatac

SEQ ID NO: 62621 - RNA, 27 nt, synthetic construct
  misc_feature 1..27: note = ATP-binding cassette sub-family F member 1 (474-482)
  source 1..27: mol_type = other RNA
atgctggacgagcccaccaaccacctc

SEQ ID NO: 62622 - RNA, 27 nt, synthetic construct
  misc_feature 1..27: note = V-type proton ATPase subunit S1 (306-314)
  source 1..27: mol_type = other RNA
atgctgcaggacttccaaatccaggcc

SEQ ID NO: 62623 - RNA, 27 nt, synthetic construct
  misc_feature 1..27: note = Lysine-specific demethylase 5A (1454-1462)
  source 1..27: mol_type = other RNA
atgatggtgggcgacctgctcgaggtc

SEQ ID NO: 62624 - RNA, 27 nt, synthetic construct
  misc_feature 1..27: note = Inosine-5'-monophosphate dehydrogenase (348-356)
  source 1..27: mol_type = other RNA
atgatgtacagcggcgagctgaagttc

SEQ ID NO: 62625 - RNA, 27 nt, synthetic construct
  misc_feature 1..27: note = Nucleolar pre-ribosomal-associated protein 1 (691-699)
  source 1..27: mol_type = other RNA
atgccccacctgagcatgcagcaagtg

SEQ ID NO: 62626 - RNA, 24 nt, synthetic construct
  misc_feature 1..24: note = Myoferlin (1357-1364)
  source 1..24: mol_type = other RNA
atgccccctctggtgatcaaggtc

SEQ ID NO: 62627 - RNA, 27 nt, synthetic construct
  misc_feature 1..27: note = Serine/threonine-protein kinase D3 (532-540)
  source 1..27: mol_type = other RNA
atgcccgtgacccctcaggccagcgtc

SEQ ID NO: 62628 - RNA, 27 nt, synthetic construct
  misc_feature 1..27: note = Progressive ankylosis protein homolog (288-296)
  source 1..27: mol_type = other RNA
atgccctacggctggctgaccgagatc

SEQ ID NO: 62629 - RNA, 30 nt, synthetic construct
  misc_feature 1..30: note = YTH domain-containing family protein 2 (206-215)
  source 1..30: mol_type = other RNA
atgagcgactcctacctgccctcttattac

SEQ ID NO: 62630 - RNA, 27 nt, synthetic construct
  misc_feature 1..27: note = Bleomycin hydrolase (410-418)
  source 1..27: mol_type = other RNA
atgaccgacgagtggttcagcgaatac

SEQ ID NO: 62631 - RNA, 27 nt, synthetic construct
  misc_feature 1..27: note = Eukaryotic initiation factor 4A-III (233-241)
  source 1..27: mol_type = other RNA
atgaccgaccccatcagaattctggtg

SEQ ID NO: 62632 - RNA, 36 nt, synthetic construct
  misc_feature 1..36: note = Cytochrome c oxidase subunit 1 (484-495)
  source 1..36: mol_type = other RNA
atggtggaggaacccagcatgaacctggagtggctc

SEQ ID NO: 62633 - RNA, 33 nt, synthetic construct
  misc_feature 1..33: note = Son of sevenless homolog 2 (615-625)
  source 1..33: mol_type = other RNA
atgtacgccgaccccaacttcgtgagaaccttt

SEQ ID NO: 62634 - RNA, 27 nt, synthetic construct
  misc_feature 1..27: note = Trafficking protein particle complex subunit 2 (93-101)
  source 1..27: mol_type = other RNA
atgtacctgaagaccgtggacaaattc

SEQ ID NO: 62635 - RNA, 27 nt, synthetic construct
  misc_feature 1..27: note = Pyruvate carboxylase, mitochondrial (1012-1020)
  source 1..27: mol_type = other RNA
atgtaccccgacgtgttcgcccacttt

SEQ ID NO: 62636 - RNA, 27 nt, synthetic construct
  misc_feature 1..27: note = Constitutive coactivator of PPAR-gamma-like protein 1 (568-576)
  source 1..27: mol_type = other RNA
atgtacccctatatcttccacgtgctg

SEQ ID NO: 62637 - RNA, 27 nt, synthetic construct
  misc_feature 1..27: note = Msx2-interacting protein (2894-2902)
  source 1..27: mol_type = other RNA
aacgccagccccgtgatctcctctgtc

SEQ ID NO: 62638 - RNA, 27 nt, synthetic construct
  misc_feature 1..27: note = Cytoplasmic dynein 1 heavy chain 1 (3346-3354)
  source 1..27: mol_type = other RNA
aacttcatccccaccattgtgaatttt

SEQ ID NO: 62639 - RNA, 30 nt, synthetic construct
  misc_feature 1..30: note = Ras GTPase-activating-like protein IQGAP3 (896-905)
  source 1..30: mol_type = other RNA
aacatcatggacattaagataggcctgctc

SEQ ID NO: 62640 - RNA, 27 nt, synthetic construct
  misc_feature 1..27: note = Tuberin (178-186)
  source 1..27: mol_type = other RNA
aacctggccgcttacgtgcccctcctt

SEQ ID NO: 62641 - RNA, 27 nt, synthetic construct
  misc_feature 1..27: note = Nestin (83-91)
  source 1..27: mol_type = other RNA
aacctggccgaggaactcgagggcgtg

SEQ ID NO: 62642 - RNA, 36 nt, synthetic construct
  misc_feature 1..36: note = Spliceosome RNA helicase DDX39B (201-212)
  source 1..36: mol_type = other RNA
aacctgttcggcagagggatggacatcgagagggtg

SEQ ID NO: 62643 - RNA, 27 nt, synthetic construct
  misc_feature 1..27: note = Protein unc-45 homolog A (297-305)
  source 1..27: mol_type = other RNA
aacctgctcgaccttctgaccgaggtg

SEQ ID NO: 62644 - RNA, 30 nt, synthetic construct
  misc_feature 1..30: note = Ras GTPase-activating-like protein IQGAP2 (826-835)
  source 1..30: mol_type = other RNA
aacctgatggacatcaagattggcctcctt

SEQ ID NO: 62645 - RNA, 42 nt, synthetic construct
  misc_feature 1..42: note = Peroxisome proliferator-activated receptor gamma coactivator 1-alpha (767-780)
  source 1..42: mol_type = other RNA
aacagcgacgatttcgaccccgcctccaccaagtctaaatac

SEQ ID NO: 62646 - RNA, 33 nt, synthetic construct
  misc_feature 1..33: note = NADH-ubiquinone oxidoreductase chain 5 (109-119)
  source 1..33: mol_type = other RNA
aacagcgaccccaatatcaaccagttctttaag

SEQ ID NO: 62647 - RNA, 27 nt, synthetic construct
  misc_feature 1..27: note = Cadherin EGF LAG seven-pass G-type receptor 2 (2584-2592)
  source 1..27: mol_type = other RNA
aacagcgacaccctgctcttccactac

SEQ ID NO: 62648 - RNA, 27 nt, synthetic construct
  misc_feature 1..27: note = Unconventional myosin-X (1519-1527)
  source 1..27: mol_type = other RNA
aacagcgacgtggtcgagcagatctac

SEQ ID NO: 62649 - RNA, 27 nt, synthetic construct
  misc_feature 1..27: note = Dedicator of cytokinesis protein 9 (118-126)
  source 1..27: mol_type = other RNA
aacagcgactggcacctggtgaattac

SEQ ID NO: 62650 - RNA, 27 nt, synthetic construct
  misc_feature 1..27: note = Serine/threonine-protein kinase RIO3 (378-386)
  source 1..27: mol_type = other RNA
aacagcgaggaaatgaaggaggcctac

SEQ ID NO: 62651 - RNA, 27 nt, synthetic construct
  misc_feature 1..27: note = Nuclear factor erythroid 2-related factor 2 (178-186)
  source 1..27: mol_type = other RNA
aacaccgacttcggcgatgagttttac

SEQ ID NO: 62652 - RNA, 27 nt, synthetic construct
  misc_feature 1..27: note = 26S proteasome non-ATPase regulatory subunit 12 (218-226)
  source 1..27: mol_type = other RNA
aacaccgagaagctgaaactcaagtac

SEQ ID NO: 62653 - RNA, 27 nt, synthetic construct
  misc_feature 1..27: note = Transgelin-2 (106-114)
  source 1..27: mol_type = other RNA
aacaccacagacatcttccagactgtg

SEQ ID NO: 62654 - RNA, 33 nt, synthetic construct
  misc_feature 1..33: note = Anaphase-promoting complex subunit 7 (236-246)
  source 1..33: mol_type = other RNA
aacgtggacctgctcggcagccttgccgatctg

SEQ ID NO: 62655 - RNA, 27 nt, synthetic construct
  misc_feature 1..27: note = C-Jun-amino-terminal kinase-interacting protein 4 (137-145)
  source 1..27: mol_type = other RNA
aactacgccgaccagatcagcagactg

SEQ ID NO: 62656 - RNA, 30 nt, synthetic construct
  misc_feature 1..30: note = Heterogeneous nuclear ribonucleoprotein U-like protein 1 (472-481)
  source 1..30: mol_type = other RNA
aactacgccggcagatgggacgtgctgatc

SEQ ID NO: 62657 - RNA, 27 nt, synthetic construct
  misc_feature 1..27: note = Basic leucine zipper and W2 domain-containing protein 2 (110-118)
  source 1..27: mol_type = other RNA
aactacgcccaggtgttcaataagctg

SEQ ID NO: 62658 - RNA, 27 nt, synthetic construct
  misc_feature 1..27: note = Baculoviral IAP repeat-containing protein 6 (803-811)
  source 1..27: mol_type = other RNA
aactacgccaccagaatcgtgacactg

SEQ ID NO: 62659 - RNA, 27 nt, synthetic construct
  misc_feature 1..27: note = Cleavage stimulation factor subunit 3 (71-79)
  source 1..27: mol_type = other RNA
aactacgacaaggtggagaaactgttc

SEQ ID NO: 62660 - RNA, 27 nt, synthetic construct
  misc_feature 1..27: note = E3 ubiquitin-protein ligase SHPRH (409-417)
  source 1..27: mol_type = other RNA
aactacttcatccccagccactatttt

SEQ ID NO: 62661 - RNA, 30 nt, synthetic construct
  misc_feature 1..30: note = Translocon-associated protein subunit alpha (108-117)
  source 1..30: mol_type = other RNA
aactacaaggacctgaatggcaacgtgttc

SEQ ID NO: 62662 - RNA, 27 nt, synthetic construct
  misc_feature 1..27: note = Ubiquitin fusion degradation protein 1 homolog (197-205)
  source 1..27: mol_type = other RNA
aactacaatgagaagatctatgaactg

SEQ ID NO: 62663 - RNA, 27 nt, synthetic construct
  misc_feature 1..27: note = Neurofibromin (31-39)
  source 1..27: mol_type = other RNA
aactaccccgacgagttcaccaagctg

SEQ ID NO: 62664 - RNA, 27 nt, synthetic construct
  misc_feature 1..27: note = Zinc finger MYM-type protein 4 (344-352)
  source 1..27: mol_type = other RNA
aactaccagaatgtggtccacaagctg

SEQ ID NO: 62665 - RNA, 27 nt, synthetic construct
  misc_feature 1..27: note = Alpha-mannosidase 2x (441-449)
  source 1..27: mol_type = other RNA
aactaccagagactgttcgactttttc

SEQ ID NO: 62666 - RNA, 27 nt, synthetic construct
  misc_feature 1..27: note = Neuron navigator 2 (1368-1376)
  source 1..27: mol_type = other RNA
aactacagcatcattccctatctgctc

SEQ ID NO: 62667 - RNA, 27 nt, synthetic construct
  misc_feature 1..27: note = E1A-binding protein p400 (343-351)
  source 1..27: mol_type = other RNA
cccttcgccaagcctctgccaaccttt

SEQ ID NO: 62668 - RNA, 30 nt, synthetic construct
  misc_feature 1..30: note = Cyclic AMP-responsive element-binding protein 3-like protein 2 (17-26)
  source 1..30: mol_type = other RNA
cccagctacggcgggcagcaacagtcctat

SEQ ID NO: 62669 - RNA, 27 nt, synthetic construct
  misc_feature 1..27: note = Coatomer subunit alpha (1152-1160)
  source 1..27: mol_type = other RNA
cccaccgacgcctaccagctgaactat

SEQ ID NO: 62670 - RNA, 30 nt, synthetic construct
  misc_feature 1..30: note = Endoplasmin (497-506)
  source 1..30: mol_type = other RNA
cccaccgacatcacaagcctggatcagtac

SEQ ID NO: 62671 - RNA, 27 nt, synthetic construct
  misc_feature 1..27: note = Neurofibromin (147-155)
  source 1..27: mol_type = other RNA
cccaccgacctggagacaagaagctac

SEQ ID NO: 62672 - RNA, 27 nt, synthetic construct
  misc_feature 1..27: note = H/ACA ribonucleoprotein complex subunit 1 (96-104)
  source 1..27: mol_type = other RNA
ccctacttcaacgcccctgtgtatctg

SEQ ID NO: 62673 - RNA, 27 nt, synthetic construct
  misc_feature 1..27: note = E3 ubiquitin-protein ligase UBR4 (190-198)
  source 1..27: mol_type = other RNA
ccctacatcattcacaccgtgctgtat

SEQ ID NO: 62674 - RNA, 27 nt, synthetic construct
  misc_feature 1..27: note = Procollagen-lysine,2-oxoglutarate 5-dioxygenase 1 (449-457)
  source 1..27: mol_type = other RNA
ccctacatcagcaacatttatctgata

SEQ ID NO: 62675 - RNA, 27 nt, synthetic construct
  misc_feature 1..27: note = Zinc finger protein 503 (342-350)
  source 1..27: mol_type = other RNA
ccctacaagcctggccagaccgtgttc

SEQ ID NO: 62676 - RNA, 27 nt, synthetic construct
  misc_feature 1..27: note = Synergin gamma (94-102)
  source 1..27: mol_type = other RNA
ccctacctgggccaggcccctttcctc

SEQ ID NO: 62677 - RNA, 27 nt, synthetic construct
  misc_feature 1..27: note = Tubulin polyglutamylase TTLL4 (755-763)
  source 1..27: mol_type = other RNA
ccctacctgatcagcggctccaagttc

SEQ ID NO: 62678 - RNA, 33 nt, synthetic construct
  misc_feature 1..33: note = Protein-L-isoaspartate(D-aspartate) O-methyltransferase (45-55)
  source 1..33: mol_type = other RNA
ccctacatggacagccctcagtccatcggcttc

SEQ ID NO: 62679 - RNA, 30 nt, synthetic construct
  misc_feature 1..30: note = Oxysterol-binding protein-related protein 10 (414-423)
  source 1..30: mol_type = other RNA
ccctacaaccctatcattggcgagaccttc

SEQ ID NO: 62680 - RNA, 30 nt, synthetic construct
  misc_feature 1..30: note = Oxysterol-binding protein-related protein 8 (441-450)
  source 1..30: mol_type = other RNA
ccctacaaccctatcctgggcgagaccttc

SEQ ID NO: 62681 - RNA, 27 nt, synthetic construct
  misc_feature 1..27: note = DNA-dependent protein kinase catalytic subunit (2252-2260)
  source 1..27: mol_type = other RNA
ccctacagactgatcttcgagaagttt

SEQ ID NO: 62682 - RNA, 27 nt, synthetic construct
  misc_feature 1..27: note = Ubiquitin-associated protein 2-like (857-865)
  source 1..27: mol_type = other RNA
ccctacagcggcgacctgaccaagttc

SEQ ID NO: 62683 - RNA, 27 nt, synthetic construct
  misc_feature 1..27: note = Origin recognition complex subunit 5 (303-311)
  source 1..27: mol_type = other RNA
ccctactatagcaagttcatcctgatt

SEQ ID NO: 62684 - RNA, 27 nt, synthetic construct
  misc_feature 1..27: note = Spectrin alpha chain, non-erythrocytic 1 (417-425)
  source 1..27: mol_type = other RNA
cagctgctcggcagcgcccacgaggtg

SEQ ID NO: 62685 - RNA, 27 nt, synthetic construct
  misc_feature 1..27: note = LIM and calponin homology domains-containing protein 1 (431-439)
  source 1..27: mol_type = other RNA
cagatgttcgagggcgtggccagagtc

SEQ ID NO: 62686 - RNA, 27 nt, synthetic construct
  misc_feature 1..27: note = Protein transport protein Sec61 subunit alpha isoform 2 (272-280)
  source 1..27: mol_type = other RNA
cagagcgccctggtgtccaacctctac

SEQ ID NO: 62687 - RNA, 36 nt, synthetic construct
  misc_feature 1..36: note = HLA class I histocompatibility antigen, A-1 alpha chain (86-97)
  source 1..36: mol_type = other RNA
cagagcgaggacggctcccacaccatccaaattatg

SEQ ID NO: 62688 - RNA, 27 nt, synthetic construct
  misc_feature 1..27: note = Peroxisome proliferator-activated receptor gamma coactivator 1-alpha (61-69)
  source 1..27: mol_type = other RNA
cagagcgagatcatttccaaccaatac

SEQ ID NO: 62689 - RNA, 36 nt, synthetic construct
  misc_feature 1..36: note = Probable ubiquitin carboxyl-terminal hydrolase FAF-X (1852-1863)
  source 1..36: mol_type = other RNA
cagagcgagtccgaaaccgccggctctacaaagtac

SEQ ID NO: 62690 - RNA, 27 nt, synthetic construct
  misc_feature 1..27: note = Obscurin-like protein 1 (662-670)
  source 1..27: mol_type = other RNA
caggtggagcccggcgccctgagatac

SEQ ID NO: 62691 - RNA, 33 nt, synthetic construct
  misc_feature 1..33: note = Regulator of nonsense transcripts 1 (738-748)
  source 1..33: mol_type = other RNA
cagtggccccaacctgacaagccaatgttcttt

SEQ ID NO: 62692 - RNA, 27 nt, synthetic construct
  misc_feature 1..27: note = Bardet-Biedl syndrome 4 protein (147-155)
  source 1..27: mol_type = other RNA
cagtacgccagcgctttccactttctg

SEQ ID NO: 62693 - RNA, 27 nt, synthetic construct
  misc_feature 1..27: note = Dynein light chain roadblock-type 1 (48-56)
  source 1..27: mol_type = other RNA
cagtacgccagcctgatgcactccttc

SEQ ID NO: 62694 - RNA, 27 nt, synthetic construct
  misc_feature 1..27: note = Serine/threonine-protein kinase PLK4 (655-663)
  source 1..27: mol_type = other RNA
cagtacgccagcagattcgtgcaactg

SEQ ID NO: 62695 - RNA, 30 nt, synthetic construct
  misc_feature 1..30: note = Neuron navigator 2 (639-648)
  source 1..30: mol_type = other RNA
cagtacgacccctataccgatagcagattc

SEQ ID NO: 62696 - RNA, 27 nt, synthetic construct
  misc_feature 1..27: note = Disks large homolog 5 (1316-1324)
  source 1..27: mol_type = other RNA
cagtacaacccccacgtgcatcaactg

SEQ ID NO: 62697 - RNA, 27 nt, synthetic construct
  misc_feature 1..27: note = YY1-associated protein 1 (219-227)
  source 1..27: mol_type = other RNA
cagtacaaccccaagttccaaaccctg

SEQ ID NO: 62698 - RNA, 27 nt, synthetic construct
  misc_feature 1..27: note = H/ACA ribonucleoprotein complex non-core subunit NAF1 (421-429)
  source 1..27: mol_type = other RNA
cagtaccccttccctctgccagtgttt

SEQ ID NO: 62699 - RNA, 27 nt, synthetic construct
  misc_feature 1..27: note = ATP-dependent RNA helicase DDX24 (585-593)
  source 1..27: mol_type = other RNA
cagtaccccggcagaagcctggtgttc

SEQ ID NO: 62700 - RNA, 33 nt, synthetic construct
  misc_feature 1..33: note = Signal transducer and activator of transcription 1-alpha/beta (67-77)
  source 1..33: mol_type = other RNA
cagtacagcagattctccctggagaacaatttt

SEQ ID NO: 62701 - RNA, 27 nt, synthetic construct
  misc_feature 1..27: note = Regulatory-associated protein of mTOR (699-707)
  source 1..27: mol_type = other RNA
cagtacaccccccacagccatcaattc

SEQ ID NO: 62702 - RNA, 27 nt, synthetic construct
  misc_feature 1..27: note = 60S ribosomal protein L7 (200-208)
  source 1..27: mol_type = other RNA
agattcaaggaggccaacaattttctg

SEQ ID NO: 62703 - RNA, 27 nt, synthetic construct
  misc_feature 1..27: note = Cullin-3 (709-717)
  source 1..27: mol_type = other RNA
agattcctgcccagccctgtggtcatc

SEQ ID NO: 62704 - RNA, 27 nt, synthetic construct
  misc_feature 1..27: note = 40S ribosomal protein S30 (115-123)
  source 1..27: mol_type = other RNA
agattcgtgaacgtcgttcccaccttt

SEQ ID NO: 62705 - RNA, 27 nt, synthetic construct
  misc_feature 1..27: note = Putative PIP5K1A and PSMD4-like protein (555-563)
  source 1..27: mol_type = other RNA
agaatcctgagcaagctccacaccgtg

SEQ ID NO: 62706 - RNA, 27 nt, synthetic construct
  misc_feature 1..27: note = Schlafen family member 5 (693-701)
  source 1..27: mol_type = other RNA
agaatcatggagaagattaggaacgtg

SEQ ID NO: 62707 - RNA, 27 nt, synthetic construct
  misc_feature 1..27: note = Condensin complex subunit 1 (412-420)
  source 1..27: mol_type = other RNA
agactggccgacaagagcgtgctcgtc

SEQ ID NO: 62708 - RNA, 27 nt, synthetic construct
  misc_feature 1..27: note = DNA replication licensing factor MCM4 (739-747)
  source 1..27: mol_type = other RNA
agactggccgaggctcacgcaaaggtg

SEQ ID NO: 62709 - RNA, 30 nt, synthetic construct
  misc_feature 1..30: note = Histone-lysine N-methyltransferase ASH1L (2786-2795)
  source 1..30: mol_type = other RNA
agactggacaagagcgcccacctcttctac

SEQ ID NO: 62710 - RNA, 30 nt, synthetic construct
  misc_feature 1..30: note = Prolyl 3-hydroxylase 1 (554-563)
  source 1..30: mol_type = other RNA
agactggacacccccctctacttcagctat

SEQ ID NO: 62711 - RNA, 27 nt, synthetic construct
  misc_feature 1..27: note = Elongation factor 2 (239-247)
  source 1..27: mol_type = other RNA
agactgatggagcccatctacctcgtg

SEQ ID NO: 62712 - RNA, 30 nt, synthetic construct
  misc_feature 1..30: note = Solute carrier family 22 member 18 (149-158)
  source 1..30: mol_type = other RNA
agacccgccgctctgggcaggctcgggctt

SEQ ID NO: 62713 - RNA, 30 nt, synthetic construct
  misc_feature 1..30: note = BCL-6 corepressor (1395-1404)
  source 1..30: mol_type = other RNA
agacccatgcctccagaggccaggcggctg

SEQ ID NO: 62714 - RNA, 33 nt, synthetic construct
  misc_feature 1..33: note = Protein FAM46B (291-301)
  source 1..33: mol_type = other RNA
agacccaggcctagcaccgacgtgcgggccctg

SEQ ID NO: 62715 - RNA, 27 nt, synthetic construct
  misc_feature 1..27: note = Nuclear factor 1 X-type (113-121)
  source 1..27: mol_type = other RNA
agacaggccgacaaggtgtggaggctg

SEQ ID NO: 62716 - RNA, 27 nt, synthetic construct
  misc_feature 1..27: note = Multiple PDZ domain protein (911-919)
  source 1..27: mol_type = other RNA
agacaggacgagaacacccccagcgtg

SEQ ID NO: 62717 - RNA, 30 nt, synthetic construct
  misc_feature 1..30: note = REST corepressor 1 (336-345)
  source 1..30: mol_type = other RNA
agacagctggacatggagctcgtgagcgtc

SEQ ID NO: 62718 - RNA, 27 nt, synthetic construct
  misc_feature 1..27: note = Bifunctional coenzyme A synthase (204-212)
  source 1..27: mol_type = other RNA
agacaggtggagaaggcctgggctctg

SEQ ID NO: 62719 - RNA, 36 nt, synthetic construct
  misc_feature 1..36: note = Serine/threonine-protein kinase SIK3 (368-379)
  source 1..36: mol_type = other RNA
agaagcgacgcctacgatcactattccgctatctac

SEQ ID NO: 62720 - RNA, 27 nt, synthetic construct
  misc_feature 1..27: note = Truncated EKLF (17-25)
  source 1..27: mol_type = other RNA
agaagcgacgagctgaccaggcactac

SEQ ID NO: 62721 - RNA, 30 nt, synthetic construct
  misc_feature 1..30: note = Unconventional myosin-X (35-44)
  source 1..30: mol_type = other RNA
agaaccgactacggccaggtgttcacatat

SEQ ID NO: 62722 - RNA, 27 nt, synthetic construct
  misc_feature 1..27: note = Ribonuclease P protein subunit p21 (66-74)
  source 1..27: mol_type = other RNA
agaaccatcgccaagaggctggtgctc

SEQ ID NO: 62723 - RNA, 27 nt, synthetic construct
  misc_feature 1..27: note = Serine/threonine-protein kinase MRCK beta (1490-1498)
  source 1..27: mol_type = other RNA
agaaccatggagtgggtgcagacaatc

SEQ ID NO: 62724 - RNA, 27 nt, synthetic construct
  misc_feature 1..27: note = Liprin-beta-1 (738-746)
  source 1..27: mol_type = other RNA
agagtggacggcaggatgctgcactac

SEQ ID NO: 62725 - RNA, 33 nt, synthetic construct
  misc_feature 1..33: note = DNA damage-binding protein 1 (263-273)
  source 1..33: mol_type = other RNA
agagtggaccccaacggcagcaggtacctgctc

SEQ ID NO: 62726 - RNA, 33 nt, synthetic construct
  misc_feature 1..33: note = Src substrate cortactin (131-141)
  source 1..33: mol_type = other RNA
agagtggaccagagcgccgtcggcttcgagtac

SEQ ID NO: 62727 - RNA, 30 nt, synthetic construct
  misc_feature 1..30: note = HLA class I histocompatibility antigen, alpha chain E (284-293)
  source 1..30: mol_type = other RNA
agatggaagcccgccagccagcctaccatc

SEQ ID NO: 62728 - RNA, 33 nt, synthetic construct
  misc_feature 1..33: note = Serine/threonine-protein phosphatase 2A 55 kDa regulatory subunit B alpha isoform (100-110)
  source 1..33: mol_type = other RNA
agatggctgccccagaagaacgccgctcaattc

SEQ ID NO: 62729 - RNA, 27 nt, synthetic construct
  misc_feature 1..27: note = snRNA-activating protein complex subunit 1 (64-72)
  source 1..27: mol_type = other RNA
agatacttcctgcccccttataccttt

SEQ ID NO: 62730 - RNA, 27 nt, synthetic construct
  misc_feature 1..27: note = Heterogeneous nuclear ribonucleoprotein H (275-283)
  source 1..27: mol_type = other RNA
agatacggcgacgggggaagcaccttc

SEQ ID NO: 62731 - RNA, 27 nt, synthetic construct
  misc_feature 1..27: note = Rab proteins geranylgeranyltransferase component A 1 (79-87)
  source 1..27: mol_type = other RNA
agatacggcaacacccccttcctgttt

SEQ ID NO: 62732 - RNA, 30 nt, synthetic construct
  misc_feature 1..30: note = Pre-mRNA-processing-splicing factor 8 (1090-1099)
  source 1..30: mol_type = other RNA
agatacatcgacaggattcacatattcttt

SEQ ID NO: 62733 - RNA, 27 nt, synthetic construct
  misc_feature 1..27: note = Cystine/glutamate transporter (148-156)
  source 1..27: mol_type = other RNA
agatacatcctggagcccttctttatt

SEQ ID NO: 62734 - RNA, 27 nt, synthetic construct
  misc_feature 1..27: note = ER degradation-enhancing alpha-mannosidase-like protein 3 (281-289)
  source 1..27: mol_type = other RNA
agatacatcagccagccccctctgctc

SEQ ID NO: 62735 - RNA, 27 nt, synthetic construct
  misc_feature 1..27: note = Homeodomain-interacting protein kinase 2 (411-419)
  source 1..27: mol_type = other RNA
agatacatcagccagacccaaggcctg

SEQ ID NO: 62736 - RNA, 27 nt, synthetic construct
  misc_feature 1..27: note = DNA-directed RNA polymerase III subunit RPC3 (90-98)
  source 1..27: mol_type = other RNA
agatacatctataccacaaagactctg

SEQ ID NO: 62737 - RNA, 27 nt, synthetic construct
  misc_feature 1..27: note = Probable global transcription activator SNF2L1 (867-875)
  source 1..27: mol_type = other RNA
agatacaaggcccccttccaccagctg

SEQ ID NO: 62738 - RNA, 27 nt, synthetic construct
  misc_feature 1..27: note = Ras GTPase-activating-like protein IQGAP1 (102-110)
  source 1..27: mol_type = other RNA
agatacaaggccaccggcctgcacttc

SEQ ID NO: 62739 - RNA, 30 nt, synthetic construct
  misc_feature 1..30: note = RNA pseudouridylate synthase domain-containing protein 2 (461-470)
  source 1..30: mol_type = other RNA
agatacaagggccccgggttcgagtatttt

SEQ ID NO: 62740 - RNA, 27 nt, synthetic construct
  misc_feature 1..27: note = Cytoplasmic dynein 1 heavy chain 1 (979-987)
  source 1..27: mol_type = other RNA
agatacaagctgtatcaggagatgttc

SEQ ID NO: 62741 - RNA, 30 nt, synthetic construct
  misc_feature 1..30: note = DENN domain-containing protein 1B (346-355)
  source 1..30: mol_type = other RNA
agatacaagcccggcgagcctatcaccttc

SEQ ID NO: 62742 - RNA, 27 nt, synthetic construct
  misc_feature 1..27: note = Trimethylguanosine synthase (469-477)
  source 1..27: mol_type = other RNA
agatacctggagaagaacgtgaaactc

SEQ ID NO: 62743 - RNA, 27 nt, synthetic construct
  misc_feature 1..27: note = Catechol O-methyltransferase (196-204)
  source 1..27: mol_type = other RNA
agatacctgcccgacaccctccttctg

SEQ ID NO: 62744 - RNA, 36 nt, synthetic construct
  misc_feature 1..36: note = Zinc finger protein 281 (390-401)
  source 1..36: mol_type = other RNA
agatacctgcccaccgccagctccaactctgctttc

SEQ ID NO: 62745 - RNA, 30 nt, synthetic construct
  misc_feature 1..30: note = Histone-binding protein RBBP7 (130-139)
  source 1..30: mol_type = other RNA
agatacatgccccagaaccctcacatcatt

SEQ ID NO: 62746 - RNA, 27 nt, synthetic construct
  misc_feature 1..27: note = E3 ubiquitin-protein ligase DZIP3 (194-202)
  source 1..27: mol_type = other RNA
agatacaacggcgggctgctcgagttc

SEQ ID NO: 62747 - RNA, 27 nt, synthetic construct
  misc_feature 1..27: note = Influenza virus NS1A-binding protein (531-539)
  source 1..27: mol_type = other RNA
agatacaaccccgagaataacacctgg

SEQ ID NO: 62748 - RNA, 27 nt, synthetic construct
  misc_feature 1..27: note = Kelch-like protein 11 (425-433)
  source 1..27: mol_type = other RNA
agatacaaccccaatctgaacacctgg

SEQ ID NO: 62749 - RNA, 27 nt, synthetic construct
  misc_feature 1..27: note = Solute carrier family 35 member B1 (235-243)
  source 1..27: mol_type = other RNA
agataccccgccatcatttataacata

SEQ ID NO: 62750 - RNA, 30 nt, synthetic construct
  misc_feature 1..30: note = Myotubularin-related protein 5 (78-87)
  source 1..30: mol_type = other RNA
agatacccccctgacatcagggccaccttc

SEQ ID NO: 62751 - RNA, 30 nt, synthetic construct
  misc_feature 1..30: note = Myotubularin-related protein 13 (1004-1013)
  source 1..30: mol_type = other RNA
agatacccccagagcatcttctccaccttt

SEQ ID NO: 62752 - RNA, 27 nt, synthetic construct
  misc_feature 1..27: note = Golgin subfamily B member 1 (2035-2043)
  source 1..27: mol_type = other RNA
agataccaggagaagatcagcgccctg

SEQ ID NO: 62753 - RNA, 27 nt, synthetic construct
  misc_feature 1..27: note = Zinc phosphodiesterase ELAC protein 2 (313-321)
  source 1..27: mol_type = other RNA
agataccagcaatggatggagaggttc

SEQ ID NO: 62754 - RNA, 27 nt, synthetic construct
  misc_feature 1..27: note = Supervillin (423-431)
  source 1..27: mol_type = other RNA
agataccagacccaacccgtgacactg

SEQ ID NO: 62755 - RNA, 36 nt, synthetic construct
  misc_feature 1..36: note = Magnesium transporter protein 1 (137-148)
  source 1..36: mol_type = other RNA
agatacagctccgccttcaccaacaggatctttttc

SEQ ID NO: 62756 - RNA, 33 nt, synthetic construct
  misc_feature 1..33: note = Retinoic acid receptor alpha (412-422)
  source 1..33: mol_type = other RNA
agatacacccccgagcaggacacaatgactttc

SEQ ID NO: 62757 - RNA, 27 nt, synthetic construct
  misc_feature 1..27: note = Beta-hexosaminidase subunit alpha (36-44)
  source 1..27: mol_type = other RNA
agatacgtgctgtatcccaacaatttc

SEQ ID NO: 62758 - RNA, 33 nt, synthetic construct
  misc_feature 1..33: note = Beta-hexosaminidase subunit alpha (36-46)
  source 1..33: mol_type = other RNA
agatacgtgctgtatcccaacaatttccagttt

SEQ ID NO: 62759 - RNA, 27 nt, synthetic construct
  misc_feature 1..27: note = 39S ribosomal protein L43, mitochondrial (21-29)
  source 1..27: mol_type = other RNA
agatacgtgcagcaactgcagaggctc

SEQ ID NO: 62760 - RNA, 27 nt, synthetic construct
  misc_feature 1..27: note = Syntaxin-binding protein 1 (149-157)
  source 1..27: mol_type = other RNA
agcgccgactccttccagtctttttac

SEQ ID NO: 62761 - RNA, 27 nt, synthetic construct
  misc_feature 1..27: note = Histone-binding protein RBBP4 (220-228)
  source 1..27: mol_type = other RNA
agcttcaacccctactccgagtttatc

SEQ ID NO: 62762 - RNA, 27 nt, synthetic construct
  misc_feature 1..27: note = Hemoglobin subunit alpha (7-15)
  source 1..27: mol_type = other RNA
agcttccccaccacaaagacttacttt

SEQ ID NO: 62763 - RNA, 27 nt, synthetic construct
  misc_feature 1..27: note Dolichyl-diphosphooligosaccharide-proteinosyltransferase subunit 2 (185-193)
  source 1..27: mol_type = other RNA
agcttcacccccgtgggcgacgtcttt

SEQ ID NO: 62764 - RNA, 36 nt, synthetic construct
  misc_feature 1..36: note = Heat shock-related 70 kDa protein 2 (211-222)
  source 1..36: mol_type = other RNA
agcatcctgaccattgaggacggcatattcgaagtg

SEQ ID NO: 62765 - RNA, 27 nt, synthetic construct
  misc_feature 1..27: note = Transcription factor BTF3 (88-96)
  source 1..27: mol_type = other RNA
agcctggccgctaacaccttcacaatc

SEQ ID NO: 62766 - RNA, 27 nt, synthetic construct
  misc_feature 1..27: note = Superkiller viralicidic activity 2-like 2 (92-100)
  source 1..27: mol_type = other RNA
agcctggccgacctcatgcccagagtg

SEQ ID NO: 62767 - RNA, 30 nt, synthetic construct
  misc_feature 1..30: note = Aminopeptidase B (318-327)
  source 1..30: mol_type = other RNA
agcctggccgacgtgatcattcacgagata

SEQ ID NO: 62768 - RNA, 27 nt, synthetic construct
  misc_feature 1..27: note = Epoxide hydrolase 1 (350-358)
  source 1..27: mol_type = other RNA
agcctggacgatctccttaccaacgtg

SEQ ID NO: 62769 - RNA, 27 nt, synthetic construct
  misc_feature 1..27: note = Band 4.1-like protein 2 (550-558)
  source 1..27: mol_type = other RNA
agcctggacggcgcccccatcggggtg

SEQ ID NO: 62770 - RNA, 27 nt, synthetic construct
  misc_feature 1..27: note = RNA-binding motif protein, X-linked-like-2 (67-75)
  source 1..27: mol_type = other RNA
agcctggacggcaaggccatcaaagtg

SEQ ID NO: 62771 - RNA, 27 nt, synthetic construct
  misc_feature 1..27: note = Telomere-associated protein RIF1 (1157-1165)
  source 1..27: mol_type = other RNA
agcctggacaagacctcccccgagatg

SEQ ID NO: 62772 - RNA, 27 nt, synthetic construct
  misc_feature 1..27: note = Cytoskeleton-associated protein 4 (535-543)
  source 1..27: mol_type = other RNA
agcctggacaacctcaaggcctccgtg

SEQ ID NO: 62773 - RNA, 24 nt, synthetic construct
  misc_feature 1..24: note = Signal recognition particle 54 kDa protein (200-207)
  source 1..24: mol_type = other RNA
agcctgttcgaggaaatgctccag

SEQ ID NO: 62774 - RNA, 27 nt, synthetic construct
  misc_feature 1..27: note = WD repeat and FYVE domain-containing protein 3 (1518-1526)
  source 1..27: mol_type = other RNA
agcctgttcgagcactttatcgaactc

SEQ ID NO: 62775 - RNA, 30 nt, synthetic construct; identical to SEQ ID NO: 38548
  misc_feature 1..30: note = Programmed cell death 6-interacting protein (103-112)
  source 1..30: mol_type = other RNA

SEQ ID NO: 62776 - RNA, 36 nt, synthetic construct
  misc_feature 1..36: note = Junction plakoglobin (670-681)
  source 1..36: mol_type = other RNA
agcctgttcaagcacgaccccgccgcttgggaggca

SEQ ID NO: 62777 - RNA, 39 nt, synthetic construct
  misc_feature 1..39: note = Unconventional myosin-Ib (552-564)
  source 1..39: mol_type = other RNA
agcctgttccccgagggcaaccctgccaagatcaatctc

SEQ ID NO: 62778 - RNA, 27 nt, synthetic construct
  misc_feature 1..27: note = Disintegrin and metalloproteinase domain-containing protein 10 (80-88)
  source 1..27: mol_type = other RNA
agcctgttctccgacgagtttaaggtg

SEQ ID NO: 62779 - RNA, 30 nt, synthetic construct
  misc_feature 1..30: note = Renin receptor (103-112)
  source 1..30: mol_type = other RNA
agcctgttctccgaggaaacccccgtggtc

SEQ ID NO: 62780 - RNA, 27 nt, synthetic construct
  misc_feature 1..27: note = Tyrosine-protein phosphatase non-receptor type 9 (479-487)
  source 1..27: mol_type = other RNA
agcctgatcgacttcctcagagtggtc

SEQ ID NO: 62781 - RNA, 27 nt, synthetic construct
  misc_feature 1..27: note = Probable E3 ubiquitin-protein ligase HECTD4 (234-242)
  source 1..27: mol_type = other RNA
agcctgaagaccttcgtgcacacagtc

SEQ ID NO: 62782 - RNA, 30 nt, synthetic construct
  misc_feature 1..30: note = Acyl-coenzyme A thioesterase 1 isoform X1 (59-68)
  source 1..30: mol_type = other RNA
agcctgctcgccggcaaggggttcgctgtg

SEQ ID NO: 62783 - RNA, 27 nt, synthetic construct
  misc_feature 1..27: note = Cell cycle checkpoint control protein RAD9A (254-262)
  source 1..27: mol_type = other RNA
agcctgctcgacggccacttcgtgctt

SEQ ID NO: 62784 - RNA, 27 nt, synthetic construct
  misc_feature 1..27: note = Unconventional myosin-Ib (9-17)
  source 1..27: mol_type = other RNA
agcctgctcgacaacatgatcggcgtg

SEQ ID NO: 62785 - RNA, 27 nt, synthetic construct
  misc_feature 1..27: note = Protein virilizer homolog (1470-1478)
  source 1..27: mol_type = other RNA
agcctgctcgactccgtggtcggcctt

SEQ ID NO: 62786 - RNA, 27 nt, synthetic construct
  misc_feature 1..27: note = Programmed cell death 6-interacting protein (554-562)
  source 1..27: mol_type = other RNA
agcctgctctccaaccttgacgaggtg

SEQ ID NO: 62787 - RNA, 33 nt, synthetic construct
  misc_feature 1..33: note = E3 ubiquitin-protein ligase UBR1 (683-693)
  source 1..33: mol_type = other RNA
agcctgatggaccccaacaagttcctccttctg

SEQ ID NO: 62788 - RNA, 33 nt, synthetic construct
  misc_feature 1..33: note = Insulin receptor substrate 2 (1109-1119)
  source 1..33: mol_type = other RNA
agcctgatggagcaggtgtccggcgtcgaagcc

SEQ ID NO: 62789 - RNA, 27 nt, synthetic construct
  misc_feature 1..27: note = UHRF1-binding protein 1-like (1293-1301)
  source 1..27: mol_type = other RNA
agcctgatgaacatccagcacttcctc

SEQ ID NO: 62790 - RNA, 30 nt, synthetic construct
  misc_feature 1..30: note = DNA-dependent protein kinase catalytic subunit (3481-3490)
  source 1..30: mol_type = other RNA
agcctgatgaccaaggagatctcctctgtg

SEQ ID NO: 62791 - RNA, 27 nt, synthetic construct
  misc_feature 1..27: note = Serpin H1 (304-312)
  source 1..27: mol_type = other RNA
agcctgcccaagggcgtggtcgaggtt

SEQ ID NO: 62792 - RNA, 24 nt, synthetic construct
  misc_feature 1..24: note = Vimentin (226-233)
  source 1..24: mol_type = other RNA
agcctgcaggaggaaatcgccttc

SEQ ID NO: 62793 - RNA, 30 nt, synthetic construct
  misc_feature 1..30: note = Enhancer of mRNA-decapping protein 4 (777-786)
  source 1..30: mol_type = other RNA
agcctgcaggagtccatcctcgcccaagtg

SEQ ID NO: 62794 - RNA, 27 nt, synthetic construct
  misc_feature 1..27: note = Plasma membrane calcium-transporting ATPase 4 (1197-1205)
  source 1..27: mol_type = other RNA
agcctgcagtccctcgagacctctgtg

SEQ ID NO: 62795 - RNA, 27 nt, synthetic construct
  misc_feature 1..27: note = Ubiquitin-associated protein 2-like (493-501)
  source 1..27: mol_type = other RNA
agcctgacctccaagatccccgccctc

SEQ ID NO: 62796 - RNA, 33 nt, synthetic construct
  misc_feature 1..33: note = Ras-related C3 botulinum toxin substrate 1 (39-49)
  source 1..33: mol_type = other RNA
agcctggtgtcccccgcctctttcgagaacgtc

SEQ ID NO: 62797 - RNA, 27 nt, synthetic construct
  misc_feature 1..27: note = Renin receptor (241-249)
  source 1..27: mol_type = other RNA
agcctgtacggcgggaacgccgtggtc

SEQ ID NO: 62798 - RNA, 33 nt, synthetic construct; identical to SEQ ID NO: 38571
  misc_feature 1..33: note = Renin receptor (241-251)
  source 1..33: mol_type = other RNA

SEQ ID NO: 62799 - RNA, 39 nt, synthetic construct
  misc_feature 1..39: note = Renin receptor (241-253)
  source 1..39: mol_type = other RNA
agcctgtacggcgggaacgccgtggtcgagctcgttacc

SEQ ID NO: 62800 - RNA, 27 nt, synthetic construct
  misc_feature 1..27: note = Nucleolar pre-ribosomal-associated protein 1 (1994-2002)
  source 1..27: mol_type = other RNA
agcctgtacatcaaggacatttggctc

SEQ ID NO: 62801 - RNA, 30 nt, synthetic construct
  misc_feature 1..30: note = Endoplasmin (71-80)
  source 1..30: mol_type = other RNA
agcctgtacaagaacaaagagatcttcctc

SEQ ID NO: 62802 - RNA, 27 nt, synthetic construct
  misc_feature 1..27: note = Probable ATP-dependent RNA helicase DDX59 (525-533)
  source 1..27: mol_type = other RNA
agcatggacgagtacgtgcaccagatc

SEQ ID NO: 62803 - RNA, 36 nt, synthetic construct
  misc_feature 1..36: note = Zinc finger protein 841 (58-69)
  source 1..36: mol_type = other RNA
agcatgctggagcagggcaaggaaccctggaccgtg

SEQ ID NO: 62804 - RNA, 27 nt, synthetic construct
  misc_feature 1..27: note = E3 ubiquitin-protein ligase UBR2 (703-711)
  source 1..27: mol_type = other RNA
agcatgatggaccccaaccacttcctg

SEQ ID NO: 62805 - RNA, 27 nt, synthetic construct
  misc_feature 1..27: note = Neuroblast differentiation-associated protein AHNAK (323-331)
  source 1..27: mol_type = other RNA
agcatgtccgaggtggacctgaacgtc

SEQ ID NO: 62806 - RNA, 27 nt, synthetic construct
  misc_feature 1..27: note = Unhealthy ribosome biogenesis protein 2 homolog (629-637)
  source 1..27: mol_type = other RNA
agcatgtccggccccctgatcggggtg

SEQ ID NO: 62807 - RNA, 33 nt, synthetic construct
  misc_feature 1..33: note = Desmoplakin (1673-1683)
  source 1..33: mol_type = other RNA
agcatggtggaggacatcaccggcctgagactc

SEQ ID NO: 62808 - RNA, 39 nt, synthetic construct
  misc_feature 1..39: note = Aminoacyl tRNA synthase complex-interacting multifunctional protein 1 (90-102)
  source 1..39: mol_type = other RNA
agcatggtgtccgagaacgtcatccagtctaccgccgtt

SEQ ID NO: 62809 - RNA, 27 nt, synthetic construct
  misc_feature 1..27: note = Poly (ADP-ribose) polymerase 4 (1186-1194)
  source 1..27: mol_type = other RNA
agccccttccctgacatcccaaaggtg

SEQ ID NO: 62810 - RNA, 27 nt, synthetic construct
  misc_feature 1..27: note = Neuroblast differentiation-associated protein AHNAK (1150-1158)
  source 1..27: mol_type = other RNA
agccccaagggcaaattctccctgttt

SEQ ID NO: 62811 - RNA, 30 nt, synthetic construct
  misc_feature 1..30: note = Cohesin subunit SA-1 (459-468)
  source 1..30: mol_type = other RNA
agccccaacggcaatctgatcagaatgctc

SEQ ID NO: 62812 - RNA, 27 nt, synthetic construct
  misc_feature 1..27: note = Neural Wiskott-Aldrich syndrome protein (82-90)
  source 1..27: mol_type = other RNA
agccccagaggctacttccacaccttt

SEQ ID NO: 62813 - RNA, 27 nt, synthetic construct
  misc_feature 1..27: note = Collagen alpha-1(VII) chain (586-594)
  source 1..27: mol_type = other RNA
agccccagagtgccttccatcgagctg

SEQ ID NO: 62814 - RNA, 27 nt, synthetic construct
  misc_feature 1..27: note = Microtubule-associated protein 4 (280-288)
  source 1..27: mol_type = other RNA
agccccaccaagctggacgtgacactc

SEQ ID NO: 62815 - RNA, 27 nt, synthetic construct
  misc_feature 1..27: note = Kelch repeat and BTB domain-containing protein 2 (594-602)
  source 1..27: mol_type = other RNA
agcccctggaagcctccaacctacctg

SEQ ID NO: 62816 - RNA, 27 nt, synthetic construct
  misc_feature 1..27: note = Molybdenum cofactor sulfurase (515-523)
  source 1..27: mol_type = other RNA
agccaggccgacgtgatccccgctgtc

SEQ ID NO: 62817 - RNA, 27 nt, synthetic construct
  misc_feature 1..27: note = Protein FAM63A (74-82)
  source 1..27: mol_type = other RNA
agctccgccccccctggcccaaccctg

SEQ ID NO: 62818 - RNA, 27 nt, synthetic construct
  misc_feature 1..27: note = Coatomer subunit gamma-2 (186-194)
  source 1..27: mol_type = other RNA
agctccgacaacatcatggtgcagtac

SEQ ID NO: 62819 - RNA, 30 nt, synthetic construct
  misc_feature 1..30: note = Oxysterol-binding protein-related protein 8 (244-253)
  source 1..30: mol_type = other RNA
agctccgactctacccacgtgacattctac

SEQ ID NO: 62820 - RNA, 33 nt, synthetic construct
  misc_feature 1..33: note = RNA-binding protein with multiple splicing 2 (84-94)
  source 1..33: mol_type = other RNA
agctccgacaccacacagcaaggctggaagtac

SEQ ID NO: 62821 - RNA, 27 nt, synthetic construct
  misc_feature 1..27: note = Discoidin domain-containing receptor 2 (676-684)
  source 1..27: mol_type = other RNA
agctccgacgtgagaaccgtctcttac

SEQ ID NO: 62822 - RNA, 42 nt, synthetic construct
  misc_feature 1..42: note = RNA-binding protein EWS (265-278)
  source 1..42: mol_type = other RNA
agctccttcagacaggaccacccctcttcaatgggcgtgtac

SEQ ID NO: 62823 - RNA, 27 nt, synthetic construct
  misc_feature 1..27: note = Bromodomain and WD repeat-containing protein 1 (343-351)
  source 1..27: mol_type = other RNA
agcaccgaccacgtgatcagaatgtac

SEQ ID NO: 62824 - RNA, 30 nt, synthetic construct
  misc_feature 1..30: note = Integrin alpha-5 (179-188)
  source 1..30: mol_type = other RNA
agcaccgacaacttcacaagaatcctggag

SEQ ID NO: 62825 - RNA, 27 nt, synthetic construct
  misc_feature 1..27: note = Actin filament-associated protein 1 (443-451)
  source 1..27: mol_type = other RNA
agcaccgaccccgaggccctgcactac

SEQ ID NO: 62826 - RNA, 33 nt, synthetic construct
  misc_feature 1..33: note = Eukaryotic translation initiation factor 2A (26-36)
  source 1..33: mol_type = other RNA
agcaccgacgtggataagacaggcgcctcctac

SEQ ID NO: 62827 - RNA, 30 nt, synthetic construct
  misc_feature 1..30: note = NADH dehydrogenase (ubiquinone) iron-sulfur protein 8, mitochondrial (174-183)
  source 1..30: mol_type = other RNA
agcaccgagacacacgaagagctgctctac

SEQ ID NO: 62828 - RNA, 39 nt, synthetic construct
  misc_feature 1..39: note = Src substrate cortactin (285-297)
  source 1..39: mol_type = other RNA
agcaccttcgaggacgtgacacaggtctcctctgcctac

SEQ ID NO: 62829 - RNA, 30 nt, synthetic construct
  misc_feature 1..30: note = Protein Smaug homolog 1 (46-55)
  source 1..30: mol_type = other RNA
agcgtggactacggccagacccactattac

SEQ ID NO: 62830 - RNA, 27 nt, synthetic construct
  misc_feature 1..27: note = Eukaryotic peptide chain release factor subunit 1 (70-78)
  source 1..27: mol_type = other RNA
agcgtgctgggcgccatcacctccgtc

SEQ ID NO: 62831 - RNA, 30 nt, synthetic construct
  misc_feature 1..30: note = Elongation factor 2 (500-509)
  source 1..30: mol_type = other RNA
agcgtgtcccccgtcgttagagtggccgta

SEQ ID NO: 62832 - RNA, 27 nt, synthetic construct
  misc_feature 1..27: note = Serum paraoxonase/arylesterase 2 (334-342)
  source 1..27: mol_type = other RNA
agcgtgtacgacggcaagctgctcatc

SEQ ID NO: 62833 - RNA, 33 nt, synthetic construct; identical to SEQ ID NO: 38606
  misc_feature 1..33: note = Renin receptor (47-57)
  source 1..33: mol_type = other RNA

SEQ ID NO: 62834 - RNA, 27 nt, synthetic construct
  misc_feature 1..27: note = Short transient receptor potential channel 4-associated protein (540-548)
  source 1..27: mol_type = other RNA
agctacgccgaccagatgttcctgctc

SEQ ID NO: 62835 - RNA, 27 nt, synthetic construct
  misc_feature 1..27: note = Ankyrin repeat and BTB/POZ domain-containing protein 2 (419-427)
  source 1..27: mol_type = other RNA
agctacgccgagacccccctgcagctc

SEQ ID NO: 62836 - RNA, 27 nt, synthetic construct
  misc_feature 1..27: note = Zinc-binding alcohol dehydrogenase domain-containing protein 2 (16-24)
  source 1..27: mol_type = other RNA
agctacgccagacacttcctggacttt

SEQ ID NO: 62837 - RNA, 30 nt, synthetic construct
  misc_feature 1..30: note = Spatacsin (908-917)
  source 1..30: mol_type = other RNA
agctacgcctccctgcagcaaaacaagtgg

SEQ ID NO: 62838 - RNA, 30 nt, synthetic construct
  misc_feature 1..30: note = Tubulin polyglutamylase TTLL4 (773-782)
  source 1..30: mol_type = other RNA
agctacgaccccctgagaatctatctcttc

SEQ ID NO: 62839 - RNA, 27 nt, synthetic construct
  misc_feature 1..27: note = Kinectin (1090-1098)
  source 1..27: mol_type = other RNA
agctacggcgagtggctgcacgggttc

SEQ ID NO: 62840 - RNA, 27 nt, synthetic construct
  misc_feature 1..27: note = Serine/threonine-protein kinase 3 (65-73)
  source 1..27: mol_type = other RNA
agctacggctccgtgttcaaggccatc

SEQ ID NO: 62841 - RNA, 27 nt, synthetic construct
  misc_feature 1..27: note = Ubiquitin-like modifier-activating enzyme 1 (921-929)
  source 1..27: mol_type = other RNA
agctacaagaacggcttcctgaatctc

SEQ ID NO: 62842 - RNA, 27 nt, synthetic construct
  misc_feature 1..27: note = Unconventional myosin-Va (78-86)
  source 1..27: mol_type = other RNA
agctacctgcacgagcccgccgtgctc

SEQ ID NO: 62843 - RNA, 27 nt, synthetic construct
  misc_feature 1..27: note = Actin-related protein 10 (66-74)
  source 1..27: mol_type = other RNA
agctacctgaaggagttcatccacatt

SEQ ID NO: 62844 - RNA, 27 nt, synthetic construct
  misc_feature 1..27: note = Kelch-like protein 15 (402-410)
  source 1..27: mol_type = other RNA
agctacaacggcaagctgtatgtgttc

SEQ ID NO: 62845 - RNA, 33 nt, synthetic construct
  misc_feature 1..33: note = Coatomer subunit alpha (369-379)
  source 1..33: mol_type = other RNA
agctacaaccccgccgagaatgctgtgctgctc

SEQ ID NO: 62846 - RNA, 27 nt, synthetic construct
  misc_feature 1..27: note = Protein artemis (321-329)
  source 1..27: mol_type = other RNA
agctactccgagatcaaggacttcctg

SEQ ID NO: 62847 - RNA, 27 nt, synthetic construct
  misc_feature 1..27: note = Zinc finger protein 24 (343-351)
  source 1..27: mol_type = other RNA
agctactcccagtcttcaaacctgttc

SEQ ID NO: 62848 - RNA, 27 nt, synthetic construct
  misc_feature 1..27: note = Melanoma-associated antigen 3 (282-290)
  source 1..27: mol_type = other RNA
agctacgtgaaggtcctgcaccatatg

SEQ ID NO: 62849 - RNA, 27 nt, synthetic construct
  misc_feature 1..27: note = Basement membrane-specific heparan sulfate proteoglycan core protein (176-184)
  source 1..27: mol_type = other RNA
agctacgtgacctccccccagggcttc

SEQ ID NO: 62850 - RNA, 27 nt, synthetic construct
  misc_feature 1..27: note = Cell differentiation protein RCD1 homolog (6-14)
  source 1..27: mol_type = other RNA
accgccgctcccgtgcctacaactctg

SEQ ID NO: 62851 - RNA, 27 nt, synthetic construct
  misc_feature 1..27: note = Protein PRRC2C (2488-2496)
  source 1..27: mol_type = other RNA
accgccatccacaacttccccacagtg

SEQ ID NO: 62852 - RNA, 27 nt, synthetic construct
  misc_feature 1..27: note = Lipoma-preferred partner (284-292)
  source 1..27: mol_type = other RNA
accgccatggaccaggtgttccacgtc

SEQ ID NO: 62853 - RNA, 27 nt, synthetic construct
  misc_feature 1..27: note = Integrator complex subunit 1 (301-309)
  source 1..27: mol_type = other RNA
accgccacaatgcacatcctggtggtc

SEQ ID NO: 62854 - RNA, 27 nt, synthetic construct
  misc_feature 1..27: note = Histone-lysine N-methyltransferase 2C (316-324)
  source 1..27: mol_type = other RNA
accttccaggactttagccacatcttc

SEQ ID NO: 62855 - RNA, 27 nt, synthetic construct
  misc_feature 1..27: note = Probable ATP-dependent RNA helicase DDX27 (430-438)
  source 1..27: mol_type = other RNA
accttcacagaccacgtgatgctgttt

SEQ ID NO: 62856 - RNA, 27 nt, synthetic construct
  misc_feature 1..27: note = Zinc finger protein RFP (458-466)
  source 1..27: mol_type = other RNA
accttcacatttagccacgccactttc

SEQ ID NO: 62857 - RNA, 27 nt, synthetic construct
  misc_feature 1..27: note = WD repeat-containing protein 61 (32-40)
  source 1..27: mol_type = other RNA
acccacgtgggcaaggtcaacatcttc

SEQ ID NO: 62858 - RNA, 27 nt, synthetic construct
  misc_feature 1..27: note = Very-long-chain enoyl-CoA reductase (28-36)
  source 1..27: mol_type = other RNA
accatcgccgagattaagaacctgttc

SEQ ID NO: 62859 - RNA, 27 nt, synthetic construct
  misc_feature 1..27: note = Heat shock-related 70 kDa protein 2 (214-222)
  source 1..27: mol_type = other RNA
accatcgaggacggcattttcgaagtg

SEQ ID NO: 62860 - RNA, 27 nt, synthetic construct
  misc_feature 1..27: note = 40S ribosomal protein S4, X isoform (127-135)
  source 1..27: mol_type = other RNA
accatcagataccccgaccctctgatt

SEQ ID NO: 62861 - RNA, 27 nt, synthetic construct
  misc_feature 1..27: note = Protein FAM73A (584-592)
  source 1..27: mol_type = other RNA
accctggccgaggacctcatgcagctt

SEQ ID NO: 62862 - RNA, 33 nt, synthetic construct
  misc_feature 1..33: note = Calmodulin-regulated spectrin-associated protein 1 (102-112)
  source 1..33: mol_type = other RNA
accctggccgagctccagccccctgtgcaactt

SEQ ID NO: 62863 - RNA, 27 nt, synthetic construct
  misc_feature 1..27: note = Importin-4 (587-595)
  source 1..27: mol_type = other RNA
accctggccgagacaatccagggcctc

SEQ ID NO: 62864 - RNA, 27 nt, synthetic construct
  misc_feature 1..27: note = E3 ubiquitin-protein ligase UBR4 (345-353)
  source 1..27: mol_type = other RNA
accctggacgccgctatcagcaaggtg

SEQ ID NO: 62865 - RNA, 27 nt, synthetic construct
  misc_feature 1..27: note = Molybdenum cofactor sulfurase (474-482)
  source 1..27: mol_type = other RNA
accctggacgatgtgcaggccttcctc

SEQ ID NO: 62866 - RNA, 27 nt, synthetic construct
  misc_feature 1..27: note = Solute carrier family 23 member 2 (493-501)
  source 1..27: mol_type = other RNA
accctgttcggcatgatcacagccgtg

SEQ ID NO: 62867 - RNA, 33 nt, synthetic construct
  misc_feature 1..33: note = Putative elongation factor 1-alpha-like 3 (142-152)
  source 1..33: mol_type = other RNA
accctgggcgtgaagcagctcatcgtcggggtt

SEQ ID NO: 62868 - RNA, 27 nt, synthetic construct
  misc_feature 1..27: note = Dynactin subunit 1 (646-654)
  source 1..27: mol_type = other RNA
accctgcacagatacgagcatgccctc

SEQ ID NO: 62869 - RNA, 30 nt, synthetic construct
  misc_feature 1..30: note = 60S acidic ribosomal protein P0 (50-59)
  source 1..30: mol_type = other RNA
accctgcacagcagattcctcgagggcgtg

SEQ ID NO: 62870 - RNA, 27 nt, synthetic construct
  misc_feature 1..27: note = Peptidyl-prolyl cis-trans isomerase FKBP9 (457-465)
  source 1..27: mol_type = other RNA
accctgctcgacagcacatggaacctt

SEQ ID NO: 62871 - RNA, 30 nt, synthetic construct; identical to SEQ ID NO: 38644
  misc_feature 1..30: note = Midasin (3030-3039)
  source 1..30: mol_type = other RNA

SEQ ID NO: 62872 - RNA, 30 nt, synthetic construct
  misc_feature 1..30: note = Puromycin-sensitive aminopeptidase (786-795)
  source 1..30: mol_type = other RNA
accctgctccccgaccttatccagaaggtg

SEQ ID NO: 62873 - RNA, 33 nt, synthetic construct
  misc_feature 1..33: note = 116 kDa U5 small nuclear ribonucleoprotein component (103-113)
  source 1..33: mol_type = other RNA
accctgatggagcagacactccccgtgactgtc

SEQ ID NO: 62874 - RNA, 27 nt, synthetic construct
  misc_feature 1..27: note = SH3 domain-binding glutamic acid-rich-like protein 3 (218-226)
  source 1..27: mol_type = other RNA
accctgcaggagttcctcaagcttgcc

SEQ ID NO: 62875 - RNA, 27 nt, synthetic construct
  misc_feature 1..27: note = Zinc finger BED domain-containing protein 5 (529-537)
  source 1..27: mol_type = other RNA
accctgagcgacttcctcacagagatc

SEQ ID NO: 62876 - RNA, 27 nt, synthetic construct
  misc_feature 1..27: note = Elongation protein 4 homolog (S. cerevisiae), isoform CRA_b (319-327)
  source 1..27: mol_type = other RNA
accctgagcgacgtggtcgttggcctc

SEQ ID NO: 62877 - RNA, 27 nt, synthetic construct
  misc_feature 1..27: note = Protein MON2 homolog (629-637)
  source 1..27: mol_type = other RNA
accctgagcaacaagtcctactctgtg

SEQ ID NO: 62878 - RNA, 39 nt, synthetic construct
  misc_feature 1..39: note = Malate dehydrogenase, mitochondrial (54-66)
  source 1..39: mol_type = other RNA
accctgtacgacatcgcccacacacccggcgtggctgca

SEQ ID NO: 62879 - RNA, 27 nt, synthetic construct
  misc_feature 1..27: note = Cyclic AMP-dependent transcription factor ATF-6 beta (30-38)
  source 1..27: mol_type = other RNA
accctgtacagcggcctcgacgaggtg

SEQ ID NO: 62880 - RNA, 30 nt, synthetic construct
  misc_feature 1..30: note = NAD(P)H dehydrogenase (quinone) 1 (124-133)
  source 1..30: mol_type = other RNA
acccccgccgacgctagaatccagattctg

SEQ ID NO: 62881 - RNA, 27 nt, synthetic construct
  misc_feature 1..27: note = Dual specificity protein phosphatase 4 (356-364)
  source 1..27: mol_type = other RNA
acccccgccacacctactagccagttc

SEQ ID NO: 62882 - RNA, 27 nt, synthetic construct
  misc_feature 1..27: note = Cytoplasmic dynein 1 heavy chain 1 (264-272)
  source 1..27: mol_type = other RNA
acccccagaatccagggcctgacagtg

SEQ ID NO: 62883 - RNA, 27 nt, synthetic construct
  misc_feature 1..27: note = Exostosin-2 (555-563)
  source 1..27: mol_type = other RNA
accagcgacgagctgcagttcggctac

SEQ ID NO: 62884 - RNA, 30 nt, synthetic construct
  misc_feature 1..30: note = Anoctamin-1 (662-671)
  source 1..30: mol_type = other RNA
accagcgacttcatccccagactggtgtac

SEQ ID NO: 62885 - RNA, 33 nt, synthetic construct
  misc_feature 1..33: note = Actin-binding LIM protein 3 (350-360)
  source 1..33: mol_type = other RNA
accagcgaggacatctcccagacatctaagtac

SEQ ID NO: 62886 - RNA, 33 nt, synthetic construct
  misc_feature 1..33: note = Serine/threonine-protein kinase MRCK alpha (699-709)
  source 1..33: mol_type = other RNA
accagcgagctggacaagctcacaactctttac

SEQ ID NO: 62887 - RNA, 30 nt, synthetic construct
  misc_feature 1..30: note = Catenin beta-1 (297-306)
  source 1..30: mol_type = other RNA
accacagactgcctgcagatcctcgcctac

SEQ ID NO: 62888 - RNA, 30 nt, synthetic construct
  misc_feature 1..30: note = Junction plakoglobin (287-296)
  source 1..30: mol_type = other RNA
accacagactgcctgcagctccttgcctac

SEQ ID NO: 62889 - RNA, 27 nt, synthetic construct
  misc_feature 1..27: note = ATP-dependent 6-phosphofructokinase, muscle type (251-259)
  source 1..27: mol_type = other RNA
accacagacttcatctttaacctgtac

SEQ ID NO: 62890 - RNA, 27 nt, synthetic construct
  misc_feature 1..27: note = Serine/threonine-protein kinase N2 (73-81)
  source 1..27: mol_type = other RNA
accacagacaagaaaagcctggcctac

SEQ ID NO: 62891 - RNA, 27 nt, synthetic construct
  misc_feature 1..27: note = Heterogeneous nuclear ribonucleoprotein F (256-264)
  source 1..27: mol_type = other RNA
accacagacctgttcggcagagatctc

SEQ ID NO: 62892 - RNA, 30 nt, synthetic construct
  misc_feature 1..30: note = Heterogeneous nuclear ribonucleoprotein F (256-265)
  source 1..30: mol_type = other RNA
accacagacctgttcggcagagatctcagc

SEQ ID NO: 62893 - RNA, 30 nt, synthetic construct
  misc_feature 1..30: note = Cofilin-1 (63-72)
  source 1..30: mol_type = other RNA
accgtggacgatccctacgccacattcgtc

SEQ ID NO: 62894 - RNA, 27 nt, synthetic construct
  misc_feature 1..27: note = Heat shock cognate 71 kDa protein (138-146)
  source 1..27: mol_type = other RNA
accgtgacaaacgccgtcgttactgtg

SEQ ID NO: 62895 - RNA, 27 nt, synthetic construct
  misc_feature 1..27: note = Kelch-like protein 9 (442-450)
  source 1..27: mol_type = other RNA
accgtgtacggcgggctgatgtatatc

SEQ ID NO: 62896 - RNA, 27 nt, synthetic construct
  misc_feature 1..27: note = Kelch-like protein 13 (468-476)
  source 1..27: mol_type = other RNA
accgtgtacggcggggtcatgtatatc

SEQ ID NO: 62897 - RNA, 30 nt, synthetic construct
  misc_feature 1..30: note = 60S ribosomal protein L13 (24-33)
  source 1..30: mol_type = other RNA
acctggttcaaccagcccgccagaaagatc

SEQ ID NO: 62898 - RNA, 33 nt, synthetic construct; identical to SEQ ID NO: 38671
  misc_feature 1..33: note = WD repeat-containing protein 35 (163-173)
  source 1..33: mol_type = other RNA

SEQ ID NO: 62899 - RNA, 36 nt, synthetic construct
  misc_feature 1..36: note = 26S protease regulatory subunit 4 (183-194)
  source 1..36: mol_type = other RNA
acctacgccgacatcggcgggctggataaccagatt

SEQ ID NO: 62900 - RNA, 27 nt, synthetic construct
  misc_feature 1..27: note = DNA replication licensing factor MCM3 (90-98)
  source 1..27: mol_type = other RNA
acctacgccaagcagtatgaggaattc

SEQ ID NO: 62901 - RNA, 27 nt, synthetic construct
  misc_feature 1..27: note = AT-rich interactive domain-containing protein 2 (938-946)
  source 1..27: mol_type = other RNA
acctacgcccccgctatccaccagatt

SEQ ID NO: 62902 - RNA, 27 nt, synthetic construct
  misc_feature 1..27: note = Ataxin-2-like protein (167-175)
  source 1..27: mol_type = other RNA
acctacgagggcatcttcaagacactg

SEQ ID NO: 62903 - RNA, 27 nt, synthetic construct
  misc_feature 1..27: note = Dedicator of cytokinesis protein 7 (588-596)
  source 1..27: mol_type = other RNA
acctacttcgacaagaactataatctg

SEQ ID NO: 62904 - RNA, 27 nt, synthetic construct
  misc_feature 1..27: note = Tubulin beta-6 chain (156-164)
  source 1..27: mol_type = other RNA
acctacggcgacctgaaccacctcgtg

SEQ ID NO: 62905 - RNA, 27 nt, synthetic construct
  misc_feature 1..27: note = Cytoplasmic aconitate hydratase (542-550)
  source 1..27: mol_type = other RNA
acctacatcaagagcccccctttcttt

SEQ ID NO: 62906 - RNA, 27 nt, synthetic construct
  misc_feature 1..27: note = Fanconi anemia group M protein (303-311)
  source 1..27: mol_type = other RNA
acctacatccagattctggagagcttc

SEQ ID NO: 62907 - RNA, 27 nt, synthetic construct
  misc_feature 1..27: note = Protein FAM178B (655-663)
  source 1..27: mol_type = other RNA
acctacatcagatggcaggagctgctc

SEQ ID NO: 62908 - RNA, 27 nt, synthetic construct
  misc_feature 1..27: note = DNA-dependent protein kinase catalytic subunit (523-531)
  source 1..27: mol_type = other RNA
acctacaaggactatgtggatctgttc

SEQ ID NO: 62909 - RNA, 27 nt, synthetic construct
  misc_feature 1..27: note = ETS translocation variant 3 (134-142)
  source 1..27: mol_type = other RNA
acctacaagttcaactttaataaactg

SEQ ID NO: 62910 - RNA, 33 nt, synthetic construct
  misc_feature 1..33: note = Leucine-rich repeat-containing protein 58 (257-267)
  source 1..33: mol_type = other RNA
acctacctgcccagagagatcctcaaccttatt

SEQ ID NO: 62911 - RNA, 30 nt, synthetic construct
  misc_feature 1..30: note = Eukaryotic translation initiation factor 3 subunit I (47-56)
  source 1..30: mol_type = other RNA
acctacatgggccacacaggggccgtgtgg

SEQ ID NO: 62912 - RNA, 27 nt, synthetic construct
  misc_feature 1..27: note = F-box only protein 38 (157-165)
  source 1..27: mol_type = other RNA
acctacatgccccacgtgcatatcctg

SEQ ID NO: 62913 - RNA, 30 nt, synthetic construct; identical to SEQ ID NO: 38686
  misc_feature 1..30: note = Protein polybromo-1 (261-270)
  source 1..30: mol_type = other RNA

SEQ ID NO: 62914 - RNA, 30 nt, synthetic construct
  misc_feature 1..30: note = Cell division cycle and apoptosis regulator protein 1 (191-200)
  source 1..30: mol_type = other RNA
acctacaaccccaatatgcctttcaagtgg

SEQ ID NO: 62915 - RNA, 27 nt, synthetic construct
  misc_feature 1..27: note = Cell cycle control protein 50A (296-304)
  source 1..27: mol_type = other RNA
acctacaactatcccgtgcactacttc

SEQ ID NO: 62916 - RNA, 27 nt, synthetic construct
  misc_feature 1..27: note = Aryl hydrocarbon receptor (47-55)
  source 1..27: mol_type = other RNA
acctaccccgccgagctgaacaatatc

SEQ ID NO: 62917 - RNA, 27 nt, synthetic construct
  misc_feature 1..27: note = Elongation factor 1-gamma (5-13)
  source 1..27: mol_type = other RNA
acctaccccgagaactggagagccttc

SEQ ID NO: 62918 - RNA, 27 nt, synthetic construct
  misc_feature 1..27: note = Pre-mRNA-processing-splicing factor 8 (224-232)
  source 1..27: mol_type = other RNA
acctaccagagatggcaattcacactg

SEQ ID NO: 62919 - RNA, 27 nt, synthetic construct
  misc_feature 1..27: note = Helicase SKI2W (746-754)
  source 1..27: mol_type = other RNA
acctacacaatgatcctgaacctcctt

SEQ ID NO: 62920 - RNA, 27 nt, synthetic construct
  misc_feature 1..27: note = U5 small nuclear ribonucleoprotein 200 kDa helicase (604-612)
  source 1..27: mol_type = other RNA
acctacacacagctggtgagactcatc

SEQ ID NO: 62921 - RNA, 27 nt, synthetic construct
  misc_feature 1..27: note = Catenin beta-1 (330-338)
  source 1..27: mol_type = other RNA
acctacacatatgagaagctgctctgg

SEQ ID NO: 62922 - RNA, 27 nt, synthetic construct
  misc_feature 1..27: note = Alanine-tRNA ligase, cytoplasmic (24-32)
  source 1..27: mol_type = other RNA
acctacgtgcacagctccgccacaatc

SEQ ID NO: 62923 - RNA, 27 nt, synthetic construct
  misc_feature 1..27: note = E3 ubiquitin-protein ligase RNF213 (931-939)
  source 1..27: mol_type = other RNA
acctacgtgaaggagatcgaagtctgg

SEQ ID NO: 62924 - RNA, 27 nt, synthetic construct
  misc_feature 1..27: note = tRNA wybutosine-synthesizing protein 4 (507-515)
  source 1..27: mol_type = other RNA
acctacgtgccctggcctctgatgctc

SEQ ID NO: 62925 - RNA, 27 nt, synthetic construct
  misc_feature 1..27: note = Cholinephosphotransferase 1 (178-186)
  source 1..27: mol_type = other RNA
acctacgtgagcggcatgctgagattc

SEQ ID NO: 62926 - RNA, 27 nt, synthetic construct
  misc_feature 1..27: note = Kinectin (1222-1230)
  source 1..27: mol_type = other RNA
acctacgtgacagaggtcagagaactg

SEQ ID NO: 62927 - RNA, 27 nt, synthetic construct
  misc_feature 1..27: note = Renin receptor (97-105)
  source 1..27: mol_type = other RNA
gtggccaacagcatccactccctgttc

SEQ ID NO: 62928 - RNA, 27 nt, synthetic construct
  misc_feature 1..27: note = Elongation factor 1-alpha 1 (433-441)
  source 1..27: mol_type = other RNA
gtggccgtcggcgttatcaaggctgtg

SEQ ID NO: 62929 - RNA, 27 nt, synthetic construct
  misc_feature 1..27: note = Glycogen synthase kinase-3 alpha (117-125)
  source 1..27: mol_type = other RNA
gtggcctacaccgacatcaaggtcatt

SEQ ID NO: 62930 - RNA, 27 nt, synthetic construct
  misc_feature 1..27: note = Influenza virus NS1A-binding protein (484-492)
  source 1..27: mol_type = other RNA
gtgttcgaccccgtcaccaagctgtgg

SEQ ID NO: 62931 - RNA, 39 nt, synthetic construct
  misc_feature 1..39: note = Cathepsin D (178-190)
  source 1..39: mol_type = other RNA
gtgttcggcgaggccaccaagcagcccgggatcacattt

SEQ ID NO: 62932 - RNA, 30 nt, synthetic construct
  misc_feature 1..30: note = Pre-mRNA-processing factor 19 (271-280)
  source 1..30: mol_type = other RNA
gtgttccaccccagccaggacctggtcttt

SEQ ID NO: 62933 - RNA, 27 nt, synthetic construct
  misc_feature 1..27: note = Heterogeneous nuclear ribonucleoprotein C-like 1 (18-26)
  source 1..27: mol_type = other RNA
gtgttcatcggcaacctgaataccctc

SEQ ID NO: 62934 - RNA, 33 nt, synthetic construct
  misc_feature 1..33: note = Tectonic-3 (150-160)
  source 1..33: mol_type = other RNA
gtgttcatggacagcaacggcatcagacagttt

SEQ ID NO: 62935 - RNA, 30 nt, synthetic construct
  misc_feature 1..30: note = Serine/threonine-protein kinase N2 (753-762)
  source 1..30: mol_type = other RNA
gtgttcagcgagcccagagccgtcttttac

SEQ ID NO: 62936 - RNA, 27 nt, synthetic construct
  misc_feature 1..27: note = Paired amphipathic helix protein Sin3b (212-220)
  source 1..27: mol_type = other RNA
gtgttcaccgaggtcgccaacctgttt

SEQ ID NO: 62937 - RNA, 33 nt, synthetic construct
  misc_feature 1..33: note = Cytospin-A (478-488)
  source 1..33: mol_type = other RNA
gtgatcgacgaggatgtcaagagcggcagatac

SEQ ID NO: 62938 - RNA, 27 nt, synthetic construct
  misc_feature 1..27: note = Bifunctional glutamate/proline-tRNA ligase (506-514)
  source 1..27: mol_type = other RNA
gtgatcgaccccgtcgcccctagatac

SEQ ID NO: 62939 - RNA, 30 nt, synthetic construct
  misc_feature 1..30: note = Zinc finger protein 638 (208-217)
  source 1..30: mol_type = other RNA
gtgatcgactacggccacgccagcaagtat

SEQ ID NO: 62940 - RNA, 27 nt, synthetic construct
  misc_feature 1..27: note = DNA replication licensing factor MCM4 (151-159)
  source 1..27: mol_type = other RNA
gtgatctggggcaccgacgtcaacgtt

SEQ ID NO: 62941 - RNA, 27 nt, synthetic construct
  misc_feature 1..27: note = Eukaryotic initiation factor 4A-II (181-189)
  source 1..27: mol_type = other RNA
gtgctggacgaggccgatgaaatgctc

SEQ ID NO: 62942 - RNA, 27 nt, synthetic construct
  misc_feature 1..27: note = Protein VPRBP (540-548)
  source 1..27: mol_type = other RNA
gtgctggacgaggccggcagcaccgtc

SEQ ID NO: 62943 - RNA, 27 nt, synthetic construct
  misc_feature 1..27: note = Protein ELYS (1430-1438)
  source 1..27: mol_type = other RNA
gtgctggacgagggcctcaccagcgtc

SEQ ID NO: 62944 - RNA, 33 nt, synthetic construct
  misc_feature 1..33: note = WD repeat-containing protein 48 (472-482)
  source 1..33: mol_type = other RNA
gtgctggaccccaacatggatctcagaaccgtc

SEQ ID NO: 62945 - RNA, 33 nt, synthetic construct
  misc_feature 1..33: note = Acylamino-acid-releasing enzyme (226-236)
  source 1..33: mol_type = other RNA
gtgctggacgtcgagagcggcaacatctccgtt

SEQ ID NO: 62946 - RNA, 30 nt, synthetic construct; identical to SEQ ID NO: 38719
  misc_feature 1..30: note = Serine/threonine-protein kinase Sgk1 (270-279)
  source 1..30: mol_type = other RNA

SEQ ID NO: 62947 - RNA, 33 nt, synthetic construct; identical to SEQ ID NO: 38720
  misc_feature 1..33: note = Serine/threonine-protein kinase Sgk1 (270-280)
  source 1..33: mol_type = other RNA

SEQ ID NO: 62948 - RNA, 36 nt, synthetic construct
  misc_feature 1..36: note = Serine/threonine-protein kinase Sgk1 (270-281)
  source 1..36: mol_type = other RNA
gtgctggactacatcaacggcggggagctcttctat

SEQ ID NO: 62949 - RNA, 27 nt, synthetic construct
  misc_feature 1..27: note = RNA-binding protein 34 (333-341)
  source 1..27: mol_type = other RNA
gtgctgttcgagaacaccgacagcgtc

SEQ ID NO: 62950 - RNA, 30 nt, synthetic construct
  misc_feature 1..30: note = Major prion protein (233-242)
  source 1..30: mol_type = other RNA
gtgctgttcagctccccccctgtcatcctc

SEQ ID NO: 62951 - RNA, 27 nt, synthetic construct
  misc_feature 1..27: note = Protein transport protein Sec16A (1388-1396)
  source 1..27: mol_type = other RNA
gtgctgatcggcagcaaccactccctc

SEQ ID NO: 62952 - RNA, 27 nt, synthetic construct
  misc_feature 1..27: note = ATP-binding cassette sub-family D member 3 (541-549)
  source 1..27: mol_type = other RNA
gtgctgaaggagtacctcgacaacgtc

SEQ ID NO: 62953 - RNA, 30 nt, synthetic construct; identical to SEQ ID NO: 38726
  misc_feature 1..30: note = Phosphotriesterase-related protein (148-157)
  source 1..30: mol_type = other RNA

SEQ ID NO: 62954 - RNA, 33 nt, synthetic construct
  misc_feature 1..33: note = Eukaryotic translation initiation factor 4 gamma 1 (187-197)
  source 1..33: mol_type = other RNA
gtgctgatgaaccagccccctcaaatcgcccca

SEQ ID NO: 62955 - RNA, 27 nt, synthetic construct
  misc_feature 1..27: note = GDP-L-fucose synthase (187-195)
  source 1..27: mol_type = other RNA
gtgctgcccggcctcatccacaaggtc

SEQ ID NO: 62956 - RNA, 27 nt, synthetic construct
  misc_feature 1..27: note = CCR4-NOT transcription complex subunit 4 (471-479)
  source 1..27: mol_type = other RNA
gtgctgccccagagattccctcaattt

SEQ ID NO: 62957 - RNA, 27 nt, synthetic construct
  misc_feature 1..27: note = Mini-chromosome maintenance complex-binding protein (204-212)
  source 1..27: mol_type = other RNA
gtgctgcccagcgtcctcaacaagttc

SEQ ID NO: 62958 - RNA, 30 nt, synthetic construct
  misc_feature 1..30: note = Fatty acid synthase (1496-1505)
  source 1..30: mol_type = other RNA
gtgctgcagggcgacctcgtcatgaacgtt

SEQ ID NO: 62959 - RNA, 27 nt, synthetic construct
  misc_feature 1..27: note = Coatomer subunit alpha (130-138)
  source 1..27: mol_type = other RNA
gtgctgaccggccacaaccattacgtc

SEQ ID NO: 62960 - RNA, 27 nt, synthetic construct
  misc_feature 1..27: note = Protein O-GlcNAcase (247-255)
  source 1..27: mol_type = other RNA
gtgctgtggaccggccccaaggtcgtt

SEQ ID NO: 62961 - RNA, 33 nt, synthetic construct
  misc_feature 1..33: note = Integral membrane protein 2C (51-61)
  source 1..33: mol_type = other RNA
gtgctgtacgaggacagcctctcctctcaggtc

SEQ ID NO: 62962 - RNA, 27 nt, synthetic construct
  misc_feature 1..27: note = Deoxynucleotidyltransferase terminal-interacting protein 2 (359-367)
  source 1..27: mol_type = other RNA
gtgatgaagagcctgacccagacattc

SEQ ID NO: 62963 - RNA, 30 nt, synthetic construct
  misc_feature 1..30: note = Protein C-ets-2 (78-87)
  source 1..30: mol_type = other RNA
gtgatgagccaggccctgaaggctaccttc

SEQ ID NO: 62964 - RNA, 24 nt, synthetic construct
  misc_feature 1..24: note = ER membrane protein complex subunit 1 (192-199)
  source 1..24: mol_type = other RNA
gtgcccttcagccacgtcaacatc

SEQ ID NO: 62965 - RNA, 27 nt, synthetic construct
  misc_feature 1..27: note = ER membrane protein complex subunit 1 (192-200)
  source 1..27: mol_type = other RNA
gtgcccttcagccacgtcaacatcgtt

SEQ ID NO: 62966 - RNA, 24 nt, synthetic construct
  misc_feature 1..24: note = Interferon-induced 35 kDa protein (52-59)
  source 1..24: mol_type = other RNA
gtgcccttcagcgtccctaagatc

SEQ ID NO: 62967 - RNA, 27 nt, synthetic construct
  misc_feature 1..27: note = Protein transport protein Sec16A (69-77)
  source 1..27: mol_type = other RNA
gtgccccacttccctaccccaagcatc

SEQ ID NO: 62968 - RNA, 30 nt, synthetic construct
  misc_feature 1..30: note = Filamin-A (436-445)
  source 1..30: mol_type = other RNA
gtgcccatccctagaagcccatacaccgtc

SEQ ID NO: 62969 - RNA, 27 nt, synthetic construct
  misc_feature 1..27: note = Tubulin alpha-1C chain (394-402)
  source 1..27: mol_type = other RNA
gtgcccaaggacgtcaacgccgctatc

SEQ ID NO: 62970 - RNA, 27 nt, synthetic construct
  misc_feature 1..27: note = Helicase with zinc finger domain 2 (656-664)
  source 1..27: mol_type = other RNA
gtgcccgtcggcttctttagccacatc

SEQ ID NO: 62971 - RNA, 27 nt, synthetic construct
  misc_feature 1..27: note = RNA-binding protein NOB1 (300-308)
  source 1..27: mol_type = other RNA
gtgagcgacgatggcaccctgcacatg

SEQ ID NO: 62972 - RNA, 33 nt, synthetic construct
  misc_feature 1..33: note = rRNA 2'-O-methyltransferase fibrillarin (174-184)
  source 1..33: mol_type = other RNA
gtgagcgacatcgtcggccccgatgggctggtt

SEQ ID NO: 62973 - RNA, 30 nt, synthetic construct; identical to SEQ ID NO: 38746
  misc_feature 1..30: note = Glyoxalase domain-containing protein 4 (145-154)
  source 1..30: mol_type = other RNA

SEQ ID NO: 62974 - RNA, 27 nt, synthetic construct
  misc_feature 1..27: note = Tripeptidyl-peptidase 1 (68-76)
  source 1..27: mol_type = other RNA
gtgagcgacccctcctctcctcagtac

SEQ ID NO: 62975 - RNA, 27 nt, synthetic construct
  misc_feature 1..27: note = DENN domain-containing protein 1B (677-685)
  source 1..27: mol_type = other RNA
gtgagcgaccccacctccggcctggat

SEQ ID NO: 62976 - RNA, 30 nt, synthetic construct
  misc_feature 1..30: note = DENN domain-containing protein 1B (677-686)
  source 1..30: mol_type = other RNA
gtgagcgaccccacctccggcctggatttc

SEQ ID NO: 62977 - RNA, 33 nt, synthetic construct
  misc_feature 1..33: note = Liprin-beta-1 (207-217)
  source 1..33: mol_type = other RNA
gtgagcgagatggactccgaaagactgcagtac

SEQ ID NO: 62978 - RNA, 27 nt, synthetic construct
  misc_feature 1..27: note = DnaJ homolog subfamily B member 12 (287-295)
  source 1..27: mol_type = other RNA
gtgaccgaccacctgggcgtcgtttac

SEQ ID NO: 62979 - RNA, 27 nt, synthetic construct
  misc_feature 1..27: note = Selenocysteine insertion sequence-binding protein 2 (645-653)
  source 1..27: mol_type = other RNA
gtgaccgacctgctcaaggagcttgtc

SEQ ID NO: 62980 - RNA, 27 nt, synthetic construct
  misc_feature 1..27: note = Disabled homolog 2 (128-136)
  source 1..27: mol_type = other RNA
gtgaccgacaacagagccttcggctac

SEQ ID NO: 62981 - RNA, 27 nt, synthetic construct
  misc_feature 1..27: note = Integrin beta-1 (77-85)
  source 1..27: mol_type = other RNA
gtgaccgaggaattccagcccgtctac

SEQ ID NO: 62982 - RNA, 33 nt, synthetic construct
  misc_feature 1..33: note = Neutral alpha-glucosidase AB (29-39)
  source 1..33: mol_type = other RNA
gtgaccgagggcggggaaccctacagactgtat

SEQ ID NO: 62983 - RNA, 27 nt, synthetic construct
  misc_feature 1..27: note = Cohesin subunit SA-1 (101-109)
  source 1..27: mol_type = other RNA
gtggtcgacgattggatcgagagctac

SEQ ID NO: 62984 - RNA, 30 nt, synthetic construct
  misc_feature 1..30: note = Tubulin-tyrosine ligase (13-22)
  source 1..30: mol_type = other RNA
gtgtacgccgaggtcagcagactgctcctt

SEQ ID NO: 62985 - RNA, 27 nt, synthetic construct
  misc_feature 1..27: note = E3 ubiquitin-protein ligase MARCH6 (744-752)
  source 1..27: mol_type = other RNA
gtgtacgccaacggcatcagaaatatt

SEQ ID NO: 62986 - RNA, 27 nt, synthetic construct
  misc_feature 1..27: note = Enoyl-CoA delta isomerase 2, mitochondrial (230-238)
  source 1..27: mol_type = other RNA
gtgtacgccagcgacagagctaccttc

SEQ ID NO: 62987 - RNA, 27 nt, synthetic construct
  misc_feature 1..27: note = Receptor tyrosine-protein kinase erbB-3 (110-118)
  source 1..27: mol_type = other RNA
gtgtacgacggcaagttcgccatcttt

SEQ ID NO: 62988 - RNA, 27 nt, synthetic construct
  misc_feature 1..27: note = SRR1-like protein (178-186)
  source 1..27: mol_type = other RNA
gtgtacgaccccctgttcagccagctc

SEQ ID NO: 62989 - RNA, 33 nt, synthetic construct
  misc_feature 1..33: note = Prolow-density lipoprotein receptor-related protein 1 (736-746)
  source 1..33: mol_type = other RNA
gtgtacgagggccccgaactgaaccacgccttc

SEQ ID NO: 62990 - RNA, 30 nt, synthetic construct
  misc_feature 1..30: note = Partitioning defective 3 homolog B (682-691)
  source 1..30: mol_type = other RNA
gtgtacttccccgaccagcacatcaacttt

SEQ ID NO: 62991 - RNA, 27 nt, synthetic construct
  misc_feature 1..27: note = Exocyst complex component 6B (452-460)
  source 1..27: mol_type = other RNA
gtgtacggcttccccgtcaaccagctg

SEQ ID NO: 62992 - RNA, 33 nt, synthetic construct
  misc_feature 1..33: note = Phosphatidylinositol-binding clathrin assembly protein (87-97)
  source 1..33: mol_type = other RNA
gtgtacggcaacgagagattcatccagtatctg

SEQ ID NO: 62993 - RNA, 27 nt, synthetic construct
  misc_feature 1..27: note = Alanine-tRNA ligase, cytoplasmic (92-100)
  source 1..27: mol_type = other RNA
gtgtaccaccataccttctttgagatg

SEQ ID NO: 62994 - RNA, 27 nt, synthetic construct
  misc_feature 1..27: note = Elongator complex protein 1 (1236-1244)
  source 1..27: mol_type = other RNA
gtgtaccacatcctgaaggtcctcttc

SEQ ID NO: 62995 - RNA, 27 nt, synthetic construct
  misc_feature 1..27: note = Sterol regulatory element-binding protein cleavage-activating protein (751-759)
  source 1..27: mol_type = other RNA
gtgtacatcgaccagaccatggtcctg

SEQ ID NO: 62996 - RNA, 27 nt, synthetic construct
  misc_feature 1..27: note = Prelamin-A/C (44-52)
  source 1..27: mol_type = other RNA
gtgtacatcgacagagtcaggagcctg

SEQ ID NO: 62997 - RNA, 27 nt, synthetic construct
  misc_feature 1..27: note = F-box only protein 42 (181-189)
  source 1..27: mol_type = other RNA
gtgtacaaggacctgctcgtccttttc

SEQ ID NO: 62998 - RNA, 27 nt, synthetic construct
  misc_feature 1..27: note = mRNA cap guanine-N7 methyltransferase (390-398)
  source 1..27: mol_type = other RNA
gtgtacaagaaaaccttcctggagttt

SEQ ID NO: 62999 - RNA, 27 nt, synthetic construct
  misc_feature 1..27: note = Kelch repeat and BTB domain-containing protein 6 (407-415)
  source 1..27: mol_type = other RNA
gtgtacaagcccgcccagaacagctgg

SEQ ID NO: 63000 - RNA, 27 nt, synthetic construct
  misc_feature 1..27: note = Brain-specific angiogenesis inhibitor 1-associated protein 2 (16-24)
  source 1..27: mol_type = other RNA
gtgtacaagaccatcatggagcagttc

SEQ ID NO: 63001 - RNA, 27 nt, synthetic construct
  misc_feature 1..27: note = Polymerase I and transcript release factor (225-233)
  source 1..27: mol_type = other RNA
gtgtacaaggtcccccctttcaccttt

SEQ ID NO: 63002 - RNA, 27 nt, synthetic construct
  misc_feature 1..27: note = Sarcolemmal membrane-associated protein (22-30)
  source 1..27: mol_type = other RNA
gtgtacctggacgagcccatcaagatt

SEQ ID NO: 63003 - RNA, 33 nt, synthetic construct
  misc_feature 1..33: note = Molybdenum cofactor sulfurase (50-60)
  source 1..33: mol_type = other RNA
gtgtacctggaccacgccggcgctaccctcttc

SEQ ID NO: 63004 - RNA, 30 nt, synthetic construct
  misc_feature 1..30: note = Plectin (3681-3690)
  source 1..30: mol_type = other RNA
gtgtacctgcccggcagcagacagaccctc

SEQ ID NO: 63005 - RNA, 27 nt, synthetic construct
  misc_feature 1..27: note = Nuclear nucleic acid-binding protein C1D (92-100)
  source 1..27: mol_type = other RNA
gtgtacatgaacagagtcaaggagatc

SEQ ID NO: 63006 - RNA, 27 nt, synthetic construct
  misc_feature 1..27: note = Pre-mRNA-splicing factor SPF27 (137-145)
  source 1..27: mol_type = other RNA
gtgtacaacgagaatctggtccacatg

SEQ ID NO: 63007 - RNA, 27 nt, synthetic construct
  misc_feature 1..27: note = Kelch-like protein 11 (473-481)
  source 1..27: mol_type = other RNA
gtgtacaaccccgagctggacaagtgg

SEQ ID NO: 63008 - RNA, 27 nt, synthetic construct
  misc_feature 1..27: note = Kelch repeat and BTB domain-containing protein 6 (536-544)
  source 1..27: mol_type = other RNA
gtgtacaaccccgtcagagccgagtgg

SEQ ID NO: 63009 - RNA, 33 nt, synthetic construct
  misc_feature 1..33: note = Zinc transporter ZIP6 (191-201)
  source 1..33: mol_type = other RNA
gtgtacaacaccgtcagcgagggcacacacttc

SEQ ID NO: 63010 - RNA, 30 nt, synthetic construct
  misc_feature 1..30: note = BAG family molecular chaperone regulator 3 (113-122)
  source 1..30: mol_type = other RNA
gtgtacccccagcctggcatgcaaagattc

SEQ ID NO: 63011 - RNA, 33 nt, synthetic construct
  misc_feature 1..33: note = 3-ketodihydrosphingosine reductase (150-160)
  source 1..33: mol_type = other RNA
gtgtaccccagcagagccgtcatcaccacaatg

SEQ ID NO: 63012 - RNA, 27 nt, synthetic construct
  misc_feature 1..27: note = Hemoglobin subunit gamma-2 (35-43)
  source 1..27: mol_type = other RNA
gtgtacccctggacccagagattcttt

SEQ ID NO: 63013 - RNA, 27 nt, synthetic construct
  misc_feature 1..27: note = Nuclear factor of activated T-cells 5 (855-863)
  source 1..27: mol_type = other RNA
gtgtaccagcaaaccagccacatgatg

SEQ ID NO: 63014 - RNA, 27 nt, synthetic construct
  misc_feature 1..27: note = Anaphase-promoting complex subunit 2 (564-572)
  source 1..27: mol_type = other RNA
gtgtacagcgccggcgtctatagactg

SEQ ID NO: 63015 - RNA, 33 nt, synthetic construct
  misc_feature 1..33: note = N-acetylgalactosamine kinase (311-321)
  source 1..33: mol_type = other RNA
gtgtacagcgaggccgctagagtcctgcagttc

SEQ ID NO: 63016 - RNA, 27 nt, synthetic construct
  misc_feature 1..27: note = Zinc transporter 6 (62-70)
  source 1..27: mol_type = other RNA
gtgtacagcttcggctttgagagactg

SEQ ID NO: 63017 - RNA, 27 nt, synthetic construct
  misc_feature 1..27: note = La-related protein 4 (319-327)
  source 1..27: mol_type = other RNA
gtgtacagcatcgtcccccagtcctgg

SEQ ID NO: 63018 - RNA, 33 nt, synthetic construct
  misc_feature 1..33: note = Pre-mRNA-processing-splicing factor 8 (1177-1187)
  source 1..33: mol_type = other RNA
gtgtacagcaaggacaaccccaatctgctcttc

SEQ ID NO: 63019 - RNA, 27 nt, synthetic construct
  misc_feature 1..27: note = Condensin-2 complex subunit H2 (66-74)
  source 1..27: mol_type = other RNA
gtgtacagcaagaaagtcgagtatctg

SEQ ID NO: 63020 - RNA, 27 nt, synthetic construct
  misc_feature 1..27: note = Zinc transporter 7 (318-326)
  source 1..27: mol_type = other RNA
gtgtacagcctgcaggagcaacacttc

SEQ ID NO: 63021 - RNA, 33 nt, synthetic construct; identical to SEQ ID NO: 38794
  misc_feature 1..33: note = Ribonuclease P protein subunit p30 (155-165)
  source 1..33: mol_type = other RNA

SEQ ID NO: 63022 - RNA, 27 nt, synthetic construct
  misc_feature 1..27: note = E3 ubiquitin-protein ligase MGRN1 (148-156)
  source 1..27: mol_type = other RNA
gtgtacagccccaagtccccttctctg

SEQ ID NO: 63023 - RNA, 27 nt, synthetic construct
  misc_feature 1..27: note = DDB1- and CUL4-associated factor 13 (310-318)
  source 1..27: mol_type = other RNA
gtgtacaccggcatcgaccaccattgg

SEQ ID NO: 63024 - RNA, 30 nt, synthetic construct
  misc_feature 1..30: note = Nuclear pore complex protein Nup153 (667-676)
  source 1..30: mol_type = other RNA
gtgtacaccagacccgccatcagctccttc

SEQ ID NO: 63025 - RNA, 27 nt, synthetic construct
  misc_feature 1..27: note = Tensin-2 (334-342)
  source 1..27: mol_type = other RNA
gtgtacaccagcggcgtctatcacatc

SEQ ID NO: 63026 - RNA, 27 nt, synthetic construct
  misc_feature 1..27: note = Pre-mRNA-processing-splicing factor 8 (809-817)
  source 1..27: mol_type = other RNA
gtgtacaccacaactgtccactggctg

SEQ ID NO: 63027 - RNA, 27 nt, synthetic construct
  misc_feature 1..27: note = Volume-regulated anion channel subunit LRRC8E (11-19)
  source 1..27: mol_type = other RNA
gtgtacgtcgagaagatcagcttcctg

SEQ ID NO: 63028 - RNA, 27 nt, synthetic construct
  misc_feature 1..27: note = Cleavage and polyadenylation specificity factor subunit 7 (127-135)
  source 1..27: mol_type = other RNA
gtgtacgtcggcagcttctcctggtgg

SEQ ID NO: 63029 - RNA, 27 nt, synthetic construct
  misc_feature 1..27: note = Kinesin-like protein KIF3B (174-182)
  source 1..27: mol_type = other RNA
gtgtacgtcaaggacctgagctccttc

SEQ ID NO: 63030 - RNA, 27 nt, synthetic construct
  misc_feature 1..27: note = Cytochrome c oxidase assembly protein COX11, mitochondrial (223-231)
  source 1..27: mol_type = other RNA
gtgtacgtcctggagagctggcacctc

SEQ ID NO: 63031 - RNA, 27 nt, synthetic construct
  misc_feature 1..27: note = Splicing factor 3B subunit 1 (254-262)
  source 1..27: mol_type = other RNA
gtgtactggaagatctataacagcatt

SEQ ID NO: 63032 - RNA, 27 nt, synthetic construct
  misc_feature 1..27: note Dolichyl-diphosphooligosaccharide-proteinosyltransferase subunit 2 (453-461)
  source 1..27: mol_type = other RNA
gtgtactggacccagctgaacatgttc

SEQ ID NO: 63033 - RNA, 27 nt, synthetic construct
  misc_feature 1..27: note = Tripartite motif-containing protein 47 (182-190)
  source 1..27: mol_type = other RNA
tacgccgacagagctctggcattctat

SEQ ID NO: 63034 - RNA, 27 nt, synthetic construct
  misc_feature 1..27: note = Monocarboxylate transporter 1 (34-42)
  source 1..27: mol_type = other RNA
tacgccttccccaagagcatcaccgtg

SEQ ID NO: 63035 - RNA, 24 nt, synthetic construct
  misc_feature 1..24: note = DDB1- and CUL4-associated factor 4 (355-362)
  source 1..24: mol_type = other RNA
tacgcctatctgcccctccacgtg

SEQ ID NO: 63036 - RNA, 30 nt, synthetic construct; identical to SEQ ID NO: 38809
  misc_feature 1..30: note = Septin-9 (180-189)
  source 1..30: mol_type = other RNA

SEQ ID NO: 63037 - RNA, 27 nt, synthetic construct
  misc_feature 1..27: note = Serine/threonine-protein kinase ATR (1253-1261)
  source 1..27: mol_type = other RNA
tacttcctgcccgaccaccctgagctc

SEQ ID NO: 63038 - RNA, 27 nt, synthetic construct
  misc_feature 1..27: note = Cytochrome c oxidase subunit 2 (113-121)
  source 1..27: mol_type = other RNA
tacggcgggctgatcttcaacagctat

SEQ ID NO: 63039 - RNA, 27 nt, synthetic construct
  misc_feature 1..27: note = Sterol O-acyltransferase 1 (161-169)
  source 1..27: mol_type = other RNA
tacatcgacgagggcagactggtgctc

SEQ ID NO: 63040 - RNA, 27 nt, synthetic construct
  misc_feature 1..27: note = Unconventional myosin-Ic (44-52)
  source 1..27: mol_type = other RNA
tacatcggccccgtgctggtcagcgtt

SEQ ID NO: 63041 - RNA, 27 nt, synthetic construct
  misc_feature 1..27: note = DENN domain-containing protein 5B (228-236)
  source 1..27: mol_type = other RNA
tacatccacaacattctgtatgaggtg

SEQ ID NO: 63042 - RNA, 27 nt, synthetic construct
  misc_feature 1..27: note = Kinesin-like protein KIF1A (510-518)
  source 1..27: mol_type = other RNA
tacatcaaggacggcattaccagagtg

SEQ ID NO: 63043 - RNA, 36 nt, synthetic construct
  misc_feature 1..36: note = Signal recognition particle 9 kDa protein (18-29)
  source 1..36: mol_type = other RNA
tacctggccgaccccatgaaggctagagtggtcctc

SEQ ID NO: 63044 - RNA, 27 nt, synthetic construct
  misc_feature 1..27: note = Ras GTPase-activating-like protein IQGAP2 (898-906)
  source 1..27: mol_type = other RNA
tacctggccaagctcatcttccagatg

SEQ ID NO: 63045 - RNA, 27 nt, synthetic construct
  misc_feature 1..27: note = Kinesin-like protein KIF13A (1108-1116)
  source 1..27: mol_type = other RNA
tacctggacgagcagatcaagaaagtg

SEQ ID NO: 63046 - RNA, 27 nt, synthetic construct
  misc_feature 1..27: note = Metastasis-associated protein MTA3 (123-131)
  source 1..27: mol_type = other RNA
tacctggacaaggaggataccttcttt

SEQ ID NO: 63047 - RNA, 24 nt, synthetic construct
  misc_feature 1..24: note = Guanine nucleotide-binding protein-like 3-like protein (294-301)
  source 1..24: mol_type = other RNA
tacctggacaagttcatcagactc

SEQ ID NO: 63048 - RNA, 27 nt, synthetic construct
  misc_feature 1..27: note = DNA topoisomerase 1 (723-731)
  source 1..27: mol_type = other RNA
tacctggaccccagaatcaccgtggcc

SEQ ID NO: 63049 - RNA, 30 nt, synthetic construct
  misc_feature 1..30: note = Proteasome activator complex subunit 3 (188-197)
  source 1..30: mol_type = other RNA
tacctggaccagatcagcagatattacatt

SEQ ID NO: 63050 - RNA, 36 nt, synthetic construct
  misc_feature 1..36: note = Lysosomal protective protein (125-136)
  source 1..36: mol_type = other RNA
tacctggagagccccgccggcgtggggttctcctat

SEQ ID NO: 63051 - RNA, 33 nt, synthetic construct
  misc_feature 1..33: note = ATP synthase F(0) complex subunit B1, mitochondrial (165-175)
  source 1..33: mol_type = other RNA
tacctgttcgacgtgcagagaaacaatatcgcc

SEQ ID NO: 63052 - RNA, 36 nt, synthetic construct
  misc_feature 1..36: note = ATP synthase F(0) complex subunit B1, mitochondrial (165-176)
  source 1..36: mol_type = other RNA
tacctgttcgacgtgcagagaaacaatatcgccatg

SEQ ID NO: 63053 - RNA, 27 nt, synthetic construct
  misc_feature 1..27: note = WD repeat-containing protein 81 (72-80)
  source 1..27: mol_type = other RNA
tacctgttcgagcccgtggccaaggct

SEQ ID NO: 63054 - RNA, 27 nt, synthetic construct
  misc_feature 1..27: note = WD repeat and FYVE domain-containing protein 3 (158-166)
  source 1..27: mol_type = other RNA
tacctgttctttgacctcccccacgtg

SEQ ID NO: 63055 - RNA, 27 nt, synthetic construct
  misc_feature 1..27: note = LIM domain-containing protein ajuba (391-399)
  source 1..27: mol_type = other RNA
tacctgttcagcggctttcaggaggcc

SEQ ID NO: 63056 - RNA, 27 nt, synthetic construct
  misc_feature 1..27: note = Heat shock cognate 71 kDa protein (134-142)
  source 1..27: mol_type = other RNA
tacctgggcaagaccgtgacaaacgcc

SEQ ID NO: 63057 - RNA, 30 nt, synthetic construct
  misc_feature 1..30: note = Intraflagellar transport protein 172 homolog (461-470)
  source 1..30: mol_type = other RNA
tacctgatcgacattaagaccatagccatc

SEQ ID NO: 63058 - RNA, 27 nt, synthetic construct
  misc_feature 1..27: note = Ankyrin repeat domain-containing protein 17 (599-607)
  source 1..27: mol_type = other RNA
tacctgctcgactatcccaacaatctt

SEQ ID NO: 63059 - RNA, 30 nt, synthetic construct
  misc_feature 1..30: note = Ankyrin repeat domain-containing protein 17 (599-608)
  source 1..30: mol_type = other RNA
tacctgctcgactatcccaacaatcttctg

SEQ ID NO: 63060 - RNA, 33 nt, synthetic construct
  misc_feature 1..33: note = Filamin-A (148-158)
  source 1..33: mol_type = other RNA
tacctgctcaaggacaaaggcgagtataccctt

SEQ ID NO: 63061 - RNA, 27 nt, synthetic construct
  misc_feature 1..27: note = Condensin complex subunit 3 (370-378)
  source 1..27: mol_type = other RNA
tacctgctcagctatatccagtccatt

SEQ ID NO: 63062 - RNA, 27 nt, synthetic construct
  misc_feature 1..27: note = UDP-glucose 6-dehydrogenase (143-151)
  source 1..27: mol_type = other RNA
tacctgatggacgagggcgcccacctc

SEQ ID NO: 63063 - RNA, 27 nt, synthetic construct
  misc_feature 1..27: note = L-lactate dehydrogenase A chain (172-180)
  source 1..27: mol_type = other RNA
tacctgatgggcgagagactcggggtg

SEQ ID NO: 63064 - RNA, 36 nt, synthetic construct
  misc_feature 1..36: note = H/ACA ribonucleoprotein complex subunit 3 (6-17)
  source 1..36: mol_type = other RNA
tacctgaacgagcagggcgacagagtgtataccctc

SEQ ID NO: 63065 - RNA, 27 nt, synthetic construct
  misc_feature 1..27: note = POZ-, AT hook-, and zinc finger-containing protein 1 (645-653)
  source 1..27: mol_type = other RNA
tacctgaacaagcacatccagaaagtg

SEQ ID NO: 63066 - RNA, 27 nt, synthetic construct
  misc_feature 1..27: note = Structural maintenance of chromosomes protein 4 (748-756)
  source 1..27: mol_type = other RNA
tacctgaacgtgcaggtcaaggagctc

SEQ ID NO: 63067 - RNA, 27 nt, synthetic construct
  misc_feature 1..27: note = Mitochondrial-processing peptidase subunit alpha (107-115)
  source 1..27: mol_type = other RNA
tacctgagcggcatcgcccacttcctc

SEQ ID NO: 63068 - RNA, 27 nt, synthetic construct
  misc_feature 1..27: note = Gelsolin (409-417)
  source 1..27: mol_type = other RNA
tacctgagctcccacatcgccaacgtg

SEQ ID NO: 63069 - RNA, 27 nt, synthetic construct
  misc_feature 1..27: note = Protein S100-A10 (25-33)
  source 1..27: mol_type = other RNA
tacctgaccaaggaggacctcagagtg

SEQ ID NO: 63070 - RNA, 30 nt, synthetic construct; identical to SEQ ID NO: 38843
  misc_feature 1..30: note = Plectin (73-82)
  source 1..30: mol_type = other RNA

SEQ ID NO: 63071 - RNA, 33 nt, synthetic construct
  misc_feature 1..33: note = Mitochondrial carrier homolog 1 (278-288)
  source 1..33: mol_type = other RNA
tacctggtggacgatagcttctcccaggccctc

SEQ ID NO: 63072 - RNA, 27 nt, synthetic construct
  misc_feature 1..27: note = Thimet oligopeptidase (612-620)
  source 1..27: mol_type = other RNA
tacctgtggagcgaggtgtattccatg

SEQ ID NO: 63073 - RNA, 36 nt, synthetic construct
  misc_feature 1..36: note = SWI/SNF-related matrix-associated actin-dependent regulator of chromatin subfamily A containing DEAD/H box 1 (108-119)
  source 1..36: mol_type = other RNA
tacctgtatcaggagggcaacaatgggccccacctc

SEQ ID NO: 63074 - RNA, 27 nt, synthetic construct
  misc_feature 1..27: note = Transcriptional enhancer factor TEF-3 (369-377)
  source 1..27: mol_type = other RNA
tacatgatcaacttcattcacaagctg

SEQ ID NO: 63075 - RNA, 24 nt, synthetic construct
  misc_feature 1..24: note = Pterin-4-alpha-carbinolamine dehydratase (70-77)
  source 1..24: mol_type = other RNA
tacaacaaggtgcacatcaccctg

SEQ ID NO: 63076 - RNA, 24 nt, synthetic construct
  misc_feature 1..24: note = Mid1-interacting protein 1 (7-14)
  source 1..24: mol_type = other RNA
tacaaccagaagcacagcctgttc

SEQ ID NO: 63077 - RNA, 27 nt, synthetic construct
  misc_feature 1..27: note = Phosducin-like protein 3 (158-166)
  source 1..27: mol_type = other RNA
taccccgacagaaacctgcctaccatc

SEQ ID NO: 63078 - RNA, 33 nt, synthetic construct
  misc_feature 1..33: note = Lipase maturation factor 2 (522-532)
  source 1..33: mol_type = other RNA
taccccttccacaagcagcctccaacctatgtg

SEQ ID NO: 63079 - RNA, 24 nt, synthetic construct
  misc_feature 1..24: note = Ubiquitin-conjugating enzyme E2 K (66-73)
  source 1..24: mol_type = other RNA
taccccttcaaccctccaaaggtg

SEQ ID NO: 63080 - RNA, 36 nt, synthetic construct; identical to SEQ ID NO: 38853
  misc_feature 1..36: note Dolichyl-diphosphooligosaccharide-proteinosyltransferase 48 kDa subunit (233-244)
  source 1..36: mol_type = other RNA

SEQ ID NO: 63081 - RNA, 27 nt, synthetic construct
  misc_feature 1..27: note = Ganglioside-induced differentiation-associated protein 2 (176-184)
  source 1..27: mol_type = other RNA
taccccctggaggacgccacccacatc

SEQ ID NO: 63082 - RNA, 27 nt, synthetic construct
  misc_feature 1..27: note = TFIIH basal transcription factor complex helicase XPD subunit (39-47)
  source 1..27: mol_type = other RNA
taccccctggaggtgaccaagctcatc

SEQ ID NO: 63083 - RNA, 27 nt, synthetic construct
  misc_feature 1..27: note = AP-2 complex subunit beta (421-429)
  source 1..27: mol_type = other RNA
taccccaacaagtatgagagcatcatt

SEQ ID NO: 63084 - RNA, 30 nt, synthetic construct
  misc_feature 1..30: note = BAG family molecular chaperone regulator 4 (184-193)
  source 1..30: mol_type = other RNA
tacccctatggcgacgggaacagaagcgtg

SEQ ID NO: 63085 - RNA, 33 nt, synthetic construct
  misc_feature 1..33: note = InaD-like protein (703-713)
  source 1..33: mol_type = other RNA
taccaggaccccctggatcctaccagaagcgtg

SEQ ID NO: 63086 - RNA, 33 nt, synthetic construct
  misc_feature 1..33: note = DNA mismatch repair protein Msh6 (977-987)
  source 1..33: mol_type = other RNA
taccagctggagatccccgaaaacttcaccaca

SEQ ID NO: 63087 - RNA, 27 nt, synthetic construct
  misc_feature 1..27: note = Ubiquitin-like-conjugating enzyme ATG3 (210-218)
  source 1..27: mol_type = other RNA
taccagacccccagactgtggctcttc

SEQ ID NO: 63088 - RNA, 27 nt, synthetic construct
  misc_feature 1..27: note = RNA binding protein fox-1 homolog 2 (317-325)
  source 1..27: mol_type = other RNA
tacagcgacggctatgggagagtgtac

SEQ ID NO: 63089 - RNA, 27 nt, synthetic construct
  misc_feature 1..27: note = Signal transducer and activator of transcription 3 (22-30)
  source 1..27: mol_type = other RNA
tacagcgactccttccccatggagctg

SEQ ID NO: 63090 - RNA, 30 nt, synthetic construct
  misc_feature 1..30: note = Protein TANC2 (62-71)
  source 1..30: mol_type = other RNA
tacagcgagaacgtggaaagaaccaagtat

SEQ ID NO: 63091 - RNA, 24 nt, synthetic construct
  misc_feature 1..24: note = Putative heat shock protein HSP 90-beta 2 (33-40)
  source 1..24: mol_type = other RNA
tacagcaacaaggagatcttcctg

SEQ ID NO: 63092 - RNA, 33 nt, synthetic construct
  misc_feature 1..33: note = Probable E3 ubiquitin-protein ligase HECTD2 (624-634)
  source 1..33: mol_type = other RNA
tacaccgacttcctgctcaacaagagcatctat

SEQ ID NO: 63093 - RNA, 27 nt, synthetic construct
  misc_feature 1..27: note = Tight junction protein ZO-1 (1054-1062)
  source 1..27: mol_type = other RNA
tacaccgaccagttcagcagaaactat

SEQ ID NO: 63094 - RNA, 27 nt, synthetic construct
  misc_feature 1..27: note = RNA-binding protein FUS (324-332)
  source 1..27: mol_type = other RNA
tacaccgacagagagacaggcaagctg

SEQ ID NO: 63095 - RNA, 30 nt, synthetic construct
  misc_feature 1..30: note = Cytochrome c oxidase subunit 2 (110-119)
  source 1..30: mol_type = other RNA
tacaccgactatggcgggctgatcttcaac

SEQ ID NO: 63096 - RNA, 33 nt, synthetic construct
  misc_feature 1..33: note = Cytochrome c oxidase subunit 2 (110-120)
  source 1..33: mol_type = other RNA
tacaccgactatggcgggctgatcttcaacagc

SEQ ID NO: 63097 - RNA, 24 nt, synthetic construct
  misc_feature 1..24: note = Peroxisomal multifunctional enzyme type 2 (339-346)
  source 1..24: mol_type = other RNA
tacaccgagctggaagccatcatg

SEQ ID NO: 63098 - RNA, 27 nt, synthetic construct
  misc_feature 1..27: note = Peroxisomal multifunctional enzyme type 2 (339-347)
  source 1..27: mol_type = other RNA
tacaccgagctggaagccatcatgtat

SEQ ID NO: 63099 - RNA, 27 nt, synthetic construct
  misc_feature 1..27: note = RNA-binding protein FUS (6-14)
  source 1..27: mol_type = other RNA
tacacccagcaagccacacagagctat

SEQ ID NO: 63100 - RNA, 30 nt, synthetic construct
  misc_feature 1..30: note = F-box only protein 11 (224-233)
  source 1..30: mol_type = other RNA
tacaccagctatcccatgcacgacttctac

SEQ ID NO: 63101 - RNA, 27 nt, synthetic construct
  misc_feature 1..27: note = Zinc finger and BTB domain-containing protein 38 (794-802)
  source 1..27: mol_type = other RNA
tacgtggccgaccccggcgggagcctg

SEQ ID NO: 63102 - RNA, 24 nt, synthetic construct
  misc_feature 1..24: note = Bax inhibitor 1 (92-99)
  source 1..24: mol_type = other RNA
tacgtgcacatggtcacccatttc

SEQ ID NO: 63103 - RNA, 36 nt, synthetic construct
  misc_feature 1..36: note = Negative elongation factor E (265-276)
  source 1..36: mol_type = other RNA
tacgtgtatggcgaggacatgacccccacactgctc

SEQ ID NO: 63104 - RNA, 27 nt, synthetic construct
  misc_feature 1..27: note = Medium-chain specific acyl-CoA dehydrogenase, mitochondrial (316-324)
  source 1..27: mol_type = other RNA
tactatgccagcatcgctaaggcattc

SEQ ID NO: 63105 - RNA, 30 nt, synthetic construct
  misc_feature 1..30: note = Eukaryotic translation initiation factor 3 subunit A (275-284)
  source 1..30: mol_type = other RNA
tactataacaaggtgagcaccgtcttctgg

SEQ ID NO: 63106 - RNA, 33 nt, synthetic construct
  misc_feature 1..33: note = Importin-7 (763-773)
  source 1..33: mol_type = other RNA
tactataacccccacctgctccttaataccctg

SEQ ID NO: 63107 - RNA, 27 nt, synthetic construct
  misc_feature 1..27: note = Prenylcysteine oxidase 1 (220-228)
  source 1..27: mol_type = other RNA
tactatcagcacatcgtgaccacactg

SEQ ID NO: 63108 - RNA, 27 nt, synthetic construct
  misc_feature 1..27: note = Protein PAT1 homolog 1 (367-375)
  source 1..27: mol_type = other RNA
tactatcagaactacttcgagaagctg

SEQ ID NO: 63109 - RNA, 27 nt, synthetic construct
  misc_feature 1..27: note = ATP-binding cassette sub-family F member 1 (528-536)
  source 1..27: mol_type = other RNA
tactatagaggcaactacatgaccttc

SEQ ID NO: 63110 - RNA, 27 nt, synthetic construct
  misc_feature 1..27: note = Polypyrimidine tract-binding protein 2 (124-132)
  source 1..27: mol_type = other RNA
tactatagcgccgtgaccccccacctg

SEQ ID NO: 63111 - RNA, 27 nt, synthetic construct
  misc_feature 1..27: note = Eukaryotic translation initiation factor 2A (345-353)
  source 1..27: mol_type = other RNA
tactatagcccccacggccatatcctg

SEQ ID NO: 63112 - RNA, 27 nt, synthetic construct
  misc_feature 1..27: note = 26S protease regulatory subunit 6B (111-119)
  source 1..27: mol_type = other RNA
tactatgtgagaatcctgagcaccatt

SEQ ID NO: 63113 - RNA, 33 nt, synthetic construct
  misc_feature 1..33: note = Glutathione peroxidase 1 (7-17)
  source 1..33: mol_type = other RNA
gccgctgcagccgcggctgcccagagcgtgtac

SEQ ID NO: 63114 - RNA, 27 nt, synthetic construct
  misc_feature 1..27: note = Interferon alpha-inducible protein 27-like protein 2 (6-14)
  source 1..27: mol_type = other RNA
gccgctgcagccgtgggcggggcgctg

SEQ ID NO: 63115 - RNA, 27 nt, synthetic construct
  misc_feature 1..27: note = Pumilio homolog 2 (304-312)
  source 1..27: mol_type = other RNA
gccgctgcaaaccccaccctggccttc

SEQ ID NO: 63116 - RNA, 27 nt, synthetic construct
  misc_feature 1..27: note = Angiomotin (918-926)
  source 1..27: mol_type = other RNA
gccgctgcacccgccgcggctgccgca

SEQ ID NO: 63117 - RNA, 27 nt, synthetic construct
  misc_feature 1..27: note = RNA-binding protein 38 (217-225)
  source 1..27: mol_type = other RNA
gccgctgcacccgccggcaccacattc

SEQ ID NO: 63118 - RNA, 30 nt, synthetic construct
  misc_feature 1..30: note = Protein SON (246-255)
  source 1..30: mol_type = other RNA
gccgctgcacccgtgcctaccacaactctg

SEQ ID NO: 63119 - RNA, 27 nt, synthetic construct
  misc_feature 1..27: note = Kelch-like protein 7 (15-23)
  source 1..27: mol_type = other RNA
gccgctgcaagccacttctttaacctg

SEQ ID NO: 63120 - RNA, 27 nt, synthetic construct
  misc_feature 1..27: note = Ephrin-A1 (167-175)
  source 1..27: mol_type = other RNA
gccgctgacgatcccgaggtgagagtc

SEQ ID NO: 63121 - RNA, 27 nt, synthetic construct
  misc_feature 1..27: note = RNA-binding protein 4 (47-55)
  source 1..27: mol_type = other RNA
gccgctgaggacgcaatcagaaacctg

SEQ ID NO: 63122 - RNA, 27 nt, synthetic construct
  misc_feature 1..27: note = Death-associated protein kinase 3 (334-342)
  source 1..27: mol_type = other RNA
gccgctgaggaaggcctgagagagctc

SEQ ID NO: 63123 - RNA, 27 nt, synthetic construct
  misc_feature 1..27: note = Perilipin-3 (62-70)
  source 1..27: mol_type = other RNA
gccgctgagaagggcgtgagaaccctg

SEQ ID NO: 63124 - RNA, 24 nt, synthetic construct
  misc_feature 1..24: note = Ribosome-binding protein 1 (105-112)
  source 1..24: mol_type = other RNA
gccgctttcgagaagcaggtgctg

SEQ ID NO: 63125 - RNA, 27 nt, synthetic construct
  misc_feature 1..27: note = Glycine dehydrogenase (decarboxylating), mitochondrial (969-977)
  source 1..27: mol_type = other RNA
gccgctttccccctgccttttgtgaag

SEQ ID NO: 63126 - RNA, 27 nt, synthetic construct
  misc_feature 1..27: note = DNA-directed RNA polymerase II subunit RPB1 (1495-1503)
  source 1..27: mol_type = other RNA
gccgctggccccaccgggatgttcttt

SEQ ID NO: 63127 - RNA, 27 nt, synthetic construct
  misc_feature 1..27: note = Programmed cell death protein 4 (282-290)
  source 1..27: mol_type = other RNA
gccgctctggacaaggcaaccgtgctc

SEQ ID NO: 63128 - RNA, 27 nt, synthetic construct
  misc_feature 1..27: note = Leucine-rich repeat-containing protein 59 (36-44)
  source 1..27: mol_type = other RNA
gccgctctgcccaaggcaaccatcctc

SEQ ID NO: 63129 - RNA, 27 nt, synthetic construct
  misc_feature 1..27: note = E3 ubiquitin-protein ligase BRE1B (225-233)
  source 1..27: mol_type = other RNA
gccgctcaggcacacaccagagagctg

SEQ ID NO: 63130 - RNA, 33 nt, synthetic construct
  misc_feature 1..33: note = NEDD8-activating enzyme E1 regulatory subunit (495-505)
  source 1..33: mol_type = other RNA
gccgctcaggaggtgatcaagattataaccaaa

SEQ ID NO: 63131 - RNA, 27 nt, synthetic construct
  misc_feature 1..27: note = Protein FAM50A (7-15)
  source 1..27: mol_type = other RNA
gccgctagcgaggcaggcagagccatg

SEQ ID NO: 63132 - RNA, 27 nt, synthetic construct
  misc_feature 1..27: note = 4F2 cell-surface antigen heavy chain (127-135)
  source 1..27: mol_type = other RNA
gccgctagcggcgcagccatgtccctg

SEQ ID NO: 63133 - RNA, 27 nt, synthetic construct
  misc_feature 1..27: note = Nuclear pore membraneoprotein 210 (1023-1031)
  source 1..27: mol_type = other RNA
gccgctagccccatcattaccctggtg

SEQ ID NO: 63134 - RNA, 27 nt, synthetic construct
  misc_feature 1..27: note = Cirhin (108-116)
  source 1..27: mol_type = other RNA
gccgctagcccctccggctctcagctg

SEQ ID NO: 63135 - RNA, 27 nt, synthetic construct
  misc_feature 1..27: note = 40S ribosomal protein SA (92-100)
  source 1..27: mol_type = other RNA
gccgctaccggcgcaacacccatcgcc

SEQ ID NO: 63136 - RNA, 27 nt, synthetic construct
  misc_feature 1..27: note = ELM2 and SANT domain-containing protein 1 (966-974)
  source 1..27: mol_type = other RNA
gccgctgtgaaggcaacccagacactg

SEQ ID NO: 63137 - RNA, 27 nt, synthetic construct
  misc_feature 1..27: note = UPF0668 protein C10orf76 (556-564)
  source 1..27: mol_type = other RNA
gccgctgtgaaccacatcagccagctg

SEQ ID NO: 63138 - RNA, 27 nt, synthetic construct
  misc_feature 1..27: note = Leucine-rich repeat and calponin homology domain-containing protein 3 (56-64)
  source 1..27: mol_type = other RNA
gccgctgtgaccggcgtcctgagcctc

SEQ ID NO: 63139 - RNA, 27 nt, synthetic construct
  misc_feature 1..27: note = Synaptonemal complex protein SC65 (428-436)
  source 1..27: mol_type = other RNA
gccgaggctgaacccgagcctgaactg

SEQ ID NO: 63140 - RNA, 27 nt, synthetic construct
  misc_feature 1..27: note = Rhotekin (187-195)
  source 1..27: mol_type = other RNA
gccgaggctggccccgacttcgaactg

SEQ ID NO: 63141 - RNA, 30 nt, synthetic construct
  misc_feature 1..30: note = Catenin alpha-1 (750-759)
  source 1..30: mol_type = other RNA
gccgaggctggcagcagaatggacaagctg

SEQ ID NO: 63142 - RNA, 27 nt, synthetic construct
  misc_feature 1..27: note = Leucine-tRNA ligase, cytoplasmic (461-469)
  source 1..27: mol_type = other RNA
gccgaggctaaggaaaaaatctacctg

SEQ ID NO: 63143 - RNA, 36 nt, synthetic construct
  misc_feature 1..36: note = 5'-AMP-activated protein kinase catalytic subunit alpha-1 (501-512)
  source 1..36: mol_type = other RNA
gccgaggctcagggcaagagctccgaagtgtctctg

SEQ ID NO: 63144 - RNA, 27 nt, synthetic construct
  misc_feature 1..27: note = Something about silencing protein 10 (119-127)
  source 1..27: mol_type = other RNA
gccgaggctagcgtggacccctccctg

SEQ ID NO: 63145 - RNA, 33 nt, synthetic construct
  misc_feature 1..33: note = Mediator of DNA damage checkpoint protein 1 (431-441)
  source 1..33: mol_type = other RNA
gccgaggaagacatgccccagagagtggtcctg

SEQ ID NO: 63146 - RNA, 27 nt, synthetic construct
  misc_feature 1..27: note = NudC domain-containing protein 1 (175-183)
  source 1..27: mol_type = other RNA
gccgaggaacacagcatcgctaccctg

SEQ ID NO: 63147 - RNA, 27 nt, synthetic construct
  misc_feature 1..27: note = Peroxisome assembly protein 26 (71-79)
  source 1..27: mol_type = other RNA
gccgaggaacccgctggcaccagcctg

SEQ ID NO: 63148 - RNA, 27 nt, synthetic construct
  misc_feature 1..27: note = Alpha-actinin-4 (804-812)
  source 1..27: mol_type = other RNA
gccgagttcaacagaatcatgagcctg

SEQ ID NO: 63149 - RNA, 27 nt, synthetic construct
  misc_feature 1..27: note = Coatomer subunit beta' (333-341)
  source 1..27: mol_type = other RNA
gccgagatcaaggacggcgaaagactg

SEQ ID NO: 63150 - RNA, 33 nt, synthetic construct
  misc_feature 1..33: note = Stathmin (73-83)
  source 1..33: mol_type = other RNA
gccgagaagagagaacacgagaaagaagtgctg

SEQ ID NO: 63151 - RNA, 27 nt, synthetic construct
  misc_feature 1..27: note = Heat shock protein 105 kDa (311-319)
  source 1..27: mol_type = other RNA
gccgagctgctccagaagatcgaagtg

SEQ ID NO: 63152 - RNA, 27 nt, synthetic construct
  misc_feature 1..27: note = LisH domain-containing protein ARMC9 (557-565)
  source 1..27: mol_type = other RNA
gccgagatgatcagacagattgaattc

SEQ ID NO: 63153 - RNA, 36 nt, synthetic construct
  misc_feature 1..36: note = V-type proton ATPase subunit C 1 (170-181)
  source 1..36: mol_type = other RNA
gccgagatggtggtccccagaagctccaacgttctg

SEQ ID NO: 63154 - RNA, 33 nt, synthetic construct
  misc_feature 1..33: note = Centromere protein F (2273-2283)
  source 1..33: mol_type = other RNA
gccgagaacagcaaggctgaagtggagaccctg

SEQ ID NO: 63155 - RNA, 33 nt, synthetic construct
  misc_feature 1..33: note = Thioredoxin domain-containing protein 5 (207-217)
  source 1..33: mol_type = other RNA
gccgagcccgaagctgacaagggcaccgtgctg

SEQ ID NO: 63156 - RNA, 33 nt, synthetic construct
  misc_feature 1..33: note = Cell cycle and apoptosis regulator protein 2 (303-313)
  source 1..33: mol_type = other RNA
gccgagcagcaagacagcggcagactgtacctc

SEQ ID NO: 63157 - RNA, 30 nt, synthetic construct
  misc_feature 1..30: note = AP-1 complex subunit beta-1 (188-197)
  source 1..30: mol_type = other RNA
gccgagagccacccctcctctaacctgctc

SEQ ID NO: 63158 - RNA, 33 nt, synthetic construct
  misc_feature 1..33: note = Clathrin heavy chain 1 (493-503)
  source 1..33: mol_type = other RNA
gccgagaccggccaggtgcaaaagatcgtcctg

SEQ ID NO: 63159 - RNA, 39 nt, synthetic construct
  misc_feature 1..39: note = T-complex protein 1 subunit eta (76-88)
  source 1..39: mol_type = other RNA
gccgaggtgggcgacgggaccacaagcgtcactctgctc

SEQ ID NO: 63160 - RNA, 27 nt, synthetic construct
  misc_feature 1..27: note = Heterogeneous nuclear ribonucleoprotein M (129-137)
  source 1..27: mol_type = other RNA
gccgaggtgctgaacaagcacagcctc

SEQ ID NO: 63161 - RNA, 27 nt, synthetic construct
  misc_feature 1..27: note = X-box-binding protein 1 (28-36)
  source 1..27: mol_type = other RNA
gccggcgctcccgcagggcaggccctg

SEQ ID NO: 63162 - RNA, 27 nt, synthetic construct
  misc_feature 1..27: note = Protein YIF1A (153-161)
  source 1..27: mol_type = other RNA
gccggcatggctctggggatccagaag

SEQ ID NO: 63163 - RNA, 27 nt, synthetic construct
  misc_feature 1..27: note = PAB-dependent poly(A)-specific ribonuclease subunit PAN2 (870-878)
  source 1..27: mol_type = other RNA
gcccacatcaaggtgggcgagacctac

SEQ ID NO: 63164 - RNA, 27 nt, synthetic construct
  misc_feature 1..27: note = Coatomer subunit gamma-1 (45-53)
  source 1..27: mol_type = other RNA
gcccacatcctgaccaagattctctac

SEQ ID NO: 63165 - RNA, 27 nt, synthetic construct
  misc_feature 1..27: note = Clathrin heavy chain 1 (1312-1320)
  source 1..27: mol_type = other RNA
gcccacatgggcatgttcaccgagctg

SEQ ID NO: 63166 - RNA, 27 nt, synthetic construct
  misc_feature 1..27: note = Elongation factor 2 (491-499)
  source 1..27: mol_type = other RNA
gcccacaacatgagagtgatgaagttc

SEQ ID NO: 63167 - RNA, 27 nt, synthetic construct
  misc_feature 1..27: note = Methionine-R-sulfoxide reductase B1 (38-46)
  source 1..27: mol_type = other RNA
gcccacagctccccctggcctgctttc

SEQ ID NO: 63168 - RNA, 27 nt, synthetic construct
  misc_feature 1..27: note = Calcineurin-binding protein cabin-1 (1962-1970)
  source 1..27: mol_type = other RNA
gcccacaccaagcccagacctgctctg

SEQ ID NO: 63169 - RNA, 27 nt, synthetic construct
  misc_feature 1..27: note = Protein RTF2 homolog (296-304)
  source 1..27: mol_type = other RNA
gcccactgggtgacccatacaagctac

SEQ ID NO: 63170 - RNA, 30 nt, synthetic construct
  misc_feature 1..30: note = Endoplasmic reticulum-Golgi intermediate compartment protein 2 (241-250)
  source 1..30: mol_type = other RNA
gccatcgaccacaaccagatgttccaatac

SEQ ID NO: 63171 - RNA, 27 nt, synthetic construct
  misc_feature 1..27: note = E3 ubiquitin-protein ligase RNF135 (258-266)
  source 1..27: mol_type = other RNA
gccatccaccccaccttcaacctgaag

SEQ ID NO: 63172 - RNA, 27 nt, synthetic construct
  misc_feature 1..27: note = Proteasome subunit alpha type-2 (187-195)
  source 1..27: mol_type = other RNA
gccatccacaccgctattctgacactc

SEQ ID NO: 63173 - RNA, 27 nt, synthetic construct
  misc_feature 1..27: note = All-trans-retinol 13,14-reductase (189-197)
  source 1..27: mol_type = other RNA
gccatcattgacaagtacataaaactg

SEQ ID NO: 63174 - RNA, 27 nt, synthetic construct
  misc_feature 1..27: note = General transcription factor 3C polypeptide 3 (294-302)
  source 1..27: mol_type = other RNA
gccatcctggacaagaacttcagaaaa

SEQ ID NO: 63175 - RNA, 27 nt, synthetic construct
  misc_feature 1..27: note = AP-1 complex subunit beta-1 (487-495)
  source 1..27: mol_type = other RNA
gccatcgtgaagctgttcctcaaaaag

SEQ ID NO: 63176 - RNA, 27 nt, synthetic construct
  misc_feature 1..27: note = Ribosomal RNA processing protein 36 homolog (221-229)
  source 1..27: mol_type = other RNA
gccctggctgagaagttcaaagaactc

SEQ ID NO: 63177 - RNA, 27 nt, synthetic construct
  misc_feature 1..27: note = Gem-associated protein 4 (288-296)
  source 1..27: mol_type = other RNA
gccctggctgagaaggtgaaagaagca

SEQ ID NO: 63178 - RNA, 27 nt, synthetic construct
  misc_feature 1..27: note = Glycosylphosphatidylinositol anchor attachment 1 protein (584-592)
  source 1..27: mol_type = other RNA
gccctggctcagggcgtgctcgagcac

SEQ ID NO: 63179 - RNA, 39 nt, synthetic construct
  misc_feature 1..39: note = Ankyrin repeat and KH domain-containing protein 1 (182-194)
  source 1..39: mol_type = other RNA
gccctggacgaggctgcagccgcgctcaccagaatgaag

SEQ ID NO: 63180 - RNA, 27 nt, synthetic construct
  misc_feature 1..27: note = Hexokinase-1 (530-538)
  source 1..27: mol_type = other RNA
gccctggacctcggcgggaccaacttc

SEQ ID NO: 63181 - RNA, 30 nt, synthetic construct
  misc_feature 1..30: note = N-acylneuraminate cytidylyltransferase (79-88)
  source 1..30: mol_type = other RNA
gccctggacagcggcgctttccagtccgtg

SEQ ID NO: 63182 - RNA, 30 nt, synthetic construct
  misc_feature 1..30: note = EP300-interacting inhibitor of differentiation 1 (70-79)
  source 1..30: mol_type = other RNA
gccctggaggaagctgacaagatgttcctc

SEQ ID NO: 63183 - RNA, 30 nt, synthetic construct
  misc_feature 1..30: note = Zinc finger protein ZXDC (46-55)
  source 1..30: mol_type = other RNA
gccctgttcagcgacacccccgctaacgca

SEQ ID NO: 63184 - RNA, 27 nt, synthetic construct
  misc_feature 1..27: note = Dystonin (1368-1376)
  source 1..27: mol_type = other RNA
gccctgttcagcaaggtgctcgagaga

SEQ ID NO: 63185 - RNA, 27 nt, synthetic construct
  misc_feature 1..27: note = Protein transport protein Sec23A (40-48)
  source 1..27: mol_type = other RNA
gccctgttcacccccctcaaggagaga

SEQ ID NO: 63186 - RNA, 27 nt, synthetic construct
  misc_feature 1..27: note = PRKCA-binding protein (279-287)
  source 1..27: mol_type = other RNA
gccctgggcgagcccctctacagagtg

SEQ ID NO: 63187 - RNA, 27 nt, synthetic construct
  misc_feature 1..27: note = Talin-2 (171-179)
  source 1..27: mol_type = other RNA
gccctgcacgacctccttcagcatgtg

SEQ ID NO: 63188 - RNA, 27 nt, synthetic construct
  misc_feature 1..27: note = Golgin subfamily A member 3 (270-278)
  source 1..27: mol_type = other RNA
gccctgcacgagagaatccaggctctc

SEQ ID NO: 63189 - RNA, 27 nt, synthetic construct
  misc_feature 1..27: note = SURP and G-patch domain-containing protein 2 (429-437)
  source 1..27: mol_type = other RNA
gccctgctcggccagaccttcagcctt

SEQ ID NO: 63190 - RNA, 27 nt, synthetic construct
  misc_feature 1..27: note = E3 ubiquitin-protein ligase AMFR (24-32)
  source 1..27: mol_type = other RNA
gccctgctcggcaccatcattagcgct

SEQ ID NO: 63191 - RNA, 30 nt, synthetic construct
  misc_feature 1..30: note = Tropomodulin-3 (44-53)
  source 1..30: mol_type = other RNA
gccctgctccccgctggcttcagacagaag

SEQ ID NO: 63192 - RNA, 36 nt, synthetic construct
  misc_feature 1..36: note = RNA-binding protein NOB1 (19-30)
  source 1..36: mol_type = other RNA
gccctgcaggacatcggcaagaacatttacaccata

SEQ ID NO: 63193 - RNA, 27 nt, synthetic construct
  misc_feature 1..27: note = Kinesin-1 heavy chain (666-674)
  source 1..27: mol_type = other RNA
gccctgagcgaggaactcgtgcagctt

SEQ ID NO: 63194 - RNA, 30 nt, synthetic construct
  misc_feature 1..30: note = Syntaxin-8 (157-166)
  source 1..30: mol_type = other RNA
gccctgagctccatcatttctagacagaag

SEQ ID NO: 63195 - RNA, 27 nt, synthetic construct
  misc_feature 1..27: note = Protein RCC2 (151-159)
  source 1..27: mol_type = other RNA
gccctgaccgagacaggcagcgtgttc

SEQ ID NO: 63196 - RNA, 27 nt, synthetic construct
  misc_feature 1..27: note = Zinc finger BED domain-containing protein 4 (250-258)
  source 1..27: mol_type = other RNA
gccctggtgggcagctccccccacctc

SEQ ID NO: 63197 - RNA, 33 nt, synthetic construct
  misc_feature 1..33: note = Protein unc-93 homolog B1 (440-450)
  source 1..33: mol_type = other RNA
gccctgtggggcgtggggagcgctctcaacaag

SEQ ID NO: 63198 - RNA, 30 nt, synthetic construct; identical to SEQ ID NO: 38971
  misc_feature 1..30: note = Galectin-3-binding protein (184-193)
  source 1..30: mol_type = other RNA

SEQ ID NO: 63199 - RNA, 27 nt, synthetic construct
  misc_feature 1..27: note = Fructose-bisphosphate aldolase A (132-140)
  source 1..27: mol_type = other RNA
gccatggctaccgtgacagcactgaga

SEQ ID NO: 63200 - RNA, 30 nt, synthetic construct
  misc_feature 1..30: note = Myosin-9 (1912-1921)
  source 1..30: mol_type = other RNA
gccatgaacagagaggtgagctccctgaag

SEQ ID NO: 63201 - RNA, 27 nt, synthetic construct
  misc_feature 1..27: note = NAD(P)H dehydrogenase (quinone) 1 (128-136)
  source 1..27: mol_type = other RNA
gccatgtacgacaagggccccttcaga

SEQ ID NO: 63202 - RNA, 27 nt, synthetic construct
  misc_feature 1..27: note = Type II inositol 3,4-bisphosphate 4-phosphatase (368-376)
  source 1..27: mol_type = other RNA
gcccccgctgcacacttccagggcttt

SEQ ID NO: 63203 - RNA, 33 nt, synthetic construct
  misc_feature 1..33: note = Ankyrin repeat and zinc finger domain-containing protein 1 (4-14)
  source 1..33: mol_type = other RNA
gcccccgacgctgcacctgccccagcgagcatc

SEQ ID NO: 63204 - RNA, 30 nt, synthetic construct
  misc_feature 1..30: note = E3 ubiquitin-protein ligase NEURL1B (119-128)
  source 1..30: mol_type = other RNA
gcccccagacctgacggcgggaggaccctg

SEQ ID NO: 63205 - RNA, 27 nt, synthetic construct
  misc_feature 1..27: note = 40S ribosomal protein S4, Y isoform 1 (27-35)
  source 1..27: mol_type = other RNA
gcccccagacctagcaccggcccacac

SEQ ID NO: 63206 - RNA, 30 nt, synthetic construct
  misc_feature 1..30: note = 60S ribosomal protein L36 (51-60)
  source 1..30: mol_type = other RNA
gccccctacgagagaagggctatggaactg

SEQ ID NO: 63207 - RNA, 30 nt, synthetic construct
  misc_feature 1..30: note = PHD and RING finger domain-containing protein 1 (159-168)
  source 1..30: mol_type = other RNA
gcccagttcggcgggaagatcctgagaaaa

SEQ ID NO: 63208 - RNA, 33 nt, synthetic construct
  misc_feature 1..33: note = Cleavage stimulation factor subunit 3 (59-69)
  source 1..33: mol_type = other RNA
gcccagttccccagctccggcagattttggaag

SEQ ID NO: 63209 - RNA, 30 nt, synthetic construct
  misc_feature 1..30: note = Transcription and mRNA export factor ENY2 (10-19)
  source 1..30: mol_type = other RNA
gcccagatgagagctgcaatcaaccaaaag

SEQ ID NO: 63210 - RNA, 27 nt, synthetic construct
  misc_feature 1..27: note = V-type proton ATPase 21 kDa proteolipid subunit (10-18)
  source 1..27: mol_type = other RNA
gcccagaaccccagcctgttcgtgaag

SEQ ID NO: 63211 - RNA, 24 nt, synthetic construct
  misc_feature 1..24: note = Myosin-9 (2-9)
  source 1..24: mol_type = other RNA
gcccagcaagctgcagacaagtac

SEQ ID NO: 63212 - RNA, 27 nt, synthetic construct
  misc_feature 1..27: note = MICOS complex subunit MIC60 (196-204)
  source 1..27: mol_type = other RNA
gcccagcaagagaagcaggaacaggtg

SEQ ID NO: 63213 - RNA, 27 nt, synthetic construct
  misc_feature 1..27: note = Ubiquitin-like protein 5 (33-41)
  source 1..27: mol_type = other RNA
gcccagaccggcacaagatggaacaag

SEQ ID NO: 63214 - RNA, 27 nt, synthetic construct
  misc_feature 1..27: note = Cytochrome c oxidase assembly factor 3 homolog, mitochondrial (44-52)
  source 1..27: mol_type = other RNA
gcccagtggcaaaaggtgctgcccaga

SEQ ID NO: 63215 - RNA, 27 nt, synthetic construct
  misc_feature 1..27: note = SUMO-activating enzyme subunit 1 (17-25)
  source 1..27: mol_type = other RNA
gcccagtacgacagacaaatcaggctg

SEQ ID NO: 63216 - RNA, 27 nt, synthetic construct
  misc_feature 1..27: note = Poly(U)-binding-splicing factor PUF60 (204-212)
  source 1..27: mol_type = other RNA
gccagagctttcaacaggatctacgtg

SEQ ID NO: 63217 - RNA, 27 nt, synthetic construct
  misc_feature 1..27: note = Protein transport protein Sec61 subunit alpha isoform 1 (310-318)
  source 1..27: mol_type = other RNA
gccagattcagcggcaacctgctcgtg

SEQ ID NO: 63218 - RNA, 27 nt, synthetic construct
  misc_feature 1..27: note = Ran GTPase-activating protein 1 (576-584)
  source 1..27: mol_type = other RNA
gccagacacagcctgctccagaccctt

SEQ ID NO: 63219 - RNA, 33 nt, synthetic construct
  misc_feature 1..33: note = Probable RNA-binding protein 19 (488-498)
  source 1..33: mol_type = other RNA
gccagcgctctgggctcctcttcatacaagaaa

SEQ ID NO: 63220 - RNA, 27 nt, synthetic construct
  misc_feature 1..27: note = Polyadenylate-binding protein 1 (551-559)
  source 1..27: mol_type = other RNA
gccagcgctccccctcaggagcaaaag

SEQ ID NO: 63221 - RNA, 27 nt, synthetic construct
  misc_feature 1..27: note = 3'(2'),5'-bisphosphate nucleotidase 1 (13-21)
  source 1..27: mol_type = other RNA
gccagcgcttactccatcgcacagaag

SEQ ID NO: 63222 - RNA, 27 nt, synthetic construct
  misc_feature 1..27: note = WD repeat-containing protein 26 (616-624)
  source 1..27: mol_type = other RNA
gccagcgacgatggcaccgtgagaatc

SEQ ID NO: 63223 - RNA, 27 nt, synthetic construct
  misc_feature 1..27: note = WD repeat-containing protein 61 (115-123)
  source 1..27: mol_type = other RNA
gccagcgacgatggctacatcaagatt

SEQ ID NO: 63224 - RNA, 30 nt, synthetic construct
  misc_feature 1..30: note = Selenoprotein O (215-224)
  source 1..30: mol_type = other RNA
gccagcgacaacaccggcagatacgcttat

SEQ ID NO: 63225 - RNA, 27 nt, synthetic construct
  misc_feature 1..27: note = Protein flightless-1 homolog (1107-1115)
  source 1..27: mol_type = other RNA
gccagcgaccccgatgaggctaagctg

SEQ ID NO: 63226 - RNA, 30 nt, synthetic construct; identical to SEQ ID NO: 38999
  misc_feature 1..30: note = Transcription factor 20 (70-79)
  source 1..30: mol_type = other RNA

SEQ ID NO: 63227 - RNA, 33 nt, synthetic construct
  misc_feature 1..33: note = Zinc finger protein 622 (77-87)
  source 1..33: mol_type = other RNA
gccagcttcaacgcttacgagaatcacctgaag

SEQ ID NO: 63228 - RNA, 27 nt, synthetic construct
  misc_feature 1..27: note = LIM domain and actin-binding protein 1 (496-504)
  source 1..27: mol_type = other RNA
gccagcttccagtccacctctgtgaag

SEQ ID NO: 63229 - RNA, 33 nt, synthetic construct
  misc_feature 1..33: note = Origin recognition complex subunit 3 (514-524)
  source 1..33: mol_type = other RNA
gccagcggctcccagcccaaggggctgcaaaaa

SEQ ID NO: 63230 - RNA, 33 nt, synthetic construct
  misc_feature 1..33: note = Serine/threonine-protein phosphatase 6 regulatory ankyrin repeat subunit B (624-634)
  source 1..33: mol_type = other RNA
gccagcatcttcgtgaaggacaacgtcaccaaa

SEQ ID NO: 63231 - RNA, 33 nt, synthetic construct
  misc_feature 1..33: note = Serine/threonine-protein phosphatase 6 regulatory ankyrin repeat subunit A (637-647)
  source 1..33: mol_type = other RNA
gccagcatcctggtgaaggactacattctcaaa

SEQ ID NO: 63232 - RNA, 33 nt, synthetic construct
  misc_feature 1..33: note = 39S ribosomal protein L22, mitochondrial (37-47)
  source 1..33: mol_type = other RNA
gccagcctggacatctccagaaagtgggagaaa

SEQ ID NO: 63233 - RNA, 27 nt, synthetic construct
  misc_feature 1..27: note = Centrosome-associated protein 350 (95-103)
  source 1..27: mol_type = other RNA
gccagcctgatcaagcagctcgaggtg

SEQ ID NO: 63234 - RNA, 33 nt, synthetic construct
  misc_feature 1..33: note = Deoxynucleotidyltransferase terminal-interacting protein 2 (668-678)
  source 1..33: mol_type = other RNA
gccagcatggaccccaagagattctacaaaaag

SEQ ID NO: 63235 - RNA, 33 nt, synthetic construct
  misc_feature 1..33: note = Myosin-10 (370-380)
  source 1..33: mol_type = other RNA
gccagcatgcccgagaacaccgtggctcagaag

SEQ ID NO: 63236 - RNA, 36 nt, synthetic construct
  misc_feature 1..36: note = Discoidin, CUB and LCCL domain-containing protein 2 (153-164)
  source 1..36: mol_type = other RNA
gccagcaacttcctggagcccgaattttccaagtac

SEQ ID NO: 63237 - RNA, 27 nt, synthetic construct
  misc_feature 1..27: note = Chromosome transmission fidelity protein 8 homolog isoform 2 (379-387)
  source 1..27: mol_type = other RNA
gccagcaaccccgctaccttccagaga

SEQ ID NO: 63238 - RNA, 36 nt, synthetic construct
  misc_feature 1..36: note = Heterogeneous nuclear ribonucleoprotein H (160-171)
  source 1..36: mol_type = other RNA
gccagccaggagatcgctgaaaaggcactgaaaaag

SEQ ID NO: 63239 - RNA, 27 nt, synthetic construct
  misc_feature 1..27: note = Zinc finger protein 574 (226-234)
  source 1..27: mol_type = other RNA
gccagccaggagctgtggctcaaccac

SEQ ID NO: 63240 - RNA, 27 nt, synthetic construct
  misc_feature 1..27: note = E3 ubiquitin-protein ligase MARCH7 (344-352)
  source 1..27: mol_type = other RNA
gccagccagggcttcagatttctgagg

SEQ ID NO: 63241 - RNA, 27 nt, synthetic construct
  misc_feature 1..27: note = Ubiquitin-conjugating enzyme E2 T (183-191)
  source 1..27: mol_type = other RNA
gccagccagctggtgggcatcgagaag

SEQ ID NO: 63242 - RNA, 39 nt, synthetic construct
  misc_feature 1..39: note = Anthrax toxin receptor 2 (131-143)
  source 1..39: mol_type = other RNA
gccagctactatggcgggagaggagtgggtggcatcaag

SEQ ID NO: 63243 - RNA, 27 nt, synthetic construct
  misc_feature 1..27: note = Transmembrane protein 147 (107-115)
  source 1..27: mol_type = other RNA
gccaccgctgagctgatcatgagcaga

SEQ ID NO: 63244 - RNA, 30 nt, synthetic construct
  misc_feature 1..30: note = Multifunctional protein ADE2 (2-11)
  source 1..30: mol_type = other RNA
gccaccgctgaggtgctgaacatcggcaag

SEQ ID NO: 63245 - RNA, 33 nt, synthetic construct
  misc_feature 1..33: note = Clathrin heavy chain 1 (311-321)
  source 1..33: mol_type = other RNA
gccaccgctggcatcattggggtgaacagaaag

SEQ ID NO: 63246 - RNA, 27 nt, synthetic construct
  misc_feature 1..27: note = Cilia- and flagella-associated protein 58 (79-87)
  source 1..27: mol_type = other RNA
gccaccgctctgaagctcagccaggac

SEQ ID NO: 63247 - RNA, 33 nt, synthetic construct
  misc_feature 1..33: note = Mitogen-activated protein kinase-binding protein 1 (686-696)
  source 1..33: mol_type = other RNA
gccaccgctagccccttctccggcctgcagaag

SEQ ID NO: 63248 - RNA, 27 nt, synthetic construct
  misc_feature 1..27: note = Glucosamine 6-phosphate N-acetyltransferase (99-107)
  source 1..27: mol_type = other RNA
gccaccgctacactgatcattgagcac

SEQ ID NO: 63249 - RNA, 27 nt, synthetic construct
  misc_feature 1..27: note = UPF0472 protein C16orf72 (67-75)
  source 1..27: mol_type = other RNA
gccaccgctgtggcacagctgtacaag

SEQ ID NO: 63250 - RNA, 30 nt, synthetic construct
  misc_feature 1..30: note = NAD(P) transhydrogenase, mitochondrial (730-739)
  source 1..30: mol_type = other RNA
gccaccgacgctgcagccaacctgacaaag

SEQ ID NO: 63251 - RNA, 33 nt, synthetic construct
  misc_feature 1..33: note = E3 ubiquitin-protein ligase RNF220 (291-301)
  source 1..33: mol_type = other RNA
gccaccgacgatctgcaccatagcgacagatac

SEQ ID NO: 63252 - RNA, 30 nt, synthetic construct
  misc_feature 1..30: note = Collagen alpha-1(XII) chain (183-192)
  source 1..30: mol_type = other RNA
gccaccgaccccgatgacacacacgcttac

SEQ ID NO: 63253 - RNA, 27 nt, synthetic construct
  misc_feature 1..27: note = V-type proton ATPase 21 kDa proteolipid subunit (120-128)
  source 1..27: mol_type = other RNA
gccaccgaccccaaggctatcggccac

SEQ ID NO: 63254 - RNA, 27 nt, synthetic construct
  misc_feature 1..27: note = ATP-dependent RNA helicase DDX1 (614-622)
  source 1..27: mol_type = other RNA
gccaccgagaaggaaaaagtgtggtac

SEQ ID NO: 63255 - RNA, 36 nt, synthetic construct
  misc_feature 1..36: note = Apoptosis inhibitor 5 (17-28)
  source 1..36: mol_type = other RNA
gccaccgagcaggtgggccaacacaaggacgcttac

SEQ ID NO: 63256 - RNA, 33 nt, synthetic construct
  misc_feature 1..33: note = Calcium-binding protein 39 (186-196)
  source 1..33: mol_type = other RNA
gccaccttcaaggacctgctcacaagacacaaa

SEQ ID NO: 63257 - RNA, 30 nt, synthetic construct
  misc_feature 1..30: note = Serine/threonine-protein kinase OSR1 (172-181)
  source 1..30: mol_type = other RNA
gccaccggcggggacatcacaagaaacaag

SEQ ID NO: 63258 - RNA, 30 nt, synthetic construct
  misc_feature 1..30: note = Inositol-pentakisphosphate 2-kinase (170-179)
  source 1..30: mol_type = other RNA
gccaccggcaagtggaaacagatcagcaag

SEQ ID NO: 63259 - RNA, 30 nt, synthetic construct
  misc_feature 1..30: note = DNA-directed RNA polymerase II subunit RPB2 (442-451)
  source 1..30: mol_type = other RNA
gccaccggcaactggggggaccagaagaaa

SEQ ID NO: 63260 - RNA, 27 nt, synthetic construct
  misc_feature 1..27: note = Plexin-B2 (68-76)
  source 1..27: mol_type = other RNA
gccaccggccccgctctggacaacaag

SEQ ID NO: 63261 - RNA, 27 nt, synthetic construct
  misc_feature 1..27: note = General transcription factor IIH subunit 2 (32-40)
  source 1..27: mol_type = other RNA
gccaccatcgaggacattctgttcaag

SEQ ID NO: 63262 - RNA, 33 nt, synthetic construct
  misc_feature 1..33: note = Polycomb group RING finger protein 6 (210-220)
  source 1..33: mol_type = other RNA
gccaccatcggccacgtggagaagttcctgaga

SEQ ID NO: 63263 - RNA, 33 nt, synthetic construct
  misc_feature 1..33: note = Isocitrate dehydrogenase (NAD) subunit alpha, mitochondrial (333-343)
  source 1..33: mol_type = other RNA
gccaccatcaaggacggcaaaagcctgacaaag

SEQ ID NO: 63264 - RNA, 27 nt, synthetic construct
  misc_feature 1..27: note = Protein MMS22-like (831-839)
  source 1..27: mol_type = other RNA
gccaccatcccccctattagctccctg

SEQ ID NO: 63265 - RNA, 30 nt, synthetic construct
  misc_feature 1..30: note = Ankyrin repeat and KH domain-containing protein 1 (1428-1437)
  source 1..30: mol_type = other RNA
gccaccatcacagacaaggagctgctcaaa

SEQ ID NO: 63266 - RNA, 33 nt, synthetic construct
  misc_feature 1..33: note = Ankyrin repeat and KH domain-containing protein 1 (1428-1438)
  source 1..33: mol_type = other RNA
gccaccatcacagacaaggagctgctcaaaaag

SEQ ID NO: 63267 - RNA, 33 nt, synthetic construct
  misc_feature 1..33: note = Ankyrin repeat domain-containing protein 17 (1306-1316)
  source 1..33: mol_type = other RNA
gccaccatcacagacaaggagatgctgaaaaag

SEQ ID NO: 63268 - RNA, 30 nt, synthetic construct
  misc_feature 1..30: note = HAUS augmin-like complex subunit 7 (418-427)
  source 1..30: mol_type = other RNA
gccaccaagatgaacgagctgatggaaaaa

SEQ ID NO: 63269 - RNA, 27 nt, synthetic construct
  misc_feature 1..27: note = E3 SUMO-protein ligase NSE2 (69-77)
  source 1..27: mol_type = other RNA
gccaccctggacagacagctcaaccac

SEQ ID NO: 63270 - RNA, 33 nt, synthetic construct
  misc_feature 1..33: note = PIN2/TERF1-interacting telomerase inhibitor 1 (312-322)
  source 1..33: mol_type = other RNA
gccaccctggaggaaacactcgtgaagaaaaag

SEQ ID NO: 63271 - RNA, 33 nt, synthetic construct
  misc_feature 1..33: note = Coatomer subunit beta (111-121)
  source 1..33: mol_type = other RNA
gccaccctgggcgacctcaagcttgtggagaaa

SEQ ID NO: 63272 - RNA, 36 nt, synthetic construct
  misc_feature 1..36: note = DNA-directed RNA polymerase II subunit RPB1 (907-918)
  source 1..36: mol_type = other RNA
gccaccctgaagcccagcaacaaagctttcgagaag

SEQ ID NO: 63273 - RNA, 33 nt, synthetic construct
  misc_feature 1..33: note = Telomerase protein component 1 (83-93)
  source 1..33: mol_type = other RNA
gccaccctgagcgacctcaagacaatggagaaa

SEQ ID NO: 63274 - RNA, 30 nt, synthetic construct; identical to SEQ ID NO: 39047
  misc_feature 1..30: note = KIF1-binding protein (254-263)
  source 1..30: mol_type = other RNA

SEQ ID NO: 63275 - RNA, 36 nt, synthetic construct
  misc_feature 1..36: note = Eukaryotic initiation factor 4A-I (214-225)
  source 1..36: mol_type = other RNA
gccaccatgcccagcgacgtgctggaggtcacaaag

SEQ ID NO: 63276 - RNA, 33 nt, synthetic construct
  misc_feature 1..33: note = Activity-dependent neuroprotector homeobox protein (988-998)
  source 1..33: mol_type = other RNA
gccaccatgcagggcgacagagagcaactgaag

SEQ ID NO: 63277 - RNA, 30 nt, synthetic construct
  misc_feature 1..30: note = Arf-GAP with coiled-coil, ANK repeat and PH domain-containing protein 2 (155-164)
  source 1..30: mol_type = other RNA
gccaccaacatcctgacagctactagaaag

SEQ ID NO: 63278 - RNA, 30 nt, synthetic construct
  misc_feature 1..30: note = Homeobox protein Hox-A13 (342-351)
  source 1..30: mol_type = other RNA
gccaccaacaagttcatcacaaaagacaag

SEQ ID NO: 63279 - RNA, 30 nt, synthetic construct; identical to SEQ ID NO: 39052
  misc_feature 1..30: note = Rho-related BTB domain-containing protein 3 (557-566)
  source 1..30: mol_type = other RNA

SEQ ID NO: 63280 - RNA, 27 nt, synthetic construct
  misc_feature 1..27: note = Glutathione S-transferase kappa 1 (148-156)
  source 1..27: mol_type = other RNA
gccacccccaaggtgaaaaaccagctg

SEQ ID NO: 63281 - RNA, 30 nt, synthetic construct
  misc_feature 1..30: note = Splicing factor 1 (7-16)
  source 1..30: mol_type = other RNA
gccacccccctggacttccctagcaagaaa

SEQ ID NO: 63282 - RNA, 27 nt, synthetic construct
  misc_feature 1..27: note = Geranylgeranyl transferase type-2 subunit alpha (31-39)
  source 1..27: mol_type = other RNA
gccacccaggctgtgttccaaaagaga

SEQ ID NO: 63283 - RNA, 36 nt, synthetic construct
  misc_feature 1..36: note = Forkhead box protein J3 (44-55)
  source 1..36: mol_type = other RNA
gccacccagaacgctcacggcacagggatcagcaag

SEQ ID NO: 63284 - RNA, 27 nt, synthetic construct
  misc_feature 1..27: note = Tubby-related protein 4 (741-749)
  source 1..27: mol_type = other RNA
gccacccagtaccccgtgagcaacaga

SEQ ID NO: 63285 - RNA, 33 nt, synthetic construct
  misc_feature 1..33: note = Importin subunit alpha-5 (407-417)
  source 1..33: mol_type = other RNA
gccaccagcggcgggtccgctgagcagatcaag

SEQ ID NO: 63286 - RNA, 27 nt, synthetic construct
  misc_feature 1..27: note = CLIP-associating protein 1 (426-434)
  source 1..27: mol_type = other RNA
gccaccagcggcgtggtcgctgttaga

SEQ ID NO: 63287 - RNA, 27 nt, synthetic construct
  misc_feature 1..27: note = Origin recognition complex subunit 3 (253-261)
  source 1..27: mol_type = other RNA
gccaccagccccatcattatacacaga

SEQ ID NO: 63288 - RNA, 30 nt, synthetic construct
  misc_feature 1..30: note = Origin recognition complex subunit 3 (253-262)
  source 1..30: mol_type = other RNA
gccaccagccccatcattatacacagactg

SEQ ID NO: 63289 - RNA, 27 nt, synthetic construct
  misc_feature 1..27: note = Importin subunit alpha-1 (60-68)
  source 1..27: mol_type = other RNA
gccaccagccccctgcaggagaacaga

SEQ ID NO: 63290 - RNA, 27 nt, synthetic construct
  misc_feature 1..27: note = tRNA pseudouridine synthase-like 1 (125-133)
  source 1..27: mol_type = other RNA
gccaccagcagaacatacctgtatagg

SEQ ID NO: 63291 - RNA, 33 nt, synthetic construct
  misc_feature 1..33: note = Golgi apparatus membrane protein TVP23 homolog B (186-196)
  source 1..33: mol_type = other RNA
gccaccagctacttcggcaagcagtttctgaga

SEQ ID NO: 63292 - RNA, 33 nt, synthetic construct
  misc_feature 1..33: note = ATP-citrate synthase (93-103)
  source 1..33: mol_type = other RNA
gccaccgtgggcaaggctacagggttcctgaaa

SEQ ID NO: 63293 - RNA, 27 nt, synthetic construct
  misc_feature 1..27: note = Phosphoribosyl pyrophosphate synthase-associated protein 1 (222-230)
  source 1..27: mol_type = other RNA
gccaccgtgcaccccggcctggagctc

SEQ ID NO: 63294 - RNA, 30 nt, synthetic construct
  misc_feature 1..30: note = Integrator complex subunit 7 (445-454)
  source 1..30: mol_type = other RNA
gccaccgtgatcttcgtcgctagccagaag

SEQ ID NO: 63295 - RNA, 27 nt, synthetic construct
  misc_feature 1..27: note = Pre-mRNA-processing factor 19 (180-188)
  source 1..27: mol_type = other RNA
gccaccgtgctgacaactgagagaaag

SEQ ID NO: 63296 - RNA, 33 nt, synthetic construct
  misc_feature 1..33: note = Mitochondrial folate transporter/carrier (241-251)
  source 1..33: mol_type = other RNA
gccacctacccctatcaggtggtcagagctagg

SEQ ID NO: 63297 - RNA, 33 nt, synthetic construct
  misc_feature 1..33: note = Eukaryotic translation initiation factor 3 subunit D (48-58)
  source 1..33: mol_type = other RNA
gccacctaccaggacaagagatatacaaacaaa

SEQ ID NO: 63298 - RNA, 27 nt, synthetic construct
  misc_feature 1..27: note = Cleavage and polyadenylation specificity factor subunit 2 (52-60)
  source 1..27: mol_type = other RNA
gccacctacgtgcagcccagaaggaag

SEQ ID NO: 63299 - RNA, 27 nt, synthetic construct
  misc_feature 1..27: note = Protein phosphatase methylesterase 1 (362-370)
  source 1..27: mol_type = other RNA
gccgtggctaccttcctgatcagacac

SEQ ID NO: 63300 - RNA, 27 nt, synthetic construct
  misc_feature 1..27: note = Serine/threonine-protein kinase SIK2 (699-707)
  source 1..27: mol_type = other RNA
gccgtggacccccagcacaacggctac

SEQ ID NO: 63301 - RNA, 27 nt, synthetic construct
  misc_feature 1..27: note = Fanconi anemia group D2 protein (69-77)
  source 1..27: mol_type = other RNA
gccgtggaccagatcgctttccaaaag

SEQ ID NO: 63302 - RNA, 27 nt, synthetic construct
  misc_feature 1..27: note = Breast cancer type 1 susceptibility protein (1104-1112)
  source 1..27: mol_type = other RNA
gccgtgttcagcaagtccgtccagaaa

SEQ ID NO: 63303 - RNA, 33 nt, synthetic construct
  misc_feature 1..33: note = Uncharacterized aarF domain-containing protein kinase 5 (335-345)
  source 1..33: mol_type = other RNA
gccgtgcacgacatcgctgagaagctgattaaa

SEQ ID NO: 63304 - RNA, 27 nt, synthetic construct
  misc_feature 1..27: note = Telomere-associated protein RIF1 (481-489)
  source 1..27: mol_type = other RNA
gccgtgcacgacagcttcgtcgctgtt

SEQ ID NO: 63305 - RNA, 33 nt, synthetic construct
  misc_feature 1..33: note = Protein canopy homolog 4 (15-25)
  source 1..33: mol_type = other RNA
gccgtgcacgaggcttgggcaggcatgctgaag

SEQ ID NO: 63306 - RNA, 27 nt, synthetic construct
  misc_feature 1..27: note = Zinc transporter ZIP3 (302-310)
  source 1..27: mol_type = other RNA
gccgtgcacgagaccctggtcgctgtt

SEQ ID NO: 63307 - RNA, 27 nt, synthetic construct
  misc_feature 1..27: note = Bifunctional methylenetetrahydrofolate dehydrogenase/cyclohydrolase, mitochondrial (270-278)
  source 1..27: mol_type = other RNA
gccgtgatcgacgtcggcattaacaga

SEQ ID NO: 63308 - RNA, 39 nt, synthetic construct
  misc_feature 1..39: note = Cytoplasmic dynein 1 heavy chain 1 (3288-3300)
  source 1..39: mol_type = other RNA
gccgtgatcgaggctcagaacgcagtcaagagcattaaa

SEQ ID NO: 63309 - RNA, 27 nt, synthetic construct
  misc_feature 1..27: note = Nucleosome-remodeling factor subunit BPTF (2407-2415)
  source 1..27: mol_type = other RNA
gccgtgatcgagcacctgaagcagaaa

SEQ ID NO: 63310 - RNA, 33 nt, synthetic construct
  misc_feature 1..33: note = L-xylulose reductase (110-120)
  source 1..33: mol_type = other RNA
gccgtgatccaggtcagccaaattgttgctaga

SEQ ID NO: 63311 - RNA, 33 nt, synthetic construct
  misc_feature 1..33: note = Protein S100-A16 (11-21)
  source 1..33: mol_type = other RNA
gccgtgatcgtcctggttgagaacttctacaag

SEQ ID NO: 63312 - RNA, 30 nt, synthetic construct
  misc_feature 1..30: note = Periodic tryptophan protein 1 homolog (46-55)
  source 1..30: mol_type = other RNA
gccgtgctggacctcagctggaacaagctt

SEQ ID NO: 63313 - RNA, 33 nt, synthetic construct
  misc_feature 1..33: note = Zinc finger SWIM domain-containing protein 8 (430-440)
  source 1..33: mol_type = other RNA
gccgtgctggaccccgctctcagccctcagaga

SEQ ID NO: 63314 - RNA, 27 nt, synthetic construct
  misc_feature 1..27: note = Vacuolar protein sorting-associated protein 11 homolog (740-748)
  source 1..27: mol_type = other RNA
gccgtgctgaagcacatcgagaacaaa

SEQ ID NO: 63315 - RNA, 33 nt, synthetic construct
  misc_feature 1..33: note = Charged multivesicular body protein 3 (30-40)
  source 1..33: mol_type = other RNA
gccgtgctgagagtcgctggcagcctccagaag

SEQ ID NO: 63316 - RNA, 33 nt, synthetic construct
  misc_feature 1..33: note = Long-chain-fatty-acid-CoA ligase 4 (332-342)
  source 1..33: mol_type = other RNA
gccgtgcccgagatcatggacagaatttacaag

SEQ ID NO: 63317 - RNA, 33 nt, synthetic construct
  misc_feature 1..33: note = Aspartyl aminopeptidase (23-33)
  source 1..33: mol_type = other RNA
gccgtgcagaccgctgcaaaggagctgctcaaa

SEQ ID NO: 63318 - RNA, 30 nt, synthetic construct
  misc_feature 1..30: note = TSC22 domain family protein 4 (336-345)
  source 1..30: mol_type = other RNA
gccgtgagagaggaagtcgaggttctgaag

SEQ ID NO: 63319 - RNA, 30 nt, synthetic construct
  misc_feature 1..30: note = Peroxisomal acyl-coenzyme A oxidase 1 (63-72)
  source 1..30: mol_type = other RNA
gccgtgagaaagagcgctatcatggtcaaa

SEQ ID NO: 63320 - RNA, 33 nt, synthetic construct
  misc_feature 1..33: note = Pre-mRNA-processing factor 6 (914-924)
  source 1..33: mol_type = other RNA
gccgtgagcaaggacatcgctaactggcagaaa

SEQ ID NO: 63321 - RNA, 27 nt, synthetic construct
  misc_feature 1..27: note = 5'-AMP-activated protein kinase subunit gamma-1 (141-149)
  source 1..27: mol_type = other RNA
gccgtgagctccctgatcagaaacaag

SEQ ID NO: 63322 - RNA, 33 nt, synthetic construct
  misc_feature 1..33: note = CD99 antigen-like protein 2 (58-68)
  source 1..33: mol_type = other RNA
gccgtgagctcctacatctcttatcagcaaaag

SEQ ID NO: 63323 - RNA, 27 nt, synthetic construct
  misc_feature 1..27: note = Inactive hydroxysteroid dehydrogenase-like protein 1 (258-266)
  source 1..27: mol_type = other RNA
gccgtgagcaccctgggcatctccaag

SEQ ID NO: 63324 - RNA, 33 nt, synthetic construct
  misc_feature 1..33: note = CD81 antigen (63-73)
  source 1..33: mol_type = other RNA
gccgtggtcgacgatgacgctaacaatgcaaag

SEQ ID NO: 63325 - RNA, 27 nt, synthetic construct
  misc_feature 1..27: note = GTP-binding protein 2 (496-504)
  source 1..27: mol_type = other RNA
gccgtggtcgagaagatccacgctaaa

SEQ ID NO: 63326 - RNA, 33 nt, synthetic construct
  misc_feature 1..33: note = Mitochondrial folate transporter/carrier (154-164)
  source 1..33: mol_type = other RNA
gccgtggtcaacagcccccacagacagtacaag

SEQ ID NO: 63327 - RNA, 27 nt, synthetic construct
  misc_feature 1..27: note = Inositol 1,4,5-trisphosphate receptor-interacting protein (385-393)
  source 1..27: mol_type = other RNA
gccgtgtacgagagacacttcctgagg

SEQ ID NO: 63328 - RNA, 33 nt, synthetic construct
  misc_feature 1..33: note = Nuclear factor interleukin-3-regulated protein (146-156)
  source 1..33: mol_type = other RNA
gccgtgtacttccaggactatcaaaccagcaag

SEQ ID NO: 63329 - RNA, 27 nt, synthetic construct
  misc_feature 1..27: note = Aladin (158-166)
  source 1..27: mol_type = other RNA
gcctggcacccccataccaacaagttc

SEQ ID NO: 63330 - RNA, 27 nt, synthetic construct
  misc_feature 1..27: note = Ankyrin-2 (1480-1488)
  source 1..27: mol_type = other RNA
gcctacatcgctgaccacctgggcttc

SEQ ID NO: 63331 - RNA, 27 nt, synthetic construct
  misc_feature 1..27: note = Leucine-rich repeat protein SHOC-2 (468-476)
  source 1..27: mol_type = other RNA
gcctacctgaaggacctccagaaactt

SEQ ID NO: 63332 - RNA, 27 nt, synthetic construct
  misc_feature 1..27: note = Fragile X mental retardation syndrome-related protein 1 (356-364)
  source 1..27: mol_type = other RNA
gcctacctgaaggaggtggaacagctc

SEQ ID NO: 63333 - RNA, 27 nt, synthetic construct
  misc_feature 1..27: note = Serine/threonine-protein kinase RIO1 (156-164)
  source 1..27: mol_type = other RNA
gcctacctgagcaaggctatggagatc

SEQ ID NO: 63334 - RNA, 27 nt, synthetic construct
  misc_feature 1..27: note = ER degradation-enhancing alpha-mannosidase-like protein 1 (395-403)
  source 1..27: mol_type = other RNA
gcctaccagagcatccaaaactatctg

SEQ ID NO: 63335 - RNA, 27 nt, synthetic construct
  misc_feature 1..27: note = Angiomotin-like protein 1 (604-612)
  source 1..27: mol_type = other RNA
gcctacgtggagaaggtcgaaaaactg

SEQ ID NO: 63336 - RNA, 27 nt, synthetic construct
  misc_feature 1..27: note = Angiomotin-like protein 2 (481-489)
  source 1..27: mol_type = other RNA
gcctacgtggagaaggtcgaaagactg

SEQ ID NO: 63337 - RNA, 27 nt, synthetic construct
  misc_feature 1..27: note = Zinc finger protein 580 (248-256)
  source 1..27: mol_type = other RNA
gacgccgctgagctggcacagcacgtg

SEQ ID NO: 63338 - RNA, 27 nt, synthetic construct
  misc_feature 1..27: note = Embryonic stem cell-specific 5-hydroxymethylcytosine-binding protein (62-70)
  source 1..27: mol_type = other RNA
gacgccgatagctccgagagaatcatt

SEQ ID NO: 63339 - RNA, 27 nt, synthetic construct
  misc_feature 1..27: note = Proteasome subunit beta type-10 (90-98)
  source 1..27: mol_type = other RNA
gacgccgagatgaccacaagaatggtg

SEQ ID NO: 63340 - RNA, 27 nt, synthetic construct
  misc_feature 1..27: note = Torsin-1A-interacting protein 2 (129-137)
  source 1..27: mol_type = other RNA
gacgcccacctgggcagctcctctgtg

SEQ ID NO: 63341 - RNA, 27 nt, synthetic construct
  misc_feature 1..27: note = Centrosomal protein of 95 kDa (61-69)
  source 1..27: mol_type = other RNA
gacgcccacaacgtgcaggctgtcatc

SEQ ID NO: 63342 - RNA, 27 nt, synthetic construct
  misc_feature 1..27: note = Cohesin subunit SA-1 (302-310)
  source 1..27: mol_type = other RNA
gacgccatcgctgagattagagcaata

SEQ ID NO: 63343 - RNA, 27 nt, synthetic construct
  misc_feature 1..27: note = Heat shock cognate 71 kDa protein (323-331)
  source 1..27: mol_type = other RNA
gacgccaagctggataaaagccagatc

SEQ ID NO: 63344 - RNA, 24 nt, synthetic construct
  misc_feature 1..24: note = Phosphatidylinositol 4-kinase alpha (403-410)
  source 1..24: mol_type = other RNA
gacgcccccgagctgagccacgtg

SEQ ID NO: 63345 - RNA, 24 nt, synthetic construct
  misc_feature 1..24: note = Carnitine O-palmitoyltransferase 1, liver isoform (477-484)
  source 1..24: mol_type = other RNA
gacgcccccatcgtggctcacctg

SEQ ID NO: 63346 - RNA, 30 nt, synthetic construct
  misc_feature 1..30: note = Transcription activator BRG1 (696-705)
  source 1..30: mol_type = other RNA
gacgcccccaaggctggccagctggaggca

SEQ ID NO: 63347 - RNA, 27 nt, synthetic construct
  misc_feature 1..27: note = Protein RMD5 homolog B (51-59)
  source 1..27: mol_type = other RNA
gacgccagagagcagcaacagcagatc

SEQ ID NO: 63348 - RNA, 27 nt, synthetic construct
  misc_feature 1..27: note = Myotubularin (278-286)
  source 1..27: mol_type = other RNA
gacgccagacccagcgtgaacgctgtc

SEQ ID NO: 63349 - RNA, 27 nt, synthetic construct
  misc_feature 1..27: note = Filamin-A (1614-1622)
  source 1..27: mol_type = other RNA
gacgccagcaagtgcaccgtgacagtc

SEQ ID NO: 63350 - RNA, 27 nt, synthetic construct
  misc_feature 1..27: note = E3 ubiquitin-protein ligase RNF114 (127-135)
  source 1..27: mol_type = other RNA
gacgccagcctgcagcccagaaacgtg

SEQ ID NO: 63351 - RNA, 27 nt, synthetic construct
  misc_feature 1..27: note = Translocon-associated protein subunit delta (40-48)
  source 1..27: mol_type = other RNA
gacgccgtgatcagcaccgagacagtc

SEQ ID NO: 63352 - RNA, 24 nt, synthetic construct
  misc_feature 1..24: note = DNA-directed RNA polymerase II subunit RPB2 (306-313)
  source 1..24: mol_type = other RNA
gacgccgtgaacgtccagaagatc

SEQ ID NO: 63353 - RNA, 27 nt, synthetic construct
  misc_feature 1..27: note = Adipocyte plasma membrane-associated protein (180-188)
  source 1..27: mol_type = other RNA
gacgcctacaagggcctgttcgaggtg

SEQ ID NO: 63354 - RNA, 27 nt, synthetic construct
  misc_feature 1..27: note = Securin (108-116)
  source 1..27: mol_type = other RNA
gacgcctaccccgagatcgaaaagttc

SEQ ID NO: 63355 - RNA, 33 nt, synthetic construct
  misc_feature 1..33: note = Proteasome subunit beta type-4 (118-128)
  source 1..33: mol_type = other RNA
gacgaggaactgctcggcgatgggcacagctac

SEQ ID NO: 63356 - RNA, 27 nt, synthetic construct
  misc_feature 1..27: note = DNA polymerase alpha catalytic subunit (336-344)
  source 1..27: mol_type = other RNA
gacgaggaacaggtgttccacttttac

SEQ ID NO: 63357 - RNA, 33 nt, synthetic construct
  misc_feature 1..33: note = 26S protease regulatory subunit 8 (123-133)
  source 1..33: mol_type = other RNA
gacgagatcgatagcattggctcctctagactg

SEQ ID NO: 63358 - RNA, 27 nt, synthetic construct
  misc_feature 1..27: note = N-alpha-acetyltransferase 10 (47-55)
  source 1..27: mol_type = other RNA
gacgagaacggcaagatcgtggggtac

SEQ ID NO: 63359 - RNA, 27 nt, synthetic construct
  misc_feature 1..27: note = 40S ribosomal protein S18 (62-70)
  source 1..27: mol_type = other RNA
gacgaggtggaaagagtcatcaccatt

SEQ ID NO: 63360 - RNA, 27 nt, synthetic construct
  misc_feature 1..27: note = Rab GDP dissociation inhibitor beta (21-29)
  source 1..27: mol_type = other RNA
gacttcaaggtgaccgagggcagcttt

SEQ ID NO: 63361 - RNA, 27 nt, synthetic construct
  misc_feature 1..27: note = Fatty acid synthase (2469-2477)
  source 1..27: mol_type = other RNA
gacggcaaggtgagcgtccacgttatc

SEQ ID NO: 63362 - RNA, 27 nt, synthetic construct
  misc_feature 1..27: note = Nucleoporin NUP53 (211-219)
  source 1..27: mol_type = other RNA
gacggcagaatcttcggggagagcatt

SEQ ID NO: 63363 - RNA, 27 nt, synthetic construct
  misc_feature 1..27: note = Nicotinamide/nicotinic acid mononucleotide adenylyltransferase 1 (112-120)
  source 1..27: mol_type = other RNA
gaccaccagcaaaacagccccaccctg

SEQ ID NO: 63364 - RNA, 42 nt, synthetic construct
  misc_feature 1..42: note = Glia-derived nexin (118-131)
  source 1..42: mol_type = other RNA
gacatcgtgaccgtcgccaacgctgttttcgtgaagaatgca

SEQ ID NO: 63365 - RNA, 27 nt, synthetic construct
  misc_feature 1..27: note = Non-POU domain-containing octamer-binding protein (226-234)
  source 1..27: mol_type = other RNA
gacctgatgagaaggcaggaggaactc

SEQ ID NO: 63366 - RNA, 27 nt, synthetic construct
  misc_feature 1..27: note = Homeodomain-interacting protein kinase 1 (252-260)
  source 1..27: mol_type = other RNA
gaccccttccagcaaacctttatcgtg

SEQ ID NO: 63367 - RNA, 27 nt, synthetic construct
  misc_feature 1..27: note = Mediator of RNA polymerase II transcription subunit 13-like (1410-1418)
  source 1..27: mol_type = other RNA
gacccctacggcgggcacagagatgtg

SEQ ID NO: 63368 - RNA, 24 nt, synthetic construct
  misc_feature 1..24: note = Plectin (3424-3431)
  source 1..24: mol_type = other RNA
gacccctacagcggctccaccatc

SEQ ID NO: 63369 - RNA, 27 nt, synthetic construct
  misc_feature 1..27: note = Elongator complex protein 2 (46-54)
  source 1..27: mol_type = other RNA
gaccagttccaaaaggtgctgagcctc

SEQ ID NO: 63370 - RNA, 30 nt, synthetic construct
  misc_feature 1..30: note = Ras GTPase-activating protein-binding protein 2 (285-294)
  source 1..30: mol_type = other RNA
gacagcgataacagaaggatcattcggtac

SEQ ID NO: 63371 - RNA, 24 nt, synthetic construct
  misc_feature 1..24: note = AP-3 complex subunit delta-1 (314-321)
  source 1..24: mol_type = other RNA
gacagcgatcagaacctgaagtac

SEQ ID NO: 63372 - RNA, 27 nt, synthetic construct
  misc_feature 1..27: note = Ubiquitin carboxyl-terminal hydrolase 28 (507-515)
  source 1..27: mol_type = other RNA
gacagctacggcgggctgagaaacgtg

SEQ ID NO: 63373 - RNA, 27 nt, synthetic construct
  misc_feature 1..27: note = Zinc transporter ZIP6 (485-493)
  source 1..27: mol_type = other RNA
gacaccgatgacagaacagagggctac

SEQ ID NO: 63374 - RNA, 24 nt, synthetic construct
  misc_feature 1..24: note = Poly (ADP-ribose) polymerase 14 (118-125)
  source 1..24: mol_type = other RNA
gacaccatcatggccacaaagctg

SEQ ID NO: 63375 - RNA, 24 nt, synthetic construct
  misc_feature 1..24: note = Protein S100-A9 (67-74)
  source 1..24: mol_type = other RNA
gacaccaacgccgataagcagctg

SEQ ID NO: 63376 - RNA, 27 nt, synthetic construct
  misc_feature 1..27: note = Protein FAM172A (263-271)
  source 1..27: mol_type = other RNA
gacgtgaagaacaaagtcaccgccgtt

SEQ ID NO: 63377 - RNA, 27 nt, synthetic construct
  misc_feature 1..27: note = Cytochrome c oxidase subunit 6C (57-65)
  source 1..27: mol_type = other RNA
gacgtgatgaaggatttcgaggaaatg

SEQ ID NO: 63378 - RNA, 27 nt, synthetic construct
  misc_feature 1..27: note = N-acetyl-D-glucosamine kinase (175-183)
  source 1..27: mol_type = other RNA
gaggccgctccccacgacatcggctac

SEQ ID NO: 63379 - RNA, 30 nt, synthetic construct
  misc_feature 1..30: note = Myosin light polypeptide 6 (148-157)
  source 1..30: mol_type = other RNA
gaggccttcgtgagacacatcctgagcggc

SEQ ID NO: 63380 - RNA, 27 nt, synthetic construct
  misc_feature 1..27: note = Hsp70-binding protein 1 (201-209)
  source 1..27: mol_type = other RNA
gaggccggcgctgcagggctgagatgg

SEQ ID NO: 63381 - RNA, 24 nt, synthetic construct
  misc_feature 1..24: note = Probable U3 small nucleolar RNA-associated protein 11 (43-50)
  source 1..24: mol_type = other RNA
gaggccaagaaaatcgaaagactg

SEQ ID NO: 63382 - RNA, 27 nt, synthetic construct
  misc_feature 1..27: note = Ribosomal RNA-processing protein 7 homolog A (260-268)
  source 1..27: mol_type = other RNA
gaggaagacaagcagagaatcgagctg

SEQ ID NO: 63383 - RNA, 27 nt, synthetic construct
  misc_feature 1..27: note = WD40 repeat-containing protein SMU1 (197-205)
  source 1..27: mol_type = other RNA
gaggaagagaagttccccacccagctg

SEQ ID NO: 63384 - RNA, 30 nt, synthetic construct
  misc_feature 1..30: note = Guanine nucleotide-binding protein-like 3-like protein (97-106)
  source 1..30: mol_type = other RNA
gaggaattcgagcacaaggaagaggtgctg

SEQ ID NO: 63385 - RNA, 27 nt, synthetic construct
  misc_feature 1..27: note = Protocadherin Fat 1 (2948-2956)
  source 1..27: mol_type = other RNA
gaggaaatcaacagacaggtgacctac

SEQ ID NO: 63386 - RNA, 27 nt, synthetic construct
  misc_feature 1..27: note = Midasin (582-590)
  source 1..27: mol_type = other RNA
gaggaaatcagccacctgatttccttc

SEQ ID NO: 63387 - RNA, 27 nt, synthetic construct
  misc_feature 1..27: note = Protein strawberry notch homolog 2 (93-101)
  source 1..27: mol_type = other RNA
gaggaactgggccacaccgagacatac

SEQ ID NO: 63388 - RNA, 27 nt, synthetic construct
  misc_feature 1..27: note = X-ray repair cross-complementing protein 5 (651-659)
  source 1..27: mol_type = other RNA
gaggaacagagattcaacaattttctg

SEQ ID NO: 63389 - RNA, 24 nt, synthetic construct
  misc_feature 1..24: note = Angiomotin-like protein 2 (573-580)
  source 1..24: mol_type = other RNA
gaggaaagagccatgaggcagttc

SEQ ID NO: 63390 - RNA, 30 nt, synthetic construct
  misc_feature 1..30: note = Methylmalonic aciduria and homocystinuria type D protein, mitochondrial (191-200)
  source 1..30: mol_type = other RNA
gaggaagtggagatcgaaagagaggtcctg

SEQ ID NO: 63391 - RNA, 27 nt, synthetic construct
  misc_feature 1..27: note = Mitotic checkpoint serine/threonine-protein kinase BUB1 beta (160-168)
  source 1..27: mol_type = other RNA
gaggaatacgaggccagagaaaacttc

SEQ ID NO: 63392 - RNA, 27 nt, synthetic construct
  misc_feature 1..27: note = Mediator of RNA polymerase II transcription subunit 18 (128-136)
  source 1..27: mol_type = other RNA
gagttcgtggccaagggccacctgttt

SEQ ID NO: 63393 - RNA, 27 nt, synthetic construct
  misc_feature 1..27: note = Glycerol-3-phosphate dehydrogenase 1-like protein (49-57)
  source 1..27: mol_type = other RNA
gagggccccgaagggctgaagctcatc

SEQ ID NO: 63394 - RNA, 27 nt, synthetic construct
  misc_feature 1..27: note = 3-ketoacyl-CoA thiolase, mitochondrial (221-229)
  source 1..27: mol_type = other RNA
gagcacgccagaccccagaccacactg

SEQ ID NO: 63395 - RNA, 27 nt, synthetic construct
  misc_feature 1..27: note = COMM domain-containing protein 6 (77-85)
  source 1..27: mol_type = other RNA
gagatcgccgctgtgattgaaaccgtc

SEQ ID NO: 63396 - RNA, 30 nt, synthetic construct; identical to SEQ ID NO: 39169
  misc_feature 1..30: note = Actin-related protein 6 (47-56)
  source 1..30: mol_type = other RNA

SEQ ID NO: 63397 - RNA, 27 nt, synthetic construct
  misc_feature 1..27: note = Spectrin beta chain, non-erythrocytic 1 (1987-1995)
  source 1..27: mol_type = other RNA
gagatcaaggaaaaactgctccagctt

SEQ ID NO: 63398 - RNA, 27 nt, synthetic construct
  misc_feature 1..27: note = DnaJ homolog subfamily C member 8 (83-91)
  source 1..27: mol_type = other RNA
gagatcaagaaaagattcaggcagctg

SEQ ID NO: 63399 - RNA, 27 nt, synthetic construct
  misc_feature 1..27: note = Heat shock protein 105 kDa (740-748)
  source 1..27: mol_type = other RNA
gagatcaagaccaaaattaaggaactg

SEQ ID NO: 63400 - RNA, 27 nt, synthetic construct
  misc_feature 1..27: note = Replication protein A 14 kDa subunit (62-70)
  source 1..27: mol_type = other RNA
gagatcagcggcattgtggaagtcgtt

SEQ ID NO: 63401 - RNA, 27 nt, synthetic construct
  misc_feature 1..27: note = Centrosomal protein of 170 kDa (1472-1480)
  source 1..27: mol_type = other RNA
gagatcagctccattctgcaggaactc

SEQ ID NO: 63402 - RNA, 33 nt, synthetic construct
  misc_feature 1..33: note = Peptidyl-prolyl cis-trans isomerase CWC27 homolog (445-455)
  source 1..33: mol_type = other RNA
gagatctacgaccccagaaaccctgtgaataag

SEQ ID NO: 63403 - RNA, 27 nt, synthetic construct
  misc_feature 1..27: note = Serine-protein kinase ATM (1146-1154)
  source 1..27: mol_type = other RNA
gagatctacaacagaaagagcgtgctg

SEQ ID NO: 63404 - RNA, 27 nt, synthetic construct
  misc_feature 1..27: note = Translin-associated protein X (45-53)
  source 1..27: mol_type = other RNA
gagctggacgccagacacgataagtac

SEQ ID NO: 63405 - RNA, 27 nt, synthetic construct
  misc_feature 1..27: note = Ankyrin repeat domain-containing protein 40 (281-289)
  source 1..27: mol_type = other RNA
gagctggacagacaggaactcacctac

SEQ ID NO: 63406 - RNA, 27 nt, synthetic construct
  misc_feature 1..27: note = Uncharacterized protein C16orf45 (98-106)
  source 1..27: mol_type = other RNA
gagctgatccagaagattcacaaactc

SEQ ID NO: 63407 - RNA, 27 nt, synthetic construct
  misc_feature 1..27: note = ATP-dependent DNA helicase Q1 (34-42)
  source 1..27: mol_type = other RNA
gagctgatccagaagaaaaaggtgctc

SEQ ID NO: 63408 - RNA, 27 nt, synthetic construct
  misc_feature 1..27: note = Dedicator of cytokinesis protein 7 (661-669)
  source 1..27: mol_type = other RNA
gagctgaagagctccatctctgccctc

SEQ ID NO: 63409 - RNA, 27 nt, synthetic construct
  misc_feature 1..27: note = Protein Spindly (108-116)
  source 1..27: mol_type = other RNA
gagctgaagaccaaaatcgaaaagctc

SEQ ID NO: 63410 - RNA, 27 nt, synthetic construct
  misc_feature 1..27: note = Hypoxia-inducible factor 1-alpha (705-713)
  source 1..27: mol_type = other RNA
gagctgaaccccaagatcctcgccctt

SEQ ID NO: 63411 - RNA, 27 nt, synthetic construct
  misc_feature 1..27: note = NF-kappa-B inhibitor-interacting Ras-like protein 1 (70-78)
  source 1..27: mol_type = other RNA
gagctgcccaagcactacttcagcttt

SEQ ID NO: 63412 - RNA, 27 nt, synthetic construct
  misc_feature 1..27: note = Transmembrane emp24 domain-containing protein 9 (163-171)
  source 1..27: mol_type = other RNA
gagctgcagctcagagtgaggcaactt

SEQ ID NO: 63413 - RNA, 27 nt, synthetic construct
  misc_feature 1..27: note = FRAS1-related extracellular matrix protein 2 (2560-2568)
  source 1..27: mol_type = other RNA
gagctgagcaacttcgaactcaccctt

SEQ ID NO: 63414 - RNA, 27 nt, synthetic construct
  misc_feature 1..27: note = Immediate early response gene 5 protein (99-107)
  source 1..27: mol_type = other RNA
gagccccagcctgaaagaagctccgtg

SEQ ID NO: 63415 - RNA, 27 nt, synthetic construct
  misc_feature 1..27: note = Tubulin beta-6 chain (116-124)
  source 1..27: mol_type = other RNA
gagccctacaacgccaccctgagcgtg

SEQ ID NO: 63416 - RNA, 30 nt, synthetic construct
  misc_feature 1..30: note = Proline-rich protein PRCC (289-298)
  source 1..30: mol_type = other RNA
gagccctacccttatccaatcccgaccgtg

SEQ ID NO: 63417 - RNA, 24 nt, synthetic construct
  misc_feature 1..24: note = Eukaryotic translation initiation factor 3 subunit A (641-648)
  source 1..24: mol_type = other RNA
gagcagatcaagaaaaccgaactg

SEQ ID NO: 63418 - RNA, 27 nt, synthetic construct
  misc_feature 1..27: note = Integrator complex subunit 1 (747-755)
  source 1..27: mol_type = other RNA
gagcagcccgaaacctactataagtgg

SEQ ID NO: 63419 - RNA, 27 nt, synthetic construct
  misc_feature 1..27: note = Oxysterol-binding protein-related protein 9 (151-159)
  source 1..27: mol_type = other RNA
gagcagagaaagaaaatcgaaaccctg

SEQ ID NO: 63420 - RNA, 39 nt, synthetic construct
  misc_feature 1..39: note = (1108-1120)
  source 1..39: mol_type = other RNA
gagagcgacaagtacgccgaaagaaaaggcgctgcatat

SEQ ID NO: 63421 - RNA, 30 nt, synthetic construct
  misc_feature 1..30: note = 39S ribosomal protein L2, mitochondrial (197-206)
  source 1..30: mol_type = other RNA
gagagcgaacccggcagaggggcccagtac

SEQ ID NO: 63422 - RNA, 27 nt, synthetic construct
  misc_feature 1..27: note = Trafficking protein particle complex subunit 3 (73-81)
  source 1..27: mol_type = other RNA
gagaccgccgacgtgatcgctaaggtc

SEQ ID NO: 63423 - RNA, 33 nt, synthetic construct
  misc_feature 1..33: note = 60S ribosomal protein L17 (31-41)
  source 1..33: mol_type = other RNA
gagaccgcccaggctatcaagggcatgcacatt

SEQ ID NO: 63424 - RNA, 33 nt, synthetic construct
  misc_feature 1..33: note = Semaphorin-3C (312-322)
  source 1..33: mol_type = other RNA
gagaccgacaaccccagaacaactctggtgtac

SEQ ID NO: 63425 - RNA, 27 nt, synthetic construct
  misc_feature 1..27: note = Maturin (26-34)
  source 1..27: mol_type = other RNA
gagaccgaaagaaggatggacttctac

SEQ ID NO: 63426 - RNA, 27 nt, synthetic construct
  misc_feature 1..27: note = Type II inositol 3,4-bisphosphate 4-phosphatase (389-397)
  source 1..27: mol_type = other RNA
gagaccgaaagaaggaacacaggctac

SEQ ID NO: 63427 - RNA, 27 nt, synthetic construct
  misc_feature 1..27: note = Crooked neck-like protein 1 (679-687)
  source 1..27: mol_type = other RNA
gagaccgaaagaacaaggaacctgtac

SEQ ID NO: 63428 - RNA, 27 nt, synthetic construct
  misc_feature 1..27: note = Mortality factor 4-like protein 1 (187-195)
  source 1..27: mol_type = other RNA
gagaccttcatgaacagagtggaagtc

SEQ ID NO: 63429 - RNA, 27 nt, synthetic construct
  misc_feature 1..27: note = Proteasome-associated protein ECM29 homolog (349-357)
  source 1..27: mol_type = other RNA
gagaccttccccgccaacatccaggtg

SEQ ID NO: 63430 - RNA, 27 nt, synthetic construct
  misc_feature 1..27: note = Nucleoporin NUP188 homolog (337-345)
  source 1..27: mol_type = other RNA
gagaccagctccgtggtcagaaagatc

SEQ ID NO: 63431 - RNA, 27 nt, synthetic construct
  misc_feature 1..27: note = NF-kappa-B-repressing factor (487-495)
  source 1..27: mol_type = other RNA
gaggtgatcgccgaagctgtcggcgtt

SEQ ID NO: 63432 - RNA, 27 nt, synthetic construct
  misc_feature 1..27: note = Sphingolipid delta(4)-desaturase DES1 (150-158)
  source 1..27: mol_type = other RNA
gaggtgatcaacaccgtcgcccaggtt

SEQ ID NO: 63433 - RNA, 27 nt, synthetic construct
  misc_feature 1..27: note = U11/U12 small nuclear ribonucleoprotein 48 kDa protein (239-247)
  source 1..27: mol_type = other RNA
gaggtgatcagagacgtcattaacgtt

SEQ ID NO: 63434 - RNA, 27 nt, synthetic construct
  misc_feature 1..27: note = T-complex protein 1 subunit theta (462-470)
  source 1..27: mol_type = other RNA
gaggtgatcagcaagctgtacgccgtc

SEQ ID NO: 63435 - RNA, 27 nt, synthetic construct
  misc_feature 1..27: note = Protein O-GlcNAcase (266-274)
  source 1..27: mol_type = other RNA
gaggtgagcaagatcattaaaagagcc

SEQ ID NO: 63436 - RNA, 30 nt, synthetic construct
  misc_feature 1..30: note = Prolyl 3-hydroxylase OGFOD1 (211-220)
  source 1..30: mol_type = other RNA
gaggtgagccccgtctccttccaccaggtt

SEQ ID NO: 63437 - RNA, 30 nt, synthetic construct
  misc_feature 1..30: note = Melanoma-associated antigen 1 (222-231)
  source 1..30: mol_type = other RNA
gaggtgtacgacggcagagaacacagcgcc

SEQ ID NO: 63438 - RNA, 27 nt, synthetic construct
  misc_feature 1..27: note = Exocyst complex component 4 (587-595)
  source 1..27: mol_type = other RNA
gagtacatccacgccctgaccctcctt

SEQ ID NO: 63439 - RNA, 33 nt, synthetic construct
  misc_feature 1..33: note = Inactive tyrosine-protein kinase transmembrane receptor ROR1 (4-14)
  source 1..33: mol_type = other RNA
gagtacatcaaccagggcgacctgcacgaattc

SEQ ID NO: 63440 - RNA, 27 nt, synthetic construct
  misc_feature 1..27: note = Vacuolar protein sorting-associated protein 4B (64-72)
  source 1..27: mol_type = other RNA
gagtacctggacagagccgaaaagctc

SEQ ID NO: 63441 - RNA, 27 nt, synthetic construct
  misc_feature 1..27: note = 5'-3' exoribonuclease 1 (989-997)
  source 1..27: mol_type = other RNA
gagtacctggaaagagcccccgagctc

SEQ ID NO: 63442 - RNA, 24 nt, synthetic construct
  misc_feature 1..24: note = Tubulin beta chain (178-185)
  source 1..24: mol_type = other RNA
gagtaccccgacagaatcatgaac

SEQ ID NO: 63443 - RNA, 30 nt, synthetic construct
  misc_feature 1..30: note = Zinc finger protein 281 (515-524)
  source 1..30: mol_type = other RNA
gagtacagcaagtatctgcagcaagccttc

SEQ ID NO: 63444 - RNA, 27 nt, synthetic construct
  misc_feature 1..27: note = UPF0469 protein KIAA0907 (327-335)
  source 1..27: mol_type = other RNA
gagtacagcagattcgtgaaccagatc

SEQ ID NO: 63445 - RNA, 27 nt, synthetic construct
  misc_feature 1..27: note = Melanoma-associated antigen D1 (504-512)
  source 1..27: mol_type = other RNA
gagtacaccgacgtgtatcccgaaatc

SEQ ID NO: 63446 - RNA, 27 nt, synthetic construct
  misc_feature 1..27: note = Probable global transcription activator SNF2L2 (535-543)
  source 1..27: mol_type = other RNA
gagtacgtggccaacctgaccaatctc

SEQ ID NO: 63447 - RNA, 33 nt, synthetic construct
  misc_feature 1..33: note = HLA class I histocompatibility antigen, alpha chain F (43-53)
  source 1..33: mol_type = other RNA
gagtacgtggacgatacccagttcctgagattt

SEQ ID NO: 63448 - RNA, 27 nt, synthetic construct
  misc_feature 1..27: note = Zinc finger protein 506 (117-125)
  source 1..27: mol_type = other RNA
gagtacgtgaagttcctgcacaaattt

SEQ ID NO: 63449 - RNA, 27 nt, synthetic construct
  misc_feature 1..27: note = Kinesin-like protein KIF22 (218-226)
  source 1..27: mol_type = other RNA
ttcgccgactttgagagacacttcctg

SEQ ID NO: 63450 - RNA, 27 nt, synthetic construct
  misc_feature 1..27: note = Phosphatidylinositol 4-phosphate 3-kinase C2 domain-containing subunit alpha (950-958)
  source 1..27: mol_type = other RNA
ttcgccgaccaggaggtgagaagcctg

SEQ ID NO: 63451 - RNA, 27 nt, synthetic construct
  misc_feature 1..27: note = E3 ubiquitin-protein ligase TRIM22 (386-394)
  source 1..27: mol_type = other RNA
ttcgcctttgaccccagcgtgaactac

SEQ ID NO: 63452 - RNA, 27 nt, synthetic construct
  misc_feature 1..27: note = Protein disulfide-isomerase A3 (184-192)
  source 1..27: mol_type = other RNA
ttcgcccacaccaacgtggagagcctg

SEQ ID NO: 63453 - RNA, 27 nt, synthetic construct
  misc_feature 1..27: note = Sarcosine dehydrogenase, mitochondrial (859-867)
  source 1..27: mol_type = other RNA
ttcgccatcgacaagaccattgcttac

SEQ ID NO: 63454 - RNA, 27 nt, synthetic construct
  misc_feature 1..27: note = Eukaryotic translation initiation factor 3 subunit E (53-61)
  source 1..27: mol_type = other RNA
ttcgccatggacgtgtacaagaacctg

SEQ ID NO: 63455 - RNA, 27 nt, synthetic construct
  misc_feature 1..27: note = Protein-tyrosine kinase 2-beta (257-265)
  source 1..27: mol_type = other RNA
ttcgccaacatcgaccaggagacctac

SEQ ID NO: 63456 - RNA, 33 nt, synthetic construct; identical to SEQ ID NO: 39229
  misc_feature 1..33: note = Glutamine and serine-rich protein 1 (1659-1669)
  source 1..33: mol_type = other RNA

SEQ ID NO: 63457 - RNA, 27 nt, synthetic construct
  misc_feature 1..27: note = Ubiquilin-1 (50-58)
  source 1..27: mol_type = other RNA
ttcgccgtgcccgagaacagctccgtc

SEQ ID NO: 63458 - RNA, 30 nt, synthetic construct
  misc_feature 1..30: note = Eukaryotic translation initiation factor 3 subunit B (568-577)
  source 1..30: mol_type = other RNA
ttcgcctgggagcccaacggcagcaagttt

SEQ ID NO: 63459 - RNA, 33 nt, synthetic construct
  misc_feature 1..33: note = Probable ATP-dependent RNA helicase DDX56 (464-474)
  source 1..33: mol_type = other RNA
ttcgaggacaaccccagagatctgcagctcctt

SEQ ID NO: 63460 - RNA, 27 nt, synthetic construct
  misc_feature 1..27: note = Coatomer subunit gamma-1 (783-791)
  source 1..27: mol_type = other RNA
ttcgagaaggaagagacctttacactg

SEQ ID NO: 63461 - RNA, 27 nt, synthetic construct
  misc_feature 1..27: note = Alpha-parvin (133-141)
  source 1..27: mol_type = other RNA
ttcgagaagctggaaagcgagaaactc

SEQ ID NO: 63462 - RNA, 30 nt, synthetic construct
  misc_feature 1..30: note = Glycogen phosphorylase, brain form (327-336)
  source 1..30: mol_type = other RNA
ttcgagacctttcccgacaaggtggccatc

SEQ ID NO: 63463 - RNA, 33 nt, synthetic construct
  misc_feature 1..33: note = Destrin (89-99)
  source 1..33: mol_type = other RNA
ttcgagaccaaggaaagcagaaaagaggaactg

SEQ ID NO: 63464 - RNA, 27 nt, synthetic construct
  misc_feature 1..27: note = Zinc finger protein 462 (268-276)
  source 1..27: mol_type = other RNA
ttcggcgacagcgggagactgtactat

SEQ ID NO: 63465 - RNA, 27 nt, synthetic construct
  misc_feature 1..27: note = Endoplasmic reticulum-Golgi intermediate compartment protein 3 (214-222)
  source 1..27: mol_type = other RNA
ttccactttgcccccggcaagagcttc

SEQ ID NO: 63466 - RNA, 30 nt, synthetic construct
  misc_feature 1..30: note = HLA class II histocompatibility antigen, DQ alpha 1 chain (134-143)
  source 1..30: mol_type = other RNA
ttcatcgacaagtttaccccccctgtggtc

SEQ ID NO: 63467 - RNA, 27 nt, synthetic construct
  misc_feature 1..27: note = Guanine nucleotide-binding protein G(I)/G(S)/G(T) subunit beta-1 (58-66)
  source 1..27: mol_type = other RNA
ttcctggacgataaccagatcgtgacc

SEQ ID NO: 63468 - RNA, 27 nt, synthetic construct
  misc_feature 1..27: note = Basigin (25-33)
  source 1..27: mol_type = other RNA
ttcctgcccgagcctatgggcaccgcc

SEQ ID NO: 63469 - RNA, 30 nt, synthetic construct
  misc_feature 1..30: note = Volume-regulated anion channel subunit LRRC8D (80-89)
  source 1..30: mol_type = other RNA
ttcctgagcgaggtgtccgaaaacaagctc

SEQ ID NO: 63470 - RNA, 27 nt, synthetic construct
  misc_feature 1..27: note = Transmembrane protein 97 (18-26)
  source 1..27: mol_type = other RNA
ttcctgagccacatccccattaccctc

SEQ ID NO: 63471 - RNA, 30 nt, synthetic construct
  misc_feature 1..30: note = Vitamin K-dependent protein S (26-35)
  source 1..30: mol_type = other RNA
ttcctgagcaagcagcaagcctcccaggtg

SEQ ID NO: 63472 - RNA, 27 nt, synthetic construct
  misc_feature 1..27: note = Helicase with zinc finger domain 2 (630-638)
  source 1..27: mol_type = other RNA
ttcagaccccctaccagggccgagctg

SEQ ID NO: 63473 - RNA, 27 nt, synthetic construct
  misc_feature 1..27: note = Myeloid leukemia factor 2 (203-211)
  source 1..27: mol_type = other RNA
ttcagacagcaaaggcccctggagttt

SEQ ID NO: 63474 - RNA, 27 nt, synthetic construct
  misc_feature 1..27: note = Importin subunit alpha-7 (90-98)
  source 1..27: mol_type = other RNA
ttcagcgacgattccgacctgcagctc

SEQ ID NO: 63475 - RNA, 27 nt, synthetic construct
  misc_feature 1..27: note = Protein phosphatase 1D (12-20)
  source 1..27: mol_type = other RNA
ttcagcgaccagggcgggagaaagtac

SEQ ID NO: 63476 - RNA, 27 nt, synthetic construct
  misc_feature 1..27: note = 60S ribosomal protein L11 (98-106)
  source 1..27: mol_type = other RNA
ttcagcgacaccggcaactttgggttc

SEQ ID NO: 63477 - RNA, 27 nt, synthetic construct
  misc_feature 1..27: note = Renin receptor (105-113)
  source 1..27: mol_type = other RNA
ttcagcgaggaaacccccgtggtcctg

SEQ ID NO: 63478 - RNA, 27 nt, synthetic construct
  misc_feature 1..27: note = Transforming protein RhoA (80-88)
  source 1..27: mol_type = other RNA
ttcagcatcgactcccccgattctctg

SEQ ID NO: 63479 - RNA, 27 nt, synthetic construct
  misc_feature 1..27: note = Condensin complex subunit 3 (305-313)
  source 1..27: mol_type = other RNA
ttcagcatcacccccctgtccgagctc

SEQ ID NO: 63480 - RNA, 27 nt, synthetic construct
  misc_feature 1..27: note = Unconventional myosin-Ib (364-372)
  source 1..27: mol_type = other RNA
ttcagctccgaccacctgatcgagatg

SEQ ID NO: 63481 - RNA, 27 nt, synthetic construct
  misc_feature 1..27: note = TBC1 domain family member 22B (80-88)
  source 1..27: mol_type = other RNA
ttcagctccccctcttttcagaccctg

SEQ ID NO: 63482 - RNA, 27 nt, synthetic construct
  misc_feature 1..27: note = Basic leucine zipper and W2 domain-containing protein 2 (234-242)
  source 1..27: mol_type = other RNA
ttcaccgacgccggcctgaaggagctc

SEQ ID NO: 63483 - RNA, 27 nt, synthetic construct
  misc_feature 1..27: note = Multidrug resistance protein 1 (175-183)
  source 1..27: mol_type = other RNA
ttcaccgacaaggagctgctcgcctac

SEQ ID NO: 63484 - RNA, 27 nt, synthetic construct
  misc_feature 1..27: note = Protein VPRBP (1070-1078)
  source 1..27: mol_type = other RNA
ttcaccgaggaccactacgtggaattt

SEQ ID NO: 63485 - RNA, 30 nt, synthetic construct
  misc_feature 1..30: note = Neuronal calcium sensor 1 (22-31)
  source 1..30: mol_type = other RNA
ttcaccgagaaggaagtgcagcaatggtac

SEQ ID NO: 63486 - RNA, 27 nt, synthetic construct
  misc_feature 1..27: note = RNMT-activating mini protein (19-27)
  source 1..27: mol_type = other RNA
ttcaccgagaacgacaaggaataccag

SEQ ID NO: 63487 - RNA, 39 nt, synthetic construct
  misc_feature 1..39: note = DNA-directed RNA polymerase II subunit RPB7 (31-43)
  source 1..39: mol_type = other RNA
ttcaccgaggtggaaggcacatgcactgggaagtacgga

SEQ ID NO: 63488 - RNA, 27 nt, synthetic construct
  misc_feature 1..27: note = SURP and G-patch domain-containing protein 1 (198-206)
  source 1..27: mol_type = other RNA
ttcgtggccgagggcgggcccgaactg

SEQ ID NO: 63489 - RNA, 30 nt, synthetic construct
  misc_feature 1..30: note = Glutamyl-tRNA(Gln) amidotransferase subunit C, mitochondrial (112-121)
  source 1..30: mol_type = other RNA
ttcgtggccccccctggcaacatcagcctg

SEQ ID NO: 63490 - RNA, 27 nt, synthetic construct
  misc_feature 1..27: note = E3 ubiquitin-protein ligase RNF187 (182-190)
  source 1..27: mol_type = other RNA
ttcgtggaggaagaggaacactttctg

SEQ ID NO: 63491 - RNA, 27 nt, synthetic construct
  misc_feature 1..27: note = Ubiquitin carboxyl-terminal hydrolase 22 (45-53)
  source 1..27: mol_type = other RNA
ttcgtgtggagcggcaccgccgaggct

SEQ ID NO: 63492 - RNA, 33 nt, synthetic construct
  misc_feature 1..33: note = Membrane cofactor protein (69-79)
  source 1..33: mol_type = other RNA
ttctacatcccccctctggccacccacacaatt

SEQ ID NO: 63493 - RNA, 27 nt, synthetic construct
  misc_feature 1..27: note = GPI transamidase component PIG-T (539-547)
  source 1..27: mol_type = other RNA
ttctacaacctgctcaccagaacattt

SEQ ID NO: 63494 - RNA, 27 nt, synthetic construct
  misc_feature 1..27: note = RNA polymerase II-associated factor 1 homolog (423-431)
  source 1..27: mol_type = other RNA
ggcgccaccgctgcagcccccgtgcct

SEQ ID NO: 63495 - RNA, 33 nt, synthetic construct
  misc_feature 1..33: note = Nuclear mitotic apparatus protein 1 (775-785)
  source 1..33: mol_type = other RNA
ggcgaggcccaccaggctgaaaccgaggtgctg

SEQ ID NO: 63496 - RNA, 30 nt, synthetic construct
  misc_feature 1..30: note = Cytoplasmic dynein 1 light intermediate chain 2 (61-70)
  source 1..30: mol_type = other RNA
ggcgaggacgggagcggaaagaccacactg

SEQ ID NO: 63497 - RNA, 33 nt, synthetic construct; identical to SEQ ID NO: 39270
  misc_feature 1..33: note = von Willebrand factor A domain-containing protein 5A (208-218)
  source 1..33: mol_type = other RNA

SEQ ID NO: 63498 - RNA, 27 nt, synthetic construct
  misc_feature 1..27: note = Protein Jade-2 (168-176)
  source 1..27: mol_type = other RNA
ggcgaggacctggaaaaggtgaccctc

SEQ ID NO: 63499 - RNA, 30 nt, synthetic construct
  misc_feature 1..30: note = Zinc finger protein 622 (359-368)
  source 1..30: mol_type = other RNA
ggcgaggaccccaacaaggccgaagagctg

SEQ ID NO: 63500 - RNA, 33 nt, synthetic construct
  misc_feature 1..33: note = Eukaryotic translation initiation factor 3 subunit C-like protein (542-552)
  source 1..33: mol_type = other RNA
ggcgaggacagcgccgtgctgatggaaagactc

SEQ ID NO: 63501 - RNA, 27 nt, synthetic construct
  misc_feature 1..27: note = Poly(U)-binding-splicing factor PUF60 (123-131)
  source 1..27: mol_type = other RNA
ggcgaggacaccatcagacaggccttc

SEQ ID NO: 63502 - RNA, 30 nt, synthetic construct
  misc_feature 1..30: note = Glutamine-tRNA ligase (351-360)
  source 1..30: mol_type = other RNA
ggcgaggaactgaaggggcacaacaccctc

SEQ ID NO: 63503 - RNA, 27 nt, synthetic construct
  misc_feature 1..27: note = DNA damage-binding protein 1 (783-791)
  source 1..27: mol_type = other RNA
ggcgaggaagtggaggtccacaacctg

SEQ ID NO: 63504 - RNA, 30 nt, synthetic construct
  misc_feature 1..30: note = RNA-binding protein 8A (81-90)
  source 1..30: mol_type = other RNA
ggcgagatcaagaacattcacctgaatctc

SEQ ID NO: 63505 - RNA, 33 nt, synthetic construct
  misc_feature 1..33: note = Supervillin (797-807)
  source 1..33: mol_type = other RNA
ggcgagatcaagacccccacaggggaaggactg

SEQ ID NO: 63506 - RNA, 27 nt, synthetic construct
  misc_feature 1..27: note = Hsc70-interacting protein (128-136)
  source 1..27: mol_type = other RNA
ggcgagctgcagaaggccatcgacctc

SEQ ID NO: 63507 - RNA, 27 nt, synthetic construct
  misc_feature 1..27: note = Antigen peptide transporter 2 (87-95)
  source 1..27: mol_type = other RNA
ggcgagctgacccaggggagcctcctt

SEQ ID NO: 63508 - RNA, 30 nt, synthetic construct
  misc_feature 1..30: note = Cytoplasmic dynein 1 heavy chain 1 (2173-2182)
  source 1..30: mol_type = other RNA
ggcgagatgaccgccctgagagaagagctc

SEQ ID NO: 63509 - RNA, 30 nt, synthetic construct
  misc_feature 1..30: note = Ras-related protein Rab-5A (27-36)
  source 1..30: mol_type = other RNA
ggcgagagcgccgtggggaagtcctctctg

SEQ ID NO: 63510 - RNA, 33 nt, synthetic construct
  misc_feature 1..33: note = U4/U6 small nuclear ribonucleoprotein Prp4 (45-55)
  source 1..33: mol_type = other RNA
ggcgagagcgggatcctgggaaaggacggtctc

SEQ ID NO: 63511 - RNA, 27 nt, synthetic construct
  misc_feature 1..27: note = tRNA wybutosine-synthesizing protein 2 homolog (54-62)
  source 1..27: mol_type = other RNA
ggcgagaccctgcccgaacagcacctc

SEQ ID NO: 63512 - RNA, 27 nt, synthetic construct
  misc_feature 1..27: note = Nuclear protein localization protein 4 homolog (480-488)
  source 1..27: mol_type = other RNA
ggcgagacccaggacttccacagcctg

SEQ ID NO: 63513 - RNA, 27 nt, synthetic construct
  misc_feature 1..27: note = Eukaryotic translation initiation factor 5A-1 (106-114)
  source 1..27: mol_type = other RNA
ggcgaggtgagagaagacctgaggctc

SEQ ID NO: 63514 - RNA, 27 nt, synthetic construct
  misc_feature 1..27: note = Heterogeneous nuclear ribonucleoprotein H (422-430)
  source 1..27: mol_type = other RNA
ggcgggtacggaggtcagagctccatg

SEQ ID NO: 63515 - RNA, 27 nt, synthetic construct
  misc_feature 1..27: note = Class E basic helix-loop-helix protein 41 (81-89)
  source 1..27: mol_type = other RNA
ggccacctggagaaggccgtggtcctc

SEQ ID NO: 63516 - RNA, 27 nt, synthetic construct
  misc_feature 1..27: note = Guanine nucleotide-binding protein subunit beta-2-like 1 (13-21)
  source 1..27: mol_type = other RNA
ggccacaacgggtgggtgacccagatc

SEQ ID NO: 63517 - RNA, 27 nt, synthetic construct
  misc_feature 1..27: note = Oxysterol-binding protein-related protein 9 (262-270)
  source 1..27: mol_type = other RNA
ggccacagccccccttcctcttcactg

SEQ ID NO: 63518 - RNA, 27 nt, synthetic construct
  misc_feature 1..27: note = DNA replication licensing factor MCM6 (508-516)
  source 1..27: mol_type = other RNA
ggccactacgacagaagcaagtccctg

SEQ ID NO: 63519 - RNA, 33 nt, synthetic construct
  misc_feature 1..33: note = 40S ribosomal protein S15 (113-123)
  source 1..33: mol_type = other RNA
ggccactacctgggggagttcagcatcacctat

SEQ ID NO: 63520 - RNA, 27 nt, synthetic construct
  misc_feature 1..27: note = Coatomer subunit alpha (731-739)
  source 1..27: mol_type = other RNA
ggccactaccagaacgccctgtatctc

SEQ ID NO: 63521 - RNA, 27 nt, synthetic construct
  misc_feature 1..27: note = Poly(rC)-binding protein 1 (259-267)
  source 1..27: mol_type = other RNA
ggcatcgacagctcctctcccgaggtg

SEQ ID NO: 63522 - RNA, 27 nt, synthetic construct
  misc_feature 1..27: note = Mitogen-activated protein kinase kinase kinase 6 (197-205)
  source 1..27: mol_type = other RNA
ggcctggccgacgggctcgtgcaggct

SEQ ID NO: 63523 - RNA, 27 nt, synthetic construct
  misc_feature 1..27: note = Multiple PDZ domain protein (814-822)
  source 1..27: mol_type = other RNA
ggcctggccgacaagcccctcttcaga

SEQ ID NO: 63524 - RNA, 27 nt, synthetic construct
  misc_feature 1..27: note = Ras GTPase-activating-like protein IQGAP3 (153-161)
  source 1..27: mol_type = other RNA
ggcctggccccccagatccacgacctc

SEQ ID NO: 63525 - RNA, 27 nt, synthetic construct
  misc_feature 1..27: note = 26S protease regulatory subunit 8 (27-35)
  source 1..27: mol_type = other RNA
ggcctggacaagcagatcaaagagatt

SEQ ID NO: 63526 - RNA, 27 nt, synthetic construct
  misc_feature 1..27: note = Nuclear autoantigenic sperm protein (409-417)
  source 1..27: mol_type = other RNA
ggcctggaggaaaaggtgagagccaaa

SEQ ID NO: 63527 - RNA, 27 nt, synthetic construct
  misc_feature 1..27: note = Nuclear pore complex protein Nup98-Nup96 (50-58)
  source 1..27: mol_type = other RNA
ggcctgttcgggaacagccagaccaag

SEQ ID NO: 63528 - RNA, 27 nt, synthetic construct
  misc_feature 1..27: note = Box C/D snoRNA protein 1 (14-22)
  source 1..27: mol_type = other RNA
ggcctgcacagcgtggccgagggggtc

SEQ ID NO: 63529 - RNA, 27 nt, synthetic construct
  misc_feature 1..27: note = 60S ribosomal protein L11 (85-93)
  source 1..27: mol_type = other RNA
ggcctgaaggtgagagagtacgaactc

SEQ ID NO: 63530 - RNA, 27 nt, synthetic construct
  misc_feature 1..27: note = Kinesin-like protein KIF3A (576-584)
  source 1..27: mol_type = other RNA
ggcctgctcgagaacatcagacagctt

SEQ ID NO: 63531 - RNA, 33 nt, synthetic construct
  misc_feature 1..33: note = Mitochondrial import inner membrane translocase subunit TIM50 (78-88)
  source 1..33: mol_type = other RNA
ggcctgctcggggccggaggtaccgtgagcgtc

SEQ ID NO: 63532 - RNA, 27 nt, synthetic construct
  misc_feature 1..27: note = C-terminal-binding protein 1 (238-246)
  source 1..27: mol_type = other RNA
ggcctgaacgagcacaatcatcacctc

SEQ ID NO: 63533 - RNA, 30 nt, synthetic construct; identical to SEQ ID NO: 39306
  misc_feature 1..30: note = Acyl-CoA synthetase family member 4 (721-730)
  source 1..30: mol_type = other RNA

SEQ ID NO: 63534 - RNA, 27 nt, synthetic construct
  misc_feature 1..27: note = Fos-related antigen 2 (165-173)
  source 1..27: mol_type = other RNA
ggcctgcagaaggagatcgccgaactc

SEQ ID NO: 63535 - RNA, 27 nt, synthetic construct
  misc_feature 1..27: note = Mitofusin-1 (547-555)
  source 1..27: mol_type = other RNA
ggcctgagcgagcccatcttccagctc

SEQ ID NO: 63536 - RNA, 27 nt, synthetic construct
  misc_feature 1..27: note = Serine/threonine-protein phosphatase 2B catalytic subunit beta isoform (228-236)
  source 1..27: mol_type = other RNA
ggcctgagccccgagatccacaccctc

SEQ ID NO: 63537 - RNA, 27 nt, synthetic construct
  misc_feature 1..27: note = Neurofibromin (37-45)
  source 1..27: mol_type = other RNA
ggcctgaccacaatcctcaagaacgtg

SEQ ID NO: 63538 - RNA, 27 nt, synthetic construct
  misc_feature 1..27: note = Retinoic acid receptor gamma (203-211)
  source 1..27: mol_type = other RNA
ggcctgtgggacaagttcagcgagctc

SEQ ID NO: 63539 - RNA, 27 nt, synthetic construct
  misc_feature 1..27: note = Uncharacterized protein C17orf85 (252-260)
  source 1..27: mol_type = other RNA
ggcctgtacgccgacaccagagagaag

SEQ ID NO: 63540 - RNA, 24 nt, synthetic construct
  misc_feature 1..24: note = Very-long-chain (3R)-3-hydroxyacyl-CoA dehydratase 1 (106-113)
  source 1..24: mol_type = other RNA
ggcctgtacaagagcatccagaaa

SEQ ID NO: 63541 - RNA, 27 nt, synthetic construct
  misc_feature 1..27: note = Tripartite motif-containing protein 65 (17-25)
  source 1..27: mol_type = other RNA
ggcctgtaccaggaccccgtgaccctc

SEQ ID NO: 63542 - RNA, 30 nt, synthetic construct
  misc_feature 1..30: note = Thioredoxin reductase 1, cytoplasmic (282-291)
  source 1..30: mol_type = other RNA
ggccagttcatcgggccccacagaattaag

SEQ ID NO: 63543 - RNA, 27 nt, synthetic construct
  misc_feature 1..27: note = Cdc42 effector protein 3 (76-84)
  source 1..27: mol_type = other RNA
ggccagttccccgggcacaacgagttt

SEQ ID NO: 63544 - RNA, 27 nt, synthetic construct
  misc_feature 1..27: note = Regulator of chromosome condensation (439-447)
  source 1..27: mol_type = other RNA
ggccagcacaccgtgctgctcgtcaag

SEQ ID NO: 63545 - RNA, 27 nt, synthetic construct
  misc_feature 1..27: note = Chromodomain-helicase-DNA-binding protein 4 (1164-1172)
  source 1..27: mol_type = other RNA
ggccagaacaagaaagtgatgatctac

SEQ ID NO: 63546 - RNA, 39 nt, synthetic construct
  misc_feature 1..39: note = EH domain-containing protein 2 (65-77)
  source 1..39: mol_type = other RNA
ggccagtacagcaccgggaagacatccttcatccaatat

SEQ ID NO: 63547 - RNA, 33 nt, synthetic construct
  misc_feature 1..33: note = Heterogeneous nuclear ribonucleoprotein H (256-266)
  source 1..33: mol_type = other RNA
ggcagcgacagattcgggagggatctgaactac

SEQ ID NO: 63548 - RNA, 27 nt, synthetic construct
  misc_feature 1..27: note = Mitochondrial import inner membrane translocase subunit TIM50 (62-70)
  source 1..27: mol_type = other RNA
ggcagcgaggggccctcctacgccaag

SEQ ID NO: 63549 - RNA, 33 nt, synthetic construct
  misc_feature 1..33: note = Ribonucleoside-diphosphate reductase subunit M2 (238-248)
  source 1..33: mol_type = other RNA
ggcagcttcgcctccatcttttggctgaagaaa

SEQ ID NO: 63550 - RNA, 27 nt, synthetic construct
  misc_feature 1..27: note = HLA class I histocompatibility antigen, A-2 alpha chain (25-33)
  source 1..27: mol_type = other RNA
ggcagccactccatgagatacttcttt

SEQ ID NO: 63551 - RNA, 30 nt, synthetic construct
  misc_feature 1..30: note = HLA class I histocompatibility antigen, A-1 alpha chain (25-34)
  source 1..30: mol_type = other RNA
ggcagccactccatgagatacttctttacc

SEQ ID NO: 63552 - RNA, 27 nt, synthetic construct
  misc_feature 1..27: note = HLA class I histocompatibility antigen, Cw-4 alpha chain (25-33)
  source 1..27: mol_type = other RNA
ggcagccactccatgagatacttctct

SEQ ID NO: 63553 - RNA, 27 nt, synthetic construct
  misc_feature 1..27: note = 60S ribosomal protein L37 (23-31)
  source 1..27: mol_type = other RNA
ggcagcaaggcctaccacctgcagaaa

SEQ ID NO: 63554 - RNA, 33 nt, synthetic construct
  misc_feature 1..33: note = Protein PRR14L (865-875)
  source 1..33: mol_type = other RNA
ggcagcctgcccggggacaagatcagaaacaaa

SEQ ID NO: 63555 - RNA, 30 nt, synthetic construct
  misc_feature 1..30: note = Smoothelin (449-458)
  source 1..30: mol_type = other RNA
ggcaccgccgagcccgggggaagcatgaag

SEQ ID NO: 63556 - RNA, 33 nt, synthetic construct
  misc_feature 1..33: note = Embryonic stem cell-specific 5-hydroxymethylcytosine-binding protein (329-339)
  source 1..33: mol_type = other RNA
ggcaccgccgggctgctcgagcagtggcttaag

SEQ ID NO: 63557 - RNA, 33 nt, synthetic construct
  misc_feature 1..33: note = Glutamine-rich protein 1 (209-219)
  source 1..33: mol_type = other RNA
ggcaccgccagcgtgctgcagcccgtcaagaaa

SEQ ID NO: 63558 - RNA, 30 nt, synthetic construct
  misc_feature 1..30: note = Sphingosine-1-phosphate phosphatase 1 (135-144)
  source 1..30: mol_type = other RNA
ggcaccgagctggggaacgaactcttctac

SEQ ID NO: 63559 - RNA, 33 nt, synthetic construct
  misc_feature 1..33: note = WD repeat-containing protein 92 (479-489)
  source 1..33: mol_type = other RNA
ggcaccttcggggccacaagcctgcagcaaaga

SEQ ID NO: 63560 - RNA, 33 nt, synthetic construct
  misc_feature 1..33: note = Cactin isoform X2 (208-218)
  source 1..33: mol_type = other RNA
ggcaccttcatctggaacaaggccctggagaaa

SEQ ID NO: 63561 - RNA, 33 nt, synthetic construct
  misc_feature 1..33: note = Unconventional myosin-IXa (2491-2501)
  source 1..33: mol_type = other RNA
ggcaccttcaaccccgagaaggggaaacagaag

SEQ ID NO: 63562 - RNA, 27 nt, synthetic construct
  misc_feature 1..27: note = Biogenesis of lysosome-related organelles complex 1 subunit 4 (164-172)
  source 1..27: mol_type = other RNA
ggcaccttccccagagcctttaagaaa

SEQ ID NO: 63563 - RNA, 30 nt, synthetic construct
  misc_feature 1..30: note = Actin-like protein 6A (362-371)
  source 1..30: mol_type = other RNA
ggcaccttccagcaaatgtggatcagcaag

SEQ ID NO: 63564 - RNA, 33 nt, synthetic construct
  misc_feature 1..33: note = Neurobeachin-like protein 1 (754-764)
  source 1..33: mol_type = other RNA
ggcaccatcgagaagagcaaactgattacaaag

SEQ ID NO: 63565 - RNA, 27 nt, synthetic construct
  misc_feature 1..27: note = Isoleucine-tRNA ligase, cytoplasmic (62-70)
  source 1..27: mol_type = other RNA
ggcaccatcaaggacattgtgacaaga

SEQ ID NO: 63566 - RNA, 36 nt, synthetic construct
  misc_feature 1..36: note = Histone H2B type 1-K (115-126)
  source 1..36: mol_type = other RNA
ggcaccaaggccgtgacaaaatacactagcgctaag

SEQ ID NO: 63567 - RNA, 30 nt, synthetic construct
  misc_feature 1..30: note = Integrator complex subunit 5 (378-387)
  source 1..30: mol_type = other RNA
ggcaccctgcagccccctttcacagccaga

SEQ ID NO: 63568 - RNA, 27 nt, synthetic construct
  misc_feature 1..27: note = Phosphomannomutase 1 (22-30)
  source 1..27: mol_type = other RNA
ggcaccctgacacccgccagacagaag

SEQ ID NO: 63569 - RNA, 33 nt, synthetic construct
  misc_feature 1..33: note = Probable phospholipid-transporting ATPase IIA (238-248)
  source 1..33: mol_type = other RNA
ggcaccctgacacagaacgagatgatcttcaag

SEQ ID NO: 63570 - RNA, 27 nt, synthetic construct
  misc_feature 1..27: note = Thioredoxin domain-containing protein 9 (203-211)
  source 1..27: mol_type = other RNA
ggcaccaacttcacaaagctggagaaa

SEQ ID NO: 63571 - RNA, 27 nt, synthetic construct
  misc_feature 1..27: note = Rho guanine nucleotide exchange factor 17 (1361-1369)
  source 1..27: mol_type = other RNA
ggcacccaggggagccccatcacaaag

SEQ ID NO: 63572 - RNA, 30 nt, synthetic construct
  misc_feature 1..30: note = Inter-alpha-trypsin inhibitor heavy chain H5 (656-665)
  source 1..30: mol_type = other RNA
ggcacccagcccgggcctctgctcaagaaa

SEQ ID NO: 63573 - RNA, 36 nt, synthetic construct
  misc_feature 1..36: note = Sorting nexin-1 (275-286)
  source 1..36: mol_type = other RNA
ggcacccagacactgagcggggccggactccttaag

SEQ ID NO: 63574 - RNA, 39 nt, synthetic construct
  misc_feature 1..39: note = HCLS1-binding protein 3 (136-148)
  source 1..39: mol_type = other RNA
ggcaccagaagccccggggccgctggactgacatccagg

SEQ ID NO: 63575 - RNA, 27 nt, synthetic construct
  misc_feature 1..27: note = Bardet-Biedl syndrome 10 protein (375-383)
  source 1..27: mol_type = other RNA
ggcaccagctccctgttcatctacaag

SEQ ID NO: 63576 - RNA, 27 nt, synthetic construct
  misc_feature 1..27: note = Proteasome subunit beta type-7 (229-237)
  source 1..27: mol_type = other RNA
ggcaccacagccgtgctgactgagaag

SEQ ID NO: 63577 - RNA, 30 nt, synthetic construct
  misc_feature 1..30: note = E3 ubiquitin-protein ligase CBL (49-58)
  source 1..30: mol_type = other RNA
ggcaccgtggacaagaaaatggtcgagaag

SEQ ID NO: 63578 - RNA, 27 nt, synthetic construct
  misc_feature 1..27: note = E3 SUMO-protein ligase PIAS1 (411-419)
  source 1..27: mol_type = other RNA
ggcacctgggcccccatgagaagcaag

SEQ ID NO: 63579 - RNA, 27 nt, synthetic construct
  misc_feature 1..27: note = Rho-associated protein kinase 2 (301-309)
  source 1..27: mol_type = other RNA
ggcacctacagcaagatcatggaccac

SEQ ID NO: 63580 - RNA, 27 nt, synthetic construct
  misc_feature 1..27: note = 40S ribosomal protein S16 (64-72)
  source 1..27: mol_type = other RNA
ggcgtggacatcagagtcagggttaag

SEQ ID NO: 63581 - RNA, 30 nt, synthetic construct
  misc_feature 1..30: note = Phosphoribosyl pyrophosphate synthase-associated protein 1 (94-103)
  source 1..30: mol_type = other RNA
ggcgtgatcccctacttcccttatagcaag

SEQ ID NO: 63582 - RNA, 27 nt, synthetic construct
  misc_feature 1..27: note = Tenascin (23-31)
  source 1..27: mol_type = other RNA
ggcgtgctgaagaaagtcatcagacac

SEQ ID NO: 63583 - RNA, 27 nt, synthetic construct
  misc_feature 1..27: note = Sterol regulatory element-binding protein 2 (852-860)
  source 1..27: mol_type = other RNA
ggcgtgatgagcccccctctgtccaga

SEQ ID NO: 63584 - RNA, 30 nt, synthetic construct
  misc_feature 1..30: note = NADH dehydrogenase (ubiquinone) iron-sulfur protein 6, mitochondrial (29-38)
  source 1..30: mol_type = other RNA
ggcgtgagagtcagccccaccggggagaag

SEQ ID NO: 63585 - RNA, 27 nt, synthetic construct
  misc_feature 1..27: note = Double-strand-break repair protein rad21 homolog (62-70)
  source 1..27: mol_type = other RNA
ggcgtggtcagaatctaccacaggaag

SEQ ID NO: 63586 - RNA, 24 nt, synthetic construct
  misc_feature 1..24: note = Melanoma-associated antigen B2 (231-238)
  source 1..24: mol_type = other RNA
ggcgtgtacgacggggaggaacac

SEQ ID NO: 63587 - RNA, 27 nt, synthetic construct
  misc_feature 1..27: note = RNA-binding motif, single-stranded-interacting protein 2 (399-407)
  source 1..27: mol_type = other RNA
ggcgtgtacagcttccagtttaacaag

SEQ ID NO: 63588 - RNA, 27 nt, synthetic construct
  misc_feature 1..27: note = Glutathione synthetase (158-166)
  source 1..27: mol_type = other RNA
ggctacatgcccagacagtatagcctg

SEQ ID NO: 63589 - RNA, 27 nt, synthetic construct
  misc_feature 1..27: note = Far upstream element-binding protein 3 (340-348)
  source 1..27: mol_type = other RNA
cacgccgctcatatcattagcgagctg

SEQ ID NO: 63590 - RNA, 27 nt, synthetic construct
  misc_feature 1..27: note = Ectonucleoside triphosphate diphosphohydrolase 4 (473-481)
  source 1..27: mol_type = other RNA
cacgccgacctgcatagactcaagtac

SEQ ID NO: 63591 - RNA, 27 nt, synthetic construct
  misc_feature 1..27: note = V-type proton ATPase subunit B, brain isoform (310-318)
  source 1..27: mol_type = other RNA
cacgccgacgtgagcaaccagctgtac

SEQ ID NO: 63592 - RNA, 27 nt, synthetic construct
  misc_feature 1..27: note = BRCA1-A complex subunit BRE (227-235)
  source 1..27: mol_type = other RNA
cacgccctgggcgggagctccgctctc

SEQ ID NO: 63593 - RNA, 24 nt, synthetic construct
  misc_feature 1..24: note Dolichyl-diphosphooligosaccharide-proteinosyltransferase 48 kDa subunit (235-242)
  source 1..24: mol_type = other RNA
cacgccgtgggcaagaacaccctg

SEQ ID NO: 63594 - RNA, 27 nt, synthetic construct
  misc_feature 1..27: note = Perilipin-3 (249-257)
  source 1..27: mol_type = other RNA
cacgcctacgagcatagcctgggcaag

SEQ ID NO: 63595 - RNA, 27 nt, synthetic construct
  misc_feature 1..27: note = TBC1 domain family member 14 (206-214)
  source 1..27: mol_type = other RNA
cacgaggccgaagagggcagcaagctg

SEQ ID NO: 63596 - RNA, 33 nt, synthetic construct
  misc_feature 1..33: note = DNA-directed RNA polymerases I and III subunit RPAC2 (45-55)
  source 1..33: mol_type = other RNA
cacgaggaagaccataccctgggcaacagcctc

SEQ ID NO: 63597 - RNA, 30 nt, synthetic construct
  misc_feature 1..30: note = Exosome complex exonuclease RRP44 (679-688)
  source 1..30: mol_type = other RNA
cacgaggaattcagcgagcatgccctgctc

SEQ ID NO: 63598 - RNA, 27 nt, synthetic construct
  misc_feature 1..27: note = THO complex subunit 5 homolog (154-162)
  source 1..27: mol_type = other RNA
cacgaggaaatcgacctggtgagcctc

SEQ ID NO: 63599 - RNA, 27 nt, synthetic construct
  misc_feature 1..27: note = Tuftelin-interacting protein 11 (365-373)
  source 1..27: mol_type = other RNA
cacgaggaaagagtgatcagcaacctg

SEQ ID NO: 63600 - RNA, 27 nt, synthetic construct
  misc_feature 1..27: note = X-linked retinitis pigmentosa GTPase regulator (637-645)
  source 1..27: mol_type = other RNA
cacgagttcagcaagaccgaagagctg

SEQ ID NO: 63601 - RNA, 27 nt, synthetic construct
  misc_feature 1..27: note = GON-4-like protein (1051-1059)
  source 1..27: mol_type = other RNA
cacgagggcgggcccgacagcaagctg

SEQ ID NO: 63602 - RNA, 27 nt, synthetic construct
  misc_feature 1..27: note = AP-3 complex subunit delta-1 (103-111)
  source 1..27: mol_type = other RNA
cacgagggcaccgacgtgatcatgctg

SEQ ID NO: 63603 - RNA, 27 nt, synthetic construct
  misc_feature 1..27: note = Gem-associated protein 5 (588-596)
  source 1..27: mol_type = other RNA
cacgagcatggcagccagcccgaactg

SEQ ID NO: 63604 - RNA, 27 nt, synthetic construct
  misc_feature 1..27: note = Zinc finger protein 644 (930-938)
  source 1..27: mol_type = other RNA
cacgagatccatgacccccagcacctg

SEQ ID NO: 63605 - RNA, 27 nt, synthetic construct
  misc_feature 1..27: note = Glycerol-3-phosphate dehydrogenase, mitochondrial (539-547)
  source 1..27: mol_type = other RNA
cacgagatcctgaacgaagtggacctc

SEQ ID NO: 63606 - RNA, 27 nt, synthetic construct
  misc_feature 1..27: note = Eukaryotic translation initiation factor 3 subunit I (165-173)
  source 1..27: mol_type = other RNA
cacgagagcggcgaactgaaccagtac

SEQ ID NO: 63607 - RNA, 27 nt, synthetic construct
  misc_feature 1..27: note = Insulin-like growth factor 2 mRNA-binding protein 2 (301-309)
  source 1..27: mol_type = other RNA
cacgagaccggcacaaagatcactatt

SEQ ID NO: 63608 - RNA, 27 nt, synthetic construct
  misc_feature 1..27: note = Inositol-trisphosphate 3-kinase B (874-882)
  source 1..27: mol_type = other RNA
cacgaggtgatcggcagctccctgctc

SEQ ID NO: 63609 - RNA, 27 nt, synthetic construct
  misc_feature 1..27: note = Trabeculin-alpha (2620-2628)
  source 1..27: mol_type = other RNA
cacgaggtgaaggaagcccagaccctg

SEQ ID NO: 63610 - RNA, 30 nt, synthetic construct
  misc_feature 1..30: note = Translocation protein SEC62 (284-293)
  source 1..30: mol_type = other RNA
cacgagtacaagggccccaaagccgacctg

SEQ ID NO: 63611 - RNA, 24 nt, synthetic construct
  misc_feature 1..24: note = Bifunctional glutamate/proline-tRNA ligase (272-279)
  source 1..24: mol_type = other RNA
cacttcgagaccatcatgaagtac

SEQ ID NO: 63612 - RNA, 27 nt, synthetic construct
  misc_feature 1..27: note = PTB domain-containing engulfment adapter protein 1 (23-31)
  source 1..27: mol_type = other RNA
cacttcatcccctacaacgccaagttt

SEQ ID NO: 63613 - RNA, 27 nt, synthetic construct
  misc_feature 1..27: note = Squalene synthase (268-276)
  source 1..27: mol_type = other RNA
caccatatccccgacgtgattacctac

SEQ ID NO: 63614 - RNA, 27 nt, synthetic construct
  misc_feature 1..27: note = CD109 antigen (1425-1433)
  source 1..27: mol_type = other RNA
caccatagctccgtgatcttcattttt

SEQ ID NO: 63615 - RNA, 27 nt, synthetic construct
  misc_feature 1..27: note = Protein Churchill (92-100)
  source 1..27: mol_type = other RNA
caccatgtgatcgccagacacgagtac

SEQ ID NO: 63616 - RNA, 27 nt, synthetic construct
  misc_feature 1..27: note = SUN domain-containing protein 1 (591-599)
  source 1..27: mol_type = other RNA
caccatgtgagcgtcaccaagcagctg

SEQ ID NO: 63617 - RNA, 27 nt, synthetic construct
  misc_feature 1..27: note = Huntingtin (895-903)
  source 1..27: mol_type = other RNA
caccattacaccggcctgctcaagctt

SEQ ID NO: 63618 - RNA, 33 nt, synthetic construct
  misc_feature 1..33: note = DNA-directed RNA polymerase III subunit RPC1 (122-132)
  source 1..33: mol_type = other RNA
cacatcgacgagcagagcggcaaggaaaaatac

SEQ ID NO: 63619 - RNA, 36 nt, synthetic construct
  misc_feature 1..36: note = GPI transamidase component PIG-T (548-559)
  source 1..36: mol_type = other RNA
cacatcgaggaacccagaaccggcgggctggccaag

SEQ ID NO: 63620 - RNA, 27 nt, synthetic construct
  misc_feature 1..27: note = Peroxisomal acyl-coenzyme A oxidase 1 (21-29)
  source 1..27: mol_type = other RNA
cacatcctggacggcagccccgagaag

SEQ ID NO: 63621 - RNA, 33 nt, synthetic construct; identical to SEQ ID NO: 39394
  misc_feature 1..33: note = Kinesin-like protein KIF20B (82-92)
  source 1..33: mol_type = other RNA

SEQ ID NO: 63622 - RNA, 30 nt, synthetic construct
  misc_feature 1..30: note = Protein polybromo-1 (618-627)
  source 1..30: mol_type = other RNA
cacatcctggagaagctccttaaagaaaag

SEQ ID NO: 63623 - RNA, 27 nt, synthetic construct
  misc_feature 1..27: note = ADNP homeobox protein 2 (899-907)
  source 1..27: mol_type = other RNA
cacatcatgcccaccgtgcatacagtc

SEQ ID NO: 63624 - RNA, 27 nt, synthetic construct
  misc_feature 1..27: note = Cytoskeleton-associated protein 5 (447-455)
  source 1..27: mol_type = other RNA
cacatcaacgacagcgcccccgaggtg

SEQ ID NO: 63625 - RNA, 30 nt, synthetic construct
  misc_feature 1..30: note = Tumor suppressor candidate 3 (250-259)
  source 1..30: mol_type = other RNA
cacatcagaggccccccttacgcccataag

SEQ ID NO: 63626 - RNA, 27 nt, synthetic construct
  misc_feature 1..27: note = E3 ubiquitin-protein ligase pellino homolog 3 (110-118)
  source 1..27: mol_type = other RNA
cacatcagcacccccctggtgtccaag

SEQ ID NO: 63627 - RNA, 27 nt, synthetic construct
  misc_feature 1..27: note = Death-associated protein kinase 3 (166-174)
  source 1..27: mol_type = other RNA
cacaagatcgaggccggcaacgaattc

SEQ ID NO: 63628 - RNA, 27 nt, synthetic construct
  misc_feature 1..27: note = Alpha-actinin-4 (413-421)
  source 1..27: mol_type = other RNA
cacctggccgagaagttcagacagaaa

SEQ ID NO: 63629 - RNA, 27 nt, synthetic construct
  misc_feature 1..27: note = Synembryn-A (382-390)
  source 1..27: mol_type = other RNA
cacctggacaccgatgtgaagagagtc

SEQ ID NO: 63630 - RNA, 27 nt, synthetic construct
  misc_feature 1..27: note = CAD protein (188-196)
  source 1..27: mol_type = other RNA
cacctgttcaacgtggcccataccctc

SEQ ID NO: 63631 - RNA, 30 nt, synthetic construct
  misc_feature 1..30: note = AP-5 complex subunit zeta-1 (1130-1139)
  source 1..30: mol_type = other RNA
cacctgttcagcggccatctctccaccctt

SEQ ID NO: 63632 - RNA, 30 nt, synthetic construct
  misc_feature 1..30: note = Proteasome inhibitor PI31 subunit (116-125)
  source 1..30: mol_type = other RNA
cacctgggcgacttccatagaacctacaag

SEQ ID NO: 63633 - RNA, 27 nt, synthetic construct
  misc_feature 1..27: note = Cytoplasmic FMR1-interacting protein 1 (638-646)
  source 1..27: mol_type = other RNA
cacctgatcaacttcagcgagaccctc

SEQ ID NO: 63634 - RNA, 33 nt, synthetic construct
  misc_feature 1..33: note = Centromere protein H (132-142)
  source 1..33: mol_type = other RNA
cacctgctcgagcttaacaagctgatcatgaaa

SEQ ID NO: 63635 - RNA, 27 nt, synthetic construct
  misc_feature 1..27: note = Solute carrier family 35 member C2 (289-297)
  source 1..27: mol_type = other RNA
cacctgctcggcgaccagatcagcctt

SEQ ID NO: 63636 - RNA, 27 nt, synthetic construct
  misc_feature 1..27: note = Rotatin (987-995)
  source 1..27: mol_type = other RNA
cacctgcccgtgcatgtcatcggccac

SEQ ID NO: 63637 - RNA, 27 nt, synthetic construct
  misc_feature 1..27: note = SAP30-binding protein (125-133)
  source 1..27: mol_type = other RNA
cacctgcaggacaagatccaaaaactc

SEQ ID NO: 63638 - RNA, 33 nt, synthetic construct
  misc_feature 1..33: note = Collagen alpha-1(XV) chain (1257-1267)
  source 1..33: mol_type = other RNA
cacctgcaggacctcagcaccatcgtgagaaag

SEQ ID NO: 63639 - RNA, 27 nt, synthetic construct
  misc_feature 1..27: note = Small integral membrane protein 17 (92-100)
  source 1..27: mol_type = other RNA
cacctgaccatcatggtggccgtcgtt

SEQ ID NO: 63640 - RNA, 30 nt, synthetic construct
  misc_feature 1..30: note = Dysbindin (37-46)
  source 1..30: mol_type = other RNA
cacctggtggagaagcagctcatcagcaaa

SEQ ID NO: 63641 - RNA, 27 nt, synthetic construct
  misc_feature 1..27: note = Zinc finger and BTB domain-containing protein 7B (252-260)
  source 1..27: mol_type = other RNA
cacctggtgcccgaggtccctaccgtt

SEQ ID NO: 63642 - RNA, 30 nt, synthetic construct
  misc_feature 1..30: note = Ubinuclein-1 (86-95)
  source 1..30: mol_type = other RNA
cacctgtacgagcagggcgggagactcaag

SEQ ID NO: 63643 - RNA, 30 nt, synthetic construct
  misc_feature 1..30: note = Fructosamine-3-kinase (111-120)
  source 1..30: mol_type = other RNA
cacctgtacaaccagaagctcagagagaaa

SEQ ID NO: 63644 - RNA, 30 nt, synthetic construct
  misc_feature 1..30: note = Cysteine-tRNA ligase, cytoplasmic (30-39)
  source 1..30: mol_type = other RNA
cacctgtacaacagcctcaccagaaataag

SEQ ID NO: 63645 - RNA, 27 nt, synthetic construct
  misc_feature 1..27: note = Protein TANC1 (1825-1833)
  source 1..27: mol_type = other RNA
cacctgtaccaggagagcatctccaag

SEQ ID NO: 63646 - RNA, 27 nt, synthetic construct
  misc_feature 1..27: note = Importin-7 (406-414)
  source 1..27: mol_type = other RNA
cacatgatcggcagcctggccgagatt

SEQ ID NO: 63647 - RNA, 33 nt, synthetic construct; identical to SEQ ID NO: 39420
  misc_feature 1..33: note = ATP-dependent RNA helicase DDX18 (255-265)
  source 1..33: mol_type = other RNA

SEQ ID NO: 63648 - RNA, 27 nt, synthetic construct
  misc_feature 1..27: note = Proline-rich protein 11 (150-158)
  source 1..27: mol_type = other RNA
cacatgagcggcaagctgaccaacgtg

SEQ ID NO: 63649 - RNA, 27 nt, synthetic construct
  misc_feature 1..27: note = Protein CutA (98-106)
  source 1..27: mol_type = other RNA
cacccctacgaggtggccgaagtcatc

SEQ ID NO: 63650 - RNA, 27 nt, synthetic construct
  misc_feature 1..27: note = Cyclic AMP-dependent transcription factor ATF-6 beta (691-699)
  source 1..27: mol_type = other RNA
caccaggccagccatcaacccctgtac

SEQ ID NO: 63651 - RNA, 27 nt, synthetic construct
  misc_feature 1..27: note = NUAK family SNF1-like kinase 2 (201-209)
  source 1..27: mol_type = other RNA
caccagggcaagttcctgcaaaccttt

SEQ ID NO: 63652 - RNA, 27 nt, synthetic construct
  misc_feature 1..27: note = Golgi resident protein GCP60 (496-504)
  source 1..27: mol_type = other RNA
caccagtaccccggcagaggggtgtat

SEQ ID NO: 63653 - RNA, 27 nt, synthetic construct
  misc_feature 1..27: note = Major prion protein (148-156)
  source 1..27: mol_type = other RNA
cacagataccccaaccaggtgtattac

SEQ ID NO: 63654 - RNA, 27 nt, synthetic construct
  misc_feature 1..27: note = STAGA complex 65 subunit gamma (129-137)
  source 1..27: mol_type = other RNA
cacagcgaccccgagtccgatttctac

SEQ ID NO: 63655 - RNA, 27 nt, synthetic construct
  misc_feature 1..27: note = Histone-lysine N-methyltransferase NSD3 (877-885)
  source 1..27: mol_type = other RNA
cacagcgaccccatgttctcctcttac

SEQ ID NO: 63656 - RNA, 30 nt, synthetic construct
  misc_feature 1..30: note = Protein FAM135A (1394-1403)
  source 1..30: mol_type = other RNA
cacagcgaccccagacagaccttcctgtac

SEQ ID NO: 63657 - RNA, 27 nt, synthetic construct
  misc_feature 1..27: note = PERQ amino acid-rich with GYF domain-containing protein 1 (731-739)
  source 1..27: mol_type = other RNA
cacagcgacccctccatcctgggctac

SEQ ID NO: 63658 - RNA, 27 nt, synthetic construct
  misc_feature 1..27: note = NAD(P)H dehydrogenase (quinone) 1 (9-17)
  source 1..27: mol_type = other RNA
cacagcgagagaacctccttcaactac

SEQ ID NO: 63659 - RNA, 33 nt, synthetic construct
  misc_feature 1..33: note = Heterogeneous nuclear ribonucleoproteins A2/B1 (72-82)
  source 1..33: mol_type = other RNA
cacagcatcgacggcagagtggtcgagcccaag

SEQ ID NO: 63660 - RNA, 30 nt, synthetic construct
  misc_feature 1..30: note = Rho-related BTB domain-containing protein 3 (176-185)
  source 1..30: mol_type = other RNA
cacagcctggacgatttctacatcggcaag

SEQ ID NO: 63661 - RNA, 27 nt, synthetic construct
  misc_feature 1..27: note = Cytochrome c1, heme protein, mitochondrial (27-35)
  source 1..27: mol_type = other RNA
cacagcatggacttcgtggcctacaga

SEQ ID NO: 63662 - RNA, 27 nt, synthetic construct
  misc_feature 1..27: note = FUN14 domain-containing protein 1 (39-47)
  source 1..27: mol_type = other RNA
cacagctccggccccatggtggagaag

SEQ ID NO: 63663 - RNA, 27 nt, synthetic construct
  misc_feature 1..27: note = Isocitrate dehydrogenase (NAD) subunit gamma, mitochondrial (342-350)
  source 1..27: mol_type = other RNA
cacagctacgccacctccatcagaaag

SEQ ID NO: 63664 - RNA, 27 nt, synthetic construct
  misc_feature 1..27: note = KAT8 regulatory NSL complex subunit 1 (802-810)
  source 1..27: mol_type = other RNA
cacaccgacatgagctcctcttcatac

SEQ ID NO: 63665 - RNA, 30 nt, synthetic construct
  misc_feature 1..30: note = Histone-lysine N-methyltransferase SETD1A (230-239)
  source 1..30: mol_type = other RNA
cacaccatcacaaacctgactacgcccaag

SEQ ID NO: 63666 - RNA, 33 nt, synthetic construct
  misc_feature 1..33: note = DNA damage-binding protein 2 (96-106)
  source 1..33: mol_type = other RNA
cacaccctggacagctacagaatcctccagaag

SEQ ID NO: 63667 - RNA, 27 nt, synthetic construct
  misc_feature 1..27: note = Transmembraneoprotein NMB (178-186)
  source 1..27: mol_type = other RNA
cacaccctgggccagtacttccaaaag

SEQ ID NO: 63668 - RNA, 27 nt, synthetic construct
  misc_feature 1..27: note = Necdin (95-103)
  source 1..27: mol_type = other RNA
cacaccatggagttcgccctggtgaag

SEQ ID NO: 63669 - RNA, 27 nt, synthetic construct
  misc_feature 1..27: note = Integrin beta-5 (781-789)
  source 1..27: mol_type = other RNA
cacaccgtggacttcacatttaacaag

SEQ ID NO: 63670 - RNA, 27 nt, synthetic construct
  misc_feature 1..27: note = Histone-lysine N-methyltransferase 2A (25-33)
  source 1..27: mol_type = other RNA
cacgtggaccaggatctgaccacatac

SEQ ID NO: 63671 - RNA, 27 nt, synthetic construct
  misc_feature 1..27: note = Adapter protein CIKS (72-80)
  source 1..27: mol_type = other RNA
cacgtgtacagctggcccaagaacaaa

SEQ ID NO: 63672 - RNA, 27 nt, synthetic construct
  misc_feature 1..27: note = KN motif and ankyrin repeat domain-containing protein 1 (825-833)
  source 1..27: mol_type = other RNA
cactacatcgagagaattcagaagctg

SEQ ID NO: 63673 - RNA, 27 nt, synthetic construct
  misc_feature 1..27: note = Astrotactin-2 (291-299)
  source 1..27: mol_type = other RNA
cactacaacagccattatgagaagttc

SEQ ID NO: 63674 - RNA, 27 nt, synthetic construct
  misc_feature 1..27: note = Tensin-1 (1660-1668)
  source 1..27: mol_type = other RNA
cactaccccctgaacaccgtgacattc

SEQ ID NO: 63675 - RNA, 27 nt, synthetic construct
  misc_feature 1..27: note = Kelch-like protein 15 (472-480)
  source 1..27: mol_type = other RNA
cactacagcgactccatcctgaccttc

SEQ ID NO: 63676 - RNA, 27 nt, synthetic construct
  misc_feature 1..27: note = ATP-dependent RNA helicase DHX36 (726-734)
  source 1..27: mol_type = other RNA
atcgccgacgctagaaggaaggagctg

SEQ ID NO: 63677 - RNA, 30 nt, synthetic construct; identical to SEQ ID NO: 39450
  misc_feature 1..30: note = Small ubiquitin-related modifier 1 (46-55)
  source 1..30: mol_type = other RNA

SEQ ID NO: 63678 - RNA, 27 nt, synthetic construct
  misc_feature 1..27: note = Sarcoplasmic/endoplasmic reticulum calcium ATPase 1 (718-726)
  source 1..27: mol_type = other RNA
atcgccatgggcagcgggaccgctgtg

SEQ ID NO: 63679 - RNA, 30 nt, synthetic construct
  misc_feature 1..30: note = DNA-directed RNA polymerase I subunit RPA1 (1631-1640)
  source 1..30: mol_type = other RNA
atcgccgtggaccccagacacctgagcctc

SEQ ID NO: 63680 - RNA, 27 nt, synthetic construct
  misc_feature 1..27: note = Derlin-3 (176-184)
  source 1..27: mol_type = other RNA
atcgccgtgggccacatttactatttc

SEQ ID NO: 63681 - RNA, 33 nt, synthetic construct
  misc_feature 1..33: note = CD99 antigen (129-139)
  source 1..33: mol_type = other RNA
atcgcctaccagaagaaaaagctgtgcttcaaa

SEQ ID NO: 63682 - RNA, 27 nt, synthetic construct
  misc_feature 1..27: note Dolichyl-diphosphooligosaccharide-proteinosyltransferase subunit 1 (381-389)
  source 1..27: mol_type = other RNA
atcgagattgacagcccctacgaaata

SEQ ID NO: 63683 - RNA, 27 nt, synthetic construct
  misc_feature 1..27: note = NEDD8-activating enzyme E1 regulatory subunit (166-174)
  source 1..27: mol_type = other RNA
atcgagagccaccccgacaacgccctg

SEQ ID NO: 63684 - RNA, 27 nt, synthetic construct
  misc_feature 1..27: note = Splicing factor 3A subunit 1 (762-770)
  source 1..27: mol_type = other RNA
atcttcattaaggacagcaactccctg

SEQ ID NO: 63685 - RNA, 27 nt, synthetic construct
  misc_feature 1..27: note = Retinoic acid receptor RXR-gamma (443-451)
  source 1..27: mol_type = other RNA
atcggcgacacccccattgatacattc

SEQ ID NO: 63686 - RNA, 27 nt, synthetic construct
  misc_feature 1..27: note = C-myc promoter-binding protein (1082-1090)
  source 1..27: mol_type = other RNA
atcggcaagccccctctgagaagcaaa

SEQ ID NO: 63687 - RNA, 27 nt, synthetic construct
  misc_feature 1..27: note = Serine/threonine-protein kinase tousled-like 2 (421-429)
  source 1..27: mol_type = other RNA
atccacaacgaggacaatagccagttc

SEQ ID NO: 63688 - RNA, 27 nt, synthetic construct
  misc_feature 1..27: note = Exportin-2 (769-777)
  source 1..27: mol_type = other RNA
atcattatacccgagatccagaaggtg

SEQ ID NO: 63689 - RNA, 27 nt, synthetic construct
  misc_feature 1..27: note = Cytoplasmic dynein 1 heavy chain 1 (201-209)
  source 1..27: mol_type = other RNA
atcattaccaaggacctgttccaggtg

SEQ ID NO: 63690 - RNA, 27 nt, synthetic construct
  misc_feature 1..27: note = Renin receptor (326-334)
  source 1..27: mol_type = other RNA
atcatttacagaatgaccaaccagaag

SEQ ID NO: 63691 - RNA, 39 nt, synthetic construct
  misc_feature 1..39: note = Putative heat shock 70 kDa protein 7 (30-42)
  source 1..39: mol_type = other RNA
atcctggccaacgaccagggcaatagaaccacacccagc

SEQ ID NO: 63692 - RNA, 27 nt, synthetic construct
  misc_feature 1..27: note = Very-long-chain enoyl-CoA reductase (8-16)
  source 1..27: mol_type = other RNA
atcctggacgccaagaccagagagaaa

SEQ ID NO: 63693 - RNA, 33 nt, synthetic construct
  misc_feature 1..33: note = Ribosome-binding protein 1 (545-555)
  source 1..33: mol_type = other RNA
atcctggaggacgaacagacccaaagacagaag

SEQ ID NO: 63694 - RNA, 30 nt, synthetic construct
  misc_feature 1..30: note = 60S ribosomal protein L19 (118-127)
  source 1..30: mol_type = other RNA
atcctgatggagcacattcataagctcaaa

SEQ ID NO: 63695 - RNA, 27 nt, synthetic construct
  misc_feature 1..27: note = Chromobox protein homolog 6 (175-183)
  source 1..27: mol_type = other RNA
atcctgaacctcaaggtgattgacaaa

SEQ ID NO: 63696 - RNA, 30 nt, synthetic construct
  misc_feature 1..30: note = A-kinase anchor protein 8-like (468-477)
  source 1..30: mol_type = other RNA
atcctgaacaataagctcattagcaaaaag

SEQ ID NO: 63697 - RNA, 36 nt, synthetic construct
  misc_feature 1..36: note = Replication factor C subunit 3 (55-66)
  source 1..36: mol_type = other RNA
atcctgagagagctctacggcgtgggggtcgaaaag

SEQ ID NO: 63698 - RNA, 33 nt, synthetic construct
  misc_feature 1..33: note = Beta-crystallin B2 (110-120)
  source 1..33: mol_type = other RNA
atcctgtacgagaaccccaatttcaccggcaag

SEQ ID NO: 63699 - RNA, 36 nt, synthetic construct
  misc_feature 1..36: note = Discoidin, CUB and LCCL domain-containing protein 2 (337-348)
  source 1..36: mol_type = other RNA
atcctgtacagcgacgatggccagaagtggaccgtg

SEQ ID NO: 63700 - RNA, 27 nt, synthetic construct
  misc_feature 1..27: note = Tight junction protein ZO-1 (1314-1322)
  source 1..27: mol_type = other RNA
atccccgagcctcagaagccacaactg

SEQ ID NO: 63701 - RNA, 27 nt, synthetic construct
  misc_feature 1..27: note = Histone H2A.V (85-93)
  source 1..27: mol_type = other RNA
atcccccacattcataagagcctgata

SEQ ID NO: 63702 - RNA, 27 nt, synthetic construct
  misc_feature 1..27: note = Msx2-interacting protein (466-474)
  source 1..27: mol_type = other RNA
atccccattcctaccctgccaagcgtg

SEQ ID NO: 63703 - RNA, 27 nt, synthetic construct
  misc_feature 1..27: note = Histone-lysine N-methyltransferase 2E (370-378)
  source 1..27: mol_type = other RNA
atccccaagggcaccgagattacaata

SEQ ID NO: 63704 - RNA, 27 nt, synthetic construct
  misc_feature 1..27: note = E3 ubiquitin-protein ligase UBR4 (92-100)
  source 1..27: mol_type = other RNA
atccccagaaaccagctgcaaagcgtg

SEQ ID NO: 63705 - RNA, 27 nt, synthetic construct
  misc_feature 1..27: note = Nucleoporin GLE1 (428-436)
  source 1..27: mol_type = other RNA
atccccgtgagccagatttccaccata

SEQ ID NO: 63706 - RNA, 27 nt, synthetic construct
  misc_feature 1..27: note = ER membrane protein complex subunit 1 (895-903)
  source 1..27: mol_type = other RNA
atcccctacagccctgacgtgcagatt

SEQ ID NO: 63707 - RNA, 33 nt, synthetic construct
  misc_feature 1..33: note = Elongator complex protein 6 (249-259)
  source 1..33: mol_type = other RNA
atccaggacaagagcgtgtccttctttgccaaa

SEQ ID NO: 63708 - RNA, 27 nt, synthetic construct
  misc_feature 1..27: note = GPI transamidase component PIG-T (440-448)
  source 1..27: mol_type = other RNA
atccagttcgagagagccctgctcaag

SEQ ID NO: 63709 - RNA, 30 nt, synthetic construct; identical to SEQ ID NO: 39482
  misc_feature 1..30: note = Kelch domain-containing protein 2 (308-317)
  source 1..30: mol_type = other RNA

SEQ ID NO: 63710 - RNA, 27 nt, synthetic construct
  misc_feature 1..27: note = Helicase with zinc finger domain 2 (2172-2180)
  source 1..27: mol_type = other RNA
atccagggcccccctgggaccggaaag

SEQ ID NO: 63711 - RNA, 27 nt, synthetic construct
  misc_feature 1..27: note = Large proline-rich protein BAG6 (377-385)
  source 1..27: mol_type = other RNA
atccagattaacgtgggcaccacagtc

SEQ ID NO: 63712 - RNA, 30 nt, synthetic construct
  misc_feature 1..30: note = Focadhesin (263-272)
  source 1..30: mol_type = other RNA
atccagctgacccaaatgagcctccagctt

SEQ ID NO: 63713 - RNA, 36 nt, synthetic construct
  misc_feature 1..36: note = Beta-2-microglobulin (21-32)
  source 1..36: mol_type = other RNA
atccagagaacccccaagattcaagtgtacagcagg

SEQ ID NO: 63714 - RNA, 30 nt, synthetic construct
  misc_feature 1..30: note = 26S proteasome non-ATPase regulatory subunit 7 (266-275)
  source 1..30: mol_type = other RNA
atcagaagcgtggtcgccctgcacaacctc

SEQ ID NO: 63715 - RNA, 27 nt, synthetic construct
  misc_feature 1..27: note = Kinesin-like protein KIF20B (1684-1692)
  source 1..27: mol_type = other RNA
atcagcgacgatagaaactcctctgtg

SEQ ID NO: 63716 - RNA, 27 nt, synthetic construct
  misc_feature 1..27: note = Sperm-specific antigen 2 (226-234)
  source 1..27: mol_type = other RNA
atcagcgacgaggccaactccaatttc

SEQ ID NO: 63717 - RNA, 27 nt, synthetic construct
  misc_feature 1..27: note = Lysosome-associated membraneoprotein 2 (66-74)
  source 1..27: mol_type = other RNA
atcagcgaccacggcaccgtgacatac

SEQ ID NO: 63718 - RNA, 27 nt, synthetic construct
  misc_feature 1..27: note Dolichyl-diphosphooligosaccharide-proteinosyltransferase 48 kDa subunit (164-172)
  source 1..27: mol_type = other RNA
atcagcgacctgggccagcacaccctc

SEQ ID NO: 63719 - RNA, 27 nt, synthetic construct
  misc_feature 1..27: note = Dynamin-1-like protein (174-182)
  source 1..27: mol_type = other RNA
atcagcaaccccaattccattatactg

SEQ ID NO: 63720 - RNA, 27 nt, synthetic construct
  misc_feature 1..27: note = HEAT repeat-containing protein 1 (915-923)
  source 1..27: mol_type = other RNA
atcagctcccccgtggtcacctctctg

SEQ ID NO: 63721 - RNA, 33 nt, synthetic construct
  misc_feature 1..33: note = UBAP1-MVB12-associated (UMA)-domain containing protein 1 isoform b (69-79)
  source 1..33: mol_type = other RNA
atcaccgacctgcccgatcacctccttagctac

SEQ ID NO: 63722 - RNA, 27 nt, synthetic construct
  misc_feature 1..27: note = U4/U6.U5 tri-snRNP-associated protein 2 (264-272)
  source 1..27: mol_type = other RNA
atcaccgagaaggaatacaaaacatat

SEQ ID NO: 63723 - RNA, 30 nt, synthetic construct
  misc_feature 1..30: note = T-complex protein 1 subunit delta (70-79)
  source 1..30: mol_type = other RNA
atcaccaacgacggcgccacaattctgaag

SEQ ID NO: 63724 - RNA, 33 nt, synthetic construct
  misc_feature 1..33: note = Cytoplasmic dynein 2 heavy chain 1 (74-84)
  source 1..33: mol_type = other RNA
atcacctacgagagcccccctggcctgaagaaa

SEQ ID NO: 63725 - RNA, 33 nt, synthetic construct
  misc_feature 1..33: note = Isocitrate dehydrogenase (NADP) cytoplasmic (55-65)
  source 1..33: mol_type = other RNA
atcacctacacacccagcgacggcactcagaag

SEQ ID NO: 63726 - RNA, 27 nt, synthetic construct
  misc_feature 1..27: note = ATP-binding cassette sub-family F member 1 (656-664)
  source 1..27: mol_type = other RNA
atcgtgggccccaacggggtcggaaag

SEQ ID NO: 63727 - RNA, 39 nt, synthetic construct
  misc_feature 1..39: note = Glia-derived nexin (119-131)
  source 1..39: mol_type = other RNA
atcgtgaccgtcgccaacgctgttttcgtgaagaatgca

SEQ ID NO: 63728 - RNA, 30 nt, synthetic construct
  misc_feature 1..30: note = Protein enabled homolog (37-46)
  source 1..30: mol_type = other RNA
atctaccaccataccggcaacaatacattc

SEQ ID NO: 63729 - RNA, 27 nt, synthetic construct
  misc_feature 1..27: note = Vacuolar protein sorting-associated protein 13C (1267-1275)
  source 1..27: mol_type = other RNA
atctaccaccccgacattcagctgctc

SEQ ID NO: 63730 - RNA, 27 nt, synthetic construct
  misc_feature 1..27: note = Calpain-5 (449-457)
  source 1..27: mol_type = other RNA
atctacattaacagcagatccgtgttc

SEQ ID NO: 63731 - RNA, 27 nt, synthetic construct
  misc_feature 1..27: note = Cyclin E variant ex7del (19-27)
  source 1..27: mol_type = other RNA
atctacccccctaagctgcaccagttc

SEQ ID NO: 63732 - RNA, 27 nt, synthetic construct
  misc_feature 1..27: note = BTB/POZ domain-containing protein 10 (83-91)
  source 1..27: mol_type = other RNA
atctacagcaccaagctgtatagattc

SEQ ID NO: 63733 - RNA, 30 nt, synthetic construct
  misc_feature 1..30: note = Beta-soluble NSF attachment protein (71-80)
  source 1..30: mol_type = other RNA
atctacaccgacatgggcagattcacaatt

SEQ ID NO: 63734 - RNA, 27 nt, synthetic construct
  misc_feature 1..27: note = WD repeat-containing protein 1 (53-61)
  source 1..27: mol_type = other RNA
atctacaccgagcacgcccatcaggtg

SEQ ID NO: 63735 - RNA, 27 nt, synthetic construct
  misc_feature 1..27: note = SMC5-SMC6 complex localization factor protein 2 (149-157)
  source 1..27: mol_type = other RNA
atctacgtgcccagctcctatcacctg

SEQ ID NO: 63736 - RNA, 33 nt, synthetic construct
  misc_feature 1..33: note = WW domain-binding protein 2 (229-239)
  source 1..33: mol_type = other RNA
aaggccgctgaggcagccgcgagcgcttactat

SEQ ID NO: 63737 - RNA, 27 nt, synthetic construct
  misc_feature 1..27: note = 40S ribosomal protein S17 (11-19)
  source 1..27: mol_type = other RNA
aaggccgctagagtgatcattgagaaa

SEQ ID NO: 63738 - RNA, 27 nt, synthetic construct
  misc_feature 1..27: note = F-box/WD repeat-containing protein 8 (325-333)
  source 1..27: mol_type = other RNA
aaggccgaggacagcgctagaaccctg

SEQ ID NO: 63739 - RNA, 36 nt, synthetic construct
  misc_feature 1..36: note = Vacuolar fusion protein CCZ1 homolog (154-165)
  source 1..36: mol_type = other RNA
aaggccatggaggacggcggggtgaaactgctcaag

SEQ ID NO: 63740 - RNA, 27 nt, synthetic construct
  misc_feature 1..27: note = Ceramide synthase 2 (35-43)
  source 1..27: mol_type = other RNA
aaggccagcgacctgtacatcaccctc

SEQ ID NO: 63741 - RNA, 27 nt, synthetic construct
  misc_feature 1..27: note = Vacuolar protein sorting-associated protein 11 homolog (811-819)
  source 1..27: mol_type = other RNA
aaggccagccccaaaatcttccagaag

SEQ ID NO: 63742 - RNA, 27 nt, synthetic construct
  misc_feature 1..27: note = 60S ribosomal protein L4 (175-183)
  source 1..27: mol_type = other RNA
aaggcctggaacgacatcaaaaaggtg

SEQ ID NO: 63743 - RNA, 33 nt, synthetic construct
  misc_feature 1..33: note = Replication protein A 70 kDa DNA-binding subunit (157-167)
  source 1..33: mol_type = other RNA
aaggcctacggcgctagcaaaaccttcgggaag

SEQ ID NO: 63744 - RNA, 36 nt, synthetic construct
  misc_feature 1..36: note = NHP2-like protein 1 (9-20)
  source 1..36: mol_type = other RNA
aaggcctaccccctggctgacgcacacctcaccaaa

SEQ ID NO: 63745 - RNA, 27 nt, synthetic construct
  misc_feature 1..27: note = WD repeat-containing protein WRAP73 (276-284)
  source 1..27: mol_type = other RNA
aaggaggccgaaaaaagcccccagctg

SEQ ID NO: 63746 - RNA, 30 nt, synthetic construct
  misc_feature 1..30: note = Kinesin-like protein KIF20A (425-434)
  source 1..30: mol_type = other RNA
aaggaggccggcaacatcaataccagcctg

SEQ ID NO: 63747 - RNA, 30 nt, synthetic construct
  misc_feature 1..30: note = Golgin subfamily B member 1 (533-542)
  source 1..30: mol_type = other RNA
aaggaggcccaggaagagatcgctttcctg

SEQ ID NO: 63748 - RNA, 30 nt, synthetic construct
  misc_feature 1..30: note = Transmembrane protein 165 (82-91)
  source 1..30: mol_type = other RNA
aaggaggaccccgccacccagacaaacctg

SEQ ID NO: 63749 - RNA, 27 nt, synthetic construct
  misc_feature 1..27: note = Zinc finger protein AEBP2 (439-447)
  source 1..27: mol_type = other RNA
aaggaggacagcggcaaaatcaagctg

SEQ ID NO: 63750 - RNA, 27 nt, synthetic construct
  misc_feature 1..27: note = Charged multivesicular body protein 4a (192-200)
  source 1..27: mol_type = other RNA
aaggaggaagagcccagcgtgaaactg

SEQ ID NO: 63751 - RNA, 27 nt, synthetic construct
  misc_feature 1..27: note = E3 ubiquitin-protein ligase makorin-1 (351-359)
  source 1..27: mol_type = other RNA
aaggaggaaaaacagaagctgatcctc

SEQ ID NO: 63752 - RNA, 27 nt, synthetic construct
  misc_feature 1..27: note = DNA topoisomerase I, mitochondrial (544-552)
  source 1..27: mol_type = other RNA
aaggaggaaaacaaacaggtggccctg

SEQ ID NO: 63753 - RNA, 33 nt, synthetic construct
  misc_feature 1..33: note = DNA damage-binding protein 1 (287-297)
  source 1..33: mol_type = other RNA
aaggaggaacagatggacggcaccgtgacactg

SEQ ID NO: 63754 - RNA, 30 nt, synthetic construct
  misc_feature 1..30: note = TATA element modulatory factor (490-499)
  source 1..30: mol_type = other RNA
aaggaggaaagctcctctatctcaagtctg

SEQ ID NO: 63755 - RNA, 27 nt, synthetic construct
  misc_feature 1..27: note = Transcriptional adapter 3 (372-380)
  source 1..27: mol_type = other RNA
aaggaggaagtgagcagacaggagctg

SEQ ID NO: 63756 - RNA, 27 nt, synthetic construct
  misc_feature 1..27: note = Peptidyl-prolyl cis-trans isomerase-like 2 (4-12)
  source 1..27: mol_type = other RNA
aaggagttcaaaggcgacgaaatcctg

SEQ ID NO: 63757 - RNA, 30 nt, synthetic construct
  misc_feature 1..30: note = Protein transport protein Sec31A (436-445)
  source 1..30: mol_type = other RNA
aaggagttcctgagcagatccgaccagctc

SEQ ID NO: 63758 - RNA, 27 nt, synthetic construct
  misc_feature 1..27: note = Heterogeneous nuclear ribonucleoprotein Q (66-74)
  source 1..27: mol_type = other RNA
aaggagttcaacgaagacggcgccctg

SEQ ID NO: 63759 - RNA, 27 nt, synthetic construct
  misc_feature 1..27: note = CUGBP Elav-like family member 2 (417-425)
  source 1..27: mol_type = other RNA
aaggagggccccgaaggggccaacctg

SEQ ID NO: 63760 - RNA, 27 nt, synthetic construct
  misc_feature 1..27: note = Nuclear nucleic acid-binding protein C1D (79-87)
  source 1..27: mol_type = other RNA
aaggagcaccccgtgaaacaggaactg

SEQ ID NO: 63761 - RNA, 30 nt, synthetic construct
  misc_feature 1..30: note = Trafficking kinesin-binding protein 2 (299-308)
  source 1..30: mol_type = other RNA
aaggagcacgtgatcgaaaaagaggaactg

SEQ ID NO: 63762 - RNA, 33 nt, synthetic construct
  misc_feature 1..33: note = HEAT repeat-containing protein 1 (449-459)
  source 1..33: mol_type = other RNA
aaggagatcgccgacctgaaaaagcaggaactc

SEQ ID NO: 63763 - RNA, 30 nt, synthetic construct
  misc_feature 1..30: note = Serine palmitoyltransferase 2 (526-535)
  source 1..30: mol_type = other RNA
aaggagatcgacgaagtgggcgatctgctc

SEQ ID NO: 63764 - RNA, 30 nt, synthetic construct
  misc_feature 1..30: note = (Pyruvate dehydrogenase (acetyl-transferring)) kinase isozyme 4, mitochondrial (34-43)
  source 1..30: mol_type = other RNA
aaggagatcgacattctgcccacccagctc

SEQ ID NO: 63765 - RNA, 33 nt, synthetic construct
  misc_feature 1..33: note = Cytochrome b-c1 complex subunit Rieske, mitochondrial (182-192)
  source 1..33: mol_type = other RNA
aaggagatcgaacaggaggccgctgtggaactg

SEQ ID NO: 63766 - RNA, 33 nt, synthetic construct
  misc_feature 1..33: note = 40S ribosomal protein S7 (47-57)
  source 1..33: mol_type = other RNA
aaggagatcgaagtgggcgggggaagaaaagcc

SEQ ID NO: 63767 - RNA, 27 nt, synthetic construct
  misc_feature 1..27: note = RuvB-like 1 (172-180)
  source 1..27: mol_type = other RNA
aaggagatcattcaggacgtgaccctg

SEQ ID NO: 63768 - RNA, 30 nt, synthetic construct
  misc_feature 1..30: note = Structural maintenance of chromosomes protein 4 (263-272)
  source 1..30: mol_type = other RNA
aaggagatcaacgaaaaaagcaatattctg

SEQ ID NO: 63769 - RNA, 30 nt, synthetic construct
  misc_feature 1..30: note = Deoxynucleotidyltransferase terminal-interacting protein 2 (311-320)
  source 1..30: mol_type = other RNA
aaggagatcaacgaaaaaagctcccagctg

SEQ ID NO: 63770 - RNA, 27 nt, synthetic construct
  misc_feature 1..27: note = Protein bicaudal D homolog 2 (150-158)
  source 1..27: mol_type = other RNA
aaggagatcaaccagaatgtggaaatt

SEQ ID NO: 63771 - RNA, 27 nt, synthetic construct
  misc_feature 1..27: note = Nibrin (635-643)
  source 1..27: mol_type = other RNA
aaggagatcagcaacaatgacaaactg

SEQ ID NO: 63772 - RNA, 33 nt, synthetic construct
  misc_feature 1..33: note = SNW domain-containing protein 1 (141-151)
  source 1..33: mol_type = other RNA
aaggagatcaccgaaaaaacaagagtggccctg

SEQ ID NO: 63773 - RNA, 27 nt, synthetic construct
  misc_feature 1..27: note = Sperm-associated antigen 5 (893-901)
  source 1..27: mol_type = other RNA
aaggagaaaaccgaacaggagacactg

SEQ ID NO: 63774 - RNA, 30 nt, synthetic construct
  misc_feature 1..30: note = Microfibrillar-associated protein 1 (250-259)
  source 1..30: mol_type = other RNA
aaggagctggaagagaacaaaagaagcctc

SEQ ID NO: 63775 - RNA, 27 nt, synthetic construct
  misc_feature 1..27: note = LYR motif-containing protein 2 (77-85)
  source 1..27: mol_type = other RNA
aaggagctggaaaaaaccctcgccctt

SEQ ID NO: 63776 - RNA, 30 nt, synthetic construct
  misc_feature 1..30: note = Prefoldin subunit 1 (92-101)
  source 1..30: mol_type = other RNA
aaggagctggaacagaaaaagagctacctc

SEQ ID NO: 63777 - RNA, 30 nt, synthetic construct
  misc_feature 1..30: note = Developmentally-regulated GTP-binding protein 2 (161-170)
  source 1..30: mol_type = other RNA
aaggagctggaaagcgtgggcatcagactc

SEQ ID NO: 63778 - RNA, 30 nt, synthetic construct
  misc_feature 1..30: note = Ancient ubiquitous protein 1 (250-259)
  source 1..30: mol_type = other RNA
aaggagctgggccagaccgggacaagactc

SEQ ID NO: 63779 - RNA, 30 nt, synthetic construct; identical to SEQ ID NO: 39552
  misc_feature 1..30: note = U2 small nuclear ribonucleoprotein B'' (57-66)
  source 1..30: mol_type = other RNA

SEQ ID NO: 63780 - RNA, 30 nt, synthetic construct
  misc_feature 1..30: note = TSC22 domain family protein 1 (1011-1020)
  source 1..30: mol_type = other RNA
aaggagctgatcgaaaaaaacagccagctc

SEQ ID NO: 63781 - RNA, 30 nt, synthetic construct
  misc_feature 1..30: note = Bifunctional 3'-phosphoadenosine 5'-phosphosulfate synthase 1 (235-244)
  source 1..30: mol_type = other RNA
aaggagctgtacgtgcccgaaaacaaactc

SEQ ID NO: 63782 - RNA, 33 nt, synthetic construct
  misc_feature 1..33: note = Polymerase I and transcript release factor (170-180)
  source 1..33: mol_type = other RNA
aaggagaacctggaaaaaaccagacacacactc

SEQ ID NO: 63783 - RNA, 27 nt, synthetic construct
  misc_feature 1..27: note = SCY1-like protein 2 (264-272)
  source 1..27: mol_type = other RNA
aaggagcaggaacaagcccagaaactg

SEQ ID NO: 63784 - RNA, 30 nt, synthetic construct
  misc_feature 1..30: note = Corepressor interacting with RBPJ 1 (48-57)
  source 1..30: mol_type = other RNA
aaggagcaggaaagctacgacaacagactg

SEQ ID NO: 63785 - RNA, 27 nt, synthetic construct
  misc_feature 1..27: note = Kinesin-like protein (323-331)
  source 1..27: mol_type = other RNA
aaggagcagatcaccattagccaactg

SEQ ID NO: 63786 - RNA, 30 nt, synthetic construct
  misc_feature 1..30: note = Catenin alpha-1 (81-90)
  source 1..30: mol_type = other RNA
aaggagagccagttcctgaaagaagagctc

SEQ ID NO: 63787 - RNA, 27 nt, synthetic construct
  misc_feature 1..27: note = General transcription factor II-I repeat domain-containing protein 1 (343-351)
  source 1..27: mol_type = other RNA
aaggagaccgaagacatcaacacactg

SEQ ID NO: 63788 - RNA, 27 nt, synthetic construct
  misc_feature 1..27: note = Endothelial PAS domain-containing protein 1 (29-37)
  source 1..27: mol_type = other RNA
aaggagaccgaagtgttctacgagctg

SEQ ID NO: 63789 - RNA, 33 nt, synthetic construct
  misc_feature 1..33: note = Activator of 90 kDa heat shock protein ATPase homolog 1 (136-146)
  source 1..33: mol_type = other RNA
aaggagaccttcctgacaagccccgaagagctc

SEQ ID NO: 63790 - RNA, 27 nt, synthetic construct
  misc_feature 1..27: note = Double-strand-break repair protein rad21 homolog (364-372)
  source 1..27: mol_type = other RNA
aaggagaccggcggggtggaaaaactg

SEQ ID NO: 63791 - RNA, 30 nt, synthetic construct
  misc_feature 1..30: note = Transcription factor BTF3 (46-55)
  source 1..30: mol_type = other RNA
aaggagaccatcatgaaccaggaaaaactg

SEQ ID NO: 63792 - RNA, 27 nt, synthetic construct
  misc_feature 1..27: note = RNA-binding protein PNO1 (122-130)
  source 1..27: mol_type = other RNA
aaggagaccaaagacgtgagcgccctg

SEQ ID NO: 63793 - RNA, 27 nt, synthetic construct
  misc_feature 1..27: note = Spectrin beta chain, non-erythrocytic 1 (832-840)
  source 1..27: mol_type = other RNA
aaggaggtggccgaactgaccagactc

SEQ ID NO: 63794 - RNA, 30 nt, synthetic construct
  misc_feature 1..30: note = Sequestosome-1 (324-333)
  source 1..30: mol_type = other RNA
aaggaggtggaccccagcaccggcgaactg

SEQ ID NO: 63795 - RNA, 30 nt, synthetic construct
  misc_feature 1..30: note = Vacuolar protein sorting-associated protein 52 homolog (10-19)
  source 1..30: mol_type = other RNA
aaggaggtggaaagcttccagcaactgctc

SEQ ID NO: 63796 - RNA, 30 nt, synthetic construct
  misc_feature 1..30: note = Sodium/potassium-transporting ATPase subunit alpha-1 (37-46)
  source 1..30: mol_type = other RNA
aaggaggtgagcatggacgatcacaaactg

SEQ ID NO: 63797 - RNA, 33 nt, synthetic construct
  misc_feature 1..33: note = Actin-related protein 5 (555-565)
  source 1..33: mol_type = other RNA
aaggagtacgaagagaaaggcggggaatatctg

SEQ ID NO: 63798 - RNA, 27 nt, synthetic construct
  misc_feature 1..27: note = Erythrocyte band 7 integral membrane protein (58-66)
  source 1..27: mol_type = other RNA
aaggagtacgaaagagccatcattttc

SEQ ID NO: 63799 - RNA, 27 nt, synthetic construct
  misc_feature 1..27: note = Son of sevenless homolog 1 (679-687)
  source 1..27: mol_type = other RNA
aaggagtacatccagcccgtgcaactg

SEQ ID NO: 63800 - RNA, 27 nt, synthetic construct
  misc_feature 1..27: note = Ran-binding protein 17 (349-357)
  source 1..27: mol_type = other RNA
aaggagtaccccgaagtgatcagactg

SEQ ID NO: 63801 - RNA, 36 nt, synthetic construct
  misc_feature 1..36: note = Intermediate filament family orphan 2 (103-114)
  source 1..36: mol_type = other RNA
aaggagtaccaggaaaccatcggccaaattgagctg

SEQ ID NO: 63802 - RNA, 27 nt, synthetic construct
  misc_feature 1..27: note = Mitochondrial ubiquitin ligase activator of NFKB 1 (158-166)
  source 1..27: mol_type = other RNA
aagttccaccccagcatccagtccttt

SEQ ID NO: 63803 - RNA, 30 nt, synthetic construct
  misc_feature 1..30: note = Structural maintenance of chromosomes protein 4 (295-304)
  source 1..30: mol_type = other RNA
aagttcatcgaggaaaacaaagagaagttt

SEQ ID NO: 63804 - RNA, 27 nt, synthetic construct
  misc_feature 1..27: note = NADH dehydrogenase (ubiquinone) 1 alpha subcomplex subunit 12 (107-115)
  source 1..27: mol_type = other RNA
aagttcatctggaccaaccacaaattt

SEQ ID NO: 63805 - RNA, 27 nt, synthetic construct
  misc_feature 1..27: note = Kelch domain-containing protein 3 (136-144)
  source 1..27: mol_type = other RNA
aagttcaaccccgtgagctttacctgg

SEQ ID NO: 63806 - RNA, 27 nt, synthetic construct
  misc_feature 1..27: note = Bromodomain and WD repeat-containing protein 1 (309-317)
  source 1..27: mol_type = other RNA
aagttcagccccagacctctgaaattt

SEQ ID NO: 63807 - RNA, 27 nt, synthetic construct
  misc_feature 1..27: note = Protein SHQ1 homolog (255-263)
  source 1..27: mol_type = other RNA
aagttcgtgaacaaaagctacctgctc

SEQ ID NO: 63808 - RNA, 27 nt, synthetic construct
  misc_feature 1..27: note = Tyrosine-protein phosphatase non-receptor type 9 (176-184)
  source 1..27: mol_type = other RNA
aagggcgccttccccgctagactgaaa

SEQ ID NO: 63809 - RNA, 27 nt, synthetic construct
  misc_feature 1..27: note = Protein SCAF8 (528-536)
  source 1..27: mol_type = other RNA
aagggcctgccccctatcagaagcaaa

SEQ ID NO: 63810 - RNA, 27 nt, synthetic construct
  misc_feature 1..27: note = BTB/POZ domain-containing adapter for CUL3-mediated RhoA degradation protein 2 (78-86)
  source 1..27: mol_type = other RNA
aagcacttcggcaccatcctgaactac

SEQ ID NO: 63811 - RNA, 27 nt, synthetic construct
  misc_feature 1..27: note = Hsp90 co-chaperone Cdc37 (147-155)
  source 1..27: mol_type = other RNA
aagcacaaaaccttcgtggagaagtac

SEQ ID NO: 63812 - RNA, 27 nt, synthetic construct
  misc_feature 1..27: note = Transcription intermediary factor 1-beta (340-348)
  source 1..27: mol_type = other RNA
aagcaccaggagcatatcctgagattc

SEQ ID NO: 63813 - RNA, 27 nt, synthetic construct
  misc_feature 1..27: note = Proliferating cell nuclear antigen (240-248)
  source 1..27: mol_type = other RNA
aagatcgccgacatgggccacctgaaa

SEQ ID NO: 63814 - RNA, 27 nt, synthetic construct
  misc_feature 1..27: note = Ubiquitin-conjugating enzyme E2 G2 (125-133)
  source 1..27: mol_type = other RNA
aagatcgccaaacagattgtgcaaaag

SEQ ID NO: 63815 - RNA, 27 nt, synthetic construct
  misc_feature 1..27: note = Signal peptidase complex subunit 2 (40-48)
  source 1..27: mol_type = other RNA
aagatcgacgataaacccgtgaagatt

SEQ ID NO: 63816 - RNA, 27 nt, synthetic construct
  misc_feature 1..27: note = T-box transcription factor TBX3 (273-281)
  source 1..27: mol_type = other RNA
aagatcgacaacaatcccttcgccaaa

SEQ ID NO: 63817 - RNA, 27 nt, synthetic construct
  misc_feature 1..27: note = Myeloid leukemia factor 1 (90-98)
  source 1..27: mol_type = other RNA
aagatcggcgacgagccccctaaagtg

SEQ ID NO: 63818 - RNA, 27 nt, synthetic construct
  misc_feature 1..27: note = Ras GTPase-activating-like protein IQGAP1 (916-924)
  source 1..27: mol_type = other RNA
aagatcggcctgctcgtgaaaaacaag

SEQ ID NO: 63819 - RNA, 33 nt, synthetic construct
  misc_feature 1..33: note = Replication factor C subunit 1 (468-478)
  source 1..33: mol_type = other RNA
aagatcattgacgaggatggcctgctcaacctt

SEQ ID NO: 63820 - RNA, 27 nt, synthetic construct
  misc_feature 1..27: note = Nucleoprotein TPR (1420-1428)
  source 1..27: mol_type = other RNA
aagatcattgacatacaggagaaagtg

SEQ ID NO: 63821 - RNA, 27 nt, synthetic construct
  misc_feature 1..27: note = Importin-8 (102-110)
  source 1..27: mol_type = other RNA
aagatcctggaccagtacagacaaaaa

SEQ ID NO: 63822 - RNA, 33 nt, synthetic construct
  misc_feature 1..33: note = Sorting nexin-14 (635-645)
  source 1..33: mol_type = other RNA
aagatcctgcccgacgtgaacctcggcaaaatt

SEQ ID NO: 63823 - RNA, 27 nt, synthetic construct
  misc_feature 1..27: note = V-type proton ATPase subunit E 2 (52-60)
  source 1..27: mol_type = other RNA
aagatcatggagtactatgaaaaaaag

SEQ ID NO: 63824 - RNA, 27 nt, synthetic construct
  misc_feature 1..27: note = Heat shock protein HSP 90-alpha (389-397)
  source 1..27: mol_type = other RNA
aagatcatgaaagacattctggagaag

SEQ ID NO: 63825 - RNA, 27 nt, synthetic construct
  misc_feature 1..27: note = Calcium-independent phospholipase A2-gamma (789-797)
  source 1..27: mol_type = other RNA
aagatcaacgactggattaaactgaag

SEQ ID NO: 63826 - RNA, 27 nt, synthetic construct
  misc_feature 1..27: note = Heterogeneous nuclear ribonucleoprotein U-like protein 1 (262-270)
  source 1..27: mol_type = other RNA
aagatcaacgaggaaattagcgtgaaa

SEQ ID NO: 63827 - RNA, 30 nt, synthetic construct
  misc_feature 1..30: note = UDP-glucose:glycoprotein glucosyltransferase 2 (148-157)
  source 1..30: mol_type = other RNA
aagatcaacgagattaaaaagctgctcaaa

SEQ ID NO: 63828 - RNA, 30 nt, synthetic construct
  misc_feature 1..30: note = Serine/threonine-protein phosphatase 4 regulatory subunit 3B (55-64)
  source 1..30: mol_type = other RNA
aagatcaaccccaataccgcctaccagaaa

SEQ ID NO: 63829 - RNA, 30 nt, synthetic construct
  misc_feature 1..30: note = Oral-facial-digital syndrome 1 protein (116-125)
  source 1..30: mol_type = other RNA
aagatcaaccccaccagctccctgtacaaa

SEQ ID NO: 63830 - RNA, 27 nt, synthetic construct
  misc_feature 1..27: note = Poly(A) polymerase alpha (641-649)
  source 1..27: mol_type = other RNA
aagatccccacccctattgtgggcgtc

SEQ ID NO: 63831 - RNA, 27 nt, synthetic construct
  misc_feature 1..27: note = Prefoldin subunit 5 (129-137)
  source 1..27: mol_type = other RNA
aagatccagcccgccctgcaagagaaa

SEQ ID NO: 63832 - RNA, 36 nt, synthetic construct
  misc_feature 1..36: note = Oxysterol-binding protein-related protein 9 (687-698)
  source 1..36: mol_type = other RNA
aagatcagagacattgatgccgctaccgaggcaaaa

SEQ ID NO: 63833 - RNA, 27 nt, synthetic construct
  misc_feature 1..27: note = Protein IMPACT (108-116)
  source 1..27: mol_type = other RNA
aagatcagagacgtgctgattcagaaa

SEQ ID NO: 63834 - RNA, 30 nt, synthetic construct
  misc_feature 1..30: note = Proto-oncogene tyrosine-protein kinase receptor Ret (156-165)
  source 1..30: mol_type = other RNA
aagatcagagagtacgaacagaccctgaaa

SEQ ID NO: 63835 - RNA, 30 nt, synthetic construct
  misc_feature 1..30: note = Heat shock factor protein 1 (131-140)
  source 1..30: mol_type = other RNA
aagatcagacaggacagcgtgaccaaactg

SEQ ID NO: 63836 - RNA, 36 nt, synthetic construct
  misc_feature 1..36: note = PDZ domain-containing RING finger protein 4 (443-454)
  source 1..36: mol_type = other RNA
aagatcagaagcgacggcaccaggtacattacaaaa

SEQ ID NO: 63837 - RNA, 33 nt, synthetic construct
  misc_feature 1..33: note = Insulin-like growth factor I (3-13)
  source 1..33: mol_type = other RNA
aagatcagctccctgcccacccagctcttcaaa

SEQ ID NO: 63838 - RNA, 27 nt, synthetic construct
  misc_feature 1..27: note = Importin-7 (419-427)
  source 1..27: mol_type = other RNA
aagatctacaaagaccagatggagtat

SEQ ID NO: 63839 - RNA, 27 nt, synthetic construct
  misc_feature 1..27: note = Mothers against decapentaplegic homolog 4 (428-436)
  source 1..27: mol_type = other RNA
aagatctaccccagcgcctatattaaa

SEQ ID NO: 63840 - RNA, 27 nt, synthetic construct
  misc_feature 1..27: note = RING finger protein 113A (151-159)
  source 1..27: mol_type = other RNA
aagatctacagaggcattaacaattat

SEQ ID NO: 63841 - RNA, 30 nt, synthetic construct
  misc_feature 1..30: note = Prefoldin subunit 1 (28-37)
  source 1..30: mol_type = other RNA
aagctggccgacatccagattgagcaactc

SEQ ID NO: 63842 - RNA, 36 nt, synthetic construct
  misc_feature 1..36: note = DNA topoisomerase 2-alpha (976-987)
  source 1..36: mol_type = other RNA
aagctggccgaggctgaaagagtgggcctccacaaa

SEQ ID NO: 63843 - RNA, 27 nt, synthetic construct
  misc_feature 1..27: note = Retinoblastoma-like protein 1 (329-337)
  source 1..27: mol_type = other RNA
aagctggccgagatcctctactataaa

SEQ ID NO: 63844 - RNA, 27 nt, synthetic construct
  misc_feature 1..27: note = Neuron navigator 3 (940-948)
  source 1..27: mol_type = other RNA
aagctggccgagtacgtgatcaccaaa

SEQ ID NO: 63845 - RNA, 33 nt, synthetic construct
  misc_feature 1..33: note = Protein PRR14L (1625-1635)
  source 1..33: mol_type = other RNA
aagctggcccccgctatgaaaacccagaagctc

SEQ ID NO: 63846 - RNA, 27 nt, synthetic construct
  misc_feature 1..27: note = Ubiquitin-40S ribosomal protein S27a (95-103)
  source 1..27: mol_type = other RNA
aagctggccgtgctcaaatactataag

SEQ ID NO: 63847 - RNA, 30 nt, synthetic construct
  misc_feature 1..30: note = Disco-interacting protein 2 homolog A (376-385)
  source 1..30: mol_type = other RNA
aagctggcctacaccctccttaacaaactg

SEQ ID NO: 63848 - RNA, 27 nt, synthetic construct
  misc_feature 1..27: note = Conserved oligomeric Golgi complex subunit 3 (394-402)
  source 1..27: mol_type = other RNA
aagctggacgagctccttgaaaaactg

SEQ ID NO: 63849 - RNA, 30 nt, synthetic construct
  misc_feature 1..30: note = REST corepressor 1 (145-154)
  source 1..30: mol_type = other RNA
aagctggacgagtacatcgccattgctaaa

SEQ ID NO: 63850 - RNA, 30 nt, synthetic construct
  misc_feature 1..30: note = 40S ribosomal protein S7 (145-154)
  source 1..30: mol_type = other RNA
aagctggacggcagcagactcatcaaagtg

SEQ ID NO: 63851 - RNA, 27 nt, synthetic construct
  misc_feature 1..27: note = CASP8-associated protein 2 (343-351)
  source 1..27: mol_type = other RNA
aagctggacaaaaaccccaatcaggtg

SEQ ID NO: 63852 - RNA, 27 nt, synthetic construct
  misc_feature 1..27: note = Cysteine and histidine-rich protein 1 (100-108)
  source 1..27: mol_type = other RNA
aagctggaggaaagactctacagcgtg

SEQ ID NO: 63853 - RNA, 27 nt, synthetic construct
  misc_feature 1..27: note = Glutathione S-transferase omega-1 (152-160)
  source 1..27: mol_type = other RNA
aagctggaggaagtgctcaccaacaaa

SEQ ID NO: 63854 - RNA, 33 nt, synthetic construct
  misc_feature 1..33: note = Thioredoxin domain-containing protein 5 (32-42)
  source 1..33: mol_type = other RNA
aagctgttcaaacccggccaggaggccgtgaag

SEQ ID NO: 63855 - RNA, 33 nt, synthetic construct
  misc_feature 1..33: note = Mitotic checkpoint serine/threonine-protein kinase BUB1 (954-964)
  source 1..33: mol_type = other RNA
aagctgttccccaaaggcaccatctttacagcc

SEQ ID NO: 63856 - RNA, 27 nt, synthetic construct
  misc_feature 1..27: note = Vacuolar protein sorting-associated protein 11 homolog (687-695)
  source 1..27: mol_type = other RNA
aagctgttccagcaaatcatgcactac

SEQ ID NO: 63857 - RNA, 39 nt, synthetic construct
  misc_feature 1..39: note = YEATS domain-containing protein 4 (115-127)
  source 1..39: mol_type = other RNA
aagctgttccagagcgacaccaacgccatgctcggcaaa

SEQ ID NO: 63858 - RNA, 27 nt, synthetic construct
  misc_feature 1..27: note = Peroxisomal acyl-coenzyme A oxidase 1 (537-545)
  source 1..27: mol_type = other RNA
aagctgttcagcgagaaactccttaag

SEQ ID NO: 63859 - RNA, 33 nt, synthetic construct
  misc_feature 1..33: note = 28S ribosomal protein S33, mitochondrial (35-45)
  source 1..33: mol_type = other RNA
aagctgttcagcgagctcccccttgccaaaaag

SEQ ID NO: 63860 - RNA, 27 nt, synthetic construct
  misc_feature 1..27: note = BAH and coiled-coil domain-containing protein 1 (52-60)
  source 1..27: mol_type = other RNA
aagctgttctacaaagccatcgtgaga

SEQ ID NO: 63861 - RNA, 30 nt, synthetic construct
  misc_feature 1..30: note = Nucleolar protein 58 (93-102)
  source 1..30: mol_type = other RNA
aagctgggcggggtgatcaaagagaagctc

SEQ ID NO: 63862 - RNA, 30 nt, synthetic construct
  misc_feature 1..30: note = Histone H1.2 (81-90)
  source 1..30: mol_type = other RNA
aagctgggcctcaaaagccttgtgtccaag

SEQ ID NO: 63863 - RNA, 27 nt, synthetic construct
  misc_feature 1..27: note = Cytochrome c oxidase subunit NDUFA4 (39-47)
  source 1..27: mol_type = other RNA
aagctgggccccaacgaccagtacaaa

SEQ ID NO: 63864 - RNA, 27 nt, synthetic construct
  misc_feature 1..27: note = DCC-interacting protein 13-alpha (553-561)
  source 1..27: mol_type = other RNA
aagctgatcgacccccagacccaagtg

SEQ ID NO: 63865 - RNA, 27 nt, synthetic construct
  misc_feature 1..27: note = DNA topoisomerase 2-beta (209-217)
  source 1..27: mol_type = other RNA
aagctgatcgaggtggtcaaaaagaaa

SEQ ID NO: 63866 - RNA, 27 nt, synthetic construct
  misc_feature 1..27: note = Dynactin subunit 4 (146-154)
  source 1..27: mol_type = other RNA
aagctgatcgagtactatcagcaactc

SEQ ID NO: 63867 - RNA, 30 nt, synthetic construct
  misc_feature 1..30: note = Glycerol-3-phosphate dehydrogenase 1-like protein (55-64)
  source 1..30: mol_type = other RNA
aagctgatcagcgacattataagagagaaa

SEQ ID NO: 63868 - RNA, 27 nt, synthetic construct
  misc_feature 1..27: note = Spectrin beta chain, non-erythrocytic 1 (387-395)
  source 1..27: mol_type = other RNA
aagctgatcagcgacattaacaaagcc

SEQ ID NO: 63869 - RNA, 39 nt, synthetic construct
  misc_feature 1..39: note = Transcription elongation factor B polypeptide 1 (4-16)
  source 1..39: mol_type = other RNA
aagctgatcagctccgacggccacgagttcattgtgaaa

SEQ ID NO: 63870 - RNA, 27 nt, synthetic construct
  misc_feature 1..27: note = Vacuolar protein sorting-associated protein 4B (71-79)
  source 1..27: mol_type = other RNA
aagctgaaagagtacctcaagaacaaa

SEQ ID NO: 63871 - RNA, 36 nt, synthetic construct
  misc_feature 1..36: note = Heterogeneous nuclear ribonucleoproteins C1/C2 (187-198)
  source 1..36: mol_type = other RNA
aagctgaaaggcgacgatctccaggccatcaagaaa

SEQ ID NO: 63872 - RNA, 33 nt, synthetic construct
  misc_feature 1..33: note = Tight junction-associated protein 1 (150-160)
  source 1..33: mol_type = other RNA
aagctgctcgacgccaaaaacaccatcaataag

SEQ ID NO: 63873 - RNA, 33 nt, synthetic construct
  misc_feature 1..33: note = 26S proteasome non-ATPase regulatory subunit 7 (204-214)
  source 1..33: mol_type = other RNA
aagctgctcgacatcagaagctaccttgagaaa

SEQ ID NO: 63874 - RNA, 33 nt, synthetic construct
  misc_feature 1..33: note = Methionine-tRNA ligase, cytoplasmic (453-463)
  source 1..33: mol_type = other RNA
aagctgctcgaccttaaaaagcagctggccgtg

SEQ ID NO: 63875 - RNA, 27 nt, synthetic construct
  misc_feature 1..27: note = Dihydrolipoyllysine-residue succinyltransferase component of 2-oxoglutarate dehydrogenase complex, mitochondrial (80-88)
  source 1..27: mol_type = other RNA
aagctgctcgagacccagcttcaaaaa

SEQ ID NO: 63876 - RNA, 30 nt, synthetic construct
  misc_feature 1..30: note = Aspartate-tRNA ligase, cytoplasmic (373-382)
  source 1..30: mol_type = other RNA
aagctgctcggccaccttgtgaaagagaag

SEQ ID NO: 63877 - RNA, 27 nt, synthetic construct
  misc_feature 1..27: note = U3 small nucleolar ribonucleoprotein protein IMP3 (11-19)
  source 1..27: mol_type = other RNA
aagctgctcaaacaggtggacttcctt

SEQ ID NO: 63878 - RNA, 27 nt, synthetic construct
  misc_feature 1..27: note = Protein Smaug homolog 1 (103-111)
  source 1..27: mol_type = other RNA
aagctgctccccaaaatccttgcccac

SEQ ID NO: 63879 - RNA, 27 nt, synthetic construct
  misc_feature 1..27: note = Box C/D snoRNA protein 1 (321-329)
  source 1..27: mol_type = other RNA
aagctgctccccaacggcttcaccaaa

SEQ ID NO: 63880 - RNA, 27 nt, synthetic construct
  misc_feature 1..27: note = Anaphase-promoting complex subunit 5 (482-490)
  source 1..27: mol_type = other RNA
aagctgctccagaaacttctggtgcac

SEQ ID NO: 63881 - RNA, 33 nt, synthetic construct
  misc_feature 1..33: note = Nucleoprotein TPR (1356-1366)
  source 1..33: mol_type = other RNA
aagctgctcagcgagaaagaagtgcacaccaag

SEQ ID NO: 63882 - RNA, 30 nt, synthetic construct
  misc_feature 1..30: note = DNA replication ATP-dependent helicase/nuclease DNA2 (580-589)
  source 1..30: mol_type = other RNA
aagctgatggagaacaccttcgtgagcaaa

SEQ ID NO: 63883 - RNA, 30 nt, synthetic construct
  misc_feature 1..30: note = Integrin alpha-9 (198-207)
  source 1..30: mol_type = other RNA
aagctgaacgacgaggtgatcatgaataga

SEQ ID NO: 63884 - RNA, 27 nt, synthetic construct
  misc_feature 1..27: note = Eukaryotic translation initiation factor 3 subunit C-like protein (333-341)
  source 1..27: mol_type = other RNA
aagctgaacgagatcctccaggccaga

SEQ ID NO: 63885 - RNA, 33 nt, synthetic construct
  misc_feature 1..33: note = Eukaryotic translation initiation factor 3 subunit C-like protein (333-343)
  source 1..33: mol_type = other RNA
aagctgaacgagatcctccaggccagaggcaaa

SEQ ID NO: 63886 - RNA, 27 nt, synthetic construct
  misc_feature 1..27: note = PHD finger protein 14 (693-701)
  source 1..27: mol_type = other RNA
aagctgaacatccccgccattctcaga

SEQ ID NO: 63887 - RNA, 27 nt, synthetic construct
  misc_feature 1..27: note = EH domain-containing protein 4 (478-486)
  source 1..27: mol_type = other RNA
aagctgcccaacagcgtgctcggcaaa

SEQ ID NO: 63888 - RNA, 30 nt, synthetic construct
  misc_feature 1..30: note = Sarcospan (62-71)
  source 1..30: mol_type = other RNA
aagctgcccagctccgagcctctctctaga

SEQ ID NO: 63889 - RNA, 27 nt, synthetic construct
  misc_feature 1..27: note = 40S ribosomal protein S18 (106-114)
  source 1..27: mol_type = other RNA
aagctgagagaggacctcgaaaggctt

SEQ ID NO: 63890 - RNA, 33 nt, synthetic construct
  misc_feature 1..33: note = Catenin delta-1 (688-698)
  source 1..33: mol_type = other RNA
aagctgagagagacccagggcatcgaaaaactc

SEQ ID NO: 63891 - RNA, 33 nt, synthetic construct; identical to SEQ ID NO: 39664
  misc_feature 1..33: note = Ankycorbin (218-228)
  source 1..33: mol_type = other RNA

SEQ ID NO: 63892 - RNA, 27 nt, synthetic construct
  misc_feature 1..27: note = Serine/threonine-protein kinase N1 (262-270)
  source 1..27: mol_type = other RNA
aagctgaccgagagcaaccagaaactc

SEQ ID NO: 63893 - RNA, 27 nt, synthetic construct
  misc_feature 1..27: note = Melanoma-associated antigen D1 (477-485)
  source 1..27: mol_type = other RNA
aagctggtgaaatacctcatgcttaag

SEQ ID NO: 63894 - RNA, 27 nt, synthetic construct
  misc_feature 1..27: note = Cytochrome c oxidase subunit 5B, mitochondrial (121-129)
  source 1..27: mol_type = other RNA
aagctggtgccccagcaactcgcccac

SEQ ID NO: 63895 - RNA, 30 nt, synthetic construct
  misc_feature 1..30: note = E3 ubiquitin-protein ligase TTC3 (1097-1106)
  source 1..30: mol_type = other RNA
aagctgtgggacatgaaccccaaacagaag

SEQ ID NO: 63896 - RNA, 30 nt, synthetic construct
  misc_feature 1..30: note = Fatty acid desaturase 2 (413-422)
  source 1..30: mol_type = other RNA
aagctgtggctcgacgcctaccttcacaaa

SEQ ID NO: 63897 - RNA, 27 nt, synthetic construct
  misc_feature 1..27: note = Serine/threonine-protein kinase ATR (289-297)
  source 1..27: mol_type = other RNA
aagctgtacgaggaacccctcagcaaa

SEQ ID NO: 63898 - RNA, 27 nt, synthetic construct
  misc_feature 1..27: note = Retinoblastoma-like protein 2 (304-312)
  source 1..27: mol_type = other RNA
aagctgtacgagaaaaagctccttaaa

SEQ ID NO: 63899 - RNA, 30 nt, synthetic construct
  misc_feature 1..30: note = Lamina-associated polypeptide 2, isoforms beta/gamma (140-149)
  source 1..30: mol_type = other RNA
aagctgtacgagaaaaagctccttaaactg

SEQ ID NO: 63900 - RNA, 27 nt, synthetic construct
  misc_feature 1..27: note = Dedicator of cytokinesis protein 7 (424-432)
  source 1..27: mol_type = other RNA
aagctgtaccccgacagcagagtgagg

SEQ ID NO: 63901 - RNA, 27 nt, synthetic construct
  misc_feature 1..27: note = Protein diaphanous homolog 3 (930-938)
  source 1..27: mol_type = other RNA
aagctgtaccagagcatcattggctat

SEQ ID NO: 63902 - RNA, 30 nt, synthetic construct
  misc_feature 1..30: note = Nuclear pore complex protein Nup98-Nup96 (1480-1489)
  source 1..30: mol_type = other RNA
aagctgtacagcgactccatcagagagaaa

SEQ ID NO: 63903 - RNA, 27 nt, synthetic construct
  misc_feature 1..27: note = NADH dehydrogenase (ubiquinone) iron-sulfur protein 7, mitochondrial (74-82)
  source 1..27: mol_type = other RNA
aagatggcccccgctctgagaaaagtg

SEQ ID NO: 63904 - RNA, 27 nt, synthetic construct
  misc_feature 1..27: note = TRPM8 channel-associated factor 1 (447-455)
  source 1..27: mol_type = other RNA
aagatgttcagccaccaggtgcaaaaa

SEQ ID NO: 63905 - RNA, 36 nt, synthetic construct
  misc_feature 1..36: note = Heat shock cognate 71 kDa protein (82-93)
  source 1..36: mol_type = other RNA
aagatgaaagagatcgccgaagcttacctgggcaag

SEQ ID NO: 63906 - RNA, 30 nt, synthetic construct
  misc_feature 1..30: note = Neuroblast differentiation-associated protein AHNAK (380-389)
  source 1..30: mol_type = other RNA
aagatgcccaaaatgaagatgcctaccttc

SEQ ID NO: 63907 - RNA, 27 nt, synthetic construct
  misc_feature 1..27: note = DNA replication licensing factor MCM7 (236-244)
  source 1..27: mol_type = other RNA
aagatgcaggagcacagcgaccaagtg

SEQ ID NO: 63908 - RNA, 27 nt, synthetic construct
  misc_feature 1..27: note = Intraflagellar transport protein 74 homolog (462-470)
  source 1..27: mol_type = other RNA
aagatgaccgaggaacagcacagcctg

SEQ ID NO: 63909 - RNA, 27 nt, synthetic construct
  misc_feature 1..27: note = Nuclear receptor corepressor 1 (1336-1344)
  source 1..27: mol_type = other RNA
aagccctacgacggcatcaccacaatt

SEQ ID NO: 63910 - RNA, 30 nt, synthetic construct
  misc_feature 1..30: note = Hippocampus abundant transcript-like protein 1 (216-225)
  source 1..30: mol_type = other RNA
aagcaggccgaccccttcgctagcctgaaa

SEQ ID NO: 63911 - RNA, 27 nt, synthetic construct
  misc_feature 1..27: note = T-complex protein 1 subunit zeta (39-47)
  source 1..27: mol_type = other RNA
aagcaggacgagcccatcgatctgttc

SEQ ID NO: 63912 - RNA, 27 nt, synthetic construct
  misc_feature 1..27: note = Catenin alpha-1 (865-873)
  source 1..27: mol_type = other RNA
aagcaggacgagacccaaacaaaaatc

SEQ ID NO: 63913 - RNA, 27 nt, synthetic construct
  misc_feature 1..27: note = Cytoplasmic dynein 1 heavy chain 1 (1181-1189)
  source 1..27: mol_type = other RNA
aagcagttcgagaaacaagtggaactg

SEQ ID NO: 63914 - RNA, 27 nt, synthetic construct
  misc_feature 1..27: note = Probable E3 ubiquitin-protein ligase makorin-2 (226-234)
  source 1..27: mol_type = other RNA
aagcagttcgagaaccccatcattaaa

SEQ ID NO: 63915 - RNA, 27 nt, synthetic construct
  misc_feature 1..27: note = Bromodomain adjacent to zinc finger domain protein 2A (588-596)
  source 1..27: mol_type = other RNA
aagcagttccccgaggtgatcaaatac

SEQ ID NO: 63916 - RNA, 27 nt, synthetic construct
  misc_feature 1..27: note = 60S ribosomal protein L22-like 1 (69-77)
  source 1..27: mol_type = other RNA
aagcagttcagcaaaagatacctgaag

SEQ ID NO: 63917 - RNA, 27 nt, synthetic construct
  misc_feature 1..27: note = Interleukin enhancer-binding factor 3 (519-527)
  source 1..27: mol_type = other RNA
aagcagcaaggccccatcctgaccaaa

SEQ ID NO: 63918 - RNA, 27 nt, synthetic construct
  misc_feature 1..27: note = Actin-related protein 8 (80-88)
  source 1..27: mol_type = other RNA
aagcagcaaggccagcccctgtacaaa

SEQ ID NO: 63919 - RNA, 27 nt, synthetic construct
  misc_feature 1..27: note = SAM and SH3 domain-containing protein 1 (898-906)
  source 1..27: mol_type = other RNA
aagagattcagcgagccccagaaactg

SEQ ID NO: 63920 - RNA, 27 nt, synthetic construct
  misc_feature 1..27: note = AP-3 complex subunit mu-2 (240-248)
  source 1..27: mol_type = other RNA
aagagatgggagagcgaaaggatcctg

SEQ ID NO: 63921 - RNA, 27 nt, synthetic construct
  misc_feature 1..27: note = AP-3 complex subunit mu-1 (186-194)
  source 1..27: mol_type = other RNA
aagagatgggagagcgaaagggtgctg

SEQ ID NO: 63922 - RNA, 27 nt, synthetic construct
  misc_feature 1..27: note = Rabankyrin-5 (851-859)
  source 1..27: mol_type = other RNA
aagagcgccgaggctatcctgaaaaga

SEQ ID NO: 63923 - RNA, 27 nt, synthetic construct
  misc_feature 1..27: note = Neuron-specific calcium-binding protein hippocalcin (174-182)
  source 1..27: mol_type = other RNA
aagagcgacccctccatcgtgagactg

SEQ ID NO: 63924 - RNA, 30 nt, synthetic construct
  misc_feature 1..30: note = Pre-mRNA-processing factor 40 homolog B (165-174)
  source 1..30: mol_type = other RNA
aagagcgacaccggcaaaccctactattac

SEQ ID NO: 63925 - RNA, 30 nt, synthetic construct
  misc_feature 1..30: note = Supervillin (396-405)
  source 1..30: mol_type = other RNA
aagagcttcgacgagcagaacgtgcccaaa

SEQ ID NO: 63926 - RNA, 33 nt, synthetic construct
  misc_feature 1..33: note = Tumor protein D54 (26-36)
  source 1..33: mol_type = other RNA
aagagcttcgaggacagagtgggcaccatcaaa

SEQ ID NO: 63927 - RNA, 27 nt, synthetic construct
  misc_feature 1..27: note = Mitogen-activated protein kinase kinase kinase kinase 4 (1062-1070)
  source 1..27: mol_type = other RNA
aagagcttcggcgagctggtgcacaaa

SEQ ID NO: 63928 - RNA, 33 nt, synthetic construct
  misc_feature 1..33: note = Myristoylated alanine-rich C-kinase substrate (162-172)
  source 1..33: mol_type = other RNA
aagagcttcaaactgtccggcttttctttcaag

SEQ ID NO: 63929 - RNA, 27 nt, synthetic construct
  misc_feature 1..27: note = Kinetochore protein Spc25 (11-19)
  source 1..27: mol_type = other RNA
aagagcatcaacgagttctggaataaa

SEQ ID NO: 63930 - RNA, 27 nt, synthetic construct
  misc_feature 1..27: note = MICOS complex subunit MIC60 (102-110)
  source 1..27: mol_type = other RNA
aagagcatccagtccggccccctgaaa

SEQ ID NO: 63931 - RNA, 27 nt, synthetic construct
  misc_feature 1..27: note = DNA-dependent protein kinase catalytic subunit (2416-2424)
  source 1..27: mol_type = other RNA
aagagcaaagacttcgtgcaggtcatg

SEQ ID NO: 63932 - RNA, 27 nt, synthetic construct
  misc_feature 1..27: note = Choline-phosphate cytidylyltransferase A (259-267)
  source 1..27: mol_type = other RNA
aagagcaaagagttcgtgcagaaggtc

SEQ ID NO: 63933 - RNA, 27 nt, synthetic construct
  misc_feature 1..27: note = Phosphatidylinositol 4,5-bisphosphate 3-kinase catalytic subunit delta isoform (860-868)
  source 1..27: mol_type = other RNA
aagagcaaaaaccccggcgaggccctg

SEQ ID NO: 63934 - RNA, 30 nt, synthetic construct
  misc_feature 1..30: note = Arf-GAP with Rho-GAP domain, ANK repeat and PH domain-containing protein 3 (219-228)
  source 1..30: mol_type = other RNA
aagagcctggaccagcccttcctctccaaa

SEQ ID NO: 63935 - RNA, 30 nt, synthetic construct
  misc_feature 1..30: note = Golgi-specific brefeldin A-resistance guanine nucleotide exchange factor 1 (944-953)
  source 1..30: mol_type = other RNA
aagagcctggaggaaaccatcattcagaaa

SEQ ID NO: 63936 - RNA, 33 nt, synthetic construct
  misc_feature 1..33: note = Charged multivesicular body protein 2a (94-104)
  source 1..33: mol_type = other RNA
aagagcaacaattccatggcccaggctatgaaa

SEQ ID NO: 63937 - RNA, 27 nt, synthetic construct
  misc_feature 1..27: note = B9 domain-containing protein 1 (56-64)
  source 1..27: mol_type = other RNA
aagagccaggacgtgagacaagccctg

SEQ ID NO: 63938 - RNA, 36 nt, synthetic construct
  misc_feature 1..36: note = 5-aminolevulinate synthase, nonspecific, mitochondrial (174-185)
  source 1..36: mol_type = other RNA
aagaccgacggcggggatcccagcggactgctcaaa

SEQ ID NO: 63939 - RNA, 27 nt, synthetic construct
  misc_feature 1..27: note = BRCA1-associated protein (26-34)
  source 1..27: mol_type = other RNA
aagaccgacggcaaaatcgtgcagtac

SEQ ID NO: 63940 - RNA, 27 nt, synthetic construct
  misc_feature 1..27: note = Zinc finger homeobox protein 3 (90-98)
  source 1..27: mol_type = other RNA
aagaccgacaaacacgtgcagaagtac

SEQ ID NO: 63941 - RNA, 30 nt, synthetic construct
  misc_feature 1..30: note = Ubiquitin carboxyl-terminal hydrolase 7 (381-390)
  source 1..30: mol_type = other RNA
aagaccgaccccaaagatcctgccaactac

SEQ ID NO: 63942 - RNA, 27 nt, synthetic construct
  misc_feature 1..27: note = Origin recognition complex subunit 3 (194-202)
  source 1..27: mol_type = other RNA
aagaccgaccccaaaatgctgagcaag

SEQ ID NO: 63943 - RNA, 27 nt, synthetic construct
  misc_feature 1..27: note = U2 small nuclear ribonucleoprotein B'' (85-93)
  source 1..27: mol_type = other RNA
aagaccgacagcgatatcatttccaaa

SEQ ID NO: 63944 - RNA, 30 nt, synthetic construct
  misc_feature 1..30: note = Membrane metallo-endopeptidase-like 1 (728-737)
  source 1..30: mol_type = other RNA
aagaccgacgtgcacagccccctgaaatac

SEQ ID NO: 63945 - RNA, 27 nt, synthetic construct
  misc_feature 1..27: note = Phosphatidylinositol 4,5-bisphosphate 3-kinase catalytic subunit alpha isoform (1030-1038)
  source 1..27: mol_type = other RNA
aagaccgagcaggaagccctggagtac

SEQ ID NO: 63946 - RNA, 27 nt, synthetic construct
  misc_feature 1..27: note = Vesicle-associated membrane protein-associated protein B/C (147-155)
  source 1..27: mol_type = other RNA
aagaccgagacacccatcgtgagcaaa

SEQ ID NO: 63947 - RNA, 33 nt, synthetic construct
  misc_feature 1..33: note = Leukotriene A-4 hydrolase (355-365)
  source 1..33: mol_type = other RNA
aagaccttcggcgagacacacccctttactaaa

SEQ ID NO: 63948 - RNA, 30 nt, synthetic construct
  misc_feature 1..30: note = Zinc finger CCCH domain-containing protein 11A (404-413)
  source 1..30: mol_type = other RNA
aagaccttcagcgaggtgctggccgaaaaa

SEQ ID NO: 63949 - RNA, 33 nt, synthetic construct
  misc_feature 1..33: note = 60S ribosomal protein L39-like (5-15)
  source 1..33: mol_type = other RNA
aagaccttcacaatcaaaagatttctggccaag

SEQ ID NO: 63950 - RNA, 27 nt, synthetic construct
  misc_feature 1..27: note = Microtubule-actin cross-linking factor 1, isoforms 1/2/3/5 (99-107)
  source 1..27: mol_type = other RNA
aagaccttcacaaaatgggtgaacaag

SEQ ID NO: 63951 - RNA, 30 nt, synthetic construct
  misc_feature 1..30: note = Transcription initiation factor TFIID subunit 7 (78-87)
  source 1..30: mol_type = other RNA
aagaccatcgacaaaaagacattctacaaa

SEQ ID NO: 63952 - RNA, 33 nt, synthetic construct
  misc_feature 1..33: note = Transforming growth factor beta-1 (34-44)
  source 1..33: mol_type = other RNA
aagaccatcgacatggagctggtgaaaagaaag

SEQ ID NO: 63953 - RNA, 27 nt, synthetic construct
  misc_feature 1..27: note = Max-like protein X (125-133)
  source 1..27: mol_type = other RNA
aagaccatcgactacattcagttcctg

SEQ ID NO: 63954 - RNA, 33 nt, synthetic construct
  misc_feature 1..33: note = Max-like protein X (125-135)
  source 1..33: mol_type = other RNA
aagaccatcgactacattcagttcctgcacaaa

SEQ ID NO: 63955 - RNA, 39 nt, synthetic construct
  misc_feature 1..39: note = tRNA pseudouridine synthase A, mitochondrial (110-122)
  source 1..39: mol_type = other RNA
aagaccatcgaggacgatctggtgagcgccctcgtcaga

SEQ ID NO: 63956 - RNA, 27 nt, synthetic construct
  misc_feature 1..27: note = Polymerase delta-interacting protein 3 (147-155)
  source 1..27: mol_type = other RNA
aagaccatccaggtgccccaacagaaa

SEQ ID NO: 63957 - RNA, 33 nt, synthetic construct
  misc_feature 1..33: note = Cyclin-dependent kinase 11A (11-21)
  source 1..33: mol_type = other RNA
aagaccctggacgagatcctccaggaaaaaaag

SEQ ID NO: 63958 - RNA, 33 nt, synthetic construct
  misc_feature 1..33: note = Exportin-2 (17-27)
  source 1..33: mol_type = other RNA
aagaccctggaccccgatcctgccatcagaagg

SEQ ID NO: 63959 - RNA, 36 nt, synthetic construct
  misc_feature 1..36: note = Coatomer subunit gamma-1 (795-806)
  source 1..36: mol_type = other RNA
aagaccctggaggaagccgtgggcaacatcgtcaaa

SEQ ID NO: 63960 - RNA, 27 nt, synthetic construct
  misc_feature 1..27: note = Protein prune homolog 2 (118-126)
  source 1..27: mol_type = other RNA
aagaccctggagagcgccgtggtcaaa

SEQ ID NO: 63961 - RNA, 33 nt, synthetic construct
  misc_feature 1..33: note = Chromatin assembly factor 1 subunit B (467-477)
  source 1..33: mol_type = other RNA
aagaccctgcagcccagctcccaaaacacaaaa

SEQ ID NO: 63962 - RNA, 33 nt, synthetic construct
  misc_feature 1..33: note = RE1-silencing transcription factor (417-427)
  source 1..33: mol_type = other RNA
aagaccatggacgtgagcaaagtcaagctgaaa

SEQ ID NO: 63963 - RNA, 33 nt, synthetic construct
  misc_feature 1..33: note = Arfaptin-2 (216-226)
  source 1..33: mol_type = other RNA
aagaccatggaggacacactgatgactgtgaaa

SEQ ID NO: 63964 - RNA, 27 nt, synthetic construct
  misc_feature 1..27: note = Asparagine synthetase domain-containing protein 1 (361-369)
  source 1..27: mol_type = other RNA
aagaccatgcccacaactttcaacaga

SEQ ID NO: 63965 - RNA, 27 nt, synthetic construct
  misc_feature 1..27: note = Uncharacterized protein C15orf41 (95-103)
  source 1..27: mol_type = other RNA
aagacccccgacttcatcctgcaggtg

SEQ ID NO: 63966 - RNA, 27 nt, synthetic construct
  misc_feature 1..27: note = Neuroblast differentiation-associated protein AHNAK (489-497)
  source 1..27: mol_type = other RNA
aagacccccgagatgatcattcagaaa

SEQ ID NO: 63967 - RNA, 30 nt, synthetic construct
  misc_feature 1..30: note = LIM and SH3 domain protein 1 (112-121)
  source 1..30: mol_type = other RNA
aagacccaggaccaaatcagcaacattaaa

SEQ ID NO: 63968 - RNA, 27 nt, synthetic construct
  misc_feature 1..27: note = mRNA-capping enzyme (403-411)
  source 1..27: mol_type = other RNA
aagacccaggagcccttcagcgtgaga

SEQ ID NO: 63969 - RNA, 33 nt, synthetic construct
  misc_feature 1..33: note = mRNA-capping enzyme (403-413)
  source 1..33: mol_type = other RNA
aagacccaggagcccttcagcgtgagaaacaaa

SEQ ID NO: 63970 - RNA, 27 nt, synthetic construct
  misc_feature 1..27: note = Actin-related protein 10 (403-411)
  source 1..27: mol_type = other RNA
aagacccagccccctctgatgaaaaga

SEQ ID NO: 63971 - RNA, 33 nt, synthetic construct
  misc_feature 1..33: note = Src substrate cortactin (299-309)
  source 1..33: mol_type = other RNA
aagaccgtgcccgtcgaggccgttacaagcaaa

SEQ ID NO: 63972 - RNA, 36 nt, synthetic construct
  misc_feature 1..36: note = X-ray repair cross-complementing protein 5 (274-285)
  source 1..36: mol_type = other RNA
aagacctggacagtggtcgacgccaaaactctgaag

SEQ ID NO: 63973 - RNA, 30 nt, synthetic construct
  misc_feature 1..30: note = NADH dehydrogenase (ubiquinone) 1 subunit C2 (106-115)
  source 1..30: mol_type = other RNA
aagacctacggcgagatcttcgaaaaattt

SEQ ID NO: 63974 - RNA, 33 nt, synthetic construct
  misc_feature 1..33: note = Zinc finger protein SNAI2 (135-145)
  source 1..33: mol_type = other RNA
aagacctacagcacattctccggcctggccaaa

SEQ ID NO: 63975 - RNA, 30 nt, synthetic construct
  misc_feature 1..30: note = ETS translocation variant 1 (301-310)
  source 1..30: mol_type = other RNA
aaggtggccggcgagagatacgtctataaa

SEQ ID NO: 63976 - RNA, 27 nt, synthetic construct
  misc_feature 1..27: note = 5'-AMP-activated protein kinase catalytic subunit alpha-2 (41-49)
  source 1..27: mol_type = other RNA
aaggtggccgtcaaaatcctgaacaga

SEQ ID NO: 63977 - RNA, 27 nt, synthetic construct
  misc_feature 1..27: note = Heat shock cognate 71 kDa protein (601-609)
  source 1..27: mol_type = other RNA
aaggtgtgcaaccccatcattaccaaa

SEQ ID NO: 63978 - RNA, 24 nt, synthetic construct
  misc_feature 1..24: note = Proteasome activator complex subunit 3 (6-13)
  source 1..24: mol_type = other RNA
aaggtggaccaggaggtcaaactg

SEQ ID NO: 63979 - RNA, 27 nt, synthetic construct
  misc_feature 1..27: note = Proteasome activator complex subunit 3 (6-14)
  source 1..27: mol_type = other RNA
aaggtggaccaggaggtcaaactgaag

SEQ ID NO: 63980 - RNA, 30 nt, synthetic construct
  misc_feature 1..30: note = Kinesin-like protein KIFC3 (522-531)
  source 1..30: mol_type = other RNA
aaggtgttcgagtttggccacaccaacaga

SEQ ID NO: 63981 - RNA, 33 nt, synthetic construct
  misc_feature 1..33: note = Nucleolin (370-380)
  source 1..33: mol_type = other RNA
aaggtgttcggcaacgagatcaaactggaaaag

SEQ ID NO: 63982 - RNA, 36 nt, synthetic construct
  misc_feature 1..36: note = CUGBP Elav-like family member 2 (453-464)
  source 1..36: mol_type = other RNA
aaggtgttcatcgacaaacagaccaacctgagcaag

SEQ ID NO: 63983 - RNA, 27 nt, synthetic construct
  misc_feature 1..27: note = Cathepsin L1 (104-112)
  source 1..27: mol_type = other RNA
aaggtgttccaggagcccctgttttac

SEQ ID NO: 63984 - RNA, 27 nt, synthetic construct
  misc_feature 1..27: note = Aspartyl/asparaginyl beta-hydroxylase (462-470)
  source 1..27: mol_type = other RNA
aaggtgcactacggcttcatcctgaaa

SEQ ID NO: 63985 - RNA, 39 nt, synthetic construct
  misc_feature 1..39: note = Homeodomain-interacting protein kinase 2 (343-355)
  source 1..39: mol_type = other RNA
aaggtgatcgacttcggcagcgcctcccacgtctctaaa

SEQ ID NO: 63986 - RNA, 33 nt, synthetic construct
  misc_feature 1..33: note = Leucine-rich repeat-containing protein 61 (158-168)
  source 1..33: mol_type = other RNA
aaggtgatcgacggcgagagagtcattgggagg

SEQ ID NO: 63987 - RNA, 27 nt, synthetic construct
  misc_feature 1..27: note = Prefoldin subunit 1 (19-27)
  source 1..27: mol_type = other RNA
aaggtgatcgacacccagcaaaaagtc

SEQ ID NO: 63988 - RNA, 27 nt, synthetic construct
  misc_feature 1..27: note = UPF0428 protein CXorf56 (42-50)
  source 1..27: mol_type = other RNA
aaggtgatcgagaaacagctggaaaga

SEQ ID NO: 63989 - RNA, 33 nt, synthetic construct
  misc_feature 1..33: note = Liprin-alpha-1 (251-261)
  source 1..33: mol_type = other RNA
aaggtgatcgagctgcaggaaattataagcaaa

SEQ ID NO: 63990 - RNA, 33 nt, synthetic construct
  misc_feature 1..33: note = Signal-induced proliferation-associated 1-like protein 2 (559-569)
  source 1..33: mol_type = other RNA
aaggtgatcaacgccgagaatgctgcacacaaa

SEQ ID NO: 63991 - RNA, 27 nt, synthetic construct
  misc_feature 1..27: note = 60S acidic ribosomal protein P2 (41-49)
  source 1..27: mol_type = other RNA
aaggtgatcagcgagctgaacggcaaa

SEQ ID NO: 63992 - RNA, 33 nt, synthetic construct
  misc_feature 1..33: note = Protein PRRC2C (1140-1150)
  source 1..33: mol_type = other RNA
aaggtgatcagcaaagacctggtcattgagaga

SEQ ID NO: 63993 - RNA, 33 nt, synthetic construct
  misc_feature 1..33: note = Zinc finger protein 721 (156-166)
  source 1..33: mol_type = other RNA
aaggtgatcaccagctcctcttcattcgccaaa

SEQ ID NO: 63994 - RNA, 36 nt, synthetic construct
  misc_feature 1..36: note = Probable U3 small nucleolar RNA-associated protein 11 (109-120)
  source 1..36: mol_type = other RNA
aaggtgaaaggcgtcaccaaccagacagggctgaag

SEQ ID NO: 63995 - RNA, 33 nt, synthetic construct
  misc_feature 1..33: note = Neuroblast differentiation-associated protein AHNAK (487-497)
  source 1..33: mol_type = other RNA
aaggtgaaaacccccgagatgatcattcagaag

SEQ ID NO: 63996 - RNA, 30 nt, synthetic construct
  misc_feature 1..30: note = Gamma-interferon-inducible protein 16 (243-252)
  source 1..30: mol_type = other RNA
aaggtgctgaacaccagcctcaaagagaag

SEQ ID NO: 63997 - RNA, 30 nt, synthetic construct
  misc_feature 1..30: note = E3 ubiquitin-protein ligase RNF216 (197-206)
  source 1..30: mol_type = other RNA
aaggtgctgccccagaccatcctctacaaa

SEQ ID NO: 63998 - RNA, 30 nt, synthetic construct
  misc_feature 1..30: note = Serine/threonine-protein kinase Sgk1 (222-231)
  source 1..30: mol_type = other RNA
aaggtgctgcagaaaaaggccatcctcaaa

SEQ ID NO: 63999 - RNA, 33 nt, synthetic construct
  misc_feature 1..33: note = Flavin reductaseADPH) (137-147)
  source 1..33: mol_type = other RNA
aaggtgctgagagagagcggcctcaaatacgtc

SEQ ID NO: 64000 - RNA, 30 nt, synthetic construct
  misc_feature 1..30: note = Polymerase I and transcript release factor (227-236)
  source 1..30: mol_type = other RNA
aaggtgccccctttcacctttcacgtcaaa

SEQ ID NO: 64001 - RNA, 33 nt, synthetic construct
  misc_feature 1..33: note = Leucine-tRNA ligase, cytoplasmic (486-496)
  source 1..33: mol_type = other RNA
aaggtgcaggacgtcaaaaagaccatccaaaaa

SEQ ID NO: 64002 - RNA, 30 nt, synthetic construct
  misc_feature 1..30: note = 28S ribosomal protein S29, mitochondrial (203-212)
  source 1..30: mol_type = other RNA
aaggtgcaggagaaatacgtctggaacaag

SEQ ID NO: 64003 - RNA, 27 nt, synthetic construct
  misc_feature 1..27: note = Prelamin-A/C (108-116)
  source 1..27: mol_type = other RNA
aaggtgagagaggaattcaaagagctg

SEQ ID NO: 64004 - RNA, 30 nt, synthetic construct
  misc_feature 1..30: note = ATP-dependent RNA helicase DHX8 (1091-1100)
  source 1..30: mol_type = other RNA
aaggtgagcgaccccaccaaactgtccaag

SEQ ID NO: 64005 - RNA, 27 nt, synthetic construct
  misc_feature 1..27: note = Protein O-GlcNAcase (850-858)
  source 1..27: mol_type = other RNA
aaggtgaccgaccccagcgtcgccaaa

SEQ ID NO: 64006 - RNA, 27 nt, synthetic construct
  misc_feature 1..27: note = Voltage-dependent anion-selective channel protein 1 (53-61)
  source 1..27: mol_type = other RNA
aaggtgaccggcagcctggagacaaaa

SEQ ID NO: 64007 - RNA, 33 nt, synthetic construct
  misc_feature 1..33: note = Septin-9 (202-212)
  source 1..33: mol_type = other RNA
aaggtggtcaacatcgttcccgtgattgccaaa

SEQ ID NO: 64008 - RNA, 27 nt, synthetic construct
  misc_feature 1..27: note = Arf-GAP with Rho-GAP domain, ANK repeat and PH domain-containing protein 3 (53-61)
  source 1..27: mol_type = other RNA
aaggtgtacctgggcatcagaaaaaag

SEQ ID NO: 64009 - RNA, 27 nt, synthetic construct
  misc_feature 1..27: note = Ubiquitin carboxyl-terminal hydrolase 32 (278-286)
  source 1..27: mol_type = other RNA
aagtacgcccccagattcaacggcttt

SEQ ID NO: 64010 - RNA, 27 nt, synthetic construct
  misc_feature 1..27: note = Methionine synthase (216-224)
  source 1..27: mol_type = other RNA
aagtacgcccccagacctatcttcatt

SEQ ID NO: 64011 - RNA, 27 nt, synthetic construct
  misc_feature 1..27: note = Metastasis-associated protein MTA2 (282-290)
  source 1..27: mol_type = other RNA
aagtacggcaaagacttcaacgatatc

SEQ ID NO: 64012 - RNA, 27 nt, synthetic construct
  misc_feature 1..27: note = Glycerol-3-phosphate acyltransferase 4 (365-373)
  source 1..27: mol_type = other RNA
aagtacggcatggtgacctatctgctc

SEQ ID NO: 64013 - RNA, 24 nt, synthetic construct
  misc_feature 1..24: note = Splicing factor 3B subunit 6 (41-48)
  source 1..24: mol_type = other RNA
aagtacggccccatcagacagatt

SEQ ID NO: 64014 - RNA, 27 nt, synthetic construct
  misc_feature 1..27: note = Inositol 1,4,5-trisphosphate receptor type 3 (117-125)
  source 1..27: mol_type = other RNA
aagtacggcagcgtgatccagctgctc

SEQ ID NO: 64015 - RNA, 27 nt, synthetic construct
  misc_feature 1..27: note = KH domain-containing, RNA-binding, signal transduction-associated protein 3 (44-52)
  source 1..27: mol_type = other RNA
aagtacatcgacgtggtcattaacaaa

SEQ ID NO: 64016 - RNA, 27 nt, synthetic construct
  misc_feature 1..27: note = Probable E3 ubiquitin-protein ligase HERC6 (822-830)
  source 1..27: mol_type = other RNA
aagtacatcgactatattttcaacgtg

SEQ ID NO: 64017 - RNA, 33 nt, synthetic construct
  misc_feature 1..33: note = Zinc finger FYVE domain-containing protein 16 (1129-1139)
  source 1..33: mol_type = other RNA
aagtacatcgagaacctggacaatattaccttc

SEQ ID NO: 64018 - RNA, 27 nt, synthetic construct
  misc_feature 1..27: note = Serine/threonine-protein kinase RIO3 (304-312)
  source 1..27: mol_type = other RNA
aagtacatcaaagacgatttcagattt

SEQ ID NO: 64019 - RNA, 27 nt, synthetic construct
  misc_feature 1..27: note = FERM domain-containing protein 6 (210-218)
  source 1..27: mol_type = other RNA
aagtacatcaaagaggccgtgagactg

SEQ ID NO: 64020 - RNA, 27 nt, synthetic construct
  misc_feature 1..27: note = ER membrane protein complex subunit 3 (66-74)
  source 1..27: mol_type = other RNA
aagtacatccccaaacagagcttcctg

SEQ ID NO: 64021 - RNA, 27 nt, synthetic construct
  misc_feature 1..27: note = Cleavage stimulation factor subunit 1 (212-220)
  source 1..27: mol_type = other RNA
aagtacatccaggaggccgaaatgctg

SEQ ID NO: 64022 - RNA, 27 nt, synthetic construct
  misc_feature 1..27: note = Poly(A)-specific ribonuclease PARN (21-29)
  source 1..27: mol_type = other RNA
aagtacatcaccaaaagcttcaacttt

SEQ ID NO: 64023 - RNA, 27 nt, synthetic construct
  misc_feature 1..27: note = Tetratricopeptide repeat protein 14 (427-435)
  source 1..27: mol_type = other RNA
aagtacatgcagaaaagcctggagctc

SEQ ID NO: 64024 - RNA, 27 nt, synthetic construct
  misc_feature 1..27: note = Heparan sulfate 2-sulfotransferase (241-249)
  source 1..27: mol_type = other RNA
aagtacaacctgatcaatgagtatttc

SEQ ID NO: 64025 - RNA, 27 nt, synthetic construct
  misc_feature 1..27: note = Homeobox protein Hox-B7 (13-21)
  source 1..27: mol_type = other RNA
aagtaccccgccagctcctctgtgttc

SEQ ID NO: 64026 - RNA, 27 nt, synthetic construct
  misc_feature 1..27: note = Adenosylhomocysteinase 2 (210-218)
  source 1..27: mol_type = other RNA
aagtaccccaacgtgttcaaaaagatc

SEQ ID NO: 64027 - RNA, 27 nt, synthetic construct
  misc_feature 1..27: note = Zinc finger C2HC domain-containing protein 1A (306-314)
  source 1..27: mol_type = other RNA
aagtaccccgtggagtgggccaaattc

SEQ ID NO: 64028 - RNA, 27 nt, synthetic construct
  misc_feature 1..27: note = T-box transcription factor TBX15 (239-247)
  source 1..27: mol_type = other RNA
aagtaccagcccagagtgcacgtcatc

SEQ ID NO: 64029 - RNA, 30 nt, synthetic construct; identical to SEQ ID NO: 39802
  misc_feature 1..30: note = Intron-binding protein aquarius (90-99)
  source 1..30: mol_type = other RNA

SEQ ID NO: 64030 - RNA, 27 nt, synthetic construct
  misc_feature 1..27: note = Putative zinc finger protein 724 (149-157)
  source 1..27: mol_type = other RNA
aagtacgtgaaagacttccacaagttt

SEQ ID NO: 64031 - RNA, 27 nt, synthetic construct
  misc_feature 1..27: note = Zinc finger protein 107 (80-88)
  source 1..27: mol_type = other RNA
aagtacgtgaaagtcttcgacaagttt

SEQ ID NO: 64032 - RNA, 27 nt, synthetic construct
  misc_feature 1..27: note = Zinc finger protein 486 (191-199)
  source 1..27: mol_type = other RNA
aagtacgtgaaagtcttccaccagttt

SEQ ID NO: 64033 - RNA, 27 nt, synthetic construct
  misc_feature 1..27: note = Zinc finger protein 675 (148-156)
  source 1..27: mol_type = other RNA
aagtacgtgaaagtcttcaacaagttt

SEQ ID NO: 64034 - RNA, 27 nt, synthetic construct
  misc_feature 1..27: note = Nuclear pore membraneoprotein 210 (17-25)
  source 1..27: mol_type = other RNA
ctggccgctggccccagcgcagccgcg

SEQ ID NO: 64035 - RNA, 27 nt, synthetic construct
  misc_feature 1..27: note = Lck-interacting transmembrane adapter 1 (150-158)
  source 1..27: mol_type = other RNA
ctggccgctctccccggcgtgagcctt

SEQ ID NO: 64036 - RNA, 27 nt, synthetic construct
  misc_feature 1..27: note = Prolyl endopeptidase-like (376-384)
  source 1..27: mol_type = other RNA
ctggccgacgatagcgtgagatccctc

SEQ ID NO: 64037 - RNA, 27 nt, synthetic construct
  misc_feature 1..27: note = Helicase ARIP4 (250-258)
  source 1..27: mol_type = other RNA
ctggccatcgtgcccgtcaacaccctc

SEQ ID NO: 64038 - RNA, 27 nt, synthetic construct
  misc_feature 1..27: note = Receptor-interacting serine/threonine-protein kinase 4 (637-645)
  source 1..27: mol_type = other RNA
ctggccaagcagcccggcgtgagcgtc

SEQ ID NO: 64039 - RNA, 27 nt, synthetic construct
  misc_feature 1..27: note = Importin-9 (625-633)
  source 1..27: mol_type = other RNA
ctggcccaggacatcttcaaggagctc

SEQ ID NO: 64040 - RNA, 27 nt, synthetic construct
  misc_feature 1..27: note = Exosome complex exonuclease RRP44 (767-775)
  source 1..27: mol_type = other RNA
ctggccagccccatctacacccacttc

SEQ ID NO: 64041 - RNA, 27 nt, synthetic construct
  misc_feature 1..27: note = Serine/threonine-protein kinase 17B (265-273)
  source 1..27: mol_type = other RNA
ctggccaccgacttcatccagagcctc

SEQ ID NO: 64042 - RNA, 27 nt, synthetic construct
  misc_feature 1..27: note = Junction plakoglobin (139-147)
  source 1..27: mol_type = other RNA
ctggccaccagagctctccccgagctt

SEQ ID NO: 64043 - RNA, 27 nt, synthetic construct
  misc_feature 1..27: note = UBX domain-containing protein 8 (242-250)
  source 1..27: mol_type = other RNA
ctggccgtggagggcgggcagagcctc

SEQ ID NO: 64044 - RNA, 27 nt, synthetic construct
  misc_feature 1..27: note = F-box only protein 32 (100-108)
  source 1..27: mol_type = other RNA
ctggaggaccagcaaaacatcagactc

SEQ ID NO: 64045 - RNA, 27 nt, synthetic construct
  misc_feature 1..27: note = Ubiquitin carboxyl-terminal hydrolase 22 (475-483)
  source 1..27: mol_type = other RNA
ctggagagcggccactacacctccttc

SEQ ID NO: 64046 - RNA, 27 nt, synthetic construct
  misc_feature 1..27: note = Gamma-aminobutyric acid receptor subunit pi (247-255)
  source 1..27: mol_type = other RNA
ctggagacctacgtgcccagcacattc

SEQ ID NO: 64047 - RNA, 27 nt, synthetic construct
  misc_feature 1..27: note = Condensin-2 complex subunit H2 (434-442)
  source 1..27: mol_type = other RNA
ctgttcatcgccaccagccagaagttt

SEQ ID NO: 64048 - RNA, 27 nt, synthetic construct
  misc_feature 1..27: note = ATP-dependent RNA helicase DDX54 (153-161)
  source 1..27: mol_type = other RNA
ctgatcctcagccccaccagagagctt

SEQ ID NO: 64049 - RNA, 27 nt, synthetic construct
  misc_feature 1..27: note = Lysine-specific demethylase 4B (245-253)
  source 1..27: mol_type = other RNA
ctgatcagccccattatactcaagaaa

SEQ ID NO: 64050 - RNA, 27 nt, synthetic construct
  misc_feature 1..27: note = Protocadherin-1 (27-35)
  source 1..27: mol_type = other RNA
ctgctcgcccccagccctggccacgct

SEQ ID NO: 64051 - RNA, 33 nt, synthetic construct
  misc_feature 1..33: note = ETS translocation variant 5 (377-387)
  source 1..33: mol_type = other RNA
ctgctcgacgatcccgccaacgctcacttcatc

SEQ ID NO: 64052 - RNA, 27 nt, synthetic construct
  misc_feature 1..27: note = ATP-binding cassette sub-family F member 3 (350-358)
  source 1..27: mol_type = other RNA
ctgctcgacgagcccaccaacatgctt

SEQ ID NO: 64053 - RNA, 30 nt, synthetic construct
  misc_feature 1..30: note = Zinc finger protein 490 (73-82)
  source 1..30: mol_type = other RNA
ctgctcgaccccggccagagaaacatctac

SEQ ID NO: 64054 - RNA, 27 nt, synthetic construct
  misc_feature 1..27: note = Probable global transcription activator SNF2L1 (721-729)
  source 1..27: mol_type = other RNA
ctgctcgagaaggaaatcctttactat

SEQ ID NO: 64055 - RNA, 39 nt, synthetic construct
  misc_feature 1..39: note = NKG2D ligand 3 (11-23)
  source 1..39: mol_type = other RNA
ctgctcttcgactggagcggcaccgggagagccgatgct

SEQ ID NO: 64056 - RNA, 27 nt, synthetic construct
  misc_feature 1..27: note = Sterol regulatory element-binding protein 2 (843-851)
  source 1..27: mol_type = other RNA
ctgctccacagcttcgtggactccgtc

SEQ ID NO: 64057 - RNA, 27 nt, synthetic construct
  misc_feature 1..27: note = Uncharacterized protein C18orf63 (124-132)
  source 1..27: mol_type = other RNA
ctgctcatccagggcagagacttcctt

SEQ ID NO: 64058 - RNA, 27 nt, synthetic construct
  misc_feature 1..27: note = Transmembrane emp24 domain-containing protein 3 (78-86)
  source 1..27: mol_type = other RNA
ctgctcaagagcttctttaccgagaaa

SEQ ID NO: 64059 - RNA, 33 nt, synthetic construct
  misc_feature 1..33: note = Protein disulfide-isomerase A3 (14-24)
  source 1..33: mol_type = other RNA
ctgctccttgccgctgcaagactggccgcggct

SEQ ID NO: 64060 - RNA, 27 nt, synthetic construct
  misc_feature 1..27: note = Peptidyl-prolyl cis-trans isomerase B (16-24)
  source 1..27: mol_type = other RNA
ctgctccttcccggccctagcgccgct

SEQ ID NO: 64061 - RNA, 30 nt, synthetic construct
  misc_feature 1..30: note = Plasma alpha-L-fucosidase (19-28)
  source 1..30: mol_type = other RNA
ctgctccttccccctccaccgtgccccgcc

SEQ ID NO: 64062 - RNA, 27 nt, synthetic construct
  misc_feature 1..27: note = PRKC apoptosis WT1 regulator protein (216-224)
  source 1..27: mol_type = other RNA
ctgctccaggagccccctagaaccgtg

SEQ ID NO: 64063 - RNA, 30 nt, synthetic construct
  misc_feature 1..30: note = Chromodomain-helicase-DNA-binding protein 7 (695-704)
  source 1..30: mol_type = other RNA
ctgctcgtgaacagccttttcgccggcatg

SEQ ID NO: 64064 - RNA, 33 nt, synthetic construct; identical to SEQ ID NO: 39837
  misc_feature 1..33: note = Notchless protein homolog 1 (181-191)
  source 1..33: mol_type = other RNA

SEQ ID NO: 64065 - RNA, 27 nt, synthetic construct
  misc_feature 1..27: note = Adenosine 3'-phospho 5'-phosphosulfate transporter 1 (251-259)
  source 1..27: mol_type = other RNA
ctgctctacggccacaccgtgacagtc

SEQ ID NO: 64066 - RNA, 27 nt, synthetic construct
  misc_feature 1..27: note = Activating signal cointegrator 1 complex subunit 1 (68-76)
  source 1..27: mol_type = other RNA
ctgctctacaagcacatcgtgggcaaa

SEQ ID NO: 64067 - RNA, 27 nt, synthetic construct
  misc_feature 1..27: note = DNA-dependent protein kinase catalytic subunit (3482-3490)
  source 1..27: mol_type = other RNA
ctgatgaccaaggagatcagctccgtg

SEQ ID NO: 64068 - RNA, 27 nt, synthetic construct
  misc_feature 1..27: note = Nucleus accumbens-associated protein 1 (343-351)
  source 1..27: mol_type = other RNA
ctgcccgccgagctcatcaaccagatt

SEQ ID NO: 64069 - RNA, 24 nt, synthetic construct
  misc_feature 1..24: note = Mothers against decapentaplegic homolog 2 (5-12)
  source 1..24: mol_type = other RNA
ctgcccttcacccctccagtggtc

SEQ ID NO: 64070 - RNA, 27 nt, synthetic construct
  misc_feature 1..27: note = Biorientation of chromosomes in cell division protein 1-like 1 (907-915)
  source 1..27: mol_type = other RNA
ctgcccatcagctccgccaccacaatt

SEQ ID NO: 64071 - RNA, 27 nt, synthetic construct
  misc_feature 1..27: note = Catenin alpha-1 (553-561)
  source 1..27: mol_type = other RNA
ctgccccaggagcaaaaggccaaaatc

SEQ ID NO: 64072 - RNA, 27 nt, synthetic construct
  misc_feature 1..27: note = E3 ubiquitin-protein ligase RNF213 (5003-5011)
  source 1..27: mol_type = other RNA
ctgcccagctccgtgatctctgccatt

SEQ ID NO: 64073 - RNA, 24 nt, synthetic construct
  misc_feature 1..24: note = Eukaryotic translation initiation factor 3 subunit C-like protein (816-823)
  source 1..24: mol_type = other RNA
ctgcccaccgtgcacagcatcatt

SEQ ID NO: 64074 - RNA, 24 nt, synthetic construct
  misc_feature 1..24: note = Regulation of nuclear pre-mRNA domain-containing protein 1A (190-197)
  source 1..24: mol_type = other RNA
ctgcccgtggaggtccaggaagtt

SEQ ID NO: 64075 - RNA, 27 nt, synthetic construct
  misc_feature 1..27: note = CDK5 and ABL1 enzyme substrate 2 (40-48)
  source 1..27: mol_type = other RNA
ctgccctacggcgaggggctcagaatc

SEQ ID NO: 64076 - RNA, 27 nt, synthetic construct
  misc_feature 1..27: note = Collagen alpha-1(XII) chain (105-113)
  source 1..27: mol_type = other RNA
ctgccctacaagggcgggaacaccctc

SEQ ID NO: 64077 - RNA, 27 nt, synthetic construct
  misc_feature 1..27: note = A-kinase anchor protein 1, mitochondrial (646-654)
  source 1..27: mol_type = other RNA
ctgccctacacccagagcgtgcaaatc

SEQ ID NO: 64078 - RNA, 27 nt, synthetic construct
  misc_feature 1..27: note = Putative tRNA (cytidine(32)/guanosine(34)-2'-O)-methyltransferase (30-38)
  source 1..27: mol_type = other RNA
ctgcagctcgacaaggagttccaactt

SEQ ID NO: 64079 - RNA, 27 nt, synthetic construct
  misc_feature 1..27: note = Double-stranded RNA-binding protein Staufen homolog 1 (119-127)
  source 1..27: mol_type = other RNA
ctgcagaacgagcccctccctgaaaga

SEQ ID NO: 64080 - RNA, 30 nt, synthetic construct; identical to SEQ ID NO: 39853
  misc_feature 1..30: note = CD44 antigen (331-340)
  source 1..30: mol_type = other RNA

SEQ ID NO: 64081 - RNA, 27 nt, synthetic construct
  misc_feature 1..27: note = Vimentin (44-52)
  source 1..27: mol_type = other RNA
ctgagacccagcacctccaggtctctc

SEQ ID NO: 64082 - RNA, 27 nt, synthetic construct
  misc_feature 1..27: note = Protein CASC5 (113-121)
  source 1..27: mol_type = other RNA
ctgagcgcccccatccacacccagatg

SEQ ID NO: 64083 - RNA, 30 nt, synthetic construct
  misc_feature 1..30: note = Fibronectin type III domain-containing protein 3B (320-329)
  source 1..30: mol_type = other RNA
ctgagcgacaagggcagagatgggaaatac

SEQ ID NO: 64084 - RNA, 27 nt, synthetic construct
  misc_feature 1..27: note = Cytoplasmic dynein 1 heavy chain 1 (69-77)
  source 1..27: mol_type = other RNA
ctgagcgacccccaggtgcacaccgtc

SEQ ID NO: 64085 - RNA, 27 nt, synthetic construct
  misc_feature 1..27: note = Stress-induced-phosphoprotein 1 (194-202)
  source 1..27: mol_type = other RNA
ctgagcgaccccacctacagagagctc

SEQ ID NO: 64086 - RNA, 27 nt, synthetic construct
  misc_feature 1..27: note = Cytochrome c oxidase subunit 4 isoform 1, mitochondrial (131-139)
  source 1..27: mol_type = other RNA
ctgagcgaccccgtgatccactccctc

SEQ ID NO: 64087 - RNA, 33 nt, synthetic construct
  misc_feature 1..33: note = tRNA-splicing endonuclease subunit Sen54 (146-156)
  source 1..33: mol_type = other RNA
ctgaccgaccacacagtgactttcctccagtac

SEQ ID NO: 64088 - RNA, 33 nt, synthetic construct
  misc_feature 1..33: note = Beta-galactosidase-1-like protein 2 (348-358)
  source 1..33: mol_type = other RNA
ctgaccgaggccggcgactacacagctaagtat

SEQ ID NO: 64089 - RNA, 24 nt, synthetic construct
  misc_feature 1..24: note = Serine/threonine-protein kinase 24 (284-291)
  source 1..24: mol_type = other RNA
ctgaccgagctcatcgacagatac

SEQ ID NO: 64090 - RNA, 27 nt, synthetic construct
  misc_feature 1..27: note = Endoplasmic reticulum-Golgi intermediate compartment protein 3 (39-47)
  source 1..27: mol_type = other RNA
ctgaccacagaggtgcaccccgaactc

SEQ ID NO: 64091 - RNA, 24 nt, synthetic construct
  misc_feature 1..24: note = POTE ankyrin domain family member F (708-715)
  source 1..24: mol_type = other RNA
ctggtgatcgacaacggcagcggg

SEQ ID NO: 64092 - RNA, 36 nt, synthetic construct
  misc_feature 1..36: note = CD44 antigen (399-410)
  source 1..36: mol_type = other RNA
ctggtgaacaaggagagctccgaaacccccgaccag

SEQ ID NO: 64093 - RNA, 27 nt, synthetic construct
  misc_feature 1..27: note = Structural maintenance of chromosomes flexible hinge domain-containing protein 1 (857-865)
  source 1..27: mol_type = other RNA
ctggtgaccgacatccagcccgtcctc

SEQ ID NO: 64094 - RNA, 27 nt, synthetic construct
  misc_feature 1..27: note = Cytoplasmic dynein 1 light intermediate chain 1 (179-187)
  source 1..27: mol_type = other RNA
ctggtgtacaagtatatcgtccagaaa

SEQ ID NO: 64095 - RNA, 27 nt, synthetic construct
  misc_feature 1..27: note = Protein archease (109-117)
  source 1..27: mol_type = other RNA
ctgtacaagttcagcgccgacgagttt

SEQ ID NO: 64096 - RNA, 27 nt, synthetic construct
  misc_feature 1..27: note = Tumor protein D54 (125-133)
  source 1..27: mol_type = other RNA
ctgtacaagaaaacccaggagacactc

SEQ ID NO: 64097 - RNA, 30 nt, synthetic construct
  misc_feature 1..30: note = CD109 antigen (139-148)
  source 1..30: mol_type = other RNA
ctgtacaagcccaaacaggaggtgaagttc

SEQ ID NO: 64098 - RNA, 27 nt, synthetic construct
  misc_feature 1..27: note = Ras-related GTP-binding protein C (292-300)
  source 1..27: mol_type = other RNA
ctgtacctcaaggaggtgaccaaattc

SEQ ID NO: 64099 - RNA, 27 nt, synthetic construct
  misc_feature 1..27: note = Exportin-5 (626-634)
  source 1..27: mol_type = other RNA
ctgtacaaccacgtgaagcagctcctt

SEQ ID NO: 64100 - RNA, 27 nt, synthetic construct
  misc_feature 1..27: note = Interferon-induced GTP-binding protein Mx2 (422-430)
  source 1..27: mol_type = other RNA
ctgtacaacaagatcagagaggacttc

SEQ ID NO: 64101 - RNA, 27 nt, synthetic construct
  misc_feature 1..27: note = ATPase family AAA domain-containing protein 2 (447-455)
  source 1..27: mol_type = other RNA
ctgtaccccgaggtgttcgaaaagttt

SEQ ID NO: 64102 - RNA, 27 nt, synthetic construct
  misc_feature 1..27: note = TELO2-interacting protein 2 (300-308)
  source 1..27: mol_type = other RNA
ctgtacacccccgagcaccatctcatc

SEQ ID NO: 64103 - RNA, 27 nt, synthetic construct
  misc_feature 1..27: note = Formin-binding protein 1-like (181-189)
  source 1..27: mol_type = other RNA
atggccgacgagaacaagaatgaatac

SEQ ID NO: 64104 - RNA, 30 nt, synthetic construct
  misc_feature 1..30: note = Condensin complex subunit 1 (1002-1011)
  source 1..30: mol_type = other RNA
atggagctgctcgacggcaagcagaccctt

SEQ ID NO: 64105 - RNA, 30 nt, synthetic construct
  misc_feature 1..30: note = Nucleoprotein TPR (1009-1018)
  source 1..30: mol_type = other RNA
atggaggtggaaaaggagaaacaggaactg

SEQ ID NO: 64106 - RNA, 33 nt, synthetic construct
  misc_feature 1..33: note = Eukaryotic translation initiation factor 2 subunit 2 (6-16)
  source 1..33: mol_type = other RNA
atgatcttcgaccccaccatgagcaagaaaaag

SEQ ID NO: 64107 - RNA, 27 nt, synthetic construct
  misc_feature 1..27: note = Melanoma-associated antigen D1 (497-505)
  source 1..27: mol_type = other RNA
atgctgagagacatcattagggagtac

SEQ ID NO: 64108 - RNA, 30 nt, synthetic construct
  misc_feature 1..30: note = Cytochrome c oxidase subunit NDUFA4 (1-10)
  source 1..30: mol_type = other RNA
atgctgagacagatcattggccaagccaag

SEQ ID NO: 64109 - RNA, 27 nt, synthetic construct
  misc_feature 1..27: note = Tetratricopeptide repeat protein 17 (580-588)
  source 1..27: mol_type = other RNA
atgcccgacgatcacgccagaaagatc

SEQ ID NO: 64110 - RNA, 24 nt, synthetic construct
  misc_feature 1..24: note = Protein polybromo-1 (426-433)
  source 1..24: mol_type = other RNA
atgcccatcagcctgcagcaaatt

SEQ ID NO: 64111 - RNA, 30 nt, synthetic construct
  misc_feature 1..30: note = Cell division cycle protein 27 homolog (515-524)
  source 1..30: mol_type = other RNA
atgcaggccgagagaatcttcagcgaagtg

SEQ ID NO: 64112 - RNA, 33 nt, synthetic construct
  misc_feature 1..33: note = CD44 antigen (412-422)
  source 1..33: mol_type = other RNA
atgaccgccgacgagacaagaaacctgcagaat

SEQ ID NO: 64113 - RNA, 33 nt, synthetic construct
  misc_feature 1..33: note = 14-3-3 protein beta/alpha (1-11)
  source 1..33: mol_type = other RNA
atgaccatggacaagagcgagctggtgcagaaa

SEQ ID NO: 64114 - RNA, 27 nt, synthetic construct
  misc_feature 1..27: note = Centromere/kinetochore protein zw10 homolog (415-423)
  source 1..27: mol_type = other RNA
atgaccagcgagatccacaacacagtg

SEQ ID NO: 64115 - RNA, 27 nt, synthetic construct
  misc_feature 1..27: note = Pyridoxal kinase (93-101)
  source 1..27: mol_type = other RNA
atggtggtcgacatcgttcaggagctg

SEQ ID NO: 64116 - RNA, 27 nt, synthetic construct
  misc_feature 1..27: note = Nucleoside diphosphate kinase (76-84)
  source 1..27: mol_type = other RNA
atggtgtgggagggcctgaacgtcgtt

SEQ ID NO: 64117 - RNA, 27 nt, synthetic construct
  misc_feature 1..27: note = Tyrosine-protein phosphatase non-receptor type 14 (204-212)
  source 1..27: mol_type = other RNA
atgtacatcaacgaggtggaaagactg

SEQ ID NO: 64118 - RNA, 27 nt, synthetic construct
  misc_feature 1..27: note = Phosphatidate cytidylyltransferase 2 (308-316)
  source 1..27: mol_type = other RNA
atgtaccccttccagatccacagcatt

SEQ ID NO: 64119 - RNA, 27 nt, synthetic construct
  misc_feature 1..27: note = M-phase phosphoprotein 8 (351-359)
  source 1..27: mol_type = other RNA
aacgccttcctggagaagaaaaccgtg

SEQ ID NO: 64120 - RNA, 27 nt, synthetic construct
  misc_feature 1..27: note = E3 ubiquitin-protein ligase RNF213 (2663-2671)
  source 1..27: mol_type = other RNA
aacgccttcctgagcaagtcctctgtg

SEQ ID NO: 64121 - RNA, 27 nt, synthetic construct
  misc_feature 1..27: note = H/ACA ribonucleoprotein complex subunit 4 (161-169)
  source 1..27: mol_type = other RNA
aacgccatcgagggcgggacccagctg

SEQ ID NO: 64122 - RNA, 27 nt, synthetic construct
  misc_feature 1..27: note = Protein transport protein Sec31A (866-874)
  source 1..27: mol_type = other RNA
aacgcctaccccaataccccttatatc

SEQ ID NO: 64123 - RNA, 27 nt, synthetic construct
  misc_feature 1..27: note = Ribonuclease P/MRP protein subunit POP5 (58-66)
  source 1..27: mol_type = other RNA
aacgcctacaccggcatcgtgctgctc

SEQ ID NO: 64124 - RNA, 27 nt, synthetic construct
  misc_feature 1..27: note = Cytoplasmic dynein 1 heavy chain 1 (1442-1450)
  source 1..27: mol_type = other RNA
aacgaggccatcgtgaaggacgtcctg

SEQ ID NO: 64125 - RNA, 30 nt, synthetic construct
  misc_feature 1..30: note = Hsc70-interacting protein (314-323)
  source 1..30: mol_type = other RNA
aacgagatcctgagcgaccccgaagtgctc

SEQ ID NO: 64126 - RNA, 24 nt, synthetic construct
  misc_feature 1..24: note = DENN domain-containing protein 5A (694-701)
  source 1..24: mol_type = other RNA
aacgagatcaccggccacacatac

SEQ ID NO: 64127 - RNA, 27 nt, synthetic construct
  misc_feature 1..27: note = Nucleoprotein TPR (857-865)
  source 1..27: mol_type = other RNA
aacgaggtggaacagagacacaccctg

SEQ ID NO: 64128 - RNA, 27 nt, synthetic construct
  misc_feature 1..27: note = Serine/arginine repetitive matrix protein 2 (2175-2183)
  source 1..27: mol_type = other RNA
aaccacgcccagagcagaatcgctctg

SEQ ID NO: 64129 - RNA, 27 nt, synthetic construct
  misc_feature 1..27: note = EH domain-containing protein 1 (209-217)
  source 1..27: mol_type = other RNA
aaccacgaggacaagatcagagtggtc

SEQ ID NO: 64130 - RNA, 30 nt, synthetic construct
  misc_feature 1..30: note = Nuclear receptor coactivator 6 (844-853)
  source 1..30: mol_type = other RNA
aaccacttcagcggccatgggatgtccttt

SEQ ID NO: 64131 - RNA, 27 nt, synthetic construct
  misc_feature 1..27: note = UDP-N-acetylhexosamine pyrophosphorylase (327-335)
  source 1..27: mol_type = other RNA
aacatcgccaatcacttctttaccgtg

SEQ ID NO: 64132 - RNA, 27 nt, synthetic construct
  misc_feature 1..27: note = Mediator of RNA polymerase II transcription subunit 22 (67-75)
  source 1..27: mol_type = other RNA
aacatcgtgagagccggcgagagcctg

SEQ ID NO: 64133 - RNA, 27 nt, synthetic construct
  misc_feature 1..27: note = Peroxisomal acyl-coenzyme A oxidase 1 (642-650)
  source 1..27: mol_type = other RNA
aacaaggccgaggtgcacgaaagctac

SEQ ID NO: 64134 - RNA, 30 nt, synthetic construct
  misc_feature 1..30: note = FERM domain-containing protein 6 (261-270)
  source 1..30: mol_type = other RNA
aacctggacgaggaaaagcagctcctttac

SEQ ID NO: 64135 - RNA, 24 nt, synthetic construct
  misc_feature 1..24: note = WD repeat-containing protein 43 (333-340)
  source 1..24: mol_type = other RNA
aacctgatcaagaaaaccgtgctc

SEQ ID NO: 64136 - RNA, 27 nt, synthetic construct
  misc_feature 1..27: note = C-terminal-binding protein 2 (784-792)
  source 1..27: mol_type = other RNA
aacctgaatgagcacaaccatcacctc

SEQ ID NO: 64137 - RNA, 33 nt, synthetic construct
  misc_feature 1..33: note = CD44 antigen (330-340)
  source 1..33: mol_type = other RNA
aacctgcagaatgtggacatgaagatcggcgtc

SEQ ID NO: 64138 - RNA, 30 nt, synthetic construct
  misc_feature 1..30: note = E3 ubiquitin-protein ligase makorin-1 (292-301)
  source 1..30: mol_type = other RNA
aaccccagcgagagaaggttcggcatcctg

SEQ ID NO: 64139 - RNA, 33 nt, synthetic construct
  misc_feature 1..33: note = Transcription factor COE2 (207-217)
  source 1..33: mol_type = other RNA
aaccagggctacatcagaaataccagctccatt

SEQ ID NO: 64140 - RNA, 27 nt, synthetic construct
  misc_feature 1..27: note = Interferon-induced GTP-binding protein Mx2 (643-651)
  source 1..27: mol_type = other RNA
aaccagatccccttcattatacaatac

SEQ ID NO: 64141 - RNA, 27 nt, synthetic construct
  misc_feature 1..27: note = Transportin-1 (49-57)
  source 1..27: mol_type = other RNA
aaccagtaccccgacttcaataactat

SEQ ID NO: 64142 - RNA, 27 nt, synthetic construct
  misc_feature 1..27: note Dolichyl-diphosphooligosaccharide-proteinosyltransferase 48 kDa subunit (395-403)
  source 1..27: mol_type = other RNA
aacagactgggctacacccacctctat

SEQ ID NO: 64143 - RNA, 27 nt, synthetic construct
  misc_feature 1..27: note = TATA-binding protein-associated factor 2N (227-235)
  source 1..27: mol_type = other RNA
aacagcgacaataacaccatcttcgtg

SEQ ID NO: 64144 - RNA, 27 nt, synthetic construct
  misc_feature 1..27: note = Niban-like protein 1 (154-162)
  source 1..27: mol_type = other RNA
aacagcgaccccaatctgcacctcctt

SEQ ID NO: 64145 - RNA, 27 nt, synthetic construct
  misc_feature 1..27: note = Serine/threonine-protein kinase TBK1 (330-338)
  source 1..27: mol_type = other RNA
aacaccgccacaatcttccacgagctg

SEQ ID NO: 64146 - RNA, 30 nt, synthetic construct
  misc_feature 1..30: note = GREB1-like protein (1697-1706)
  source 1..30: mol_type = other RNA
aacaccgacctgacacagaatgtgcaatac

SEQ ID NO: 64147 - RNA, 30 nt, synthetic construct; identical to SEQ ID NO: 39920
  misc_feature 1..30: note = Eukaryotic translation initiation factor 3 subunit C-like protein (462-471)
  source 1..30: mol_type = other RNA

SEQ ID NO: 64148 - RNA, 30 nt, synthetic construct
  misc_feature 1..30: note = Guanine deaminase (328-337)
  source 1..30: mol_type = other RNA
aacaccgacagacccggcgggtacagctat

SEQ ID NO: 64149 - RNA, 30 nt, synthetic construct
  misc_feature 1..30: note = 26S proteasome non-ATPase regulatory subunit 13 (227-236)
  source 1..30: mol_type = other RNA
aacaccgacagacagtggctgatcgataca

SEQ ID NO: 64150 - RNA, 33 nt, synthetic construct
  misc_feature 1..33: note = Polypyrimidine tract-binding protein 1 (102-112)
  source 1..33: mol_type = other RNA
aacaccgaggaagccgctaatacaatggtgaac

SEQ ID NO: 64151 - RNA, 27 nt, synthetic construct
  misc_feature 1..27: note = MOB kinase activator 1A (60-68)
  source 1..27: mol_type = other RNA
aacaccgtggacttctttaatcagatc

SEQ ID NO: 64152 - RNA, 27 nt, synthetic construct
  misc_feature 1..27: note = Vesicular integral-membrane protein VIP36 (305-313)
  source 1..27: mol_type = other RNA
aacgtggacgatcccaccggcaatttc

SEQ ID NO: 64153 - RNA, 33 nt, synthetic construct
  misc_feature 1..33: note = Dynactin subunit 6 (105-115)
  source 1..33: mol_type = other RNA
aacgtgatcgagagcaaggcctacgtcggcaga

SEQ ID NO: 64154 - RNA, 27 nt, synthetic construct
  misc_feature 1..27: note = Sperm-associated antigen 16 protein (89-97)
  source 1..27: mol_type = other RNA
aacgtgcccgacgtctacacccagatc

SEQ ID NO: 64155 - RNA, 27 nt, synthetic construct
  misc_feature 1..27: note = Activity-dependent neuroprotector homeobox protein (450-458)
  source 1..27: mol_type = other RNA
aactacatcatgaagattcacaatttc

SEQ ID NO: 64156 - RNA, 27 nt, synthetic construct
  misc_feature 1..27: note = Abelson tyrosine-protein kinase 2 (124-132)
  source 1..27: mol_type = other RNA
aactacatcacccccgtgaatagcctg

SEQ ID NO: 64157 - RNA, 27 nt, synthetic construct
  misc_feature 1..27: note = Opioid growth factor receptor (195-203)
  source 1..27: mol_type = other RNA
aactaccagaagagattccaaaatctg

SEQ ID NO: 64158 - RNA, 27 nt, synthetic construct
  misc_feature 1..27: note = DNA-directed RNA polymerase II subunit RPB4 (66-74)
  source 1..27: mol_type = other RNA
aactacaccgccagattcagcaggttt

SEQ ID NO: 64159 - RNA, 30 nt, synthetic construct
  misc_feature 1..30: note = BTB/POZ domain-containing adapter for CUL3-mediated RhoA degradation protein 3 (245-254)
  source 1..30: mol_type = other RNA
cccgaggccagaatctacgaagagaccctg

SEQ ID NO: 64160 - RNA, 27 nt, synthetic construct
  misc_feature 1..27: note = Ubiquitin-like modifier-activating enzyme 7 (898-906)
  source 1..27: mol_type = other RNA
cccttcgcccctgctatccagaccttt

SEQ ID NO: 64161 - RNA, 27 nt, synthetic construct
  misc_feature 1..27: note = Short-chain dehydrogenase/reductase 3 (219-227)
  source 1..27: mol_type = other RNA
cccttccacaccagcacagagatgttt

SEQ ID NO: 64162 - RNA, 30 nt, synthetic construct
  misc_feature 1..30: note = Nodal modulator 2 (293-302)
  source 1..30: mol_type = other RNA
cccttctacagaggcgagaggatcaccttt

SEQ ID NO: 64163 - RNA, 30 nt, synthetic construct
  misc_feature 1..30: note = Beta-2-microglobulin (110-119)
  source 1..30: mol_type = other RNA
cccaagatcgtgaaatgggacagagatatg

SEQ ID NO: 64164 - RNA, 27 nt, synthetic construct
  misc_feature 1..27: note = Proteasomal ubiquitin receptor ADRM1 (86-94)
  source 1..27: mol_type = other RNA
ccccagtgccctagcggcagagtgtac

SEQ ID NO: 64165 - RNA, 36 nt, synthetic construct
  misc_feature 1..36: note = NADH dehydrogenase (ubiquinone) 1 alpha subcomplex subunit 3 (73-84)
  source 1..36: mol_type = other RNA
ccccagggccctagcctggagtggctcaagaaactt

SEQ ID NO: 64166 - RNA, 27 nt, synthetic construct
  misc_feature 1..27: note = Signal recognition particle 9 kDa protein (2-10)
  source 1..27: mol_type = other RNA
ccccagtaccaaacctgggaggaattc

SEQ ID NO: 64167 - RNA, 30 nt, synthetic construct; identical to SEQ ID NO: 39940
  misc_feature 1..30: note = Gamma-aminobutyric acid receptor-associated protein (52-61)
  source 1..30: mol_type = other RNA

SEQ ID NO: 64168 - RNA, 33 nt, synthetic construct
  misc_feature 1..33: note = B-cell CLL/lymphoma 9-like protein (1331-1341)
  source 1..33: mol_type = other RNA
cccagcgagaagccttcctctaccctgcagtac

SEQ ID NO: 64169 - RNA, 27 nt, synthetic construct
  misc_feature 1..27: note = Retroviral-like aspartic protease 1 (314-322)
  source 1..27: mol_type = other RNA
cccgtgggcgggagcctggaggacgaa

SEQ ID NO: 64170 - RNA, 27 nt, synthetic construct
  misc_feature 1..27: note = Procollagen-lysine,2-oxoglutarate 5-dioxygenase 3 (459-467)
  source 1..27: mol_type = other RNA
ccctacatcagccaggcctatgtgatt

SEQ ID NO: 64171 - RNA, 27 nt, synthetic construct
  misc_feature 1..27: note = Telomerase protein component 1 (1087-1095)
  source 1..27: mol_type = other RNA
ccctacgtgggcgggctggaggaattc

SEQ ID NO: 64172 - RNA, 27 nt, synthetic construct
  misc_feature 1..27: note = U5 small nuclear ribonucleoprotein 200 kDa helicase (643-651)
  source 1..27: mol_type = other RNA
caggaggacgtgagactgatcggcctc

SEQ ID NO: 64173 - RNA, 27 nt, synthetic construct
  misc_feature 1..27: note = Ras GTPase-activating protein-binding protein 1 (211-219)
  source 1..27: mol_type = other RNA
caggaggaaaagcccgagcctgtgctg

SEQ ID NO: 64174 - RNA, 27 nt, synthetic construct
  misc_feature 1..27: note = Threonylcarbamoyladenosine tRNA methylthiotransferase (57-65)
  source 1..27: mol_type = other RNA
caggaggaaaacaagaaaatcgtgctg

SEQ ID NO: 64175 - RNA, 30 nt, synthetic construct
  misc_feature 1..30: note = Eukaryotic translation initiation factor 3 subunit K (94-103)
  source 1..30: mol_type = other RNA
caggaggaaagacccatcaggcaaattctg

SEQ ID NO: 64176 - RNA, 36 nt, synthetic construct
  misc_feature 1..36: note = RNA polymerase II subunit A C-terminal domain phosphatase SSU72 (177-188)
  source 1..36: mol_type = other RNA
caggagttcgaagagaagagcggcagaacctttctg

SEQ ID NO: 64177 - RNA, 27 nt, synthetic construct
  misc_feature 1..27: note = Clathrin heavy chain 1 (10-18)
  source 1..27: mol_type = other RNA
caggagcacctgcaactccagaacctt

SEQ ID NO: 64178 - RNA, 27 nt, synthetic construct
  misc_feature 1..27: note = Bifunctional arginine demethylase and lysyl-hydroxylase JMJD6 (356-364)
  source 1..27: mol_type = other RNA
caggagcaccccgaactggccgtgctc

SEQ ID NO: 64179 - RNA, 30 nt, synthetic construct
  misc_feature 1..30: note = F-box only protein 11 (141-150)
  source 1..30: mol_type = other RNA
caggagaagctgcccgacgaagtggtcctc

SEQ ID NO: 64180 - RNA, 30 nt, synthetic construct
  misc_feature 1..30: note = protein PET100 homolog, mitochondrial (48-57)
  source 1..30: mol_type = other RNA
caggagctggaagagttcaaggaaagactc

SEQ ID NO: 64181 - RNA, 30 nt, synthetic construct; identical to SEQ ID NO: 39954
  misc_feature 1..30: note = Protein SHQ1 homolog (236-245)
  source 1..30: mol_type = other RNA

SEQ ID NO: 64182 - RNA, 30 nt, synthetic construct
  misc_feature 1..30: note = Histone-lysine N-methyltransferase SETD7 (253-262)
  source 1..30: mol_type = other RNA
caggaggtggacagcagagattgggccctg

SEQ ID NO: 64183 - RNA, 27 nt, synthetic construct
  misc_feature 1..27: note = Neutral amino acid transporter B(0) (224-232)
  source 1..27: mol_type = other RNA
caggaggtggaaggcatgaacatcctg

SEQ ID NO: 64184 - RNA, 27 nt, synthetic construct
  misc_feature 1..27: note = Uridine-cytidine kinase 2 (143-151)
  source 1..27: mol_type = other RNA
caggaggtgagagacctgttccaaatg

SEQ ID NO: 64185 - RNA, 27 nt, synthetic construct
  misc_feature 1..27: note = WD repeat-containing protein 3 (640-648)
  source 1..27: mol_type = other RNA
cagttcgtgcccaagagccacctgttt

SEQ ID NO: 64186 - RNA, 27 nt, synthetic construct
  misc_feature 1..27: note = Niban-like protein 1 (79-87)
  source 1..27: mol_type = other RNA
cagatcagcattcccttcctgctcaag

SEQ ID NO: 64187 - RNA, 27 nt, synthetic construct
  misc_feature 1..27: note = Rho-associated protein kinase 2 (563-571)
  source 1..27: mol_type = other RNA
cagctggacgagaccaacgccctcctt

SEQ ID NO: 64188 - RNA, 27 nt, synthetic construct
  misc_feature 1..27: note = Ras-associated and pleckstrin homology domains-containing protein 1 (496-504)
  source 1..27: mol_type = other RNA
cagctggaccacgtgaacgtctactat

SEQ ID NO: 64189 - RNA, 27 nt, synthetic construct
  misc_feature 1..27: note = Disco-interacting protein 2 homolog A (1561-1569)
  source 1..27: mol_type = other RNA
cagctggaccccatctacgtggcctat

SEQ ID NO: 64190 - RNA, 27 nt, synthetic construct
  misc_feature 1..27: note = Transcription elongation factor SPT5 (537-545)
  source 1..27: mol_type = other RNA
cagctggacccccaaaccgtgggcgtc

SEQ ID NO: 64191 - RNA, 27 nt, synthetic construct
  misc_feature 1..27: note = Transcriptional repressor CTCF (65-73)
  source 1..27: mol_type = other RNA
cagctggaccccaccctccttcaaatg

SEQ ID NO: 64192 - RNA, 27 nt, synthetic construct
  misc_feature 1..27: note = Ubiquitin-40S ribosomal protein S27a (69-77)
  source 1..27: mol_type = other RNA
cagctggaggacggcagaaccctcagc

SEQ ID NO: 64193 - RNA, 27 nt, synthetic construct
  misc_feature 1..27: note = Mortality factor 4-like protein 2 (145-153)
  source 1..27: mol_type = other RNA
cagctgttccaactccccgccaagaaa

SEQ ID NO: 64194 - RNA, 30 nt, synthetic construct
  misc_feature 1..30: note = Transitional endoplasmic reticulum ATPase (50-59)
  source 1..30: mol_type = other RNA
cagctgttcagaggcgacaccgtgctcctt

SEQ ID NO: 64195 - RNA, 33 nt, synthetic construct
  misc_feature 1..33: note = Transitional endoplasmic reticulum ATPase (50-60)
  source 1..33: mol_type = other RNA
cagctgttcagaggcgacaccgtgctccttaag

SEQ ID NO: 64196 - RNA, 30 nt, synthetic construct; identical to SEQ ID NO: 39969
  misc_feature 1..30: note = Mitofusin-2 (172-181)
  source 1..30: mol_type = other RNA

SEQ ID NO: 64197 - RNA, 27 nt, synthetic construct
  misc_feature 1..27: note = Kinesin-like protein KIF15 (1210-1218)
  source 1..27: mol_type = other RNA
cagctgatcgagaagaactggctcctt

SEQ ID NO: 64198 - RNA, 27 nt, synthetic construct
  misc_feature 1..27: note = Cleavage and polyadenylation specificity factor subunit 2 (95-103)
  source 1..27: mol_type = other RNA
cagctgctcgaccaaatctggagaacc

SEQ ID NO: 64199 - RNA, 27 nt, synthetic construct
  misc_feature 1..27: note = Eukaryotic translation initiation factor 4 gamma 1 (739-747)
  source 1..27: mol_type = other RNA
cagctgatgaagcaagtgacccagctc

SEQ ID NO: 64200 - RNA, 27 nt, synthetic construct
  misc_feature 1..27: note = Lanosterol 14-alpha demethylase (218-226)
  source 1..27: mol_type = other RNA
cagctgaacgagaaggtggcccaactc

SEQ ID NO: 64201 - RNA, 27 nt, synthetic construct
  misc_feature 1..27: note = Pleckstrin homology-like domain family B member 1 (775-783)
  source 1..27: mol_type = other RNA
cagctgcaagagaagctcgtggccctt

SEQ ID NO: 64202 - RNA, 27 nt, synthetic construct
  misc_feature 1..27: note = WD and tetratricopeptide repeats protein 1 (274-282)
  source 1..27: mol_type = other RNA
cagctgtacagcaaggccgtgcaaaga

SEQ ID NO: 64203 - RNA, 27 nt, synthetic construct
  misc_feature 1..27: note = Zinc finger protein ubi-d4 (70-78)
  source 1..27: mol_type = other RNA
cagctgtacagctatcccgccagaagg

SEQ ID NO: 64204 - RNA, 27 nt, synthetic construct
  misc_feature 1..27: note = KxDL motif-containing protein 1 (65-73)
  source 1..27: mol_type = other RNA
cagatgagcgagagattcctgcaccat

SEQ ID NO: 64205 - RNA, 27 nt, synthetic construct
  misc_feature 1..27: note = Helicase with zinc finger domain 2 (1555-1563)
  source 1..27: mol_type = other RNA
cagcccgcccctagaagccaacagctg

SEQ ID NO: 64206 - RNA, 27 nt, synthetic construct
  misc_feature 1..27: note = V-type proton ATPase subunit B, brain isoform (42-50)
  source 1..27: mol_type = other RNA
cagcccagactgacctacaagacagtg

SEQ ID NO: 64207 - RNA, 30 nt, synthetic construct
  misc_feature 1..30: note = Transmembrane protein 160 (91-100)
  source 1..30: mol_type = other RNA
cagagcgacatgggcagagaggccgcttac

SEQ ID NO: 64208 - RNA, 27 nt, synthetic construct
  misc_feature 1..27: note = Synaptotagmin-like protein 2 (379-387)
  source 1..27: mol_type = other RNA
cagagcgaccccaagccttcccaatac

SEQ ID NO: 64209 - RNA, 30 nt, synthetic construct
  misc_feature 1..30: note = Very long-chain specific acyl-CoA dehydrogenase, mitochondrial (600-609)
  source 1..30: mol_type = other RNA
cagagcgacccctggcaacaggagctgtac

SEQ ID NO: 64210 - RNA, 27 nt, synthetic construct
  misc_feature 1..27: note = E3 ubiquitin-protein ligase TRAF7 (293-301)
  source 1..27: mol_type = other RNA
cagaccgacgatagattccacgagatg

SEQ ID NO: 64211 - RNA, 27 nt, synthetic construct
  misc_feature 1..27: note = WD repeat and FYVE domain-containing protein 3 (796-804)
  source 1..27: mol_type = other RNA
cagaccgacgagagactggcccaatac

SEQ ID NO: 64212 - RNA, 30 nt, synthetic construct
  misc_feature 1..30: note = Tetratricopeptide repeat protein 19, mitochondrial (128-137)
  source 1..30: mol_type = other RNA
cagaccgacaacaagaaagccatcacatac

SEQ ID NO: 64213 - RNA, 33 nt, synthetic construct
  misc_feature 1..33: note = Nuclear pore complex protein Nup133 (878-888)
  source 1..33: mol_type = other RNA
cagaccgacaaccaaagcagactgcagaggtac

SEQ ID NO: 64214 - RNA, 27 nt, synthetic construct
  misc_feature 1..27: note = Signal recognition particle receptor subunit beta (32-40)
  source 1..27: mol_type = other RNA
cagaccgaccccacactgctcagcgtg

SEQ ID NO: 64215 - RNA, 27 nt, synthetic construct
  misc_feature 1..27: note = Helicase with zinc finger domain 2 (612-620)
  source 1..27: mol_type = other RNA
cagaccgaccccgtgacactgcaatac

SEQ ID NO: 64216 - RNA, 27 nt, synthetic construct
  misc_feature 1..27: note = Small G protein signaling modulator 3 (245-253)
  source 1..27: mol_type = other RNA
cagaccgaccaaagagtgctgaggcac

SEQ ID NO: 64217 - RNA, 30 nt, synthetic construct
  misc_feature 1..30: note = SWI/SNF-related matrix-associated actin-dependent regulator of chromatin subfamily A member 5 (85-94)
  source 1..30: mol_type = other RNA
cagaccgacagagccaacaggttcgagtac

SEQ ID NO: 64218 - RNA, 30 nt, synthetic construct
  misc_feature 1..30: note = Sodium-dependent lysophosphatidylcholine symporter 1 (104-113)
  source 1..30: mol_type = other RNA
cagaccgagagagacagcgccacagcttac

SEQ ID NO: 64219 - RNA, 27 nt, synthetic construct
  misc_feature 1..27: note = Ras GTPase-activating-like protein IQGAP1 (980-988)
  source 1..27: mol_type = other RNA
cagaccaaccccacatacctggccaag

SEQ ID NO: 64220 - RNA, 27 nt, synthetic construct
  misc_feature 1..27: note = Mitochondrial-processing peptidase subunit alpha (144-152)
  source 1..27: mol_type = other RNA
cagaccagcagagacacaactatgtac

SEQ ID NO: 64221 - RNA, 27 nt, synthetic construct
  misc_feature 1..27: note = DNA-directed RNA polymerase III subunit RPC5 (106-114)
  source 1..27: mol_type = other RNA
cagaccacaagcaacacttccagatac

SEQ ID NO: 64222 - RNA, 27 nt, synthetic construct
  misc_feature 1..27: note = Catenin beta-1 (78-86)
  source 1..27: mol_type = other RNA
caggtggccgacatcgatggccaatac

SEQ ID NO: 64223 - RNA, 27 nt, synthetic construct
  misc_feature 1..27: note = Regulator of microtubule dynamics protein 1 (253-261)
  source 1..27: mol_type = other RNA
caggtggaccccaacttctacagcaag

SEQ ID NO: 64224 - RNA, 30 nt, synthetic construct
  misc_feature 1..30: note = Cell division cycle protein 27 homolog (594-603)
  source 1..30: mol_type = other RNA
caggtggaccccaactacgcctatgcttac

SEQ ID NO: 64225 - RNA, 42 nt, synthetic construct
  misc_feature 1..42: note = Protein Tob2 (303-316)
  source 1..42: mol_type = other RNA
caggtgttcggcgggggagccaacagcctgtttctcgagaag

SEQ ID NO: 64226 - RNA, 33 nt, synthetic construct
  misc_feature 1..33: note = UPF0488 protein C8orf33 (189-199)
  source 1..33: mol_type = other RNA
caggtgcaacccgtcgacggcgccaccagaaag

SEQ ID NO: 64227 - RNA, 27 nt, synthetic construct
  misc_feature 1..27: note = Dynamin-like 120 kDa protein, mitochondrial (858-866)
  source 1..27: mol_type = other RNA
caggtgtacagaaggcacttcctgaag

SEQ ID NO: 64228 - RNA, 27 nt, synthetic construct
  misc_feature 1..27: note = Zinc finger MIZ domain-containing protein 2 (283-291)
  source 1..27: mol_type = other RNA
cagtacgcccccagcaccgctcaattc

SEQ ID NO: 64229 - RNA, 27 nt, synthetic construct
  misc_feature 1..27: note = HEAT repeat-containing protein 6 (870-878)
  source 1..27: mol_type = other RNA
cagtacgccagaatctggaacgctctg

SEQ ID NO: 64230 - RNA, 27 nt, synthetic construct
  misc_feature 1..27: note = Ubiquitin carboxyl-terminal hydrolase 48 (677-685)
  source 1..27: mol_type = other RNA
cagtacttccccaaggcccctgagttt

SEQ ID NO: 64231 - RNA, 27 nt, synthetic construct
  misc_feature 1..27: note = DNA-directed RNA polymerase III subunit RPC2 (60-68)
  source 1..27: mol_type = other RNA
cagtacaaggacgtgcccatcacctat

SEQ ID NO: 64232 - RNA, 33 nt, synthetic construct
  misc_feature 1..33: note = Negative elongation factor A (142-152)
  source 1..33: mol_type = other RNA
cagtacctgaacaagaatgccctcaccacactt

SEQ ID NO: 64233 - RNA, 27 nt, synthetic construct
  misc_feature 1..27: note = Laminin subunit alpha-4 (1299-1307)
  source 1..27: mol_type = other RNA
cagtacaacgacggcctgagccacttc

SEQ ID NO: 64234 - RNA, 27 nt, synthetic construct
  misc_feature 1..27: note = Protein spire homolog 1 (293-301)
  source 1..27: mol_type = other RNA
cagtacaaccccctgcctatcgagtat

SEQ ID NO: 64235 - RNA, 27 nt, synthetic construct
  misc_feature 1..27: note = Protein transport protein Sec61 subunit alpha isoform 1 (275-283)
  source 1..27: mol_type = other RNA
cagtacaacacctatcccatcaagctg

SEQ ID NO: 64236 - RNA, 30 nt, synthetic construct
  misc_feature 1..30: note = Protein transport protein Sec61 subunit alpha isoform 1 (275-284)
  source 1..30: mol_type = other RNA
cagtacaacacctatcccatcaagctgttc

SEQ ID NO: 64237 - RNA, 27 nt, synthetic construct
  misc_feature 1..27: note = Gem-associated protein 5 (1174-1182)
  source 1..27: mol_type = other RNA
cagtaccaagaggccttccagaagctg

SEQ ID NO: 64238 - RNA, 27 nt, synthetic construct
  misc_feature 1..27: note = E3 ubiquitin-protein ligase RNF213 (2046-2054)
  source 1..27: mol_type = other RNA
cagtaccaaaaggtgcccgtcctgttc

SEQ ID NO: 64239 - RNA, 27 nt, synthetic construct
  misc_feature 1..27: note = Spectrin beta chain, non-erythrocytic 2 (18-26)
  source 1..27: mol_type = other RNA
cagtacagcgacatcaacaatagatgg

SEQ ID NO: 64240 - RNA, 27 nt, synthetic construct
  misc_feature 1..27: note = Ubiquitin-like modifier-activating enzyme 1 (717-725)
  source 1..27: mol_type = other RNA
cagtacagcaacaatatcagacaactg

SEQ ID NO: 64241 - RNA, 27 nt, synthetic construct
  misc_feature 1..27: note = Phosphatidylinositol transfer protein beta isoform (56-64)
  source 1..27: mol_type = other RNA
cagtacacccacaagatctatcatctg

SEQ ID NO: 64242 - RNA, 27 nt, synthetic construct
  misc_feature 1..27: note = Laminin subunit gamma-1 (6-14)
  source 1..27: mol_type = other RNA
agagccgctcccgcactgaggcctcgg

SEQ ID NO: 64243 - RNA, 27 nt, synthetic construct
  misc_feature 1..27: note = CCAAT/enhancer-binding protein beta (62-70)
  source 1..27: mol_type = other RNA
agagccatcgacttcagcccctacctg

SEQ ID NO: 64244 - RNA, 33 nt, synthetic construct
  misc_feature 1..33: note = X-ray repair cross-complementing protein 6 (586-596)
  source 1..33: mol_type = other RNA
agagcctacggcctgaagagcgggctcaaaaag

SEQ ID NO: 64245 - RNA, 27 nt, synthetic construct
  misc_feature 1..27: note = Filamin-B (649-657)
  source 1..27: mol_type = other RNA
agagcctacggccccgggctggagaag

SEQ ID NO: 64246 - RNA, 27 nt, synthetic construct
  misc_feature 1..27: note = Ras and Rab interactor 2 (179-187)
  source 1..27: mol_type = other RNA
agagacgtgctgcccttcaccctcaag

SEQ ID NO: 64247 - RNA, 33 nt, synthetic construct
  misc_feature 1..33: note = Glutamine-tRNA ligase (34-44)
  source 1..33: mol_type = other RNA
agagaggccgctacccaggcacaacagacactg

SEQ ID NO: 64248 - RNA, 33 nt, synthetic construct
  misc_feature 1..33: note = Pre-mRNA-processing-splicing factor 8 (1275-1285)
  source 1..33: mol_type = other RNA
agagaggccgtggtcaacacccaggaactgctc

SEQ ID NO: 64249 - RNA, 27 nt, synthetic construct
  misc_feature 1..27: note = TFIIH basal transcription factor complex helicase XPB subunit (472-480)
  source 1..27: mol_type = other RNA
agagaggacgataagatcgtggacctg

SEQ ID NO: 64250 - RNA, 33 nt, synthetic construct
  misc_feature 1..33: note = Nuclear pore complex protein Nup107 (142-152)
  source 1..33: mol_type = other RNA
agagaggacgatcccggcgaagccgctagcatg

SEQ ID NO: 64251 - RNA, 30 nt, synthetic construct
  misc_feature 1..30: note = Translationally-controlled tumor protein (152-161)
  source 1..30: mol_type = other RNA
agagaggacggcgtgaccccctacatgatc

SEQ ID NO: 64252 - RNA, 27 nt, synthetic construct
  misc_feature 1..27: note = Catenin beta-1 (457-465)
  source 1..27: mol_type = other RNA
agagaggacatcaccgaacccgccatt

SEQ ID NO: 64253 - RNA, 36 nt, synthetic construct
  misc_feature 1..36: note = Histone-lysine N-methyltransferase 2D (2065-2076)
  source 1..36: mol_type = other RNA
agagaggaccccggcaccgggatgggaagctccctg

SEQ ID NO: 64254 - RNA, 33 nt, synthetic construct
  misc_feature 1..33: note = Protein ELYS (1949-1959)
  source 1..33: mol_type = other RNA
agagaggacagcaacctggaatcctctcagctc

SEQ ID NO: 64255 - RNA, 33 nt, synthetic construct
  misc_feature 1..33: note = DNA damage-inducible transcript 4 protein (39-49)
  source 1..33: mol_type = other RNA
agagaggaaggcttcgacaggagcacctccctg

SEQ ID NO: 64256 - RNA, 30 nt, synthetic construct
  misc_feature 1..30: note = Protein THEMIS2 (210-219)
  source 1..30: mol_type = other RNA
agagaggaaaaccccgagttcaccagcctg

SEQ ID NO: 64257 - RNA, 30 nt, synthetic construct
  misc_feature 1..30: note = Serine/threonine-protein phosphatase 2B catalytic subunit beta isoform (441-450)
  source 1..30: mol_type = other RNA
agagaggaaagcgagtccgtgctgaccctc

SEQ ID NO: 64258 - RNA, 30 nt, synthetic construct
  misc_feature 1..30: note = Poly(rC)-binding protein 2 (40-49)
  source 1..30: mol_type = other RNA
agagaggaaagcggcgccaggatcaacatt

SEQ ID NO: 64259 - RNA, 30 nt, synthetic construct
  misc_feature 1..30: note = Vigilin (608-617)
  source 1..30: mol_type = other RNA
agagaggaaagcaacaccaagatcgacctg

SEQ ID NO: 64260 - RNA, 27 nt, synthetic construct
  misc_feature 1..27: note = Double-strand-break repair protein rad21 homolog (146-154)
  source 1..27: mol_type = other RNA
agagaggaagtgggcaacatcagcatt

SEQ ID NO: 64261 - RNA, 27 nt, synthetic construct
  misc_feature 1..27: note = U3 small nucleolar RNA-associated protein 14 homolog A (370-378)
  source 1..27: mol_type = other RNA
agagagttcgaagagaggcggagcctg

SEQ ID NO: 64262 - RNA, 33 nt, synthetic construct
  misc_feature 1..33: note = ADP-ribose pyrophosphatase, mitochondrial (229-239)
  source 1..33: mol_type = other RNA
agagagttcggcgaagaggccctgaacagcctc

SEQ ID NO: 64263 - RNA, 27 nt, synthetic construct
  misc_feature 1..27: note = Procollagen-lysine,2-oxoglutarate 5-dioxygenase 2 (100-108)
  source 1..27: mol_type = other RNA
agagagttcatcgcccccgtgaccctg

SEQ ID NO: 64264 - RNA, 30 nt, synthetic construct
  misc_feature 1..30: note = Peptidyl-prolyl cis-trans isomerase FKBP14 (202-211)
  source 1..30: mol_type = other RNA
agagagttcacctacaagcacgacgaactg

SEQ ID NO: 64265 - RNA, 27 nt, synthetic construct
  misc_feature 1..27: note = Splicing factor 3B subunit 1 (390-398)
  source 1..27: mol_type = other RNA
agagagatcgacgaaaggaaccggccc

SEQ ID NO: 64266 - RNA, 30 nt, synthetic construct
  misc_feature 1..30: note = Nucleolin (546-555)
  source 1..30: mol_type = other RNA
agagagatcgaaggcagggccattcggctg

SEQ ID NO: 64267 - RNA, 27 nt, synthetic construct
  misc_feature 1..27: note = Cytoplasmic dynein 1 heavy chain 1 (254-262)
  source 1..27: mol_type = other RNA
agagagatccagaaggtgaccaaactg

SEQ ID NO: 64268 - RNA, 33 nt, synthetic construct
  misc_feature 1..33: note = Death-associated protein kinase 3 (69-79)
  source 1..33: mol_type = other RNA
agagagatcaggcaccccaacattataaccctg

SEQ ID NO: 64269 - RNA, 30 nt, synthetic construct
  misc_feature 1..30: note = E3 ubiquitin-protein ligase BRE1B (440-449)
  source 1..30: mol_type = other RNA
agagagaaggacgatgccaacttcaaactg

SEQ ID NO: 64270 - RNA, 27 nt, synthetic construct
  misc_feature 1..27: note = Transcription factor AP-2 alpha (Activating enhancer binding protein 2 alpha), isoform CRA_c (266-274)
  source 1..27: mol_type = other RNA
agagagaagctggacaaaatcggcctc

SEQ ID NO: 64271 - RNA, 27 nt, synthetic construct
  misc_feature 1..27: note = Putative pituitary tumor-transforming gene 3 protein (153-161)
  source 1..27: mol_type = other RNA
agagagctggaaaagctcttccagctt

SEQ ID NO: 64272 - RNA, 30 nt, synthetic construct
  misc_feature 1..30: note = Guanine nucleotide-binding protein G(I)/G(S)/G(T) subunit beta-2 (137-146)
  source 1..30: mol_type = other RNA
agagagctgcccggccacaccgggtacctc

SEQ ID NO: 64273 - RNA, 30 nt, synthetic construct
  misc_feature 1..30: note = Glycosylphosphatidylinositol anchor attachment 1 protein (565-574)
  source 1..30: mol_type = other RNA
agagagctgcaggaagcccccctcagcctt

SEQ ID NO: 64274 - RNA, 30 nt, synthetic construct
  misc_feature 1..30: note = Ataxin-10 (119-128)
  source 1..30: mol_type = other RNA
agagagctgagggtggaacaggagagcctc

SEQ ID NO: 64275 - RNA, 30 nt, synthetic construct
  misc_feature 1..30: note = TSC22 domain family protein 3 (77-86)
  source 1..30: mol_type = other RNA
agagagctggtggaaaagaacagccagctc

SEQ ID NO: 64276 - RNA, 33 nt, synthetic construct
  misc_feature 1..33: note = Src substrate cortactin (59-69)
  source 1..33: mol_type = other RNA
agagagaacgtgttccaggaacaccaaaccctg

SEQ ID NO: 64277 - RNA, 33 nt, synthetic construct
  misc_feature 1..33: note = WW domain-containing transcription regulator protein 1 (308-318)
  source 1..33: mol_type = other RNA
agagagcagagcaccgactccggcctggggctc

SEQ ID NO: 64278 - RNA, 27 nt, synthetic construct
  misc_feature 1..27: note = Endoplasmin (427-435)
  source 1..27: mol_type = other RNA
agagagaccctgcagcaacacaagctc

SEQ ID NO: 64279 - RNA, 30 nt, synthetic construct
  misc_feature 1..30: note = Rho guanine nucleotide exchange factor 2 (633-642)
  source 1..30: mol_type = other RNA
agagaggtggaaggcctgaaggacctcctt

SEQ ID NO: 64280 - RNA, 27 nt, synthetic construct
  misc_feature 1..27: note = Bifunctional methylenetetrahydrofolate dehydrogenase/cyclohydrolase, mitochondrial (337-345)
  source 1..27: mol_type = other RNA
agagaggtgctgaagagcaaagaactc

SEQ ID NO: 64281 - RNA, 27 nt, synthetic construct
  misc_feature 1..27: note = Phosphoserine aminotransferase (319-327)
  source 1..27: mol_type = other RNA
agattcctggacaaggccctcgagctt

SEQ ID NO: 64282 - RNA, 30 nt, synthetic construct
  misc_feature 1..30: note = AP-5 complex subunit sigma-1 (172-181)
  source 1..30: mol_type = other RNA
agattcctgccccacggccagctccttttt

SEQ ID NO: 64283 - RNA, 27 nt, synthetic construct
  misc_feature 1..27: note = Arf-GAP with coiled-coil, ANK repeat and PH domain-containing protein 2 (770-778)
  source 1..27: mol_type = other RNA
agattccagcaagacagccagaagttt

SEQ ID NO: 64284 - RNA, 27 nt, synthetic construct
  misc_feature 1..27: note = NADH dehydrogenase (ubiquinone) 1 beta subcomplex subunit 5, mitochondrial (61-69)
  source 1..27: mol_type = other RNA
agattctacgacaggcggtttctgaag

SEQ ID NO: 64285 - RNA, 33 nt, synthetic construct
  misc_feature 1..33: note = Putative helicase MOV-10 (450-460)
  source 1..33: mol_type = other RNA
agaggcctggacgatatcaaggacctcaaagtg

SEQ ID NO: 64286 - RNA, 33 nt, synthetic construct
  misc_feature 1..33: note = Protein EFR3 homolog A (165-175)
  source 1..33: mol_type = other RNA
agaatcgccggcattagggggatacagggagtg

SEQ ID NO: 64287 - RNA, 33 nt, synthetic construct
  misc_feature 1..33: note = Nuclear cap-binding protein subunit 1 (194-204)
  source 1..33: mol_type = other RNA
agaatcttcgccaacaccgagagctacctgaag

SEQ ID NO: 64288 - RNA, 27 nt, synthetic construct
  misc_feature 1..27: note = Transcription cofactor vestigial-like protein 4 (79-87)
  source 1..27: mol_type = other RNA
agaatcttcaacccccacctgaataag

SEQ ID NO: 64289 - RNA, 27 nt, synthetic construct
  misc_feature 1..27: note = Tubulin polyglutamylase TTLL7 (765-773)
  source 1..27: mol_type = other RNA
agaatcttcaacagggtgtttaatcgg

SEQ ID NO: 64290 - RNA, 30 nt, synthetic construct
  misc_feature 1..30: note = Centrosomal protein of 192 kDa (1349-1358)
  source 1..30: mol_type = other RNA
agaatcttccccgacaagtttgtgctgaaa

SEQ ID NO: 64291 - RNA, 27 nt, synthetic construct
  misc_feature 1..27: note = V-type proton ATPase subunit B, brain isoform (380-388)
  source 1..27: mol_type = other RNA
agaatcttccccaaggagatgctgaaa

SEQ ID NO: 64292 - RNA, 27 nt, synthetic construct
  misc_feature 1..27: note = COUP transcription factor 2 (293-301)
  source 1..27: mol_type = other RNA
agaatcttccaggagcaagtggaaaag

SEQ ID NO: 64293 - RNA, 27 nt, synthetic construct
  misc_feature 1..27: note = BolA-like protein 3 (99-107)
  source 1..27: mol_type = other RNA
agaatcttcaccagcgtgcccaagagg

SEQ ID NO: 64294 - RNA, 30 nt, synthetic construct
  misc_feature 1..30: note = Serine/threonine-protein kinase PLK2 (71-80)
  source 1..30: mol_type = other RNA
agaatcattgtggaccccaccacaggcaag

SEQ ID NO: 64295 - RNA, 27 nt, synthetic construct
  misc_feature 1..27: note = Exostosin-2 (166-174)
  source 1..27: mol_type = other RNA
agaatcaaggagaccgcccaggctatg

SEQ ID NO: 64296 - RNA, 33 nt, synthetic construct
  misc_feature 1..33: note = Calcium-independent phospholipase A2-gamma (131-141)
  source 1..33: mol_type = other RNA
agaatcaagagcaccctgaactccgtgtctaaa

SEQ ID NO: 64297 - RNA, 33 nt, synthetic construct
  misc_feature 1..33: note = Inactive tyrosine-protein kinase 7 (630-640)
  source 1..33: mol_type = other RNA
agaatcctggaccccaccaagctcggccctagg

SEQ ID NO: 64298 - RNA, 33 nt, synthetic construct
  misc_feature 1..33: note = MORC family CW-type zinc finger protein 3 (659-669)
  source 1..33: mol_type = other RNA
agaatcctggagatgaacgacaagtacgtgaaa

SEQ ID NO: 64299 - RNA, 27 nt, synthetic construct
  misc_feature 1..27: note = Eukaryotic translation initiation factor 3 subunit C-like protein (507-515)
  source 1..27: mol_type = other RNA
agaatcctgcacacctactataagttc

SEQ ID NO: 64300 - RNA, 30 nt, synthetic construct
  misc_feature 1..30: note = DNA polymerase alpha subunit B (497-506)
  source 1..30: mol_type = other RNA
agaatcctgaagcacattctcacccagagg

SEQ ID NO: 64301 - RNA, 27 nt, synthetic construct
  misc_feature 1..27: note = Chromodomain-helicase-DNA-binding protein 4 (623-631)
  source 1..27: mol_type = other RNA
agaatcctgaaccacagcgtggacaag

SEQ ID NO: 64302 - RNA, 27 nt, synthetic construct
  misc_feature 1..27: note = Catechol O-methyltransferase (58-66)
  source 1..27: mol_type = other RNA
agaatcctgaaccacgtgctccagcat

SEQ ID NO: 64303 - RNA, 30 nt, synthetic construct
  misc_feature 1..30: note = Cleavage stimulation factor subunit 2 tau variant (180-189)
  source 1..30: mol_type = other RNA
agaatcatggaccccgagattgccctgaag

SEQ ID NO: 64304 - RNA, 27 nt, synthetic construct
  misc_feature 1..27: note = Rho GTPase-activating protein 7 (278-286)
  source 1..27: mol_type = other RNA
agaatcaacgtgcccatggtcaggaag

SEQ ID NO: 64305 - RNA, 33 nt, synthetic construct
  misc_feature 1..33: note = Pleckstrin homology domain-containing family A member 5 (177-187)
  source 1..33: mol_type = other RNA
agaatccaggacgtgatggagggcctgagcaag

SEQ ID NO: 64306 - RNA, 27 nt, synthetic construct
  misc_feature 1..27: note = ATP-dependent RNA helicase DDX19B (454-462)
  source 1..27: mol_type = other RNA
agaatccaggagcacttcaacaagaaa

SEQ ID NO: 64307 - RNA, 27 nt, synthetic construct
  misc_feature 1..27: note Dolichyl-diphosphooligosaccharide-proteinosyltransferase subunit DAD1 (74-82)
  source 1..27: mol_type = other RNA
agaatccagattaacccccaaaataag

SEQ ID NO: 64308 - RNA, 27 nt, synthetic construct
  misc_feature 1..27: note = Dynamin-like 120 kDa protein, mitochondrial (500-508)
  source 1..27: mol_type = other RNA
agaatccagcaaattatagagggcaag

SEQ ID NO: 64309 - RNA, 33 nt, synthetic construct
  misc_feature 1..33: note = Coronin-2B (108-118)
  source 1..33: mol_type = other RNA
agaatctgggagattcccgaaggcgggctgaag

SEQ ID NO: 64310 - RNA, 36 nt, synthetic construct
  misc_feature 1..36: note = Coronin-2B (113-124)
  source 1..36: mol_type = other RNA
agaatctgggagattcccgaaggcgggctgaagagg

SEQ ID NO: 64311 - RNA, 27 nt, synthetic construct
  misc_feature 1..27: note = E3 ubiquitin-protein ligase HECTD1 (480-488)
  source 1..27: mol_type = other RNA
agaatctgggagcccacctacacaatt

SEQ ID NO: 64312 - RNA, 30 nt, synthetic construct
  misc_feature 1..30: note = Protein kinase C iota type (269-278)
  source 1..30: mol_type = other RNA
agaatctacgccatgaaggtggtcaaaaag

SEQ ID NO: 64313 - RNA, 30 nt, synthetic construct
  misc_feature 1..30: note = DNA dC-dU-editing enzyme APOBEC-3B (119-128)
  source 1..30: mol_type = other RNA
agaatctacgactatgatcccctgtacaag

SEQ ID NO: 64314 - RNA, 36 nt, synthetic construct
  misc_feature 1..36: note = Fragile X mental retardation syndrome-related protein 1 (263-274)
  source 1..36: mol_type = other RNA
agaatctacggcgagagcgccgacgctgtgaagaaa

SEQ ID NO: 64315 - RNA, 33 nt, synthetic construct
  misc_feature 1..33: note = Arpin (3-13)
  source 1..33: mol_type = other RNA
agaatctaccacgacggcgccctgaggaacaag

SEQ ID NO: 64316 - RNA, 27 nt, synthetic construct
  misc_feature 1..27: note = Long-chain-fatty-acid-CoA ligase 3 (389-397)
  source 1..27: mol_type = other RNA
agaatctacaagaacgtgatgaataaa

SEQ ID NO: 64317 - RNA, 36 nt, synthetic construct
  misc_feature 1..36: note = Reticulon-1 (565-576)
  source 1..36: mol_type = other RNA
agaatctacaagagcgtgctgcaggccgtccaaaaa

SEQ ID NO: 64318 - RNA, 27 nt, synthetic construct
  misc_feature 1..27: note = Protein MMS22-like (284-292)
  source 1..27: mol_type = other RNA
agaatctacagcaagttccaccagaaa

SEQ ID NO: 64319 - RNA, 33 nt, synthetic construct
  misc_feature 1..33: note = Cytoplasmic dynein 1 heavy chain 1 (1603-1613)
  source 1..33: mol_type = other RNA
agactggccgacctccttggcaagatccagaaa

SEQ ID NO: 64320 - RNA, 27 nt, synthetic construct
  misc_feature 1..27: note = NADH dehydrogenase (ubiquinone) 1 beta subcomplex subunit 4 (36-44)
  source 1..27: mol_type = other RNA
agactggccatcagggctcagctcaag

SEQ ID NO: 64321 - RNA, 27 nt, synthetic construct
  misc_feature 1..27: note = Vacuolar protein sorting-associated protein 51 homolog (159-167)
  source 1..27: mol_type = other RNA
agactggcccagcaactcaggcagcgg

SEQ ID NO: 64322 - RNA, 27 nt, synthetic construct
  misc_feature 1..27: note = Replication initiator 1 (39-47)
  source 1..27: mol_type = other RNA
agactggccagcctccagtccgaggtg

SEQ ID NO: 64323 - RNA, 27 nt, synthetic construct
  misc_feature 1..27: note = HEAT repeat-containing protein 2 (751-759)
  source 1..27: mol_type = other RNA
agactggacgatgtgagcaacgacgtc

SEQ ID NO: 64324 - RNA, 27 nt, synthetic construct
  misc_feature 1..27: note = Arf-GAP with Rho-GAP domain, ANK repeat and PH domain-containing protein 1 (106-114)
  source 1..27: mol_type = other RNA
agactggacaccgatcacctcaggtac

SEQ ID NO: 64325 - RNA, 30 nt, synthetic construct
  misc_feature 1..30: note = Centrosomal protein of 41 kDa (29-38)
  source 1..30: mol_type = other RNA
agactggacaccggcaacagcatgacaaag

SEQ ID NO: 64326 - RNA, 27 nt, synthetic construct
  misc_feature 1..27: note = Protein flightless-1 homolog (672-680)
  source 1..27: mol_type = other RNA
agactgttcgccgagaagatcaacaaa

SEQ ID NO: 64327 - RNA, 27 nt, synthetic construct
  misc_feature 1..27: note = Elongator complex protein 2 (264-272)
  source 1..27: mol_type = other RNA
agactgttcgccccctggaagaggaaa

SEQ ID NO: 64328 - RNA, 27 nt, synthetic construct
  misc_feature 1..27: note = NEDD8-conjugating enzyme Ubc12 (158-166)
  source 1..27: mol_type = other RNA
agactgttcgagcagaacgtgcaaagg

SEQ ID NO: 64329 - RNA, 27 nt, synthetic construct
  misc_feature 1..27: note = Synaptonemal complex protein SC65 (104-112)
  source 1..27: mol_type = other RNA
agactgttcggcagggtgctcgagcgg

SEQ ID NO: 64330 - RNA, 27 nt, synthetic construct
  misc_feature 1..27: note = Plectin (177-185)
  source 1..27: mol_type = other RNA
agactgttcaacgccatcattcacagg

SEQ ID NO: 64331 - RNA, 30 nt, synthetic construct
  misc_feature 1..30: note = Transformation/transcription domain-associated protein (1453-1462)
  source 1..30: mol_type = other RNA
agactgttccccaacagctttaatgacaag

SEQ ID NO: 64332 - RNA, 30 nt, synthetic construct
  misc_feature 1..30: note = Zinc finger protein ZXDC (460-469)
  source 1..30: mol_type = other RNA
agactgttcaccagcaagcactccatgaaa

SEQ ID NO: 64333 - RNA, 27 nt, synthetic construct
  misc_feature 1..27: note = Insulin-degrading enzyme (683-691)
  source 1..27: mol_type = other RNA
agactgcacatcgaggccctccttcat

SEQ ID NO: 64334 - RNA, 33 nt, synthetic construct
  misc_feature 1..33: note = Proteasome subunit alpha type-4 (20-30)
  source 1..33: mol_type = other RNA
agactgatcgcccagaggtacctccttcaatat

SEQ ID NO: 64335 - RNA, 30 nt, synthetic construct
  misc_feature 1..30: note = Probable ATP-dependent RNA helicase DDX17 (304-313)
  source 1..30: mol_type = other RNA
agactgatcgacttcctcgagagcggcaag

SEQ ID NO: 64336 - RNA, 33 nt, synthetic construct
  misc_feature 1..33: note = General transcription factor 3C polypeptide 1 (377-387)
  source 1..33: mol_type = other RNA
agactgatcgagagcctcttcaccattcagaag

SEQ ID NO: 64337 - RNA, 36 nt, synthetic construct
  misc_feature 1..36: note = Protein S100-A13 (77-88)
  source 1..36: mol_type = other RNA
agactgatcggcgagctcgccaaggaaattaggaaa

SEQ ID NO: 64338 - RNA, 33 nt, synthetic construct
  misc_feature 1..33: note = ATP synthase subunit a (41-51)
  source 1..33: mol_type = other RNA
agactgatcaccacacagcaatggctcattaag

SEQ ID NO: 64339 - RNA, 33 nt, synthetic construct
  misc_feature 1..33: note = Peroxisomal multifunctional enzyme type 2 (634-644)
  source 1..33: mol_type = other RNA
agactgaaggacatcggccccgaggtggtcaaa

SEQ ID NO: 64340 - RNA, 27 nt, synthetic construct
  misc_feature 1..27: note = Cardiolipin synthase (CMP-forming) (235-243)
  source 1..27: mol_type = other RNA
agactgaagcccaccttcatcagcaaa

SEQ ID NO: 64341 - RNA, 36 nt, synthetic construct
  misc_feature 1..36: note = Eukaryotic translation initiation factor 3 subunit A (340-351)
  source 1..36: mol_type = other RNA
agactgctcgacatggatggcatcattgtggagaag

SEQ ID NO: 64342 - RNA, 27 nt, synthetic construct
  misc_feature 1..27: note = Oxidation resistance protein 1 (21-37)
  source 1..27: mol_type = other RNA
agactgctcgacagcgagatcaagctt

SEQ ID NO: 64343 - RNA, 30 nt, synthetic construct
  misc_feature 1..30: note = Mucosa-associated lymphoid tissue lymphoma translocation protein 1 (834-843)
  source 1..30: mol_type = other RNA
agactgctcgaggacaagaaaatcaccgtg

SEQ ID NO: 64344 - RNA, 33 nt, synthetic construct
  misc_feature 1..33: note = Condensin-2 complex subunit D3 (225-235)
  source 1..33: mol_type = other RNA
agactgctccccaagttcagccttaaagagaag

SEQ ID NO: 64345 - RNA, 30 nt, synthetic construct
  misc_feature 1..30: note = Uridine-cytidine kinase-like 1 (31-40)
  source 1..30: mol_type = other RNA
agactgctcccccctgtgggcaccgggagg

SEQ ID NO: 64346 - RNA, 30 nt, synthetic construct
  misc_feature 1..30: note = Lymphokine-activated killer T-cell-originated protein kinase (81-90)
  source 1..30: mol_type = other RNA
agactgatggacgaggccaagatcctcaaa

SEQ ID NO: 64347 - RNA, 27 nt, synthetic construct
  misc_feature 1..27: note = GCN1 general control of amino-acid synthesis 1-like 1 (961-969)
  source 1..27: mol_type = other RNA
agactgatggagatctaccaggaaaag

SEQ ID NO: 64348 - RNA, 27 nt, synthetic construct
  misc_feature 1..27: note = RILP-like protein 1 (200-208)
  source 1..27: mol_type = other RNA
agactgatgaagatcaaccacgacctc

SEQ ID NO: 64349 - RNA, 27 nt, synthetic construct
  misc_feature 1..27: note = Sperm-specific antigen 2 (294-302)
  source 1..27: mol_type = other RNA
agactgatgaagaccctcagcaaactt

SEQ ID NO: 64350 - RNA, 27 nt, synthetic construct
  misc_feature 1..27: note = Glyoxylate reductase/hydroxypyruvate reductase (5-13)
  source 1..27: mol_type = other RNA
agactgatgaaggtgttcgtcaccagg

SEQ ID NO: 64351 - RNA, 27 nt, synthetic construct
  misc_feature 1..27: note = Bombesin receptor-activated protein C6orf89 (119-127)
  source 1..27: mol_type = other RNA
agactgatgagcctccccatcgccaag

SEQ ID NO: 64352 - RNA, 30 nt, synthetic construct
  misc_feature 1..30: note = Fibronectin type-III domain-containing protein 3A (948-957)
  source 1..30: mol_type = other RNA
agactgaacgagagcacctcctacaagttc

SEQ ID NO: 64353 - RNA, 27 nt, synthetic construct
  misc_feature 1..27: note = DNA damage-binding protein 1 (1057-1065)
  source 1..27: mol_type = other RNA
agactgaacaaggtgatcaaaagcgtc

SEQ ID NO: 64354 - RNA, 30 nt, synthetic construct
  misc_feature 1..30: note = Serine/threonine-protein phosphatase 2A 56 kDa regulatory subunit delta isoform (408-417)
  source 1..30: mol_type = other RNA
agactgaacccccagtaccctatgttcagg

SEQ ID NO: 64355 - RNA, 27 nt, synthetic construct
  misc_feature 1..27: note = Tuberin (712-720)
  source 1..27: mol_type = other RNA
agactgcccgagagcctcaggtacaag

SEQ ID NO: 64356 - RNA, 27 nt, synthetic construct
  misc_feature 1..27: note = Poly (ADP-ribose) polymerase 10 (221-229)
  source 1..27: mol_type = other RNA
agactgcccggccctctcgggaccgtg

SEQ ID NO: 64357 - RNA, 30 nt, synthetic construct
  misc_feature 1..30: note = Lipase maturation factor 1 (191-200)
  source 1..30: mol_type = other RNA
agactgccccagcacacccctacaagcagg

SEQ ID NO: 64358 - RNA, 27 nt, synthetic construct
  misc_feature 1..27: note = ER membrane protein complex subunit 7 (133-141)
  source 1..27: mol_type = other RNA
agactgccctaccctctccagatgaag

SEQ ID NO: 64359 - RNA, 30 nt, synthetic construct
  misc_feature 1..30: note = Guanine nucleotide-binding protein G(s) subunit alpha isoforms short (255-264)
  source 1..30: mol_type = other RNA
agactgcaggaggccctcaaccttttcaag

SEQ ID NO: 64360 - RNA, 27 nt, synthetic construct
  misc_feature 1..27: note = Syntaxin-18 (265-273)
  source 1..27: mol_type = other RNA
agactgcaggagatcttcaccgaaaag

SEQ ID NO: 64361 - RNA, 27 nt, synthetic construct
  misc_feature 1..27: note = Pyridoxal-dependent decarboxylase domain-containing protein 1 (365-373)
  source 1..27: mol_type = other RNA
agactgcaggagagcctcaagaaagtg

SEQ ID NO: 64362 - RNA, 30 nt, synthetic construct
  misc_feature 1..30: note = Serine/threonine-protein kinase SIK2 (468-477)
  source 1..30: mol_type = other RNA
agactgcagaagcccagcctcctttccaaa

SEQ ID NO: 64363 - RNA, 27 nt, synthetic construct
  misc_feature 1..27: note = ELAV-like protein 1 (85-93)
  source 1..27: mol_type = other RNA
agactgcagagcaagaccatcaaagtg

SEQ ID NO: 64364 - RNA, 27 nt, synthetic construct
  misc_feature 1..27: note = E3 ubiquitin-protein ligase UBR5 (21-29)
  source 1..27: mol_type = other RNA
agactgagggaggtgagcgaaaagctc

SEQ ID NO: 64365 - RNA, 27 nt, synthetic construct
  misc_feature 1..27: note = Pituitary tumor-transforming gene 1 protein-interacting protein (14-22)
  source 1..27: mol_type = other RNA
agactgaggctcggcggggccgctctt

SEQ ID NO: 64366 - RNA, 27 nt, synthetic construct
  misc_feature 1..27: note = Serine/arginine-rich splicing factor 6 (8-16)
  source 1..27: mol_type = other RNA
agactgagctacaacgtgagggagaag

SEQ ID NO: 64367 - RNA, 30 nt, synthetic construct
  misc_feature 1..30: note = DNA mismatch repair protein Mlh1 (265-274)
  source 1..30: mol_type = other RNA
agactggtggagagcacctccctcaggaag

SEQ ID NO: 64368 - RNA, 30 nt, synthetic construct
  misc_feature 1..30: note = E3 SUMO-protein ligase RanBP2 (170-179)
  source 1..30: mol_type = other RNA
agactggtggaggtctacaggagcaccaag

SEQ ID NO: 64369 - RNA, 27 nt, synthetic construct
  misc_feature 1..27: note = V-type proton ATPase subunit E 2 (44-52)
  source 1..27: mol_type = other RNA
agactggtgcagacccaaaggctcaag

SEQ ID NO: 64370 - RNA, 27 nt, synthetic construct
  misc_feature 1..27: note = Sterol regulatory element-binding protein 2 (632-640)
  source 1..27: mol_type = other RNA
agactggtgaggtggctccttaagaaa

SEQ ID NO: 64371 - RNA, 27 nt, synthetic construct
  misc_feature 1..27: note = Protein disulfide-isomerase A3 (115-123)
  source 1..27: mol_type = other RNA
agactgtggcacatccagagcaagaaa

SEQ ID NO: 64372 - RNA, 27 nt, synthetic construct
  misc_feature 1..27: note = Transducin beta-like protein 3 (102-110)
  source 1..27: mol_type = other RNA
agactgtggaaggccatccacaccgct

SEQ ID NO: 64373 - RNA, 30 nt, synthetic construct
  misc_feature 1..30: note = GRAM domain-containing protein 1B (198-207)
  source 1..30: mol_type = other RNA
agactgtggcagaacgccctccttgagaag

SEQ ID NO: 64374 - RNA, 30 nt, synthetic construct
  misc_feature 1..30: note = Inositol 1,4,5-trisphosphate receptor type 3 (801-810)
  source 1..30: mol_type = other RNA
agactgtggaccgagatccccacagccatt

SEQ ID NO: 64375 - RNA, 27 nt, synthetic construct
  misc_feature 1..27: note = Annexin A5 (89-97)
  source 1..27: mol_type = other RNA
agactgtacgacgcctatgagctcaag

SEQ ID NO: 64376 - RNA, 30 nt, synthetic construct
  misc_feature 1..30: note = DNA damage-binding protein 1 (134-143)
  source 1..30: mol_type = other RNA
agactgtacgacggcctcttcaaggtgatc

SEQ ID NO: 64377 - RNA, 27 nt, synthetic construct
  misc_feature 1..27: note = Nesprin-1 (318-326)
  source 1..27: mol_type = other RNA
agactgtacgacctccccgccaagagg

SEQ ID NO: 64378 - RNA, 27 nt, synthetic construct
  misc_feature 1..27: note = Annexin A2 (273-281)
  source 1..27: mol_type = other RNA
agactgtacgacagcatgaagggcaaa

SEQ ID NO: 64379 - RNA, 27 nt, synthetic construct
  misc_feature 1..27: note = DNA topoisomerase 3-alpha (407-415)
  source 1..27: mol_type = other RNA
agactgtacgagttcatcgtgaggcac

SEQ ID NO: 64380 - RNA, 27 nt, synthetic construct
  misc_feature 1..27: note = Glutamine-tRNA ligase (679-687)
  source 1..27: mol_type = other RNA
agactgtacgagaggctcttccagcac

SEQ ID NO: 64381 - RNA, 36 nt, synthetic construct
  misc_feature 1..36: note = Eukaryotic translation initiation factor 3 subunit A (172-183)
  source 1..36: mol_type = other RNA
agactgtaccacgacatcgcccagcaagctttcaag

SEQ ID NO: 64382 - RNA, 27 nt, synthetic construct
  misc_feature 1..27: note = GPI transamidase component PIG-T (503-511)
  source 1..27: mol_type = other RNA
agactgtacaccgagcccctccttgtg

SEQ ID NO: 64383 - RNA, 27 nt, synthetic construct
  misc_feature 1..27: note = 2-hydroxyacyl-CoA lyase 1 (135-143)
  source 1..27: mol_type = other RNA
agactgtacaccaagttcagcgccagg

SEQ ID NO: 64384 - RNA, 24 nt, synthetic construct
  misc_feature 1..24: note = Uncharacterized protein (677-684)
  source 1..24: mol_type = other RNA
agactgtacgtgggcagggagaag

SEQ ID NO: 64385 - RNA, 27 nt, synthetic construct
  misc_feature 1..27: note = Protein sel-1 homolog 3 (282-290)
  source 1..27: mol_type = other RNA
agaatggactaccccgtgttcaccgtc

SEQ ID NO: 64386 - RNA, 33 nt, synthetic construct
  misc_feature 1..33: note = Vimentin (13-23)
  source 1..33: mol_type = other RNA
agaatgttcggcgggcccggaaccgccagcagg

SEQ ID NO: 64387 - RNA, 27 nt, synthetic construct
  misc_feature 1..27: note = Dynamin-1 (271-279)
  source 1..27: mol_type = other RNA
agaatgggcaccccctacctgcagaag

SEQ ID NO: 64388 - RNA, 27 nt, synthetic construct
  misc_feature 1..27: note = Eukaryotic translation initiation factor 3 subunit C-like protein (709-717)
  source 1..27: mol_type = other RNA
agaatgatcagcaagcagttccaccat

SEQ ID NO: 64389 - RNA, 30 nt, synthetic construct
  misc_feature 1..30: note = Protein FAM208B (229-238)
  source 1..30: mol_type = other RNA
agaatgaaggaccccaccttcctgggcaaa

SEQ ID NO: 64390 - RNA, 30 nt, synthetic construct
  misc_feature 1..30: note = UPF0585 protein C16orf13 (168-177)
  source 1..30: mol_type = other RNA
agaatggtggacatgcccgccaacaataag

SEQ ID NO: 64391 - RNA, 27 nt, synthetic construct
  misc_feature 1..27: note = 60S ribosomal protein L13a (117-125)
  source 1..27: mol_type = other RNA
agaatggtggtccccgccgctctgaag

SEQ ID NO: 64392 - RNA, 27 nt, synthetic construct
  misc_feature 1..27: note = Cytoplasmic FMR1-interacting protein 1 (286-294)
  source 1..27: mol_type = other RNA
agaatgtacctgacccccagcgagaag

SEQ ID NO: 64393 - RNA, 30 nt, synthetic construct
  misc_feature 1..30: note = Phosphatidate cytidylyltransferase 2 (307-316)
  source 1..30: mol_type = other RNA
agaatgtaccccttccagatccacagcatt

SEQ ID NO: 64394 - RNA, 27 nt, synthetic construct
  misc_feature 1..27: note = RNA cytidine acetyltransferase (629-637)
  source 1..27: mol_type = other RNA
agacccgccgagaggctggactacctc

SEQ ID NO: 64395 - RNA, 27 nt, synthetic construct
  misc_feature 1..27: note = Cell division cycle protein 23 homolog (423-431)
  source 1..27: mol_type = other RNA
agacccaacgacagcaggatgctggtg

SEQ ID NO: 64396 - RNA, 27 nt, synthetic construct
  misc_feature 1..27: note = Transgelin-2 (44-52)
  source 1..27: mol_type = other RNA
agaccccagcctggcagggagaacttc

SEQ ID NO: 64397 - RNA, 30 nt, synthetic construct
  misc_feature 1..30: note = Myosin regulatory light polypeptide 9 (14-23)
  source 1..30: mol_type = other RNA
agaccccagagggccaccagcaacgtgttc

SEQ ID NO: 64398 - RNA, 27 nt, synthetic construct
  misc_feature 1..27: note = Pre-mRNA-splicing factor SYF1 (370-378)
  source 1..27: mol_type = other RNA
agacccagggagatcattaacacctac

SEQ ID NO: 64399 - RNA, 30 nt, synthetic construct
  misc_feature 1..30: note = Trafficking protein particle complex subunit 4 (100-109)
  source 1..30: mol_type = other RNA
agacccaggctgaccagcaacgagaagctc

SEQ ID NO: 64400 - RNA, 30 nt, synthetic construct
  misc_feature 1..30: note = Cytochrome c oxidase assembly factor 3 homolog, mitochondrial (39-48)
  source 1..30: mol_type = other RNA
agacaggccgagctggctcaatggcagaag

SEQ ID NO: 64401 - RNA, 27 nt, synthetic construct
  misc_feature 1..27: note = Focal adhesion kinase 1 (476-484)
  source 1..27: mol_type = other RNA
agacagttcgaccacccccatatcgtg

SEQ ID NO: 64402 - RNA, 33 nt, synthetic construct
  misc_feature 1..33: note = Acidic fibroblast growth factor intracellular-binding protein (136-146)
  source 1..33: mol_type = other RNA
agacagttcgacaactttaagagggtgttcaaa

SEQ ID NO: 64403 - RNA, 33 nt, synthetic construct
  misc_feature 1..33: note = MICOS complex subunit MIC19 (130-140)
  source 1..33: mol_type = other RNA
agacagctggaggaaaaggacagggtgctcaaa

SEQ ID NO: 64404 - RNA, 33 nt, synthetic construct
  misc_feature 1..33: note = 40S ribosomal protein S29 (44-54)
  source 1..33: mol_type = other RNA
agacagtacgccaaggacatcggcttcattaaa

SEQ ID NO: 64405 - RNA, 30 nt, synthetic construct
  misc_feature 1..30: note = F-box only protein 33 (21-30)
  source 1..30: mol_type = other RNA
agacagtacgacaagttcctgacccacttt

SEQ ID NO: 64406 - RNA, 27 nt, synthetic construct
  misc_feature 1..27: note = SH2B adapter protein 1 (560-568)
  source 1..27: mol_type = other RNA
agaaggggcgagtacgtgctgaccttc

SEQ ID NO: 64407 - RNA, 27 nt, synthetic construct
  misc_feature 1..27: note = Multivesicular body subunit 12A (198-206)
  source 1..27: mol_type = other RNA
agaaggaacgacagcatctacgaggcc

SEQ ID NO: 64408 - RNA, 27 nt, synthetic construct
  misc_feature 1..27: note = Chloride intracellular channel protein 1 (50-58)
  source 1..27: mol_type = other RNA
agaaggaccgagacagtgcagaagctg

SEQ ID NO: 64409 - RNA, 27 nt, synthetic construct
  misc_feature 1..27: note = Eukaryotic translation initiation factor 3 subunit L (327-335)
  source 1..27: mol_type = other RNA
agaaggtaccaggacgccatccgggtg

SEQ ID NO: 64410 - RNA, 27 nt, synthetic construct
  misc_feature 1..27: note = Breast cancer metastasis-suppressor 1-like protein (255-263)
  source 1..27: mol_type = other RNA
agaagcgaggaaggcaggctgtactat

SEQ ID NO: 64411 - RNA, 33 nt, synthetic construct
  misc_feature 1..33: note = Putative protein N-methyltransferase FAM86B1 (27-37)
  source 1..33: mol_type = other RNA
agaagcttcccctggcagtccctggaggccaag

SEQ ID NO: 64412 - RNA, 33 nt, synthetic construct
  misc_feature 1..33: note = Dual specificity protein kinase CLK1 (60-70)
  source 1..33: mol_type = other RNA
agaagcatcaacgagaaggactaccactccagg

SEQ ID NO: 64413 - RNA, 33 nt, synthetic construct
  misc_feature 1..33: note = Transmembrane protein 209 (277-287)
  source 1..33: mol_type = other RNA
agaagcatgggcgactacgcccagaccctgaag

SEQ ID NO: 64414 - RNA, 27 nt, synthetic construct
  misc_feature 1..27: note = Annexin A11 (302-310)
  source 1..27: mol_type = other RNA
agaagcaacgagcacatcagggaactg

SEQ ID NO: 64415 - RNA, 27 nt, synthetic construct
  misc_feature 1..27: note = Cullin-associated NEDD8-dissociated protein 1 (758-766)
  source 1..27: mol_type = other RNA
agaagcaccgactccatcaggctgctc

SEQ ID NO: 64416 - RNA, 27 nt, synthetic construct
  misc_feature 1..27: note = Non-structural maintenance of chromosomes element 4 homolog A (203-211)
  source 1..27: mol_type = other RNA
agaaccgccgagaacacattcaataag

SEQ ID NO: 64417 - RNA, 33 nt, synthetic construct
  misc_feature 1..33: note = Nephrocystin-1 (181-191)
  source 1..33: mol_type = other RNA
agaaccgacccccactggagcgccgtgcagaag

SEQ ID NO: 64418 - RNA, 30 nt, synthetic construct
  misc_feature 1..30: note = Arginine-glutamic acid dipeptide repeats protein (74-83)
  source 1..30: mol_type = other RNA
agaaccgacacaggcgagatcactagctac

SEQ ID NO: 64419 - RNA, 33 nt, synthetic construct
  misc_feature 1..33: note = Ectonucleoside triphosphate diphosphohydrolase 6 (319-329)
  source 1..33: mol_type = other RNA
agaaccgaggaagtgaagcacgtcgacttctac

SEQ ID NO: 64420 - RNA, 36 nt, synthetic construct
  misc_feature 1..36: note = Protein LSM12 homolog (95-106)
  source 1..36: mol_type = other RNA
agaaccgagaaggaagagaaactgagccaggcctac

SEQ ID NO: 64421 - RNA, 30 nt, synthetic construct
  misc_feature 1..30: note = Tubulin-tyrosine ligase-like protein 12 (394-403)
  source 1..30: mol_type = other RNA
agaaccgagctgccccagttcgtgagctac

SEQ ID NO: 64422 - RNA, 27 nt, synthetic construct
  misc_feature 1..27: note = A-kinase anchor protein 13 (994-1002)
  source 1..27: mol_type = other RNA
agaaccttcagctacatcaagaacaaa

SEQ ID NO: 64423 - RNA, 36 nt, synthetic construct
  misc_feature 1..36: note = Biogenesis of lysosome-related organelles complex 1 subunit 1 (106-117)
  source 1..36: mol_type = other RNA
agaaccatcgccacagctctggagtacgtgtataag

SEQ ID NO: 64424 - RNA, 27 nt, synthetic construct
  misc_feature 1..27: note = WASH complex subunit 7 (330-338)
  source 1..27: mol_type = other RNA
agaaccatcgacaagaaattctacaag

SEQ ID NO: 64425 - RNA, 27 nt, synthetic construct
  misc_feature 1..27: note = Leucine-rich repeat-containing protein 57 (41-49)
  source 1..27: mol_type = other RNA
agaaccatcgacctgagcaacaataag

SEQ ID NO: 64426 - RNA, 36 nt, synthetic construct
  misc_feature 1..36: note = DNA damage-binding protein 2 (181-192)
  source 1..36: mol_type = other RNA
agaaccatcgacgtgttcgatggcaacagcgggaag

SEQ ID NO: 64427 - RNA, 33 nt, synthetic construct
  misc_feature 1..33: note = F-box only protein 25 (19-29)
  source 1..33: mol_type = other RNA
agaaccatcctggagatgacacagattctcaag

SEQ ID NO: 64428 - RNA, 33 nt, synthetic construct
  misc_feature 1..33: note = DDB1- and CUL4-associated factor 4 (390-400)
  source 1..33: mol_type = other RNA
agaaccatccccagcccttacccagcctccaag

SEQ ID NO: 64429 - RNA, 27 nt, synthetic construct
  misc_feature 1..27: note = Protein CEBPZOS (3-11)
  source 1..27: mol_type = other RNA
agaaccctggagcccctcgccaagaaa

SEQ ID NO: 64430 - RNA, 36 nt, synthetic construct
  misc_feature 1..36: note = Solute carrier family 22 member 18 (377-388)
  source 1..36: mol_type = other RNA
agaaccctgggccccacagtggggggactcctttac

SEQ ID NO: 64431 - RNA, 27 nt, synthetic construct
  misc_feature 1..27: note = Coatomer subunit gamma-2 (309-317)
  source 1..27: mol_type = other RNA
agaaccctgaacaaggtggccatgaaa

SEQ ID NO: 64432 - RNA, 36 nt, synthetic construct
  misc_feature 1..36: note = Nuclear factor 1 C-type (82-93)
  source 1..36: mol_type = other RNA
agaaccctgcccagcacatcctcttcaggcagtaag

SEQ ID NO: 64433 - RNA, 27 nt, synthetic construct
  misc_feature 1..27: note = Pinin (6-14)
  source 1..27: mol_type = other RNA
agaaccctgcaggagcaactcgaaaag

SEQ ID NO: 64434 - RNA, 33 nt, synthetic construct
  misc_feature 1..33: note = Ornithine decarboxylase antizyme 1 (32-42)
  source 1..33: mol_type = other RNA
agaaccatgcccctgctcagccttcactccagg

SEQ ID NO: 64435 - RNA, 27 nt, synthetic construct
  misc_feature 1..27: note = 2,4-dienoyl-CoA reductase, mitochondrial (33-41)
  source 1..27: mol_type = other RNA
agaaccaacttctttagcaattggaag

SEQ ID NO: 64436 - RNA, 27 nt, synthetic construct
  misc_feature 1..27: note = Endoplasmic reticulum-Golgi intermediate compartment protein 3 (297-305)
  source 1..27: mol_type = other RNA
agaaccaaccagttcagcgtgacaagg

SEQ ID NO: 64437 - RNA, 27 nt, synthetic construct
  misc_feature 1..27: note = RNA-binding protein 26 (515-523)
  source 1..27: mol_type = other RNA
agaaccaacagccccggcttccagaag

SEQ ID NO: 64438 - RNA, 30 nt, synthetic construct
  misc_feature 1..30: note = Breast cancer type 2 susceptibility protein (2034-2043)
  source 1..30: mol_type = other RNA
agaacccccgagcacctgatcagccagaag

SEQ ID NO: 64439 - RNA, 27 nt, synthetic construct
  misc_feature 1..27: note = Short transient receptor potential channel 4-associated protein (364-372)
  source 1..27: mol_type = other RNA
agaacccagctgccccaaagcatgaag

SEQ ID NO: 64440 - RNA, 33 nt, synthetic construct
  misc_feature 1..33: note = Signal recognition particle 14 kDa protein (21-31)
  source 1..33: mol_type = other RNA
agaaccagcggctccgtgtacatcacactgaag

SEQ ID NO: 64441 - RNA, 27 nt, synthetic construct
  misc_feature 1..27: note = Histone-lysine N-methyltransferase 2A (1655-1663)
  source 1..27: mol_type = other RNA
agaaccacaagccacctgctcaggtac

SEQ ID NO: 64442 - RNA, 30 nt, synthetic construct
  misc_feature 1..30: note = Diphosphoinositol polyphosphate phosphohydrolase 3-alpha (9-18)
  source 1..30: mol_type = other RNA
agaacctacgaccccgagggcttcaagaaa

SEQ ID NO: 64443 - RNA, 33 nt, synthetic construct
  misc_feature 1..33: note = Transcription factor p65 (287-297)
  source 1..33: mol_type = other RNA
agaacctacgagacattcaagagcatcatgaaa

SEQ ID NO: 64444 - RNA, 30 nt, synthetic construct
  misc_feature 1..30: note = Ras and Rab interactor 1 (442-451)
  source 1..30: mol_type = other RNA
agaacctacagcccctccgcccaggtgaag

SEQ ID NO: 64445 - RNA, 33 nt, synthetic construct
  misc_feature 1..33: note = Ras and Rab interactor 1 (442-452)
  source 1..33: mol_type = other RNA
agaacctacagcccctccgcccaggtgaagagg

SEQ ID NO: 64446 - RNA, 33 nt, synthetic construct
  misc_feature 1..33: note = Acyl-CoA dehydrogenase family member 10 (557-567)
  source 1..33: mol_type = other RNA
agagtggccgctatcctgcagggcgtctacaag

SEQ ID NO: 64447 - RNA, 33 nt, synthetic construct
  misc_feature 1..33: note = Cytochrome c oxidase subunit 7A-related protein, mitochondrial (26-36)
  source 1..33: mol_type = other RNA
agagtggcccccggccagctggggcacgagaag

SEQ ID NO: 64448 - RNA, 27 nt, synthetic construct
  misc_feature 1..27: note = E3 ubiquitin-protein ligase TRIP12 (1581-1589)
  source 1..27: mol_type = other RNA
agagtggcccccaggctggaccggaag

SEQ ID NO: 64449 - RNA, 33 nt, synthetic construct
  misc_feature 1..33: note = Coiled-coil domain-containing protein 115 (34-44)
  source 1..33: mol_type = other RNA
agagtggaggaaggctggctgagcctcgccaag

SEQ ID NO: 64450 - RNA, 27 nt, synthetic construct
  misc_feature 1..27: note = Serine/threonine-protein kinase B-raf (158-166)
  source 1..27: mol_type = other RNA
agagtgttcctgcccaacaagcagagg

SEQ ID NO: 64451 - RNA, 33 nt, synthetic construct
  misc_feature 1..33: note = Coatomer subunit gamma-1 (32-42)
  source 1..33: mol_type = other RNA
agagtgttcaacgagacccccatcaatcctagg

SEQ ID NO: 64452 - RNA, 27 nt, synthetic construct
  misc_feature 1..27: note = Arf-GAP with GTPase, ANK repeat and PH domain-containing protein 3 (240-248)
  source 1..27: mol_type = other RNA
agagtgttccaggacgtcgcccaaaag

SEQ ID NO: 64453 - RNA, 30 nt, synthetic construct
  misc_feature 1..30: note = 28S ribosomal protein S15, mitochondrial (238-247)
  source 1..30: mol_type = other RNA
agagtgttccaggagacccaaaagctgaaa

SEQ ID NO: 64454 - RNA, 33 nt, synthetic construct
  misc_feature 1..33: note = 28S ribosomal protein S15, mitochondrial (238-248)
  source 1..33: mol_type = other RNA
agagtgttccaggagacccaaaagctgaaaaag

SEQ ID NO: 64455 - RNA, 27 nt, synthetic construct
  misc_feature 1..27: note = EH domain-containing protein 2 (305-313)
  source 1..27: mol_type = other RNA
agagtgcacgcctacatcattagctat

SEQ ID NO: 64456 - RNA, 30 nt, synthetic construct
  misc_feature 1..30: note = L-lactate dehydrogenase A chain (269-278)
  source 1..30: mol_type = other RNA
agagtgcaccccgtcagcaccatgatcaag

SEQ ID NO: 64457 - RNA, 30 nt, synthetic construct
  misc_feature 1..30: note = E3 ubiquitin-protein ligase NEDD4 (24-33)
  source 1..30: mol_type = other RNA
agagtgatcgccggcattgggctggctaag

SEQ ID NO: 64458 - RNA, 27 nt, synthetic construct
  misc_feature 1..27: note = 60S ribosomal protein L3 (156-164)
  source 1..27: mol_type = other RNA
agagtgatcgcccacacccagatgagg

SEQ ID NO: 64459 - RNA, 27 nt, synthetic construct
  misc_feature 1..27: note = Lon protease homolog 2, peroxisomal (241-249)
  source 1..27: mol_type = other RNA
agagtgatcgccattaggcccatacgg

SEQ ID NO: 64460 - RNA, 27 nt, synthetic construct
  misc_feature 1..27: note = Ran GTPase-activating protein 1 (67-75)
  source 1..27: mol_type = other RNA
agagtgatcgccaaggctctggagaaa

SEQ ID NO: 64461 - RNA, 30 nt, synthetic construct
  misc_feature 1..30: note = SAFB-like transcription modulator (26-35)
  source 1..30: mol_type = other RNA
agagtgatcgacctgaagagcgagctcaaa

SEQ ID NO: 64462 - RNA, 33 nt, synthetic construct
  misc_feature 1..33: note = Histone-binding protein RBBP7 (58-68)
  source 1..33: mol_type = other RNA
agagtgatcaacgaggaatacaagatttggaaa

SEQ ID NO: 64463 - RNA, 27 nt, synthetic construct
  misc_feature 1..27: note = Pumilio homolog 2 (311-319)
  source 1..27: mol_type = other RNA
agagtgatccagaggattctggagcac

SEQ ID NO: 64464 - RNA, 33 nt, synthetic construct
  misc_feature 1..33: note = 60S ribosomal protein L13 (167-177)
  source 1..33: mol_type = other RNA
agagtgatcaccgaggaagagaagaacttcaaa

SEQ ID NO: 64465 - RNA, 36 nt, synthetic construct
  misc_feature 1..36: note = Cullin-4A (273-284)
  source 1..36: mol_type = other RNA
agagtgatcacctacctggaccacagcacacagaag

SEQ ID NO: 64466 - RNA, 30 nt, synthetic construct
  misc_feature 1..30: note = COX assembly mitochondrial protein 2 homolog (63-72)
  source 1..30: mol_type = other RNA
agagtgatcgtcacccacggcagcctgaag

SEQ ID NO: 64467 - RNA, 36 nt, synthetic construct
  misc_feature 1..36: note = Guanine nucleotide-binding protein G(I)/G(S)/G(O) subunit gamma-5 (25-36)
  source 1..36: mol_type = other RNA
agagtgaaggtcagccaggccgctgcagacctgaaa

SEQ ID NO: 64468 - RNA, 33 nt, synthetic construct
  misc_feature 1..33: note = Monofunctional C1-tetrahydrofolate synthase, mitochondrial (497-507)
  source 1..33: mol_type = other RNA
agagtgctggacaccaacgataggttcctccgg

SEQ ID NO: 64469 - RNA, 27 nt, synthetic construct
  misc_feature 1..27: note = 3-hydroxybutyrate dehydrogenase type 2 (55-63)
  source 1..27: mol_type = other RNA
agagtgctggacgtcaccaagaaaaag

SEQ ID NO: 64470 - RNA, 30 nt, synthetic construct
  misc_feature 1..30: note = Cysteine-rich with EGF-like domain protein 1 (411-420)
  source 1..30: mol_type = other RNA
agagtgctggagggcttcatcaaggggagg

SEQ ID NO: 64471 - RNA, 36 nt, synthetic construct
  misc_feature 1..36: note = Serine hydroxymethyltransferase, mitochondrial (374-385)
  source 1..36: mol_type = other RNA
agagtgctggagctcgtcagcatcaccgccaacaag

SEQ ID NO: 64472 - RNA, 36 nt, synthetic construct
  misc_feature 1..36: note = Lon protease homolog 2, peroxisomal (308-319)
  source 1..36: mol_type = other RNA
agagtgctggagtacctcgccgtcaggcagcttaag

SEQ ID NO: 64473 - RNA, 27 nt, synthetic construct
  misc_feature 1..27: note = Focadhesin (1784-1792)
  source 1..27: mol_type = other RNA
agagtgctgcccgagttcaagaaaaag

SEQ ID NO: 64474 - RNA, 33 nt, synthetic construct
  misc_feature 1..33: note = Zinc finger MYM-type protein 1 (867-877)
  source 1..33: mol_type = other RNA
agagtgctgagcgtcaccggcatcctctccaag

SEQ ID NO: 64475 - RNA, 27 nt, synthetic construct
  misc_feature 1..27: note = Exostosin-like 2 (12-20)
  source 1..27: mol_type = other RNA
agagtgatgggcatcagggtcctgcgg

SEQ ID NO: 64476 - RNA, 33 nt, synthetic construct
  misc_feature 1..33: note = Inner centromere protein (907-917)
  source 1..33: mol_type = other RNA
agagtgcccagctccctggcctactctctcaag

SEQ ID NO: 64477 - RNA, 30 nt, synthetic construct
  misc_feature 1..30: note = DNA topoisomerase I, mitochondrial (376-385)
  source 1..30: mol_type = other RNA
agagtgcccgtcgagaagcctgtttacaaa

SEQ ID NO: 64478 - RNA, 27 nt, synthetic construct
  misc_feature 1..27: note = 6-phosphofructo-2-kinase/fructose-2,6-bisphosphatase 3 (43-51)
  source 1..27: mol_type = other RNA
agagtgcaggaccacatccaaagcagg

SEQ ID NO: 64479 - RNA, 30 nt, synthetic construct
  misc_feature 1..30: note = Melanoma inhibitory activity protein 3 (1184-1193)
  source 1..30: mol_type = other RNA
agagtgcaggaggaaaacgccaggctgaag

SEQ ID NO: 64480 - RNA, 27 nt, synthetic construct
  misc_feature 1..27: note = DNA replication licensing factor MCM3 (234-242)
  source 1..27: mol_type = other RNA
agagtgcaggtcgttggcacctacagg

SEQ ID NO: 64481 - RNA, 42 nt, synthetic construct
  misc_feature 1..42: note = LysM and putative peptidoglycan-binding domain-containing protein 2 (74-87)
  source 1..42: mol_type = other RNA
agagtgagggccggcgacaccctgcaggggatcgctctcaag

SEQ ID NO: 64482 - RNA, 33 nt, synthetic construct
  misc_feature 1..33: note = Galectin-1 (11-21)
  source 1..33: mol_type = other RNA
agagtgaggggcgaggtcgcccccgacgctaag

SEQ ID NO: 64483 - RNA, 27 nt, synthetic construct
  misc_feature 1..27: note = Protein phosphatase methylesterase 1 (228-236)
  source 1..27: mol_type = other RNA
agagtgagcatggtcggccaggttaag

SEQ ID NO: 64484 - RNA, 30 nt, synthetic construct
  misc_feature 1..30: note = SLAIN motif-containing protein 2 (375-384)
  source 1..30: mol_type = other RNA
agagtgagcccccagcctatgatctccagg

SEQ ID NO: 64485 - RNA, 27 nt, synthetic construct
  misc_feature 1..27: note = RNA-binding protein Raly (133-141)
  source 1..27: mol_type = other RNA
agagtgaccgtccccctggttaggcgg

SEQ ID NO: 64486 - RNA, 27 nt, synthetic construct
  misc_feature 1..27: note = 5'-AMP-activated protein kinase subunit gamma-1 (236-244)
  source 1..27: mol_type = other RNA
agagtggtcgacatctacagcaagttc

SEQ ID NO: 64487 - RNA, 27 nt, synthetic construct
  misc_feature 1..27: note = Clathrin heavy chain 1 (903-911)
  source 1..27: mol_type = other RNA
agagtggtcggcaagtactgcgagaaa

SEQ ID NO: 64488 - RNA, 30 nt, synthetic construct
  misc_feature 1..30: note = Coatomer subunit alpha (160-169)
  source 1..30: mol_type = other RNA
agagtgtgggacatcagcggcctgaggaag

SEQ ID NO: 64489 - RNA, 27 nt, synthetic construct
  misc_feature 1..27: note = SWI/SNF complex subunit SMARCC1 (56-64)
  source 1..27: mol_type = other RNA
agagtgtggctgggcaagcactacaaa

SEQ ID NO: 64490 - RNA, 33 nt, synthetic construct
  misc_feature 1..33: note = Charged multivesicular body protein 1a (46-56)
  source 1..33: mol_type = other RNA
agagtgtacgccgagaacgctatcaggaagaaa

SEQ ID NO: 64491 - RNA, 30 nt, synthetic construct
  misc_feature 1..30: note = WD repeat-containing protein 74 (208-217)
  source 1..30: mol_type = other RNA
agagtgtacgaccccgccagccctcagagg

SEQ ID NO: 64492 - RNA, 30 nt, synthetic construct
  misc_feature 1..30: note = Protein Churchill (86-95)
  source 1..30: mol_type = other RNA
agagtgtaccacgccgtcagcgttatgagg

SEQ ID NO: 64493 - RNA, 27 nt, synthetic construct
  misc_feature 1..27: note = Cytochrome c oxidase assembly protein COX14 (33-41)
  source 1..27: mol_type = other RNA
agagtgtaccactatttccagtggagg

SEQ ID NO: 64494 - RNA, 33 nt, synthetic construct
  misc_feature 1..33: note = Uncharacterized protein KIAA1522 (239-249)
  source 1..33: mol_type = other RNA
agagtgtacagggacgataccttcgtcggccgg

SEQ ID NO: 64495 - RNA, 27 nt, synthetic construct
  misc_feature 1..27: note = Poly(U)-binding-splicing factor PUF60 (112-120)
  source 1..27: mol_type = other RNA
agagtgtacgtcggcagcatctattac

SEQ ID NO: 64496 - RNA, 27 nt, synthetic construct
  misc_feature 1..27: note = Adipocyte plasma membrane-associated protein (296-304)
  source 1..27: mol_type = other RNA
agagtgtacgtcagcggcctgatgaag

SEQ ID NO: 64497 - RNA, 33 nt, synthetic construct
  misc_feature 1..33: note = Histone-lysine N-methyltransferase 2A (2053-2063)
  source 1..33: mol_type = other RNA
agagtgtactggagcaccacagacgccaggaag

SEQ ID NO: 64498 - RNA, 33 nt, synthetic construct
  misc_feature 1..33: note = 60S ribosome subunit biogenesis protein NIP7 homolog (43-53)
  source 1..33: mol_type = other RNA
agagtgtactatgtcagcgagaagatcatgaaa

SEQ ID NO: 64499 - RNA, 27 nt, synthetic construct
  misc_feature 1..27: note = Kinesin-like protein KIF2C (467-475)
  source 1..27: mol_type = other RNA
agatacgccgacagggtgaaggagctg

SEQ ID NO: 64500 - RNA, 30 nt, synthetic construct
  misc_feature 1..30: note = Protein-cysteine N-palmitoyltransferase HHAT (337-346)
  source 1..30: mol_type = other RNA
agatacttcgacgtgggcctgcacaacttt

SEQ ID NO: 64501 - RNA, 27 nt, synthetic construct
  misc_feature 1..27: note = von Willebrand factor A domain-containing protein 8 (1836-1844)
  source 1..27: mol_type = other RNA
agatacggcatccaccccgccaagttc

SEQ ID NO: 64502 - RNA, 27 nt, synthetic construct
  misc_feature 1..27: note = Serine/threonine-protein kinase PLK2 (271-279)
  source 1..27: mol_type = other RNA
agatacatcgacacccacaacagggtg

SEQ ID NO: 64503 - RNA, 27 nt, synthetic construct
  misc_feature 1..27: note = Deoxyguanosine kinase, mitochondrial (148-156)
  source 1..27: mol_type = other RNA
agatacatcttcgccaagaacctgttt

SEQ ID NO: 64504 - RNA, 27 nt, synthetic construct
  misc_feature 1..27: note = Rho GTPase-activating protein 35 (208-216)
  source 1..27: mol_type = other RNA
agatacatcagggacgcccacaccttc

SEQ ID NO: 64505 - RNA, 27 nt, synthetic construct
  misc_feature 1..27: note = Structural maintenance of chromosomes protein 5 (245-253)
  source 1..27: mol_type = other RNA
agatacaagcaggacgtggagaggttc

SEQ ID NO: 64506 - RNA, 33 nt, synthetic construct
  misc_feature 1..33: note = Tumor suppressor candidate 3 (18-28)
  source 1..33: mol_type = other RNA
agatacctgcccaccggcagcttcccttttctc

SEQ ID NO: 64507 - RNA, 27 nt, synthetic construct
  misc_feature 1..27: note = Potassium voltage-gated channel subfamily G member 1 (168-176)
  source 1..27: mol_type = other RNA
agatacctgcagaagatcgaggaattc

SEQ ID NO: 64508 - RNA, 27 nt, synthetic construct
  misc_feature 1..27: note = Cell division cycle protein 16 homolog (320-328)
  source 1..27: mol_type = other RNA
agatacctgagcaaggccaccacactc

SEQ ID NO: 64509 - RNA, 27 nt, synthetic construct
  misc_feature 1..27: note = Histone-binding protein RBBP7 (130-138)
  source 1..27: mol_type = other RNA
agatacatgccccagaaccctcacatc

SEQ ID NO: 64510 - RNA, 27 nt, synthetic construct
  misc_feature 1..27: note = Kelch-like protein 24 (592-600)
  source 1..27: mol_type = other RNA
agatacaacgagaagtgcttcaaactg

SEQ ID NO: 64511 - RNA, 27 nt, synthetic construct
  misc_feature 1..27: note = Kelch-like protein 20 (478-486)
  source 1..27: mol_type = other RNA
agatacaaccccaggaccaatcagtgg

SEQ ID NO: 64512 - RNA, 27 nt, synthetic construct
  misc_feature 1..27: note = Thyroid transcription factor 1-associated protein 26 (88-96)
  source 1..27: mol_type = other RNA
agataccccgacaacctgaagcacctc

SEQ ID NO: 64513 - RNA, 30 nt, synthetic construct
  misc_feature 1..30: note = Thyroid transcription factor 1-associated protein 26 (88-97)
  source 1..30: mol_type = other RNA
agataccccgacaacctgaagcacctctat

SEQ ID NO: 64514 - RNA, 27 nt, synthetic construct
  misc_feature 1..27: note = Serine/threonine-protein phosphatase 4 catalytic subunit (103-111)
  source 1..27: mol_type = other RNA
agataccccgacaggatcaccctgatt

SEQ ID NO: 64515 - RNA, 27 nt, synthetic construct
  misc_feature 1..27: note = Lysophosphatidylcholine acyltransferase 1 (98-106)
  source 1..27: mol_type = other RNA
agataccccaacaagctggacaccatc

SEQ ID NO: 64516 - RNA, 30 nt, synthetic construct
  misc_feature 1..30: note = CCR4-NOT transcription complex subunit 1 (438-447)
  source 1..30: mol_type = other RNA
agataccccaacagccacacccattatttc

SEQ ID NO: 64517 - RNA, 27 nt, synthetic construct
  misc_feature 1..27: note = Uncharacterized protein C1orf43 (178-186)
  source 1..27: mol_type = other RNA
agataccaggaggccctgagcgaactc

SEQ ID NO: 64518 - RNA, 27 nt, synthetic construct
  misc_feature 1..27: note = YTH domain-containing protein 1 (550-558)
  source 1..27: mol_type = other RNA
agataccaggaggtggacaggcggttc

SEQ ID NO: 64519 - RNA, 27 nt, synthetic construct
  misc_feature 1..27: note = High affinity cationic amino acid transporter 1 (419-427)
  source 1..27: mol_type = other RNA
agataccagcccgagcaacctaacctg

SEQ ID NO: 64520 - RNA, 27 nt, synthetic construct
  misc_feature 1..27: note = Centrosomal protein of 89 kDa (331-339)
  source 1..27: mol_type = other RNA
agataccagaccaagttcaggcacctg

SEQ ID NO: 64521 - RNA, 27 nt, synthetic construct
  misc_feature 1..27: note = Leucine zipper putative tumor suppressor 1 (36-44)
  source 1..27: mol_type = other RNA
agatacagcgacggcctgctcaggttc

SEQ ID NO: 64522 - RNA, 27 nt, synthetic construct
  misc_feature 1..27: note = Myotubularin related protein 6 (594-602)
  source 1..27: mol_type = other RNA
agatacagcgagtatgccgaagagttc

SEQ ID NO: 64523 - RNA, 27 nt, synthetic construct
  misc_feature 1..27: note = Rap guanine nucleotide exchange factor 6 (57-65)
  source 1..27: mol_type = other RNA
agatacagcggcaaccaggtgctgttc

SEQ ID NO: 64524 - RNA, 27 nt, synthetic construct
  misc_feature 1..27: note = Cation-independent mannose-6-phosphate receptor (1582-1590)
  source 1..27: mol_type = other RNA
agatacgtggaccaggtcctgcaactc

SEQ ID NO: 64525 - RNA, 27 nt, synthetic construct
  misc_feature 1..27: note = Calpain-5 (466-474)
  source 1..27: mol_type = other RNA
agatacgtgatcattcccaccacattc

SEQ ID NO: 64526 - RNA, 27 nt, synthetic construct
  misc_feature 1..27: note = Histone-lysine N-methyltransferase EHMT2 (935-943)
  source 1..27: mol_type = other RNA
agatactatggcaacatcagcaggttc

SEQ ID NO: 64527 - RNA, 30 nt, synthetic construct
  misc_feature 1..30: note = Myosin-9 (104-113)
  source 1..30: mol_type = other RNA
agatactatagcggcctgatctacacctat

SEQ ID NO: 64528 - RNA, 27 nt, synthetic construct
  misc_feature 1..27: note = Fanconi anemia group C protein (413-421)
  source 1..27: mol_type = other RNA
agcgccgctgagccccctaccgcactg

SEQ ID NO: 64529 - RNA, 27 nt, synthetic construct
  misc_feature 1..27: note = V-type proton ATPase 16 kDa proteolipid subunit (20-28)
  source 1..27: mol_type = other RNA
agcgccgctatggtgttctccgcactg

SEQ ID NO: 64530 - RNA, 27 nt, synthetic construct
  misc_feature 1..27: note = Factor VIII intron 22 protein (251-259)
  source 1..27: mol_type = other RNA
agcgccgctccctcccctgcagccctg

SEQ ID NO: 64531 - RNA, 27 nt, synthetic construct
  misc_feature 1..27: note = Phosphoacetylglucosamine mutase (515-523)
  source 1..27: mol_type = other RNA
agcgccgaccacctggctcatgaggtg

SEQ ID NO: 64532 - RNA, 27 nt, synthetic construct
  misc_feature 1..27: note = Melanoma-associated antigen 1 (62-70)
  source 1..27: mol_type = other RNA
agcgccttccccaccacaatcaacttt

SEQ ID NO: 64533 - RNA, 27 nt, synthetic construct
  misc_feature 1..27: note = Multiple epidermal growth factor-like domains protein 8 (745-753)
  source 1..27: mol_type = other RNA
agcgccggccccgggcactccgagctg

SEQ ID NO: 64534 - RNA, 27 nt, synthetic construct
  misc_feature 1..27: note = AT-rich interactive domain-containing protein 2 (319-327)
  source 1..27: mol_type = other RNA
agcgcccactcccatttcatctctctg

SEQ ID NO: 64535 - RNA, 27 nt, synthetic construct
  misc_feature 1..27: note = ADP-ribosylation factor GTPase-activating protein 3 (167-175)
  source 1..27: mol_type = other RNA
agcgccatcgctgagccctcctctctg

SEQ ID NO: 64536 - RNA, 27 nt, synthetic construct
  misc_feature 1..27: note = Catenin alpha-1 (366-374)
  source 1..27: mol_type = other RNA
agcgccatcgacaagatgaccaaaaag

SEQ ID NO: 64537 - RNA, 27 nt, synthetic construct
  misc_feature 1..27: note = COBW domain-containing protein 5 (82-90)
  source 1..27: mol_type = other RNA
agcgccctggagaagtccctcgctgtg

SEQ ID NO: 64538 - RNA, 36 nt, synthetic construct
  misc_feature 1..36: note = Vimentin (42-53)
  source 1..36: mol_type = other RNA
agcgccctgagaccctccacctctaggtcactctac

SEQ ID NO: 64539 - RNA, 30 nt, synthetic construct; identical to SEQ ID NO: 40312
  misc_feature 1..30: note = Putative annexin A2-like protein (89-98)
  source 1..30: mol_type = other RNA

SEQ ID NO: 64540 - RNA, 27 nt, synthetic construct
  misc_feature 1..27: note = Ran GTPase-activating protein 1 (174-182)
  source 1..27: mol_type = other RNA
agcgcccagggcaagcccctggctctc

SEQ ID NO: 64541 - RNA, 27 nt, synthetic construct
  misc_feature 1..27: note = Protein virilizer homolog (804-812)
  source 1..27: mol_type = other RNA
agcgccgtgggccacgtcttctccctg

SEQ ID NO: 64542 - RNA, 27 nt, synthetic construct
  misc_feature 1..27: note = MICAL-like protein 2 (424-432)
  source 1..27: mol_type = other RNA
agcgccgtgccccctggcacctccctg

SEQ ID NO: 64543 - RNA, 30 nt, synthetic construct
  misc_feature 1..30: note = Eukaryotic peptide chain release factor GTP-binding subunit ERF3A (27-36)
  source 1..30: mol_type = other RNA
agcgaggccgaacccggcgggggatccctg

SEQ ID NO: 64544 - RNA, 27 nt, synthetic construct
  misc_feature 1..27: note = Neuron navigator 2 (1899-1907)
  source 1..27: mol_type = other RNA
agcgaggccgaaaccgtgatgcagctg

SEQ ID NO: 64545 - RNA, 27 nt, synthetic construct
  misc_feature 1..27: note = Transportin-1 (59-67)
  source 1..27: mol_type = other RNA
agcgaggacgaacccaccagatccctg

SEQ ID NO: 64546 - RNA, 27 nt, synthetic construct
  misc_feature 1..27: note = Zinc finger protein 217 (77-85)
  source 1..27: mol_type = other RNA
agcgaggacctgaacaagcacgtgctc

SEQ ID NO: 64547 - RNA, 27 nt, synthetic construct
  misc_feature 1..27: note = Vacuolar protein sorting-associated protein 35 (500-508)
  source 1..27: mol_type = other RNA
agcgaggaccccgatcagcaatacctg

SEQ ID NO: 64548 - RNA, 30 nt, synthetic construct
  misc_feature 1..30: note = Protein CASC3 (106-115)
  source 1..30: mol_type = other RNA
agcgaggaagagaactccaaggtggaactg

SEQ ID NO: 64549 - RNA, 27 nt, synthetic construct
  misc_feature 1..27: note = Ribosome biogenesis protein BOP1 (459-467)
  source 1..27: mol_type = other RNA
agcgaggaagagagacaggtgggcctg

SEQ ID NO: 64550 - RNA, 27 nt, synthetic construct
  misc_feature 1..27: note = GPI-anchor transamidase (176-184)
  source 1..27: mol_type = other RNA
agcgaggaaatcaccaacattgagctg

SEQ ID NO: 64551 - RNA, 30 nt, synthetic construct
  misc_feature 1..30: note = Tyrosine-protein kinase JAK1 (600-609)
  source 1..30: mol_type = other RNA
agcgaggaaaagaaaatcaaggtgattctg

SEQ ID NO: 64552 - RNA, 27 nt, synthetic construct
  misc_feature 1..27: note = DNA mismatch repair protein Msh2 (900-908)
  source 1..27: mol_type = other RNA
agcgaggaaaacatcaccattaagctg

SEQ ID NO: 64553 - RNA, 27 nt, synthetic construct
  misc_feature 1..27: note = Selenocysteine insertion sequence-binding protein 2 (597-605)
  source 1..27: mol_type = other RNA
agcgaggaaccccctggcaccgagctg

SEQ ID NO: 64554 - RNA, 33 nt, synthetic construct
  misc_feature 1..33: note = Rac GTPase-activating protein 1 (44-54)
  source 1..33: mol_type = other RNA
agcgaggaacagaagtccgccctggctttcctc

SEQ ID NO: 64555 - RNA, 30 nt, synthetic construct
  misc_feature 1..30: note = X-ray repair cross-complementing protein 5 (546-555)
  source 1..30: mol_type = other RNA
agcgaggaacagagattcaacaattttctg

SEQ ID NO: 64556 - RNA, 27 nt, synthetic construct
  misc_feature 1..27: note = Caspase-8 (168-176)
  source 1..27: mol_type = other RNA
agcgaggaagtgtccagatctgagctg

SEQ ID NO: 64557 - RNA, 27 nt, synthetic construct
  misc_feature 1..27: note = E3 ubiquitin-protein ligase UBR5 (2161-2169)
  source 1..27: mol_type = other RNA
agcgagggcccccctctgacctccttc

SEQ ID NO: 64558 - RNA, 36 nt, synthetic construct
  misc_feature 1..36: note = Basigin (49-60)
  source 1..36: mol_type = other RNA
agcgagcacatcaacgaaggcgagaccgccatgctg

SEQ ID NO: 64559 - RNA, 33 nt, synthetic construct
  misc_feature 1..33: note = Kinesin-like protein KIF20A (608-618)
  source 1..33: mol_type = other RNA
agcgagcacctggacacccagaaggaactcctt

SEQ ID NO: 64560 - RNA, 33 nt, synthetic construct
  misc_feature 1..33: note = La-related protein 4 (384-394)
  source 1..33: mol_type = other RNA
agcgagcactccaccgaaggctctgtgtcactg

SEQ ID NO: 64561 - RNA, 39 nt, synthetic construct
  misc_feature 1..39: note = AP-1 complex subunit beta-1 (185-197)
  source 1..39: mol_type = other RNA
agcgagatcgccgaatcccacccctcttcaaacctgctc

SEQ ID NO: 64562 - RNA, 30 nt, synthetic construct
  misc_feature 1..30: note = Endothelial PAS domain-containing protein 1 (345-354)
  source 1..30: mol_type = other RNA
agcgagatcgaaaagaacgacgtggtcttc

SEQ ID NO: 64563 - RNA, 33 nt, synthetic construct
  misc_feature 1..33: note = Centrosomal protein of 170 kDa (569-579)
  source 1..33: mol_type = other RNA
agcgagatcggcgaaaagcaggacaccgagctg

SEQ ID NO: 64564 - RNA, 30 nt, synthetic construct
  misc_feature 1..30: note = Protein OS-9 (136-145)
  source 1..30: mol_type = other RNA
agcgagatcaagggcgaagtgctgtacctc

SEQ ID NO: 64565 - RNA, 33 nt, synthetic construct
  misc_feature 1..33: note = BCL-6 corepressor (765-775)
  source 1..33: mol_type = other RNA
agcgagatcctggaaacctcctctacaaagctc

SEQ ID NO: 64566 - RNA, 39 nt, synthetic construct
  misc_feature 1..39: note = AP-2 complex subunit beta (185-197)
  source 1..39: mol_type = other RNA
agcgagatctccgaatctcaccccaactcaaatctgctc

SEQ ID NO: 64567 - RNA, 30 nt, synthetic construct
  misc_feature 1..30: note = E3 ubiquitin-protein ligase UBR4 (365-374)
  source 1..30: mol_type = other RNA
agcgagatcaccgaccccgaatccttcctg

SEQ ID NO: 64568 - RNA, 30 nt, synthetic construct
  misc_feature 1..30: note = Centrin-1 (98-107)
  source 1..30: mol_type = other RNA
agcgagaaggacaccaaagaagagatcctg

SEQ ID NO: 64569 - RNA, 30 nt, synthetic construct
  misc_feature 1..30: note = Ubiquitin carboxyl-terminal hydrolase 43 (210-219)
  source 1..30: mol_type = other RNA
agcgagaagctgccccctgaagccaccaaa

SEQ ID NO: 64570 - RNA, 27 nt, synthetic construct
  misc_feature 1..27: note = Spatacsin (742-750)
  source 1..27: mol_type = other RNA
agcgagctgctcaagaacatgggcttc

SEQ ID NO: 64571 - RNA, 27 nt, synthetic construct
  misc_feature 1..27: note = Nuclear pore complex protein Nup155 (1180-1188)
  source 1..27: mol_type = other RNA
agcgagctgatggacatcaccaagctc

SEQ ID NO: 64572 - RNA, 30 nt, synthetic construct
  misc_feature 1..30: note = WD repeat-containing protein 43 (123-132)
  source 1..30: mol_type = other RNA
agcgagaacaaggaagagcccgtgaaactg

SEQ ID NO: 64573 - RNA, 30 nt, synthetic construct
  misc_feature 1..30: note = Caspase recruitment domain-containing protein 19 (24-33)
  source 1..30: mol_type = other RNA
agcgagcagcaagtggacagaatcattctg

SEQ ID NO: 64574 - RNA, 30 nt, synthetic construct
  misc_feature 1..30: note = Protein deglycase DJ-1 (83-92)
  source 1..30: mol_type = other RNA
agcgagtccgccgctgtgaaggaaatcctg

SEQ ID NO: 64575 - RNA, 33 nt, synthetic construct
  misc_feature 1..33: note = Coatomer subunit gamma-1 (429-439)
  source 1..33: mol_type = other RNA
agcgagtccaaggaaaccggcctgtctcacctc

SEQ ID NO: 64576 - RNA, 27 nt, synthetic construct
  misc_feature 1..27: note = Probable ubiquitin carboxyl-terminal hydrolase FAF-X (1855-1863)
  source 1..27: mol_type = other RNA
agcgagaccgccggctccacaaagtac

SEQ ID NO: 64577 - RNA, 30 nt, synthetic construct
  misc_feature 1..30: note = Homocysteine-responsive endoplasmic reticulum-resident ubiquitin-like domain member 1 protein (3-12)
  source 1..30: mol_type = other RNA
agcgagaccgaacccgagcctgtgacactg

SEQ ID NO: 64578 - RNA, 27 nt, synthetic construct
  misc_feature 1..27: note = DNA-dependent protein kinase catalytic subunit (1564-1572)
  source 1..27: mol_type = other RNA
agcgagaccatcaacacagaactgctc

SEQ ID NO: 64579 - RNA, 30 nt, synthetic construct
  misc_feature 1..30: note = Adipocyte plasma membrane-associated protein (402-411)
  source 1..30: mol_type = other RNA
agcgaggtgcacgaacatgacggccacctg

SEQ ID NO: 64580 - RNA, 27 nt, synthetic construct
  misc_feature 1..27: note = Ubiquitin-like modifier-activating enzyme 1 (251-259)
  source 1..27: mol_type = other RNA
agcgaggtgcagggcatggtcgaactg

SEQ ID NO: 64581 - RNA, 33 nt, synthetic construct
  misc_feature 1..33: note = Zinc finger and BTB domain-containing protein 2 (491-501)
  source 1..33: mol_type = other RNA
agcgaggtgaccgaacccgaccaccctgtcctg

SEQ ID NO: 64582 - RNA, 30 nt, synthetic construct
  misc_feature 1..30: note = 60S ribosomal protein L28 (37-46)
  source 1..30: mol_type = other RNA
agcttcagatacaacggcctgatccacagg

SEQ ID NO: 64583 - RNA, 27 nt, synthetic construct
  misc_feature 1..27: note = Prelamin-A/C (424-432)
  source 1..27: mol_type = other RNA
agcggcgaccccgccgagtacaacctg

SEQ ID NO: 64584 - RNA, 27 nt, synthetic construct
  misc_feature 1..27: note = Replication protein A 70 kDa DNA-binding subunit (149-157)
  source 1..27: mol_type = other RNA
agcggcatggggtccaccgtgtctaag

SEQ ID NO: 64585 - RNA, 27 nt, synthetic construct
  misc_feature 1..27: note = Exocyst complex component 4 (448-456)
  source 1..27: mol_type = other RNA
agccacgccatctccatgtctgcttac

SEQ ID NO: 64586 - RNA, 27 nt, synthetic construct
  misc_feature 1..27: note = Unconventional myosin-Ib (546-554)
  source 1..27: mol_type = other RNA
agccacgccctgatcaagtccctcttc

SEQ ID NO: 64587 - RNA, 27 nt, synthetic construct
  misc_feature 1..27: note = Transcription factor 4 (246-254)
  source 1..27: mol_type = other RNA
agccacatcccccagtcctcttcatac

SEQ ID NO: 64588 - RNA, 27 nt, synthetic construct
  misc_feature 1..27: note = Dual specificity mitogen-activated protein kinase kinase 1 (86-94)
  source 1..27: mol_type = other RNA
agccacaagccctccggcctggtgatg

SEQ ID NO: 64589 - RNA, 27 nt, synthetic construct
  misc_feature 1..27: note = Rho-related GTP-binding protein RhoE (218-226)
  source 1..27: mol_type = other RNA
agccacatgccctccagacctgagctg

SEQ ID NO: 64590 - RNA, 27 nt, synthetic construct
  misc_feature 1..27: note = Reticulon-3 (10-18)
  source 1..27: mol_type = other RNA
agccactccatctcttcaagtagcttc

SEQ ID NO: 64591 - RNA, 27 nt, synthetic construct
  misc_feature 1..27: note = Aminoacylase-1 (79-87)
  source 1..27: mol_type = other RNA
agccacaccgacgtggtccccgttttc

SEQ ID NO: 64592 - RNA, 27 nt, synthetic construct
  misc_feature 1..27: note = Sialin (259-267)
  source 1..27: mol_type = other RNA
agccactacgagaaggaatatatcctg

SEQ ID NO: 64593 - RNA, 27 nt, synthetic construct
  misc_feature 1..27: note = Solute carrier family 35 member C2 (273-281)
  source 1..27: mol_type = other RNA
agcatcgccggcattttcaaggaggtg

SEQ ID NO: 64594 - RNA, 27 nt, synthetic construct
  misc_feature 1..27: note = 40S ribosomal protein S4, X isoform (72-80)
  source 1..27: mol_type = other RNA
agcatcgacaagaccggcgagaacttc

SEQ ID NO: 64595 - RNA, 33 nt, synthetic construct
  misc_feature 1..33: note = YTH domain-containing family protein 1 (434-444)
  source 1..33: mol_type = other RNA
agcatcttcgacgattttgcccactacgagaag

SEQ ID NO: 64596 - RNA, 33 nt, synthetic construct
  misc_feature 1..33: note = YTH domain-containing family protein 2 (707-717)
  source 1..33: mol_type = other RNA
agcatcttcgacgatttttcccactacgagaag

SEQ ID NO: 64597 - RNA, 27 nt, synthetic construct
  misc_feature 1..27: note = Transmembrane emp24 domain-containing protein 7 (192-200)
  source 1..27: mol_type = other RNA
agcatcggccaggtgttcctgctcaag

SEQ ID NO: 64598 - RNA, 27 nt, synthetic construct
  misc_feature 1..27: note = Kit ligand (99-107)
  source 1..27: mol_type = other RNA
agcatcattgacaagctggtgaacata

SEQ ID NO: 64599 - RNA, 27 nt, synthetic construct
  misc_feature 1..27: note = Heat shock protein HSP 90-alpha (763-771)
  source 1..27: mol_type = other RNA
agcatcattgagaccctgagacagaag

SEQ ID NO: 64600 - RNA, 36 nt, synthetic construct
  misc_feature 1..36: note = Poly(rC)-binding protein 2 (27-38)
  source 1..36: mol_type = other RNA
agcatcattggcaagaaaggggagtccgtgaagaaa

SEQ ID NO: 64601 - RNA, 27 nt, synthetic construct
  misc_feature 1..27: note = NADH dehydrogenase (ubiquinone) 1 alpha subcomplex subunit 13 (40-48)
  source 1..27: mol_type = other RNA
agcatcatgaagtggaacagagagagg

SEQ ID NO: 64602 - RNA, 27 nt, synthetic construct
  misc_feature 1..27: note = Sterol regulatory element-binding protein 1 (338-346)
  source 1..27: mol_type = other RNA
agcatcaacgacaagattatagagctg

SEQ ID NO: 64603 - RNA, 30 nt, synthetic construct
  misc_feature 1..30: note = Ubiquitin-associated protein 2-like (325-334)
  source 1..30: mol_type = other RNA
agcatcccccagaagcctcaaaccaacaaa

SEQ ID NO: 64604 - RNA, 33 nt, synthetic construct; identical to SEQ ID NO: 40377
  misc_feature 1..33: note = Alkyldihydroxyacetonephosphate synthase, peroxisomal (630-640)
  source 1..33: mol_type = other RNA

SEQ ID NO: 64605 - RNA, 27 nt, synthetic construct
  misc_feature 1..27: note = Progressive ankylosis protein homolog (165-173)
  source 1..27: mol_type = other RNA
agcatctccgacgtgattgcccaggtc

SEQ ID NO: 64606 - RNA, 36 nt, synthetic construct
  misc_feature 1..36: note = Insulin-like growth factor 2 mRNA-binding protein 2 (181-192)
  source 1..36: mol_type = other RNA
agcatctacaaccccgagagaaccattacagtgaag

SEQ ID NO: 64607 - RNA, 33 nt, synthetic construct
  misc_feature 1..33: note = Fibronectin type III domain-containing protein 3B (555-565)
  source 1..33: mol_type = other RNA
agcatctacagaggcccctcccacacctataag

SEQ ID NO: 64608 - RNA, 30 nt, synthetic construct
  misc_feature 1..30: note = Nuclear receptor coactivator 3 (336-345)
  source 1..30: mol_type = other RNA
agcctggccgacggcaccatcgtgacagct

SEQ ID NO: 64609 - RNA, 27 nt, synthetic construct
  misc_feature 1..27: note = Calmodulin-regulated spectrin-associated protein 2 (271-279)
  source 1..27: mol_type = other RNA
agcctggccgactccctctacaacctt

SEQ ID NO: 64610 - RNA, 30 nt, synthetic construct
  misc_feature 1..30: note = ATPase family AAA domain-containing protein 2 (410-419)
  source 1..30: mol_type = other RNA
agcctggccgacgtggatcccatgcagctc

SEQ ID NO: 64611 - RNA, 27 nt, synthetic construct
  misc_feature 1..27: note = Wiskott-Aldrich syndrome protein family member 2 (67-75)
  source 1..27: mol_type = other RNA
agcctggccgagagagtggacaggctc

SEQ ID NO: 64612 - RNA, 27 nt, synthetic construct
  misc_feature 1..27: note = Histone H1x (66-74)
  source 1..27: mol_type = other RNA
agcctggccaagatctacaccgaggct

SEQ ID NO: 64613 - RNA, 27 nt, synthetic construct
  misc_feature 1..27: note = Discoidin, CUB and LCCL domain-containing protein 2 (222-230)
  source 1..27: mol_type = other RNA
agcctggccaacaatgtgacctccgtc

SEQ ID NO: 64614 - RNA, 36 nt, synthetic construct
  misc_feature 1..36: note = Prohibitin (227-238)
  source 1..36: mol_type = other RNA
agcctggccaccgctggcgacgggctcatcgagctt

SEQ ID NO: 64615 - RNA, 27 nt, synthetic construct
  misc_feature 1..27: note = Arf-GAP with Rho-GAP domain, ANK repeat and PH domain-containing protein 3 (220-228)
  source 1..27: mol_type = other RNA
agcctggaccagcccttcctctccaag

SEQ ID NO: 64616 - RNA, 27 nt, synthetic construct
  misc_feature 1..27: note = Transcription intermediary factor 1-beta (265-273)
  source 1..27: mol_type = other RNA
agcctggaccagcccggcgggaccctc

SEQ ID NO: 64617 - RNA, 27 nt, synthetic construct
  misc_feature 1..27: note Dolichyl-diphosphooligosaccharide-proteinosyltransferase subunit 2 (40-48)
  source 1..27: mol_type = other RNA
agcctggacagacccttcaccaacctc

SEQ ID NO: 64618 - RNA, 30 nt, synthetic construct; identical to SEQ ID NO: 40391
  misc_feature 1..30: note = Spatacsin (1958-1967)
  source 1..30: mol_type = other RNA

SEQ ID NO: 64619 - RNA, 27 nt, synthetic construct
  misc_feature 1..27: note = Mothers against decapentaplegic homolog 6 (187-195)
  source 1..27: mol_type = other RNA
agcctggacaccctccttgaggccgtg

SEQ ID NO: 64620 - RNA, 30 nt, synthetic construct
  misc_feature 1..30: note = Activating transcription factor 7-interacting protein 2 (272-281)
  source 1..30: mol_type = other RNA
agcctggacaccaacaataactcccactac

SEQ ID NO: 64621 - RNA, 27 nt, synthetic construct
  misc_feature 1..27: note = Transcription factor E2-alpha (165-173)
  source 1..27: mol_type = other RNA
agcctggacacccagcccaagaaagtg

SEQ ID NO: 64622 - RNA, 30 nt, synthetic construct; identical to SEQ ID NO: 40395
  misc_feature 1..30: note = Transformation/transcription domain-associated protein (976-985)
  source 1..30: mol_type = other RNA

SEQ ID NO: 64623 - RNA, 30 nt, synthetic construct; identical to SEQ ID NO: 40396
  misc_feature 1..30: note = Probable E3 ubiquitin-protein ligase HERC6 (177-186)
  source 1..30: mol_type = other RNA

SEQ ID NO: 64624 - RNA, 27 nt, synthetic construct
  misc_feature 1..27: note = Uncharacterized protein C17orf112 (97-105)
  source 1..27: mol_type = other RNA
agcctggagctcgaccccccttccctt

SEQ ID NO: 64625 - RNA, 27 nt, synthetic construct
  misc_feature 1..27: note = Transmembrane emp24 domain-containing protein 9 (130-138)
  source 1..27: mol_type = other RNA
agcctgttcgccggcgggatgctcaga

SEQ ID NO: 64626 - RNA, 30 nt, synthetic construct
  misc_feature 1..30: note = Splicing factor 3A subunit 3 (299-308)
  source 1..30: mol_type = other RNA
agcctgttcgccaagaaccccaaatccaag

SEQ ID NO: 64627 - RNA, 27 nt, synthetic construct
  misc_feature 1..27: note = Probable E3 ubiquitin-protein ligase HECTD4 (550-558)
  source 1..27: mol_type = other RNA
agcctgttcggcgggacctccggactc

SEQ ID NO: 64628 - RNA, 27 nt, synthetic construct
  misc_feature 1..27: note = ADP-ribosylation factor 4 (7-15)
  source 1..27: mol_type = other RNA
agcctgttctccagactctttggcaag

SEQ ID NO: 64629 - RNA, 30 nt, synthetic construct
  misc_feature 1..30: note = Leukocyte tyrosine kinase receptor (149-158)
  source 1..30: mol_type = other RNA
agcctgggcctcggggagtccctttacatc

SEQ ID NO: 64630 - RNA, 30 nt, synthetic construct
  misc_feature 1..30: note = PRELI domain containing protein 3A (115-124)
  source 1..30: mol_type = other RNA
agcctgggctcctacctcgagtctcttatg

SEQ ID NO: 64631 - RNA, 33 nt, synthetic construct
  misc_feature 1..33: note = Epidermal growth factor receptor kinase substrate 8 (115-125)
  source 1..33: mol_type = other RNA
agcctgatcgacctcgagtccaagaacgaactt

SEQ ID NO: 64632 - RNA, 30 nt, synthetic construct
  misc_feature 1..30: note = Sugar phosphate exchanger 3 (370-379)
  source 1..30: mol_type = other RNA
agcctgatcggctactccctcttctctgtg

SEQ ID NO: 64633 - RNA, 27 nt, synthetic construct
  misc_feature 1..27: note = Type I inositol 3,4-bisphosphate 4-phosphatase (107-115)
  source 1..27: mol_type = other RNA
agcctgatcaaccagatgacccaagtg

SEQ ID NO: 64634 - RNA, 27 nt, synthetic construct
  misc_feature 1..27: note = Kinectin (369-377)
  source 1..27: mol_type = other RNA
agcctgaaggcccacgtgcaggaggtc

SEQ ID NO: 64635 - RNA, 27 nt, synthetic construct
  misc_feature 1..27: note Dolichyl-diphosphooligosaccharide-proteinosyltransferase 48 kDa subunit (66-74)
  source 1..27: mol_type = other RNA
agcctgaaggacagaggcttcgagctc

SEQ ID NO: 64636 - RNA, 27 nt, synthetic construct
  misc_feature 1..27: note = Gamma-interferon-inducible protein 16 (248-256)
  source 1..27: mol_type = other RNA
agcctgaaggagaaattcaacggcaag

SEQ ID NO: 64637 - RNA, 27 nt, synthetic construct
  misc_feature 1..27: note = KN motif and ankyrin repeat domain-containing protein 1 (464-472)
  source 1..27: mol_type = other RNA
agcctgaaggagaaaatctacagactc

SEQ ID NO: 64638 - RNA, 30 nt, synthetic construct
  misc_feature 1..30: note = Histone-lysine N-methyltransferase NSD2 (177-186)
  source 1..30: mol_type = other RNA
agcctgctcgagcagggccttgtggaagcc

SEQ ID NO: 64639 - RNA, 36 nt, synthetic construct
  misc_feature 1..36: note = TSC22 domain family protein 1 (28-39)
  source 1..36: mol_type = other RNA
agcctgctcggcaccgagaacgcctccgtgagactt

SEQ ID NO: 64640 - RNA, 36 nt, synthetic construct
  misc_feature 1..36: note = Homocysteine-responsive endoplasmic reticulum-resident ubiquitin-like domain member 1 protein (221-232)
  source 1..36: mol_type = other RNA
agcctgctccccgagggccctccagccatcgctaac

SEQ ID NO: 64641 - RNA, 27 nt, synthetic construct
  misc_feature 1..27: note = Ankyrin repeat and KH domain-containing protein 1 (2544-2552)
  source 1..27: mol_type = other RNA
agcctgctcccctccgtgcctgccctt

SEQ ID NO: 64642 - RNA, 27 nt, synthetic construct
  misc_feature 1..27: note = E3 ubiquitin-protein ligase TRIM38 (21-29)
  source 1..27: mol_type = other RNA
agcctgatgaccaaccccgtgtccatc

SEQ ID NO: 64643 - RNA, 27 nt, synthetic construct
  misc_feature 1..27: note = Coiled-coil domain-containing protein 93 (321-329)
  source 1..27: mol_type = other RNA
agcctgaacaagcagatcgcccaaaaa

SEQ ID NO: 64644 - RNA, 27 nt, synthetic construct
  misc_feature 1..27: note = Deubiquitinating protein VCIP135 (181-189)
  source 1..27: mol_type = other RNA
agcctgaactccaatgtgtacgacgtc

SEQ ID NO: 64645 - RNA, 27 nt, synthetic construct
  misc_feature 1..27: note = Disintegrin and metalloproteinase domain-containing protein 10 (100-108)
  source 1..27: mol_type = other RNA
agcctgaacaccggcatcattacagtg

SEQ ID NO: 64646 - RNA, 27 nt, synthetic construct
  misc_feature 1..27: note = E3 ubiquitin-protein ligase BRE1B (149-157)
  source 1..27: mol_type = other RNA
agcctgcagaaccacaatcatcaactc

SEQ ID NO: 64647 - RNA, 27 nt, synthetic construct
  misc_feature 1..27: note = DNA primase small subunit (265-273)
  source 1..27: mol_type = other RNA
agcctgcagagatgggagcacctcaag

SEQ ID NO: 64648 - RNA, 27 nt, synthetic construct
  misc_feature 1..27: note = Integrin alpha-3 (452-460)
  source 1..27: mol_type = other RNA
agcctgtccgaccacatcgtgctcctt

SEQ ID NO: 64649 - RNA, 27 nt, synthetic construct
  misc_feature 1..27: note = Pleckstrin homology-like domain family B member 2 (117-125)
  source 1..27: mol_type = other RNA
agcctgtccggctaccccctcgggaga

SEQ ID NO: 64650 - RNA, 27 nt, synthetic construct
  misc_feature 1..27: note = GDH/6PGL endoplasmic bifunctional protein (741-749)
  source 1..27: mol_type = other RNA
agcctgtccctcccccttatcaacaga

SEQ ID NO: 64651 - RNA, 36 nt, synthetic construct
  misc_feature 1..36: note = 26S proteasome non-ATPase regulatory subunit 3 (262-273)
  source 1..36: mol_type = other RNA
agcctgtacgaccaggccgagaagctcgtgtccaaa

SEQ ID NO: 64652 - RNA, 27 nt, synthetic construct
  misc_feature 1..27: note = Delta(24)-sterol reductase (399-407)
  source 1..27: mol_type = other RNA
agcctgtaccacaagctcagagagaaa

SEQ ID NO: 64653 - RNA, 39 nt, synthetic construct
  misc_feature 1..39: note = D-beta-hydroxybutyrate dehydrogenase, mitochondrial (246-258)
  source 1..39: mol_type = other RNA
agcctgtactcccccgagtctatccaggccattgctaag

SEQ ID NO: 64654 - RNA, 27 nt, synthetic construct
  misc_feature 1..27: note = TATA box-binding protein-associated factor RNA polymerase I subunit B (255-263)
  source 1..27: mol_type = other RNA
agcctgtactggctctccacccagaag

SEQ ID NO: 64655 - RNA, 27 nt, synthetic construct
  misc_feature 1..27: note = Bifunctional 3'-phosphoadenosine 5'-phosphosulfate synthase 2 (537-545)
  source 1..27: mol_type = other RNA
agcatggcccccggcctgacctccgtg

SEQ ID NO: 64656 - RNA, 27 nt, synthetic construct
  misc_feature 1..27: note = Protein SON (1023-1031)
  source 1..27: mol_type = other RNA
agcatgatgtcccccatggccgagaga

SEQ ID NO: 64657 - RNA, 27 nt, synthetic construct
  misc_feature 1..27: note = Small nuclear ribonucleoprotein Sm D1 (35-43)
  source 1..27: mol_type = other RNA
agcatgaacacccacctgaaggccgtg

SEQ ID NO: 64658 - RNA, 27 nt, synthetic construct
  misc_feature 1..27: note = Ubiquitin carboxyl-terminal hydrolase isozyme L5 (131-139)
  source 1..27: mol_type = other RNA
agcaactccgacgtgatcagacaggtc

SEQ ID NO: 64659 - RNA, 27 nt, synthetic construct
  misc_feature 1..27: note = Chloride channel CLIC-like protein 1 (324-332)
  source 1..27: mol_type = other RNA
agccccgccgctgagaaggcacagctg

SEQ ID NO: 64660 - RNA, 27 nt, synthetic construct
  misc_feature 1..27: note = Eukaryotic translation initiation factor 2A (347-355)
  source 1..27: mol_type = other RNA
agcccccacggccatatcctggtgctc

SEQ ID NO: 64661 - RNA, 33 nt, synthetic construct
  misc_feature 1..33: note = Zinc finger SWIM domain-containing protein 7 (59-69)
  source 1..33: mol_type = other RNA
agcccctccggcagaagggtgtaccaggtcctg

SEQ ID NO: 64662 - RNA, 27 nt, synthetic construct
  misc_feature 1..27: note = Spermatogenesis-associated protein 20 (30-38)
  source 1..27: mol_type = other RNA
agccccacctccagactgaactctctc

SEQ ID NO: 64663 - RNA, 27 nt, synthetic construct
  misc_feature 1..27: note = mRNA-decapping enzyme 1A (62-70)
  source 1..27: mol_type = other RNA
agcccctaccacggcttcaccatcgtg

SEQ ID NO: 64664 - RNA, 27 nt, synthetic construct
  misc_feature 1..27: note = Complex I assembly factor TIMMDC1, mitochondrial (108-116)
  source 1..27: mol_type = other RNA
agccaggccgagatctaccacaacaga

SEQ ID NO: 64665 - RNA, 33 nt, synthetic construct
  misc_feature 1..33: note = Centromere protein J (1081-1091)
  source 1..33: mol_type = other RNA
agccagatctcctctggcacccaagtggagaag

SEQ ID NO: 64666 - RNA, 27 nt, synthetic construct
  misc_feature 1..27: note = G protein pathway suppressor 2 (319-327)
  source 1..27: mol_type = other RNA
agccagaaccccagattctaccacaag

SEQ ID NO: 64667 - RNA, 27 nt, synthetic construct
  misc_feature 1..27: note = T-complex protein 1 subunit eta (157-165)
  source 1..27: mol_type = other RNA
agccagcaaaaggccttctttgctaaa

SEQ ID NO: 64668 - RNA, 30 nt, synthetic construct
  misc_feature 1..30: note = 3-hydroxy-3-methylglutaryl-coenzyme A reductase (226-235)
  source 1..30: mol_type = other RNA
agcagagagggcaggcccatctggcagctg

SEQ ID NO: 64669 - RNA, 27 nt, synthetic construct
  misc_feature 1..27: note = Protein CYR61 (3-11)
  source 1..27: mol_type = other RNA
agcagaatcgccagggctctggcactc

SEQ ID NO: 64670 - RNA, 27 nt, synthetic construct
  misc_feature 1..27: note = Polyadenylate-binding protein 4 (289-297)
  source 1..27: mol_type = other RNA
agcagataccagggcgtgaacctgtat

SEQ ID NO: 64671 - RNA, 30 nt, synthetic construct
  misc_feature 1..30: note = NUMB protein (52-61)
  source 1..30: mol_type = other RNA
agctccgccaccacatctcccttctttaag

SEQ ID NO: 64672 - RNA, 27 nt, synthetic construct
  misc_feature 1..27: note = Nucleoporin GLE1 (16-24)
  source 1..27: mol_type = other RNA
agctccgacaagggcagactgtgctac

SEQ ID NO: 64673 - RNA, 30 nt, synthetic construct
  misc_feature 1..30: note = Rho guanine nucleotide exchange factor 35 (173-182)
  source 1..30: mol_type = other RNA
agctccgacaactctggccagaccagatac

SEQ ID NO: 64674 - RNA, 27 nt, synthetic construct
  misc_feature 1..27: note = Integrin alpha-7 (233-241)
  source 1..27: mol_type = other RNA
agctccgaccccgatcagctggtgtac

SEQ ID NO: 64675 - RNA, 33 nt, synthetic construct
  misc_feature 1..33: note = Transcriptional coactivator YAP1 (331-341)
  source 1..33: mol_type = other RNA
agctccgaccccttcctgaactctggcacctac

SEQ ID NO: 64676 - RNA, 27 nt, synthetic construct
  misc_feature 1..27: note = Plastin-3 (113-121)
  source 1..27: mol_type = other RNA
agctccgagggcacccagcactcttac

SEQ ID NO: 64677 - RNA, 30 nt, synthetic construct
  misc_feature 1..30: note = Spermatogenesis-associated serine-rich protein 2 (123-132)
  source 1..30: mol_type = other RNA
agctccgagaagggcgggatgaacggatac

SEQ ID NO: 64678 - RNA, 33 nt, synthetic construct
  misc_feature 1..33: note = Myotubularin-related protein 14 (229-239)
  source 1..33: mol_type = other RNA
agctccgagaaggtggacaaagcccagagatac

SEQ ID NO: 64679 - RNA, 27 nt, synthetic construct
  misc_feature 1..27: note = Liprin-beta-1 (506-514)
  source 1..27: mol_type = other RNA
agctccttcggcagagggtttttcaag

SEQ ID NO: 64680 - RNA, 27 nt, synthetic construct
  misc_feature 1..27: note = Breast cancer type 2 susceptibility protein (661-669)
  source 1..27: mol_type = other RNA
agctccttcggcaccatcctgagaaag

SEQ ID NO: 64681 - RNA, 27 nt, synthetic construct
  misc_feature 1..27: note = 60S ribosomal protein L28 (14-22)
  source 1..27: mol_type = other RNA
agctccttcctgatcaagagaaacaaa

SEQ ID NO: 64682 - RNA, 27 nt, synthetic construct
  misc_feature 1..27: note = AP-3 complex subunit mu-2 (10-18)
  source 1..27: mol_type = other RNA
agctccggcgacatcttcctggagaag

SEQ ID NO: 64683 - RNA, 27 nt, synthetic construct
  misc_feature 1..27: note = Deoxynucleotidyltransferase terminal-interacting protein 2 (562-570)
  source 1..27: mol_type = other RNA
agctccatcgaccccggcctgtctatt

SEQ ID NO: 64684 - RNA, 27 nt, synthetic construct
  misc_feature 1..27: note = 60S ribosomal protein L28 (91-99)
  source 1..27: mol_type = other RNA
agctccatcagacacatgattaggaag

SEQ ID NO: 64685 - RNA, 36 nt, synthetic construct
  misc_feature 1..36: note = Dermcidin (63-74)
  source 1..36: mol_type = other RNA
agctccctgctcgagaagggccttgacggggccaaa

SEQ ID NO: 64686 - RNA, 27 nt, synthetic construct
  misc_feature 1..27: note = Integrator complex subunit 3 (459-467)
  source 1..27: mol_type = other RNA
agctccctgaaccacatcgtggagaag

SEQ ID NO: 64687 - RNA, 27 nt, synthetic construct
  misc_feature 1..27: note = Retinoblastoma-like protein 2 (834-842)
  source 1..27: mol_type = other RNA
agctccctgtctctcttctttagaaag

SEQ ID NO: 64688 - RNA, 30 nt, synthetic construct
  misc_feature 1..30: note = GATS-like protein 2 (89-98)
  source 1..30: mol_type = other RNA
agctcctctcagcccatcggcgtgaccaag

SEQ ID NO: 64689 - RNA, 33 nt, synthetic construct
  misc_feature 1..33: note = Synaptotagmin-like protein 2 (280-290)
  source 1..33: mol_type = other RNA
agctcctctaccgactcagagacactgagatac

SEQ ID NO: 64690 - RNA, 33 nt, synthetic construct
  misc_feature 1..33: note = WD repeat-containing protein 62 (49-59)
  source 1..33: mol_type = other RNA
agcaccgcctccgaggaaacagtgcagaacaga

SEQ ID NO: 64691 - RNA, 27 nt, synthetic construct
  misc_feature 1..27: note = Cyclic AMP-responsive element-binding protein 3-like protein 2 (116-124)
  source 1..27: mol_type = other RNA
agcaccgacttcccctccacatctatc

SEQ ID NO: 64692 - RNA, 36 nt, synthetic construct
  misc_feature 1..36: note = ETS-related transcription factor Elf-1 (430-441)
  source 1..36: mol_type = other RNA
agcaccgacccctccgccggcacagggtctcagaag

SEQ ID NO: 64693 - RNA, 30 nt, synthetic construct
  misc_feature 1..30: note = Epidermal growth factor receptor kinase substrate 8 (476-485)
  source 1..30: mol_type = other RNA
agcaccgagcactcctctgtgtcagaatac

SEQ ID NO: 64694 - RNA, 27 nt, synthetic construct
  misc_feature 1..27: note = Nuclear receptor subfamily 2 group C member 2 (226-234)
  source 1..27: mol_type = other RNA
agcaccgagaagatctacattagaaaa

SEQ ID NO: 64695 - RNA, 30 nt, synthetic construct
  misc_feature 1..30: note = V-type proton ATPase subunit H (296-305)
  source 1..30: mol_type = other RNA
agcaccgagagagaaacaaggcaggagtac

SEQ ID NO: 64696 - RNA, 30 nt, synthetic construct
  misc_feature 1..30: note = Nucleolar protein 56 (354-363)
  source 1..30: mol_type = other RNA
agcaccttcatcggcagagccgctgcaaag

SEQ ID NO: 64697 - RNA, 33 nt, synthetic construct
  misc_feature 1..33: note = Ankyrin repeat and KH domain-containing protein 1 (1842-1852)
  source 1..33: mol_type = other RNA
agcaccttccagcccgccaacaagctgaataaa

SEQ ID NO: 64698 - RNA, 33 nt, synthetic construct
  misc_feature 1..33: note = 5-aminolevulinate synthase, nonspecific, mitochondrial (212-222)
  source 1..33: mol_type = other RNA
agcaccttccagtacgacagatttttcgagaag

SEQ ID NO: 64699 - RNA, 27 nt, synthetic construct
  misc_feature 1..27: note = Nuclear autoantigen Sp-100 (389-397)
  source 1..27: mol_type = other RNA
agcaccttcagagagtcctttaagaaa

SEQ ID NO: 64700 - RNA, 30 nt, synthetic construct
  misc_feature 1..30: note = Zinc finger protein SNAI2 (138-147)
  source 1..30: mol_type = other RNA
agcaccttctccggcctggccaagcacaaa

SEQ ID NO: 64701 - RNA, 36 nt, synthetic construct
  misc_feature 1..36: note = Oxidative stress-responsive serine-rich protein 1 (96-107)
  source 1..36: mol_type = other RNA
agcaccatcgcctcctcttcaagtagccagctgaag

SEQ ID NO: 64702 - RNA, 27 nt, synthetic construct
  misc_feature 1..27: note = Clathrin interactor 1 (210-218)
  source 1..27: mol_type = other RNA
agcaccatcgacgatacaatttccaag

SEQ ID NO: 64703 - RNA, 33 nt, synthetic construct
  misc_feature 1..33: note = Ligand-dependent nuclear receptor-interacting factor 1 (338-348)
  source 1..33: mol_type = other RNA
agcaccatcgacccctccggcacaagatctaag

SEQ ID NO: 64704 - RNA, 30 nt, synthetic construct
  misc_feature 1..30: note = Regulation of nuclear pre-mRNA domain-containing protein 2 (942-951)
  source 1..30: mol_type = other RNA
agcaccatcgagttcaagaacatgctgaaa

SEQ ID NO: 64705 - RNA, 27 nt, synthetic construct
  misc_feature 1..27: note = Probable RNA-binding protein 23 (53-61)
  source 1..27: mol_type = other RNA
agcaccatcggcgagacatccaacaga

SEQ ID NO: 64706 - RNA, 36 nt, synthetic construct
  misc_feature 1..36: note = Hexokinase-2 (408-419)
  source 1..36: mol_type = other RNA
agcaccatcggcgtggacgggtccgtctacaagaaa

SEQ ID NO: 64707 - RNA, 33 nt, synthetic construct
  misc_feature 1..33: note = Transcription intermediary factor 1-alpha (597-607)
  source 1..33: mol_type = other RNA
agcaccatcatgctggacaacattgtgagaaag

SEQ ID NO: 64708 - RNA, 27 nt, synthetic construct
  misc_feature 1..27: note = Tigger transposable element-derived protein 2 (379-387)
  source 1..27: mol_type = other RNA
agcaccatcacaaaggcctggaaaaag

SEQ ID NO: 64709 - RNA, 33 nt, synthetic construct
  misc_feature 1..33: note = Mediator of RNA polymerase II transcription subunit 20 (51-61)
  source 1..33: mol_type = other RNA
agcaccctgggctcccaggggcaaacaggaaag

SEQ ID NO: 64710 - RNA, 27 nt, synthetic construct
  misc_feature 1..27: note = KN motif and ankyrin repeat domain-containing protein 1 (972-980)
  source 1..27: mol_type = other RNA
agcaccctgaagtccatcatgaaaaag

SEQ ID NO: 64711 - RNA, 33 nt, synthetic construct
  misc_feature 1..33: note = Alanine-tRNA ligase, cytoplasmic (3-13)
  source 1..33: mol_type = other RNA
agcaccctgacagcctccgagatcagacagagg

SEQ ID NO: 64712 - RNA, 27 nt, synthetic construct
  misc_feature 1..27: note = Guanine nucleotide-binding protein G(I)/G(S)/G(O) subunit gamma-12 (7-15)
  source 1..27: mol_type = other RNA
agcaccaacaatatcgcccaggctaga

SEQ ID NO: 64713 - RNA, 27 nt, synthetic construct
  misc_feature 1..27: note = AP-3 complex subunit delta-1 (232-240)
  source 1..27: mol_type = other RNA
agcaccaacaattgggtgctgatcaag

SEQ ID NO: 64714 - RNA, 27 nt, synthetic construct
  misc_feature 1..27: note = Guanine nucleotide-binding protein G(I)/G(S)/G(O) subunit gamma-5 (55-63)
  source 1..27: mol_type = other RNA
agcaccaaccccttcagacctcagaag

SEQ ID NO: 64715 - RNA, 33 nt, synthetic construct
  misc_feature 1..33: note = ATP synthase F(0) complex subunit B1, mitochondrial (228-238)
  source 1..33: mol_type = other RNA
agcacccagcaagagaaggaaacaatcgccaaa

SEQ ID NO: 64716 - RNA, 30 nt, synthetic construct
  misc_feature 1..30: note = Band 4.1-like protein 2 (78-87)
  source 1..30: mol_type = other RNA
agcaccacaactacgacccacatcacaaag

SEQ ID NO: 64717 - RNA, 27 nt, synthetic construct
  misc_feature 1..27: note = Mediator of RNA polymerase II transcription subunit 25 (129-137)
  source 1..27: mol_type = other RNA
agcaccgtggcccccggctccgggctg

SEQ ID NO: 64718 - RNA, 27 nt, synthetic construct
  misc_feature 1..27: note = SEC14-like protein 1 (142-150)
  source 1..27: mol_type = other RNA
agcaccgtggagaagatcgccatgaaa

SEQ ID NO: 64719 - RNA, 33 nt, synthetic construct
  misc_feature 1..33: note = Signal recognition particle 14 kDa protein (68-78)
  source 1..33: mol_type = other RNA
agcaccgtggtctcctctaaggaggttaacaaa

SEQ ID NO: 64720 - RNA, 30 nt, synthetic construct
  misc_feature 1..30: note = Cleavage and polyadenylation specificity factor subunit 3 (66-75)
  source 1..30: mol_type = other RNA
agcacctacggcacacacatccatgagaag

SEQ ID NO: 64721 - RNA, 30 nt, synthetic construct
  misc_feature 1..30: note = DmX-like protein 2 (1766-1775)
  source 1..30: mol_type = other RNA
agcacctacatctccattctgaaccagaag

SEQ ID NO: 64722 - RNA, 33 nt, synthetic construct
  misc_feature 1..33: note = Lysosomal protective protein (339-349)
  source 1..33: mol_type = other RNA
agcacctacctgaacaatccctatgtgagaaag

SEQ ID NO: 64723 - RNA, 30 nt, synthetic construct
  misc_feature 1..30: note = E3 ubiquitin-protein ligase HECTD1 (546-555)
  source 1..30: mol_type = other RNA
agcacctacaacctgcagatcctcacaaga

SEQ ID NO: 64724 - RNA, 33 nt, synthetic construct
  misc_feature 1..33: note = Protein FAM84B (105-115)
  source 1..33: mol_type = other RNA
agcacctacacacccgagaacctgctcaataag

SEQ ID NO: 64725 - RNA, 30 nt, synthetic construct
  misc_feature 1..30: note = Lysine-specific demethylase 5B (847-856)
  source 1..30: mol_type = other RNA
agcgtggcccagcaactgctcaacggcaag

SEQ ID NO: 64726 - RNA, 27 nt, synthetic construct
  misc_feature 1..27: note = Perilipin-2 (129-137)
  source 1..27: mol_type = other RNA
agcgtggcctccaccatcacaggcgtc

SEQ ID NO: 64727 - RNA, 33 nt, synthetic construct
  misc_feature 1..33: note = Oral-facial-digital syndrome 1 protein (92-102)
  source 1..33: mol_type = other RNA
agcgtgttctttcccgagtccggcctggccaag

SEQ ID NO: 64728 - RNA, 33 nt, synthetic construct
  misc_feature 1..33: note = Short coiled-coil protein (42-52)
  source 1..33: mol_type = other RNA
agcgtgttccagaccacagacactaagtccaaa

SEQ ID NO: 64729 - RNA, 27 nt, synthetic construct
  misc_feature 1..27: note = Centromere protein F (215-223)
  source 1..27: mol_type = other RNA
agcgtgttctcctggcagcaagagaag

SEQ ID NO: 64730 - RNA, 33 nt, synthetic construct
  misc_feature 1..33: note = Probable 18S rRNA (guanine-N(7))-methyltransferase (228-238)
  source 1..33: mol_type = other RNA
agcgtgttcaccaacgagagatttcccctgagg

SEQ ID NO: 64731 - RNA, 36 nt, synthetic construct
  misc_feature 1..36: note = Protein FAN (644-655)
  source 1..36: mol_type = other RNA
agcgtgttcaccacatcccaggactctactctgaag

SEQ ID NO: 64732 - RNA, 27 nt, synthetic construct
  misc_feature 1..27: note = Acyl-CoA desaturase (245-253)
  source 1..27: mol_type = other RNA
agcgtgttcgtcgccacctttctgaga

SEQ ID NO: 64733 - RNA, 27 nt, synthetic construct
  misc_feature 1..27: note = Nitric oxide synthase-interacting protein (147-155)
  source 1..27: mol_type = other RNA
agcgtgggccccccttccaaggacaaa

SEQ ID NO: 64734 - RNA, 30 nt, synthetic construct
  misc_feature 1..30: note = V-type proton ATPase subunit d 1 (68-77)
  source 1..30: mol_type = other RNA
agcgtgatcgacgatagactgaaggagaaa

SEQ ID NO: 64735 - RNA, 33 nt, synthetic construct
  misc_feature 1..33: note = Striatin (234-244)
  source 1..33: mol_type = other RNA
agcgtgatcgacacctccacaattgtcagaaag

SEQ ID NO: 64736 - RNA, 33 nt, synthetic construct
  misc_feature 1..33: note = Phosducin-like protein (220-230)
  source 1..33: mol_type = other RNA
agcgtgatcggcgcctcctctcagttcaccaga

SEQ ID NO: 64737 - RNA, 27 nt, synthetic construct
  misc_feature 1..27: note = Protein fuzzy homolog (41-49)
  source 1..27: mol_type = other RNA
agcgtgatcggctccctgaacggggtc

SEQ ID NO: 64738 - RNA, 27 nt, synthetic construct
  misc_feature 1..27: note = MAP kinase-activating death domain protein (1140-1148)
  source 1..27: mol_type = other RNA
agcgtgatcggcgtctcccccgccgtt

SEQ ID NO: 64739 - RNA, 27 nt, synthetic construct
  misc_feature 1..27: note = Tubby-related protein 3 (322-330)
  source 1..27: mol_type = other RNA
agcgtgatcattcccggcatgaccctg

SEQ ID NO: 64740 - RNA, 27 nt, synthetic construct
  misc_feature 1..27: note = ETS-related transcription factor Elf-1 (531-539)
  source 1..27: mol_type = other RNA
agcgtgatcaagacccaggagacaaaa

SEQ ID NO: 64741 - RNA, 27 nt, synthetic construct
  misc_feature 1..27: note = SEC14 domain and spectrin repeat-containing protein 1 (4-12)
  source 1..27: mol_type = other RNA
agcgtgatcctgcccattctcaagaaa

SEQ ID NO: 64742 - RNA, 27 nt, synthetic construct
  misc_feature 1..27: note = Serine/threonine-protein kinase RIO1 (130-138)
  source 1..27: mol_type = other RNA
agcgtgatcaacaaggtcaccgagaaa

SEQ ID NO: 64743 - RNA, 27 nt, synthetic construct
  misc_feature 1..27: note = NHS-like protein 1 (635-643)
  source 1..27: mol_type = other RNA
agcgtgatcaacgtcttcgttggcaga

SEQ ID NO: 64744 - RNA, 33 nt, synthetic construct
  misc_feature 1..33: note = E3 ubiquitin-protein ligase Topors (307-317)
  source 1..33: mol_type = other RNA
agcgtgctgggcaaggacgagcagatcaacaaa

SEQ ID NO: 64745 - RNA, 27 nt, synthetic construct
  misc_feature 1..27: note = Nuclear pore complex protein Nup50 (280-288)
  source 1..27: mol_type = other RNA
agcgtgctgggctccctctcttcagtc

SEQ ID NO: 64746 - RNA, 27 nt, synthetic construct
  misc_feature 1..27: note = Superkiller viralicidic activity 2-like 2 (759-767)
  source 1..27: mol_type = other RNA
agcgtgctgaagtccatccaggaggtc

SEQ ID NO: 64747 - RNA, 27 nt, synthetic construct
  misc_feature 1..27: note = Nuclear pore membraneoprotein 210 (659-667)
  source 1..27: mol_type = other RNA
agcgtgctgaacttcgccaccaataga

SEQ ID NO: 64748 - RNA, 36 nt, synthetic construct
  misc_feature 1..36: note = Little elongation complex subunit 1 (852-863)
  source 1..36: mol_type = other RNA
agcgtgctgcccaaccaggtctccgttatcaccaag

SEQ ID NO: 64749 - RNA, 33 nt, synthetic construct
  misc_feature 1..33: note = Lysine-specific demethylase 3A (512-522)
  source 1..33: mol_type = other RNA
agcgtgctgaccgaccccgccaagctcaaaaag

SEQ ID NO: 64750 - RNA, 27 nt, synthetic construct
  misc_feature 1..27: note = Enhancer of mRNA-decapping protein 4 (927-935)
  source 1..27: mol_type = other RNA
agcgtgatggcccaggtcagacaaaag

SEQ ID NO: 64751 - RNA, 30 nt, synthetic construct
  misc_feature 1..30: note = Poly(U)-binding-splicing factor PUF60 (174-183)
  source 1..30: mol_type = other RNA
agcgtgatgctgggcgggagaaacatcaag

SEQ ID NO: 64752 - RNA, 27 nt, synthetic construct
  misc_feature 1..27: note = TGF-beta-activated kinase 1 and MAP3K7-binding protein 2 (354-362)
  source 1..27: mol_type = other RNA
agcgtgaactcccagaccctgaataga

SEQ ID NO: 64753 - RNA, 30 nt, synthetic construct
  misc_feature 1..30: note = Rho GDP-dissociation inhibitor 1 (24-33)
  source 1..30: mol_type = other RNA
agcgtgaactacaagccccctgcccagaaa

SEQ ID NO: 64754 - RNA, 30 nt, synthetic construct
  misc_feature 1..30: note = LON peptidase N-terminal domain and RING finger protein 1 (418-427)
  source 1..30: mol_type = other RNA
agcgtgcaggagaagggcgtcctgctcaaa

SEQ ID NO: 64755 - RNA, 27 nt, synthetic construct
  misc_feature 1..27: note = Kinesin-like protein KIF11 (750-758)
  source 1..27: mol_type = other RNA
agcgtgcaggagaacatccaacagaag

SEQ ID NO: 64756 - RNA, 27 nt, synthetic construct
  misc_feature 1..27: note = DNA topoisomerase 2-binding protein 1 (587-595)
  source 1..27: mol_type = other RNA
agcgtgcaggagtacttcgtcagaaag

SEQ ID NO: 64757 - RNA, 27 nt, synthetic construct
  misc_feature 1..27: note = Zinc-binding alcohol dehydrogenase domain-containing protein 2 (299-307)
  source 1..27: mol_type = other RNA
agcgtgcagggcttctttctgaaccac

SEQ ID NO: 64758 - RNA, 33 nt, synthetic construct
  misc_feature 1..33: note = E3 ubiquitin-protein ligase MARCH7 (13-23)
  source 1..33: mol_type = other RNA
agcgtgcagccctcctcttcactgagtgccaga

SEQ ID NO: 64759 - RNA, 33 nt, synthetic construct
  misc_feature 1..33: note = MAP7 domain-containing protein 3 (532-542)
  source 1..33: mol_type = other RNA
agcgtgcagtccgcctcttcaaccgtcaagaaa

SEQ ID NO: 64760 - RNA, 30 nt, synthetic construct
  misc_feature 1..30: note = BRCA1-associated RING domain protein 1 (162-171)
  source 1..30: mol_type = other RNA
agcgtgcagacccaacccgccatcaagaaa

SEQ ID NO: 64761 - RNA, 27 nt, synthetic construct
  misc_feature 1..27: note = DNA-directed RNA polymerase, mitochondrial (77-85)
  source 1..27: mol_type = other RNA
agcgtgtccgaggtcgttgtgaacaga

SEQ ID NO: 64762 - RNA, 30 nt, synthetic construct
  misc_feature 1..30: note = GAS2-like protein 3 (568-577)
  source 1..30: mol_type = other RNA
agcgtgtcccccgtcaaggccacccagaaa

SEQ ID NO: 64763 - RNA, 27 nt, synthetic construct
  misc_feature 1..27: note = Lipoma-preferred partner (35-43)
  source 1..27: mol_type = other RNA
agcgtgtccacccagcaaccccctaag

SEQ ID NO: 64764 - RNA, 27 nt, synthetic construct
  misc_feature 1..27: note = Probable 8-oxo-dGTP diphosphatase NUDT15 (78-86)
  source 1..27: mol_type = other RNA
agcgtggtcaactccttcatcgagaag

SEQ ID NO: 64765 - RNA, 27 nt, synthetic construct
  misc_feature 1..27: note = Transmembrane and TPR repeat-containing protein 2 (627-635)
  source 1..27: mol_type = other RNA
agcgtgtacaaggaggccatccagaaa

SEQ ID NO: 64766 - RNA, 27 nt, synthetic construct
  misc_feature 1..27: note = Cytoplasmic dynein 1 heavy chain 1 (2957-2965)
  source 1..27: mol_type = other RNA
agcgtgtaccagatcaaggtccacaga

SEQ ID NO: 64767 - RNA, 27 nt, synthetic construct
  misc_feature 1..27: note = Tetratricopeptide repeat protein 28 (60-68)
  source 1..27: mol_type = other RNA
agctaccacaactatgtgctggagctc

SEQ ID NO: 64768 - RNA, 27 nt, synthetic construct
  misc_feature 1..27: note = Long-chain-fatty-acid-CoA ligase 3 (616-624)
  source 1..27: mol_type = other RNA
agctaccactcctatgtgatcggcttc

SEQ ID NO: 64769 - RNA, 27 nt, synthetic construct
  misc_feature 1..27: note = 14-3-3 protein beta/alpha (212-220)
  source 1..27: mol_type = other RNA
agctacaaggactccaccctgatcatg

SEQ ID NO: 64770 - RNA, 27 nt, synthetic construct
  misc_feature 1..27: note = Serine/threonine-protein kinase 24 (88-96)
  source 1..27: mol_type = other RNA
agctacctgaaggacaccaaactctgg

SEQ ID NO: 64771 - RNA, 27 nt, synthetic construct
  misc_feature 1..27: note = Selenoprotein N (310-318)
  source 1..27: mol_type = other RNA
agctacctgcccttcaccgaggccttt

SEQ ID NO: 64772 - RNA, 27 nt, synthetic construct
  misc_feature 1..27: note = Zinc finger protein 383 (239-247)
  source 1..27: mol_type = other RNA
agctacctgtcccagcaccaaagaatc

SEQ ID NO: 64773 - RNA, 27 nt, synthetic construct
  misc_feature 1..27: note = Tumor necrosis factor receptor superfamily member 3 (87-95)
  source 1..27: mol_type = other RNA
agctacaacgagcactggaattatctg

SEQ ID NO: 64774 - RNA, 27 nt, synthetic construct
  misc_feature 1..27: note = Transmembrane protein 39A (477-485)
  source 1..27: mol_type = other RNA
agctaccccctgaactcctatgagctc

SEQ ID NO: 64775 - RNA, 27 nt, synthetic construct
  misc_feature 1..27: note = Tetraspanin-10 (217-225)
  source 1..27: mol_type = other RNA
agctaccaggactggcaacagaacctg

SEQ ID NO: 64776 - RNA, 27 nt, synthetic construct
  misc_feature 1..27: note = Calcyclin-binding protein (124-132)
  source 1..27: mol_type = other RNA
agctactccatgatcgtgaacaatctg

SEQ ID NO: 64777 - RNA, 27 nt, synthetic construct
  misc_feature 1..27: note = Transmembrane protein 39A (363-371)
  source 1..27: mol_type = other RNA
agctactccaacgccccccagcacatc

SEQ ID NO: 64778 - RNA, 27 nt, synthetic construct
  misc_feature 1..27: note = Serine/threonine-protein kinase LATS2 (554-562)
  source 1..27: mol_type = other RNA
agctactccccctatgccttcaagttt

SEQ ID NO: 64779 - RNA, 27 nt, synthetic construct
  misc_feature 1..27: note = AF4/FMR2 family member 4 (1095-1103)
  source 1..27: mol_type = other RNA
agctacgtgcaggtcacctccaacttc

SEQ ID NO: 64780 - RNA, 33 nt, synthetic construct
  misc_feature 1..33: note = Basement membrane-specific heparan sulfate proteoglycan core protein (176-186)
  source 1..33: mol_type = other RNA
agctacgtgacctccccccagggcttccaattt

SEQ ID NO: 64781 - RNA, 27 nt, synthetic construct
  misc_feature 1..27: note = Transcription factor BTF3 (82-90)
  source 1..27: mol_type = other RNA
accgccgacgataagaaactgcagttc

SEQ ID NO: 64782 - RNA, 27 nt, synthetic construct
  misc_feature 1..27: note Dolichyl-diphosphooligosaccharide-proteinosyltransferase 48 kDa subunit (78-86)
  source 1..27: mol_type = other RNA
accgccgacgatcccagcctgtccctc

SEQ ID NO: 64783 - RNA, 30 nt, synthetic construct
  misc_feature 1..30: note = Transducin beta-like protein 3 (197-206)
  source 1..30: mol_type = other RNA
accgccgaccacaacctgctcctttacgag

SEQ ID NO: 64784 - RNA, 27 nt, synthetic construct
  misc_feature 1..27: note = Lymphocyte cytosolic protein 2 (227-235)
  source 1..27: mol_type = other RNA
accgccaagctgcccgctcctagcatc

SEQ ID NO: 64785 - RNA, 27 nt, synthetic construct
  misc_feature 1..27: note = Pyridine nucleotide-disulfide oxidoreductase domain-containing protein 1 (42-50)
  source 1..27: mol_type = other RNA
accgccagccccgtgatcaaggctgtc

SEQ ID NO: 64786 - RNA, 27 nt, synthetic construct
  misc_feature 1..27: note = Programmed cell death 6-interacting protein (658-666)
  source 1..27: mol_type = other RNA
accgcctacgacaacttcgtggagctg

SEQ ID NO: 64787 - RNA, 42 nt, synthetic construct
  misc_feature 1..42: note = Cullin-4B (24-37)
  source 1..42: mol_type = other RNA
accgacggcaacacaagcactacgccccctacctccgccaag

SEQ ID NO: 64788 - RNA, 27 nt, synthetic construct
  misc_feature 1..27: note = Putative sodium-coupled neutral amino acid transporter 10 (253-261)
  source 1..27: mol_type = other RNA
accgaggccacagctggcaacgtgctg

SEQ ID NO: 64789 - RNA, 33 nt, synthetic construct
  misc_feature 1..33: note = Optineurin (373-383)
  source 1..33: mol_type = other RNA
accgaggacgaaaagagcaaactgacagtgctc

SEQ ID NO: 64790 - RNA, 36 nt, synthetic construct
  misc_feature 1..36: note = Nuclear factor erythroid 2-related factor 2 (160-171)
  source 1..36: mol_type = other RNA
accgaggaccccaaccagctgacagtgaatagcctc

SEQ ID NO: 64791 - RNA, 33 nt, synthetic construct
  misc_feature 1..33: note = Actin-related protein 2/3 complex subunit 1A (312-322)
  source 1..33: mol_type = other RNA
accgaggacagaaacacagccctggaaactctc

SEQ ID NO: 64792 - RNA, 27 nt, synthetic construct
  misc_feature 1..27: note = Dynactin subunit 2 (131-139)
  source 1..27: mol_type = other RNA
accgaggaaaagctgacacccgtgctc

SEQ ID NO: 64793 - RNA, 30 nt, synthetic construct
  misc_feature 1..30: note = Dynactin subunit 2 (131-140)
  source 1..30: mol_type = other RNA
accgaggaaaagctgacacccgtgctcctt

SEQ ID NO: 64794 - RNA, 30 nt, synthetic construct
  misc_feature 1..30: note = Protein fuzzy homolog (371-380)
  source 1..30: mol_type = other RNA
accgaggaacccggcacaggggtgagactg

SEQ ID NO: 64795 - RNA, 33 nt, synthetic construct
  misc_feature 1..33: note = BRF1 protein (61-71)
  source 1..33: mol_type = other RNA
accgagttcgaagacacacccactagccagctg

SEQ ID NO: 64796 - RNA, 30 nt, synthetic construct
  misc_feature 1..30: note = Dystonin (2514-2523)
  source 1..30: mol_type = other RNA
accgagatcgacagcaagtggcaggaactg

SEQ ID NO: 64797 - RNA, 27 nt, synthetic construct
  misc_feature 1..27: note = Protein TBRG4 (216-224)
  source 1..27: mol_type = other RNA
accgagatcgaagacagccacacactg

SEQ ID NO: 64798 - RNA, 27 nt, synthetic construct
  misc_feature 1..27: note = RuvB-like 1 (44-52)
  source 1..27: mol_type = other RNA
accgagatcaagaaaacagaagtgctg

SEQ ID NO: 64799 - RNA, 27 nt, synthetic construct
  misc_feature 1..27: note = MIF2 suppressor (12-20)
  source 1..27: mol_type = other RNA
accgagaacaatgaccacatcaacctg

SEQ ID NO: 64800 - RNA, 27 nt, synthetic construct
  misc_feature 1..27: note = Sodium/potassium-transporting ATPase subunit alpha-1 (206-214)
  source 1..27: mol_type = other RNA
accgagaaccagagcggcgtgtccttc

SEQ ID NO: 64801 - RNA, 27 nt, synthetic construct
  misc_feature 1..27: note = Eukaryotic translation initiation factor 3 subunit L (482-490)
  source 1..27: mol_type = other RNA
accgagcaggaattcagaatccaactg

SEQ ID NO: 64802 - RNA, 30 nt, synthetic construct
  misc_feature 1..30: note = Golgi-associated PDZ and coiled-coil motif-containing protein (106-115)
  source 1..30: mol_type = other RNA
accgagacacaggccgaaaaggtggtcctg

SEQ ID NO: 64803 - RNA, 30 nt, synthetic construct
  misc_feature 1..30: note Dolichyl-diphosphooligosaccharide-proteinosyltransferase subunit 2 (371-380)
  source 1..30: mol_type = other RNA
accgaggtgggcatcacaaacgtcgacctg

SEQ ID NO: 64804 - RNA, 30 nt, synthetic construct
  misc_feature 1..30: note = Apoptosis-inducing factor 2 (163-172)
  source 1..30: mol_type = other RNA
accgagtaccccgaaaaggaggtgacactg

SEQ ID NO: 64805 - RNA, 27 nt, synthetic construct
  misc_feature 1..27: note = Fibronectin type III domain-containing protein 3B (635-643)
  source 1..27: mol_type = other RNA
acccacctgaagcccggcacactctac

SEQ ID NO: 64806 - RNA, 27 nt, synthetic construct
  misc_feature 1..27: note = Transcription factor 12 (468-476)
  source 1..27: mol_type = other RNA
acccacagagaggacagcgtgtccctg

SEQ ID NO: 64807 - RNA, 27 nt, synthetic construct
  misc_feature 1..27: note = N-alpha-acetyltransferase 25, NatB auxiliary subunit (500-508)
  source 1..27: mol_type = other RNA
acccacagcccctccaacgcccagttc

SEQ ID NO: 64808 - RNA, 27 nt, synthetic construct
  misc_feature 1..27: note = Minor histocompatibility antigen H13 (287-295)
  source 1..27: mol_type = other RNA
acccacacatacttctatactagcttt

SEQ ID NO: 64809 - RNA, 27 nt, synthetic construct
  misc_feature 1..27: note = GLTSCR1-like protein (169-177)
  source 1..27: mol_type = other RNA
acccacgtgcccgtcggcgccagcttc

SEQ ID NO: 64810 - RNA, 27 nt, synthetic construct
  misc_feature 1..27: note = Asparagine synthetase (glutamine-hydrolyzing) (553-561)
  source 1..27: mol_type = other RNA
acccactacaagagcgccgtgaaagct

SEQ ID NO: 64811 - RNA, 33 nt, synthetic construct
  misc_feature 1..33: note = Sorting nexin-18 (279-289)
  source 1..33: mol_type = other RNA
accatcgacgatcccacaaagcagactaaattc

SEQ ID NO: 64812 - RNA, 27 nt, synthetic construct
  misc_feature 1..27: note = Clathrin interactor 1 (211-219)
  source 1..27: mol_type = other RNA
accatcgacgatacaattagcaagttc

SEQ ID NO: 64813 - RNA, 27 nt, synthetic construct
  misc_feature 1..27: note = Nucleolar GTP-binding protein 1 (163-171)
  source 1..27: mol_type = other RNA
accatcgaccccaacacaagaactctg

SEQ ID NO: 64814 - RNA, 39 nt, synthetic construct
  misc_feature 1..39: note = Signal transducer and activator of transcription 5B (372-384)
  source 1..39: mol_type = other RNA
accatcattagcgagcagcaagccaagtccctgctcaaa

SEQ ID NO: 64815 - RNA, 27 nt, synthetic construct
  misc_feature 1..27: note = Sorting nexin-14 (74-82)
  source 1..27: mol_type = other RNA
accatcaagtacaaacccaagcagctg

SEQ ID NO: 64816 - RNA, 33 nt, synthetic construct
  misc_feature 1..33: note = Heterogeneous nuclear ribonucleoproteins A2/B1 (164-174)
  source 1..33: mol_type = other RNA
accatcaacggccacaatgccgaggtgagaaag

SEQ ID NO: 64817 - RNA, 30 nt, synthetic construct
  misc_feature 1..30: note = Similar to calcium-independent phospholipase A2 (165-174)
  source 1..30: mol_type = other RNA
accatcgtgaacagaggcattacacccaag

SEQ ID NO: 64818 - RNA, 33 nt, synthetic construct
  misc_feature 1..33: note = Cytoplasmic dynein 1 heavy chain 1 (1281-1291)
  source 1..33: mol_type = other RNA
accatctacgagggcaagttcgggagactgaaa

SEQ ID NO: 64819 - RNA, 27 nt, synthetic construct
  misc_feature 1..27: note = Melanoma-associated antigen D1 (153-161)
  source 1..27: mol_type = other RNA
accaaggtgggccccaacgccacatac

SEQ ID NO: 64820 - RNA, 27 nt, synthetic construct
  misc_feature 1..27: note = Calmodulin-binding transcription activator 1 (1179-1187)
  source 1..27: mol_type = other RNA
accctggccgagcacatcattgaagct

SEQ ID NO: 64821 - RNA, 36 nt, synthetic construct
  misc_feature 1..36: note = Syndecan-3 (348-359)
  source 1..36: mol_type = other RNA
accctggaggaacccaagcaggccagcgtgacatac

SEQ ID NO: 64822 - RNA, 36 nt, synthetic construct
  misc_feature 1..36: note = Septin-7 (426-437)
  source 1..36: mol_type = other RNA
accctggagaagaacaaaaagaaaggcaagatcttc

SEQ ID NO: 64823 - RNA, 33 nt, synthetic construct
  misc_feature 1..33: note = Histone-lysine N-methyltransferase ASH1L (2959-2969)
  source 1..33: mol_type = other RNA
accctgttcatccccgagaacagctttagaaag

SEQ ID NO: 64824 - RNA, 33 nt, synthetic construct
  misc_feature 1..33: note = Uncharacterized protein C1orf198 (300-310)
  source 1..33: mol_type = other RNA
accctgttcagcgagcccaagtttgcccaggtg

SEQ ID NO: 64825 - RNA, 33 nt, synthetic construct
  misc_feature 1..33: note = Signal recognition particle receptor subunit beta (114-124)
  source 1..33: mol_type = other RNA
accctgatcgacctccccggccacgagagcctt

SEQ ID NO: 64826 - RNA, 27 nt, synthetic construct
  misc_feature 1..27: note = Conserved oligomeric Golgi complex subunit 5 (271-279)
  source 1..27: mol_type = other RNA
accctgaaggacacaatcactagcgtg

SEQ ID NO: 64827 - RNA, 27 nt, synthetic construct
  misc_feature 1..27: note = Transcription intermediary factor 1-beta (187-195)
  source 1..27: mol_type = other RNA
accctgcagaagagcacaaaagaggtg

SEQ ID NO: 64828 - RNA, 27 nt, synthetic construct
  misc_feature 1..27: note = Cell division cycle protein 20 homolog (304-312)
  source 1..27: mol_type = other RNA
accctgagcggccactcccaggaggtg

SEQ ID NO: 64829 - RNA, 27 nt, synthetic construct
  misc_feature 1..27: note = Zinc finger BED domain-containing protein 4 (953-961)
  source 1..27: mol_type = other RNA
accctgagccaggtgatccccatggtc

SEQ ID NO: 64830 - RNA, 27 nt, synthetic construct
  misc_feature 1..27: note = Ubiquitin-60S ribosomal protein L40 (12-20)
  source 1..27: mol_type = other RNA
accctgacaggcaagactatcacgctc

SEQ ID NO: 64831 - RNA, 27 nt, synthetic construct
  misc_feature 1..27: note = Sodium/potassium-transporting ATPase subunit alpha-3 (782-790)
  source 1..27: mol_type = other RNA
accctgacaagcaacatccccgagatt

SEQ ID NO: 64832 - RNA, 33 nt, synthetic construct
  misc_feature 1..33: note = Putative heat shock protein HSP 90-beta 2 (85-95)
  source 1..33: mol_type = other RNA
accctggtggacacaggcatcgggatgactaag

SEQ ID NO: 64833 - RNA, 33 nt, synthetic construct
  misc_feature 1..33: note = Lathosterol oxidase (245-255)
  source 1..33: mol_type = other RNA
accctgtgggacagaatcggcgggagcttcaag

SEQ ID NO: 64834 - RNA, 27 nt, synthetic construct
  misc_feature 1..27: note = Nicotinamide phosphoribosyltransferase (435-443)
  source 1..27: mol_type = other RNA
acccccgccggcaacttcgtgacactg

SEQ ID NO: 64835 - RNA, 27 nt, synthetic construct
  misc_feature 1..27: note = SH3 domain-containing protein 19 (137-145)
  source 1..27: mol_type = other RNA
acccccgcccctagaccactgctcctt

SEQ ID NO: 64836 - RNA, 27 nt, synthetic construct
  misc_feature 1..27: note = Ephrin-A5 (207-215)
  source 1..27: mol_type = other RNA
acccccagaatccctagcaggctgctc

SEQ ID NO: 64837 - RNA, 27 nt, synthetic construct
  misc_feature 1..27: note = 40S ribosomal protein S2 (285-293)
  source 1..27: mol_type = other RNA
acccaggcccccgctgtggcaacaact

SEQ ID NO: 64838 - RNA, 27 nt, synthetic construct
  misc_feature 1..27: note = RNA-binding protein EWS (33-41)
  source 1..27: mol_type = other RNA
acccaggcctacggccaacagagctat

SEQ ID NO: 64839 - RNA, 27 nt, synthetic construct
  misc_feature 1..27: note = 28S ribosomal protein S12, mitochondrial (115-123)
  source 1..27: mol_type = other RNA
acccaggacctgcccggcgtgaagctc

SEQ ID NO: 64840 - RNA, 33 nt, synthetic construct
  misc_feature 1..33: note = Synphilin-1 (60-70)
  source 1..33: mol_type = other RNA
acccagaagcccacaggcatcgccgacgtgtac

SEQ ID NO: 64841 - RNA, 27 nt, synthetic construct
  misc_feature 1..27: note = U5 small nuclear ribonucleoprotein 200 kDa helicase (1765-1773)
  source 1..27: mol_type = other RNA
acccagaaccccaattactataacctg

SEQ ID NO: 64842 - RNA, 27 nt, synthetic construct
  misc_feature 1..27: note = SWI/SNF-related matrix-associated actin-dependent regulator of chromatin subfamily D member 1 (436-444)
  source 1..27: mol_type = other RNA
acccagagagagttcatgctgagcttt

SEQ ID NO: 64843 - RNA, 27 nt, synthetic construct
  misc_feature 1..27: note = Protein FAM204A (125-133)
  source 1..27: mol_type = other RNA
acccagtggaaggagctgacacaatac

SEQ ID NO: 64844 - RNA, 27 nt, synthetic construct
  misc_feature 1..27: note = Cytoskeleton-associated protein 2 (274-282)
  source 1..27: mol_type = other RNA
accagcgccaacgtgacaatcagaaag

SEQ ID NO: 64845 - RNA, 27 nt, synthetic construct
  misc_feature 1..27: note = Uncharacterized protein KIAA2013 (598-606)
  source 1..27: mol_type = other RNA
accagcgcccccacaggccacactttc

SEQ ID NO: 64846 - RNA, 27 nt, synthetic construct
  misc_feature 1..27: note = Long-chain-fatty-acid-CoA ligase 4 (10-18)
  source 1..27: mol_type = other RNA
accagcgacaagcccggctccccttac

SEQ ID NO: 64847 - RNA, 27 nt, synthetic construct
  misc_feature 1..27: note = Zinc finger MYM-type protein 1 (293-301)
  source 1..27: mol_type = other RNA
accagcgacctgggcaagacagagctc

SEQ ID NO: 64848 - RNA, 27 nt, synthetic construct
  misc_feature 1..27: note = Importin subunit alpha-4 (81-89)
  source 1..27: mol_type = other RNA
accagcgacaaccccgtggtccagctg

SEQ ID NO: 64849 - RNA, 27 nt, synthetic construct
  misc_feature 1..27: note = Dual specificity mitogen-activated protein kinase kinase 3 (150-158)
  source 1..27: mol_type = other RNA
accagcctggacaagttctacagaaaa

SEQ ID NO: 64850 - RNA, 33 nt, synthetic construct
  misc_feature 1..33: note = Prothymosin alpha (8-18)
  source 1..33: mol_type = other RNA
accagctccgagatcacaactaaggacctgaaa

SEQ ID NO: 64851 - RNA, 27 nt, synthetic construct
  misc_feature 1..27: note = Histone-lysine N-methyltransferase SETD2 (1436-1444)
  source 1..27: mol_type = other RNA
accagcgtgccccctggctccgccctg

SEQ ID NO: 64852 - RNA, 27 nt, synthetic construct
  misc_feature 1..27: note = Metastasis-associated protein MTA2 (312-320)
  source 1..27: mol_type = other RNA
accacagacagatacatccagcaaaag

SEQ ID NO: 64853 - RNA, 27 nt, synthetic construct
  misc_feature 1..27: note = Cyclin-dependent kinase 1 (25-33)
  source 1..27: mol_type = other RNA
accacaggccaggtggtcgccatgaag

SEQ ID NO: 64854 - RNA, 33 nt, synthetic construct
  misc_feature 1..33: note = ATP-dependent RNA helicase DHX8 (1166-1176)
  source 1..33: mol_type = other RNA
accacaatcgaccccagatggctggtggagttc

SEQ ID NO: 64855 - RNA, 27 nt, synthetic construct
  misc_feature 1..27: note = Splicing factor 3A subunit 1 (123-131)
  source 1..27: mol_type = other RNA
accacacagcaacagctgccccagaag

SEQ ID NO: 64856 - RNA, 27 nt, synthetic construct
  misc_feature 1..27: note = Germinal-center associated nuclear protein (203-211)
  source 1..27: mol_type = other RNA
accacaagcaacttcactttttccaag

SEQ ID NO: 64857 - RNA, 27 nt, synthetic construct
  misc_feature 1..27: note = Vacuolar protein sorting-associated protein 35 (375-383)
  source 1..27: mol_type = other RNA
accacagtggagatcttcaacaagctg

SEQ ID NO: 64858 - RNA, 30 nt, synthetic construct
  misc_feature 1..30: note = Eukaryotic translation initiation factor 3 subunit L (353-362)
  source 1..30: mol_type = other RNA
accacatacaagtatgagatgatcaacaaa

SEQ ID NO: 64859 - RNA, 27 nt, synthetic construct
  misc_feature 1..27: note = Cofilin-1 (12-20)
  source 1..27: mol_type = other RNA
accgtggacgatccctacgccacattc

SEQ ID NO: 64860 - RNA, 27 nt, synthetic construct
  misc_feature 1..27: note = CCAAT/enhancer-binding protein beta (266-274)
  source 1..27: mol_type = other RNA
accgtggacaagcacagcgatgagtac

SEQ ID NO: 64861 - RNA, 33 nt, synthetic construct
  misc_feature 1..33: note = WD repeat-containing protein 48 (379-389)
  source 1..33: mol_type = other RNA
accgtggacaagaacatgcccaaattcaataag

SEQ ID NO: 64862 - RNA, 27 nt, synthetic construct
  misc_feature 1..27: note = TRAF2 and NCK-interacting protein kinase (352-360)
  source 1..27: mol_type = other RNA
accgtggaggaaggccagagactgaag

SEQ ID NO: 64863 - RNA, 30 nt, synthetic construct
  misc_feature 1..30: note = Nicotinamide phosphoribosyltransferase (460-469)
  source 1..30: mol_type = other RNA
accgtgttcaagaacggcaaagtcacaaag

SEQ ID NO: 64864 - RNA, 27 nt, synthetic construct
  misc_feature 1..27: note = E3 ubiquitin-protein ligase RNF213 (4830-4838)
  source 1..27: mol_type = other RNA
accgtgttcctgagcacatggaacaag

SEQ ID NO: 64865 - RNA, 27 nt, synthetic construct
  misc_feature 1..27: note = Chromatin assembly factor 1 subunit B (444-452)
  source 1..27: mol_type = other RNA
accgtgatcagagacccccctagcatt

SEQ ID NO: 64866 - RNA, 27 nt, synthetic construct
  misc_feature 1..27: note = Glycine-tRNA ligase (350-358)
  source 1..27: mol_type = other RNA
accgtgctgggctacttcatcgggaga

SEQ ID NO: 64867 - RNA, 33 nt, synthetic construct
  misc_feature 1..33: note = Beta-lactamase-like protein 2 (237-247)
  source 1..33: mol_type = other RNA
accgtgatggagctggtcaagatcatttacaaa

SEQ ID NO: 64868 - RNA, 27 nt, synthetic construct
  misc_feature 1..27: note = Probable U3 small nucleolar RNA-associated protein 11 (238-246)
  source 1..27: mol_type = other RNA
accgtgaacagccccgccatctacaag

SEQ ID NO: 64869 - RNA, 30 nt, synthetic construct
  misc_feature 1..30: note = Complex I assembly factor TIMMDC1, mitochondrial (151-160)
  source 1..30: mol_type = other RNA
accgtgaacacaagcctgaatgtctacaga

SEQ ID NO: 64870 - RNA, 27 nt, synthetic construct
  misc_feature 1..27: note = Coiled-coil domain-containing protein 66 (124-132)
  source 1..27: mol_type = other RNA
accgtgaacacaagcctggtcggcaag

SEQ ID NO: 64871 - RNA, 27 nt, synthetic construct
  misc_feature 1..27: note = Exportin-1 (648-656)
  source 1..27: mol_type = other RNA
accgtgcaggagcacctgatcgaaaag

SEQ ID NO: 64872 - RNA, 27 nt, synthetic construct
  misc_feature 1..27: note = SWI/SNF-related matrix-associated actin-dependent regulator of chromatin subfamily A containing DEAD/H box 1 (109-117)
  source 1..27: mol_type = other RNA
accgtgcaggagaagacattcaacaaa

SEQ ID NO: 64873 - RNA, 27 nt, synthetic construct
  misc_feature 1..27: note = Collagen alpha-3(VI) chain (2723-2731)
  source 1..27: mol_type = other RNA
accgtgagaccccctgtcgccgttaag

SEQ ID NO: 64874 - RNA, 27 nt, synthetic construct
  misc_feature 1..27: note = Cleavage and polyadenylation specificity factor subunit 3 (440-448)
  source 1..27: mol_type = other RNA
accgtgacaactgtcatcctggaggtt

SEQ ID NO: 64875 - RNA, 33 nt, synthetic construct
  misc_feature 1..33: note = Transformation/transcription domain-associated protein (10-20)
  source 1..33: mol_type = other RNA
accgtggtcgaccagacaactctgatgaagaaa

SEQ ID NO: 64876 - RNA, 36 nt, synthetic construct
  misc_feature 1..36: note = Endoplasmic reticulum-Golgi intermediate compartment protein 1 (103-114)
  source 1..36: mol_type = other RNA
accgtgtacgaggacaagagcggcaaacagagatat

SEQ ID NO: 64877 - RNA, 36 nt, synthetic construct
  misc_feature 1..36: note = HIG1 domain family member 2A, mitochondrial (27-38)
  source 1..36: mol_type = other RNA
accgtgtacagaaaccccgagagcttcaaggaaaaa

SEQ ID NO: 64878 - RNA, 27 nt, synthetic construct
  misc_feature 1..27: note = Neuroblastoma-amplified sequence (1950-1958)
  source 1..27: mol_type = other RNA
acctacgccgacacactgaaccacctc

SEQ ID NO: 64879 - RNA, 27 nt, synthetic construct
  misc_feature 1..27: note = Dystonin (672-680)
  source 1..27: mol_type = other RNA
acctacgccgagaagctgcacagactc

SEQ ID NO: 64880 - RNA, 27 nt, synthetic construct
  misc_feature 1..27: note = Unconventional myosin-Va (386-394)
  source 1..27: mol_type = other RNA
acctacatcaagcccattagcaaactg

SEQ ID NO: 64881 - RNA, 27 nt, synthetic construct
  misc_feature 1..27: note = Protein transport protein Sec24B (640-648)
  source 1..27: mol_type = other RNA
acctacatcaaccccttcgtgagcttt

SEQ ID NO: 64882 - RNA, 33 nt, synthetic construct; identical to SEQ ID NO: 40655
  misc_feature 1..33: note = MORN repeat-containing protein 1 (177-187)
  source 1..33: mol_type = other RNA

SEQ ID NO: 64883 - RNA, 27 nt, synthetic construct
  misc_feature 1..27: note = Nesprin-2 (2589-2597)
  source 1..27: mol_type = other RNA
acctacctggacaagatcaaaaagttc

SEQ ID NO: 64884 - RNA, 27 nt, synthetic construct
  misc_feature 1..27: note = Interferon-induced protein with tetratricopeptide repeats 1 (116-124)
  source 1..27: mol_type = other RNA
acctacctggacaaggtggagaacatc

SEQ ID NO: 64885 - RNA, 27 nt, synthetic construct
  misc_feature 1..27: note = Putative UDP-GlcNAc:betaGal beta-1,3-N-acetylglucosaminyltransferase LOC100288842 (347-355)
  source 1..27: mol_type = other RNA
acctacctggacagcttcaagagattt

SEQ ID NO: 64886 - RNA, 33 nt, synthetic construct
  misc_feature 1..33: note = Tenascin (710-720)
  source 1..33: mol_type = other RNA
acctacctgcccgcccctgagggcctcaagttc

SEQ ID NO: 64887 - RNA, 27 nt, synthetic construct
  misc_feature 1..27: note = Mid1-interacting protein 1 (6-14)
  source 1..27: mol_type = other RNA
acctacaaccagaagcacagcctgttc

SEQ ID NO: 64888 - RNA, 27 nt, synthetic construct
  misc_feature 1..27: note = Glycogenin-2 (121-129)
  source 1..27: mol_type = other RNA
acctacagccccgccttcaagcagttt

SEQ ID NO: 64889 - RNA, 27 nt, synthetic construct
  misc_feature 1..27: note = 60S ribosomal protein L28 (24-32)
  source 1..27: mol_type = other RNA
acctacagcacagagcccaacaatctg

SEQ ID NO: 64890 - RNA, 33 nt, synthetic construct
  misc_feature 1..33: note = Vacuolar protein sorting-associated protein 13B (523-533)
  source 1..33: mol_type = other RNA
acctacacagagatcgccggcatgcagagattc

SEQ ID NO: 64891 - RNA, 27 nt, synthetic construct
  misc_feature 1..27: note = 5'-3' exoribonuclease 1 (313-321)
  source 1..27: mol_type = other RNA
acctacgtgacaatcctgcccgagctc

SEQ ID NO: 64892 - RNA, 27 nt, synthetic construct
  misc_feature 1..27: note = EF-hand calcium-binding domain-containing protein 11 (105-113)
  source 1..27: mol_type = other RNA
acctactatagaggcttcctgacactc

SEQ ID NO: 64893 - RNA, 27 nt, synthetic construct
  misc_feature 1..27: note = Exocyst complex component 4 (15-23)
  source 1..27: mol_type = other RNA
gtggccgctgcacacagcgtcgttctg

SEQ ID NO: 64894 - RNA, 27 nt, synthetic construct
  misc_feature 1..27: note = Pre-mRNA-splicing factor RBM22 (282-290)
  source 1..27: mol_type = other RNA
gtggccgctgagaagagcttcaacaaa

SEQ ID NO: 64895 - RNA, 27 nt, synthetic construct
  misc_feature 1..27: note = Protein disulfide-isomerase A4 (76-84)
  source 1..27: mol_type = other RNA
gtggccgacaaggataccgtcctgctc

SEQ ID NO: 64896 - RNA, 30 nt, synthetic construct
  misc_feature 1..30: note Dolichyl-diphosphooligosaccharide-proteinosyltransferase 48 kDa subunit (203-212)
  source 1..30: mol_type = other RNA
gtggccgaccccgataaccctctggtcctc

SEQ ID NO: 64897 - RNA, 33 nt, synthetic construct
  misc_feature 1..33: note = KN motif and ankyrin repeat domain-containing protein 2 (489-499)
  source 1..33: mol_type = other RNA
gtggccgaccccaccgctcacagaaggagcctg

SEQ ID NO: 64898 - RNA, 27 nt, synthetic construct
  misc_feature 1..27: note = 40S ribosomal protein S5 (11-19)
  source 1..27: mol_type = other RNA
gtggccgagacccccgacatcaagctg

SEQ ID NO: 64899 - RNA, 27 nt, synthetic construct
  misc_feature 1..27: note = ATP-dependent 6-phosphofructokinase, liver type (717-725)
  source 1..27: mol_type = other RNA
gtggccttcagccccgtcaccgagctg

SEQ ID NO: 64900 - RNA, 27 nt, synthetic construct
  misc_feature 1..27: note = Inosine-5'-monophosphate dehydrogenase 2 (219-227)
  source 1..27: mol_type = other RNA
gtggccatcattgctagaaccgacctg

SEQ ID NO: 64901 - RNA, 27 nt, synthetic construct
  misc_feature 1..27: note = Transmembrane protein 41B (243-251)
  source 1..27: mol_type = other RNA
gtggccatcaaggctggcaccacactg

SEQ ID NO: 64902 - RNA, 33 nt, synthetic construct
  misc_feature 1..33: note = Importin-9 (102-112)
  source 1..33: mol_type = other RNA
gtggccatgagccccgagctgatccagcaattc

SEQ ID NO: 64903 - RNA, 27 nt, synthetic construct
  misc_feature 1..27: note = Cytochrome c oxidase subunit 7A2, mitochondrial (75-83)
  source 1..27: mol_type = other RNA
gtggccagcttccccaagaaacaggag

SEQ ID NO: 64904 - RNA, 27 nt, synthetic construct
  misc_feature 1..27: note = Transketolase (365-373)
  source 1..27: mol_type = other RNA
gtggccaccgagaaggctgtcgaactg

SEQ ID NO: 64905 - RNA, 27 nt, synthetic construct
  misc_feature 1..27: note = Hydroxyacylglutathione hydrolase-like protein (26-34)
  source 1..27: mol_type = other RNA
gtggccgtcgacgttgctgtgcccaag

SEQ ID NO: 64906 - RNA, 42 nt, synthetic construct
  misc_feature 1..42: note = Myosin-9 (1950-1963)
  source 1..42: mol_type = other RNA
gtggacggcaaggccgatggggctgaggcaaaacccgccgaa

SEQ ID NO: 64907 - RNA, 27 nt, synthetic construct
  misc_feature 1..27: note = StAR-related lipid transfer protein 13 (841-849)
  source 1..27: mol_type = other RNA
gtggaggccccccctagcgtcgttctg

SEQ ID NO: 64908 - RNA, 30 nt, synthetic construct; identical to SEQ ID NO: 40681
  misc_feature 1..30: note = Cytoplasmic dynein 1 heavy chain 1 (236-245)
  source 1..30: mol_type = other RNA

SEQ ID NO: 64909 - RNA, 30 nt, synthetic construct
  misc_feature 1..30: note = Protein strawberry notch homolog 1 (1087-1096)
  source 1..30: mol_type = other RNA
gtggaggacagaagcggcatcctgaccctc

SEQ ID NO: 64910 - RNA, 33 nt, synthetic construct
  misc_feature 1..33: note = Condensin complex subunit 3 (683-693)
  source 1..33: mol_type = other RNA
gtggaggaaaccgccacagctaagaacgtcctg

SEQ ID NO: 64911 - RNA, 30 nt, synthetic construct
  misc_feature 1..30: note = Serine/threonine-protein phosphatase 2A 55 kDa regulatory subunit B alpha isoform (34-43)
  source 1..30: mol_type = other RNA
gtggagttcaaccacagcggcgaactgctc

SEQ ID NO: 64912 - RNA, 33 nt, synthetic construct
  misc_feature 1..33: note = Dynactin subunit 3 (113-123)
  source 1..33: mol_type = other RNA
gtggagatcaccgaagagagcaaggccctgctc

SEQ ID NO: 64913 - RNA, 33 nt, synthetic construct
  misc_feature 1..33: note = Coatomer subunit delta (229-239)
  source 1..33: mol_type = other RNA
gtggagaacgaagacaagaaaggcgtccagctg

SEQ ID NO: 64914 - RNA, 36 nt, synthetic construct
  misc_feature 1..36: note = Transmembrane emp24 domain-containing protein 4 (79-90)
  source 1..36: mol_type = other RNA
gtggaggtcaaggaccccgatggcaaagttgtgctg

SEQ ID NO: 64915 - RNA, 30 nt, synthetic construct; identical to SEQ ID NO: 40688
  misc_feature 1..30: note = Neuroblast differentiation-associated protein AHNAK (866-875)
  source 1..30: mol_type = other RNA

SEQ ID NO: 64916 - RNA, 27 nt, synthetic construct
  misc_feature 1..27: note = Coatomer subunit alpha (256-264)
  source 1..27: mol_type = other RNA
gtgttccaccccagacaggagctgatc

SEQ ID NO: 64917 - RNA, 27 nt, synthetic construct
  misc_feature 1..27: note = Alpha-internexin (107-115)
  source 1..27: mol_type = other RNA
gtgttcatcgagaaggtccaccagctg

SEQ ID NO: 64918 - RNA, 27 nt, synthetic construct
  misc_feature 1..27: note = Protein unc-119 homolog B (162-170)
  source 1..27: mol_type = other RNA
gtgggcgacaagcccgtcagcaacttc

SEQ ID NO: 64919 - RNA, 27 nt, synthetic construct
  misc_feature 1..27: note = Dehydrogenase/reductase SDR family member on chromosome X (20-28)
  source 1..27: mol_type = other RNA
gtgatcctggcccagctccttagaagg

SEQ ID NO: 64920 - RNA, 30 nt, synthetic construct
  misc_feature 1..30: note = Transcription initiation factor IIA subunit 1 (21-30)
  source 1..30: mol_type = other RNA
gtgatcaacgacgtcagagatattttcctg

SEQ ID NO: 64921 - RNA, 27 nt, synthetic construct
  misc_feature 1..27: note = Protein FAM208B (1046-1054)
  source 1..27: mol_type = other RNA
gtgatcaaccccgagcctattaccctg

SEQ ID NO: 64922 - RNA, 27 nt, synthetic construct
  misc_feature 1..27: note = Copine-2 (523-531)
  source 1..27: mol_type = other RNA
gtgctggccgagctcccccagcaagtc

SEQ ID NO: 64923 - RNA, 33 nt, synthetic construct
  misc_feature 1..33: note = High affinity cationic amino acid transporter 1 (147-157)
  source 1..33: mol_type = other RNA
gtgctggccgagaaccccgacatcttcgctgtc

SEQ ID NO: 64924 - RNA, 39 nt, synthetic construct
  misc_feature 1..39: note = Neudesin (19-31)
  source 1..39: mol_type = other RNA
gtgctggccctcgctcccggccttcctaccgcaagagcc

SEQ ID NO: 64925 - RNA, 39 nt, synthetic construct
  misc_feature 1..39: note = Activating signal cointegrator 1 complex subunit 2 (166-178)
  source 1..39: mol_type = other RNA
gtgctgttcggcaaggggaacagccccctccttcagaaa

SEQ ID NO: 64926 - RNA, 33 nt, synthetic construct
  misc_feature 1..33: note = Acyl-CoA:lysophosphatidylglycerol acyltransferase 1 (180-190)
  source 1..33: mol_type = other RNA
gtgctgttccccgagggcgggtttctcagaaag

SEQ ID NO: 64927 - RNA, 27 nt, synthetic construct
  misc_feature 1..27: note = Importin-7 (169-177)
  source 1..27: mol_type = other RNA
gtgctgatccagaagcaaattttcaaa

SEQ ID NO: 64928 - RNA, 27 nt, synthetic construct
  misc_feature 1..27: note = Tight junction protein ZO-1 (1634-1642)
  source 1..27: mol_type = other RNA
gtgctgagctccatcgagaccggcgtc

SEQ ID NO: 64929 - RNA, 27 nt, synthetic construct
  misc_feature 1..27: note = Interleukin-4 receptor subunit alpha (335-343)
  source 1..27: mol_type = other RNA
gtgctgtggcccgagagcatctccgtc

SEQ ID NO: 64930 - RNA, 36 nt, synthetic construct
  misc_feature 1..36: note Dolichyl-diphosphooligosaccharide-proteinosyltransferase subunit 4 (23-34)
  source 1..36: mol_type = other RNA
gtgctgtaccactatgtcgccgttaacaatcccaag

SEQ ID NO: 64931 - RNA, 33 nt, synthetic construct
  misc_feature 1..33: note = Clathrin heavy chain 1 (788-798)
  source 1..33: mol_type = other RNA
gtgctgtacctctatagaaacaatcttcagaag

SEQ ID NO: 64932 - RNA, 27 nt, synthetic construct
  misc_feature 1..27: note = ADNP homeobox protein 2 (968-976)
  source 1..27: mol_type = other RNA
gtgatgcacgacagctccttctctgtc

SEQ ID NO: 64933 - RNA, 30 nt, synthetic construct
  misc_feature 1..30: note = Myosin-10 (1967-1976)
  source 1..30: mol_type = other RNA
gtgaacgagacccagccccctcaaagcgaa

SEQ ID NO: 64934 - RNA, 27 nt, synthetic construct
  misc_feature 1..27: note = Fas-activated serine/threonine kinase (383-391)
  source 1..27: mol_type = other RNA
gtgcccatcttccctcagccactgatt

SEQ ID NO: 64935 - RNA, 33 nt, synthetic construct
  misc_feature 1..33: note = DNA-(apurinic or apyrimidinic site) lyase (172-182)
  source 1..33: mol_type = other RNA
gtgcccaacgccggcagagggctggtcaggctc

SEQ ID NO: 64936 - RNA, 27 nt, synthetic construct
  misc_feature 1..27: note = Eukaryotic translation initiation factor 3 subunit A (428-436)
  source 1..27: mol_type = other RNA
gtgccccagctgcaaaacaataccatc

SEQ ID NO: 64937 - RNA, 27 nt, synthetic construct
  misc_feature 1..27: note = Zinc finger CCCH domain-containing protein 7A (237-245)
  source 1..27: mol_type = other RNA
gtgcccgtcatgcctctgaccagcatc

SEQ ID NO: 64938 - RNA, 24 nt, synthetic construct
  misc_feature 1..24: note = Cellular tumor antigen p53 (218-225)
  source 1..24: mol_type = other RNA
gtgccctacgagcctccagaagtc

SEQ ID NO: 64939 - RNA, 27 nt, synthetic construct
  misc_feature 1..27: note = 40S ribosomal protein S11 (120-128)
  source 1..27: mol_type = other RNA
gtgcagatcggcgacattgtcaccgtt

SEQ ID NO: 64940 - RNA, 27 nt, synthetic construct
  misc_feature 1..27: note = Golgin-45 (153-161)
  source 1..27: mol_type = other RNA
gtgcagaccgaggtcaacagagaactg

SEQ ID NO: 64941 - RNA, 27 nt, synthetic construct
  misc_feature 1..27: note = Centrosomal protein of 192 kDa (314-322)
  source 1..27: mol_type = other RNA
gtgagaaaccccaggatcaccagcctg

SEQ ID NO: 64942 - RNA, 27 nt, synthetic construct
  misc_feature 1..27: note = Oxidoreductase HTATIP2 (105-113)
  source 1..27: mol_type = other RNA
gtgagagtcgacagggattacgttctg

SEQ ID NO: 64943 - RNA, 27 nt, synthetic construct
  misc_feature 1..27: note = Serine/threonine-protein phosphatase 4 catalytic subunit (102-110)
  source 1..27: mol_type = other RNA
gtgagataccccgacaggatcaccctg

SEQ ID NO: 64944 - RNA, 27 nt, synthetic construct
  misc_feature 1..27: note = Phosphorylated CTD-interacting factor 1 (411-419)
  source 1..27: mol_type = other RNA
gtgagcgccccccctatgccatccgtc

SEQ ID NO: 64945 - RNA, 27 nt, synthetic construct
  misc_feature 1..27: note = Protein prenyltransferase alpha subunit repeat-containing protein 1 (214-222)
  source 1..27: mol_type = other RNA
gtgagcgaccactccggcttccattac

SEQ ID NO: 64946 - RNA, 36 nt, synthetic construct
  misc_feature 1..36: note = Nuclear protein localization protein 4 homolog (316-327)
  source 1..36: mol_type = other RNA
gtgagcgaggacaccagaaagggcacagtcaggtac

SEQ ID NO: 64947 - RNA, 27 nt, synthetic construct
  misc_feature 1..27: note = Neuronal regeneration-related protein (79-87)
  source 1..27: mol_type = other RNA
gtgagccaggagcccttccctaacaag

SEQ ID NO: 64948 - RNA, 27 nt, synthetic construct
  misc_feature 1..27: note = Mannosyl-oligosaccharide glucosidase (210-218)
  source 1..27: mol_type = other RNA
gtgaccgacggcaaggaggtcctgctc

SEQ ID NO: 64949 - RNA, 27 nt, synthetic construct
  misc_feature 1..27: note = Attractin (8-16)
  source 1..27: mol_type = other RNA
gtgaccgacggccccgggaactacaag

SEQ ID NO: 64950 - RNA, 27 nt, synthetic construct
  misc_feature 1..27: note = U3 small nucleolar ribonucleoprotein protein IMP3 (23-31)
  source 1..27: mol_type = other RNA
gtgaccgaccacaacctgcatgagctc

SEQ ID NO: 64951 - RNA, 27 nt, synthetic construct
  misc_feature 1..27: note = Protocadherin Fat 1 (1217-1225)
  source 1..27: mol_type = other RNA
gtgaccgacaacggcagcccccctaag

SEQ ID NO: 64952 - RNA, 30 nt, synthetic construct
  misc_feature 1..30: note = Death-inducer obliterator 1 (716-725)
  source 1..30: mol_type = other RNA
gtgaccgacaacagatacaagagcaaatat

SEQ ID NO: 64953 - RNA, 33 nt, synthetic construct
  misc_feature 1..33: note = Fructose-bisphosphate aldolase A (87-97)
  source 1..33: mol_type = other RNA
gtgaccgagaaggtcctggccgctgtttacaaa

SEQ ID NO: 64954 - RNA, 33 nt, synthetic construct
  misc_feature 1..33: note = Prefoldin subunit 4 (11-21)
  source 1..33: mol_type = other RNA
gtgaccttcgaggaccagcaaaagatcaacaaa

SEQ ID NO: 64955 - RNA, 33 nt, synthetic construct
  misc_feature 1..33: note = Phosphoserine aminotransferase (349-359)
  source 1..33: mol_type = other RNA
gtgaccatcgaggacgtccagaagctggccgct

SEQ ID NO: 64956 - RNA, 39 nt, synthetic construct
  misc_feature 1..39: note = Phosphate carrier protein, mitochondrial (107-119)
  source 1..39: mol_type = other RNA
gtgaccctgaaggaggacggcgtcagagggctcgccaaa

SEQ ID NO: 64957 - RNA, 30 nt, synthetic construct
  misc_feature 1..30: note = Apoptosis inhibitor 5 (368-377)
  source 1..30: mol_type = other RNA
gtgaccctgagctggaagcccgtccagaaa

SEQ ID NO: 64958 - RNA, 30 nt, synthetic construct
  misc_feature 1..30: note = Small subunit processome component 20 homolog (830-839)
  source 1..30: mol_type = other RNA
gtgaccaaccccgacatcgccgctaagaaa

SEQ ID NO: 64959 - RNA, 27 nt, synthetic construct
  misc_feature 1..27: note = Putative PIP5K1A and PSMD4-like protein (656-664)
  source 1..27: mol_type = other RNA
gtgaccgtcccccctggcccaagcctg

SEQ ID NO: 64960 - RNA, 30 nt, synthetic construct
  misc_feature 1..30: note = Something about silencing protein 10 (302-311)
  source 1..30: mol_type = other RNA
gtgacctacagaaacctgatcaataagctc

SEQ ID NO: 64961 - RNA, 27 nt, synthetic construct
  misc_feature 1..27: note = 116 kDa U5 small nuclear ribonucleoprotein component (795-803)
  source 1..27: mol_type = other RNA
gtggtcgcccaggagcccctgcacaga

SEQ ID NO: 64962 - RNA, 27 nt, synthetic construct
  misc_feature 1..27: note = E3 ubiquitin-protein ligase TRIM23 (309-317)
  source 1..27: mol_type = other RNA
gtggtcgacgcccacgttagagagaag

SEQ ID NO: 64963 - RNA, 27 nt, synthetic construct
  misc_feature 1..27: note = X-ray repair cross-complementing protein 5 (174-182)
  source 1..27: mol_type = other RNA
gtggtcgacgccaagaccctgaaaaag

SEQ ID NO: 64964 - RNA, 36 nt, synthetic construct
  misc_feature 1..36: note = DNA damage-binding protein 1 (364-375)
  source 1..36: mol_type = other RNA
gtggtcgacctggagagacagggccaagggcagctc

SEQ ID NO: 64965 - RNA, 33 nt, synthetic construct
  misc_feature 1..33: note = Vacuolar protein sorting-associated protein 45 (3-13)
  source 1..33: mol_type = other RNA
gtggtcttcgccgttaagcagtacatcagcaaa

SEQ ID NO: 64966 - RNA, 33 nt, synthetic construct
  misc_feature 1..33: note = 60S ribosomal protein L8 (15-25)
  source 1..33: mol_type = other RNA
gtggtcttcagagacccctacaggtttaagaaa

SEQ ID NO: 64967 - RNA, 30 nt, synthetic construct
  misc_feature 1..30: note = Rho-related BTB domain-containing protein 3 (256-265)
  source 1..30: mol_type = other RNA
gtggtcttctacaaccccaatctgaagaaa

SEQ ID NO: 64968 - RNA, 33 nt, synthetic construct
  misc_feature 1..33: note = Protein FAM171B (18-28)
  source 1..33: mol_type = other RNA
gtggtcctgctcaaggccagacttgttcccgct

SEQ ID NO: 64969 - RNA, 33 nt, synthetic construct
  misc_feature 1..33: note = Clathrin interactor 1 (17-27)
  source 1..33: mol_type = other RNA
gtggtcatgaactacagcgagatcgaatccaag

SEQ ID NO: 64970 - RNA, 33 nt, synthetic construct
  misc_feature 1..33: note = Protein disulfide-isomerase A4 (356-366)
  source 1..33: mol_type = other RNA
gtggtcatgcagcccgagaagttccaaagcaaa

SEQ ID NO: 64971 - RNA, 30 nt, synthetic construct
  misc_feature 1..30: note = Sulfate anion transporter 1 (417-426)
  source 1..30: mol_type = other RNA
gtggtcagcgccaccgttgtgctgctcgta

SEQ ID NO: 64972 - RNA, 27 nt, synthetic construct
  misc_feature 1..27: note = 26S proteasome non-ATPase regulatory subunit 14 (143-151)
  source 1..27: mol_type = other RNA
gtggtcgttgaccccatccagagcgtg

SEQ ID NO: 64973 - RNA, 27 nt, synthetic construct
  misc_feature 1..27: note = Sodium/potassium-transporting ATPase subunit alpha-1 (185-193)
  source 1..27: mol_type = other RNA
gtggtcgttggcgacctggtggaggta

SEQ ID NO: 64974 - RNA, 27 nt, synthetic construct
  misc_feature 1..27: note = Receptor tyrosine-protein kinase erbB-3 (147-155)
  source 1..27: mol_type = other RNA
gtgtacatcgagaagaacgacaaactg

SEQ ID NO: 64975 - RNA, 27 nt, synthetic construct
  misc_feature 1..27: note = Uncharacterized protein C5orf42 (702-710)
  source 1..27: mol_type = other RNA
gtgtacatcctgcagcccgaggtcatt

SEQ ID NO: 64976 - RNA, 30 nt, synthetic construct
  misc_feature 1..30: note = Small nuclear ribonucleoprotein Sm D3 (61-70)
  source 1..30: mol_type = other RNA
gtgtacatcagaggcagcaagattaggttc

SEQ ID NO: 64977 - RNA, 27 nt, synthetic construct
  misc_feature 1..27: note = Selenoprotein K (56-64)
  source 1..27: mol_type = other RNA
gtgtacatcagcaacggccaggtcctg

SEQ ID NO: 64978 - RNA, 27 nt, synthetic construct
  misc_feature 1..27: note = Fibronectin type III domain-containing protein 3B (651-659)
  source 1..27: mol_type = other RNA
gtgtacaagggcgaggaagccaccttc

SEQ ID NO: 64979 - RNA, 24 nt, synthetic construct
  misc_feature 1..24: note = Transmembrane protein 41B (71-78)
  source 1..24: mol_type = other RNA
gtgtacaagaacttcccccagctg

SEQ ID NO: 64980 - RNA, 27 nt, synthetic construct
  misc_feature 1..27: note = Surfeit locus protein 4 (220-228)
  source 1..27: mol_type = other RNA
gtgtacaagcccatgcacgacttcctg

SEQ ID NO: 64981 - RNA, 30 nt, synthetic construct
  misc_feature 1..30: note = Mitogen-activated protein kinase-binding protein 1 (356-365)
  source 1..30: mol_type = other RNA
gtgtacaacgaccacagcatctatgtctgg

SEQ ID NO: 64982 - RNA, 27 nt, synthetic construct
  misc_feature 1..27: note CMP-N-acetylneuraminate-beta-galactosamide-alpha-2,3-sialyl transf erase 1 (190-198)
  source 1..27: mol_type = other RNA
gtgtaccccgagagcttcagagaactg

SEQ ID NO: 64983 - RNA, 27 nt, synthetic construct
  misc_feature 1..27: note = Inactive tyrosine-protein kinase 7 (603-611)
  source 1..27: mol_type = other RNA
gtgtaccagggccacaccgccctgctc

SEQ ID NO: 64984 - RNA, 27 nt, synthetic construct
  misc_feature 1..27: note = Bcl-2 homologous antagonist/killer (142-150)
  source 1..27: mol_type = other RNA
gtgtaccagcacggcctgaccgggttc

SEQ ID NO: 64985 - RNA, 27 nt, synthetic construct
  misc_feature 1..27: note = Rho GTPase-activating protein 5 (413-421)
  source 1..27: mol_type = other RNA
gtgtaccagaaccacgtccaacatctg

SEQ ID NO: 64986 - RNA, 27 nt, synthetic construct
  misc_feature 1..27: note = Mitochondrial peptide methionine sulfoxide reductase (82-90)
  source 1..27: mol_type = other RNA
gtgtaccagcccgagcacatgagcttc

SEQ ID NO: 64987 - RNA, 33 nt, synthetic construct
  misc_feature 1..33: note = Complex I assembly factor TIMMDC1, mitochondrial (158-168)
  source 1..33: mol_type = other RNA
gtgtacagaaacaaggacgccctgagccacttc

SEQ ID NO: 64988 - RNA, 30 nt, synthetic construct; identical to SEQ ID NO: 40761
  misc_feature 1..30: note = Unconventional myosin-XVIIIa (453-462)
  source 1..30: mol_type = other RNA

SEQ ID NO: 64989 - RNA, 30 nt, synthetic construct
  misc_feature 1..30: note = Latent-transforming growth factor beta-binding protein 3 (448-457)
  source 1..30: mol_type = other RNA
gtgtacagctccgccgagttccactctctg

SEQ ID NO: 64990 - RNA, 27 nt, synthetic construct
  misc_feature 1..27: note = Uncharacterized protein C11orf80 (292-300)
  source 1..27: mol_type = other RNA
gtgtacaccctgctcacaactcacctt

SEQ ID NO: 64991 - RNA, 27 nt, synthetic construct
  misc_feature 1..27: note = Integrin alpha-11 (440-448)
  source 1..27: mol_type = other RNA
gtgtacgtcgccggcgctcccagattc

SEQ ID NO: 64992 - RNA, 27 nt, synthetic construct
  misc_feature 1..27: note = Angiomotin (598-606)
  source 1..27: mol_type = other RNA
gtgtacgtcgacaaggttgagaaaatg

SEQ ID NO: 64993 - RNA, 27 nt, synthetic construct
  misc_feature 1..27: note = Early endosome antigen 1 (285-293)
  source 1..27: mol_type = other RNA
gtgtacgtccaggagctgcaaaagctc

SEQ ID NO: 64994 - RNA, 27 nt, synthetic construct
  misc_feature 1..27: note = Transformation/transcription domain-associated protein (1973-1981)
  source 1..27: mol_type = other RNA
gtgtactatcccgtcagacaccatctg

SEQ ID NO: 64995 - RNA, 27 nt, synthetic construct
  misc_feature 1..27: note = Actin-binding protein anillin (212-220)
  source 1..27: mol_type = other RNA
tgggaggacgatgtgaaccacagcttc

SEQ ID NO: 64996 - RNA, 27 nt, synthetic construct
  misc_feature 1..27: note = AP-5 complex subunit zeta-1 (1307-1315)
  source 1..27: mol_type = other RNA
tacgccgctggcgtgcacagcgtcctg

SEQ ID NO: 64997 - RNA, 30 nt, synthetic construct
  misc_feature 1..30: note = Proline-rich protein 12 (50-59)
  source 1..30: mol_type = other RNA
tacgccgctccccaccctctgcagagctat

SEQ ID NO: 64998 - RNA, 27 nt, synthetic construct
  misc_feature 1..27: note = A-kinase anchor protein 12 (1228-1236)
  source 1..27: mol_type = other RNA
tacgccgacgagaagaccaaagatgtg

SEQ ID NO: 64999 - RNA, 27 nt, synthetic construct
  misc_feature 1..27: note = Maturin (34-42)
  source 1..27: mol_type = other RNA
tacgccgaccccggcgtgagcttctat

SEQ ID NO: 65000 - RNA, 27 nt, synthetic construct
  misc_feature 1..27: note = Integrin alpha-V (110-118)
  source 1..27: mol_type = other RNA
tacgccaaggacgatcccctggagttc

SEQ ID NO: 65001 - RNA, 27 nt, synthetic construct
  misc_feature 1..27: note = Ras-related protein Rab-1B (43-51)
  source 1..27: mol_type = other RNA
tacgccagcgagaacgtgaataagctg

SEQ ID NO: 65002 - RNA, 27 nt, synthetic construct
  misc_feature 1..27: note = Acetyl-CoA carboxylase 2 (1068-1076)
  source 1..27: mol_type = other RNA
tacgccagcaacatcacctccgtgctg

SEQ ID NO: 65003 - RNA, 30 nt, synthetic construct
  misc_feature 1..30: note = Translocon-associated protein subunit beta (33-42)
  source 1..30: mol_type = other RNA
tacgccgtggagggcagagacctgaccctc

SEQ ID NO: 65004 - RNA, 24 nt, synthetic construct
  misc_feature 1..24: note = Melanoma-associated antigen B2 (233-240)
  source 1..24: mol_type = other RNA
tacgacggcgaggaacacagcgtg

SEQ ID NO: 65005 - RNA, 33 nt, synthetic construct
  misc_feature 1..33: note = Protein phosphatase 1A (59-69)
  source 1..33: mol_type = other RNA
tacgacggccacgccgggagccaggtggctaag

SEQ ID NO: 65006 - RNA, 27 nt, synthetic construct
  misc_feature 1..27: note = NAD(P)H dehydrogenase (quinone) 1 (130-138)
  source 1..27: mol_type = other RNA
tacgacaagggccccttcagaagcaaa

SEQ ID NO: 65007 - RNA, 30 nt, synthetic construct
  misc_feature 1..30: note = Proteasome subunit beta type-4 (177-186)
  source 1..30: mol_type = other RNA
tacgaggcccccagcctggctaccggctat

SEQ ID NO: 65008 - RNA, 27 nt, synthetic construct
  misc_feature 1..27: note = RNA-binding motif protein, X-linked 2 (84-92)
  source 1..27: mol_type = other RNA
tacgaggaccagagaagcaccatcctg

SEQ ID NO: 65009 - RNA, 27 nt, synthetic construct
  misc_feature 1..27: note = SAP30-binding protein (41-49)
  source 1..27: mol_type = other RNA
tacggcgaggacgatttcagcagactg

SEQ ID NO: 65010 - RNA, 27 nt, synthetic construct
  misc_feature 1..27: note = Tubulin-specific chaperone C (219-227)
  source 1..27: mol_type = other RNA
tacggcaaccccaataccctgagactc

SEQ ID NO: 65011 - RNA, 27 nt, synthetic construct
  misc_feature 1..27: note = Regulator of microtubule dynamics protein 1 (188-196)
  source 1..27: mol_type = other RNA
tacatcattaaggagcacttcgaaaaa

SEQ ID NO: 65012 - RNA, 27 nt, synthetic construct
  misc_feature 1..27: note = Tensin-3 (11-19)
  source 1..27: mol_type = other RNA
tacatcaccgagagaattatagccgtg

SEQ ID NO: 65013 - RNA, 27 nt, synthetic construct
  misc_feature 1..27: note = Uncharacterized protein CXorf57 (109-117)
  source 1..27: mol_type = other RNA
tacctggaccccagcctcaactccctt

SEQ ID NO: 65014 - RNA, 27 nt, synthetic construct
  misc_feature 1..27: note = Ragulator complex protein LAMTOR2 (114-122)
  source 1..27: mol_type = other RNA
tacctggaggaacccctcacccaggtg

SEQ ID NO: 65015 - RNA, 27 nt, synthetic construct
  misc_feature 1..27: note = HLA class I histocompatibility antigen, B-15 alpha chain (195-203)
  source 1..27: mol_type = other RNA
tacctggagaacggcaaggaaaccctc

SEQ ID NO: 65016 - RNA, 27 nt, synthetic construct
  misc_feature 1..27: note = Proteasome activator complex subunit 4 (1375-1383)
  source 1..27: mol_type = other RNA
tacctggagcccaagctcacccaggtg

SEQ ID NO: 65017 - RNA, 27 nt, synthetic construct
  misc_feature 1..27: note = Inhibitor of nuclear factor kappa-B kinase subunit alpha (354-362)
  source 1..27: mol_type = other RNA
tacctgttcgacaagagcaaaaccgtg

SEQ ID NO: 65018 - RNA, 27 nt, synthetic construct
  misc_feature 1..27: note = Unconventional myosin-X (243-251)
  source 1..27: mol_type = other RNA
tacctgctcgagaagaacagagtggtc

SEQ ID NO: 65019 - RNA, 33 nt, synthetic construct
  misc_feature 1..33: note = Protein-lysine N-methyltransferase EEF2KMT (112-122)
  source 1..33: mol_type = other RNA
tacctgctccccagcggcgggtccgtgaccctt

SEQ ID NO: 65020 - RNA, 27 nt, synthetic construct
  misc_feature 1..27: note = ER lumen protein-retaining receptor 3 (196-204)
  source 1..27: mol_type = other RNA
tacctgtatgtgaccaaggtcctcaaa

SEQ ID NO: 65021 - RNA, 30 nt, synthetic construct
  misc_feature 1..30: note = Zinc-binding alcohol dehydrogenase domain-containing protein 2 (355-364)
  source 1..30: mol_type = other RNA
tacatgtatatgggcaagaacaccgggaaa

SEQ ID NO: 65022 - RNA, 27 nt, synthetic construct
  misc_feature 1..27: note = Ubiquitin-60S ribosomal protein L40 (64-72)
  source 1..27: mol_type = other RNA
tacaacatccagaaggagagcaccctg

SEQ ID NO: 65023 - RNA, 30 nt, synthetic construct
  misc_feature 1..30: note = Disabled homolog 2-interacting protein (418-427)
  source 1..30: mol_type = other RNA
taccccgacgatagaaccgccaggacactg

SEQ ID NO: 65024 - RNA, 33 nt, synthetic construct
  misc_feature 1..33: note = 7-methylguanosine phosphate-specific 5'-nucleotidase (85-95)
  source 1..33: mol_type = other RNA
taccccatcgagattgaccctcacagaaccgtg

SEQ ID NO: 65025 - RNA, 27 nt, synthetic construct
  misc_feature 1..27: note = RNA polymerase II-associated protein 3 (96-104)
  source 1..27: mol_type = other RNA
taccccaaggaggccgacatcgtgatt

SEQ ID NO: 65026 - RNA, 27 nt, synthetic construct
  misc_feature 1..27: note = Rabankyrin-5 (262-270)
  source 1..27: mol_type = other RNA
taccccctgcacaaggccatcaaagtg

SEQ ID NO: 65027 - RNA, 27 nt, synthetic construct
  misc_feature 1..27: note = AP-1 complex subunit beta-1 (421-429)
  source 1..27: mol_type = other RNA
taccccaacaagtatgagagcgtgatc

SEQ ID NO: 65028 - RNA, 27 nt, synthetic construct
  misc_feature 1..27: note = Ataxin-2 (759-767)
  source 1..27: mol_type = other RNA
taccccgtgcctgtcagcccaggcgtt

SEQ ID NO: 65029 - RNA, 27 nt, synthetic construct
  misc_feature 1..27: note = Ataxin-2-like protein (752-760)
  source 1..27: mol_type = other RNA
tacccctatcctgtgagcaactccgtc

SEQ ID NO: 65030 - RNA, 27 nt, synthetic construct
  misc_feature 1..27: note = Long-chain-fatty-acid-CoA ligase 3 (709-717)
  source 1..27: mol_type = other RNA
taccaggccgacatcgagagaatgtat

SEQ ID NO: 65031 - RNA, 27 nt, synthetic construct
  misc_feature 1..27: note = RNA-binding motif protein 22 (253-261)
  source 1..27: mol_type = other RNA
taccagttcggcgagatcagaaccatt

SEQ ID NO: 65032 - RNA, 27 nt, synthetic construct
  misc_feature 1..27: note = Copine-1 (66-74)
  source 1..27: mol_type = other RNA
tacagattcgagaccgtgcagaagctg

SEQ ID NO: 65033 - RNA, 24 nt, synthetic construct
  misc_feature 1..24: note = Fibronectin type III domain-containing protein 3B (557-564)
  source 1..24: mol_type = other RNA
tacagaggccccagccacacctat

SEQ ID NO: 65034 - RNA, 27 nt, synthetic construct
  misc_feature 1..27: note = Myosin-9 (40-48)
  source 1..27: mol_type = other RNA
tacagaatcggccagagcaaggtgttc

SEQ ID NO: 65035 - RNA, 27 nt, synthetic construct
  misc_feature 1..27: note = Fatty acid desaturase 2 (166-174)
  source 1..27: mol_type = other RNA
tacagaaagcccaaatggaaccacctg

SEQ ID NO: 65036 - RNA, 27 nt, synthetic construct
  misc_feature 1..27: note = Breast cancer anti-estrogen resistance protein 3 (757-765)
  source 1..27: mol_type = other RNA
tacagaatgaacgccgagaggatcctg

SEQ ID NO: 65037 - RNA, 27 nt, synthetic construct
  misc_feature 1..27: note = Unconventional myosin-Ib (72-80)
  source 1..27: mol_type = other RNA
tacagaaacaggaatttctatgagctg

SEQ ID NO: 65038 - RNA, 27 nt, synthetic construct
  misc_feature 1..27: note = Constitutive coactivator of PPAR-gamma-like protein 1 (602-610)
  source 1..27: mol_type = other RNA
tacagacccgtgaggcagtatgtctac

SEQ ID NO: 65039 - RNA, 27 nt, synthetic construct
  misc_feature 1..27: note = E3 ubiquitin-protein ligase MARCH6 (469-477)
  source 1..27: mol_type = other RNA
tacagcgacgcccccgtgtccgagctg

SEQ ID NO: 65040 - RNA, 33 nt, synthetic construct
  misc_feature 1..33: note = Discoidin, CUB and LCCL domain-containing protein 2 (339-349)
  source 1..33: mol_type = other RNA
tacagcgacgatggccagaagtggaccgtgtat

SEQ ID NO: 65041 - RNA, 27 nt, synthetic construct
  misc_feature 1..27: note = TM2 domain-containing protein 2 (68-76)
  source 1..27: mol_type = other RNA
tacagcgacgtggagcacacctccgtc

SEQ ID NO: 65042 - RNA, 27 nt, synthetic construct
  misc_feature 1..27: note = Caveolin-2 (19-27)
  source 1..27: mol_type = other RNA
tacagccaccattccggcctggagtat

SEQ ID NO: 65043 - RNA, 33 nt, synthetic construct
  misc_feature 1..33: note = Calcium-responsive transactivator (198-208)
  source 1..33: mol_type = other RNA
tacagctccgcccagggcgggtctcaacactat

SEQ ID NO: 65044 - RNA, 30 nt, synthetic construct
  misc_feature 1..30: note = Paxillin (31-40)
  source 1..30: mol_type = other RNA
tacagctatcccaccggcaaccacacatac

SEQ ID NO: 65045 - RNA, 27 nt, synthetic construct
  misc_feature 1..27: note = Uridine phosphorylase 1 (20-28)
  source 1..27: mol_type = other RNA
tacaccgagaaggacaaacaggcctat

SEQ ID NO: 65046 - RNA, 33 nt, synthetic construct
  misc_feature 1..33: note = Nucleolin (463-473)
  source 1..33: mol_type = other RNA
tacaccggcgagaaggggcagaaccaagactat

SEQ ID NO: 65047 - RNA, 27 nt, synthetic construct
  misc_feature 1..27: note = Melanophilin (121-129)
  source 1..27: mol_type = other RNA
tactatgagcacgtgaaggccagattc

SEQ ID NO: 65048 - RNA, 27 nt, synthetic construct
  misc_feature 1..27: note = 26S proteasome non-ATPase regulatory subunit 3 (212-220)
  source 1..27: mol_type = other RNA
tactatcacgccagagtgtacgagttc

SEQ ID NO: 65049 - RNA, 27 nt, synthetic construct
  misc_feature 1..27: note = Neuroepithelial cell-transforming gene 1 protein (222-230)
  source 1..27: mol_type = other RNA
tactatatcgacaagctggagtacctc

SEQ ID NO: 65050 - RNA, 27 nt, synthetic construct
  misc_feature 1..27: note = Disheveled-associated activator of morphogenesis 2 (101-109)
  source 1..27: mol_type = other RNA
tactatatcgacagaattaacagcatg

SEQ ID NO: 65051 - RNA, 30 nt, synthetic construct
  misc_feature 1..30: note = DNA-dependent protein kinase catalytic subunit (3101-3110)
  source 1..30: mol_type = other RNA
tactatatccagaacggcattcaaagcttc

SEQ ID NO: 65052 - RNA, 27 nt, synthetic construct
  misc_feature 1..27: note = Coiled-coil domain-containing protein 130 (79-87)
  source 1..27: mol_type = other RNA
tactataccacacccatctacagattc

SEQ ID NO: 65053 - RNA, 27 nt, synthetic construct
  misc_feature 1..27: note = RING finger protein 145 (469-477)
  source 1..27: mol_type = other RNA
tactatgtgaacggcacctacagactg

SEQ ID NO: 65054 - RNA, 27 nt, synthetic construct
  misc_feature 1..27: note = EH domain-containing protein 4 (505-513)
  source 1..27: mol_type = other RNA
gccctggctaagcacctcatcaaaatt

SEQ ID NO: 65055 - RNA, 24 nt, synthetic construct
  misc_feature 1..24: note = Ubiquitin carboxyl-terminal hydrolase 10 (606-613)
  source 1..24: mol_type = other RNA
ttcggcgggcacatcagaagcgtg

SEQ ID NO: 65056 - RNA, 21 nt, synthetic construct
  misc_feature 1..21: note = Guanine nucleotide-binding protein subunit beta-5 (322-328)
  source 1..21: mol_type = other RNA
ttcggccacgagaacagagtg

SEQ ID NO: 65057 - RNA, 30 nt, synthetic construct
  misc_feature 1..30: note = Alpha-actinin-3 (113-122)
  source 1..30: mol_type = other RNA
ttcatcgccagcaagggcgtgaaactggtc

SEQ ID NO: 65058 - RNA, 27 nt, synthetic construct
  misc_feature 1..27: note = Transcriptional regulator Kaiso (564-572)
  source 1..27: mol_type = other RNA
ttcatgagctcccacatcaagtctgtg

SEQ ID NO: 65059 - RNA, 33 nt, synthetic construct
  misc_feature 1..33: note = DNA fragmentation factor subunit alpha (139-149)
  source 1..33: mol_type = other RNA
atcctgctcagcgaggaagaccttcagatgctg

SEQ ID NO: 65060 - RNA, 27 nt, synthetic construct
  misc_feature 1..27: note = Serine/threonine-protein kinase ULK3 (108-116)
  source 1..27: mol_type = other RNA
atcctgcccgagaaggtggccagagtc

SEQ ID NO: 65061 - RNA, 27 nt, synthetic construct
  misc_feature 1..27: note = Protein-lysine N-methyltransferase EEF2KMT (154-162)
  source 1..27: mol_type = other RNA
aagctggacagccccagagtgaccgtc

SEQ ID NO: 65062 - RNA, 27 nt, synthetic construct
  misc_feature 1..27: note = WASH complex subunit 7 (85-93)
  source 1..27: mol_type = other RNA
aaggtgctgaacaaagtcatcaccgtt

SEQ ID NO: 65063 - RNA, 24 nt, synthetic construct
  misc_feature 1..24: note = Myelin expression factor 2 (298-305)
  source 1..24: mol_type = other RNA
ctgttcgacagacccatgcacgtg

SEQ ID NO: 65064 - RNA, 27 nt, synthetic construct
  misc_feature 1..27: note = cAMP-specific 3',5'-cyclic phosphodiesterase 4B (450-458)
  source 1..27: mol_type = other RNA
ctgctcgccgaccttaagaccatggtg

SEQ ID NO: 65065 - RNA, 27 nt, synthetic construct
  misc_feature 1..27: note = Multifunctional methyltransferase subunit TRM112-like protein (8-16)
  source 1..27: mol_type = other RNA
ctgctcagctcccacgtgagaggcgtc

SEQ ID NO: 65066 - RNA, 21 nt, synthetic construct
  misc_feature 1..21: note = 60S ribosomal protein L19 (120-126)
  source 1..21: mol_type = other RNA
atggagcacatccataagctg

SEQ ID NO: 65067 - RNA, 27 nt, synthetic construct
  misc_feature 1..27: note = Melanoma antigen preferentially expressed in tumors (394-402)
  source 1..27: mol_type = other RNA
cagctgctcgcccttctgcccagcttg

SEQ ID NO: 65068 - RNA, 27 nt, synthetic construct
  misc_feature 1..27: note = Proteasome activator complex subunit 4 (564-572)
  source 1..27: mol_type = other RNA
cagctgctcagcgagatcaccagagtg

SEQ ID NO: 65069 - RNA, 27 nt, synthetic construct
  misc_feature 1..27: note = Eukaryotic translation initiation factor 3 subunit C (478-486)
  source 1..27: mol_type = other RNA
caggtgtgcgccatcattgagagagtc

SEQ ID NO: 65070 - RNA, 27 nt, synthetic construct
  misc_feature 1..27: note = Methylsterol monooxygenase 1 (33-41)
  source 1..27: mol_type = other RNA
agaatctacaagtatattcacaaagtg

SEQ ID NO: 65071 - RNA, 27 nt, synthetic construct
  misc_feature 1..27: note = Spectrin beta chain, erythrocytic (86-94)
  source 1..27: mol_type = other RNA
agaatgctgatcaagctccttgaggtg

SEQ ID NO: 65072 - RNA, 33 nt, synthetic construct
  misc_feature 1..33: note = NHP2-like protein 1 (118-128)
  source 1..33: mol_type = other RNA
agcatccagcaatccattgagagactgctcgtg

SEQ ID NO: 65073 - RNA, 27 nt, synthetic construct
  misc_feature 1..27: note = Erlin-2 (41-49)
  source 1..27: mol_type = other RNA
agcctgttctccgccgtgcacaagatc

SEQ ID NO: 65074 - RNA, 27 nt, synthetic construct
  misc_feature 1..27: note = Protein FAM214A (403-411)
  source 1..27: mol_type = other RNA
agcctgcactccaagctcttcagagtg

SEQ ID NO: 65075 - RNA, 27 nt, synthetic construct
  misc_feature 1..27: note = Vacuole membrane protein 1 (82-90)
  source 1..27: mol_type = other RNA
agcctgtggtccatcatttctaaggtg

SEQ ID NO: 65076 - RNA, 27 nt, synthetic construct
  misc_feature 1..27: note = Potassium voltage-gated channel subfamily KQT member 5 (530-538)
  source 1..27: mol_type = other RNA
agcatgctgggcagagtggtcaaggtt

SEQ ID NO: 65077 - RNA, 27 nt, synthetic construct
  misc_feature 1..27: note = Sialate O-acetylesterase (32-40)
  source 1..27: mol_type = other RNA
accatcatgaagaaagtgacaagcgtc

SEQ ID NO: 65078 - RNA, 33 nt, synthetic construct
  misc_feature 1..33: note = Protein ELFN1 (17-27)
  source 1..33: mol_type = other RNA
accctgctccacgccggcgggcttgctagagca

SEQ ID NO: 65079 - RNA, 27 nt, synthetic construct
  misc_feature 1..27: note = Reticulocalbin-1 (21-29)
  source 1..27: mol_type = other RNA
gtgctggcccccagagtcctcagggct

SEQ ID NO: 65080 - RNA, 27 nt, synthetic construct
  misc_feature 1..27: note = Eukaryotic translation initiation factor 3 subunit A (379-387)
  source 1..27: mol_type = other RNA
gtgctgcagtacgtcgttcccgaggtg

SEQ ID NO: 65081 - RNA, 27 nt, synthetic construct
  misc_feature 1..27: note = Intraflagellar transport protein 81 homolog (117-125)
  source 1..27: mol_type = other RNA
tacctggccagattcctcatcaagctt

SEQ ID NO: 65082 - RNA, 27 nt, synthetic construct
  misc_feature 1..27: note = Small subunit processome component 20 homolog (154-162)
  source 1..27: mol_type = other RNA
tacctgtataagtacctctggagactt

SEQ ID NO: 65083 - RNA, 45 nt, synthetic construct
  misc_feature 1..45: note = Serum albumin (438-452)
  source 1..45: mol_type = other RNA
aaggtgccccaggtcagcacccctacactggttgaggtgtccaga

SEQ ID NO: 65084 - RNA, 27 nt, synthetic construct
  misc_feature 1..27: note = Beta-secretase 2 (5-13)
  source 1..27: mol_type = other RNA
gccagagctctgctccttcccctgttg

SEQ ID NO: 65085 - RNA, 27 nt, synthetic construct
  misc_feature 1..27: note = Proteasome subunit beta type-4 (79-87)
  source 1..27: mol_type = other RNA
gccagattcaggaacatcagccggatt

SEQ ID NO: 65086 - RNA, 30 nt, synthetic construct
  misc_feature 1..30: note = Protein sel-1 homolog 1 (629-638)
  source 1..30: mol_type = other RNA
gccagaatcaagctgggcgactaccacttc

SEQ ID NO: 65087 - RNA, 30 nt, synthetic construct
  misc_feature 1..30: note = Lon protease homolog 2, peroxisomal (291-300)
  source 1..30: mol_type = other RNA
gccagaatcctgctcgacaacgatcactac

SEQ ID NO: 65088 - RNA, 33 nt, synthetic construct
  misc_feature 1..33: note = NAD(P)H dehydrogenase (quinone) 1 (128-138)
  source 1..33: mol_type = other RNA
gccagaatccagattctggagggctggaagaaa

SEQ ID NO: 65089 - RNA, 27 nt, synthetic construct
  misc_feature 1..27: note = Zinc finger protein 721 (73-81)
  source 1..27: mol_type = other RNA
gccagagtgaaggtcttcagcaaattt

SEQ ID NO: 65090 - RNA, 27 nt, synthetic construct
  misc_feature 1..27: note = TATA-box-binding protein (218-226)
  source 1..27: mol_type = other RNA
gccagagtggtccagaagctgggcttc

SEQ ID NO: 65091 - RNA, 66 nt, synthetic construct
  misc_feature 1..66: note = Plectin (3368-3389)
  source 1..66: mol_type = other RNA
gccaccacagctgcactgctccttgaggcccaggcggctactggcttcctggtggaccccgtcaga

SEQ ID NO: 65092 - RNA, 27 nt, synthetic construct
  misc_feature 1..27: note = Coatomer subunit alpha (338-346)
  source 1..27: mol_type = other RNA
gacagattcctgaggcagctcgatttt

SEQ ID NO: 65093 - RNA, 27 nt, synthetic construct
  misc_feature 1..27: note = Mannosyl-oligosaccharide glucosidase (370-378)
  source 1..27: mol_type = other RNA
gagagattcgaaaagacctttcagctg

SEQ ID NO: 65094 - RNA, 27 nt, synthetic construct
  misc_feature 1..27: note = General transcription factor II-I (386-394)
  source 1..27: mol_type = other RNA
gagagaatcaggttcgtgattaagaaa

SEQ ID NO: 65095 - RNA, 27 nt, synthetic construct
  misc_feature 1..27: note = NADH dehydrogenase (ubiquinone) 1 beta subcomplex subunit 4 (35-43)
  source 1..27: mol_type = other RNA
gagagactggccatcagggctcagctc

SEQ ID NO: 65096 - RNA, 27 nt, synthetic construct
  misc_feature 1..27: note = Cytoplasmic dynein 1 heavy chain 1 (2441-2449)
  source 1..27: mol_type = other RNA
ttccagctggagcacatcatggacctc

SEQ ID NO: 65097 - RNA, 27 nt, synthetic construct
  misc_feature 1..27: note = AP-2 complex subunit sigma (52-60)
  source 1..27: mol_type = other RNA
ttcagaaactttaagatcatttacagg

SEQ ID NO: 65098 - RNA, 30 nt, synthetic construct
  misc_feature 1..30: note = Protein scribble homolog (1146-1155)
  source 1..30: mol_type = other RNA
ggcagagacgggaggctgcgggtgggactc

SEQ ID NO: 65099 - RNA, 30 nt, synthetic construct
  misc_feature 1..30: note = Disintegrin and metalloproteinase domain-containing protein 10 (14-23)
  source 1..30: mol_type = other RNA
ggcagattcgaggggtttatccagaccagg

SEQ ID NO: 65100 - RNA, 33 nt, synthetic construct
  misc_feature 1..33: note = Mitogen-activated protein kinase kinase kinase 12 (175-185)
  source 1..33: mol_type = other RNA
ggcagattccacggggaggaagtggccgtcaag

SEQ ID NO: 65101 - RNA, 30 nt, synthetic construct
  misc_feature 1..30: note = Rho guanine nucleotide exchange factor 2 (459-468)
  source 1..30: mol_type = other RNA
ggcagattcaaggacgtgctggtcctcctt

SEQ ID NO: 65102 - RNA, 27 nt, synthetic construct
  misc_feature 1..27: note Dolichyl-diphosphooligosaccharide-proteinosyltransferase subunit STT3A (230-238)
  source 1..27: mol_type = other RNA
ggcagattcagccacaggatctacgtg

SEQ ID NO: 65103 - RNA, 27 nt, synthetic construct
  misc_feature 1..27: note = Small nuclear ribonucleoprotein-associated proteins B and B' (17-25)
  source 1..27: mol_type = other RNA
ggcagaatcttcattgggacctttaag

SEQ ID NO: 65104 - RNA, 27 nt, synthetic construct
  misc_feature 1..27: note = Sorbitol dehydrogenase (55-63)
  source 1..27: mol_type = other RNA
ggcagaatcgggaacttcattgtgaag

SEQ ID NO: 65105 - RNA, 30 nt, synthetic construct
  misc_feature 1..30: note = Sorbitol dehydrogenase (55-64)
  source 1..30: mol_type = other RNA
ggcagaatcgggaacttcattgtgaagaaa

SEQ ID NO: 65106 - RNA, 27 nt, synthetic construct
  misc_feature 1..27: note = Dystonin (345-353)
  source 1..27: mol_type = other RNA
ggcagaatcaagctgctccaggggtac

SEQ ID NO: 65107 - RNA, 27 nt, synthetic construct
  misc_feature 1..27: note = 26S protease regulatory subunit 6B (325-333)
  source 1..27: mol_type = other RNA
ggcagactggacaggaagatcgagttc

SEQ ID NO: 65108 - RNA, 27 nt, synthetic construct
  misc_feature 1..27: note = Serine/threonine-protein phosphatase 6 regulatory subunit 3 (311-319)
  source 1..27: mol_type = other RNA
ggcagactggggagcttccacgagctc

SEQ ID NO: 65109 - RNA, 30 nt, synthetic construct
  misc_feature 1..30: note = H(+)/Cl(-) exchange transporter 3 (772-781)
  source 1..30: mol_type = other RNA
ggcagactgctcgggatcattaccaagaaa

SEQ ID NO: 65110 - RNA, 27 nt, synthetic construct
  misc_feature 1..27: note = Thioredoxin reductase 1, cytoplasmic (45-53)
  source 1..27: mol_type = other RNA
ggcagactgcagaagctccttaaaatg

SEQ ID NO: 65111 - RNA, 27 nt, synthetic construct
  misc_feature 1..27: note = Aurora kinase A-interacting protein (40-48)
  source 1..27: mol_type = other RNA
ggcagactgaccagccagctccttagg

SEQ ID NO: 65112 - RNA, 30 nt, synthetic construct
  misc_feature 1..30: note = Lon protease homolog 2, peroxisomal (714-723)
  source 1..30: mol_type = other RNA
ggcagactggtgaggagcgacgtcgccatg

SEQ ID NO: 65113 - RNA, 30 nt, synthetic construct
  misc_feature 1..30: note = Up-regulated during skeletal muscle growth protein 5 (26-35)
  source 1..30: mol_type = other RNA
ggcagaatgaactgcgtgctggccacctac

SEQ ID NO: 65114 - RNA, 27 nt, synthetic construct
  misc_feature 1..27: note = Tetratricopeptide repeat protein 12 (373-381)
  source 1..27: mol_type = other RNA
ggcagaagcctgatcattaaccacctc

SEQ ID NO: 65115 - RNA, 30 nt, synthetic construct
  misc_feature 1..30: note = Plectin (2680-2689)
  source 1..30: mol_type = other RNA
ggcagaagctccatcgccgggctgctcctt

SEQ ID NO: 65116 - RNA, 27 nt, synthetic construct
  misc_feature 1..27: note = Nucleolar protein 11 (40-48)
  source 1..27: mol_type = other RNA
ggcagaaccgtgatcctgtacaaggtc

SEQ ID NO: 65117 - RNA, 48 nt, synthetic construct
  misc_feature 1..48: note = HLA class I histocompatibility antigen, A-1 alpha chain (25-40)
  source 1..48: mol_type = other RNA
ggcagccactccatgagatacttctttacctctgtgtcaaggcccggg

SEQ ID NO: 65118 - RNA, 27 nt, synthetic construct
  misc_feature 1..27: note = Transcription factor E2F4 (157-165)
  source 1..27: mol_type = other RNA
atcagagcccccagcggcacctccctg

SEQ ID NO: 65119 - RNA, 27 nt, synthetic construct
  misc_feature 1..27: note = CAP-Gly domain-containing linker protein 4 (454-462)
  source 1..27: mol_type = other RNA
atcagattctttggcaccacaaacttc

SEQ ID NO: 65120 - RNA, 33 nt, synthetic construct
  misc_feature 1..33: note = Glutamine synthetase (323-333)
  source 1..33: mol_type = other RNA
atcagaattcccaggaccgtgggccaggagaag

SEQ ID NO: 65121 - RNA, 33 nt, synthetic construct
  misc_feature 1..33: note = NADH dehydrogenase (ubiquinone) iron-sulfur protein 5 (8-18)
  source 1..33: mol_type = other RNA
aagagattcggcctgaacatcgacaggtggctc

SEQ ID NO: 65122 - RNA, 30 nt, synthetic construct
  misc_feature 1..30: note = Cytoplasmic dynein 2 heavy chain 1 (804-813)
  source 1..30: mol_type = other RNA
aagagattcatcggcattcccaaccagttt

SEQ ID NO: 65123 - RNA, 27 nt, synthetic construct
  misc_feature 1..27: note = DNA-dependent protein kinase catalytic subunit (1074-1082)
  source 1..27: mol_type = other RNA
aagagactgggcgccagcctcgctttc

SEQ ID NO: 65124 - RNA, 27 nt, synthetic construct
  misc_feature 1..27: note = Fatty acyl-CoA reductase 1 (327-335)
  source 1..27: mol_type = other RNA
aagagaaaccccctggagcaggccttc

SEQ ID NO: 65125 - RNA, 27 nt, synthetic construct
  misc_feature 1..27: note = ATP-dependent RNA helicase DDX18 (403-411)
  source 1..27: mol_type = other RNA
aagagaaccacaactttctttcagttc

SEQ ID NO: 65126 - RNA, 30 nt, synthetic construct
  misc_feature 1..30: note = Talin-1 (357-366)
  source 1..30: mol_type = other RNA
aagagatgggccgctagccccaaatccttc

SEQ ID NO: 65127 - RNA, 27 nt, synthetic construct
  misc_feature 1..27: note = ATP-dependent RNA helicase DHX8 (289-297)
  source 1..27: mol_type = other RNA
aagagatgggagggcctggtgcacatc

SEQ ID NO: 65128 - RNA, 27 nt, synthetic construct
  misc_feature 1..27: note = Eukaryotic translation initiation factor 4 gamma 1 (570-578)
  source 1..27: mol_type = other RNA
aagagatacgacagggagttcctgctc

SEQ ID NO: 65129 - RNA, 27 nt, synthetic construct
  misc_feature 1..27: note = E3 ubiquitin-protein ligase RNF213 (1227-1235)
  source 1..27: mol_type = other RNA
ctgagagacagccacatcttccagctc

SEQ ID NO: 65130 - RNA, 27 nt, synthetic construct
  misc_feature 1..27: note = Eukaryotic initiation factor 4A-II (229-237)
  source 1..27: mol_type = other RNA
atgagagaccccatcaggattctggtg

SEQ ID NO: 65131 - RNA, 27 nt, synthetic construct
  misc_feature 1..27: note = Abhydrolase domain-containing protein 2 (327-335)
  source 1..27: mol_type = other RNA
atgagatacctgcacaggatctatgtg

SEQ ID NO: 65132 - RNA, 27 nt, synthetic construct
  misc_feature 1..27: note = Uncharacterized protein C15orf41 (140-148)
  source 1..27: mol_type = other RNA
aacagattcggccccgggctggtgatc

SEQ ID NO: 65133 - RNA, 27 nt, synthetic construct
  misc_feature 1..27: note = Heat shock protein HSP 90-alpha (808-816)
  source 1..27: mol_type = other RNA
aacagaatctacaggatgattaagctg

SEQ ID NO: 65134 - RNA, 27 nt, synthetic construct
  misc_feature 1..27: note = Guanine nucleotide-binding protein G(s) subunit alpha isoforms short (265-273)
  source 1..27: mol_type = other RNA
aacagatggctgaggaccatcagcgtg

SEQ ID NO: 65135 - RNA, 42 nt, synthetic construct
  misc_feature 1..42: note = Zinc finger protein 608 (42-55)
  source 1..42: mol_type = other RNA
cccgccagccctggcgctgggaacccaccgggaacccccaag

SEQ ID NO: 65136 - RNA, 27 nt, synthetic construct
  misc_feature 1..27: note = Eukaryotic translation initiation factor 3 subunit L (152-160)
  source 1..27: mol_type = other RNA
cagagattcgagagctactataactac

SEQ ID NO: 65137 - RNA, 27 nt, synthetic construct
  misc_feature 1..27: note = Eukaryotic translation initiation factor 3 subunit A (316-324)
  source 1..27: mol_type = other RNA
cagagaatgagcaccagggtgctgctc

SEQ ID NO: 65138 - RNA, 27 nt, synthetic construct
  misc_feature 1..27: note = Transmembrane protein 141 (54-62)
  source 1..27: mol_type = other RNA
agaaagttcccctaccctctgcagtgg

SEQ ID NO: 65139 - RNA, 33 nt, synthetic construct
  misc_feature 1..33: note = Nuclear envelope integral membrane protein 1 (157-167)
  source 1..33: mol_type = other RNA
agaaggttcgaccccaagctgtttctcgtgttc

SEQ ID NO: 65140 - RNA, 33 nt, synthetic construct
  misc_feature 1..33: note = Unconventional myosin-Id (770-780)
  source 1..33: mol_type = other RNA
agaaggttcgaggaagccctgcagaccatcttt

SEQ ID NO: 65141 - RNA, 39 nt, synthetic construct
  misc_feature 1..39: note = Pre-mRNA-processing-splicing factor 8 (820-832)
  source 1..39: mol_type = other RNA
agaaggttcagccccatcccttttccaccgctgtcctac

SEQ ID NO: 65142 - RNA, 27 nt, synthetic construct
  misc_feature 1..27: note = Exportin-1 (596-604)
  source 1..27: mol_type = other RNA
agaaggcacttcgtgcaggtccaagtt

SEQ ID NO: 65143 - RNA, 30 nt, synthetic construct
  misc_feature 1..30: note = Negative elongation factor C/D (83-92)
  source 1..30: mol_type = other RNA
agaaggatcgcccaggaggtgcaacggttc

SEQ ID NO: 65144 - RNA, 30 nt, synthetic construct
  misc_feature 1..30: note = cAMP-dependent protein kinase type I-beta regulatory subunit (232-241)
  source 1..30: mol_type = other RNA
agaaggatcctgatgggcagcaccctccgg

SEQ ID NO: 65145 - RNA, 30 nt, synthetic construct
  misc_feature 1..30: note = Cytoplasmic FMR1-interacting protein 2 (148-157)
  source 1..30: mol_type = other RNA
agaaggaaggacttcgtgagcgaggcctac

SEQ ID NO: 65146 - RNA, 27 nt, synthetic construct
  misc_feature 1..27: note = Nuclear pore complex protein Nup98-Nup96 (778-786)
  source 1..27: mol_type = other RNA
agaaggaaggaggtggtcgtttacctg

SEQ ID NO: 65147 - RNA, 30 nt, synthetic construct
  misc_feature 1..30: note = NADH dehydrogenase (ubiquinone) 1 alpha subcomplex subunit 13 (49-58)
  source 1..30: mol_type = other RNA
agaaggctgcagatcgaggacttcgaagcc

SEQ ID NO: 65148 - RNA, 30 nt, synthetic construct
  misc_feature 1..30: note = Signal peptide peptidase-like 2A (5-14)
  source 1..30: mol_type = other RNA
agaaggctgagccccgccggcgctgcactc

SEQ ID NO: 65149 - RNA, 39 nt, synthetic construct
  misc_feature 1..39: note = Splicing factor, proline- and glutamine-rich (547-559)
  source 1..39: mol_type = other RNA
agaaggatggaggaactgcacaaccaggagatgcaaaag

SEQ ID NO: 65150 - RNA, 27 nt, synthetic construct
  misc_feature 1..27: note = Probable ATP-dependent RNA helicase DDX10 (353-361)
  source 1..27: mol_type = other RNA
agaaggatggaggtgtacaacgaattc

SEQ ID NO: 65151 - RNA, 36 nt, synthetic construct
  misc_feature 1..36: note = 40S ribosomal protein S21 (60-71)
  source 1..36: mol_type = other RNA
agaaggatgggcgagagcgacgattccatcctgcgg

SEQ ID NO: 65152 - RNA, 27 nt, synthetic construct
  misc_feature 1..27: note = HLA class II histocompatibility antigen, DQ beta 1 chain (88-96)
  source 1..27: mol_type = other RNA
agaagggtggagcccaccgtcacaatc

SEQ ID NO: 65153 - RNA, 36 nt, synthetic construct
  misc_feature 1..36: note = HLA class I histocompatibility antigen, B-15 alpha chain (193-204)
  source 1..36: mol_type = other RNA
agaaggtacctggagaacggcaaggaaaccctccag

SEQ ID NO: 65154 - RNA, 27 nt, synthetic construct
  misc_feature 1..27: note = Glucoside xylosyltransferase 1 (2-10)
  source 1..27: mol_type = other RNA
agaaggtacctgcgggtggtcgttctc

SEQ ID NO: 65155 - RNA, 33 nt, synthetic construct
  misc_feature 1..33: note = Eukaryotic initiation factor 4A-I (168-178)
  source 1..33: mol_type = other RNA
agaaggtacctgagccccaagtatatcaaaatg

SEQ ID NO: 65156 - RNA, 45 nt, synthetic construct
  misc_feature 1..45: note = HLA class II histocompatibility antigen, DR alpha chain (48-62)
  source 1..45: mol_type = other RNA
agcttcgaggcccagggcgctctggcaaacatcgccgtggacaag

SEQ ID NO: 65157 - RNA, 30 nt, synthetic construct
  misc_feature 1..30: note = EH domain-containing protein 4 (129-138)
  source 1..30: mol_type = other RNA
agcagattcggcaacgcctttctgaatagg

SEQ ID NO: 65158 - RNA, 30 nt, synthetic construct
  misc_feature 1..30: note = Cohesin subunit SA-2 (369-378)
  source 1..30: mol_type = other RNA
agcagattcaaggacaggatcgtgtccatg

SEQ ID NO: 65159 - RNA, 27 nt, synthetic construct
  misc_feature 1..27: note = Nucleolar pre-ribosomal-associated protein 1 (628-636)
  source 1..27: mol_type = other RNA
agcagattcaacaggtactattccctg

SEQ ID NO: 65160 - RNA, 27 nt, synthetic construct
  misc_feature 1..27: note = 26S proteasome non-ATPase regulatory subunit 13 (153-161)
  source 1..27: mol_type = other RNA
agcagattctacgacctgtcctctaag

SEQ ID NO: 65161 - RNA, 27 nt, synthetic construct
  misc_feature 1..27: note = Lysine-specific demethylase 3A (1085-1093)
  source 1..27: mol_type = other RNA
agcagactgcccaactacttcgtgagg

SEQ ID NO: 65162 - RNA, 27 nt, synthetic construct
  misc_feature 1..27: note = RRP12-like protein (519-527)
  source 1..27: mol_type = other RNA
accagactgggcttctttacaacttac

SEQ ID NO: 65163 - RNA, 27 nt, synthetic construct
  misc_feature 1..27: note = Voltage-dependent anion-selective channel protein 2 (165-173)
  source 1..27: mol_type = other RNA
accagaaacaatttcgccgtgggctac

SEQ ID NO: 65164 - RNA, 33 nt, synthetic construct
  misc_feature 1..33: note Dolichyl-diphosphooligosaccharide-proteinosyltransferase 48 kDa subunit (358-368)
  source 1..33: mol_type = other RNA
gtgagaatcgaccccttcgtcaggacctttctg

SEQ ID NO: 65165 - RNA, 27 nt, synthetic construct
  misc_feature 1..27: note = Phosphatidylinositol 4-phosphate 5-kinase type-1 alpha (54-62)
  source 1..27: mol_type = other RNA
tacagattcgtgaagaaactggagcac

SEQ ID NO: 65166 - RNA, 27 nt, synthetic construct
  misc_feature 1..27: note = PERQ amino acid-rich with GYF domain-containing protein 2 (41-49)
  source 1..27: mol_type = other RNA
tacagatatggcagggaggaaatgctg

SEQ ID NO: 65167 - RNA, 27 nt, synthetic construct
  misc_feature 1..27: note = Alpha-actinin-1 (567-575)
  source 1..27: mol_type = other RNA
gccatcctgggcattcacaacgaggtg

SEQ ID NO: 65168 - RNA, 27 nt, synthetic construct
  misc_feature 1..27: note = CCR4-NOT transcription complex subunit 1 (2294-2302)
  source 1..27: mol_type = other RNA
gccatccaggagcaaattaccagagtg

SEQ ID NO: 65169 - RNA, 30 nt, synthetic construct
  misc_feature 1..30: note = GEM-interacting protein (553-562)
  source 1..30: mol_type = other RNA
gccctggacgtgcagggcatctacagagtc

SEQ ID NO: 65170 - RNA, 30 nt, synthetic construct
  misc_feature 1..30: note = Glycogen phosphorylase, brain form (417-426)
  source 1..30: mol_type = other RNA
gccctgttccccggcgacgtggatagactc

SEQ ID NO: 65171 - RNA, 39 nt, synthetic construct
  misc_feature 1..39: note = T-complex protein 1 subunit gamma (186-198)
  source 1..39: mol_type = other RNA
gaggaaaacggcagaaaggagatcgacattaaaaagtac

SEQ ID NO: 65172 - RNA, 27 nt, synthetic construct
  misc_feature 1..27: note = Glycerol-3-phosphate dehydrogenase, mitochondrial (467-475)
  source 1..27: mol_type = other RNA
gagaccgccagaaagttcctgtactat

SEQ ID NO: 65173 - RNA, 27 nt, synthetic construct
  misc_feature 1..27: note = Hexokinase-2 (850-858)
  source 1..27: mol_type = other RNA
ggcctggacgccctcaaggtgaccgtc

SEQ ID NO: 65174 - RNA, 27 nt, synthetic construct
  misc_feature 1..27: note = NF-kappa-B-repressing factor (193-201)
  source 1..27: mol_type = other RNA
ggcagcgacaagatcaactacacctat

SEQ ID NO: 65175 - RNA, 27 nt, synthetic construct
  misc_feature 1..27: note = Galectin-3 (217-225)
  source 1..27: mol_type = other RNA
cacctgctccagtacaaccatagagtg

SEQ ID NO: 65176 - RNA, 27 nt, synthetic construct
  misc_feature 1..27: note = Serine-protein kinase ATM (2898-2906)
  source 1..27: mol_type = other RNA
aagatcctgcccacccctgagacagtg

SEQ ID NO: 65177 - RNA, 27 nt, synthetic construct
  misc_feature 1..27: note = F-box only protein 7 (226-234)
  source 1..27: mol_type = other RNA
aagatcaacaatgagattagaagcgtg

SEQ ID NO: 65178 - RNA, 27 nt, synthetic construct
  misc_feature 1..27: note = DNA topoisomerase 2-beta (151-159)
  source 1..27: mol_type = other RNA
aagctggacgagaccggcgtggccctc

SEQ ID NO: 65179 - RNA, 30 nt, synthetic construct; identical to SEQ ID NO: 40952
  misc_feature 1..30: note = Coatomer subunit gamma-1 (75-84)
  source 1..30: mol_type = other RNA

SEQ ID NO: 65180 - RNA, 30 nt, synthetic construct
  misc_feature 1..30: note = Protein S100-A6 (47-56)
  source 1..30: mol_type = other RNA
aagctgcaggacgccgagatcgctagactc

SEQ ID NO: 65181 - RNA, 27 nt, synthetic construct
  misc_feature 1..27: note = Nucleoprotein TPR (699-707)
  source 1..27: mol_type = other RNA
aagctgcaggagcaagtgaccgacctc

SEQ ID NO: 65182 - RNA, 27 nt, synthetic construct
  misc_feature 1..27: note = Unconventional myosin-Ic (409-417)
  source 1..27: mol_type = other RNA
aagctgcagcaactcttcatcgagctt

SEQ ID NO: 65183 - RNA, 27 nt, synthetic construct
  misc_feature 1..27: note = 26S proteasome non-ATPase regulatory subunit 11 (159-167)
  source 1..27: mol_type = other RNA
aagatggacgataaagccctgctcgtg

SEQ ID NO: 65184 - RNA, 27 nt, synthetic construct
  misc_feature 1..27: note = Serine/threonine-protein kinase/endoribonuclease IRE1 (690-698)
  source 1..27: mol_type = other RNA
aagccccacaacatcctgattagcatg

SEQ ID NO: 65185 - RNA, 27 nt, synthetic construct
  misc_feature 1..27: note = Zinc finger protein 277 (158-166)
  source 1..27: mol_type = other RNA
aagagcgagctgggcctcaacttctac

SEQ ID NO: 65186 - RNA, 27 nt, synthetic construct
  misc_feature 1..27: note = Profilin-1 (105-113)
  source 1..27: mol_type = other RNA
aagaccgacaaaacactggtgctcctt

SEQ ID NO: 65187 - RNA, 27 nt, synthetic construct
  misc_feature 1..27: note = RHO/RAC effector protein (462-470)
  source 1..27: mol_type = other RNA
aagaccgagagaagcgacctggaatac

SEQ ID NO: 65188 - RNA, 27 nt, synthetic construct
  misc_feature 1..27: note = Replication protein A 70 kDa DNA-binding subunit (489-497)
  source 1..27: mol_type = other RNA
aaggtgatcgaccagcaaaacggcctg

SEQ ID NO: 65189 - RNA, 27 nt, synthetic construct
  misc_feature 1..27: note = Plectin (2572-2580)
  source 1..27: mol_type = other RNA
ctgctcgccgaggaaaaccagagactt

SEQ ID NO: 65190 - RNA, 27 nt, synthetic construct
  misc_feature 1..27: note = Clathrin heavy chain 1 (333-341)
  source 1..27: mol_type = other RNA
aacatcattccctacataaccaatgtg

SEQ ID NO: 65191 - RNA, 27 nt, synthetic construct
  misc_feature 1..27: note = Cell division cycle protein 27 homolog (216-224)
  source 1..27: mol_type = other RNA
aacctggagagctccaattctaagtac

SEQ ID NO: 65192 - RNA, 30 nt, synthetic construct
  misc_feature 1..30: note = Band 4.1-like protein 2 (252-261)
  source 1..30: mol_type = other RNA
aacctgctcgagaaggactacttcggcctt

SEQ ID NO: 65193 - RNA, 27 nt, synthetic construct
  misc_feature 1..27: note = Keratin, type I cytoskeletal 18 (100-108)
  source 1..27: mol_type = other RNA
agactggccgctgacgatttcagggtg

SEQ ID NO: 65194 - RNA, 30 nt, synthetic construct
  misc_feature 1..30: note = Vacuolar protein sorting-associated protein 35 (226-235)
  source 1..30: mol_type = other RNA
agactgagccagctcgagggcgtgaacgtc

SEQ ID NO: 65195 - RNA, 27 nt, synthetic construct
  misc_feature 1..27: note = DNA topoisomerase 2-alpha (230-238)
  source 1..27: mol_type = other RNA
agcctggacaaggatatcgtggccctc

SEQ ID NO: 65196 - RNA, 27 nt, synthetic construct
  misc_feature 1..27: note = Ubiquitin carboxyl-terminal hydrolase 14 (241-249)
  source 1..27: mol_type = other RNA
agcctgatcgaccagttctttggcgtg

SEQ ID NO: 65197 - RNA, 27 nt, synthetic construct
  misc_feature 1..27: note = Calcium-binding mitochondrial carrier protein Aralar1 (25-33)
  source 1..27: mol_type = other RNA
agcaccgaggtggacggcgaaagatac

SEQ ID NO: 65198 - RNA, 27 nt, synthetic construct
  misc_feature 1..27: note = Thymosin beta-10 (26-34)
  source 1..27: mol_type = other RNA
accgagacacaggaaaagaacactctg

SEQ ID NO: 65199 - RNA, 27 nt, synthetic construct
  misc_feature 1..27: note = L-lactate dehydrogenase B chain (323-331)
  source 1..27: mol_type = other RNA
accctgtgggacatccagaaggatctc

SEQ ID NO: 65200 - RNA, 27 nt, synthetic construct
  misc_feature 1..27: note = SAM and SH3 domain-containing protein 1 (299-307)
  source 1..27: mol_type = other RNA
gtgctggacgagagaagcgccctctac

SEQ ID NO: 65201 - RNA, 27 nt, synthetic construct
  misc_feature 1..27: note = Centromere protein F (684-692)
  source 1..27: mol_type = other RNA
gtgctggacagcaagtccgtcgaggtt

SEQ ID NO: 65202 - RNA, 30 nt, synthetic construct
  misc_feature 1..30: note = N(G),N(G)-dimethylarginine dimethylaminohydrolase 1 (92-101)
  source 1..30: mol_type = other RNA
gtgctgttcaccggcagagagtttttcgtc

SEQ ID NO: 65203 - RNA, 60 nt, synthetic construct
  misc_feature 1..60: note = Cytochrome c oxidase subunit 7C, mitochondrial (44-63)
  source 1..60: mol_type = other RNA
tacttcggcagcgcctttgctacccccttcctggtggtcagacaccagctccttaagaca

SEQ ID NO: 65204 - RNA, 27 nt, synthetic construct
  misc_feature 1..27: note = GTP-binding protein Rit1 (134-142)
  source 1..27: mol_type = other RNA
tacatcgacgatgtgttccacgccctg

SEQ ID NO: 65205 - RNA, 27 nt, synthetic construct
  misc_feature 1..27: note = WASH complex subunit 7 (733-741)
  source 1..27: mol_type = other RNA
tacctggacaagaccttctataacctc

SEQ ID NO: 65206 - RNA, 30 nt, synthetic construct
  misc_feature 1..30: note = Coatomer subunit alpha (707-716)
  source 1..30: mol_type = other RNA
tacctgatcaccggcaacctcgagaagctt

SEQ ID NO: 65207 - RNA, 27 nt, synthetic construct
  misc_feature 1..27: note = cAMP-dependent protein kinase type I-alpha regulatory subunit (126-134)
  source 1..27: mol_type = other RNA
gccgctctggcaaaggccatcgagaaa

SEQ ID NO: 65208 - RNA, 24 nt, synthetic construct
  misc_feature 1..24: note = Fatty acid synthase (1645-1652)
  source 1..24: mol_type = other RNA
gccgctagcgtgcccgtcgtttac

SEQ ID NO: 65209 - RNA, 27 nt, synthetic construct
  misc_feature 1..27: note = Matrix Gla protein (90-98)
  source 1..27: mol_type = other RNA
gccgcttacaacagatatttcaggaag

SEQ ID NO: 65210 - RNA, 24 nt, synthetic construct
  misc_feature 1..24: note = 60S ribosomal protein L10 (29-36)
  source 1..24: mol_type = other RNA
gccaagatcagaattttcgacctg

SEQ ID NO: 65211 - RNA, 27 nt, synthetic construct
  misc_feature 1..27: note = Sushi repeat-containing protein SRPX isoform 4 (328-336)
  source 1..27: mol_type = other RNA
gccctgctcgaccagttctacgagaag

SEQ ID NO: 65212 - RNA, 30 nt, synthetic construct
  misc_feature 1..30: note = Zinc finger MYM-type protein 4 (757-766)
  source 1..30: mol_type = other RNA
gccagcgctggccccccttccctgagaaag

SEQ ID NO: 65213 - RNA, 30 nt, synthetic construct
  misc_feature 1..30: note = Thymosin beta-10 (16-25)
  source 1..30: mol_type = other RNA
gccagcttcgacaaggctaaactgaagaaa

SEQ ID NO: 65214 - RNA, 27 nt, synthetic construct
  misc_feature 1..27: note = Glycogen phosphorylase, muscle form (303-311)
  source 1..27: mol_type = other RNA
gccaccctgcaggacatcattagaagg

SEQ ID NO: 65215 - RNA, 27 nt, synthetic construct
  misc_feature 1..27: note = Cell surfaceoprotein MUC18 (577-585)
  source 1..27: mol_type = other RNA
gccgtgctgtacttcctctataagaaa

SEQ ID NO: 65216 - RNA, 24 nt, synthetic construct
  misc_feature 1..24: note = Torsin-1A-interacting protein 1 (433-440)
  source 1..24: mol_type = other RNA
gcctacagctccttcagatctgtg

SEQ ID NO: 65217 - RNA, 24 nt, synthetic construct
  misc_feature 1..24: note = Nucleolin (415-422)
  source 1..24: mol_type = other RNA
gacgccgctgagatcagactggtg

SEQ ID NO: 65218 - RNA, 24 nt, synthetic construct
  misc_feature 1..24: note = Prohibitin (233-240)
  source 1..24: mol_type = other RNA
gacggcctgatcgagctcagaaag

SEQ ID NO: 65219 - RNA, 21 nt, synthetic construct
  misc_feature 1..21: note = Lysine-specific demethylase 5B (46-52)
  source 1..21: mol_type = other RNA
ttcgcctttatccacaagatt

SEQ ID NO: 65220 - RNA, 27 nt, synthetic construct
  misc_feature 1..27: note = Polypeptide N-acetylgalactosaminyltransferase 5 (282-290)
  source 1..27: mol_type = other RNA
ttccccaaggtgagaatcctgaggctc

SEQ ID NO: 65221 - RNA, 30 nt, synthetic construct
  misc_feature 1..30: note = Dual specificity protein phosphatase 6 (130-139)
  source 1..30: mol_type = other RNA
ttctacctggagggcgggtttagcaagttc

SEQ ID NO: 65222 - RNA, 27 nt, synthetic construct
  misc_feature 1..27: note = Multiple PDZ domain protein (777-785)
  source 1..27: mol_type = other RNA
ggcaccgtgagaatcggggtcgccaag

SEQ ID NO: 65223 - RNA, 30 nt, synthetic construct
  misc_feature 1..30: note = Calcyphosin (120-129)
  source 1..30: mol_type = other RNA
ggcgtgtacagcgggagagcccaccccaag

SEQ ID NO: 65224 - RNA, 30 nt, synthetic construct
  misc_feature 1..30: note = PEST proteolytic signal-containing nuclear protein (144-153)
  source 1..30: mol_type = other RNA
cacctgggcaacgtgcatgaccaggataat

SEQ ID NO: 65225 - RNA, 30 nt, synthetic construct
  misc_feature 1..30: note = DAZ-associated protein 1 (397-406)
  source 1..30: mol_type = other RNA
cacaacgtgcagggcttccatccctacaga

SEQ ID NO: 65226 - RNA, 45 nt, synthetic construct
  misc_feature 1..45: note = Ribonucleoprotein PTB-binding 1 (737-751)
  source 1..45: mol_type = other RNA
cacagccagggcctggggggacattacgccgactcctatctcaag

SEQ ID NO: 65227 - RNA, 27 nt, synthetic construct
  misc_feature 1..27: note = Melanocyte protein PMEL (189-197)
  source 1..27: mol_type = other RNA
cacaccatggaggtgacagtctaccat

SEQ ID NO: 65228 - RNA, 33 nt, synthetic construct
  misc_feature 1..33: note = Neurosecretory protein VGF (2-12)
  source 1..33: mol_type = other RNA
aaggccctgagactcagcgcttccgcacttttc

SEQ ID NO: 65229 - RNA, 27 nt, synthetic construct
  misc_feature 1..27: note = Serine/threonine-protein kinase Nek7 (81-89)
  source 1..27: mol_type = other RNA
aaggagatcgacctgctcaaacagctt

SEQ ID NO: 65230 - RNA, 27 nt, synthetic construct
  misc_feature 1..27: note = Calpain-3 (10-18)
  source 1..27: mol_type = other RNA
aaggtgctgaacaccgtcgttaataaa

SEQ ID NO: 65231 - RNA, 27 nt, synthetic construct
  misc_feature 1..27: note = (Pyruvate dehydrogenase (acetyl-transferring))-phosphatase 1, mitochondrial (542-550)
  source 1..27: mol_type = other RNA
ctgcccgaggaactcgccagaatgtac

SEQ ID NO: 65232 - RNA, 21 nt, synthetic construct
  misc_feature 1..21: note = Vimentin (116-122)
  source 1..21: mol_type = other RNA
aactacatcgacaaggtgaga

SEQ ID NO: 65233 - RNA, 24 nt, synthetic construct
  misc_feature 1..24: note = Vimentin (116-123)
  source 1..24: mol_type = other RNA
aactacatcgacaaggtgagattc

SEQ ID NO: 65234 - RNA, 24 nt, synthetic construct
  misc_feature 1..24: note = Lysine-specific demethylase 5B (45-52)
  source 1..24: mol_type = other RNA
cccttcgcctttatccacaagatt

SEQ ID NO: 65235 - RNA, 24 nt, synthetic construct
  misc_feature 1..24: note = Isoleucine-tRNA ligase, cytoplasmic (611-618)
  source 1..24: mol_type = other RNA
cccgtgagcatcattcagaagtac

SEQ ID NO: 65236 - RNA, 27 nt, synthetic construct
  misc_feature 1..27: note = Ankyrin-2 (1316-1324)
  source 1..27: mol_type = other RNA
ccctacatggccaagttcgtggtcttt

SEQ ID NO: 65237 - RNA, 21 nt, synthetic construct
  misc_feature 1..21: note = Plectin (3425-3431)
  source 1..21: mol_type = other RNA
ccctacagcggctccaccatc

SEQ ID NO: 65238 - RNA, 27 nt, synthetic construct
  misc_feature 1..27: note = Crooked neck-like protein 1 (372-380)
  source 1..27: mol_type = other RNA
agattcgaggaaaagcacgcctacttt

SEQ ID NO: 65239 - RNA, 27 nt, synthetic construct
  misc_feature 1..27: note = Vimentin (122-130)
  source 1..27: mol_type = other RNA
agattcctggagcagcaaaacaagatc

SEQ ID NO: 65240 - RNA, 27 nt, synthetic construct
  misc_feature 1..27: note = Membrane-associated transporter protein (209-217)
  source 1..27: mol_type = other RNA
agactgctcggcaccgagttccaggtg

SEQ ID NO: 65241 - RNA, 24 nt, synthetic construct
  misc_feature 1..24: note = V-type proton ATPase subunit B, kidney isoform (40-47)
  source 1..24: mol_type = other RNA
agaagcggccaggtgctggaggtc

SEQ ID NO: 65242 - RNA, 27 nt, synthetic construct
  misc_feature 1..27: note = Sialidase-4 (192-200)
  source 1..27: mol_type = other RNA
agaaccagcccccactccttcgccttt

SEQ ID NO: 65243 - RNA, 27 nt, synthetic construct
  misc_feature 1..27: note = Tubulin beta-6 chain (244-252)
  source 1..27: mol_type = other RNA
agatacctgaccgtggccacagtcttc

SEQ ID NO: 65244 - RNA, 27 nt, synthetic construct
  misc_feature 1..27: note = Transcription elongation factor SPT5 (361-369)
  source 1..27: mol_type = other RNA
agatacagcaggaagggcttcctgttt

SEQ ID NO: 65245 - RNA, 27 nt, synthetic construct
  misc_feature 1..27: note = Zinc finger MYM-type protein 4 (758-766)
  source 1..27: mol_type = other RNA
agcgccggccccccttccctgagaaag

SEQ ID NO: 65246 - RNA, 27 nt, synthetic construct
  misc_feature 1..27: note = Melanoma-associated antigen 1 (230-238)
  source 1..27: mol_type = other RNA
agcgcctacggcgagcccagaaagctg

SEQ ID NO: 65247 - RNA, 39 nt, synthetic construct
  misc_feature 1..39: note = Heterogeneous nuclear ribonucleoproteins A2/B1 (289-301)
  source 1..39: mol_type = other RNA
agcggcgggtccggaggttacggcgggagatctaggtat

SEQ ID NO: 65248 - RNA, 39 nt, synthetic construct
  misc_feature 1..39: note = Elongation factor 1-alpha 1 (18-30)
  source 1..39: mol_type = other RNA
agcggcaagtccaccacaactgggcacctgatctacaaa

SEQ ID NO: 65249 - RNA, 27 nt, synthetic construct
  misc_feature 1..27: note = G protein pathway suppressor 2 (319-327)
  source 1..27: mol_type = other RNA
agccagaaccccagattctaccacaag

SEQ ID NO: 65250 - RNA, 27 nt, synthetic construct
  misc_feature 1..27: note = Nuclear pore complex protein Nup205 (214-222)
  source 1..27: mol_type = other RNA
agctccctgtacatcattctcaagaaa

SEQ ID NO: 65251 - RNA, 27 nt, synthetic construct
  misc_feature 1..27: note = RNA binding motif protein, X-linked-like-1 (142-150)
  source 1..27: mol_type = other RNA
agctccagaggccccctgcctgtgaag

SEQ ID NO: 65252 - RNA, 30 nt, synthetic construct
  misc_feature 1..30: note = Mitochondrial fission factor (79-88)
  source 1..30: mol_type = other RNA
agcacccccttcaagcctctggccctcaaa

SEQ ID NO: 65253 - RNA, 51 nt, synthetic construct
  misc_feature 1..51: note = Prelamin-A/C (479-495)
  source 1..51: mol_type = other RNA
agcgtgggcgggtccggaggtggctctttcggggacaacctggtcaccaga

SEQ ID NO: 65254 - RNA, 27 nt, synthetic construct
  misc_feature 1..27: note = Zinc finger MIZ domain-containing protein 1 (594-602)
  source 1..27: mol_type = other RNA
agcgtgctgcagggcctccttaagaaa

SEQ ID NO: 65255 - RNA, 27 nt, synthetic construct
  misc_feature 1..27: note = Anaphase-promoting complex subunit 5 (50-58)
  source 1..27: mol_type = other RNA
agcgtggtcggcctgttcctcagacac

SEQ ID NO: 65256 - RNA, 33 nt, synthetic construct
  misc_feature 1..33: note = Prohibitin (230-240)
  source 1..33: mol_type = other RNA
accgccggcgacgggctgatcgagctcagaaag

SEQ ID NO: 65257 - RNA, 45 nt, synthetic construct
  misc_feature 1..45: note = RNA polymerase II-associated factor 1 homolog (4-18)
  source 1..45: mol_type = other RNA
accatccagacacaagcccagagagaggacggccacaggcccaac

SEQ ID NO: 65258 - RNA, 45 nt, synthetic construct
  misc_feature 1..45: note = Thymosin beta-10 (33-47)
  source 1..45: mol_type = other RNA
accctgcccacaaaggagactatcgaacaggagaaaagaagcgaa

SEQ ID NO: 65259 - RNA, 51 nt, synthetic construct
  misc_feature 1..51: note = Thymosin beta-10 (33-49)
  source 1..51: mol_type = other RNA
accctgcccacaaaggagactatcgaacaggagaaaagaagcgaaatttcc

SEQ ID NO: 65260 - RNA, 42 nt, synthetic construct
  misc_feature 1..42: note = Golgi-specific brefeldin A-resistance guanine nucleotide exchange factor 1 (535-548)
  source 1..42: mol_type = other RNA
acccccagacctacagacccaatcccgactagcgaggtgaac

SEQ ID NO: 65261 - RNA, 33 nt, synthetic construct
  misc_feature 1..33: note = KH domain-containing, RNA-binding, signal transduction-associated protein 1 (33-43)
  source 1..33: mol_type = other RNA
acccccagcagacagcctccactgccgcacagg

SEQ ID NO: 65262 - RNA, 45 nt, synthetic construct
  misc_feature 1..45: note = Probable ATP-dependent RNA helicase DDX5 (556-570)
  source 1..45: mol_type = other RNA
accagcttcagaacaggcaaccccactgggacgtaccagaatgga

SEQ ID NO: 65263 - RNA, 24 nt, synthetic construct
  misc_feature 1..24: note = Elongation factor 1-alpha 1 (23-30)
  source 1..24: mol_type = other RNA
accacaggccacctgatctacaag

SEQ ID NO: 65264 - RNA, 45 nt, synthetic construct
  misc_feature 1..45: note = Vimentin (446-460)
  source 1..45: mol_type = other RNA
accgtggagacaagagacggccaggtcatcaacgaaactagccaa

SEQ ID NO: 65265 - RNA, 42 nt, synthetic construct
  misc_feature 1..42: note = Serum albumin (439-452)
  source 1..42: mol_type = other RNA
gtgccccaggtcagcacccctacactggttgaggtgtccaga

SEQ ID NO: 65266 - RNA, 27 nt, synthetic construct
  misc_feature 1..27: note = Melanoma-associated antigen F1 (199-207)
  source 1..27: mol_type = other RNA
gtgcagcccagcaagtaccacttcctg

SEQ ID NO: 65267 - RNA, 24 nt, synthetic construct
  misc_feature 1..24: note = Vimentin (117-124)
  source 1..24: mol_type = other RNA
tacatcgacaaggtgagattcctg

SEQ ID NO: 65268 - RNA, 27 nt, synthetic construct
  misc_feature 1..27: note = Fatty acid synthase (2288-2296)
  source 1..27: mol_type = other RNA
tactatatcgactgcattagacaggtg

SEQ ID NO: 65269 - RNA, 27 nt, synthetic construct
  misc_feature 1..27: note = Zinc finger protein 552 (2-10)
  source 1..27: mol_type = other RNA
gccgctgcagccctgagattccccgtg

SEQ ID NO: 65270 - RNA, 30 nt, synthetic construct
  misc_feature 1..30: note = Colipase-like protein 2 (3-12)
  source 1..30: mol_type = other RNA
gccgctctggcactcgtggccggcgtcctt

SEQ ID NO: 65271 - RNA, 27 nt, synthetic construct
  misc_feature 1..27: note = ATP-binding cassette sub-family G member 1 (538-546)
  source 1..27: mol_type = other RNA
gccgctctgggcaccatgacaagcctc

SEQ ID NO: 65272 - RNA, 27 nt, synthetic construct
  misc_feature 1..27: note = Integrin beta-7 (351-359)
  source 1..27: mol_type = other RNA
gccgctctgcccgtgtaccaggagctc

SEQ ID NO: 65273 - RNA, 27 nt, synthetic construct
  misc_feature 1..27: note = Translocon-associated protein subunit delta (2-10)
  source 1..27: mol_type = other RNA
gccgctatggcaagcctgggcgccctc

SEQ ID NO: 65274 - RNA, 27 nt, synthetic construct
  misc_feature 1..27: note = Fumarate hydratase, mitochondrial (264-272)
  source 1..27: mol_type = other RNA
gccgctatgcccagaatctacgagctg

SEQ ID NO: 65275 - RNA, 24 nt, synthetic construct
  misc_feature 1..24: note = Interferon-induced GTP-binding protein Mx1 (15-22)
  source 1..24: mol_type = other RNA
gccgctagccaccccctgctcctt

SEQ ID NO: 65276 - RNA, 27 nt, synthetic construct
  misc_feature 1..27: note = Basement membrane-specific heparan sulfate proteoglycan core protein (1503-1511)
  source 1..27: mol_type = other RNA
gccgctagcatctccgcagtgtctctg

SEQ ID NO: 65277 - RNA, 27 nt, synthetic construct
  misc_feature 1..27: note = Zinc finger and BTB domain-containing protein 7B (478-486)
  source 1..27: mol_type = other RNA
gccgctagccccgcaggcctggacctc

SEQ ID NO: 65278 - RNA, 27 nt, synthetic construct
  misc_feature 1..27: note = Poly(rC)-binding protein 2 (92-100)
  source 1..27: mol_type = other RNA
gccgctagcagaccccctgtgaccctg

SEQ ID NO: 65279 - RNA, 33 nt, synthetic construct
  misc_feature 1..33: note = Protein phosphatase inhibitor 2 (2-12)
  source 1..33: mol_type = other RNA
gccgctagcaccgcatcccacagacccatcaag

SEQ ID NO: 65280 - RNA, 27 nt, synthetic construct
  misc_feature 1..27: note = Transcription factor jun-B (200-208)
  source 1..27: mol_type = other RNA
gccgctgtgggcaccgggagctcctac

SEQ ID NO: 65281 - RNA, 27 nt, synthetic construct
  misc_feature 1..27: note = Carnitine O-palmitoyltransferase 1, liver isoform (476-484)
  source 1..27: mol_type = other RNA
gccgacgctcccatcgtggcacacctg

SEQ ID NO: 65282 - RNA, 30 nt, synthetic construct
  misc_feature 1..30: note = Protein CDV3 homolog (2-11)
  source 1..30: mol_type = other RNA
gccgagaccgaagagagaagcctggacaac

SEQ ID NO: 65283 - RNA, 27 nt, synthetic construct
  misc_feature 1..27: note = Cirhin (640-648)
  source 1..27: mol_type = other RNA
gccttcaagatcagcaaaatttacaag

SEQ ID NO: 65284 - RNA, 27 nt, synthetic construct
  misc_feature 1..27: note = Tyrosine-protein kinase HCK (301-309)
  source 1..27: mol_type = other RNA
gccttcctggctgaggcaaacgtgatg

SEQ ID NO: 65285 - RNA, 27 nt, synthetic construct
  misc_feature 1..27: note = 2-oxoglutarate dehydrogenase, mitochondrial (85-93)
  source 1..27: mol_type = other RNA
gccggcgctccccctgggaccgcatac

SEQ ID NO: 65286 - RNA, 24 nt, synthetic construct
  misc_feature 1..24: note = Fc receptor-like A (58-65)
  source 1..24: mol_type = other RNA
gccggcttccaggtgaaggcttac

SEQ ID NO: 65287 - RNA, 27 nt, synthetic construct
  misc_feature 1..27: note = Piezo-type mechanosensitive ion channel component 1 (211-219)
  source 1..27: mol_type = other RNA
gccggcatcgctcaccccagcgcactg

SEQ ID NO: 65288 - RNA, 30 nt, synthetic construct
  misc_feature 1..30: note = Uncharacterized protein ENSP00000382042 (147-156)
  source 1..30: mol_type = other RNA
gccggcaccgggggaagccccgctctgctc

SEQ ID NO: 65289 - RNA, 27 nt, synthetic construct
  misc_feature 1..27: note = Glycogen debranching enzyme (1193-1201)
  source 1..27: mol_type = other RNA
gccggcaccctggaccagcccctcttc

SEQ ID NO: 65290 - RNA, 30 nt, synthetic construct
  misc_feature 1..30: note = Abelson tyrosine-protein kinase 2 (1157-1166)
  source 1..30: mol_type = other RNA
gccggcgtgcccgggaccaaccctgtcctg

SEQ ID NO: 65291 - RNA, 27 nt, synthetic construct
  misc_feature 1..27: note = Heterogeneous nuclear ribonucleoprotein F (403-411)
  source 1..27: mol_type = other RNA
gccggctacagcgggcagaactccatg

SEQ ID NO: 65292 - RNA, 27 nt, synthetic construct
  misc_feature 1..27: note = Spectrin alpha chain, non-erythrocytic 1 (2132-2140)
  source 1..27: mol_type = other RNA
gcccacgacgctttcagaagctccctg

SEQ ID NO: 65293 - RNA, 27 nt, synthetic construct
  misc_feature 1..27: note = ER degradation-enhancing alpha-mannosidase-like protein 1 (264-272)
  source 1..27: mol_type = other RNA
gcccacgacctggctgtgagactcctt

SEQ ID NO: 65294 - RNA, 27 nt, synthetic construct
  misc_feature 1..27: note = DmX-like protein 2 (2940-2948)
  source 1..27: mol_type = other RNA
gcccacgacagcgctatcaaggcactg

SEQ ID NO: 65295 - RNA, 27 nt, synthetic construct
  misc_feature 1..27: note = Testicular acid phosphatase (287-295)
  source 1..27: mol_type = other RNA
gcccacgacagcaccctgctcgctctt

SEQ ID NO: 65296 - RNA, 27 nt, synthetic construct
  misc_feature 1..27: note = Lysosomal acid phosphatase (285-293)
  source 1..27: mol_type = other RNA
gcccacgacaccacactggtggctctc

SEQ ID NO: 65297 - RNA, 33 nt, synthetic construct
  misc_feature 1..33: note = U4/U6 small nuclear ribonucleoprotein Prp3 (510-520)
  source 1..33: mol_type = other RNA
gcccacgaggaagctaacgcagccagaaagctg

SEQ ID NO: 65298 - RNA, 27 nt, synthetic construct
  misc_feature 1..27: note = Protein FAM195A (93-101)
  source 1..27: mol_type = other RNA
gcccacgaggaaaacgtgagattcgtc

SEQ ID NO: 65299 - RNA, 27 nt, synthetic construct
  misc_feature 1..27: note = Synemin (147-155)
  source 1..27: mol_type = other RNA
gcccacgagagagacgtgagggaactg

SEQ ID NO: 65300 - RNA, 27 nt, synthetic construct
  misc_feature 1..27: note = NADH dehydrogenase (ubiquinone) 1 alpha subcomplex subunit 1 (39-47)
  source 1..27: mol_type = other RNA
gcccacttcggctaccattggagcctg

SEQ ID NO: 65301 - RNA, 27 nt, synthetic construct
  misc_feature 1..27: note = GDP-mannose 4,6 dehydratase (74-82)
  source 1..27: mol_type = other RNA
gcccacatcgagggcaacatgaagctg

SEQ ID NO: 65302 - RNA, 27 nt, synthetic construct
  misc_feature 1..27: note = Striatin-3 (531-539)
  source 1..27: mol_type = other RNA
gcccacatcggccccgtgctgagcctc

SEQ ID NO: 65303 - RNA, 27 nt, synthetic construct
  misc_feature 1..27: note = Nuclear factor erythroid 2-related factor 2 (106-114)
  source 1..27: mol_type = other RNA
gcccacatccccaagagcgacgctctg

SEQ ID NO: 65304 - RNA, 27 nt, synthetic construct
  misc_feature 1..27: note = Nucleolar RNA helicase 2 (616-624)
  source 1..27: mol_type = other RNA
gcccacatcagcggcgctacctccgtg

SEQ ID NO: 65305 - RNA, 27 nt, synthetic construct
  misc_feature 1..27: note = Coatomer subunit beta' (555-563)
  source 1..27: mol_type = other RNA
gcccacctggacagaaccatgtacctc

SEQ ID NO: 65306 - RNA, 27 nt, synthetic construct
  misc_feature 1..27: note = Nuclear inhibitor of protein phosphatase 1 (172-180)
  source 1..27: mol_type = other RNA
gcccacaacaagagaatcagcaccctg

SEQ ID NO: 65307 - RNA, 24 nt, synthetic construct
  misc_feature 1..24: note = Suppressor of SWI4 1 homolog (136-143)
  source 1..24: mol_type = other RNA
gcccacccccctctgctcgtgctt

SEQ ID NO: 65308 - RNA, 27 nt, synthetic construct
  misc_feature 1..27: note = Exosome complex component CSL4 (156-164)
  source 1..27: mol_type = other RNA
gcccacagcgagtccggcatccagatg

SEQ ID NO: 65309 - RNA, 30 nt, synthetic construct
  misc_feature 1..30: note = DNA mismatch repair protein Msh6 (457-466)
  source 1..30: mol_type = other RNA
gcccacagcggcttccccgagatcgctttt

SEQ ID NO: 65310 - RNA, 27 nt, synthetic construct
  misc_feature 1..27: note = 60S ribosomal protein L18a (121-129)
  source 1..27: mol_type = other RNA
gcccacagcatccagattatgaaggtg

SEQ ID NO: 65311 - RNA, 27 nt, synthetic construct
  misc_feature 1..27: note = Sodium-coupled neutral amino acid transporter 5 (74-82)
  source 1..27: mol_type = other RNA
gcccacaccggcgtgatcttctttctg

SEQ ID NO: 65312 - RNA, 27 nt, synthetic construct
  misc_feature 1..27: note = AP-2 complex subunit mu (194-202)
  source 1..27: mol_type = other RNA
gcccacgtgagcggcagagtcgttatg

SEQ ID NO: 65313 - RNA, 27 nt, synthetic construct
  misc_feature 1..27: note = Trafficking protein particle complex subunit 5 (162-170)
  source 1..27: mol_type = other RNA
gcccactggcataagggcaccacactg

SEQ ID NO: 65314 - RNA, 27 nt, synthetic construct
  misc_feature 1..27: note = LIM and SH3 domain protein 1 (55-63)
  source 1..27: mol_type = other RNA
gcccactaccccaagcagagcttcacc

SEQ ID NO: 65315 - RNA, 27 nt, synthetic construct
  misc_feature 1..27: note = Endoplasmic reticulum-Golgi intermediate compartment protein 3 (313-321)
  source 1..27: mol_type = other RNA
gccatcattggcgggatgttcaccgtg

SEQ ID NO: 65316 - RNA, 27 nt, synthetic construct
  misc_feature 1..27: note = Parafibromin (184-192)
  source 1..27: mol_type = other RNA
gccatcaaggctaaaattatggcaaag

SEQ ID NO: 65317 - RNA, 27 nt, synthetic construct
  misc_feature 1..27: note = Exportin-4 (825-833)
  source 1..27: mol_type = other RNA
gccatcctgttcaactttctcatggac

SEQ ID NO: 65318 - RNA, 27 nt, synthetic construct
  misc_feature 1..27: note = Protein arginine N-methyltransferase 5 (168-176)
  source 1..27: mol_type = other RNA
gccatcctgcccaccagcattttcctc

SEQ ID NO: 65319 - RNA, 30 nt, synthetic construct
  misc_feature 1..30: note = Bifunctional glutamate/proline-tRNA ligase (215-224)
  source 1..30: mol_type = other RNA
gccaaggctgcactgctcaaccagcactac

SEQ ID NO: 65320 - RNA, 30 nt, synthetic construct
  misc_feature 1..30: note = Exportin-5 (744-753)
  source 1..30: mol_type = other RNA
gccaaggctggcgggttcgtggtcggatac

SEQ ID NO: 65321 - RNA, 27 nt, synthetic construct
  misc_feature 1..27: note = DNA replication licensing factor MCM7 (470-478)
  source 1..27: mol_type = other RNA
gccaaggctggcatcctgaccacactc

SEQ ID NO: 65322 - RNA, 27 nt, synthetic construct
  misc_feature 1..27: note = DNA replication licensing factor MCM5 (470-478)
  source 1..27: mol_type = other RNA
gccaaggctggcatcaccacaactctg

SEQ ID NO: 65323 - RNA, 27 nt, synthetic construct
  misc_feature 1..27: note = Peptidase M20 domain-containing protein 2 (398-406)
  source 1..27: mol_type = other RNA
gccaaggctctggcaatgaccgccctc

SEQ ID NO: 65324 - RNA, 30 nt, synthetic construct
  misc_feature 1..30: note = Proteasome subunit beta type-2 (125-134)
  source 1..30: mol_type = other RNA
gccaaggctcccttcgcagcccacggctac

SEQ ID NO: 65325 - RNA, 27 nt, synthetic construct
  misc_feature 1..27: note = Drebrin (614-622)
  source 1..27: mol_type = other RNA
gccaaggctccccctccagtgttctac

SEQ ID NO: 65326 - RNA, 27 nt, synthetic construct
  misc_feature 1..27: note = CCAAT/enhancer-binding protein beta (241-249)
  source 1..27: mol_type = other RNA
gccaaggctccccctaccgcatgctac

SEQ ID NO: 65327 - RNA, 27 nt, synthetic construct
  misc_feature 1..27: note = Ragulator complex protein LAMTOR2 (106-114)
  source 1..27: mol_type = other RNA
gccaaggctcaggcactggtgcaatac

SEQ ID NO: 65328 - RNA, 27 nt, synthetic construct
  misc_feature 1..27: note = Protein PRRC2C (2502-2510)
  source 1..27: mol_type = other RNA
gccaaggctcagagcggcctggcattc

SEQ ID NO: 65329 - RNA, 27 nt, synthetic construct
  misc_feature 1..27: note = ATP-dependent RNA helicase A (181-189)
  source 1..27: mol_type = other RNA
gccaaggctagactgaaccagtacttc

SEQ ID NO: 65330 - RNA, 33 nt, synthetic construct
  misc_feature 1..33: note = Heterogeneous nuclear ribonucleoprotein L (247-257)
  source 1..33: mol_type = other RNA
gccaaggctagcctgaacggcgcagacatctac

SEQ ID NO: 65331 - RNA, 27 nt, synthetic construct
  misc_feature 1..27: note = NAD(P)H-hydrate epimerase (96-104)
  source 1..27: mol_type = other RNA
gccaaggcttacccccctaccagcatg

SEQ ID NO: 65332 - RNA, 27 nt, synthetic construct
  misc_feature 1..27: note = 1-phosphatidylinositol 4,5-bisphosphate phosphodiesterase beta-1 (127-135)
  source 1..27: mol_type = other RNA
gccaaggagtggaccaacgaagtgttc

SEQ ID NO: 65333 - RNA, 30 nt, synthetic construct
  misc_feature 1..30: note = Cell division cycle-associated 7-like protein (291-300)
  source 1..30: mol_type = other RNA
gccaagttcgctgaggaattttacagcttc

SEQ ID NO: 65334 - RNA, 27 nt, synthetic construct
  misc_feature 1..27: note = Cathepsin D (193-201)
  source 1..27: mol_type = other RNA
gccaagttcgacggcatcctggggatg

SEQ ID NO: 65335 - RNA, 30 nt, synthetic construct
  misc_feature 1..30: note = Crooked neck-like protein 1 (420-429)
  source 1..30: mol_type = other RNA
gccaagttcgaggaaaaccagaaagagttt

SEQ ID NO: 65336 - RNA, 27 nt, synthetic construct
  misc_feature 1..27: note = Staphylococcal nuclease domain-containing protein 1 (248-256)
  source 1..27: mol_type = other RNA
gccaagttctttaccgagagcagactg

SEQ ID NO: 65337 - RNA, 27 nt, synthetic construct
  misc_feature 1..27: note = Pre-mRNA-processing factor 19 (487-495)
  source 1..27: mol_type = other RNA
gccaagttcatcgctagcaccggcatg

SEQ ID NO: 65338 - RNA, 27 nt, synthetic construct
  misc_feature 1..27: note = Squalene monooxygenase (243-251)
  source 1..27: mol_type = other RNA
gccaagttcatcgagggcgtggtcctg

SEQ ID NO: 65339 - RNA, 27 nt, synthetic construct
  misc_feature 1..27: note = DCN1-like protein 2 (152-160)
  source 1..27: mol_type = other RNA
gccaagttcaaagacttttaccagttc

SEQ ID NO: 65340 - RNA, 30 nt, synthetic construct
  misc_feature 1..30: note = DnaJ homolog subfamily B member 9 (65-74)
  source 1..30: mol_type = other RNA
gccaagttcagagagatcgctgaagcatac

SEQ ID NO: 65341 - RNA, 27 nt, synthetic construct
  misc_feature 1..27: note = Nitrogen permease regulator 3-like protein (366-374)
  source 1..27: mol_type = other RNA
gccaagttcagcctgcccgtgtccctc

SEQ ID NO: 65342 - RNA, 33 nt, synthetic construct
  misc_feature 1..33: note = DNA-directed RNA polymerases I and III subunit RPAC1 (223-233)
  source 1..33: mol_type = other RNA
gccaagttcagccccgtggctaccgcatcctac

SEQ ID NO: 65343 - RNA, 27 nt, synthetic construct
  misc_feature 1..27: note = Ubiquitin-like modifier-activating enzyme 1 (321-329)
  source 1..27: mol_type = other RNA
gccaagttcagcagacccgctcagctg

SEQ ID NO: 65344 - RNA, 27 nt, synthetic construct
  misc_feature 1..27: note = Staphylococcal nuclease domain-containing protein 1 (738-746)
  source 1..27: mol_type = other RNA
gccaagttcgtggacggcgagtggtac

SEQ ID NO: 65345 - RNA, 27 nt, synthetic construct
  misc_feature 1..27: note = 60S ribosomal protein L31 (74-82)
  source 1..27: mol_type = other RNA
gccaagggcatcagaaacgtgccctac

SEQ ID NO: 65346 - RNA, 27 nt, synthetic construct
  misc_feature 1..27: note = Cullin-1 (220-228)
  source 1..27: mol_type = other RNA
gccaagggccccaccctgacagtgtac

SEQ ID NO: 65347 - RNA, 27 nt, synthetic construct
  misc_feature 1..27: note = NACHT, LRR and PYD domains-containing protein 7 (625-633)
  source 1..27: mol_type = other RNA
gccaagggcgtgttcctggagaactac

SEQ ID NO: 65348 - RNA, 27 nt, synthetic construct
  misc_feature 1..27: note = Cystatin-B (90-98)
  source 1..27: mol_type = other RNA
gccaagcacgacgagctgacctacttc

SEQ ID NO: 65349 - RNA, 36 nt, synthetic construct
  misc_feature 1..36: note = T-complex protein 1 subunit theta (19-30)
  source 1..36: mol_type = other RNA
gccaagcacttcagcggcctggaggaagctgtgtac

SEQ ID NO: 65350 - RNA, 27 nt, synthetic construct
  misc_feature 1..27: note = Unconventional myosin-Va (1821-1829)
  source 1..27: mol_type = other RNA
gccaagcacatcttccccgtgaccttt

SEQ ID NO: 65351 - RNA, 27 nt, synthetic construct
  misc_feature 1..27: note = Fatty aldehyde dehydrogenase (198-206)
  source 1..27: mol_type = other RNA
gccaagcacctgacccccgtgacactc

SEQ ID NO: 65352 - RNA, 27 nt, synthetic construct
  misc_feature 1..27: note = AP-2 complex subunit sigma (44-52)
  source 1..27: mol_type = other RNA
gccaagcacaccaacttcgtggagttt

SEQ ID NO: 65353 - RNA, 27 nt, synthetic construct
  misc_feature 1..27: note = F-box DNA helicase 1 (835-843)
  source 1..27: mol_type = other RNA
gccaagatcgctgtggtcgagaaatac

SEQ ID NO: 65354 - RNA, 33 nt, synthetic construct
  misc_feature 1..33: note = Carnitine O-palmitoyltransferase 1, liver isoform (75-85)
  source 1..33: mol_type = other RNA
gccaagatcgaccccagcctgggcattatagct

SEQ ID NO: 65355 - RNA, 27 nt, synthetic construct
  misc_feature 1..27: note = D(2) dopamine receptor (338-346)
  source 1..27: mol_type = other RNA
gccaagatcttcgagattcagaccatg

SEQ ID NO: 65356 - RNA, 27 nt, synthetic construct
  misc_feature 1..27: note = Poly(rC)-binding protein 2 (308-316)
  source 1..27: mol_type = other RNA
gccaagatcaacgagattagacagatg

SEQ ID NO: 65357 - RNA, 27 nt, synthetic construct
  misc_feature 1..27: note = Reticulon-2 (522-530)
  source 1..27: mol_type = other RNA
gccaagatccccggcaccggggctctg

SEQ ID NO: 65358 - RNA, 33 nt, synthetic construct
  misc_feature 1..33: note = Protein SET (89-99)
  source 1..33: mol_type = other RNA
gccaagatccccaacttctgggtgaccacattt

SEQ ID NO: 65359 - RNA, 33 nt, synthetic construct
  misc_feature 1..33: note = COBW domain-containing protein 6 (40-50)
  source 1..33: mol_type = other RNA
gccaagatccccgtgaccattataacaggctac

SEQ ID NO: 65360 - RNA, 33 nt, synthetic construct
  misc_feature 1..33: note Dolichyl-diphosphooligosaccharide-proteinosyltransferase subunit 1 (125-135)
  source 1..33: mol_type = other RNA
gccaagatcagcgtgattgtcgagaccgtttac

SEQ ID NO: 65361 - RNA, 27 nt, synthetic construct
  misc_feature 1..27: note = Nuclear fragile X mental retardation-interacting protein 2 (350-358)
  source 1..27: mol_type = other RNA
gccaagatcgtgcccaaaattagctac

SEQ ID NO: 65362 - RNA, 27 nt, synthetic construct
  misc_feature 1..27: note = Poly (ADP-ribose) polymerase 3 (121-129)
  source 1..27: mol_type = other RNA
gccaagaaagacttcgagaagaaattt

SEQ ID NO: 65363 - RNA, 27 nt, synthetic construct
  misc_feature 1..27: note = DnaJ homolog subfamily C member 7 (40-48)
  source 1..27: mol_type = other RNA
gccaagaaagactacaacgaggcttat

SEQ ID NO: 65364 - RNA, 27 nt, synthetic construct
  misc_feature 1..27: note = Double-stranded RNA-binding protein Staufen homolog 1 (297-305)
  source 1..27: mol_type = other RNA
gccaagaaagagaaggaacccgagtac

SEQ ID NO: 65365 - RNA, 27 nt, synthetic construct
  misc_feature 1..27: note = Translocation protein SEC62 (64-72)
  source 1..27: mol_type = other RNA
gccaagaaaggcgaggaagctctgttc

SEQ ID NO: 65366 - RNA, 27 nt, synthetic construct
  misc_feature 1..27: note = SWI/SNF complex subunit SMARCC2 (316-324)
  source 1..27: mol_type = other RNA
gccaagaaaggccccagcaccccttac

SEQ ID NO: 65367 - RNA, 27 nt, synthetic construct
  misc_feature 1..27: note = Myosin light chain 1/3, skeletal muscle isoform (105-113)
  source 1..27: mol_type = other RNA
gccaagaaaatcgagttcgaacagttt

SEQ ID NO: 65368 - RNA, 27 nt, synthetic construct
  misc_feature 1..27: note = Probable ATP-dependent RNA helicase DDX6 (351-359)
  source 1..27: mol_type = other RNA
gccaagaaaatcagccagctgggctac

SEQ ID NO: 65369 - RNA, 27 nt, synthetic construct
  misc_feature 1..27: note = Poly (ADP-ribose) polymerase 8 (686-694)
  source 1..27: mol_type = other RNA
gccaagaaactgttcggcagcaccttt

SEQ ID NO: 65370 - RNA, 27 nt, synthetic construct
  misc_feature 1..27: note = Serine/threonine-protein phosphatase 2A 56 kDa regulatory subunit delta isoform (231-239)
  source 1..27: mol_type = other RNA
gccaagaaatacatcgaccagaagttc

SEQ ID NO: 65371 - RNA, 27 nt, synthetic construct
  misc_feature 1..27: note = Nucleolar RNA helicase 2 (386-394)
  source 1..27: mol_type = other RNA
gccaagaaatacatgaagagcacctat

SEQ ID NO: 65372 - RNA, 33 nt, synthetic construct
  misc_feature 1..33: note = Interferon-induced, double-stranded RNA-activated protein kinase (313-323)
  source 1..33: mol_type = other RNA
gccaagctggaccacgtgaacatcgtccattac

SEQ ID NO: 65373 - RNA, 27 nt, synthetic construct
  misc_feature 1..27: note = Golgin subfamily A member 4 (798-806)
  source 1..27: mol_type = other RNA
gccaagctggacgtgttccagagctac

SEQ ID NO: 65374 - RNA, 27 nt, synthetic construct
  misc_feature 1..27: note = Zinc finger Ran-binding domain-containing protein 2 (94-102)
  source 1..27: mol_type = other RNA
gccaagctggaggaaagaaccggctac

SEQ ID NO: 65375 - RNA, 27 nt, synthetic construct
  misc_feature 1..27: note = Pre-mRNA-splicing factor ATP-dependent RNA helicase PRP16 (1082-1090)
  source 1..27: mol_type = other RNA
gccaagctgaaaggcatcggggagtac

SEQ ID NO: 65376 - RNA, 27 nt, synthetic construct
  misc_feature 1..27: note = DNA replication licensing factor MCM5 (557-565)
  source 1..27: mol_type = other RNA
gccaagctgaaaaagttcatcgcttac

SEQ ID NO: 65377 - RNA, 30 nt, synthetic construct
  misc_feature 1..30: note = Transmembrane and coiled-coil domain-containing protein 1 (115-124)
  source 1..30: mol_type = other RNA
gccaagctgcccttcacccctctcagctac

SEQ ID NO: 65378 - RNA, 27 nt, synthetic construct
  misc_feature 1..27: note = ATP-dependent RNA helicase A (856-864)
  source 1..27: mol_type = other RNA
gccaagctgcccatcgagcctagattc

SEQ ID NO: 65379 - RNA, 27 nt, synthetic construct
  misc_feature 1..27: note = Peptidyl-prolyl cis-trans isomerase FKBP1A (73-81)
  source 1..27: mol_type = other RNA
gccaagctgaccatcagccccgactac

SEQ ID NO: 65380 - RNA, 33 nt, synthetic construct
  misc_feature 1..33: note = Heterogeneous nuclear ribonucleoprotein U (422-432)
  source 1..33: mol_type = other RNA
gccaagaacggccaggacctgggggtggctttc

SEQ ID NO: 65381 - RNA, 27 nt, synthetic construct
  misc_feature 1..27: note = Pre-mRNA-processing-splicing factor 8 (1011-1019)
  source 1..27: mol_type = other RNA
gccaagaacaatgtggtcatcaactac

SEQ ID NO: 65382 - RNA, 27 nt, synthetic construct
  misc_feature 1..27: note = Immunoglobulin superfamily member 10 (2607-2615)
  source 1..27: mol_type = other RNA
gccaagaaccccctgggcagcgactac

SEQ ID NO: 65383 - RNA, 33 nt, synthetic construct
  misc_feature 1..33: note = ADP-ribosylation factor GTPase-activating protein 3 (30-40)
  source 1..33: mol_type = other RNA
gccaagaaccccagctgggcttccatcacctac

SEQ ID NO: 65384 - RNA, 30 nt, synthetic construct
  misc_feature 1..30: note = Transmembrane protein 214 (356-365)
  source 1..30: mol_type = other RNA
gccaagcccgacagcaccctgcacacatac

SEQ ID NO: 65385 - RNA, 30 nt, synthetic construct
  misc_feature 1..30: note = Nucleolar GTP-binding protein 2 (401-410)
  source 1..30: mol_type = other RNA
gccaagcccgagtacatcagcaaaacctat

SEQ ID NO: 65386 - RNA, 27 nt, synthetic construct
  misc_feature 1..27: note = Vacuolar protein sorting-associated protein 41 homolog (804-812)
  source 1..27: mol_type = other RNA
gccaagcccttcagcgtggtcgttttt

SEQ ID NO: 65387 - RNA, 27 nt, synthetic construct
  misc_feature 1..27: note = 116 kDa U5 small nuclear ribonucleoprotein component (445-453)
  source 1..27: mol_type = other RNA
gccaagcccaaaatcgagcacacctac

SEQ ID NO: 65388 - RNA, 27 nt, synthetic construct
  misc_feature 1..27: note = Olfactomedin-like protein 2B (2-10)
  source 1..27: mol_type = other RNA
gccaagcccagactgctcgtgctttac

SEQ ID NO: 65389 - RNA, 30 nt, synthetic construct
  misc_feature 1..30: note = RNA-binding protein 38 (113-122)
  source 1..30: mol_type = other RNA
gccaagcccagaagcctgcagaccggcttc

SEQ ID NO: 65390 - RNA, 27 nt, synthetic construct
  misc_feature 1..27: note = 116 kDa U5 small nuclear ribonucleoprotein component (962-970)
  source 1..27: mol_type = other RNA
gccaagcaggacgtggtcctgaactac

SEQ ID NO: 65391 - RNA, 27 nt, synthetic construct
  misc_feature 1..27: note = Nuclear pore complex protein Nup153 (293-301)
  source 1..27: mol_type = other RNA
gccaagcagctgagcgctcaatcctac

SEQ ID NO: 65392 - RNA, 27 nt, synthetic construct
  misc_feature 1..27: note = Proteasome activator complex subunit 1 (189-197)
  source 1..27: mol_type = other RNA
gccaagcagccccacgtgggcgactac

SEQ ID NO: 65393 - RNA, 27 nt, synthetic construct
  misc_feature 1..27: note = Mitochondrial import receptor subunit TOM7 homolog (8-16)
  source 1..27: mol_type = other RNA
gccaagcagagactgcaacagctcttc

SEQ ID NO: 65394 - RNA, 27 nt, synthetic construct
  misc_feature 1..27: note = Protein disulfide-isomerase A4 (244-252)
  source 1..27: mol_type = other RNA
gccaagagattcgacgtgagcggctac

SEQ ID NO: 65395 - RNA, 27 nt, synthetic construct
  misc_feature 1..27: note = Serine/threonine-protein phosphatase PP1-beta catalytic subunit (258-266)
  source 1..27: mol_type = other RNA
gccaagagacagctggtgaccctcttc

SEQ ID NO: 65396 - RNA, 24 nt, synthetic construct
  misc_feature 1..24: note = Putative uncharacterized protein C10orf113 (2-9)
  source 1..24: mol_type = other RNA
gccaagagcgagagaaggatctac

SEQ ID NO: 65397 - RNA, 27 nt, synthetic construct
  misc_feature 1..27: note = Serine/threonine-protein kinase/endoribonuclease IRE1 (276-284)
  source 1..27: mol_type = other RNA
gccaagagcaaactgacccccacactc

SEQ ID NO: 65398 - RNA, 30 nt, synthetic construct
  misc_feature 1..30: note = Gamma-taxilin (369-378)
  source 1..30: mol_type = other RNA
gccaagagcaacgagctgttcaccacattt

SEQ ID NO: 65399 - RNA, 27 nt, synthetic construct
  misc_feature 1..27: note = Cullin-1 (38-46)
  source 1..27: mol_type = other RNA
gccaagagcagatacatggagctgtat

SEQ ID NO: 65400 - RNA, 27 nt, synthetic construct
  misc_feature 1..27: note = Protein disulfide-isomerase TMX3 (363-371)
  source 1..27: mol_type = other RNA
gccaagagcaccatcgtgtccattttc

SEQ ID NO: 65401 - RNA, 27 nt, synthetic construct
  misc_feature 1..27: note = Coiled-coil domain-containing protein 115 (51-59)
  source 1..27: mol_type = other RNA
gccaagagcgtgggccccctgcagtac

SEQ ID NO: 65402 - RNA, 27 nt, synthetic construct
  misc_feature 1..27: note = Cyclin-dependent kinase 14 (280-288)
  source 1..27: mol_type = other RNA
gccaagagcgtgccctcccacacctac

SEQ ID NO: 65403 - RNA, 27 nt, synthetic construct
  misc_feature 1..27: note = Nuclear nucleic acid-binding protein C1D (53-61)
  source 1..27: mol_type = other RNA
gccaaggtggacctggtcagcgcttac

SEQ ID NO: 65404 - RNA, 30 nt, synthetic construct
  misc_feature 1..30: note = Plastin-2 (19-28)
  source 1..30: mol_type = other RNA
gccaaggtggacaccgatggcaacgggtac

SEQ ID NO: 65405 - RNA, 27 nt, synthetic construct
  misc_feature 1..27: note = Transmembrane protein 14D (103-111)
  source 1..27: mol_type = other RNA
gccaaggtgggcgtcagaatgctgatg

SEQ ID NO: 65406 - RNA, 27 nt, synthetic construct
  misc_feature 1..27: note = 60S ribosomal protein L27 (114-122)
  source 1..27: mol_type = other RNA
gccaaggtgaaattcgaggaaagatac

SEQ ID NO: 65407 - RNA, 24 nt, synthetic construct
  misc_feature 1..24: note = Neuroblast differentiation-associated protein AHNAK (5180-5187)
  source 1..24: mol_type = other RNA
gccaaggtgaaaacccccagcttc

SEQ ID NO: 65408 - RNA, 27 nt, synthetic construct
  misc_feature 1..27: note = Nck-associated protein 1-like (512-520)
  source 1..27: mol_type = other RNA
gccaaggtgatgaacctgatcgtcttc

SEQ ID NO: 65409 - RNA, 27 nt, synthetic construct
  misc_feature 1..27: note Dolichyl-diphosphooligosaccharide-proteinosyltransferase subunit STT3A (520-528)
  source 1..27: mol_type = other RNA
gccaaggtgatgagctggtgggactac

SEQ ID NO: 65410 - RNA, 27 nt, synthetic construct
  misc_feature 1..27: note = Eukaryotic translation initiation factor 3 subunit L (142-150)
  source 1..27: mol_type = other RNA
gccaaggtgagcggcgggccctccctg

SEQ ID NO: 65411 - RNA, 27 nt, synthetic construct
  misc_feature 1..27: note = Condensin-2 complex subunit D3 (362-370)
  source 1..27: mol_type = other RNA
gccaaggtggtcgacaaaagcgagtac

SEQ ID NO: 65412 - RNA, 27 nt, synthetic construct
  misc_feature 1..27: note = Cytoskeleton-associated protein 5 (1205-1213)
  source 1..27: mol_type = other RNA
gccaagtggctgcaggacgagatgttc

SEQ ID NO: 65413 - RNA, 33 nt, synthetic construct
  misc_feature 1..33: note = DNA-directed RNA polymerase II subunit RPB3 (174-184)
  source 1..33: mol_type = other RNA
gccaagtggaaccccaccgctggcgtggcattc

SEQ ID NO: 65414 - RNA, 27 nt, synthetic construct
  misc_feature 1..27: note = Enhancer of mRNA-decapping protein 4 (124-132)
  source 1..27: mol_type = other RNA
gccaagtacgactgggagcagaaatat

SEQ ID NO: 65415 - RNA, 27 nt, synthetic construct
  misc_feature 1..27: note = Myotubularin-related protein 6 (102-110)
  source 1..27: mol_type = other RNA
gccaagtacgaggacctgtatgctttc

SEQ ID NO: 65416 - RNA, 27 nt, synthetic construct
  misc_feature 1..27: note = CXXC-type zinc finger protein 1 (507-515)
  source 1..27: mol_type = other RNA
gccaagtacgagagccagacctccttc

SEQ ID NO: 65417 - RNA, 27 nt, synthetic construct
  misc_feature 1..27: note = Guanine nucleotide-binding protein G(s) subunit alpha isoforms XLas (980-988)
  source 1..27: mol_type = other RNA
gccaagtacttcatcagagacgagttt

SEQ ID NO: 65418 - RNA, 27 nt, synthetic construct
  misc_feature 1..27: note = Integrator complex subunit 10 (304-312)
  source 1..27: mol_type = other RNA
gccaagtacaaaaaccaggtggtctat

SEQ ID NO: 65419 - RNA, 33 nt, synthetic construct
  misc_feature 1..33: note = 40S ribosomal protein S5 (46-56)
  source 1..33: mol_type = other RNA
gccaagtacctgccccacagcgctggcagatat

SEQ ID NO: 65420 - RNA, 33 nt, synthetic construct
  misc_feature 1..33: note = Nucleolar protein 56 (319-329)
  source 1..33: mol_type = other RNA
gccaagtaccccgctagcaccgtgcagatcctg

SEQ ID NO: 65421 - RNA, 27 nt, synthetic construct
  misc_feature 1..27: note = Proteasome activator complex subunit 3 (194-202)
  source 1..27: mol_type = other RNA
gccaagtacccccacgtggaggactat

SEQ ID NO: 65422 - RNA, 27 nt, synthetic construct
  misc_feature 1..27: note = V-type proton ATPase subunit C 1 (110-118)
  source 1..27: mol_type = other RNA
gccaagtaccccatcaaacagagcctg

SEQ ID NO: 65423 - RNA, 27 nt, synthetic construct
  misc_feature 1..27: note = Probable ATP-dependent RNA helicase DDX10 (280-288)
  source 1..27: mol_type = other RNA
gccaagtacagcacccccgctacactg

SEQ ID NO: 65424 - RNA, 27 nt, synthetic construct
  misc_feature 1..27: note = 26S proteasome non-ATPase regulatory subunit 12 (367-375)
  source 1..27: mol_type = other RNA
gccaagtactataccagaatcacaatg

SEQ ID NO: 65425 - RNA, 30 nt, synthetic construct
  misc_feature 1..30: note = Serine/arginine repetitive matrix protein 2 (2360-2369)
  source 1..30: mol_type = other RNA
gccctggctcccgcaagcctcacctccgcc

SEQ ID NO: 65426 - RNA, 27 nt, synthetic construct
  misc_feature 1..27: note = Protein FAM217A (258-266)
  source 1..27: mol_type = other RNA
gccctggacctccacaaccttgctctg

SEQ ID NO: 65427 - RNA, 27 nt, synthetic construct
  misc_feature 1..27: note = HAUS augmin-like complex subunit 8 (77-85)
  source 1..27: mol_type = other RNA
gccctggacaccacaagacacgagctc

SEQ ID NO: 65428 - RNA, 30 nt, synthetic construct
  misc_feature 1..30: note = Mesoderm development candidate 1 (248-257)
  source 1..30: mol_type = other RNA
gccctgttcagcggccccctcgtgcaggct

SEQ ID NO: 65429 - RNA, 27 nt, synthetic construct
  misc_feature 1..27: note = Zinc finger protein 827 (563-571)
  source 1..27: mol_type = other RNA
gccctgttcagccaggacatctccgtg

SEQ ID NO: 65430 - RNA, 27 nt, synthetic construct
  misc_feature 1..27: note = DNA-directed RNA polymerase I subunit RPA49 (297-305)
  source 1..27: mol_type = other RNA
gccctgggccccggggtgcctcacatc

SEQ ID NO: 65431 - RNA, 30 nt, synthetic construct
  misc_feature 1..30: note = Fatty acid desaturase 2 (422-431)
  source 1..30: mol_type = other RNA
gccctgctcgacatcattagaagccttaag

SEQ ID NO: 65432 - RNA, 27 nt, synthetic construct
  misc_feature 1..27: note = Symplekin (780-788)
  source 1..27: mol_type = other RNA
gccctgctcccccagaaccacaagctt

SEQ ID NO: 65433 - RNA, 27 nt, synthetic construct
  misc_feature 1..27: note = Transmembrane protein 147 (135-143)
  source 1..27: mol_type = other RNA
gccctgagcaccctcgctctttacgtg

SEQ ID NO: 65434 - RNA, 30 nt, synthetic construct
  misc_feature 1..30: note = Protein HIRA (789-798)
  source 1..30: mol_type = other RNA
gccctgaccgctgcagccacactcagcgtg

SEQ ID NO: 65435 - RNA, 27 nt, synthetic construct
  misc_feature 1..27: note = ATP-binding cassette sub-family B member 8, mitochondrial (142-150)
  source 1..27: mol_type = other RNA
gccctggtgaacgtccagatccccctc

SEQ ID NO: 65436 - RNA, 27 nt, synthetic construct
  misc_feature 1..27: note = Serine/threonine-protein phosphatase 6 regulatory ankyrin repeat subunit A (155-163)
  source 1..27: mol_type = other RNA
gccctggtgcccctccttagcaacgtc

SEQ ID NO: 65437 - RNA, 27 nt, synthetic construct
  misc_feature 1..27: note = Protein transport protein Sec61 subunit alpha isoform 2 (274-282)
  source 1..27: mol_type = other RNA
gccctggtgagcaacctctacgtcatc

SEQ ID NO: 65438 - RNA, 27 nt, synthetic construct
  misc_feature 1..27: note = E3 ubiquitin-protein ligase UBR4 (709-717)
  source 1..27: mol_type = other RNA
gccctgtaccacttcaaccatagcctc

SEQ ID NO: 65439 - RNA, 27 nt, synthetic construct
  misc_feature 1..27: note = Tetratricopeptide repeat protein 13 (724-732)
  source 1..27: mol_type = other RNA
gccctgtacaaggacctcaccgctaaa

SEQ ID NO: 65440 - RNA, 27 nt, synthetic construct
  misc_feature 1..27: note = E3 ubiquitin-protein ligase UBR5 (376-384)
  source 1..27: mol_type = other RNA
gccctgtacagcgagctccttgctgtg

SEQ ID NO: 65441 - RNA, 27 nt, synthetic construct
  misc_feature 1..27: note = Protein spinster homolog 3 (269-277)
  source 1..27: mol_type = other RNA
gccatggctttcgtgaccggcgcactg

SEQ ID NO: 65442 - RNA, 27 nt, synthetic construct
  misc_feature 1..27: note = 28S ribosomal protein S9, mitochondrial (347-355)
  source 1..27: mol_type = other RNA
gccatggctaaggcactgtgcagcttc

SEQ ID NO: 65443 - RNA, 33 nt, synthetic construct
  misc_feature 1..33: note = Probable ribosome biogenesis protein RLP24 (92-102)
  source 1..33: mol_type = other RNA
gccatgaagagagtggaggaaatcaaacagaag

SEQ ID NO: 65444 - RNA, 27 nt, synthetic construct
  misc_feature 1..27: note = Melanocyte-stimulating hormone receptor (198-206)
  source 1..27: mol_type = other RNA
gccatgctggtgctcatggctgtcctt

SEQ ID NO: 65445 - RNA, 27 nt, synthetic construct
  misc_feature 1..27: note = Enteropeptidase (878-886)
  source 1..27: mol_type = other RNA
gccatgatgcacctggagttcaaggtg

SEQ ID NO: 65446 - RNA, 27 nt, synthetic construct
  misc_feature 1..27: note = 60S ribosomal protein L11 (162-170)
  source 1..27: mol_type = other RNA
gccatgagatggttccagcaaaagtac

SEQ ID NO: 65447 - RNA, 27 nt, synthetic construct
  misc_feature 1..27: note = Multivesicular body subunit 12A (38-46)
  source 1..27: mol_type = other RNA
gcccccgctagcttcggcaagtccttt

SEQ ID NO: 65448 - RNA, 27 nt, synthetic construct
  misc_feature 1..27: note = Hypoxia-inducible factor 1-alpha (828-836)
  source 1..27: mol_type = other RNA
gcccccatccagggcagcagaaacctg

SEQ ID NO: 65449 - RNA, 27 nt, synthetic construct
  misc_feature 1..27: note = Transcriptional activator Myb (224-232)
  source 1..27: mol_type = other RNA
gcccaggctccccctaccgcacaactg

SEQ ID NO: 65450 - RNA, 27 nt, synthetic construct
  misc_feature 1..27: note = Serine/threonine-protein phosphatase 2B catalytic subunit beta isoform (292-300)
  source 1..27: mol_type = other RNA
gcccaggacgctggctacagaatgtat

SEQ ID NO: 65451 - RNA, 24 nt, synthetic construct
  misc_feature 1..24: note = Transcription intermediary factor 1-beta (762-769)
  source 1..24: mol_type = other RNA
gcccaggacgtgggcagaatgttc

SEQ ID NO: 65452 - RNA, 27 nt, synthetic construct
  misc_feature 1..27: note = Poly(A) polymerase gamma (579-587)
  source 1..27: mol_type = other RNA
gcccagggcctgagcatccccgtgatt

SEQ ID NO: 65453 - RNA, 27 nt, synthetic construct
  misc_feature 1..27: note = Ribosomal RNA processing protein 1 homolog A (91-99)
  source 1..27: mol_type = other RNA
gcccagcacctgttcctccaagctttt

SEQ ID NO: 65454 - RNA, 27 nt, synthetic construct
  misc_feature 1..27: note = Very-long-chain enoyl-CoA reductase (83-91)
  source 1..27: mol_type = other RNA
gcccagatcagctgggtgaccgtcttc

SEQ ID NO: 65455 - RNA, 27 nt, synthetic construct
  misc_feature 1..27: note = Disintegrin and metalloproteinase domain-containing protein 15 (301-309)
  source 1..27: mol_type = other RNA
gcccagctggtgaccggcacaagcttc

SEQ ID NO: 65456 - RNA, 30 nt, synthetic construct
  misc_feature 1..30: note = Protein YIF1B (52-61)
  source 1..30: mol_type = other RNA
gcccagagagctcccggcgggctgagctac

SEQ ID NO: 65457 - RNA, 27 nt, synthetic construct
  misc_feature 1..27: note = Activator of basal transcription 1 (212-220)
  source 1..27: mol_type = other RNA
gcccagagacccaccgagcaagaactg

SEQ ID NO: 65458 - RNA, 24 nt, synthetic construct
  misc_feature 1..24: note = UBX domain-containing protein 4 (350-357)
  source 1..24: mol_type = other RNA
gcccagaccgtgggcaacacatac

SEQ ID NO: 65459 - RNA, 27 nt, synthetic construct
  misc_feature 1..27: note = Uncharacterized protein C11orf24 (193-201)
  source 1..27: mol_type = other RNA
gcccaggtgcccaagagctccgctctg

SEQ ID NO: 65460 - RNA, 30 nt, synthetic construct
  misc_feature 1..30: note = Asparagine synthetase (glutamine-hydrolyzing) (277-286)
  source 1..30: mol_type = other RNA
gcccaggtgcaataccccctgcagaccttc

SEQ ID NO: 65461 - RNA, 27 nt, synthetic construct
  misc_feature 1..27: note = Elongation factor 1-gamma (93-101)
  source 1..27: mol_type = other RNA
gcccaggtggtccaatgggttagcttc

SEQ ID NO: 65462 - RNA, 27 nt, synthetic construct
  misc_feature 1..27: note = Transmembrane protein 147 (151-159)
  source 1..27: mol_type = other RNA
gcccaggtgtggatgatcaccagatac

SEQ ID NO: 65463 - RNA, 27 nt, synthetic construct
  misc_feature 1..27: note = Replication initiator 1 (187-195)
  source 1..27: mol_type = other RNA
gcccagtgggaccaactggtggctcac

SEQ ID NO: 65464 - RNA, 27 nt, synthetic construct
  misc_feature 1..27: note = Probable helicase with zinc finger domain (470-478)
  source 1..27: mol_type = other RNA
gcccagtacaaggagatcagcaaattc

SEQ ID NO: 65465 - RNA, 27 nt, synthetic construct
  misc_feature 1..27: note = Ribonuclease K6 (120-128)
  source 1..27: mol_type = other RNA
gcccagtacaagttctttatcgtggct

SEQ ID NO: 65466 - RNA, 27 nt, synthetic construct
  misc_feature 1..27: note = Centromere protein N (267-275)
  source 1..27: mol_type = other RNA
gcccagtacaagctggagaccaaattc

SEQ ID NO: 65467 - RNA, 30 nt, synthetic construct
  misc_feature 1..30: note = Periodic tryptophan protein 1 homolog (372-381)
  source 1..30: mol_type = other RNA
gccagaagcgacaagcccatcttcaccctg

SEQ ID NO: 65468 - RNA, 27 nt, synthetic construct
  misc_feature 1..27: note = Olfactory receptor 5K3 (240-248)
  source 1..27: mol_type = other RNA
gccagccacttcctgtccgtgtctatc

SEQ ID NO: 65469 - RNA, 27 nt, synthetic construct
  misc_feature 1..27: note = N-acetyllactosaminide beta-1,6-N-acetylglucosaminyl-transferase, isoform A (153-161)
  source 1..27: mol_type = other RNA
gccagcaagaaagagtccgtggtctac

SEQ ID NO: 65470 - RNA, 27 nt, synthetic construct
  misc_feature 1..27: note = Cytoplasmic FMR1-interacting protein 1 (658-666)
  source 1..27: mol_type = other RNA
gccagcatgatggagtacgtgctgtat

SEQ ID NO: 65471 - RNA, 30 nt, synthetic construct
  misc_feature 1..30: note = Utrophin (3369-3378)
  source 1..30: mol_type = other RNA
gccagcccccagcactccgctctgtcttac

SEQ ID NO: 65472 - RNA, 27 nt, synthetic construct
  misc_feature 1..27: note = RNA-binding protein NOB1 (403-411)
  source 1..27: mol_type = other RNA
gccagcagaaagaaattcgtgaagaaa

SEQ ID NO: 65473 - RNA, 27 nt, synthetic construct
  misc_feature 1..27: note = Nodal modulator 2 (823-831)
  source 1..27: mol_type = other RNA
gccagctcccccctgatcaccgtgttc

SEQ ID NO: 65474 - RNA, 27 nt, synthetic construct
  misc_feature 1..27: note = Asparagine synthetase (glutamine-hydrolyzing) (544-552)
  source 1..27: mol_type = other RNA
gccaccgaccccagcgctagaacactg

SEQ ID NO: 65475 - RNA, 27 nt, synthetic construct
  misc_feature 1..27: note = Ribosomal RNA processing protein 1 homolog B (664-672)
  source 1..27: mol_type = other RNA
gccacccacccccctggcccagctgtg

SEQ ID NO: 65476 - RNA, 27 nt, synthetic construct
  misc_feature 1..27: note = Polyadenylate-binding protein 1 (359-367)
  source 1..27: mol_type = other RNA
gccaccaagcccctgtacgtggctctc

SEQ ID NO: 65477 - RNA, 27 nt, synthetic construct
  misc_feature 1..27: note = ATP-dependent 6-phosphofructokinase, muscle type (150-158)
  source 1..27: mol_type = other RNA
gccaccaagagctcctacctgaacatc

SEQ ID NO: 65478 - RNA, 27 nt, synthetic construct
  misc_feature 1..27: note = Transmembrane protein 9B (2-10)
  source 1..27: mol_type = other RNA
gccaccctgtggggcgggctccttaga

SEQ ID NO: 65479 - RNA, 27 nt, synthetic construct
  misc_feature 1..27: note = Serine/threonine-protein phosphatase 6 regulatory subunit 1 (821-829)
  source 1..27: mol_type = other RNA
gccaccagagaccccagcacatccgtg

SEQ ID NO: 65480 - RNA, 27 nt, synthetic construct
  misc_feature 1..27: note = Leukocyte-associated immunoglobulin-like receptor 1 (224-232)
  source 1..27: mol_type = other RNA
gccaccgtgaacggcctgcccgagaag

SEQ ID NO: 65481 - RNA, 27 nt, synthetic construct
  misc_feature 1..27: note = 40S ribosomal protein S5 (40-48)
  source 1..27: mol_type = other RNA
gccgtgaaggagaaatacgctaagtat

SEQ ID NO: 65482 - RNA, 27 nt, synthetic construct
  misc_feature 1..27: note = Oligoribonuclease, mitochondrial (109-117)
  source 1..27: mol_type = other RNA
gccgtgaaggagagcaccatcacactg

SEQ ID NO: 65483 - RNA, 27 nt, synthetic construct
  misc_feature 1..27: note = 39S ribosomal protein L44, mitochondrial (114-122)
  source 1..27: mol_type = other RNA
gccgtgctgctcaaccttaagagcaat

SEQ ID NO: 65484 - RNA, 30 nt, synthetic construct
  misc_feature 1..30: note = Ig lambda-2 chain C regions (41-50)
  source 1..30: mol_type = other RNA
gcctggaaggctgacagctcccccgtgaaa

SEQ ID NO: 65485 - RNA, 27 nt, synthetic construct
  misc_feature 1..27: note = Nucleolar transcription factor 1 (644-652)
  source 1..27: mol_type = other RNA
gcctacaaggagtatatcagcaacaaa

SEQ ID NO: 65486 - RNA, 30 nt, synthetic construct
  misc_feature 1..30: note = Translocon-associated protein subunit gamma (76-85)
  source 1..30: mol_type = other RNA
gcctacaagaacgtgaaattcgtcctgaag

SEQ ID NO: 65487 - RNA, 27 nt, synthetic construct
  misc_feature 1..27: note = Serine-protein kinase ATM (740-748)
  source 1..27: mol_type = other RNA
gcctacaagagcgagctgttccagaaa

SEQ ID NO: 65488 - RNA, 27 nt, synthetic construct
  misc_feature 1..27: note = Poly (ADP-ribose) polymerase (365-373)
  source 1..27: mol_type = other RNA
gcctaccccgagtatctgatcaccttc

SEQ ID NO: 65489 - RNA, 36 nt, synthetic construct
  misc_feature 1..36: note = Sialoadhesin (1671-1682)
  source 1..36: mol_type = other RNA
tgcaagcagagcatgggcgagaactccgtggaaatg

SEQ ID NO: 65490 - RNA, 27 nt, synthetic construct
  misc_feature 1..27: note = Transmembrane inner ear expressed protein (21-29)
  source 1..27: mol_type = other RNA
tgcctggccggcgtggctgggcagctc

SEQ ID NO: 65491 - RNA, 27 nt, synthetic construct
  misc_feature 1..27: note = Tetraspanin-18 (82-90)
  source 1..27: mol_type = other RNA
tgcctgctccttttctttttcctgttt

SEQ ID NO: 65492 - RNA, 27 nt, synthetic construct
  misc_feature 1..27: note = Asparagine-tRNA ligase, cytoplasmic (537-545)
  source 1..27: mol_type = other RNA
tgcctgtaccccagattcgtgcagagg

SEQ ID NO: 65493 - RNA, 33 nt, synthetic construct
  misc_feature 1..33: note = Protein-glutamine gamma-glutamyltransferase 4 (213-223)
  source 1..33: mol_type = other RNA
tgcagagccatgtgtgctatgatgagcttcgag

SEQ ID NO: 65494 - RNA, 30 nt, synthetic construct
  misc_feature 1..30: note = Pentatricopeptide repeat domain-containing protein 3, mitochondrial (34-43)
  source 1..30: mol_type = other RNA
tgcagattctacagcggctccgccaccctg

SEQ ID NO: 65495 - RNA, 27 nt, synthetic construct
  misc_feature 1..27: note = Endothelin-1 receptor (88-96)
  source 1..27: mol_type = other RNA
tgcaccatcttcattgtgggcatggtc

SEQ ID NO: 65496 - RNA, 27 nt, synthetic construct
  misc_feature 1..27: note = cAMP-dependent protein kinase type I-alpha regulatory subunit (109-117)
  source 1..27: mol_type = other RNA
gacgccgctagctacgtgagaaaggtc

SEQ ID NO: 65497 - RNA, 27 nt, synthetic construct
  misc_feature 1..27: note = DnaJ homolog subfamily B member 9 (12-20)
  source 1..27: mol_type = other RNA
gacgccgaggctaagttcagagaaatc

SEQ ID NO: 65498 - RNA, 27 nt, synthetic construct
  misc_feature 1..27: note = Catenin beta-1 (145-153)
  source 1..27: mol_type = other RNA
gacgccgagctggctaccagagcaatc

SEQ ID NO: 65499 - RNA, 27 nt, synthetic construct
  misc_feature 1..27: note = Protein disulfide-isomerase A5 (441-449)
  source 1..27: mol_type = other RNA
gacgccttcaaggatgacagaaaaatc

SEQ ID NO: 65500 - RNA, 24 nt, synthetic construct
  misc_feature 1..24: note = Asparagine synthetase (glutamine-hydrolyzing) (9-16)
  source 1..24: mol_type = other RNA
gacgccttcagatttgagaacgtg

SEQ ID NO: 65501 - RNA, 27 nt, synthetic construct
  misc_feature 1..27: note = Protein FAM127A (61-69)
  source 1..27: mol_type = other RNA
gacgccctgaaggtgaccttcctcatc

SEQ ID NO: 65502 - RNA, 27 nt, synthetic construct
  misc_feature 1..27: note = Importin subunit beta-1 (627-635)
  source 1..27: mol_type = other RNA
gacgccctgatggctgtgagcaccctc

SEQ ID NO: 65503 - RNA, 24 nt, synthetic construct
  misc_feature 1..24: note = Eukaryotic translation initiation factor 3 subunit A (504-511)
  source 1..24: mol_type = other RNA
gacgcccccatcggccctcacctg

SEQ ID NO: 65504 - RNA, 33 nt, synthetic construct
  misc_feature 1..33: note = Dermcidin (86-96)
  source 1..33: mol_type = other RNA
gacgccgtggaggatctggaaagcgtcggcaag

SEQ ID NO: 65505 - RNA, 24 nt, synthetic construct
  misc_feature 1..24: note = DNA polymerase delta catalytic subunit (515-522)
  source 1..24: mol_type = other RNA
gacgcctacctgcccctcagactt

SEQ ID NO: 65506 - RNA, 27 nt, synthetic construct
  misc_feature 1..27: note = Oral-facial-digital syndrome 1 protein (185-193)
  source 1..27: mol_type = other RNA
gacgcctacccccagagaatcaagttc

SEQ ID NO: 65507 - RNA, 27 nt, synthetic construct
  misc_feature 1..27: note = Splicing factor, arginine/serine-rich 15 (540-548)
  source 1..27: mol_type = other RNA
gacgcctacagagctctgcagaagctc

SEQ ID NO: 65508 - RNA, 24 nt, synthetic construct
  misc_feature 1..24: note = Period circadian protein homolog 1 (771-778)
  source 1..24: mol_type = other RNA
gacgcctacagacccgtgggcctg

SEQ ID NO: 65509 - RNA, 27 nt, synthetic construct
  misc_feature 1..27: note = Torsin-1A-interacting protein 2 (317-325)
  source 1..27: mol_type = other RNA
gacgcctacaccagctcccagaaggtg

SEQ ID NO: 65510 - RNA, 36 nt, synthetic construct
  misc_feature 1..36: note = Autism susceptibility gene 2 protein (283-294)
  source 1..36: mol_type = other RNA
gactgctgtaaggagcccatcttcgaacctgtggtc

SEQ ID NO: 65511 - RNA, 30 nt, synthetic construct
  misc_feature 1..30: note = Voltage-dependent T-type calcium channel subunit alpha-1G (1640-1649)
  source 1..30: mol_type = other RNA
gacgaggccctgaagatctgcaactacatt

SEQ ID NO: 65512 - RNA, 27 nt, synthetic construct
  misc_feature 1..27: note = Signal peptidase complex subunit 2 (82-90)
  source 1..27: mol_type = other RNA
gacggcagactgaccatctgcacaatt

SEQ ID NO: 65513 - RNA, 30 nt, synthetic construct
  misc_feature 1..30: note = Alanine-tRNA ligase, cytoplasmic (300-309)
  source 1..30: mol_type = other RNA
gaccacgccagaaccatcacagtggctctg

SEQ ID NO: 65514 - RNA, 27 nt, synthetic construct
  misc_feature 1..27: note = SRSF protein kinase 2 (597-605)
  source 1..27: mol_type = other RNA
gaccacatcgcccatattatagagctg

SEQ ID NO: 65515 - RNA, 24 nt, synthetic construct
  misc_feature 1..24: note = Laminin subunit beta-3 (1159-1166)
  source 1..24: mol_type = other RNA
gaccacatcaacggcagagtgctg

SEQ ID NO: 65516 - RNA, 27 nt, synthetic construct
  misc_feature 1..27: note = Coatomer subunit gamma-1 (762-770)
  source 1..27: mol_type = other RNA
gaccacatccagaaggtgatgaaactg

SEQ ID NO: 65517 - RNA, 27 nt, synthetic construct
  misc_feature 1..27: note = Protein Hook homolog 2 (130-138)
  source 1..27: mol_type = other RNA
gaccacatccagagaattatgaccctg

SEQ ID NO: 65518 - RNA, 27 nt, synthetic construct
  misc_feature 1..27: note = V-type proton ATPase subunit S1 (458-466)
  source 1..27: mol_type = other RNA
gaccacaagggccccaccatcagcctg

SEQ ID NO: 65519 - RNA, 27 nt, synthetic construct
  misc_feature 1..27: note = Cyclin-Y-like protein 2 (84-92)
  source 1..27: mol_type = other RNA
gaccaccccaaggccagcaccatcttc

SEQ ID NO: 65520 - RNA, 27 nt, synthetic construct
  misc_feature 1..27: note = Calponin-2 (202-210)
  source 1..27: mol_type = other RNA
gaccacagcaccatctccctgcagatg

SEQ ID NO: 65521 - RNA, 24 nt, synthetic construct
  misc_feature 1..24: note = Integrin beta-7 (722-729)
  source 1..24: mol_type = other RNA
gaccacacccaggccatcgtgctg

SEQ ID NO: 65522 - RNA, 24 nt, synthetic construct
  misc_feature 1..24: note = Lipopolysaccharide-responsive and beige-like anchor protein (1946-1953)
  source 1..24: mol_type = other RNA
gaccacgtgaccgccacacagctg

SEQ ID NO: 65523 - RNA, 27 nt, synthetic construct
  misc_feature 1..27: note = BPI fold-containing family A member 2 (98-106)
  source 1..27: mol_type = other RNA
gacatcttcggcctgaagattagcaac

SEQ ID NO: 65524 - RNA, 33 nt, synthetic construct
  misc_feature 1..33: note = BPI fold-containing family A member 2 (98-108)
  source 1..33: mol_type = other RNA
gacatcttcggcctgaagattagcaactccctc

SEQ ID NO: 65525 - RNA, 30 nt, synthetic construct
  misc_feature 1..30: note = 60S ribosomal protein L4 (35-44)
  source 1..30: mol_type = other RNA
gacatcgtgaacttcgtccacaccaatctg

SEQ ID NO: 65526 - RNA, 27 nt, synthetic construct
  misc_feature 1..27: note = Solute carrier family 2, facilitated glucose transporter member 2 (4-12)
  source 1..27: mol_type = other RNA
gacaaggtgaccggcacactggtcttc

SEQ ID NO: 65527 - RNA, 27 nt, synthetic construct
  misc_feature 1..27: note = 1,2-dihydroxy-3-keto-5-methylthiopentene dioxygenase (44-52)
  source 1..27: mol_type = other RNA
gacaagtacgagaacgatcccgaactg

SEQ ID NO: 65528 - RNA, 27 nt, synthetic construct
  misc_feature 1..27: note = Peroxidasin-like protein (813-821)
  source 1..27: mol_type = other RNA
gacctggatcacaccgtgcccgccctc

SEQ ID NO: 65529 - RNA, 27 nt, synthetic construct
  misc_feature 1..27: note = Mitochondrial import receptor subunit TOM6 homolog (66-74)
  source 1..27: mol_type = other RNA
gacctgatggccccccagcctggcgtg

SEQ ID NO: 65530 - RNA, 27 nt, synthetic construct
  misc_feature 1..27: note = Phosphorylase b kinase gamma catalytic chain, skeletal muscle/heart isoform (105-113)
  source 1..27: mol_type = other RNA
gacctgatgaagagaggcgagctcttc

SEQ ID NO: 65531 - RNA, 27 nt, synthetic construct
  misc_feature 1..27: note = Inosine-5'-monophosphate dehydrogenase 1 (77-85)
  source 1..27: mol_type = other RNA
gacatggccatcgctatggcactgatg

SEQ ID NO: 65532 - RNA, 36 nt, synthetic construct
  misc_feature 1..36: note = Type II inositol 1,4,5-trisphosphate 5-phosphatase (2-13)
  source 1..36: mol_type = other RNA
gaccagagcgtggccatccaagagaccctggctgaa

SEQ ID NO: 65533 - RNA, 27 nt, synthetic construct
  misc_feature 1..27: note = Proline and serine-rich protein 3 (2-10)
  source 1..27: mol_type = other RNA
gacagaagcctgcccgtgttctccatc

SEQ ID NO: 65534 - RNA, 27 nt, synthetic construct
  misc_feature 1..27: note = Nucleotide exchange factor SIL1 (410-418)
  source 1..27: mol_type = other RNA
gacagatacaggcaggatccccaactg

SEQ ID NO: 65535 - RNA, 27 nt, synthetic construct
  misc_feature 1..27: note = Cyclin-Y-like protein 2 (130-138)
  source 1..27: mol_type = other RNA
gacagcatcgcctcccagccccacctg

SEQ ID NO: 65536 - RNA, 24 nt, synthetic construct
  misc_feature 1..24: note = Hexokinase-2 (815-822)
  source 1..24: mol_type = other RNA
gacagcatcattgtgaaggaggtc

SEQ ID NO: 65537 - RNA, 24 nt, synthetic construct
  misc_feature 1..24: note = 60S ribosomal protein L6 (255-262)
  source 1..24: mol_type = other RNA
gacagccagatcctgcccaagatt

SEQ ID NO: 65538 - RNA, 27 nt, synthetic construct
  misc_feature 1..27: note = Small ubiquitin-related modifier 1 (30-38)
  source 1..27: mol_type = other RNA
gacagctccgagatccacttcaaggtg

SEQ ID NO: 65539 - RNA, 27 nt, synthetic construct
  misc_feature 1..27: note = Integrin beta-7 (374-382)
  source 1..27: mol_type = other RNA
gacagctccaacgtggtccagctgatc

SEQ ID NO: 65540 - RNA, 27 nt, synthetic construct
  misc_feature 1..27: note = Ig lambda-2 chain C regions (45-53)
  source 1..27: mol_type = other RNA
gacagctcccccgtgaaggccggcgtc

SEQ ID NO: 65541 - RNA, 27 nt, synthetic construct
  misc_feature 1..27: note = Sterol O-acyltransferase 1 (310-318)
  source 1..27: mol_type = other RNA
gacagctaccccagaaaccctaccgtg

SEQ ID NO: 65542 - RNA, 24 nt, synthetic construct
  misc_feature 1..24: note = Store-operated calcium entry-associated regulatory factor (74-81)
  source 1..24: mol_type = other RNA
gacagctacacccccaaggtgatc

SEQ ID NO: 65543 - RNA, 27 nt, synthetic construct
  misc_feature 1..27: note = Disintegrin and metalloproteinase domain-containing protein 15 (247-255)
  source 1..27: mol_type = other RNA
gacaccttctttagacccctgaacgtg

SEQ ID NO: 65544 - RNA, 24 nt, synthetic construct
  misc_feature 1..24: note = Sialidase-1 (75-82)
  source 1..24: mol_type = other RNA
gacaccttcagaatccccctgatt

SEQ ID NO: 65545 - RNA, 27 nt, synthetic construct
  misc_feature 1..27: note = WD repeat-containing protein 54 (273-281)
  source 1..27: mol_type = other RNA
gacaccttcgtgcacatctggaagctg

SEQ ID NO: 65546 - RNA, 27 nt, synthetic construct
  misc_feature 1..27: note = Protein FAM117A (93-101)
  source 1..27: mol_type = other RNA
gacaccatcctgagctcctacctcctt

SEQ ID NO: 65547 - RNA, 30 nt, synthetic construct
  misc_feature 1..30: note = Ankyrin repeat and SOCS box protein 3 (420-429)
  source 1..30: mol_type = other RNA
gacaccctgatcttcacactcgagtttact

SEQ ID NO: 65548 - RNA, 27 nt, synthetic construct
  misc_feature 1..27: note = WD repeat-containing protein 26 (376-384)
  source 1..27: mol_type = other RNA
gacaccacagtgatcatttggcaggtc

SEQ ID NO: 65549 - RNA, 27 nt, synthetic construct
  misc_feature 1..27: note = Signal recognition particle receptor subunit beta (154-162)
  source 1..27: mol_type = other RNA
gacgtggccgagttcctgtaccaggtc

SEQ ID NO: 65550 - RNA, 27 nt, synthetic construct
  misc_feature 1..27: note = 60S ribosomal protein L23a (120-128)
  source 1..27: mol_type = other RNA
gacgtggccaaggtcaacaccctgatc

SEQ ID NO: 65551 - RNA, 27 nt, synthetic construct
  misc_feature 1..27: note = G2/M phase-specific E3 ubiquitin-protein ligase (493-501)
  source 1..27: mol_type = other RNA
gacgtggcccagatcattataagaatc

SEQ ID NO: 65552 - RNA, 27 nt, synthetic construct
  misc_feature 1..27: note = Inorganic pyrophosphatase (42-50)
  source 1..27: mol_type = other RNA
gacgtgttccacatggtcgttgaggtg

SEQ ID NO: 65553 - RNA, 27 nt, synthetic construct
  misc_feature 1..27: note = Carboxylesterase 3 (415-423)
  source 1..27: mol_type = other RNA
gacgtgttcatcaacgtccccaccgtt

SEQ ID NO: 65554 - RNA, 27 nt, synthetic construct
  misc_feature 1..27: note = Bardet-Biedl syndrome 7 protein (53-61)
  source 1..27: mol_type = other RNA
gaggccgctgcagtgttcaagaccctg

SEQ ID NO: 65555 - RNA, 27 nt, synthetic construct
  misc_feature 1..27: note = Exocyst complex component 5 (158-166)
  source 1..27: mol_type = other RNA
gaggccgctgacatcattcagaagctg

SEQ ID NO: 65556 - RNA, 27 nt, synthetic construct
  misc_feature 1..27: note = Lysine-specific histone demethylase 1A (710-718)
  source 1..27: mol_type = other RNA
gaggccgctggcatcatggaaaacatt

SEQ ID NO: 65557 - RNA, 33 nt, synthetic construct
  misc_feature 1..33: note = Probable phospholipid-transporting ATPase VA (700-710)
  source 1..33: mol_type = other RNA
gaggccgctctggtgtacgcagccagagcgtat

SEQ ID NO: 65558 - RNA, 27 nt, synthetic construct
  misc_feature 1..27: note = Kelch-like protein 6 (450-458)
  source 1..27: mol_type = other RNA
gaggccgctcccctgctcgtgcacgtc

SEQ ID NO: 65559 - RNA, 27 nt, synthetic construct
  misc_feature 1..27: note = Coatomer subunit gamma-1 (269-277)
  source 1..27: mol_type = other RNA
gaggccgctagcgcaatcgtgaacctg

SEQ ID NO: 65560 - RNA, 27 nt, synthetic construct
  misc_feature 1..27: note = Nesprin-3 (176-184)
  source 1..27: mol_type = other RNA
gaggccgctagcctgttcaacagaatc

SEQ ID NO: 65561 - RNA, 30 nt, synthetic construct
  misc_feature 1..30: note = snRNA-activating protein complex subunit 4 (237-246)
  source 1..30: mol_type = other RNA
gaggccgaaaaggagatccaggacattaac

SEQ ID NO: 65562 - RNA, 27 nt, synthetic construct
  misc_feature 1..27: note = L-xylulose reductase (98-106)
  source 1..27: mol_type = other RNA
gaggccttcgacagaagctttgaagtg

SEQ ID NO: 65563 - RNA, 30 nt, synthetic construct
  misc_feature 1..30: note = Protein flightless-1 homolog (516-525)
  source 1..30: mol_type = other RNA
gaggccttccacggcaagttttacgaagct

SEQ ID NO: 65564 - RNA, 27 nt, synthetic construct
  misc_feature 1..27: note = Mortality factor 4-like protein 2 (113-121)
  source 1..27: mol_type = other RNA
gaggccttcaagaacagaatggaagtg

SEQ ID NO: 65565 - RNA, 27 nt, synthetic construct
  misc_feature 1..27: note = Pre-B-cell leukemia transcription factor-interacting protein 1 (166-174)
  source 1..27: mol_type = other RNA
gaggccggcccccctcagccaatggtg

SEQ ID NO: 65566 - RNA, 27 nt, synthetic construct
  misc_feature 1..27: note = E3 ubiquitin-protein ligase UBR2 (256-264)
  source 1..27: mol_type = other RNA
gaggccatcggcttcgctaccacagtg

SEQ ID NO: 65567 - RNA, 24 nt, synthetic construct
  misc_feature 1..24: note = 60S ribosomal protein L10 (63-70)
  source 1..24: mol_type = other RNA
gaggccctggaagctgcaagaatc

SEQ ID NO: 65568 - RNA, 24 nt, synthetic construct
  misc_feature 1..24: note = Steroid hormone receptor ERR1 (353-360)
  source 1..24: mol_type = other RNA
gaggccctgcacgaagctctcctt

SEQ ID NO: 65569 - RNA, 27 nt, synthetic construct
  misc_feature 1..27: note = Very-long-chain (3R)-3-hydroxyacyl-CoA dehydratase 3 (293-301)
  source 1..27: mol_type = other RNA
gaggccgtgagcgtcatccagtccatt

SEQ ID NO: 65570 - RNA, 27 nt, synthetic construct
  misc_feature 1..27: note = Paired amphipathic helix protein Sin3a (1166-1174)
  source 1..27: mol_type = other RNA
gagtgcagattcaagctgaacagctac

SEQ ID NO: 65571 - RNA, 36 nt, synthetic construct
  misc_feature 1..36: note = RNA polymerase I-specific transcription initiation factor RRN3 (604-615)
  source 1..36: mol_type = other RNA
gaggacgatgacttcctgaagggcgaagtgccccag

SEQ ID NO: 65572 - RNA, 27 nt, synthetic construct
  misc_feature 1..27: note = MICAL C-terminal-like protein (368-376)
  source 1..27: mol_type = other RNA
gaggacgtgcccaccctgctcgaaaag

SEQ ID NO: 65573 - RNA, 27 nt, synthetic construct
  misc_feature 1..27: note = Protein transport protein Sec24C (408-416)
  source 1..27: mol_type = other RNA
gaggaagccagcccctacgtggtcgac

SEQ ID NO: 65574 - RNA, 33 nt, synthetic construct
  misc_feature 1..33: note = PHD finger protein 10 (446-456)
  source 1..33: mol_type = other RNA
gaggaaatgatgttctgcgacatgtgtgataga

SEQ ID NO: 65575 - RNA, 27 nt, synthetic construct
  misc_feature 1..27: note = FERM domain-containing protein 6 (338-346)
  source 1..27: mol_type = other RNA
gaggaaaacgaggaaaagaaacagtac

SEQ ID NO: 65576 - RNA, 27 nt, synthetic construct
  misc_feature 1..27: note = Epiplakin (2700-2708)
  source 1..27: mol_type = other RNA
gaggaaagactgagcaaggtgtccttc

SEQ ID NO: 65577 - RNA, 36 nt, synthetic construct
  misc_feature 1..36: note = Salivary acidic proline-rich phosphoprotein 1/2 (44-55)
  source 1..36: mol_type = other RNA
gaggaaagacagggcccccctctggggggacaacag

SEQ ID NO: 65578 - RNA, 27 nt, synthetic construct
  misc_feature 1..27: note = Inactive ubiquitin carboxyl-terminal hydrolase 17-like protein 4 (449-457)
  source 1..27: mol_type = other RNA
gagttcaacgtgagaaaggtcgaaggc

SEQ ID NO: 65579 - RNA, 27 nt, synthetic construct
  misc_feature 1..27: note = Kinesin heavy chain isoform 5A (583-591)
  source 1..27: mol_type = other RNA
gagttcaccgtggccagactgtacatc

SEQ ID NO: 65580 - RNA, 27 nt, synthetic construct
  misc_feature 1..27: note = Hyaluronan and proteoglycan link protein 2 (201-209)
  source 1..27: mol_type = other RNA
gagggcagcgtgagataccccgtcctg

SEQ ID NO: 65581 - RNA, 24 nt, synthetic construct
  misc_feature 1..24: note = Gem-associated protein 5 (589-596)
  source 1..24: mol_type = other RNA
gagcacggcagccagcccgaactg

SEQ ID NO: 65582 - RNA, 27 nt, synthetic construct
  misc_feature 1..27: note = Filamin-B (2269-2277)
  source 1..27: mol_type = other RNA
gagcacatccccgaaagcccttacctg

SEQ ID NO: 65583 - RNA, 27 nt, synthetic construct
  misc_feature 1..27: note = Protein Hook homolog 1 (136-144)
  source 1..27: mol_type = other RNA
gagcacatccagaacattatgaccctg

SEQ ID NO: 65584 - RNA, 27 nt, synthetic construct
  misc_feature 1..27: note = 26S proteasome non-ATPase regulatory subunit 11 (348-356)
  source 1..27: mol_type = other RNA
gagcacatcagctccctgattaagctc

SEQ ID NO: 65585 - RNA, 27 nt, synthetic construct
  misc_feature 1..27: note = Intraflagellar transport protein 46 homolog (70-78)
  source 1..27: mol_type = other RNA
gagcacctgcccgtgagcgccgaaatc

SEQ ID NO: 65586 - RNA, 27 nt, synthetic construct
  misc_feature 1..27: note = Kinesin-like protein KIF21B (1412-1420)
  source 1..27: mol_type = other RNA
gagcaccagatcaaccaaattgccctg

SEQ ID NO: 65587 - RNA, 27 nt, synthetic construct
  misc_feature 1..27: note = Zinc finger and BTB domain-containing protein 38 (220-228)
  source 1..27: mol_type = other RNA
gagcacagctacgccgtgtcctctgtc

SEQ ID NO: 65588 - RNA, 27 nt, synthetic construct
  misc_feature 1..27: note = Fructose-bisphosphate aldolase A (156-164)
  source 1..27: mol_type = other RNA
gagcacacccccagcgccctggctatc

SEQ ID NO: 65589 - RNA, 27 nt, synthetic construct
  misc_feature 1..27: note = Ribosome-binding protein 1 (768-776)
  source 1..27: mol_type = other RNA
gagcacgtgaaggaagtccagcaactg

SEQ ID NO: 65590 - RNA, 27 nt, synthetic construct
  misc_feature 1..27: note = OTU domain-containing protein 6B (276-284)
  source 1..27: mol_type = other RNA
gagcactacaacagcgtgaccagactg

SEQ ID NO: 65591 - RNA, 27 nt, synthetic construct
  misc_feature 1..27: note = E3 ubiquitin-protein ligase UBR4 (401-409)
  source 1..27: mol_type = other RNA
gagcactaccagaacttccaactgctc

SEQ ID NO: 65592 - RNA, 27 nt, synthetic construct
  misc_feature 1..27: note = 26S protease regulatory subunit 4 (130-138)
  source 1..27: mol_type = other RNA
gagcactacgtgagcatcctgtccttc

SEQ ID NO: 65593 - RNA, 27 nt, synthetic construct
  misc_feature 1..27: note = Epsin-2 (42-50)
  source 1..27: mol_type = other RNA
gagatcgccgacctgacctacaacgtg

SEQ ID NO: 65594 - RNA, 27 nt, synthetic construct
  misc_feature 1..27: note = Telomere-associated protein RIF1 (220-228)
  source 1..27: mol_type = other RNA
gagatcgccagcattaccgaacagctg

SEQ ID NO: 65595 - RNA, 30 nt, synthetic construct
  misc_feature 1..30: note = General transcription factor II-I (577-586)
  source 1..30: mol_type = other RNA
gagatcttcaacctgaagtttgcccaggct

SEQ ID NO: 65596 - RNA, 30 nt, synthetic construct
  misc_feature 1..30: note = Atlastin-3 (199-208)
  source 1..30: mol_type = other RNA
gagatcttccagaagccctttcaaaccctg

SEQ ID NO: 65597 - RNA, 27 nt, synthetic construct
  misc_feature 1..27: note = DNA-directed RNA polymerase III subunit RPC5 (655-663)
  source 1..27: mol_type = other RNA
gagatcttcagcaagaactacagagtg

SEQ ID NO: 65598 - RNA, 30 nt, synthetic construct
  misc_feature 1..30: note = C-X-C motif chemokine 9 (62-71)
  source 1..30: mol_type = other RNA
gagatcattgccaccctgaagaacggcgtg

SEQ ID NO: 65599 - RNA, 27 nt, synthetic construct
  misc_feature 1..27: note = Uncharacterized protein CXorf23 (474-482)
  source 1..27: mol_type = other RNA
gagatcattaccataatccaccaggtg

SEQ ID NO: 65600 - RNA, 27 nt, synthetic construct
  misc_feature 1..27: note = Serine/threonine-protein kinase TBK1 (497-505)
  source 1..27: mol_type = other RNA
gagatcagcgacattcacaccaagctg

SEQ ID NO: 65601 - RNA, 27 nt, synthetic construct
  misc_feature 1..27: note = Constitutive coactivator of peroxisome proliferator-activated receptor gamma (111-119)
  source 1..27: mol_type = other RNA
gagatcagcagaattttccactacata

SEQ ID NO: 65602 - RNA, 27 nt, synthetic construct
  misc_feature 1..27: note = Centrosomal protein of 170 kDa protein B (1491-1499)
  source 1..27: mol_type = other RNA
gagatcagctccattctgaaggaactc

SEQ ID NO: 65603 - RNA, 27 nt, synthetic construct
  misc_feature 1..27: note = Testis-specific Y-encoded-like protein 2 (468-476)
  source 1..27: mol_type = other RNA
gagatcaccgacattaacgaaaatata

SEQ ID NO: 65604 - RNA, 27 nt, synthetic construct
  misc_feature 1..27: note = Oxysterols receptor LXR-beta (280-288)
  source 1..27: mol_type = other RNA
gagatcgtggacttcgccaagcaggtc

SEQ ID NO: 65605 - RNA, 30 nt, synthetic construct
  misc_feature 1..30: note = Tubulin beta-4B chain (3-12)
  source 1..30: mol_type = other RNA
gagatcgtgcacctgcaggccggccaatgc

SEQ ID NO: 65606 - RNA, 27 nt, synthetic construct
  misc_feature 1..27: note = Activating transcription factor 7-interacting protein 2 (101-109)
  source 1..27: mol_type = other RNA
gagatcgtgcacagcgaaaccaagctg

SEQ ID NO: 65607 - RNA, 27 nt, synthetic construct
  misc_feature 1..27: note = Ras GTPase-activating-like protein IQGAP2 (753-761)
  source 1..27: mol_type = other RNA
gagatcgtgaagattcagagcctgctc

SEQ ID NO: 65608 - RNA, 27 nt, synthetic construct
  misc_feature 1..27: note = Williams-Beuren syndrome chromosomal region 16 protein (214-222)
  source 1..27: mol_type = other RNA
gagatctacagcgaatcccacagagtg

SEQ ID NO: 65609 - RNA, 30 nt, synthetic construct
  misc_feature 1..30: note = Protein S100-A8 (6-15)
  source 1..30: mol_type = other RNA
gagaaggccctgaacagcatcattgacgtg

SEQ ID NO: 65610 - RNA, 30 nt, synthetic construct
  misc_feature 1..30: note = Zinc finger protein 559 (97-106)
  source 1..30: mol_type = other RNA
gagaaggccctgagcgaacactcctgcctc

SEQ ID NO: 65611 - RNA, 27 nt, synthetic construct
  misc_feature 1..27: note = Replication protein A 32 kDa subunit (84-92)
  source 1..27: mol_type = other RNA
gagaaggcccccaccaacatcgtgtac

SEQ ID NO: 65612 - RNA, 27 nt, synthetic construct
  misc_feature 1..27: note = Pre-mRNA-processing factor 40 homolog A (475-483)
  source 1..27: mol_type = other RNA
gagaagatgaccagcacaactagatac

SEQ ID NO: 65613 - RNA, 30 nt, synthetic construct
  misc_feature 1..30: note = Transcriptional repressor p66-beta (434-443)
  source 1..30: mol_type = other RNA
gagaagaacggcaaaatcctgtgcgaacag

SEQ ID NO: 65614 - RNA, 30 nt, synthetic construct
  misc_feature 1..30: note = Valine-tRNA ligase (271-280)
  source 1..30: mol_type = other RNA
gagaagagagaccccggcgtgatcacctac

SEQ ID NO: 65615 - RNA, 27 nt, synthetic construct
  misc_feature 1..27: note = Transcriptional regulator Kaiso (528-536)
  source 1..27: mol_type = other RNA
gagaaggtgttccccctggccgaatac

SEQ ID NO: 65616 - RNA, 27 nt, synthetic construct
  misc_feature 1..27: note = Tyrosine-tRNA ligase, cytoplasmic (281-289)
  source 1..27: mol_type = other RNA
gagaagtggggcgggaacaaaacctac

SEQ ID NO: 65617 - RNA, 27 nt, synthetic construct
  misc_feature 1..27: note = E3 ubiquitin-protein ligase synoviolin (216-224)
  source 1..27: mol_type = other RNA
gagctgttcaccggctttatcaaggtg

SEQ ID NO: 65618 - RNA, 30 nt, synthetic construct
  misc_feature 1..30: note = Cohesin subunit SA-2 (1209-1218)
  source 1..30: mol_type = other RNA
gagctgaagcccgacttctttgatcctgcc

SEQ ID NO: 65619 - RNA, 27 nt, synthetic construct
  misc_feature 1..27: note = Cytospin-A (413-421)
  source 1..27: mol_type = other RNA
gagctgcaggccaccctccaagaactt

SEQ ID NO: 65620 - RNA, 27 nt, synthetic construct
  misc_feature 1..27: note = E3 ubiquitin-protein ligase UBR4 (3813-3821)
  source 1..27: mol_type = other RNA
gagctgagcaagatcattcagaaagtg

SEQ ID NO: 65621 - RNA, 27 nt, synthetic construct
  misc_feature 1..27: note = 60S ribosomal protein L36 (89-97)
  source 1..27: mol_type = other RNA
gagctgagcaacgtgctcgccgctatg

SEQ ID NO: 65622 - RNA, 30 nt, synthetic construct
  misc_feature 1..30: note = Glutamate-rich protein 3 (1485-1494)
  source 1..30: mol_type = other RNA
gagctgagccccgaatccctccaggccatg

SEQ ID NO: 65623 - RNA, 27 nt, synthetic construct
  misc_feature 1..27: note = Mini-chromosome maintenance complex-binding protein (343-351)
  source 1..27: mol_type = other RNA
gagctgagccccgtgagagccgaactc

SEQ ID NO: 65624 - RNA, 36 nt, synthetic construct
  misc_feature 1..36: note = Dynamin-binding protein (804-815)
  source 1..36: mol_type = other RNA
gagatgtgcatcgaaagaattatggtgcccatgcag

SEQ ID NO: 65625 - RNA, 30 nt, synthetic construct
  misc_feature 1..30: note = GLIPR1-like protein 2 (312-321)
  source 1..30: mol_type = other RNA
gagatggaaatggagatcatggaaatggag

SEQ ID NO: 65626 - RNA, 36 nt, synthetic construct
  misc_feature 1..36: note = Pleckstrin homology domain-containing family G member 3 (582-593)
  source 1..36: mol_type = other RNA
gagatgggcggggccgctcaggaacccgagagcctg

SEQ ID NO: 65627 - RNA, 27 nt, synthetic construct
  misc_feature 1..27: note = Contactin-1 (416-424)
  source 1..27: mol_type = other RNA
gagatgaaccccatgaagaaaaagatc

SEQ ID NO: 65628 - RNA, 24 nt, synthetic construct
  misc_feature 1..24: note = Putative vomeronasal receptor-like protein 4 (2-9)
  source 1..24: mol_type = other RNA
gagatgaccaagctgttcagctac

SEQ ID NO: 65629 - RNA, 30 nt, synthetic construct; identical to SEQ ID NO: 41402
  misc_feature 1..30: note = Putative vomeronasal receptor-like protein 4 (2-11)
  source 1..30: mol_type = other RNA

SEQ ID NO: 65630 - RNA, 27 nt, synthetic construct
  misc_feature 1..27: note = Cyclin-H (240-248)
  source 1..27: mol_type = other RNA
gagaacagaacctgcctgagccagctc

SEQ ID NO: 65631 - RNA, 27 nt, synthetic construct
  misc_feature 1..27: note = 3-phosphoinositide-dependent protein kinase 1 (57-65)
  source 1..27: mol_type = other RNA
gagcccagacctggcgccgggagcctg

SEQ ID NO: 65632 - RNA, 27 nt, synthetic construct
  misc_feature 1..27: note = Gamma-glutamyltransferase 6 (2-10)
  source 1..27: mol_type = other RNA
gagagagccgaagagcccgtggtctac

SEQ ID NO: 65633 - RNA, 27 nt, synthetic construct
  misc_feature 1..27: note = Integrin beta-7 (243-251)
  source 1..27: mol_type = other RNA
gagagagaagtgggcaggcagagcgtc

SEQ ID NO: 65634 - RNA, 27 nt, synthetic construct
  misc_feature 1..27: note = Serine/threonine-protein kinase pim-3 (34-42)
  source 1..27: mol_type = other RNA
gagagcttcgaaaaggcctaccaggtg

SEQ ID NO: 65635 - RNA, 27 nt, synthetic construct
  misc_feature 1..27: note = Endoplasmin (550-558)
  source 1..27: mol_type = other RNA
gagagctcccccttcgtggaaagactg

SEQ ID NO: 65636 - RNA, 27 nt, synthetic construct
  misc_feature 1..27: note = Lamina-associated polypeptide 2, isoforms beta/gamma (277-285)
  source 1..27: mol_type = other RNA
gagagcacccccatcgccgaaacaatt

SEQ ID NO: 65637 - RNA, 36 nt, synthetic construct
  misc_feature 1..36: note = Dermcidin (92-103)
  source 1..36: mol_type = other RNA
gagagcgtgggcaagggggccgtccacgacgttaaa

SEQ ID NO: 65638 - RNA, 27 nt, synthetic construct
  misc_feature 1..27: note = Elongation factor 2 (311-319)
  source 1..27: mol_type = other RNA
gagaccgccaagctgatcgaaaaactc

SEQ ID NO: 65639 - RNA, 30 nt, synthetic construct
  misc_feature 1..30: note Dolichyl-diphosphooligosaccharide-proteinosyltransferase 48 kDa subunit (318-327)
  source 1..30: mol_type = other RNA
gagaccgccccccctaacgcttacacagtg

SEQ ID NO: 65640 - RNA, 27 nt, synthetic construct
  misc_feature 1..27: note = Heat shock protein HSP 90-beta (13-21)
  source 1..27: mol_type = other RNA
gagaccttcgcctttcaggctgaaatc

SEQ ID NO: 65641 - RNA, 27 nt, synthetic construct
  misc_feature 1..27: note = Cyclin-dependent kinase 6 (69-77)
  source 1..27: mol_type = other RNA
gagaccttcgaacaccccaacgtggtc

SEQ ID NO: 65642 - RNA, 27 nt, synthetic construct
  misc_feature 1..27: note = Serine/threonine-protein phosphatase 2A catalytic subunit beta isoform (226-234)
  source 1..27: mol_type = other RNA
gagaccttcaaccacgccaatggcctg

SEQ ID NO: 65643 - RNA, 36 nt, synthetic construct
  misc_feature 1..36: note = Protein diaphanous homolog 1 (1255-1266)
  source 1..36: mol_type = other RNA
gagaccttccccacaatcctggaagaggccaaggaa

SEQ ID NO: 65644 - RNA, 27 nt, synthetic construct
  misc_feature 1..27: note = Serine/threonine-protein kinase 17B (257-265)
  source 1..27: mol_type = other RNA
gagaccttcagctccgtgtctcagctg

SEQ ID NO: 65645 - RNA, 27 nt, synthetic construct
  misc_feature 1..27: note = Transcription elongation factor SPT6 (1159-1167)
  source 1..27: mol_type = other RNA
gagaccttctacatcggcaagctgatt

SEQ ID NO: 65646 - RNA, 27 nt, synthetic construct
  misc_feature 1..27: note = SWI/SNF-related matrix-associated actin-dependent regulator of chromatin subfamily D member 2 (442-450)
  source 1..27: mol_type = other RNA
gagaccatcgaaagcattaaccagctg

SEQ ID NO: 65647 - RNA, 30 nt, synthetic construct
  misc_feature 1..30: note = Ribonuclease H2 subunit C (135-144)
  source 1..30: mol_type = other RNA
gagaccatccccggccctgacgccaaggtg

SEQ ID NO: 65648 - RNA, 30 nt, synthetic construct; identical to SEQ ID NO: 41421
  misc_feature 1..30: note = MOB kinase activator 1A (129-138)
  source 1..30: mol_type = other RNA

SEQ ID NO: 65649 - RNA, 27 nt, synthetic construct
  misc_feature 1..27: note = Cystatin-B (15-23)
  source 1..27: mol_type = other RNA
gagacccagcacatcgccgaccaagtg

SEQ ID NO: 65650 - RNA, 27 nt, synthetic construct
  misc_feature 1..27: note = Heat shock protein HSP 90-beta (478-486)
  source 1..27: mol_type = other RNA
gagacccagaagagcatctactatatt

SEQ ID NO: 65651 - RNA, 30 nt, synthetic construct
  misc_feature 1..30: note = Wiskott-Aldrich syndrome protein (285-294)
  source 1..30: mol_type = other RNA
gagaccagcaagctgatctacgacttcatt

SEQ ID NO: 65652 - RNA, 27 nt, synthetic construct
  misc_feature 1..27: note = Elongation factor 1-alpha 1 (81-89)
  source 1..27: mol_type = other RNA
gagaccagcaagtactatgtgacaatc

SEQ ID NO: 65653 - RNA, 27 nt, synthetic construct
  misc_feature 1..27: note = Protein virilizer homolog (61-69)
  source 1..27: mol_type = other RNA
gagaccagcccccacacattccagctg

SEQ ID NO: 65654 - RNA, 27 nt, synthetic construct
  misc_feature 1..27: note = Splicing factor 3B subunit 1 (1221-1229)
  source 1..27: mol_type = other RNA
gagaccagcccccacgtgatccaggcc

SEQ ID NO: 65655 - RNA, 30 nt, synthetic construct
  misc_feature 1..30: note = G1/S-specific cyclin-D2 (114-123)
  source 1..30: mol_type = other RNA
gagaccagccccctgacagccgaaaagctc

SEQ ID NO: 65656 - RNA, 27 nt, synthetic construct
  misc_feature 1..27: note = Neurexin-3 (1375-1383)
  source 1..27: mol_type = other RNA
gagaccacaaaggacagcctgtccatg

SEQ ID NO: 65657 - RNA, 27 nt, synthetic construct
  misc_feature 1..27: note = Mucin-16 (2346-2354)
  source 1..27: mol_type = other RNA
gagaccacagtgaagactagcgacatc

SEQ ID NO: 65658 - RNA, 27 nt, synthetic construct
  misc_feature 1..27: note = Non-structural maintenance of chromosomes element 1 homolog (182-190)
  source 1..27: mol_type = other RNA
gagacctaccccgacgccgtgaagatc

SEQ ID NO: 65659 - RNA, 27 nt, synthetic construct
  misc_feature 1..27: note = Alanine-tRNA ligase, cytoplasmic (688-696)
  source 1..27: mol_type = other RNA
gagacctaccccgaccctgtgagagtc

SEQ ID NO: 65660 - RNA, 30 nt, synthetic construct
  misc_feature 1..30: note = Actin-related protein 2 (129-138)
  source 1..30: mol_type = other RNA
gagacctaccagttcagcggcgtgtatgtc

SEQ ID NO: 65661 - RNA, 27 nt, synthetic construct
  misc_feature 1..27: note = Pre-mRNA-processing-splicing factor 8 (1844-1852)
  source 1..27: mol_type = other RNA
gaggtggccgctctgatcagaagcctc

SEQ ID NO: 65662 - RNA, 27 nt, synthetic construct
  misc_feature 1..27: note = Ankyrin repeat and KH domain-containing protein 1 (519-527)
  source 1..27: mol_type = other RNA
gaggtggccgacttcctgatcaaggct

SEQ ID NO: 65663 - RNA, 27 nt, synthetic construct
  misc_feature 1..27: note = PRKCA-binding protein (85-93)
  source 1..27: mol_type = other RNA
gaggtggccaagatgatccaggaagtc

SEQ ID NO: 65664 - RNA, 27 nt, synthetic construct
  misc_feature 1..27: note = A-kinase anchor protein 9 (1455-1463)
  source 1..27: mol_type = other RNA
gaggtggccaaggtcatcgttagcatg

SEQ ID NO: 65665 - RNA, 27 nt, synthetic construct
  misc_feature 1..27: note = Histone acetyltransferase KAT8 (250-258)
  source 1..27: mol_type = other RNA
gaggtggacggcaaggatcacaaaatc

SEQ ID NO: 65666 - RNA, 33 nt, synthetic construct
  misc_feature 1..33: note = Nucleolin (411-421)
  source 1..33: mol_type = other RNA
gaggtgttcgaagacgccgctgagatcagactg

SEQ ID NO: 65667 - RNA, 27 nt, synthetic construct
  misc_feature 1..27: note = Nucleolin (504-512)
  source 1..27: mol_type = other RNA
gaggtgttcgaaaaggccacctttatc

SEQ ID NO: 65668 - RNA, 27 nt, synthetic construct
  misc_feature 1..27: note = Desmoplakin (745-753)
  source 1..27: mol_type = other RNA
gaggtgttcggcctgtttcagaagctc

SEQ ID NO: 65669 - RNA, 27 nt, synthetic construct
  misc_feature 1..27: note = Splicing factor 3B subunit 3 (57-65)
  source 1..27: mol_type = other RNA
gaggtgttcggcgtcatcagaagcctg

SEQ ID NO: 65670 - RNA, 27 nt, synthetic construct
  misc_feature 1..27: note = E2F-associated phosphoprotein (273-281)
  source 1..27: mol_type = other RNA
gaggtgttccactttttcaacgtcctg

SEQ ID NO: 65671 - RNA, 27 nt, synthetic construct
  misc_feature 1..27: note = Vacuolar protein sorting-associated protein 8 homolog (935-943)
  source 1..27: mol_type = other RNA
gaggtgttcaactacatccacaatatt

SEQ ID NO: 65672 - RNA, 27 nt, synthetic construct
  misc_feature 1..27: note = Actin-binding LIM protein 1 (747-755)
  source 1..27: mol_type = other RNA
gaggtgttcagagaaatctttggcatg

SEQ ID NO: 65673 - RNA, 30 nt, synthetic construct
  misc_feature 1..30: note = Replication protein A 32 kDa subunit (62-71)
  source 1..30: mol_type = other RNA
gaggtgttcagaatcggcaacgtcgaaatt

SEQ ID NO: 65674 - RNA, 27 nt, synthetic construct
  misc_feature 1..27: note = Phenylalanine-tRNA ligase alpha subunit (418-426)
  source 1..27: mol_type = other RNA
gaggtgttcagctaccaccagggcctg

SEQ ID NO: 65675 - RNA, 27 nt, synthetic construct
  misc_feature 1..27: note = Non-canonical poly(A) RNA polymerase PAPD7 (185-193)
  source 1..27: mol_type = other RNA
gaggtgttcaccggcgggatcagctcc

SEQ ID NO: 65676 - RNA, 27 nt, synthetic construct
  misc_feature 1..27: note = Cytochrome b-245 heavy chain (203-211)
  source 1..27: mol_type = other RNA
gaggtgttctggtacacccaccatctg

SEQ ID NO: 65677 - RNA, 30 nt, synthetic construct
  misc_feature 1..30: note = Sigma non-opioid intracellular receptor 1 (144-153)
  source 1..30: mol_type = other RNA
gaggtgttctaccccggcgaaaccgtcgtt

SEQ ID NO: 65678 - RNA, 27 nt, synthetic construct
  misc_feature 1..27: note = Phosphomannomutase 1 (68-76)
  source 1..27: mol_type = other RNA
gaggtgatcgaaaagttcgactacgtc

SEQ ID NO: 65679 - RNA, 27 nt, synthetic construct
  misc_feature 1..27: note = Centromere/kinetochore protein zw10 homolog (663-671)
  source 1..27: mol_type = other RNA
gaggtgatcggcaagattaccgccctg

SEQ ID NO: 65680 - RNA, 27 nt, synthetic construct
  misc_feature 1..27: note = Protein phosphatase 1G (109-117)
  source 1..27: mol_type = other RNA
gaggtgatcaaggaactggcccagatt

SEQ ID NO: 65681 - RNA, 27 nt, synthetic construct
  misc_feature 1..27: note = Importin-9 (267-275)
  source 1..27: mol_type = other RNA
gaggtgctgaaggccgtcaccgctctc

SEQ ID NO: 65682 - RNA, 27 nt, synthetic construct
  misc_feature 1..27: note = Nuclear receptor-binding factor 2 (2-10)
  source 1..27: mol_type = other RNA
gaggtgatggaaggccccctgaacctc

SEQ ID NO: 65683 - RNA, 27 nt, synthetic construct
  misc_feature 1..27: note = Uncharacterized protein KIAA1143 (71-79)
  source 1..27: mol_type = other RNA
gaggtgatgaagatcaaagccgaaatt

SEQ ID NO: 65684 - RNA, 27 nt, synthetic construct
  misc_feature 1..27: note = C-1-tetrahydrofolate synthase, cytoplasmic (80-88)
  source 1..27: mol_type = other RNA
gaggtgatgaagtacatcaccagcctg

SEQ ID NO: 65685 - RNA, 27 nt, synthetic construct
  misc_feature 1..27: note = Probable ubiquitin carboxyl-terminal hydrolase FAF-X (357-365)
  source 1..27: mol_type = other RNA
gaggtgaacaaggtcatcagctccgtt

SEQ ID NO: 65686 - RNA, 27 nt, synthetic construct
  misc_feature 1..27: note = Programmed cell death protein 4 (355-363)
  source 1..27: mol_type = other RNA
gaggtgccccacttccatcacgaactg

SEQ ID NO: 65687 - RNA, 27 nt, synthetic construct
  misc_feature 1..27: note = InaD-like protein (626-634)
  source 1..27: mol_type = other RNA
gaggtgccccctccattcaccctggtc

SEQ ID NO: 65688 - RNA, 27 nt, synthetic construct
  misc_feature 1..27: note = Gypsy retrotransposon integrase-like protein 1 (184-192)
  source 1..27: mol_type = other RNA
gaggtgagcaaggccatcattaacata

SEQ ID NO: 65689 - RNA, 27 nt, synthetic construct
  misc_feature 1..27: note = DNA-directed RNA polymerase III subunit RPC3 (143-151)
  source 1..27: mol_type = other RNA
gaggtgagcaacaccttcgtcagactg

SEQ ID NO: 65690 - RNA, 27 nt, synthetic construct
  misc_feature 1..27: note = CAP-Gly domain-containing linker protein 1 (841-849)
  source 1..27: mol_type = other RNA
gaggtgagccaggtcaaggaaaccctg

SEQ ID NO: 65691 - RNA, 30 nt, synthetic construct
  misc_feature 1..30: note = Double-stranded RNA-specific adenosine deaminase (806-815)
  source 1..30: mol_type = other RNA
gaggtgacccccgtcacaggcgccagcctg

SEQ ID NO: 65692 - RNA, 27 nt, synthetic construct
  misc_feature 1..27: note = Multiple C2 and transmembrane domain-containing protein 1 (410-418)
  source 1..27: mol_type = other RNA
gaggtggtcggcagctacttctccgtt

SEQ ID NO: 65693 - RNA, 30 nt, synthetic construct
  misc_feature 1..30: note = Monocarboxylate transporter 4 (456-465)
  source 1..30: mol_type = other RNA
gaggtggtccacacccccgaaacaagcgtt

SEQ ID NO: 65694 - RNA, 27 nt, synthetic construct
  misc_feature 1..27: note = E3 ubiquitin-protein ligase RNF114 (34-42)
  source 1..27: mol_type = other RNA
gaggtgtacgaaaagcccgtccaggtt

SEQ ID NO: 65695 - RNA, 33 nt, synthetic construct
  misc_feature 1..33: note = Sorting nexin-17 (460-470)
  source 1..33: mol_type = other RNA
ttcgcctttgagggcatcggggacgaagatctg

SEQ ID NO: 65696 - RNA, 30 nt, synthetic construct
  misc_feature 1..30: note = Coiled-coil domain-containing protein 60 (70-79)
  source 1..30: mol_type = other RNA
ttcgccatcctgagagaggaaaccgctaag

SEQ ID NO: 65697 - RNA, 27 nt, synthetic construct
  misc_feature 1..27: note = Serpin B6 (11-19)
  source 1..27: mol_type = other RNA
ttcgccctgaacctccttaagaccctg

SEQ ID NO: 65698 - RNA, 27 nt, synthetic construct
  misc_feature 1..27: note = Inactive phospholipase D5 (72-80)
  source 1..27: mol_type = other RNA
ttcgccctggtgtgctgttttgctatc

SEQ ID NO: 65699 - RNA, 27 nt, synthetic construct
  misc_feature 1..27: note = Actin-like protein 6A (118-126)
  source 1..27: mol_type = other RNA
ttcgccaacggcagaagcaccgggctg

SEQ ID NO: 65700 - RNA, 27 nt, synthetic construct
  misc_feature 1..27: note = Fatty acid synthase (1720-1728)
  source 1..27: mol_type = other RNA
ttcgccaacagcagagacacctccttt

SEQ ID NO: 65701 - RNA, 27 nt, synthetic construct
  misc_feature 1..27: note = DNA polymerase delta subunit 2 (24-32)
  source 1..27: mol_type = other RNA
ttcgccagagtgcccgtcgctacctac

SEQ ID NO: 65702 - RNA, 30 nt, synthetic construct; identical to SEQ ID NO: 41475
  misc_feature 1..30: note = Microtubule cross-linking factor 1 (1586-1595)
  source 1..30: mol_type = other RNA

SEQ ID NO: 65703 - RNA, 27 nt, synthetic construct
  misc_feature 1..27: note = ATP synthase subunit delta, mitochondrial (42-50)
  source 1..27: mol_type = other RNA
ttcgccagccccacccaggtgtttttc

SEQ ID NO: 65704 - RNA, 27 nt, synthetic construct
  misc_feature 1..27: note = Alanine-tRNA ligase, cytoplasmic (346-354)
  source 1..27: mol_type = other RNA
ttcgccaccctggtggacgtcgttgtg

SEQ ID NO: 65705 - RNA, 33 nt, synthetic construct
  misc_feature 1..33: note = G patch domain-containing protein 2 (148-158)
  source 1..33: mol_type = other RNA
ttcgccgtggacaacgtcggcaatagaaccctg

SEQ ID NO: 65706 - RNA, 27 nt, synthetic construct
  misc_feature 1..27: note = Protein disulfide-isomerase A2 (456-464)
  source 1..27: mol_type = other RNA
ttcgccgtgcacggctttcccaccctg

SEQ ID NO: 65707 - RNA, 27 nt, synthetic construct
  misc_feature 1..27: note = Translocon-associated protein subunit gamma (75-83)
  source 1..27: mol_type = other RNA
ttcgcctacaagaacgtgaaatttgtc

SEQ ID NO: 65708 - RNA, 27 nt, synthetic construct
  misc_feature 1..27: note = Transmembrane protein 214 (326-334)
  source 1..27: mol_type = other RNA
ttcgcctacatgcccaacaatagcctg

SEQ ID NO: 65709 - RNA, 27 nt, synthetic construct
  misc_feature 1..27: note = 28S ribosomal protein S29, mitochondrial (117-125)
  source 1..27: mol_type = other RNA
ttcgcctaccccgctatcagatatctg

SEQ ID NO: 65710 - RNA, 27 nt, synthetic construct
  misc_feature 1..27: note = Protein furry homolog-like (828-836)
  source 1..27: mol_type = other RNA
ttcgcctacaccagactgcagctcctt

SEQ ID NO: 65711 - RNA, 24 nt, synthetic construct
  misc_feature 1..24: note = Transmembrane and coiled-coil domain-containing protein 1 (109-116)
  source 1..24: mol_type = other RNA
ttcgacggcagagtggtcgccaag

SEQ ID NO: 65712 - RNA, 27 nt, synthetic construct
  misc_feature 1..27: note = ATP-binding cassette sub-family A member 9 (420-428)
  source 1..27: mol_type = other RNA
ttcgacaagatcctgcccgccgagtac

SEQ ID NO: 65713 - RNA, 24 nt, synthetic construct
  misc_feature 1..24: note = Peroxidasin-like protein (1168-1175)
  source 1..24: mol_type = other RNA
ttcgaggacctgcagaacgaaatc

SEQ ID NO: 65714 - RNA, 30 nt, synthetic construct
  misc_feature 1..30: note = Unconventional myosin-Ih (75-84)
  source 1..30: mol_type = other RNA
ttcgagctgccccctcacgtgtacgccatc

SEQ ID NO: 65715 - RNA, 27 nt, synthetic construct
  misc_feature 1..27: note = Band 4.1-like protein 1 (692-700)
  source 1..27: mol_type = other RNA
ttcgagcccgtgaagaccgaaacaatg

SEQ ID NO: 65716 - RNA, 36 nt, synthetic construct
  misc_feature 1..36: note = Gigaxonin (459-470)
  source 1..36: mol_type = other RNA
ttcggcgccgtggcttgcggggtcgcaatggagctg

SEQ ID NO: 65717 - RNA, 30 nt, synthetic construct
  misc_feature 1..30: note = Cysteine andine-rich protein 1 (180-189)
  source 1..30: mol_type = other RNA
ttcggctttgggcagggagccggtgctctg

SEQ ID NO: 65718 - RNA, 27 nt, synthetic construct
  misc_feature 1..27: note = Protein FAM60A (2-10)
  source 1..27: mol_type = other RNA
ttcggctttcacaagcccaaaatgtac

SEQ ID NO: 65719 - RNA, 27 nt, synthetic construct
  misc_feature 1..27: note = Acyl-CoA-binding domain-containing protein 6 (141-149)
  source 1..27: mol_type = other RNA
ttcggcgggcccgtgatcagctccctg

SEQ ID NO: 65720 - RNA, 27 nt, synthetic construct
  misc_feature 1..27: note = Hydroxyacyl-coenzyme A dehydrogenase, mitochondrial (302-310)
  source 1..27: mol_type = other RNA
ttcggcaagaaaaccggggagggattt

SEQ ID NO: 65721 - RNA, 27 nt, synthetic construct
  misc_feature 1..27: note = EH domain-containing protein 1 (42-50)
  source 1..27: mol_type = other RNA
ttccacgagtttcatagccccgccctg

SEQ ID NO: 65722 - RNA, 27 nt, synthetic construct
  misc_feature 1..27: note = Forkhead box protein N2 (278-286)
  source 1..27: mol_type = other RNA
ttccaccatcccagcgccgtgagactg

SEQ ID NO: 65723 - RNA, 27 nt, synthetic construct
  misc_feature 1..27: note = B-lymphocyte antigen CD20 (62-70)
  source 1..27: mol_type = other RNA
ttccacatcgccctgggcgggctcctt

SEQ ID NO: 65724 - RNA, 27 nt, synthetic construct
  misc_feature 1..27: note = Endoplasmic reticulum-Golgi intermediate compartment protein 2 (185-193)
  source 1..27: mol_type = other RNA
ttccacatcaccgtgggcaaggccatt

SEQ ID NO: 65725 - RNA, 27 nt, synthetic construct
  misc_feature 1..27: note = Complement receptor type 2 (1016-1024)
  source 1..27: mol_type = other RNA
ttccacctggaggccagagaagtgtac

SEQ ID NO: 65726 - RNA, 27 nt, synthetic construct
  misc_feature 1..27: note = Eukaryotic elongation factor 2 kinase (553-561)
  source 1..27: mol_type = other RNA
ttccacctggagcatgccgctaacctc

SEQ ID NO: 65727 - RNA, 27 nt, synthetic construct
  misc_feature 1..27: note Dolichyl-diphosphooligosaccharide-proteinosyltransferase subunit 2 (579-587)
  source 1..27: mol_type = other RNA
ttccacctgggccatgccgctatgctc

SEQ ID NO: 65728 - RNA, 27 nt, synthetic construct
  misc_feature 1..27: note = Brain-specific angiogenesis inhibitor 1-associated protein 2 (97-105)
  source 1..27: mol_type = other RNA
ttccacaacgagctgctcacccagctt

SEQ ID NO: 65729 - RNA, 27 nt, synthetic construct
  misc_feature 1..27: note = Large subunit GTPase 1 homolog (597-605)
  source 1..27: mol_type = other RNA
ttccaccaggagaacgtgagagccctg

SEQ ID NO: 65730 - RNA, 27 nt, synthetic construct
  misc_feature 1..27: note = tRNA (uracil(54)-C(5))-methyltransferase homolog (396-404)
  source 1..27: mol_type = other RNA
ttccacaccggccaggccgagaagatc

SEQ ID NO: 65731 - RNA, 30 nt, synthetic construct
  misc_feature 1..30: note = E3 ubiquitin-protein ligase UHRF1 (36-45)
  source 1..30: mol_type = other RNA
ttccacgtggagcccggcctgcagagactc

SEQ ID NO: 65732 - RNA, 27 nt, synthetic construct
  misc_feature 1..27: note = Minor histocompatibility protein HA-1 (190-198)
  source 1..27: mol_type = other RNA
ttccactacgagagcaacaatgacctg

SEQ ID NO: 65733 - RNA, 27 nt, synthetic construct
  misc_feature 1..27: note = Gamma-adducin (307-315)
  source 1..27: mol_type = other RNA
ttccactacatctttaacgtgcagctg

SEQ ID NO: 65734 - RNA, 27 nt, synthetic construct
  misc_feature 1..27: note = Protein RER1 (79-87)
  source 1..27: mol_type = other RNA
ttcatcgcctttctgagccccaaggtg

SEQ ID NO: 65735 - RNA, 27 nt, synthetic construct
  misc_feature 1..27: note = Mitochondrial import receptor subunit TOM5 homolog (43-51)
  source 1..27: mol_type = other RNA
ttcatcctgaagaaactcgacagcatt

SEQ ID NO: 65736 - RNA, 27 nt, synthetic construct
  misc_feature 1..27: note = Neutral amino acid transporter B(0) (175-183)
  source 1..27: mol_type = other RNA
ttcatcctgcccattggcgccaccgtg

SEQ ID NO: 65737 - RNA, 27 nt, synthetic construct
  misc_feature 1..27: note = Nectin-1 (509-517)
  source 1..27: mol_type = other RNA
ttcatcagcaagaaagagtggtacgtg

SEQ ID NO: 65738 - RNA, 27 nt, synthetic construct
  misc_feature 1..27: note = Desmoplakin (2300-2308)
  source 1..27: mol_type = other RNA
ttcatcgtggaccccgtcagcaacctg

SEQ ID NO: 65739 - RNA, 27 nt, synthetic construct
  misc_feature 1..27: note = Zinc finger protein 460 (554-562)
  source 1..27: mol_type = other RNA
ttcatcgtggaggaaaccctgcccctc

SEQ ID NO: 65740 - RNA, 27 nt, synthetic construct
  misc_feature 1..27: note = Elongation factor 1-gamma (16-24)
  source 1..27: mol_type = other RNA
ttcaaggccctgatcgctgcacagtac

SEQ ID NO: 65741 - RNA, 27 nt, synthetic construct
  misc_feature 1..27: note = Ubiquilin-1 (61-69)
  source 1..27: mol_type = other RNA
ttcaaggaggaaatcagcaaaagattt

SEQ ID NO: 65742 - RNA, 27 nt, synthetic construct
  misc_feature 1..27: note = Nuclear pore complex protein Nup153 (924-932)
  source 1..27: mol_type = other RNA
ttcaagtttggcgaccaggggggattc

SEQ ID NO: 65743 - RNA, 27 nt, synthetic construct
  misc_feature 1..27: note = Thioredoxin-interacting protein (370-378)
  source 1..27: mol_type = other RNA
ttcaagtttatgccccctccaacctac

SEQ ID NO: 65744 - RNA, 27 nt, synthetic construct
  misc_feature 1..27: note = Protein SCAF11 (1115-1123)
  source 1..27: mol_type = other RNA
ttcaagtttgtggagcagcaaagctac

SEQ ID NO: 65745 - RNA, 30 nt, synthetic construct; identical to SEQ ID NO: 41518
  misc_feature 1..30: note = Casein kinase II subunit alpha (197-206)
  source 1..30: mol_type = other RNA

SEQ ID NO: 65746 - RNA, 30 nt, synthetic construct
  misc_feature 1..30: note = Ras association domain-containing protein 2 (212-221)
  source 1..30: mol_type = other RNA
ttcaagatcgagaacagcgccgaagagttt

SEQ ID NO: 65747 - RNA, 27 nt, synthetic construct
  misc_feature 1..27: note = Septin-6 (197-205)
  source 1..27: mol_type = other RNA
ttcaagatcaaaattaccagcgagctg

SEQ ID NO: 65748 - RNA, 27 nt, synthetic construct
  misc_feature 1..27: note = Ubiquitin carboxyl-terminal hydrolase 33 (150-158)
  source 1..27: mol_type = other RNA
ttcaagatccccagcaacaccacactg

SEQ ID NO: 65749 - RNA, 30 nt, synthetic construct
  misc_feature 1..30: note = SLIT-ROBO Rho GTPase-activating protein 3 (765-774)
  source 1..30: mol_type = other RNA
ttcaagaaaggcgccagcctgctcctttac

SEQ ID NO: 65750 - RNA, 30 nt, synthetic construct
  misc_feature 1..30: note = ETS domain-containing protein Elk-4 (163-172)
  source 1..30: mol_type = other RNA
ttcaagctgatcaaaaccgagaaccccgcc

SEQ ID NO: 65751 - RNA, 27 nt, synthetic construct
  misc_feature 1..27: note = Nucleoporin-like protein 2 (303-311)
  source 1..27: mol_type = other RNA
ttcaagagccccgccgcttcctctttt

SEQ ID NO: 65752 - RNA, 30 nt, synthetic construct; identical to SEQ ID NO: 41525
  misc_feature 1..30: note = Mini-chromosome maintenance complex-binding protein (250-259)
  source 1..30: mol_type = other RNA

SEQ ID NO: 65753 - RNA, 27 nt, synthetic construct
  misc_feature 1..27: note = U2 small nuclear ribonucleoprotein auxiliary factor 35 kDa subunit-related protein 2 (256-264)
  source 1..27: mol_type = other RNA
ttcaaggtgagctgcaacctggagccc

SEQ ID NO: 65754 - RNA, 27 nt, synthetic construct
  misc_feature 1..27: note = Ubiquitin-conjugating enzyme E2 T (132-140)
  source 1..27: mol_type = other RNA
ttcaagtacaacaaacccgcctttctg

SEQ ID NO: 65755 - RNA, 27 nt, synthetic construct
  misc_feature 1..27: note = Bestrophin-3 (595-603)
  source 1..27: mol_type = other RNA
ttcctgggcagctcccacacctctctc

SEQ ID NO: 65756 - RNA, 30 nt, synthetic construct; identical to SEQ ID NO: 41529
  misc_feature 1..30: note = Heparan-alpha-glucosaminide N-acetyltransferase (512-521)
  source 1..30: mol_type = other RNA

SEQ ID NO: 65757 - RNA, 27 nt, synthetic construct
  misc_feature 1..27: note = Acetyl-CoA carboxylase 1 (2174-2182)
  source 1..27: mol_type = other RNA
ttcctgatccccatttaccaccaggtg

SEQ ID NO: 65758 - RNA, 27 nt, synthetic construct
  misc_feature 1..27: note = Rho-associated protein kinase 1 (316-324)
  source 1..27: mol_type = other RNA
ttcctgaccgacagagaggtgaggctc

SEQ ID NO: 65759 - RNA, 27 nt, synthetic construct
  misc_feature 1..27: note = AP-2 complex subunit alpha-1 (812-820)
  source 1..27: mol_type = other RNA
ttcctgaccccccctctccttagcgtg

SEQ ID NO: 65760 - RNA, 30 nt, synthetic construct
  misc_feature 1..30: note = Bardet-Biedl syndrome 1 protein (409-418)
  source 1..30: mol_type = other RNA
ttcctgtacaacgaggccctctatagcctt

SEQ ID NO: 65761 - RNA, 27 nt, synthetic construct
  misc_feature 1..27: note = Adiponectin receptor protein 1 (163-171)
  source 1..27: mol_type = other RNA
ttcatggcccccctgcaggagaaggtg

SEQ ID NO: 65762 - RNA, 27 nt, synthetic construct
  misc_feature 1..27: note = Protein SGT1 homolog (332-340)
  source 1..27: mol_type = other RNA
ttcatggagagcggcgggaccgtgctg

SEQ ID NO: 65763 - RNA, 27 nt, synthetic construct
  misc_feature 1..27: note = Cyclin-dependent kinase 13 (131-139)
  source 1..27: mol_type = other RNA
ttccccatcaccgccattagagagata

SEQ ID NO: 65764 - RNA, 27 nt, synthetic construct
  misc_feature 1..27: note = Actin-like protein 6A (99-107)
  source 1..27: mol_type = other RNA
ttccaggccatcctggaccacacctac

SEQ ID NO: 65765 - RNA, 30 nt, synthetic construct
  misc_feature 1..30: note = Nuclear pore complex protein Nup153 (1395-1404)
  source 1..30: mol_type = other RNA
ttccagtttggcagctccaccacaaacttc

SEQ ID NO: 65766 - RNA, 27 nt, synthetic construct
  misc_feature 1..27: note = Choline-phosphate cytidylyltransferase B (242-250)
  source 1..27: mol_type = other RNA
ttccagaaccaagtggacaagatgaaa

SEQ ID NO: 65767 - RNA, 27 nt, synthetic construct
  misc_feature 1..27: note = Fibrillin-3 (594-602)
  source 1..27: mol_type = other RNA
ttcagatgccagtgtctgggcgggctc

SEQ ID NO: 65768 - RNA, 27 nt, synthetic construct
  misc_feature 1..27: note = Polycystin-1 (3465-3473)
  source 1..27: mol_type = other RNA
ttcagcgcctccgacgaggatctgatc

SEQ ID NO: 65769 - RNA, 27 nt, synthetic construct
  misc_feature 1..27: note = Chromodomain-helicase-DNA-binding protein 4 (167-175)
  source 1..27: mol_type = other RNA
ttcagcgaggaagactacagaaccctg

SEQ ID NO: 65770 - RNA, 27 nt, synthetic construct
  misc_feature 1..27: note = Integrin beta-7 (227-235)
  source 1..27: mol_type = other RNA
ttcagctttcaccatgtgctgtccctc

SEQ ID NO: 65771 - RNA, 30 nt, synthetic construct
  misc_feature 1..30: note = GPALPP motifs-containing protein 1 (331-340)
  source 1..30: mol_type = other RNA
ttcagccacggcaaggggaacatgtttctg

SEQ ID NO: 65772 - RNA, 27 nt, synthetic construct
  misc_feature 1..27: note = Transcription intermediary factor 1-beta (125-133)
  source 1..27: mol_type = other RNA
ttcagcaaggacatcgtggagaactac

SEQ ID NO: 65773 - RNA, 27 nt, synthetic construct
  misc_feature 1..27: note = Meiosis arrest female protein 1 (1734-1742)
  source 1..27: mol_type = other RNA
ttcagcctggcccccatcaccaagctc

SEQ ID NO: 65774 - RNA, 24 nt, synthetic construct
  misc_feature 1..24: note = Chromosome transmission fidelity protein 8 homolog isoform 2 (371-378)
  source 1..24: mol_type = other RNA
ttcagccagtcctctggcaccctg

SEQ ID NO: 65775 - RNA, 27 nt, synthetic construct
  misc_feature 1..27: note = Protein PRRC2A (165-173)
  source 1..27: mol_type = other RNA
ttcagcagagaggaatttcccaccctg

SEQ ID NO: 65776 - RNA, 27 nt, synthetic construct
  misc_feature 1..27: note = V-type proton ATPase subunit D (79-87)
  source 1..27: mol_type = other RNA
ttcagcaccacagtgatccagaacgtc

SEQ ID NO: 65777 - RNA, 24 nt, synthetic construct
  misc_feature 1..24: note = Nodal modulator 2 (329-336)
  source 1..24: mol_type = other RNA
ttcagcgtgaccggcagagtcctg

SEQ ID NO: 65778 - RNA, 27 nt, synthetic construct
  misc_feature 1..27: note = ETS domain-containing protein Elk-3 (331-339)
  source 1..27: mol_type = other RNA
ttcaccgcccagacacccaacggcctg

SEQ ID NO: 65779 - RNA, 30 nt, synthetic construct
  misc_feature 1..30: note = ATP synthase subunit delta, mitochondrial (40-49)
  source 1..30: mol_type = other RNA
ttcacctttgccagccccacacaggtgttc

SEQ ID NO: 65780 - RNA, 33 nt, synthetic construct
  misc_feature 1..33: note = E3 SUMO-protein ligase RanBP2 (1132-1142)
  source 1..33: mol_type = other RNA
ttcacctttcacggccccgggaagagcgtgttc

SEQ ID NO: 65781 - RNA, 27 nt, synthetic construct
  misc_feature 1..27: note = Embigin (129-137)
  source 1..27: mol_type = other RNA
ttcaccatcattaacagcaagcagatg

SEQ ID NO: 65782 - RNA, 27 nt, synthetic construct
  misc_feature 1..27: note = Protein transport protein Sec23B (392-400)
  source 1..27: mol_type = other RNA
ttcaccaaggactttaacggcgatttc

SEQ ID NO: 65783 - RNA, 27 nt, synthetic construct
  misc_feature 1..27: note = Protein TFG (363-371)
  source 1..27: mol_type = other RNA
ttcaccagcctgcccggctccacaatg

SEQ ID NO: 65784 - RNA, 27 nt, synthetic construct
  misc_feature 1..27: note = Nuclear factor of activated T-cells, cytoplasmic 2 (454-462)
  source 1..27: mol_type = other RNA
ttcacctaccaccccgtgcctgccatc

SEQ ID NO: 65785 - RNA, 27 nt, synthetic construct
  misc_feature 1..27: note = Phosphomannomutase 2 (157-165)
  source 1..27: mol_type = other RNA
ttcgtggccgacctgagaaaggagttt

SEQ ID NO: 65786 - RNA, 27 nt, synthetic construct
  misc_feature 1..27: note = V-type proton ATPase subunit G 1 (102-110)
  source 1..27: mol_type = other RNA
ttcgtgtgcgacatcagacccgagatt

SEQ ID NO: 65787 - RNA, 27 nt, synthetic construct
  misc_feature 1..27: note = T-box transcription factor TBX20 (45-53)
  source 1..27: mol_type = other RNA
ttcgtggagaagagctcctgcgcccag

SEQ ID NO: 65788 - RNA, 27 nt, synthetic construct
  misc_feature 1..27: note = Dual specificity protein phosphatase 4 (364-372)
  source 1..27: mol_type = other RNA
ttcgtgtttagcttccccgtctccgtt

SEQ ID NO: 65789 - RNA, 27 nt, synthetic construct
  misc_feature 1..27: note = RNA-binding protein PNO1 (136-144)
  source 1..27: mol_type = other RNA
ttcgtgaaggcctttatcctgggcttc

SEQ ID NO: 65790 - RNA, 27 nt, synthetic construct
  misc_feature 1..27: note = Serine/threonine-protein kinase mTOR (725-733)
  source 1..27: mol_type = other RNA
ttcgtgatgccctttctgagaaagatg

SEQ ID NO: 65791 - RNA, 27 nt, synthetic construct
  misc_feature 1..27: note = 60S ribosomal protein L36 (39-47)
  source 1..27: mol_type = other RNA
ttcgtgagagacatgatcagggaggtc

SEQ ID NO: 65792 - RNA, 27 nt, synthetic construct
  misc_feature 1..27: note = Melanoma-associated antigen C2 (265-273)
  source 1..27: mol_type = other RNA
ttcgtgtacggcgagcccagagaactg

SEQ ID NO: 65793 - RNA, 27 nt, synthetic construct
  misc_feature 1..27: note = Beta-1,3-galactosyltransferase 5 (36-44)
  source 1..27: mol_type = other RNA
ttcgtgtacaagaaagacggcaacttt

SEQ ID NO: 65794 - RNA, 27 nt, synthetic construct
  misc_feature 1..27: note = Olfactory receptor 12D2 (250-258)
  source 1..27: mol_type = other RNA
ttctacgcccccgtgctgtttacctat

SEQ ID NO: 65795 - RNA, 27 nt, synthetic construct
  misc_feature 1..27: note = Laminin subunit alpha-5 (1849-1857)
  source 1..27: mol_type = other RNA
ttctacagagacgtgaagggcctgttt

SEQ ID NO: 65796 - RNA, 27 nt, synthetic construct
  misc_feature 1..27: note = Erythrocyte band 7 integral membrane protein (75-83)
  source 1..27: mol_type = other RNA
ggcgccaaggggcccggactgttcttt

SEQ ID NO: 65797 - RNA, 27 nt, synthetic construct
  misc_feature 1..27: note = Forkhead box protein O3 (542-550)
  source 1..27: mol_type = other RNA
ggcgccctggggggaagcagagctctc

SEQ ID NO: 65798 - RNA, 27 nt, synthetic construct
  misc_feature 1..27: note = Tumor necrosis factor receptor superfamily member 18 (5-13)
  source 1..27: mol_type = other RNA
ggcgccatgggggctttcagagcactg

SEQ ID NO: 65799 - RNA, 27 nt, synthetic construct
  misc_feature 1..27: note = Leukocyte elastase inhibitor (309-317)
  source 1..27: mol_type = other RNA
ggcgccagagacatcttcattagcaag

SEQ ID NO: 65800 - RNA, 27 nt, synthetic construct
  misc_feature 1..27: note = Solute carrier family 22 member 9 (444-452)
  source 1..27: mol_type = other RNA
ggcgccagcgctctggcaaacaccctc

SEQ ID NO: 65801 - RNA, 27 nt, synthetic construct
  misc_feature 1..27: note = Alpha-enolase (122-130)
  source 1..27: mol_type = other RNA
ggcgccgtggagaagggggtccccctg

SEQ ID NO: 65802 - RNA, 27 nt, synthetic construct
  misc_feature 1..27: note = Importin subunit alpha-5 (169-177)
  source 1..27: mol_type = other RNA
ggcgccgtgcccatcttcattgagctg

SEQ ID NO: 65803 - RNA, 27 nt, synthetic construct
  misc_feature 1..27: note = 60S ribosomal protein L15 (2-10)
  source 1..27: mol_type = other RNA
ggcgcctacaagtatatccaggagctg

SEQ ID NO: 65804 - RNA, 30 nt, synthetic construct
  misc_feature 1..30: note = Nuclease EXOG, mitochondrial (105-114)
  source 1..30: mol_type = other RNA
ggcgacgccgatagaaagcactgcaaattc

SEQ ID NO: 65805 - RNA, 27 nt, synthetic construct
  misc_feature 1..27: note = Lariat debranching enzyme (502-510)
  source 1..27: mol_type = other RNA
ggcgaggacctgaccaaggtgcccctc

SEQ ID NO: 65806 - RNA, 24 nt, synthetic construct
  misc_feature 1..24: note = Leucine-rich repeat LGI family member 4 (2-9)
  source 1..24: mol_type = other RNA
ggcggggccggaatcctgctcctt

SEQ ID NO: 65807 - RNA, 27 nt, synthetic construct
  misc_feature 1..27: note = Anosmin-1 (412-420)
  source 1..27: mol_type = other RNA
ggcgggatccagacccaactgcccttc

SEQ ID NO: 65808 - RNA, 27 nt, synthetic construct
  misc_feature 1..27: note = Cold-inducible RNA-binding protein (133-141)
  source 1..27: mol_type = other RNA
ggcgggtacggaggtagcagagactat

SEQ ID NO: 65809 - RNA, 27 nt, synthetic construct
  misc_feature 1..27: note = Acetyl-CoA carboxylase 2 (352-360)
  source 1..27: mol_type = other RNA
ggccacgccagcgagaaccccaagctg

SEQ ID NO: 65810 - RNA, 27 nt, synthetic construct
  misc_feature 1..27: note = Guanine nucleotide-binding protein subunit beta-5 (365-373)
  source 1..27: mol_type = other RNA
ggccacgagaacagagtgagcaccctg

SEQ ID NO: 65811 - RNA, 33 nt, synthetic construct; identical to SEQ ID NO: 41584
  misc_feature 1..33: note = Rho guanine nucleotide exchange factor 2 (157-167)
  source 1..33: mol_type = other RNA

SEQ ID NO: 65812 - RNA, 27 nt, synthetic construct
  misc_feature 1..27: note = DNA polymerase delta catalytic subunit (784-792)
  source 1..27: mol_type = other RNA
ggccacttccccagccctatcagactg

SEQ ID NO: 65813 - RNA, 27 nt, synthetic construct
  misc_feature 1..27: note = Factor VIII intron 22 protein (163-171)
  source 1..27: mol_type = other RNA
ggccacttccagagagccgctcaactg

SEQ ID NO: 65814 - RNA, 27 nt, synthetic construct
  misc_feature 1..27: note = Centrosomal protein of 152 kDa (1140-1148)
  source 1..27: mol_type = other RNA
ggccaccatgcccagcccctggctctc

SEQ ID NO: 65815 - RNA, 27 nt, synthetic construct
  misc_feature 1..27: note = Inosine-5'-monophosphate dehydrogenase 2 (371-379)
  source 1..27: mol_type = other RNA
ggccacatcgccaaggctctggcactc

SEQ ID NO: 65816 - RNA, 30 nt, synthetic construct; identical to SEQ ID NO: 41589
  misc_feature 1..30: note = Selenocysteine-specific elongation factor (14-23)
  source 1..30: mol_type = other RNA

SEQ ID NO: 65817 - RNA, 27 nt, synthetic construct
  misc_feature 1..27: note = Hairy/enhancer-of-split related with YRPW motif protein 1 (176-184)
  source 1..27: mol_type = other RNA
ggccacatcccctgggggaccgtgttc

SEQ ID NO: 65818 - RNA, 36 nt, synthetic construct
  misc_feature 1..36: note = Transcription factor AP-1 (86-97)
  source 1..36: mol_type = other RNA
ggccacatcaccacaactcccacgcctacccagttc

SEQ ID NO: 65819 - RNA, 27 nt, synthetic construct
  misc_feature 1..27: note = U5 small nuclear ribonucleoprotein 40 kDa protein (107-115)
  source 1..27: mol_type = other RNA
ggccacagcggggccgtgatggagctg

SEQ ID NO: 65820 - RNA, 27 nt, synthetic construct
  misc_feature 1..27: note = Scaffold attachment factor B1 (858-866)
  source 1..27: mol_type = other RNA
ggccacagcgggcccggacatatgatg

SEQ ID NO: 65821 - RNA, 27 nt, synthetic construct
  misc_feature 1..27: note = Proteasome subunit beta type-4 (125-133)
  source 1..27: mol_type = other RNA
ggccacagctactcccccagagccatc

SEQ ID NO: 65822 - RNA, 33 nt, synthetic construct
  misc_feature 1..33: note = Inactive tyrosine-protein kinase transmembrane receptor ROR1 (927-937)
  source 1..33: mol_type = other RNA
ggccacaccgagagcatgatctccgccgaactg

SEQ ID NO: 65823 - RNA, 27 nt, synthetic construct
  misc_feature 1..27: note = Cytochrome b-c1 complex subunit 2, mitochondrial (445-453)
  source 1..27: mol_type = other RNA
ggccacacccccttcgtggacgagctg

SEQ ID NO: 65824 - RNA, 27 nt, synthetic construct
  misc_feature 1..27: note = Tetratricopeptide repeat protein 8 (471-479)
  source 1..27: mol_type = other RNA
ggccacgtggagcaggccagagctctg

SEQ ID NO: 65825 - RNA, 27 nt, synthetic construct
  misc_feature 1..27: note = Centromere protein M (155-163)
  source 1..27: mol_type = other RNA
ggccacgtgcccggggtcagcgccctg

SEQ ID NO: 65826 - RNA, 27 nt, synthetic construct
  misc_feature 1..27: note = Inosine-5'-monophosphate dehydrogenase 1 (371-379)
  source 1..27: mol_type = other RNA
ggccacgtggtcaaggccctggctctc

SEQ ID NO: 65827 - RNA, 27 nt, synthetic construct
  misc_feature 1..27: note = Ubiquitin carboxyl-terminal hydrolase 1 (592-600)
  source 1..27: mol_type = other RNA
ggccactacaccgccagcgtgaaggtc

SEQ ID NO: 65828 - RNA, 27 nt, synthetic construct
  misc_feature 1..27: note = Tubulin beta-4B chain (104-112)
  source 1..27: mol_type = other RNA
ggccactacaccgagggggccgaactg

SEQ ID NO: 65829 - RNA, 27 nt, synthetic construct
  misc_feature 1..27: note = Ubiquitin-like-conjugating enzyme ATG3 (118-126)
  source 1..27: mol_type = other RNA
ggcatcaccgaggccgtgaaggaaatt

SEQ ID NO: 65830 - RNA, 27 nt, synthetic construct
  misc_feature 1..27: note = Phospholipid phosphatase 5 (2-10)
  source 1..27: mol_type = other RNA
ggcaaggccgctgcagccgtggcgttc

SEQ ID NO: 65831 - RNA, 30 nt, synthetic construct
  misc_feature 1..30: note = Sterol regulatory element-binding protein 2 (933-942)
  source 1..30: mol_type = other RNA
ggcaaggccgacgggcagcaaagctccttc

SEQ ID NO: 65832 - RNA, 27 nt, synthetic construct
  misc_feature 1..27: note = Zinc finger protein 623 (381-389)
  source 1..27: mol_type = other RNA
ggcaaggccttctttctgagctcctac

SEQ ID NO: 65833 - RNA, 27 nt, synthetic construct
  misc_feature 1..27: note = Zinc finger protein 791 (278-286)
  source 1..27: mol_type = other RNA
ggcaaggccttcatctttcccagcttc

SEQ ID NO: 65834 - RNA, 27 nt, synthetic construct
  misc_feature 1..27: note = Zinc finger protein with KRAB and SCAN domains 1 (495-503)
  source 1..27: mol_type = other RNA
ggcaaggccttcaacagaaatagctac

SEQ ID NO: 65835 - RNA, 27 nt, synthetic construct
  misc_feature 1..27: note = Zinc finger protein 397 (375-383)
  source 1..27: mol_type = other RNA
ggcaaggccttcagccagtcctcttac

SEQ ID NO: 65836 - RNA, 27 nt, synthetic construct
  misc_feature 1..27: note = Zinc finger protein 791 (362-370)
  source 1..27: mol_type = other RNA
ggcaaggccttcagcagaatctcctac

SEQ ID NO: 65837 - RNA, 30 nt, synthetic construct
  misc_feature 1..30: note = Zinc finger protein 460 (370-379)
  source 1..30: mol_type = other RNA
ggcaaggccttcacccactacagcacatat

SEQ ID NO: 65838 - RNA, 27 nt, synthetic construct
  misc_feature 1..27: note = Coatomer subunit delta (13-21)
  source 1..27: mol_type = other RNA
ggcaaggccatcgtgagcagacagttc

SEQ ID NO: 65839 - RNA, 27 nt, synthetic construct
  misc_feature 1..27: note = O-acetyl-ADP-ribose deacetylase MACROD1 (208-216)
  source 1..27: mol_type = other RNA
ggcaaggccaaaatcaccgggggatac

SEQ ID NO: 65840 - RNA, 27 nt, synthetic construct
  misc_feature 1..27: note = 2',3'-cyclic-nucleotide 3'-phosphodiesterase (260-268)
  source 1..27: mol_type = other RNA
ggcaaggcccccggggctgaggaatac

SEQ ID NO: 65841 - RNA, 27 nt, synthetic construct
  misc_feature 1..27: note = Ig lambda chain V-II region BOH (43-51)
  source 1..27: mol_type = other RNA
ggcaaggcccccaaactgatcatttac

SEQ ID NO: 65842 - RNA, 27 nt, synthetic construct
  misc_feature 1..27: note = Ig kappa chain V-I region Walker (63-71)
  source 1..27: mol_type = other RNA
ggcaaggcccccaaactgctcatctac

SEQ ID NO: 65843 - RNA, 27 nt, synthetic construct
  misc_feature 1..27: note = Filamin-B (876-884)
  source 1..27: mol_type = other RNA
ggcaaggcccccctgaacgtgcagttc

SEQ ID NO: 65844 - RNA, 27 nt, synthetic construct
  misc_feature 1..27: note = SH2 domain-containing protein 3C (476-484)
  source 1..27: mol_type = other RNA
ggcaaggccagcccctccccttctctg

SEQ ID NO: 65845 - RNA, 27 nt, synthetic construct
  misc_feature 1..27: note = Parafibromin (46-54)
  source 1..27: mol_type = other RNA
ggcaaggaggggcagcccagagaatac

SEQ ID NO: 65846 - RNA, 27 nt, synthetic construct
  misc_feature 1..27: note = 40S ribosomal protein S11 (29-37)
  source 1..27: mol_type = other RNA
ggcaaggagaaactgcccagatactat

SEQ ID NO: 65847 - RNA, 30 nt, synthetic construct
  misc_feature 1..30: note = Transmembrane emp24 domain-containing protein 10 (93-102)
  source 1..30: mol_type = other RNA
ggcaagttcgcctttaccacagaggactac

SEQ ID NO: 65848 - RNA, 27 nt, synthetic construct
  misc_feature 1..27: note = ER membrane protein complex subunit 1 (28-36)
  source 1..27: mol_type = other RNA
ggcaagttcgactggagacagcaatac

SEQ ID NO: 65849 - RNA, 27 nt, synthetic construct
  misc_feature 1..27: note = Nucleolar protein 56 (40-48)
  source 1..27: mol_type = other RNA
ggcaagttccacagcatcgtgagactg

SEQ ID NO: 65850 - RNA, 30 nt, synthetic construct
  misc_feature 1..30: note = Putative ATP-dependent RNA helicase DHX30 (1039-1048)
  source 1..30: mol_type = other RNA
ggcaagttcaaacccaacagcgtgacctac

SEQ ID NO: 65851 - RNA, 30 nt, synthetic construct
  misc_feature 1..30: note = Kinesin light chain 1 (395-404)
  source 1..30: mol_type = other RNA
ggcaagttcaaacaggccgagaccctgtac

SEQ ID NO: 65852 - RNA, 30 nt, synthetic construct
  misc_feature 1..30: note = Transcription activator BRG1 (851-860)
  source 1..30: mol_type = other RNA
ggcaagttcaacgtgctgctcaccacatac

SEQ ID NO: 65853 - RNA, 27 nt, synthetic construct
  misc_feature 1..27: note = 60S ribosomal protein L10a (132-140)
  source 1..27: mol_type = other RNA
ggcaagttccccagcctgctcacccac

SEQ ID NO: 65854 - RNA, 27 nt, synthetic construct
  misc_feature 1..27: note = Microtubule-associated protein RP/EB family member 1 (99-107)
  source 1..27: mol_type = other RNA
ggcaagttccaggacaactttgagttc

SEQ ID NO: 65855 - RNA, 36 nt, synthetic construct
  misc_feature 1..36: note = Glycogen phosphorylase, brain form (810-821)
  source 1..36: mol_type = other RNA
ggcaagttcagctccgacagaaccatcacagagtac

SEQ ID NO: 65856 - RNA, 27 nt, synthetic construct
  misc_feature 1..27: note = 60S ribosome subunit biogenesis protein NIP7 homolog (71-79)
  source 1..27: mol_type = other RNA
ggcaagttcaccaaaacacacaagttt

SEQ ID NO: 65857 - RNA, 33 nt, synthetic construct
  misc_feature 1..33: note = ATP-dependent RNA helicase DDX19B (186-196)
  source 1..33: mol_type = other RNA
ggcaagttctaccccgagctgaaactcgcctat

SEQ ID NO: 65858 - RNA, 27 nt, synthetic construct
  misc_feature 1..27: note = Serine/threonine-protein kinase pim-2 (39-47)
  source 1..27: mol_type = other RNA
ggcaaggggggattcggtaccgtgttt

SEQ ID NO: 65859 - RNA, 27 nt, synthetic construct
  misc_feature 1..27: note = Tyrosine-protein kinase Fer (570-578)
  source 1..27: mol_type = other RNA
ggcaaggggaacttcggagaggtgtac

SEQ ID NO: 65860 - RNA, 27 nt, synthetic construct
  misc_feature 1..27: note = YTH domain-containing family protein 2 (451-459)
  source 1..27: mol_type = other RNA
ggcaaggggcccgtgtacctgctcttc

SEQ ID NO: 65861 - RNA, 30 nt, synthetic construct; identical to SEQ ID NO: 41634
  misc_feature 1..30: note = MYCBP-associated protein (359-368)
  source 1..30: mol_type = other RNA

SEQ ID NO: 65862 - RNA, 33 nt, synthetic construct
  misc_feature 1..33: note = 60S ribosomal protein L36a (16-26)
  source 1..33: mol_type = other RNA
ggcaagcaccagccccataaagtgacccaatac

SEQ ID NO: 65863 - RNA, 27 nt, synthetic construct
  misc_feature 1..27: note = SWI/SNF complex subunit SMARCC1 (93-101)
  source 1..27: mol_type = other RNA
ggcaagcacgtgaccaaccccgccttc

SEQ ID NO: 65864 - RNA, 27 nt, synthetic construct
  misc_feature 1..27: note = DNA damage-binding protein 1 (59-67)
  source 1..27: mol_type = other RNA
ggcaagatcgccgtgatggagctgttc

SEQ ID NO: 65865 - RNA, 30 nt, synthetic construct
  misc_feature 1..30: note = Acidic leucine-rich nuclear phosphoprotein 32 family member B (32-41)
  source 1..30: mol_type = other RNA
ggcaagatcgaggggctgaccgccgaattc

SEQ ID NO: 65866 - RNA, 27 nt, synthetic construct
  misc_feature 1..27: note = Endothelial differentiation-related factor 1 (122-130)
  source 1..27: mol_type = other RNA
ggcaagatcgagagagccattgggctg

SEQ ID NO: 65867 - RNA, 27 nt, synthetic construct
  misc_feature 1..27: note = Heterogeneous nuclear ribonucleoprotein A3 (150-158)
  source 1..27: mol_type = other RNA
ggcaagatcgagaccattgaagtgatg

SEQ ID NO: 65868 - RNA, 27 nt, synthetic construct
  misc_feature 1..27: note = Peptidyl-prolyl cis-trans isomerase B (203-211)
  source 1..27: mol_type = other RNA
ggcaagatcgaggtggaaaaacccttc

SEQ ID NO: 65869 - RNA, 33 nt, synthetic construct
  misc_feature 1..33: note = Macrophage migration inhibitory factor (66-76)
  source 1..33: mol_type = other RNA
ggcaagatcgggggagcccagaacagaagctac

SEQ ID NO: 65870 - RNA, 27 nt, synthetic construct
  misc_feature 1..27: note = Phospholipase ABHD3 (231-239)
  source 1..27: mol_type = other RNA
ggcaagatcgggagcaaaacccccctg

SEQ ID NO: 65871 - RNA, 27 nt, synthetic construct
  misc_feature 1..27: note = D-dopachrome decarboxylase (109-117)
  source 1..27: mol_type = other RNA
ggcaagatcgggaccgtgatgacattc

SEQ ID NO: 65872 - RNA, 27 nt, synthetic construct
  misc_feature 1..27: note = Protein YIF1B (244-252)
  source 1..27: mol_type = other RNA
ggcaagatcgggtactatctggtgctc

SEQ ID NO: 65873 - RNA, 27 nt, synthetic construct
  misc_feature 1..27: note = Nucleolar GTP-binding protein 2 (54-62)
  source 1..27: mol_type = other RNA
ggcaagatcattaaacccctgcagtac

SEQ ID NO: 65874 - RNA, 30 nt, synthetic construct
  misc_feature 1..30: note = Nucleolar protein 58 (195-204)
  source 1..30: mol_type = other RNA
ggcaagatcattagcgacaacctgacctac

SEQ ID NO: 65875 - RNA, 27 nt, synthetic construct
  misc_feature 1..27: note = Nucleolar GTP-binding protein 2 (534-542)
  source 1..27: mol_type = other RNA
ggcaagatcaacgtggtcccccagttc

SEQ ID NO: 65876 - RNA, 27 nt, synthetic construct
  misc_feature 1..27: note = Protein YIPF5 (145-153)
  source 1..27: mol_type = other RNA
ggcaagatccagttcgggtacgtgtat

SEQ ID NO: 65877 - RNA, 30 nt, synthetic construct
  misc_feature 1..30: note = TBC1 domain family member 9 (117-126)
  source 1..30: mol_type = other RNA
ggcaagatccaggggattatagccgagtac

SEQ ID NO: 65878 - RNA, 27 nt, synthetic construct
  misc_feature 1..27: note = Nucleolysin TIAR (121-129)
  source 1..27: mol_type = other RNA
ggcaagatcagcgacgccagagtggtc

SEQ ID NO: 65879 - RNA, 27 nt, synthetic construct
  misc_feature 1..27: note = Ras GTPase-activating protein 1 (354-362)
  source 1..27: mol_type = other RNA
ggcaagatcagcaaacaggaggcctac

SEQ ID NO: 65880 - RNA, 24 nt, synthetic construct
  misc_feature 1..24: note = Solute carrier family 35 member E2B (319-326)
  source 1..24: mol_type = other RNA
ggcaagatcagccccgtgaccttc

SEQ ID NO: 65881 - RNA, 27 nt, synthetic construct
  misc_feature 1..27: note = 40S ribosomal protein S4, X isoform (167-175)
  source 1..27: mol_type = other RNA
ggcaagatcaccgacttcattaaattt

SEQ ID NO: 65882 - RNA, 27 nt, synthetic construct
  misc_feature 1..27: note = Calcium channel flower homolog (141-149)
  source 1..27: mol_type = other RNA
ggcaagaaaggggacgccatcagctac

SEQ ID NO: 65883 - RNA, 27 nt, synthetic construct
  misc_feature 1..27: note = Signal recognition particle receptor subunit beta (226-234)
  source 1..27: mol_type = other RNA
ggcaagaaagggaaggagttcgaattt

SEQ ID NO: 65884 - RNA, 27 nt, synthetic construct
  misc_feature 1..27: note = Sodium-coupled neutral amino acid transporter 2 (58-66)
  source 1..27: mol_type = other RNA
ggcaagaaaaagtacgagaccgaattc

SEQ ID NO: 65885 - RNA, 27 nt, synthetic construct
  misc_feature 1..27: note = Barrier-to-autointegration factor (31-39)
  source 1..27: mol_type = other RNA
ggcaagaaactggaggaaagagggttc

SEQ ID NO: 65886 - RNA, 27 nt, synthetic construct
  misc_feature 1..27: note = Amyloid protein-binding protein 2 (502-510)
  source 1..27: mol_type = other RNA
ggcaagaaactgttcggggagggatac

SEQ ID NO: 65887 - RNA, 27 nt, synthetic construct
  misc_feature 1..27: note = C-1-tetrahydrofolate synthase, cytoplasmic (332-340)
  source 1..27: mol_type = other RNA
ggcaagctggccagagagatcgggctc

SEQ ID NO: 65888 - RNA, 27 nt, synthetic construct
  misc_feature 1..27: note = Sterol regulatory element-binding protein 2 (730-738)
  source 1..27: mol_type = other RNA
ggcaagctggggttcctcgccagctac

SEQ ID NO: 65889 - RNA, 30 nt, synthetic construct; identical to SEQ ID NO: 41662
  misc_feature 1..30: note = T-cell-specific surfaceoprotein CD28 (88-97)
  source 1..30: mol_type = other RNA

SEQ ID NO: 65890 - RNA, 33 nt, synthetic construct; identical to SEQ ID NO: 41663
  misc_feature 1..33: note = T-cell-specific surfaceoprotein CD28 (88-98)
  source 1..33: mol_type = other RNA

SEQ ID NO: 65891 - RNA, 27 nt, synthetic construct
  misc_feature 1..27: note = Guanine nucleotide-binding protein G(I)/G(S)/G(T) subunit beta-1 (77-85)
  source 1..27: mol_type = other RNA
ggcaagctgatcatttgggacagctac

SEQ ID NO: 65892 - RNA, 24 nt, synthetic construct
  misc_feature 1..24: note = Sterile alpha motif domain-containing protein 9-like (1531-1538)
  source 1..24: mol_type = other RNA
ggcaagctgatcagcgtggagtac

SEQ ID NO: 65893 - RNA, 27 nt, synthetic construct
  misc_feature 1..27: note = RNA-binding protein FUS (331-339)
  source 1..27: mol_type = other RNA
ggcaagctgaaaggggaggccaccgtg

SEQ ID NO: 65894 - RNA, 27 nt, synthetic construct
  misc_feature 1..27: note = Hydroxysteroid dehydrogenase-like protein 2 (382-390)
  source 1..27: mol_type = other RNA
ggcaagctgaaacccaccatggccttc

SEQ ID NO: 65895 - RNA, 27 nt, synthetic construct
  misc_feature 1..27: note = Endoplasmic reticulum-Golgi intermediate compartment protein 3 (5-13)
  source 1..27: mol_type = other RNA
ggcaagctgaaacagttcgacgcctac

SEQ ID NO: 65896 - RNA, 27 nt, synthetic construct
  misc_feature 1..27: note = Tripartite motif-containing protein 26 (302-310)
  source 1..27: mol_type = other RNA
ggcaagctgctcagagaccttgagtac

SEQ ID NO: 65897 - RNA, 30 nt, synthetic construct
  misc_feature 1..30: note = Protein PRRC2A (1913-1922)
  source 1..30: mol_type = other RNA
ggcaagctgcccgccgggggagtgctctac

SEQ ID NO: 65898 - RNA, 27 nt, synthetic construct
  misc_feature 1..27: note = RRP12-like protein (5-13)
  source 1..27: mol_type = other RNA
ggcaagctgcccagcggggtgtccgcc

SEQ ID NO: 65899 - RNA, 24 nt, synthetic construct
  misc_feature 1..24: note = Proteasome subunit alpha type-2 (17-24)
  source 1..24: mol_type = other RNA
ggcaagctggtgcagatcgagtac

SEQ ID NO: 65900 - RNA, 27 nt, synthetic construct
  misc_feature 1..27: note = Pre-mRNA-processing-splicing factor 8 (1462-1470)
  source 1..27: mol_type = other RNA
ggcaagctgtggaacctcaataactac

SEQ ID NO: 65901 - RNA, 27 nt, synthetic construct
  misc_feature 1..27: note = Non-specific lipid-transfer protein (510-518)
  source 1..27: mol_type = other RNA
ggcaagatgaacccccagagcgccttc

SEQ ID NO: 65902 - RNA, 27 nt, synthetic construct
  misc_feature 1..27: note = Vitamin D 25-hydroxylase (287-295)
  source 1..27: mol_type = other RNA
ggcaagaacgaccccagctccaccttc

SEQ ID NO: 65903 - RNA, 27 nt, synthetic construct
  misc_feature 1..27: note = FACT complex subunit SSRP1 (142-150)
  source 1..27: mol_type = other RNA
ggcaagaacgaggtgaccctggaattc

SEQ ID NO: 65904 - RNA, 27 nt, synthetic construct
  misc_feature 1..27: note = Protein disulfide-isomerase A2 (395-403)
  source 1..27: mol_type = other RNA
ggcaagaacttcgagcaggtggccttt

SEQ ID NO: 65905 - RNA, 27 nt, synthetic construct
  misc_feature 1..27: note = Embigin (163-171)
  source 1..27: mol_type = other RNA
ggcaagaacaaacccctgatcagctac

SEQ ID NO: 65906 - RNA, 27 nt, synthetic construct
  misc_feature 1..27: note = Pre-mRNA-splicing factor SLU7 (301-309)
  source 1..27: mol_type = other RNA
ggcaagaaccccgacgaggtgagctac

SEQ ID NO: 65907 - RNA, 30 nt, synthetic construct; identical to SEQ ID NO: 41680
  misc_feature 1..30: note = Cell cycle control protein 50A (320-329)
  source 1..30: mol_type = other RNA

SEQ ID NO: 65908 - RNA, 27 nt, synthetic construct
  misc_feature 1..27: note = WD repeat-containing protein 75 (353-361)
  source 1..27: mol_type = other RNA
ggcaagcccgggcacctgcagttctac

SEQ ID NO: 65909 - RNA, 30 nt, synthetic construct
  misc_feature 1..30: note = Aurora kinase A (325-334)
  source 1..30: mol_type = other RNA
ggcaagccccctttcgaggccaacacctac

SEQ ID NO: 65910 - RNA, 27 nt, synthetic construct
  misc_feature 1..27: note = Filamin-B (863-871)
  source 1..27: mol_type = other RNA
ggcaagcccacccacttcacagtgtac

SEQ ID NO: 65911 - RNA, 27 nt, synthetic construct
  misc_feature 1..27: note = Dual specificity protein phosphatase 5 (162-170)
  source 1..27: mol_type = other RNA
ggcaagcccgtggtcaacgttagctac

SEQ ID NO: 65912 - RNA, 27 nt, synthetic construct
  misc_feature 1..27: note = Actin-like protein 6A (61-69)
  source 1..27: mol_type = other RNA
ggcaagcaggggggacccacctactat

SEQ ID NO: 65913 - RNA, 30 nt, synthetic construct
  misc_feature 1..30: note = F-box only protein 21 (396-405)
  source 1..30: mol_type = other RNA
ggcaagagagaggggatcgaccagagctac

SEQ ID NO: 65914 - RNA, 27 nt, synthetic construct
  misc_feature 1..27: note = Probable ATP-dependent RNA helicase DDX5 (500-508)
  source 1..27: mol_type = other RNA
ggcaagagagggggattcaacaccttt

SEQ ID NO: 65915 - RNA, 27 nt, synthetic construct
  misc_feature 1..27: note = Hydroxymethylglutaryl-CoA synthase, cytoplasmic (367-375)
  source 1..27: mol_type = other RNA
ggcaagagaatcggggtgttcagctac

SEQ ID NO: 65916 - RNA, 27 nt, synthetic construct
  misc_feature 1..27: note = Protein S100-A4 (47-55)
  source 1..27: mol_type = other RNA
ggcaagagaaccgacgaggccgctttc

SEQ ID NO: 65917 - RNA, 27 nt, synthetic construct
  misc_feature 1..27: note = Cell cycle progression protein 1 (410-418)
  source 1..27: mol_type = other RNA
ggcaagagcgactcccccaacgtgtac

SEQ ID NO: 65918 - RNA, 27 nt, synthetic construct
  misc_feature 1..27: note = C-myc promoter-binding protein (1422-1430)
  source 1..27: mol_type = other RNA
ggcaagagcgaggtgacctcctctttc

SEQ ID NO: 65919 - RNA, 27 nt, synthetic construct
  misc_feature 1..27: note = Zinc finger protein 213 (379-387)
  source 1..27: mol_type = other RNA
ggcaagagcttctccagatctgcctac

SEQ ID NO: 65920 - RNA, 27 nt, synthetic construct
  misc_feature 1..27: note = Zinc finger protein 557 (403-411)
  source 1..27: mol_type = other RNA
ggcaagagcttcacctccaactcttac

SEQ ID NO: 65921 - RNA, 27 nt, synthetic construct
  misc_feature 1..27: note = Nuclear receptor corepressor 1 (1214-1222)
  source 1..27: mol_type = other RNA
ggcaagagcgggcacatcctgtcctac

SEQ ID NO: 65922 - RNA, 33 nt, synthetic construct
  misc_feature 1..33: note = Polyadenylate-binding protein 1 (228-238)
  source 1..33: mol_type = other RNA
ggcaagagcaaagggttcggatttgtgtccttc

SEQ ID NO: 65923 - RNA, 27 nt, synthetic construct
  misc_feature 1..27: note = Constitutive coactivator of PPAR-gamma-like protein 1 (209-217)
  source 1..27: mol_type = other RNA
ggcaagagcctgaccacatcccagtac

SEQ ID NO: 65924 - RNA, 30 nt, synthetic construct
  misc_feature 1..30: note = Heterogeneous nuclear ribonucleoprotein U (185-194)
  source 1..30: mol_type = other RNA
ggcaagagctccgggcccacctctctgttc

SEQ ID NO: 65925 - RNA, 33 nt, synthetic construct
  misc_feature 1..33: note = Elongation factor 1-alpha 1 (19-29)
  source 1..33: mol_type = other RNA
ggcaagagcaccacaactgggcacctgatctac

SEQ ID NO: 65926 - RNA, 27 nt, synthetic construct
  misc_feature 1..27: note = Zinc finger protein 845 (333-341)
  source 1..27: mol_type = other RNA
ggcaagaccttcagccagacatcctac

SEQ ID NO: 65927 - RNA, 30 nt, synthetic construct
  misc_feature 1..30: note = Sodium-coupled neutral amino acid transporter 5 (46-55)
  source 1..30: mol_type = other RNA
ggcaagaccagcttcgggatgtccgtgttt

SEQ ID NO: 65928 - RNA, 27 nt, synthetic construct
  misc_feature 1..27: note = Ras-related protein Rab-6A (25-33)
  source 1..27: mol_type = other RNA
ggcaagaccagcctgatcacaagattc

SEQ ID NO: 65929 - RNA, 27 nt, synthetic construct
  misc_feature 1..27: note = ATP-dependent RNA helicase DHX8 (593-601)
  source 1..27: mol_type = other RNA
ggcaagaccacacagatcactcaatac

SEQ ID NO: 65930 - RNA, 27 nt, synthetic construct
  misc_feature 1..27: note = Pre-mRNA-splicing factor ATP-dependent RNA helicase PRP16 (560-568)
  source 1..27: mol_type = other RNA
ggcaagaccacacagctgactcaatac

SEQ ID NO: 65931 - RNA, 27 nt, synthetic construct
  misc_feature 1..27: note = ATP-dependent RNA helicase DHX36 (235-243)
  source 1..27: mol_type = other RNA
ggcaagaccacacaggtgactcaattc

SEQ ID NO: 65932 - RNA, 27 nt, synthetic construct
  misc_feature 1..27: note = Adenosylhomocysteinase (213-221)
  source 1..27: mol_type = other RNA
ggcaaggtggccgtcgttgctgggtac

SEQ ID NO: 65933 - RNA, 27 nt, synthetic construct
  misc_feature 1..27: note = Major facilitator superfamily domain-containing protein 1 (287-295)
  source 1..27: mol_type = other RNA
ggcaaggtgttctttaccgagaaattc

SEQ ID NO: 65934 - RNA, 27 nt, synthetic construct
  misc_feature 1..27: note = Zinc finger protein 264 (349-357)
  source 1..27: mol_type = other RNA
ggcaaggtgttcaaacacagaagctac

SEQ ID NO: 65935 - RNA, 27 nt, synthetic construct
  misc_feature 1..27: note = DNA polymerase delta catalytic subunit (997-1005)
  source 1..27: mol_type = other RNA
ggcaaggtggggggactgctcgccttc

SEQ ID NO: 65936 - RNA, 33 nt, synthetic construct
  misc_feature 1..33: note = Estradiol 17-beta-dehydrogenase 8 (159-169)
  source 1..33: mol_type = other RNA
ggcaaggtggggaacgtcggacagaccaattac

SEQ ID NO: 65937 - RNA, 30 nt, synthetic construct
  misc_feature 1..30: note = WD repeat domain phosphoinositide-interacting protein 4 (281-290)
  source 1..30: mol_type = other RNA
ggcaaggtggggcccatgatcggacagtac

SEQ ID NO: 65938 - RNA, 27 nt, synthetic construct
  misc_feature 1..27: note = Dual specificity protein phosphatase 16 (647-655)
  source 1..27: mol_type = other RNA
ggcaaggtggggagccagtcctctttc

SEQ ID NO: 65939 - RNA, 27 nt, synthetic construct
  misc_feature 1..27: note = Protein lin-7 homolog C (165-173)
  source 1..27: mol_type = other RNA
ggcaaggtgaaactggtcgttagatac

SEQ ID NO: 65940 - RNA, 27 nt, synthetic construct
  misc_feature 1..27: note = Apoptosis-associated speck-like protein containing a CARD (138-146)
  source 1..27: mol_type = other RNA
ggcaaggtgctgaccgacgagcagtac

SEQ ID NO: 65941 - RNA, 27 nt, synthetic construct
  misc_feature 1..27: note = E3 ubiquitin-protein ligase synoviolin (58-66)
  source 1..27: mol_type = other RNA
ggcaaggtgatggggaaagtcttcttt

SEQ ID NO: 65942 - RNA, 27 nt, synthetic construct
  misc_feature 1..27: note = Poly (ADP-ribose) polymerase 1 (46-54)
  source 1..27: mol_type = other RNA
ggcaaggtgccccactggtaccatttc

SEQ ID NO: 65943 - RNA, 27 nt, synthetic construct
  misc_feature 1..27: note = DNA-directed RNA polymerase II subunit RPB1 (572-580)
  source 1..27: mol_type = other RNA
ggcaaggtgccccagcctgccatcctg

SEQ ID NO: 65944 - RNA, 27 nt, synthetic construct
  misc_feature 1..27: note = Nucleolar complex protein 2 homolog (575-583)
  source 1..27: mol_type = other RNA
ggcaaggtgcaggagaacagcgcctac

SEQ ID NO: 65945 - RNA, 33 nt, synthetic construct
  misc_feature 1..33: note = Major vault protein (396-406)
  source 1..33: mol_type = other RNA
ggcaaggtgagagccgtcatcgggagcacctac

SEQ ID NO: 65946 - RNA, 27 nt, synthetic construct
  misc_feature 1..27: note = 40S ribosomal protein S4, X isoform (74-82)
  source 1..27: mol_type = other RNA
ggcaaggtgagaaccgacatcacatac

SEQ ID NO: 65947 - RNA, 27 nt, synthetic construct
  misc_feature 1..27: note = 40S ribosomal protein S4, Y isoform 1 (74-82)
  source 1..27: mol_type = other RNA
ggcaaggtgagagtcgacgttacctac

SEQ ID NO: 65948 - RNA, 27 nt, synthetic construct
  misc_feature 1..27: note = ATP-dependent RNA helicase DHX8 (270-278)
  source 1..27: mol_type = other RNA
ggcaaggtgaccagcatcatgcagttc

SEQ ID NO: 65949 - RNA, 27 nt, synthetic construct
  misc_feature 1..27: note = G2/mitotic-specific cyclin-B2 (323-331)
  source 1..27: mol_type = other RNA
ggcaagtggaacctgaaacagcaatac

SEQ ID NO: 65950 - RNA, 27 nt, synthetic construct
  misc_feature 1..27: note = Transcription initiation factor IIE subunit beta (135-143)
  source 1..27: mol_type = other RNA
ggcaagtacgccttcaaacccaagtat

SEQ ID NO: 65951 - RNA, 27 nt, synthetic construct
  misc_feature 1..27: note = Interferon-induced protein 44 (72-80)
  source 1..27: mol_type = other RNA
ggcaagtacgccagcatcattctgttc

SEQ ID NO: 65952 - RNA, 27 nt, synthetic construct
  misc_feature 1..27: note = WD repeat-containing protein 44 (704-712)
  source 1..27: mol_type = other RNA
ggcaagtacgccgtgatcgggacctat

SEQ ID NO: 65953 - RNA, 27 nt, synthetic construct
  misc_feature 1..27: note = Kinesin light chain 1 (353-361)
  source 1..27: mol_type = other RNA
ggcaagtacgaggaagtggagtattac

SEQ ID NO: 65954 - RNA, 27 nt, synthetic construct
  misc_feature 1..27: note = Transketolase (139-147)
  source 1..27: mol_type = other RNA
ggcaagtacttcgacaaagccagctat

SEQ ID NO: 65955 - RNA, 27 nt, synthetic construct
  misc_feature 1..27: note = Golgi pH regulator A (283-291)
  source 1..27: mol_type = other RNA
ggcaagtacttcaactttctggggtat

SEQ ID NO: 65956 - RNA, 33 nt, synthetic construct
  misc_feature 1..33: note = Ethanolamine kinase 1 (257-267)
  source 1..33: mol_type = other RNA
ggcaagtacttcagcctgatccccaccgggttt

SEQ ID NO: 65957 - RNA, 36 nt, synthetic construct
  misc_feature 1..36: note = Solute carrier family 35 member B1 (38-49)
  source 1..36: mol_type = other RNA
ggcaagtacggggagggagccaaacaggaaaccttc

SEQ ID NO: 65958 - RNA, 33 nt, synthetic construct
  misc_feature 1..33: note = Phosphatidylinositol 3-kinase regulatory subunit alpha (388-398)
  source 1..33: mol_type = other RNA
ggcaagtacgggttcagcgaccccctgaccttt

SEQ ID NO: 65959 - RNA, 27 nt, synthetic construct
  misc_feature 1..27: note = DNA-directed RNA polymerase II subunit RPB7 (40-48)
  source 1..27: mol_type = other RNA
ggcaagtacgggttcgtgatcgccgtc

SEQ ID NO: 65960 - RNA, 27 nt, synthetic construct
  misc_feature 1..27: note = Neutral amino acid transporter A (295-303)
  source 1..27: mol_type = other RNA
ggcaagtacatcttcgccagcattctg

SEQ ID NO: 65961 - RNA, 27 nt, synthetic construct
  misc_feature 1..27: note = ER membrane protein complex subunit 3 (65-73)
  source 1..27: mol_type = other RNA
ggcaagtacatccccaaacagagcttc

SEQ ID NO: 65962 - RNA, 30 nt, synthetic construct
  misc_feature 1..30: note = Protein phosphatase 1K, mitochondrial (350-359)
  source 1..30: mol_type = other RNA
ggcaagtacaaaaacagcgagatcaatttc

SEQ ID NO: 65963 - RNA, 30 nt, synthetic construct
  misc_feature 1..30: note = Peptidyl-prolyl cis-trans isomerase FKBP4 (284-293)
  source 1..30: mol_type = other RNA
ggcaagtacaaacaggccctgctccaatat

SEQ ID NO: 65964 - RNA, 27 nt, synthetic construct
  misc_feature 1..27: note = Protein transport protein Sec31A (487-495)
  source 1..27: mol_type = other RNA
ggcaagtacctggagctccttgggtat

SEQ ID NO: 65965 - RNA, 27 nt, synthetic construct
  misc_feature 1..27: note = Catalase (272-280)
  source 1..27: mol_type = other RNA
ggcaagtaccccagctggaccttctat

SEQ ID NO: 65966 - RNA, 27 nt, synthetic construct
  misc_feature 1..27: note = Transmembrane protein 222 (176-184)
  source 1..27: mol_type = other RNA
ggcaagtacgtgagcgtcggggccttc

SEQ ID NO: 65967 - RNA, 27 nt, synthetic construct
  misc_feature 1..27: note = 5'-nucleotidase domain-containing protein 1 (122-130)
  source 1..27: mol_type = other RNA
ggcaagtactatttctacgacaactat

SEQ ID NO: 65968 - RNA, 24 nt, synthetic construct
  misc_feature 1..24: note = Plasmalemma vesicle-associated protein (2-9)
  source 1..24: mol_type = other RNA
ggcctggccatggagcacggggga

SEQ ID NO: 65969 - RNA, 27 nt, synthetic construct
  misc_feature 1..27: note = DC-STAMP domain-containing protein 2 (243-251)
  source 1..27: mol_type = other RNA
ggcctggccagcctcgtgcaggtcttc

SEQ ID NO: 65970 - RNA, 24 nt, synthetic construct
  misc_feature 1..24: note = Protein sel-1 homolog 3 (550-557)
  source 1..24: mol_type = other RNA
ggcctgcaccagatcagctccatt

SEQ ID NO: 65971 - RNA, 27 nt, synthetic construct
  misc_feature 1..27: note = 40S ribosomal protein S3a (61-69)
  source 1..27: mol_type = other RNA
ggcctgaaggggagagtgttcgaggtc

SEQ ID NO: 65972 - RNA, 27 nt, synthetic construct
  misc_feature 1..27: note = Integrin beta-7 (317-325)
  source 1..27: mol_type = other RNA
ggcctgtacagcagatccaccgagttc

SEQ ID NO: 65973 - RNA, 33 nt, synthetic construct
  misc_feature 1..33: note = Solute carrier family 25 member 46 (162-172)
  source 1..33: mol_type = other RNA
ggcatggggagcaccttcatcgtgcagggagtc

SEQ ID NO: 65974 - RNA, 27 nt, synthetic construct
  misc_feature 1..27: note = DNA damage-binding protein 1 (56-64)
  source 1..27: mol_type = other RNA
ggcatgtacgggaagatcgccgtgatg

SEQ ID NO: 65975 - RNA, 27 nt, synthetic construct
  misc_feature 1..27: note = 60S ribosomal protein L8 (131-139)
  source 1..27: mol_type = other RNA
ggcaactacgccaccgtgatcagccac

SEQ ID NO: 65976 - RNA, 27 nt, synthetic construct
  misc_feature 1..27: note = Huntingtin (77-85)
  source 1..27: mol_type = other RNA
ggccccgccgtggctgaggaacctctg

SEQ ID NO: 65977 - RNA, 27 nt, synthetic construct
  misc_feature 1..27: note = Salivary acidic proline-rich phosphoprotein 1/2 (83-91)
  source 1..27: mol_type = other RNA
ggcccccctccaccgcaggggaagccc

SEQ ID NO: 65978 - RNA, 33 nt, synthetic construct
  misc_feature 1..33: note = Basic salivary proline-rich protein 2 (59-69)
  source 1..33: mol_type = other RNA
ggcccccctccacaggggggaaaccaaccgcag

SEQ ID NO: 65979 - RNA, 33 nt, synthetic construct
  misc_feature 1..33: note = Basic salivary proline-rich protein 4 (248-258)
  source 1..33: mol_type = other RNA
ggcccccctcagcaagaggggaacaagccacag

SEQ ID NO: 65980 - RNA, 33 nt, synthetic construct
  misc_feature 1..33: note = Basic salivary proline-rich protein 2 (368-378)
  source 1..33: mol_type = other RNA
ggcccccctcagcaagaggggaacaatccacag

SEQ ID NO: 65981 - RNA, 27 nt, synthetic construct
  misc_feature 1..27: note = Ig kappa chain V-I region WAT (41-49)
  source 1..27: mol_type = other RNA
ggccaggcccccaaggtgctgatctac

SEQ ID NO: 65982 - RNA, 30 nt, synthetic construct
  misc_feature 1..30: note = Thioredoxin domain-containing protein 5 (57-66)
  source 1..30: mol_type = other RNA
ggccaggacccccacagcaagcatctgtac

SEQ ID NO: 65983 - RNA, 27 nt, synthetic construct
  misc_feature 1..27: note = Protein FAM179B (288-296)
  source 1..27: mol_type = other RNA
ggccaggacagattccaaagctacatc

SEQ ID NO: 65984 - RNA, 27 nt, synthetic construct
  misc_feature 1..27: note = Nucleosome-remodeling factor subunit BPTF (843-851)
  source 1..27: mol_type = other RNA
ggccaggaggggaagtacagagtgtat

SEQ ID NO: 65985 - RNA, 27 nt, synthetic construct
  misc_feature 1..27: note = Rho GTPase-activating protein 1 (183-191)
  source 1..27: mol_type = other RNA
ggccagaagatcttctacgtgaactat

SEQ ID NO: 65986 - RNA, 27 nt, synthetic construct
  misc_feature 1..27: note = Endoplasmic reticulum lectin 1 (141-149)
  source 1..27: mol_type = other RNA
ggccagaagatcaacattcacgagtac

SEQ ID NO: 65987 - RNA, 27 nt, synthetic construct
  misc_feature 1..27: note = Chromodomain-helicase-DNA-binding protein 2 (905-913)
  source 1..27: mol_type = other RNA
ggccagaagaaacaagtgaacatctac

SEQ ID NO: 65988 - RNA, 27 nt, synthetic construct
  misc_feature 1..27: note = Immunoglobulin superfamily member 10 (2429-2437)
  source 1..27: mol_type = other RNA
ggccagaagcccgtgatcctgacctac

SEQ ID NO: 65989 - RNA, 27 nt, synthetic construct
  misc_feature 1..27: note = Fibronectin (679-687)
  source 1..27: mol_type = other RNA
ggccagctgatcagcattcaacagtac

SEQ ID NO: 65990 - RNA, 27 nt, synthetic construct
  misc_feature 1..27: note = Lysine-specific demethylase 4B (78-86)
  source 1..27: mol_type = other RNA
ggccagagcgggctgttcacccaatac

SEQ ID NO: 65991 - RNA, 27 nt, synthetic construct
  misc_feature 1..27: note = FERM domain-containing protein 3 (200-208)
  source 1..27: mol_type = other RNA
ggccagagcccccctgtggccgagttc

SEQ ID NO: 65992 - RNA, 27 nt, synthetic construct
  misc_feature 1..27: note = RNA-binding protein EWS (62-70)
  source 1..27: mol_type = other RNA
ggccagaccgcctacgctacaagctat

SEQ ID NO: 65993 - RNA, 24 nt, synthetic construct
  misc_feature 1..24: note = Guanine nucleotide-binding protein subunit beta-2-like 1 (295-302)
  source 1..24: mol_type = other RNA
ggccagaccctgttcgccgggtac

SEQ ID NO: 65994 - RNA, 27 nt, synthetic construct
  misc_feature 1..27: note = Protein ELYS (807-815)
  source 1..27: mol_type = other RNA
ggccaggtgaagctgatccaagggttc

SEQ ID NO: 65995 - RNA, 27 nt, synthetic construct
  misc_feature 1..27: note = Zinc finger protein 507 (577-585)
  source 1..27: mol_type = other RNA
ggccaggtgaagaccgggatcagcatg

SEQ ID NO: 65996 - RNA, 30 nt, synthetic construct
  misc_feature 1..30: note = Probable ATP-dependent RNA helicase DDX17 (631-640)
  source 1..30: mol_type = other RNA
ggccagtacacctatgggcaaggaacatac

SEQ ID NO: 65997 - RNA, 27 nt, synthetic construct
  misc_feature 1..27: note = LanC-like protein 1 (154-162)
  source 1..27: mol_type = other RNA
ggcagaatcgggtacatttatgccctg

SEQ ID NO: 65998 - RNA, 27 nt, synthetic construct
  misc_feature 1..27: note = Gamma-interferon-inducible protein 16 (464-472)
  source 1..27: mol_type = other RNA
ggcagccacttccccgggccttttatg

SEQ ID NO: 65999 - RNA, 27 nt, synthetic construct
  misc_feature 1..27: note = NADH dehydrogenase (ubiquinone) 1 alpha subcomplex subunit 8 (164-172)
  source 1..27: mol_type = other RNA
ggcagcagattctacttttggaccaag

SEQ ID NO: 66000 - RNA, 27 nt, synthetic construct
  misc_feature 1..27: note = Proteasome subunit beta type-4 (73-81)
  source 1..27: mol_type = other RNA
ggcagctacgggtccctggccagattc

SEQ ID NO: 66001 - RNA, 30 nt, synthetic construct
  misc_feature 1..30: note = Egl nine homolog 2 (272-281)
  source 1..30: mol_type = other RNA
ggcagctacgtgatcaacgggagaaccaag

SEQ ID NO: 66002 - RNA, 27 nt, synthetic construct
  misc_feature 1..27: note = Olfactory receptor 8I2 (193-201)
  source 1..27: mol_type = other RNA
ggcaccgagatggtgagcttcgtcctg

SEQ ID NO: 66003 - RNA, 27 nt, synthetic construct
  misc_feature 1..27: note = Dual adapter for phosphotyrosine and 3-phosphotyrosine and 3-phosphoinositide (165-173)
  source 1..27: mol_type = other RNA
ggcaccaaggaggggtacctgacaaaa

SEQ ID NO: 66004 - RNA, 27 nt, synthetic construct
  misc_feature 1..27: note = Large proline-rich protein BAG6 (391-399)
  source 1..27: mol_type = other RNA
ggcaccagaccccctccaacaccgaac

SEQ ID NO: 66005 - RNA, 27 nt, synthetic construct
  misc_feature 1..27: note = Splicing factor 3A subunit 2 (300-308)
  source 1..27: mol_type = other RNA
ggcgtgcacccccctgccccaggggtc

SEQ ID NO: 66006 - RNA, 27 nt, synthetic construct
  misc_feature 1..27: note = Centrosomal protein of 76 kDa (224-232)
  source 1..27: mol_type = other RNA
ggcgtgaccagcctgacagtcgagctc

SEQ ID NO: 66007 - RNA, 27 nt, synthetic construct
  misc_feature 1..27: note = Programmed cell death 6-interacting protein (279-287)
  source 1..27: mol_type = other RNA
cacgccgctgagctgatcaagaccgtg

SEQ ID NO: 66008 - RNA, 27 nt, synthetic construct
  misc_feature 1..27: note = UDP-glucose:glycoprotein glucosyltransferase 1 (566-574)
  source 1..27: mol_type = other RNA
cacgccttccagaccctgacacatatc

SEQ ID NO: 66009 - RNA, 27 nt, synthetic construct
  misc_feature 1..27: note = Methionine synthase (601-609)
  source 1..27: mol_type = other RNA
cacgccatcaagagcggcatggacatg

SEQ ID NO: 66010 - RNA, 27 nt, synthetic construct
  misc_feature 1..27: note = KH domain-containing, RNA-binding, signal transduction-associated protein 1 (246-254)
  source 1..27: mol_type = other RNA
cacgccatggaggaagtgaagaaattc

SEQ ID NO: 66011 - RNA, 27 nt, synthetic construct
  misc_feature 1..27: note = Dynein heavy chain 6, axonemal (1387-1395)
  source 1..27: mol_type = other RNA
cacgccagagacatcgtgaccgagctg

SEQ ID NO: 66012 - RNA, 24 nt, synthetic construct
  misc_feature 1..24: note = Putative sodium-coupled neutral amino acid transporter 10 (698-705)
  source 1..24: mol_type = other RNA
cacgccgtgctgctccaggtcatc

SEQ ID NO: 66013 - RNA, 33 nt, synthetic construct
  misc_feature 1..33: note = HLA class I histocompatibility antigen, A-30 alpha chain (140-150)
  source 1..33: mol_type = other RNA
cacgcctacgacggcaaggattatatcgctctg

SEQ ID NO: 66014 - RNA, 24 nt, synthetic construct
  misc_feature 1..24: note = Tryptophan 2,3-dioxygenase (67-74)
  source 1..24: mol_type = other RNA
cacgacgagcatctgttcatcatt

SEQ ID NO: 66015 - RNA, 24 nt, synthetic construct
  misc_feature 1..24: note = G1/S-specific cyclin-D2 (157-164)
  source 1..24: mol_type = other RNA
cacgacttcatcgagcatattctg

SEQ ID NO: 66016 - RNA, 27 nt, synthetic construct
  misc_feature 1..27: note = Splicing factor, proline- and glutamine-rich (29-37)
  source 1..27: mol_type = other RNA
cacgacttcagaagcccccctccaggc

SEQ ID NO: 66017 - RNA, 27 nt, synthetic construct
  misc_feature 1..27: note = MKL/myocardin-like protein 1 (831-839)
  source 1..27: mol_type = other RNA
cacgacggccccgagcctctgagcctc

SEQ ID NO: 66018 - RNA, 27 nt, synthetic construct
  misc_feature 1..27: note = Rho guanine nucleotide exchange factor 5 (1170-1178)
  source 1..27: mol_type = other RNA
cacgaggaccagaagctgcaagaagtg

SEQ ID NO: 66019 - RNA, 33 nt, synthetic construct
  misc_feature 1..33: note = Dedicator of cytokinesis protein 9 (933-943)
  source 1..33: mol_type = other RNA
cacgaggaactgaccaagagcatgacaactatc

SEQ ID NO: 66020 - RNA, 27 nt, synthetic construct
  misc_feature 1..27: note = Protein phosphatase 2C-like domain-containing protein 1 (71-79)
  source 1..27: mol_type = other RNA
cacgagatcgacctgaccggcattttc

SEQ ID NO: 66021 - RNA, 30 nt, synthetic construct
  misc_feature 1..30: note = Histatin-3 (34-43)
  source 1..30: mol_type = other RNA
cacgagaagcatcacagccatagaggctac

SEQ ID NO: 66022 - RNA, 27 nt, synthetic construct
  misc_feature 1..27: note = Protocadherin-9 (1071-1079)
  source 1..27: mol_type = other RNA
cacgagcccgtgggcagcgggaccctg

SEQ ID NO: 66023 - RNA, 27 nt, synthetic construct
  misc_feature 1..27: note = 60S ribosomal protein L36a-like (90-98)
  source 1..27: mol_type = other RNA
cacttcgagctgggcggggacaagaaa

SEQ ID NO: 66024 - RNA, 33 nt, synthetic construct
  misc_feature 1..33: note = Cancer/testis antigen 47A (120-130)
  source 1..33: mol_type = other RNA
cacttcgtgctgctcgacatggtccatagcctt

SEQ ID NO: 66025 - RNA, 30 nt, synthetic construct
  misc_feature 1..30: note = Neuroblast differentiation-associated protein AHNAK (5535-5544)
  source 1..30: mol_type = other RNA
cacggcgccgctcccgacatcagcgtgaag

SEQ ID NO: 66026 - RNA, 24 nt, synthetic construct
  misc_feature 1..24: note = Centrosomal protein of 97 kDa (154-161)
  source 1..24: mol_type = other RNA
cacggcaacatcattaccagcctg

SEQ ID NO: 66027 - RNA, 27 nt, synthetic construct
  misc_feature 1..27: note = Ubiquitin carboxyl-terminal hydrolase 19 (562-570)
  source 1..27: mol_type = other RNA
caccatgccttccagcccagcaagctg

SEQ ID NO: 66028 - RNA, 24 nt, synthetic construct
  misc_feature 1..24: note = E3 SUMO-protein ligase CBX4 (399-406)
  source 1..24: mol_type = other RNA
caccatgccgtgggcctgaacctc

SEQ ID NO: 66029 - RNA, 30 nt, synthetic construct
  misc_feature 1..30: note = Thyroid hormone receptor-associated protein 3 (641-650)
  source 1..30: mol_type = other RNA
caccatttcggcagctccgggatgaccctg

SEQ ID NO: 66030 - RNA, 27 nt, synthetic construct
  misc_feature 1..27: note = Beta-galactoside alpha-2,6-sialyltransferase 2 (354-362)
  source 1..27: mol_type = other RNA
caccatttcatcgacagctccctgtac

SEQ ID NO: 66031 - RNA, 27 nt, synthetic construct
  misc_feature 1..27: note = Protein virilizer homolog (679-687)
  source 1..27: mol_type = other RNA
caccatttcctggagctcgtgaccctt

SEQ ID NO: 66032 - RNA, 24 nt, synthetic construct
  misc_feature 1..24: note = L-aminoadipate-semialdehyde dehydrogenase-phosphopantetheinyl transferase (238-245)
  source 1..24: mol_type = other RNA
caccatttcgtggccgtcgctctg

SEQ ID NO: 66033 - RNA, 27 nt, synthetic construct
  misc_feature 1..27: note = PCNA-interacting partner (385-393)
  source 1..27: mol_type = other RNA
caccatggcaccagcatcctgacactc

SEQ ID NO: 66034 - RNA, 27 nt, synthetic construct
  misc_feature 1..27: note = E3 SUMO-protein ligase CBX4 (398-406)
  source 1..27: mol_type = other RNA
caccatcacgccgtgggcctgaacctc

SEQ ID NO: 66035 - RNA, 27 nt, synthetic construct
  misc_feature 1..27: note = Transcriptional repressor protein YY1 (76-84)
  source 1..27: mol_type = other RNA
caccatcaccatcacccccctatgatc

SEQ ID NO: 66036 - RNA, 30 nt, synthetic construct
  misc_feature 1..30: note = Histone deacetylase complex subunit SAP130 (202-211)
  source 1..30: mol_type = other RNA
caccatatcatgaccacaaacgtgcagatg

SEQ ID NO: 66037 - RNA, 30 nt, synthetic construct
  misc_feature 1..30: note = Vacuolar protein sorting-associated protein 11 homolog (554-563)
  source 1..30: mol_type = other RNA
caccatatccccgagcagaccacacaactg

SEQ ID NO: 66038 - RNA, 24 nt, synthetic construct
  misc_feature 1..24: note = Drebrin-like protein (362-369)
  source 1..24: mol_type = other RNA
caccatatccagggccaagggctg

SEQ ID NO: 66039 - RNA, 27 nt, synthetic construct
  misc_feature 1..27: note = Protein PRRC2B (1834-1842)
  source 1..27: mol_type = other RNA
caccatatccagagagccattggcctg

SEQ ID NO: 66040 - RNA, 27 nt, synthetic construct
  misc_feature 1..27: note = Fructose-bisphosphate aldolase A (220-228)
  source 1..27: mol_type = other RNA
caccatatctacctggagggcaccctc

SEQ ID NO: 66041 - RNA, 27 nt, synthetic construct
  misc_feature 1..27: note = Queuine tRNA-ribosyltransferase subunit QTRTD1 (365-373)
  source 1..27: mol_type = other RNA
caccatctgctcgtgaccaacgagctt

SEQ ID NO: 66042 - RNA, 27 nt, synthetic construct
  misc_feature 1..27: note = MMS19 nucleotide excision repair protein homolog (102-110)
  source 1..27: mol_type = other RNA
caccatctggtgatccccagcgtcctc

SEQ ID NO: 66043 - RNA, 27 nt, synthetic construct
  misc_feature 1..27: note = Transcription factor ETV6 (170-178)
  source 1..27: mol_type = other RNA
caccataacccccctaccatcgagctg

SEQ ID NO: 66044 - RNA, 27 nt, synthetic construct
  misc_feature 1..27: note = Eukaryotic translation initiation factor 2-alpha kinase 1 (119-127)
  source 1..27: mol_type = other RNA
caccataacagagccatcacccacctg

SEQ ID NO: 66045 - RNA, 27 nt, synthetic construct
  misc_feature 1..27: note = Fas apoptotic inhibitory molecule 3 (176-184)
  source 1..27: mol_type = other RNA
caccatagctcccccaccacacagatc

SEQ ID NO: 66046 - RNA, 27 nt, synthetic construct
  misc_feature 1..27: note = Gamma-glutamyltranspeptidase 1 (532-540)
  source 1..27: mol_type = other RNA
caccatacccagatcgccagcacattc

SEQ ID NO: 66047 - RNA, 27 nt, synthetic construct
  misc_feature 1..27: note = Zinc transporter 6 (356-364)
  source 1..27: mol_type = other RNA
caccatgtgatccccatgcctctgctc

SEQ ID NO: 66048 - RNA, 33 nt, synthetic construct
  misc_feature 1..33: note = GLTSCR1-like protein (415-425)
  source 1..33: mol_type = other RNA
caccatgtgcagaccatcaacggccaactgctc

SEQ ID NO: 66049 - RNA, 27 nt, synthetic construct
  misc_feature 1..27: note = Nucleolar RNA helicase 2 (218-226)
  source 1..27: mol_type = other RNA
caccatgtgtacagcggcaaggacctg

SEQ ID NO: 66050 - RNA, 27 nt, synthetic construct
  misc_feature 1..27: note = GMP synthase (glutamine-hydrolyzing) (22-30)
  source 1..27: mol_type = other RNA
caccattacgagggcgccgtggtcatc

SEQ ID NO: 66051 - RNA, 30 nt, synthetic construct
  misc_feature 1..30: note = GMP synthase (glutamine-hydrolyzing) (22-31)
  source 1..30: mol_type = other RNA
caccattacgagggcgccgtggtcatcctg

SEQ ID NO: 66052 - RNA, 27 nt, synthetic construct
  misc_feature 1..27: note = Membralin (447-455)
  source 1..27: mol_type = other RNA
caccattacgagctgcccgccatcctc

SEQ ID NO: 66053 - RNA, 30 nt, synthetic construct
  misc_feature 1..30: note = G/T mismatch-specific thymine DNAosylase (150-159)
  source 1..30: mol_type = other RNA
caccattaccccggccctgggaaccacttc

SEQ ID NO: 66054 - RNA, 27 nt, synthetic construct
  misc_feature 1..27: note = Suppression of tumorigenicity 18 protein (571-579)
  source 1..27: mol_type = other RNA
cacatcgccgctgcagccgcgattctg

SEQ ID NO: 66055 - RNA, 27 nt, synthetic construct
  misc_feature 1..27: note = Cytochrome b-c1 complex subunit 9 (55-63)
  source 1..27: mol_type = other RNA
cacatcaagcataaatacgagaacaag

SEQ ID NO: 66056 - RNA, 27 nt, synthetic construct
  misc_feature 1..27: note = Phosphofurin acidic cluster sorting protein 1 (734-742)
  source 1..27: mol_type = other RNA
cacaagttccccgacgaggatagctac

SEQ ID NO: 66057 - RNA, 27 nt, synthetic construct
  misc_feature 1..27: note = Heterogeneous nuclear ribonucleoproteins C1/C2 (49-57)
  source 1..27: mol_type = other RNA
cacaagggcttcgcctttgtgcagtac

SEQ ID NO: 66058 - RNA, 27 nt, synthetic construct
  misc_feature 1..27: note = 60S ribosomal protein L31 (30-38)
  source 1..27: mol_type = other RNA
cacaagagaatccatggcgtggggttc

SEQ ID NO: 66059 - RNA, 27 nt, synthetic construct
  misc_feature 1..27: note = Mitotic checkpoint serine/threonine-protein kinase BUB1 (430-438)
  source 1..27: mol_type = other RNA
cacaaggtggccaacaccagctccttc

SEQ ID NO: 66060 - RNA, 30 nt, synthetic construct; identical to SEQ ID NO: 41833
  misc_feature 1..30: note = JmjC domain-containing protein 8 (176-185)
  source 1..30: mol_type = other RNA

SEQ ID NO: 66061 - RNA, 30 nt, synthetic construct; identical to SEQ ID NO: 41834
  misc_feature 1..30: note = 40S ribosomal protein S7 (168-177)
  source 1..30: mol_type = other RNA

SEQ ID NO: 66062 - RNA, 30 nt, synthetic construct
  misc_feature 1..30: note = Histone-lysine N-methyltransferase SETD2 (1284-1293)
  source 1..30: mol_type = other RNA
cacaagtaccagcaaaacgccgagcagtat

SEQ ID NO: 66063 - RNA, 33 nt, synthetic construct
  misc_feature 1..33: note = Protein S100-A4 (17-27)
  source 1..33: mol_type = other RNA
cacaagtacagcggcaaagagggggacaagttc

SEQ ID NO: 66064 - RNA, 27 nt, synthetic construct
  misc_feature 1..27: note = Calpain-12 (697-705)
  source 1..27: mol_type = other RNA
cacctggacggcggggagggagtgatc

SEQ ID NO: 66065 - RNA, 36 nt, synthetic construct
  misc_feature 1..36: note = Tyrosine-protein kinase BAZ1B (365-376)
  source 1..36: mol_type = other RNA
cacctggaggaaatgatgaagatgatgagccccaac

SEQ ID NO: 66066 - RNA, 33 nt, synthetic construct
  misc_feature 1..33: note = Catalase (466-476)
  source 1..33: mol_type = other RNA
cacctgaaggacgcccagatcttcattcaaaaa

SEQ ID NO: 66067 - RNA, 27 nt, synthetic construct
  misc_feature 1..27: note = Neuropeptide FF receptor 1 (270-278)
  source 1..27: mol_type = other RNA
cacatgctggtgatggtcgccctcttc

SEQ ID NO: 66068 - RNA, 30 nt, synthetic construct
  misc_feature 1..30: note = AP-1 complex subunit gamma-like 2 (576-585)
  source 1..30: mol_type = other RNA
cacatgagagccgctatcctggagaagatg

SEQ ID NO: 66069 - RNA, 27 nt, synthetic construct
  misc_feature 1..27: note = Uncharacterized protein C2orf16 (1260-1268)
  source 1..27: mol_type = other RNA
cacaacctgcccgagagcgactccgaa

SEQ ID NO: 66070 - RNA, 27 nt, synthetic construct
  misc_feature 1..27: note = E3 ubiquitin-protein ligase CBL (213-221)
  source 1..27: mol_type = other RNA
caccccatcagctccggcctggaggcc

SEQ ID NO: 66071 - RNA, 27 nt, synthetic construct
  misc_feature 1..27: note = Ubiquitin-conjugating enzyme E2 variant 3 (119-127)
  source 1..27: mol_type = other RNA
caccccaagagcgtgatcgtcggcctg

SEQ ID NO: 66072 - RNA, 30 nt, synthetic construct
  misc_feature 1..30: note = Microtubule-associated protein 4 (1128-1137)
  source 1..30: mol_type = other RNA
caccccaccctgagcggcgggggagaccag

SEQ ID NO: 66073 - RNA, 27 nt, synthetic construct
  misc_feature 1..27: note = Ataxin-2-like protein (896-904)
  source 1..27: mol_type = other RNA
caccaggccggccaagctccccatctg

SEQ ID NO: 66074 - RNA, 27 nt, synthetic construct
  misc_feature 1..27: note = Programmed cell death protein 10 (162-170)
  source 1..27: mol_type = other RNA
caccagaagaaagagttcgtgaagtac

SEQ ID NO: 66075 - RNA, 30 nt, synthetic construct
  misc_feature 1..30: note = Transcription activator BRG1 (178-187)
  source 1..30: mol_type = other RNA
caccagctgagagcccaaatcatggcttac

SEQ ID NO: 66076 - RNA, 27 nt, synthetic construct
  misc_feature 1..27: note = RNA polymerase-associated protein CTR9 homolog (714-722)
  source 1..27: mol_type = other RNA
caccagaacaccgaggtggtcctgtac

SEQ ID NO: 66077 - RNA, 30 nt, synthetic construct
  misc_feature 1..30: note = Ubiquitin-conjugating enzyme E2 J1 (238-247)
  source 1..30: mol_type = other RNA
caccagcccacccaacctgtggccaagaac

SEQ ID NO: 66078 - RNA, 33 nt, synthetic construct
  misc_feature 1..33: note = 40S ribosomal protein S29 (3-13)
  source 1..33: mol_type = other RNA
caccagcaactgtactggagccatcccagaaag

SEQ ID NO: 66079 - RNA, 36 nt, synthetic construct
  misc_feature 1..36: note = MORC family CW-type zinc finger protein 3 (528-539)
  source 1..36: mol_type = other RNA
caccaggtgccccctcaaagcgagccagaatccaac

SEQ ID NO: 66080 - RNA, 27 nt, synthetic construct
  misc_feature 1..27: note = TBC1 domain family member 2B (111-119)
  source 1..27: mol_type = other RNA
cacagcgccggcgctgtgaccgtcctg

SEQ ID NO: 66081 - RNA, 27 nt, synthetic construct
  misc_feature 1..27: note = Serine palmitoyltransferase 2 (403-411)
  source 1..27: mol_type = other RNA
cacagcgccgtgtacgctacctccctg

SEQ ID NO: 66082 - RNA, 27 nt, synthetic construct
  misc_feature 1..27: note = Protein virilizer homolog (1566-1574)
  source 1..27: mol_type = other RNA
cacagcgagctggaaagatccttcctc

SEQ ID NO: 66083 - RNA, 24 nt, synthetic construct
  misc_feature 1..24: note = Hematopoietic SH2 domain-containing protein (62-69)
  source 1..24: mol_type = other RNA
cacagccatgtgggctacaccctg

SEQ ID NO: 66084 - RNA, 27 nt, synthetic construct
  misc_feature 1..27: note = Thrombospondin type-1 domain-containing protein 7B (289-297)
  source 1..27: mol_type = other RNA
cacagcaagtcctgggccatcgagatt

SEQ ID NO: 66085 - RNA, 27 nt, synthetic construct
  misc_feature 1..27: note = Paired box protein Pax-9 (196-204)
  source 1..27: mol_type = other RNA
cacagcgtgaccgacatcctgggcatt

SEQ ID NO: 66086 - RNA, 27 nt, synthetic construct
  misc_feature 1..27: note = Proteasome subunit beta type-4 (134-142)
  source 1..27: mol_type = other RNA
cacagctggctgaccagagccatgtac

SEQ ID NO: 66087 - RNA, 27 nt, synthetic construct
  misc_feature 1..27: note = E3 SUMO-protein ligase RanBP2 (3152-3160)
  source 1..27: mol_type = other RNA
cacaccggccccgggctgctcagcatg

SEQ ID NO: 66088 - RNA, 27 nt, synthetic construct
  misc_feature 1..27: note = Cytochrome b-245 heavy chain (115-123)
  source 1..27: mol_type = other RNA
cacaccatcgcccatctgttcaacgtg

SEQ ID NO: 66089 - RNA, 30 nt, synthetic construct
  misc_feature 1..30: note = Heterogeneous nuclear ribonucleoproteins A2/B1 (163-172)
  source 1..30: mol_type = other RNA
cacaccatcaacggccataatgccgaggtg

SEQ ID NO: 66090 - RNA, 30 nt, synthetic construct
  misc_feature 1..30: note = Heterogeneous nuclear ribonucleoprotein A3 (189-198)
  source 1..30: mol_type = other RNA
cacaccatcaacggccataattgcgaggtg

SEQ ID NO: 66091 - RNA, 27 nt, synthetic construct
  misc_feature 1..27: note = Mucin-3A (1830-1838)
  source 1..27: mol_type = other RNA
cacaccctgacacccagcactgccctc

SEQ ID NO: 66092 - RNA, 27 nt, synthetic construct
  misc_feature 1..27: note = Eukaryotic translation initiation factor 4 gamma 1 (354-362)
  source 1..27: mol_type = other RNA
cacaccgtggagatccatgaacccaac

SEQ ID NO: 66093 - RNA, 27 nt, synthetic construct
  misc_feature 1..27: note = Nucleoporin NUP188 homolog (1451-1459)
  source 1..27: mol_type = other RNA
cacaccgtgggcttcatcctgcagctc

SEQ ID NO: 66094 - RNA, 27 nt, synthetic construct
  misc_feature 1..27: note = 5-phosphohydroxy-L-lysine phospho-lyase (166-174)
  source 1..27: mol_type = other RNA
cacgtggcccccctgcctgacacctac

SEQ ID NO: 66095 - RNA, 30 nt, synthetic construct
  misc_feature 1..30: note = Extracellular matrix protein FRAS1 (3372-3381)
  source 1..30: mol_type = other RNA
cacgtgtgcagcaacctggtcaccacatac

SEQ ID NO: 66096 - RNA, 30 nt, synthetic construct
  misc_feature 1..30: note = Cystatin-B (58-67)
  source 1..30: mol_type = other RNA
cacgtgggcgacgaggatttcgtccatctg

SEQ ID NO: 66097 - RNA, 36 nt, synthetic construct
  misc_feature 1..36: note = Microtubule-associated protein 4 (1016-1027)
  source 1..36: mol_type = other RNA
cacgtgcccggcgggggaaacgtccagatccaaaat

SEQ ID NO: 66098 - RNA, 27 nt, synthetic construct
  misc_feature 1..27: note = Transmembrane protein 201 (96-104)
  source 1..27: mol_type = other RNA
cacgtggtcagctccgccccctctctg

SEQ ID NO: 66099 - RNA, 33 nt, synthetic construct
  misc_feature 1..33: note = Cholinesterase (154-164)
  source 1..33: mol_type = other RNA
cacgtgtacgacggcaagttcctggccagagtc

SEQ ID NO: 66100 - RNA, 27 nt, synthetic construct
  misc_feature 1..27: note = 60S ribosomal protein L26 (61-69)
  source 1..27: mol_type = other RNA
cactacaagggccagcaaatcgggaaa

SEQ ID NO: 66101 - RNA, 27 nt, synthetic construct
  misc_feature 1..27: note = HEAT repeat-containing protein 1 (578-586)
  source 1..27: mol_type = other RNA
atcgccgctgacattctgataaaggag

SEQ ID NO: 66102 - RNA, 30 nt, synthetic construct
  misc_feature 1..30: note = Protein PRRC2C (2676-2685)
  source 1..30: mol_type = other RNA
atcgccggcagaagcaccacacccacttcc

SEQ ID NO: 66103 - RNA, 27 nt, synthetic construct
  misc_feature 1..27: note = Endoplasmic reticulum lectin 1 (311-319)
  source 1..27: mol_type = other RNA
atcgccattggcagccagcccgtgctg

SEQ ID NO: 66104 - RNA, 27 nt, synthetic construct
  misc_feature 1..27: note = Monoacylglycerol lipase ABHD12 (84-92)
  source 1..27: mol_type = other RNA
atcgccattcccttcctgataaagctc

SEQ ID NO: 66105 - RNA, 27 nt, synthetic construct
  misc_feature 1..27: note = Endoplasmin (166-174)
  source 1..27: mol_type = other RNA
atcgccaagagcggcacctccgagttc

SEQ ID NO: 66106 - RNA, 27 nt, synthetic construct
  misc_feature 1..27: note = Msx2-interacting protein (613-621)
  source 1..27: mol_type = other RNA
atcgcccccaagattaccagcgtgata

SEQ ID NO: 66107 - RNA, 27 nt, synthetic construct
  misc_feature 1..27: note = Mitotic checkpoint serine/threonine-protein kinase BUB1 (382-390)
  source 1..27: mol_type = other RNA
atcgccccccctgtgccactgaaggct

SEQ ID NO: 66108 - RNA, 27 nt, synthetic construct
  misc_feature 1..27: note = Large proline-rich protein BAG6 (504-512)
  source 1..27: mol_type = other RNA
atcgccagacccacccctccacaggct

SEQ ID NO: 66109 - RNA, 27 nt, synthetic construct
  misc_feature 1..27: note = Low-density lipoprotein receptor-related protein 1B (2001-2009)
  source 1..27: mol_type = other RNA
atcgccgtgcaccccgagaagggcctg

SEQ ID NO: 66110 - RNA, 30 nt, synthetic construct
  misc_feature 1..30: note = Signal transducing adapter molecule 2 (292-301)
  source 1..30: mol_type = other RNA
atcgacgaggataagatggacagagccctg

SEQ ID NO: 66111 - RNA, 27 nt, synthetic construct
  misc_feature 1..27: note = Omega-amidase NIT2 (246-254)
  source 1..27: mol_type = other RNA
atcgacctgaagaaactcgccgagatt

SEQ ID NO: 66112 - RNA, 27 nt, synthetic construct
  misc_feature 1..27: note = DENN domain-containing protein 1A (78-86)
  source 1..27: mol_type = other RNA
atcgacagcaagcagagattcggcttt

SEQ ID NO: 66113 - RNA, 27 nt, synthetic construct
  misc_feature 1..27: note = Histone-lysine N-methyltransferase EHMT1 (1232-1240)
  source 1..27: mol_type = other RNA
atcgaggccggcgaacagctggggttc

SEQ ID NO: 66114 - RNA, 24 nt, synthetic construct
  misc_feature 1..24: note = Basic helix-loop-helix domain-containing protein KIAA2018 (1140-1147)
  source 1..24: mol_type = other RNA
atcttcgaccaggagaacctggaa

SEQ ID NO: 66115 - RNA, 27 nt, synthetic construct
  misc_feature 1..27: note = Neutral cholesterol ester hydrolase 1 (382-390)
  source 1..27: mol_type = other RNA
atcttcaccagctggcccacaaacttt

SEQ ID NO: 66116 - RNA, 27 nt, synthetic construct
  misc_feature 1..27: note = Olfactory receptor 5H15 (106-114)
  source 1..27: mol_type = other RNA
atcggcgtgaccacagagtgcttcctg

SEQ ID NO: 66117 - RNA, 27 nt, synthetic construct
  misc_feature 1..27: note = Heterogeneous nuclear ribonucleoprotein U (749-757)
  source 1..27: mol_type = other RNA
atcggctacccctatcctagagcccca

SEQ ID NO: 66118 - RNA, 27 nt, synthetic construct
  misc_feature 1..27: note = BolA-like protein 2 (67-75)
  source 1..27: mol_type = other RNA
atccacgccttcgagcagaagaccctg

SEQ ID NO: 66119 - RNA, 27 nt, synthetic construct
  misc_feature 1..27: note = Histone H3.1 (113-121)
  source 1..27: mol_type = other RNA
atccacgccaagagagtgaccattatg

SEQ ID NO: 66120 - RNA, 27 nt, synthetic construct
  misc_feature 1..27: note = Two pore calcium channel protein 1 (44-52)
  source 1..27: mol_type = other RNA
atccacgacagccaggccccctccctg

SEQ ID NO: 66121 - RNA, 27 nt, synthetic construct
  misc_feature 1..27: note = Probable ATP-dependent RNA helicase DDX41 (201-209)
  source 1..27: mol_type = other RNA
atccaccatcccacccctattcagata

SEQ ID NO: 66122 - RNA, 27 nt, synthetic construct
  misc_feature 1..27: note = T-complex protein 1 subunit eta (281-289)
  source 1..27: mol_type = other RNA
atccaccatagcggcgccaaggtggtc

SEQ ID NO: 66123 - RNA, 30 nt, synthetic construct
  misc_feature 1..30: note = T-complex protein 1 subunit eta (281-290)
  source 1..30: mol_type = other RNA
atccaccatagcggcgccaaggtggtcctg

SEQ ID NO: 66124 - RNA, 27 nt, synthetic construct
  misc_feature 1..27: note = Leucine-rich repeat-containing protein 16A (481-489)
  source 1..27: mol_type = other RNA
atccacaacattaccagcctggacata

SEQ ID NO: 66125 - RNA, 27 nt, synthetic construct
  misc_feature 1..27: note = UDP-N-acetylglucosamine-peptide N-acetylglucosaminyltransferase 110 kDa subunit (628-636)
  source 1..27: mol_type = other RNA
atccaccaggacggcattcatatactg

SEQ ID NO: 66126 - RNA, 27 nt, synthetic construct
  misc_feature 1..27: note = Calcium/calmodulin-dependent protein kinase type 1 (286-294)
  source 1..27: mol_type = other RNA
atccaccagagcgtgtccgagcaaatt

SEQ ID NO: 66127 - RNA, 30 nt, synthetic construct
  misc_feature 1..30: note = G-protein coupled receptor 98 (3507-3516)
  source 1..30: mol_type = other RNA
atccacagcttcacccccgcctccggcatt

SEQ ID NO: 66128 - RNA, 27 nt, synthetic construct
  misc_feature 1..27: note = Wee1-like protein kinase (417-425)
  source 1..27: mol_type = other RNA
atccacagcatgtccctggtgcatatg

SEQ ID NO: 66129 - RNA, 27 nt, synthetic construct
  misc_feature 1..27: note = Toll-like receptor 9 (587-595)
  source 1..27: mol_type = other RNA
atccacagccaggtgtcccaacagctg

SEQ ID NO: 66130 - RNA, 27 nt, synthetic construct
  misc_feature 1..27: note = Tumor suppressor candidate 2 (99-107)
  source 1..27: mol_type = other RNA
atccacgtggacttccccgtcattctg

SEQ ID NO: 66131 - RNA, 27 nt, synthetic construct
  misc_feature 1..27: note = DNA replication licensing factor MCM5 (694-702)
  source 1..27: mol_type = other RNA
atcattaaggacttcaccaaacagaag

SEQ ID NO: 66132 - RNA, 30 nt, synthetic construct
  misc_feature 1..30: note = Kelch-like protein 6 (114-123)
  source 1..30: mol_type = other RNA
atcattaagggcgtggacgccgagaccatg

SEQ ID NO: 66133 - RNA, 30 nt, synthetic construct
  misc_feature 1..30: note = Transcription factor Sp2 (277-286)
  source 1..30: mol_type = other RNA
atcattcaggccggcaacaatctgctcata

SEQ ID NO: 66134 - RNA, 27 nt, synthetic construct
  misc_feature 1..27: note = Stress-associated endoplasmic reticulum protein 1 (58-66)
  source 1..27: mol_type = other RNA
atcattcagagcataagaatgggcatg

SEQ ID NO: 66135 - RNA, 27 nt, synthetic construct
  misc_feature 1..27: note = HEAT repeat-containing protein 5B (1006-1014)
  source 1..27: mol_type = other RNA
atcattaccacagtgggccccgagctg

SEQ ID NO: 66136 - RNA, 27 nt, synthetic construct
  misc_feature 1..27: note = Annexin A7 (223-231)
  source 1..27: mol_type = other RNA
atcaaggccgctttcaaaaccagctac

SEQ ID NO: 66137 - RNA, 30 nt, synthetic construct
  misc_feature 1..30: note = Tetraspanin-8 (198-207)
  source 1..30: mol_type = other RNA
atcaaggacttcctggccaaaaacctcatt

SEQ ID NO: 66138 - RNA, 27 nt, synthetic construct
  misc_feature 1..27: note = Copine-3 (135-143)
  source 1..27: mol_type = other RNA
atcaaggacaacagagtggtcctgttc

SEQ ID NO: 66139 - RNA, 27 nt, synthetic construct
  misc_feature 1..27: note = AP-3 complex subunit mu-1 (102-110)
  source 1..27: mol_type = other RNA
atcaaggacaacgtggtcattgtttac

SEQ ID NO: 66140 - RNA, 27 nt, synthetic construct
  misc_feature 1..27: note = Geminin (90-98)
  source 1..27: mol_type = other RNA
atcaaggagaaccccagctcccagtac

SEQ ID NO: 66141 - RNA, 27 nt, synthetic construct
  misc_feature 1..27: note = X-ray repair cross-complementing protein 5 (647-655)
  source 1..27: mol_type = other RNA
atcaagttcagcgaggaacagagattt

SEQ ID NO: 66142 - RNA, 27 nt, synthetic construct
  misc_feature 1..27: note = Serine/threonine-protein kinase TAO1 (83-91)
  source 1..27: mol_type = other RNA
atcaagcaccccaacagcattgagtac

SEQ ID NO: 66143 - RNA, 27 nt, synthetic construct
  misc_feature 1..27: note = 60S ribosomal protein L12 (98-106)
  source 1..27: mol_type = other RNA
atcaagcacagcggcaacattaccttc

SEQ ID NO: 66144 - RNA, 27 nt, synthetic construct
  misc_feature 1..27: note = Alkyldihydroxyacetonephosphate synthase, peroxisomal (379-387)
  source 1..27: mol_type = other RNA
atcaagattagacccgtgcctgagtac

SEQ ID NO: 66145 - RNA, 27 nt, synthetic construct
  misc_feature 1..27: note = Probable ATP-dependent RNA helicase DDX52 (255-263)
  source 1..27: mol_type = other RNA
atcaagattagcgagggcaccgggttc

SEQ ID NO: 66146 - RNA, 27 nt, synthetic construct
  misc_feature 1..27: note = Nucleolar and spindle-associated protein 1 (108-116)
  source 1..27: mol_type = other RNA
atcaagattagcaaccccaccgagttc

SEQ ID NO: 66147 - RNA, 27 nt, synthetic construct
  misc_feature 1..27: note = Serine/threonine-protein kinase 17A (79-87)
  source 1..27: mol_type = other RNA
atcaagaaagacagcggcaaggagttc

SEQ ID NO: 66148 - RNA, 27 nt, synthetic construct
  misc_feature 1..27: note = Dynein light chain 1, cytoplasmic (42-50)
  source 1..27: mol_type = other RNA
atcaagaaagagttcgacaagaaatac

SEQ ID NO: 66149 - RNA, 27 nt, synthetic construct
  misc_feature 1..27: note = Endoplasmin (472-480)
  source 1..27: mol_type = other RNA
atcaagaaaattgccgacgataagtac

SEQ ID NO: 66150 - RNA, 30 nt, synthetic construct
  misc_feature 1..30: note = Elongation factor 2 (570-579)
  source 1..30: mol_type = other RNA
atcaagaaaagcgaccccgtggtctcctac

SEQ ID NO: 66151 - RNA, 27 nt, synthetic construct
  misc_feature 1..27: note = DNA ligase 1 (608-616)
  source 1..27: mol_type = other RNA
atcaagctgcccagcgtgacctccttc

SEQ ID NO: 66152 - RNA, 27 nt, synthetic construct
  misc_feature 1..27: note = Acetyl-coenzyme A transporter 1 (305-313)
  source 1..27: mol_type = other RNA
atcaagatgcccgccgtgctgaccttc

SEQ ID NO: 66153 - RNA, 27 nt, synthetic construct
  misc_feature 1..27: note = Ribulose-phosphate 3-epimerase (119-127)
  source 1..27: mol_type = other RNA
atcaagcccggcaccagcgtggagtac

SEQ ID NO: 66154 - RNA, 24 nt, synthetic construct
  misc_feature 1..24: note = Serine/threonine-protein kinase tousled-like 1 (482-489)
  source 1..24: mol_type = other RNA
atcaagccccctattatacactac

SEQ ID NO: 66155 - RNA, 30 nt, synthetic construct
  misc_feature 1..30: note = Eukaryotic translation initiation factor 5B (366-375)
  source 1..30: mol_type = other RNA
atcaagagactggaggaactcgaggccaaa

SEQ ID NO: 66156 - RNA, 27 nt, synthetic construct
  misc_feature 1..27: note = F-box only protein 11 (714-722)
  source 1..27: mol_type = other RNA
atcaagaccgacagcaaccccacactg

SEQ ID NO: 66157 - RNA, 30 nt, synthetic construct
  misc_feature 1..30: note = 60S ribosomal protein L11 (117-126)
  source 1..30: mol_type = other RNA
atcaagtacgaccccagcattggcatatat

SEQ ID NO: 66158 - RNA, 27 nt, synthetic construct
  misc_feature 1..27: note = Ubiquitin carboxyl-terminal hydrolase 40 (723-731)
  source 1..27: mol_type = other RNA
atcctgattcaggacagccacgatgac

SEQ ID NO: 66159 - RNA, 27 nt, synthetic construct
  misc_feature 1..27: note = E3 ubiquitin-protein ligase UBR4 (654-662)
  source 1..27: mol_type = other RNA
atcctgaacttcattaccagctccatg

SEQ ID NO: 66160 - RNA, 27 nt, synthetic construct
  misc_feature 1..27: note = ATP-dependent RNA helicase DDX18 (529-537)
  source 1..27: mol_type = other RNA
atcctgagacccgaggaactcggcttc

SEQ ID NO: 66161 - RNA, 33 nt, synthetic construct
  misc_feature 1..33: note = Trace amine-associated receptor 6 (212-222)
  source 1..33: mol_type = other RNA
atcatgattatactgtacggcaacatcttcctc

SEQ ID NO: 66162 - RNA, 27 nt, synthetic construct
  misc_feature 1..27: note = DNA polymerase delta subunit 2 (258-266)
  source 1..27: mol_type = other RNA
atcaacaaggccaaatacctgaccaag

SEQ ID NO: 66163 - RNA, 27 nt, synthetic construct
  misc_feature 1..27: note = 40S ribosomal protein S18 (5-13)
  source 1..27: mol_type = other RNA
atccccgagaagttccagcacattctg

SEQ ID NO: 66164 - RNA, 27 nt, synthetic construct
  misc_feature 1..27: note = Nuclear factor of activated T-cells, cytoplasmic 2 (331-339)
  source 1..27: mol_type = other RNA
atccccgagagctccggcagaattgtg

SEQ ID NO: 66165 - RNA, 24 nt, synthetic construct
  misc_feature 1..24: note = Nuclear factor erythroid 2-related factor 2 (443-450)
  source 1..24: mol_type = other RNA
atccccttccctgtggagaagatt

SEQ ID NO: 66166 - RNA, 27 nt, synthetic construct
  misc_feature 1..27: note = Tetra-peptide repeat homeobox protein 1 (109-117)
  source 1..27: mol_type = other RNA
atccccggccctctgccagggagcatt

SEQ ID NO: 66167 - RNA, 27 nt, synthetic construct
  misc_feature 1..27: note = DNA replication licensing factor MCM6 (79-87)
  source 1..27: mol_type = other RNA
atccaggaggaattctacagagtgtat

SEQ ID NO: 66168 - RNA, 33 nt, synthetic construct
  misc_feature 1..33: note = Poly (ADP-ribose) polymerase 8 (10-20)
  source 1..33: mol_type = other RNA
atccagaaggacattgatgtggtcatacaaaaa

SEQ ID NO: 66169 - RNA, 27 nt, synthetic construct
  misc_feature 1..27: note = DNA-directed RNA polymerase II subunit RPB4 (134-142)
  source 1..27: mol_type = other RNA
atccagaccaagagaagcttccaatac

SEQ ID NO: 66170 - RNA, 27 nt, synthetic construct
  misc_feature 1..27: note = Serine/threonine-protein phosphatase 4 regulatory subunit 2 (40-48)
  source 1..27: mol_type = other RNA
atccagtggagccaattcaagggctac

SEQ ID NO: 66171 - RNA, 27 nt, synthetic construct
  misc_feature 1..27: note = Maestro heat-like repeat-containing protein family member 1 (525-533)
  source 1..27: mol_type = other RNA
atccagtacgacgcccacgctagcctg

SEQ ID NO: 66172 - RNA, 27 nt, synthetic construct
  misc_feature 1..27: note = Protein capicua homolog (862-870)
  source 1..27: mol_type = other RNA
atcagattcaccctgccccctggcaca

SEQ ID NO: 66173 - RNA, 30 nt, synthetic construct
  misc_feature 1..30: note = Inactive serine/threonine-protein kinase VRK3 (422-431)
  source 1..30: mol_type = other RNA
atcagacccagcgagaccctgcagaagtac

SEQ ID NO: 66174 - RNA, 27 nt, synthetic construct
  misc_feature 1..27: note = Sphingomyelin phosphodiesterase 3 (179-187)
  source 1..27: mol_type = other RNA
atcagcgccgcttccttctcttcactg

SEQ ID NO: 66175 - RNA, 27 nt, synthetic construct
  misc_feature 1..27: note = Sodium channel protein type 5 subunit alpha (1758-1766)
  source 1..27: mol_type = other RNA
atcagcttcctgattgtggtcaacatg

SEQ ID NO: 66176 - RNA, 27 nt, synthetic construct
  misc_feature 1..27: note = Calsyntenin-1 (783-791)
  source 1..27: mol_type = other RNA
atcagcaacgagttcaaggtggaagtc

SEQ ID NO: 66177 - RNA, 30 nt, synthetic construct; identical to SEQ ID NO: 41950
  misc_feature 1..30: note = Calcineurin subunit B type 2 (107-116)
  source 1..30: mol_type = other RNA

SEQ ID NO: 66178 - RNA, 27 nt, synthetic construct
  misc_feature 1..27: note = AT-rich interactive domain-containing protein 2 (1322-1330)
  source 1..27: mol_type = other RNA
atcagcaacggcccctccctggagctc

SEQ ID NO: 66179 - RNA, 27 nt, synthetic construct
  misc_feature 1..27: note = THUMP domain-containing protein 3 (77-85)
  source 1..27: mol_type = other RNA
atcagcgtggagtccctggcccaggtc

SEQ ID NO: 66180 - RNA, 27 nt, synthetic construct
  misc_feature 1..27: note = Methylcrotonoyl-CoA carboxylase subunit alpha, mitochondrial (547-555)
  source 1..27: mol_type = other RNA
atcagctacaccagaaacatgacactg

SEQ ID NO: 66181 - RNA, 27 nt, synthetic construct
  misc_feature 1..27: note = Kelch repeat and BTB domain-containing protein 12 (77-85)
  source 1..27: mol_type = other RNA
atcaccgccgagagcgtgtccgtcctg

SEQ ID NO: 66182 - RNA, 27 nt, synthetic construct
  misc_feature 1..27: note = Titin (15022-15030)
  source 1..27: mol_type = other RNA
atcaccaagaacacagccgacctgaaa

SEQ ID NO: 66183 - RNA, 33 nt, synthetic construct
  misc_feature 1..33: note = Elongation factor 1-alpha 1 (170-180)
  source 1..33: mol_type = other RNA
atcgtgaaggaggtcagcacctacattaaaaag

SEQ ID NO: 66184 - RNA, 27 nt, synthetic construct
  misc_feature 1..27: note = Nucleolar protein 58 (41-49)
  source 1..27: mol_type = other RNA
atcgtgaagctgaaacacttcgagaag

SEQ ID NO: 66185 - RNA, 27 nt, synthetic construct
  misc_feature 1..27: note = NADH dehydrogenase (ubiquinone) 1 beta subcomplex subunit 1 (7-15)
  source 1..27: mol_type = other RNA
atcgtgagagaccactgggtccatgtt

SEQ ID NO: 66186 - RNA, 27 nt, synthetic construct
  misc_feature 1..27: note = Serine/threonine-protein kinase RIO1 (209-217)
  source 1..27: mol_type = other RNA
atctacaagaccagcattctggtgttc

SEQ ID NO: 66187 - RNA, 27 nt, synthetic construct
  misc_feature 1..27: note = 60S ribosomal protein L4 (269-277)
  source 1..27: mol_type = other RNA
aaggccgctagcctgaaatccaactac

SEQ ID NO: 66188 - RNA, 27 nt, synthetic construct
  misc_feature 1..27: note = Pre-mRNA-splicing factor SYF2 (221-229)
  source 1..27: mol_type = other RNA
aaggccgagagattctacggcaaatat

SEQ ID NO: 66189 - RNA, 27 nt, synthetic construct
  misc_feature 1..27: note = Zinc finger protein 215 (386-394)
  source 1..27: mol_type = other RNA
aaggccttctgcagaagctcctctctg

SEQ ID NO: 66190 - RNA, 27 nt, synthetic construct
  misc_feature 1..27: note = Integrin alpha-4 (236-244)
  source 1..27: mol_type = other RNA
aaggccttcctggacaaacagaaccaa

SEQ ID NO: 66191 - RNA, 27 nt, synthetic construct
  misc_feature 1..27: note = Spermatid perinuclear RNA-binding protein (384-392)
  source 1..27: mol_type = other RNA
aaggccatcgacctgatgaacgctctc

SEQ ID NO: 66192 - RNA, 27 nt, synthetic construct
  misc_feature 1..27: note = Collagen alpha-6(VI) chain (501-509)
  source 1..27: mol_type = other RNA
aaggccatcgagaacattagacagatg

SEQ ID NO: 66193 - RNA, 27 nt, synthetic construct
  misc_feature 1..27: note = T-complex protein 1 subunit gamma (163-171)
  source 1..27: mol_type = other RNA
aaggccatcagcagatggtcctctctg

SEQ ID NO: 66194 - RNA, 27 nt, synthetic construct
  misc_feature 1..27: note = 60S ribosomal protein L7 (53-61)
  source 1..27: mol_type = other RNA
aaggccaaacactaccataaggagtat

SEQ ID NO: 66195 - RNA, 27 nt, synthetic construct
  misc_feature 1..27: note = N(G),N(G)-dimethylarginine dimethylaminohydrolase 1 (196-204)
  source 1..27: mol_type = other RNA
aaggccctgaaaatcatgcagcaaatg

SEQ ID NO: 66196 - RNA, 27 nt, synthetic construct
  misc_feature 1..27: note = Zinc finger protein 491 (250-258)
  source 1..27: mol_type = other RNA
aaggccctgagcagactcatctccttc

SEQ ID NO: 66197 - RNA, 27 nt, synthetic construct
  misc_feature 1..27: note = Inositol 1,4,5-trisphosphate receptor type 3 (2312-2320)
  source 1..27: mol_type = other RNA
aaggccatggtgatggacatggagttc

SEQ ID NO: 66198 - RNA, 30 nt, synthetic construct
  misc_feature 1..30: note = Mid1-interacting protein 1 (164-173)
  source 1..30: mol_type = other RNA
aaggccaacatcctgaccaatagatacaaa

SEQ ID NO: 66199 - RNA, 27 nt, synthetic construct
  misc_feature 1..27: note = Phosphoenolpyruvate carboxykinase, cytosolic (GTP) (547-555)
  source 1..27: mol_type = other RNA
aaggccagcaccaaactgacacccatc

SEQ ID NO: 66200 - RNA, 27 nt, synthetic construct
  misc_feature 1..27: note = Zinc finger protein 726 (174-182)
  source 1..27: mol_type = other RNA
aagtgcaaaaactgtgtgaagagcttc

SEQ ID NO: 66201 - RNA, 27 nt, synthetic construct
  misc_feature 1..27: note = PDZ domain-containing protein 8 (559-567)
  source 1..27: mol_type = other RNA
aaggacggcaacaaaccccctccactg

SEQ ID NO: 66202 - RNA, 27 nt, synthetic construct
  misc_feature 1..27: note = Zinc finger protein 470 (79-87)
  source 1..27: mol_type = other RNA
aaggacccctgggtgatcaaaggcggg

SEQ ID NO: 66203 - RNA, 27 nt, synthetic construct
  misc_feature 1..27: note = HIV Tat-specific factor 1 (234-242)
  source 1..27: mol_type = other RNA
aaggactacaaaaagaaactgagcatg

SEQ ID NO: 66204 - RNA, 27 nt, synthetic construct
  misc_feature 1..27: note = Glucose-6-phosphate translocase (212-220)
  source 1..27: mol_type = other RNA
aaggaggaaagcaccctgcaggagctc

SEQ ID NO: 66205 - RNA, 27 nt, synthetic construct
  misc_feature 1..27: note = Protein bassoon (2970-2978)
  source 1..27: mol_type = other RNA
aaggagatcgacgccaaactgaagtac

SEQ ID NO: 66206 - RNA, 27 nt, synthetic construct
  misc_feature 1..27: note = Nuclear fragile X mental retardation-interacting protein 2 (667-675)
  source 1..27: mol_type = other RNA
aaggagatggaaagcatctggaacctg

SEQ ID NO: 66207 - RNA, 27 nt, synthetic construct
  misc_feature 1..27: note = Desmoplakin (423-431)
  source 1..27: mol_type = other RNA
aaggagagagaaaaaatcctggagtac

SEQ ID NO: 66208 - RNA, 27 nt, synthetic construct
  misc_feature 1..27: note = Protein FAM91A1 (752-760)
  source 1..27: mol_type = other RNA
aaggagagcctgcagaacctccttcac

SEQ ID NO: 66209 - RNA, 27 nt, synthetic construct
  misc_feature 1..27: note = Complement C4-A (189-197)
  source 1..27: mol_type = other RNA
aaggaggtgtacatgcccagctccatc

SEQ ID NO: 66210 - RNA, 30 nt, synthetic construct
  misc_feature 1..30: note = Heterogeneous nuclear ribonucleoprotein U (565-574)
  source 1..30: mol_type = other RNA
aagttcatcgagattgccgctagaaaaaag

SEQ ID NO: 66211 - RNA, 27 nt, synthetic construct
  misc_feature 1..27: note = Ciliogenesis-associated TTC17-interacting protein (302-310)
  source 1..27: mol_type = other RNA
aagttcctggacagaaaagaggaactc

SEQ ID NO: 66212 - RNA, 30 nt, synthetic construct
  misc_feature 1..30: note = Heparan-sulfate 6-O-sulfotransferase 2 (519-528)
  source 1..30: mol_type = other RNA
aagttcctgaaaggcagactccttcagacc

SEQ ID NO: 66213 - RNA, 30 nt, synthetic construct
  misc_feature 1..30: note = 78 kDa glucose-regulated protein (113-122)
  source 1..30: mol_type = other RNA
aagttcctgccctttaaagtggtcgagaag

SEQ ID NO: 66214 - RNA, 27 nt, synthetic construct
  misc_feature 1..27: note = Protein SON (16-24)
  source 1..27: mol_type = other RNA
aagttcagagagatccagcaagaactg

SEQ ID NO: 66215 - RNA, 30 nt, synthetic construct
  misc_feature 1..30: note = Mothers against decapentaplegic homolog 9 (159-168)
  source 1..30: mol_type = other RNA
aagttcagaagcgcctccctgcactctgag

SEQ ID NO: 66216 - RNA, 33 nt, synthetic construct; identical to SEQ ID NO: 41989
  misc_feature 1..33: note = Stabilin-2 (1755-1765)
  source 1..33: mol_type = other RNA

SEQ ID NO: 66217 - RNA, 27 nt, synthetic construct
  misc_feature 1..27: note = Desmoglein-2 (639-647)
  source 1..27: mol_type = other RNA
aagggcgccaaagggttcacccccatc

SEQ ID NO: 66218 - RNA, 27 nt, synthetic construct
  misc_feature 1..27: note = Tumor necrosis factor ligand superfamily member 11 (257-265)
  source 1..27: mol_type = other RNA
aagggcgggagcaccaaatactggtcc

SEQ ID NO: 66219 - RNA, 33 nt, synthetic construct
  misc_feature 1..33: note = Arginase-1 (153-163)
  source 1..33: mol_type = other RNA
aagggcaaaatccccgacgtgcctgggttcagc

SEQ ID NO: 66220 - RNA, 30 nt, synthetic construct
  misc_feature 1..30: note = Casein kinase I isoform delta (242-251)
  source 1..30: mol_type = other RNA
aagggctaccccagcgagttcgccacctat

SEQ ID NO: 66221 - RNA, 33 nt, synthetic construct
  misc_feature 1..33: note = 40S ribosomal protein S17 (49-59)
  source 1..33: mol_type = other RNA
aagatcgccggctacgtgacccacctgatgaaa

SEQ ID NO: 66222 - RNA, 27 nt, synthetic construct
  misc_feature 1..27: note = Repetin (489-497)
  source 1..27: mol_type = other RNA
aagatcgacagacaggatcaaagctac

SEQ ID NO: 66223 - RNA, 27 nt, synthetic construct
  misc_feature 1..27: note = T-complex protein 1 subunit eta (135-143)
  source 1..27: mol_type = other RNA
aagatcaaagagattgccgtgaccgtc

SEQ ID NO: 66224 - RNA, 27 nt, synthetic construct
  misc_feature 1..27: note = V-type proton ATPase catalytic subunit A (596-604)
  source 1..27: mol_type = other RNA
aagatcaaaagcgactacgcccagctg

SEQ ID NO: 66225 - RNA, 27 nt, synthetic construct
  misc_feature 1..27: note = Potassium-transporting ATPase alpha chain 1 (737-745)
  source 1..27: mol_type = other RNA
aagaaagccgacatcggcgtggctatg

SEQ ID NO: 66226 - RNA, 27 nt, synthetic construct
  misc_feature 1..27: note = Histone H1.4 (63-71)
  source 1..27: mol_type = other RNA
aagaaagccctggctgcagccggctac

SEQ ID NO: 66227 - RNA, 27 nt, synthetic construct
  misc_feature 1..27: note = Ezrin (262-270)
  source 1..27: mol_type = other RNA
aagaaagcccccgacttcgtgttttac

SEQ ID NO: 66228 - RNA, 27 nt, synthetic construct
  misc_feature 1..27: note = C1GALT1-specific chaperone 1 (160-168)
  source 1..27: mol_type = other RNA
aagaaagaccccagccagcctttctac

SEQ ID NO: 66229 - RNA, 27 nt, synthetic construct
  misc_feature 1..27: note = Cofilin-1 (95-103)
  source 1..27: mol_type = other RNA
aagaaagaggacctggtgttcatcttt

SEQ ID NO: 66230 - RNA, 30 nt, synthetic construct
  misc_feature 1..30: note = 116 kDa U5 small nuclear ribonucleoprotein component (421-430)
  source 1..30: mol_type = other RNA
aagaaattctttggcgagttcaccgggttt

SEQ ID NO: 66231 - RNA, 27 nt, synthetic construct
  misc_feature 1..27: note = Squalene monooxygenase (15-23)
  source 1..27: mol_type = other RNA
aagaaattcggcgactttatcaccctg

SEQ ID NO: 66232 - RNA, 27 nt, synthetic construct
  misc_feature 1..27: note = UPF0729 protein C18orf32 (17-25)
  source 1..27: mol_type = other RNA
aagaaattcctggagccctacatctat

SEQ ID NO: 66233 - RNA, 27 nt, synthetic construct
  misc_feature 1..27: note = Cholesterol 24-hydroxylase (94-102)
  source 1..27: mol_type = other RNA
aagaaattcctgatgagcaccaagtac

SEQ ID NO: 66234 - RNA, 33 nt, synthetic construct
  misc_feature 1..33: note = Spermidine synthase (134-144)
  source 1..33: mol_type = other RNA
aagaaattcctgcccggcatggccatcgggtac

SEQ ID NO: 66235 - RNA, 30 nt, synthetic construct
  misc_feature 1..30: note = Probable global transcription activator SNF2L2 (1110-1119)
  source 1..30: mol_type = other RNA
aagaaattcaacgagcccggcagccagtac

SEQ ID NO: 66236 - RNA, 30 nt, synthetic construct
  misc_feature 1..30: note = TRAF-interacting protein with FHA domain-containing protein A (76-85)
  source 1..30: mol_type = other RNA
aagaaattcaacagctccgtgctgtctttt

SEQ ID NO: 66237 - RNA, 36 nt, synthetic construct
  misc_feature 1..36: note = Nicotinamide phosphoribosyltransferase (330-341)
  source 1..36: mol_type = other RNA
aagaaattccccgtgaccgagaacagcaagggctac

SEQ ID NO: 66238 - RNA, 33 nt, synthetic construct
  misc_feature 1..33: note = Cell cycle progression protein 1 (523-533)
  source 1..33: mol_type = other RNA
aagaaattcagcgactccgtgaagtctaccttt

SEQ ID NO: 66239 - RNA, 30 nt, synthetic construct
  misc_feature 1..30: note = 40S ribosomal protein S7 (85-94)
  source 1..30: mol_type = other RNA
aagaaattcagcggcaagcacgtggtcttt

SEQ ID NO: 66240 - RNA, 33 nt, synthetic construct
  misc_feature 1..33: note = Lupus La protein (165-175)
  source 1..33: mol_type = other RNA
aagaaattcgtggagacccccggccagaagtac

SEQ ID NO: 66241 - RNA, 27 nt, synthetic construct
  misc_feature 1..27: note = Zinc finger protein 451 (219-227)
  source 1..27: mol_type = other RNA
aagaaattcgtgacccagcaacagtac

SEQ ID NO: 66242 - RNA, 27 nt, synthetic construct
  misc_feature 1..27: note = Melanoma inhibitory activity protein 3 (67-75)
  source 1..27: mol_type = other RNA
aagaaaggcgaccccgtgtacgtctat

SEQ ID NO: 66243 - RNA, 27 nt, synthetic construct
  misc_feature 1..27: note = Protein FAM173B (108-116)
  source 1..27: mol_type = other RNA
aagaaaggcttcaccgccgtggggtac

SEQ ID NO: 66244 - RNA, 27 nt, synthetic construct
  misc_feature 1..27: note = SEC14-like protein 1 (157-165)
  source 1..27: mol_type = other RNA
aagaaaggcaaggagatcattgaatac

SEQ ID NO: 66245 - RNA, 27 nt, synthetic construct
  misc_feature 1..27: note = Na(+)/H(+) exchange regulatory cofactor NHE-RF1 (158-166)
  source 1..27: mol_type = other RNA
aagaaaggccccagcgggtacggattc

SEQ ID NO: 66246 - RNA, 27 nt, synthetic construct
  misc_feature 1..27: note = Serine/threonine-protein kinase RIO3 (353-361)
  source 1..27: mol_type = other RNA
aagaaacacatcctggtgatgagcttc

SEQ ID NO: 66247 - RNA, 27 nt, synthetic construct
  misc_feature 1..27: note = Heat shock protein HSP 90-beta (203-211)
  source 1..27: mol_type = other RNA
aagaaacacagccagttcatcggctac

SEQ ID NO: 66248 - RNA, 27 nt, synthetic construct
  misc_feature 1..27: note = Dynactin subunit 3 (59-67)
  source 1..27: mol_type = other RNA
aagaaaatcgaggacctgattaagtac

SEQ ID NO: 66249 - RNA, 27 nt, synthetic construct
  misc_feature 1..27: note = 60S ribosomal protein L23a (88-96)
  source 1..27: mol_type = other RNA
aagaaaatcgaggacaacaataccctg

SEQ ID NO: 66250 - RNA, 30 nt, synthetic construct
  misc_feature 1..30: note = Nardilysin (992-1001)
  source 1..30: mol_type = other RNA
aagaaaatcgaggaattcctgagctccttt

SEQ ID NO: 66251 - RNA, 27 nt, synthetic construct
  misc_feature 1..27: note = Leydig cell tumor 10 kDa protein homolog (59-67)
  source 1..27: mol_type = other RNA
aagaaaatcgagcacgacgtggtcatg

SEQ ID NO: 66252 - RNA, 27 nt, synthetic construct
  misc_feature 1..27: note = Brain-specific angiogenesis inhibitor 1-associated protein 2-like protein 1 (106-114)
  source 1..27: mol_type = other RNA
aagaaaatcgagctggacgtgaagtac

SEQ ID NO: 66253 - RNA, 30 nt, synthetic construct
  misc_feature 1..30: note = General transcription factor 3C polypeptide 4 (563-572)
  source 1..30: mol_type = other RNA
aagaaaatcgagagctccggcgtgacctac

SEQ ID NO: 66254 - RNA, 30 nt, synthetic construct
  misc_feature 1..30: note = T-complex protein 1 subunit gamma (353-362)
  source 1..30: mol_type = other RNA
aagaaaatcggcgacgagtacttcaccttt

SEQ ID NO: 66255 - RNA, 27 nt, synthetic construct
  misc_feature 1..27: note = Gamma-interferon-inducible protein 16 (256-264)
  source 1..27: mol_type = other RNA
aagaaaatcattataatcagcgactac

SEQ ID NO: 66256 - RNA, 27 nt, synthetic construct
  misc_feature 1..27: note = Synaptojanin-2 (121-129)
  source 1..27: mol_type = other RNA
aagaaaatcctgagctccggcgtgttc

SEQ ID NO: 66257 - RNA, 27 nt, synthetic construct
  misc_feature 1..27: note = Golgin-45 (320-328)
  source 1..27: mol_type = other RNA
aagaaaatccccagcaccgtggagttc

SEQ ID NO: 66258 - RNA, 27 nt, synthetic construct
  misc_feature 1..27: note = RNA exonuclease 4 (342-350)
  source 1..27: mol_type = other RNA
aagaaaatcagagacacccagaagtac

SEQ ID NO: 66259 - RNA, 27 nt, synthetic construct
  misc_feature 1..27: note = 60S ribosomal protein L23a (38-46)
  source 1..27: mol_type = other RNA
aagaaaatcagaaccagccccacattc

SEQ ID NO: 66260 - RNA, 27 nt, synthetic construct
  misc_feature 1..27: note = Stress-induced-phosphoprotein 1 (237-245)
  source 1..27: mol_type = other RNA
aagaaaaaggacttcgataccgccctg

SEQ ID NO: 66261 - RNA, 30 nt, synthetic construct
  misc_feature 1..30: note = Protein DEK (143-152)
  source 1..30: mol_type = other RNA
aagaaaaaggaggaaatgctgaaaaagttc

SEQ ID NO: 66262 - RNA, 27 nt, synthetic construct
  misc_feature 1..27: note = Protein KIAA2022 (1378-1386)
  source 1..27: mol_type = other RNA
aagaaaaagatcaacagcggctcccag

SEQ ID NO: 66263 - RNA, 27 nt, synthetic construct
  misc_feature 1..27: note = Regulatory factor X-associated protein (175-183)
  source 1..27: mol_type = other RNA
aagaaaaagaaaagcgaccaggccctg

SEQ ID NO: 66264 - RNA, 27 nt, synthetic construct
  misc_feature 1..27: note = UBX domain-containing protein 4 (377-385)
  source 1..27: mol_type = other RNA
aagaaaaagctgctcgaccttgagctg

SEQ ID NO: 66265 - RNA, 30 nt, synthetic construct
  misc_feature 1..30: note = Prefoldin subunit 3 (51-60)
  source 1..30: mol_type = other RNA
aagaaactggacgagcagtaccaaaagtat

SEQ ID NO: 66266 - RNA, 30 nt, synthetic construct
  misc_feature 1..30: note = Non-specific lipid-transfer protein (442-451)
  source 1..30: mol_type = other RNA
aagaaactggaggaagagggcgaacagttc

SEQ ID NO: 66267 - RNA, 30 nt, synthetic construct
  misc_feature 1..30: note = Alpha-taxilin (423-432)
  source 1..30: mol_type = other RNA
aagaaactggagaaggaaaccacaatgtac

SEQ ID NO: 66268 - RNA, 27 nt, synthetic construct
  misc_feature 1..27: note = Mitogen-activated protein kinase kinase kinase 1 (792-800)
  source 1..27: mol_type = other RNA
aagaaactgctcagccttctgaccttc

SEQ ID NO: 66269 - RNA, 30 nt, synthetic construct
  misc_feature 1..30: note = Cold shock domain-containing protein E1 (411-420)
  source 1..30: mol_type = other RNA
aagaaactgcccaagggcaccgtgagcttc

SEQ ID NO: 66270 - RNA, 27 nt, synthetic construct
  misc_feature 1..27: note = Hexokinase-2 (146-154)
  source 1..27: mol_type = other RNA
aagaaactgcccctcggcttcaccttt

SEQ ID NO: 66271 - RNA, 27 nt, synthetic construct
  misc_feature 1..27: note = 14-3-3 protein theta (74-82)
  source 1..27: mol_type = other RNA
aagaaactgcagctcatcaaggactac

SEQ ID NO: 66272 - RNA, 27 nt, synthetic construct
  misc_feature 1..27: note = Nibrin (236-244)
  source 1..27: mol_type = other RNA
aagaaactgagctccgccgtggtcttc

SEQ ID NO: 66273 - RNA, 30 nt, synthetic construct
  misc_feature 1..30: note = Clustered mitochondria protein homolog (294-303)
  source 1..30: mol_type = other RNA
aagaaaaacttcgccgtgctgcagaagaaa

SEQ ID NO: 66274 - RNA, 27 nt, synthetic construct
  misc_feature 1..27: note = General transcription factor II-I (644-652)
  source 1..27: mol_type = other RNA
aagaaacccgagctggtgatcagctac

SEQ ID NO: 66275 - RNA, 30 nt, synthetic construct
  misc_feature 1..30: note = SUMO-activating enzyme subunit 1 (117-126)
  source 1..30: mol_type = other RNA
aagaaacccgagagcttctttacccagttc

SEQ ID NO: 66276 - RNA, 27 nt, synthetic construct
  misc_feature 1..27: note = Poly(ADP-ribose)ohydrolase (689-697)
  source 1..27: mol_type = other RNA
aagaaacccaccggcctggtgacattc

SEQ ID NO: 66277 - RNA, 27 nt, synthetic construct
  misc_feature 1..27: note = DnaJ homolog subfamily C member 3 (406-414)
  source 1..27: mol_type = other RNA
aagaaacaggagatcattaaggcctac

SEQ ID NO: 66278 - RNA, 30 nt, synthetic construct
  misc_feature 1..30: note = Ankyrin repeat domain-containing protein 17 (1650-1659)
  source 1..30: mol_type = other RNA
aagaaacagcccagcgtgctggtcaccttc

SEQ ID NO: 66279 - RNA, 27 nt, synthetic construct
  misc_feature 1..27: note = Transmembrane emp24 domain-containing protein 3 (82-90)
  source 1..27: mol_type = other RNA
aagaaacagtacgacagcttcacctat

SEQ ID NO: 66280 - RNA, 30 nt, synthetic construct
  misc_feature 1..30: note = Heterogeneous nuclear ribonucleoproteins A2/B1 (151-160)
  source 1..30: mol_type = other RNA
aagaaaagaggcttcgggtttgtgaccttc

SEQ ID NO: 66281 - RNA, 27 nt, synthetic construct
  misc_feature 1..27: note = Heterogeneous nuclear ribonucleoproteins C1/C2 (29-37)
  source 1..27: mol_type = other RNA
aagaaaagcgacgtggaggccatcttc

SEQ ID NO: 66282 - RNA, 27 nt, synthetic construct
  misc_feature 1..27: note = RNA-binding protein Raly (34-42)
  source 1..27: mol_type = other RNA
aagaaaagcgacgtggagaccatcttc

SEQ ID NO: 66283 - RNA, 27 nt, synthetic construct
  misc_feature 1..27: note = Endoplasmin (404-412)
  source 1..27: mol_type = other RNA
aagaaaagcgactacatcaagctgtat

SEQ ID NO: 66284 - RNA, 27 nt, synthetic construct
  misc_feature 1..27: note = Exocyst complex component 2 (196-204)
  source 1..27: mol_type = other RNA
aagaaaagcgagggctccctggcctac

SEQ ID NO: 66285 - RNA, 24 nt, synthetic construct
  misc_feature 1..24: note = ATPase family AAA domain-containing protein 5 (1559-1566)
  source 1..24: mol_type = other RNA
aagaaaagccagaagaaaaagcaa

SEQ ID NO: 66286 - RNA, 27 nt, synthetic construct
  misc_feature 1..27: note = 60S ribosomal protein L18a (55-63)
  source 1..27: mol_type = other RNA
aagaaaagctccggcgagatcgtgtac

SEQ ID NO: 66287 - RNA, 27 nt, synthetic construct
  misc_feature 1..27: note = Copper transport protein ATOX1 (56-64)
  source 1..27: mol_type = other RNA
aagaaaaccggcaagacagtgagctac

SEQ ID NO: 66288 - RNA, 27 nt, synthetic construct
  misc_feature 1..27: note = Melanoma-associated antigen 1 (104-112)
  source 1..27: mol_type = other RNA
aagaaagtggccgacctggtcggcttc

SEQ ID NO: 66289 - RNA, 27 nt, synthetic construct
  misc_feature 1..27: note = ATP-dependent RNA helicase DDX18 (647-655)
  source 1..27: mol_type = other RNA
aagaaagtggagaagagcaaaatcttc

SEQ ID NO: 66290 - RNA, 27 nt, synthetic construct
  misc_feature 1..27: note = Polyadenylate-binding protein 1 (268-276)
  source 1..27: mol_type = other RNA
aagaaagtggagagacagaccgaactg

SEQ ID NO: 66291 - RNA, 30 nt, synthetic construct
  misc_feature 1..30: note = Asparagine synthetase (glutamine-hydrolyzing) (131-140)
  source 1..30: mol_type = other RNA
aagaaagtgttcctgggcagagacacctac

SEQ ID NO: 66292 - RNA, 27 nt, synthetic construct
  misc_feature 1..27: note = 60S ribosomal protein L37a (6-14)
  source 1..27: mol_type = other RNA
aagaaagtgggcatcgtcgggaagtac

SEQ ID NO: 66293 - RNA, 27 nt, synthetic construct
  misc_feature 1..27: note = 60S ribosomal protein L23 (74-82)
  source 1..27: mol_type = other RNA
aagaaagtgcaccccgccgtcgttatc

SEQ ID NO: 66294 - RNA, 27 nt, synthetic construct
  misc_feature 1..27: note = Acyl-CoA desaturase (337-345)
  source 1..27: mol_type = other RNA
aagaaagtgagcaaggccgctatcctg

SEQ ID NO: 66295 - RNA, 27 nt, synthetic construct
  misc_feature 1..27: note = Condensin-2 complex subunit G2 (421-429)
  source 1..27: mol_type = other RNA
aagaaagtgaccggcgagctggccttc

SEQ ID NO: 66296 - RNA, 27 nt, synthetic construct
  misc_feature 1..27: note = Sorting nexin-29 (261-269)
  source 1..27: mol_type = other RNA
aagaaagtgaccaacatcattagcttc

SEQ ID NO: 66297 - RNA, 30 nt, synthetic construct
  misc_feature 1..30: note = 3-hydroxyisobutyryl-CoA hydrolase, mitochondrial (73-82)
  source 1..30: mol_type = other RNA
aagaaatgggagcaggaccccgaaaccttc

SEQ ID NO: 66298 - RNA, 30 nt, synthetic construct
  misc_feature 1..30: note = Rho-related GTP-binding protein RhoE (115-124)
  source 1..30: mol_type = other RNA
aagaaatggaagggcgagatccaggaattc

SEQ ID NO: 66299 - RNA, 27 nt, synthetic construct
  misc_feature 1..27: note = Conserved oligomeric Golgi complex subunit 2 (378-386)
  source 1..27: mol_type = other RNA
aagaaatggaacctgcccgtgtacttc

SEQ ID NO: 66300 - RNA, 27 nt, synthetic construct
  misc_feature 1..27: note = Oxysterol-binding protein 1 (288-296)
  source 1..27: mol_type = other RNA
aagaaatggcagaagagcctgcaatac

SEQ ID NO: 66301 - RNA, 30 nt, synthetic construct
  misc_feature 1..30: note = Cytosolic phospholipase A2 (379-388)
  source 1..30: mol_type = other RNA
aagaaatacgaggaaaaccccctgcacttc

SEQ ID NO: 66302 - RNA, 27 nt, synthetic construct
  misc_feature 1..27: note = F-BAR and double SH3 domains protein 2 (153-161)
  source 1..27: mol_type = other RNA
aagaaatacttcgagaccgaacagatg

SEQ ID NO: 66303 - RNA, 30 nt, synthetic construct
  misc_feature 1..30: note = Cysteine andine-rich protein 1 (64-73)
  source 1..30: mol_type = other RNA
aagaaatacggccccaaggggtatggatac

SEQ ID NO: 66304 - RNA, 30 nt, synthetic construct
  misc_feature 1..30: note = WD repeat-containing protein 82 (62-71)
  source 1..30: mol_type = other RNA
aagaaatacggcgtggacctgatcagatat

SEQ ID NO: 66305 - RNA, 27 nt, synthetic construct
  misc_feature 1..27: note = Gamma-interferon-inducible protein 16 (3-11)
  source 1..27: mol_type = other RNA
aagaaatacaagaacatcgtgctgctc

SEQ ID NO: 66306 - RNA, 30 nt, synthetic construct
  misc_feature 1..30: note = AT-rich interactive domain-containing protein 4B (387-396)
  source 1..30: mol_type = other RNA
aagaaatacctgtatggcttcgaggaatac

SEQ ID NO: 66307 - RNA, 33 nt, synthetic construct
  misc_feature 1..33: note = 116 kDa U5 small nuclear ribonucleoprotein component (63-73)
  source 1..33: mol_type = other RNA
aagaaatactatcccaccgccgaggaagtgtac

SEQ ID NO: 66308 - RNA, 27 nt, synthetic construct
  misc_feature 1..27: note = Astrocytic phosphoprotein PEA-15 (122-130)
  source 1..27: mol_type = other RNA
aagctggccccccctccaaaaaaggct

SEQ ID NO: 66309 - RNA, 27 nt, synthetic construct
  misc_feature 1..27: note = Remodeling and spacing factor 1 (587-595)
  source 1..27: mol_type = other RNA
aagctggagaaaagcaagaaaaccttc

SEQ ID NO: 66310 - RNA, 36 nt, synthetic construct
  misc_feature 1..36: note = Zymogen granule protein 16 homolog B (100-111)
  source 1..36: mol_type = other RNA
aagctgggcgccctcgggggaaacacccaggaggtg

SEQ ID NO: 66311 - RNA, 24 nt, synthetic construct
  misc_feature 1..24: note = Ubiquitin carboxyl-terminal hydrolase 3 (107-114)
  source 1..24: mol_type = other RNA
aagctgggcctcgtgcagaaagtc

SEQ ID NO: 66312 - RNA, 27 nt, synthetic construct
  misc_feature 1..27: note = Sister chromatid cohesion protein PDS5 homolog A (112-120)
  source 1..27: mol_type = other RNA
aagctgaaagacatcttcctctttatt

SEQ ID NO: 66313 - RNA, 27 nt, synthetic construct
  misc_feature 1..27: note = DDB1- and CUL4-associated factor 13 (376-384)
  source 1..27: mol_type = other RNA
aagctgaaagagaagttccagcactac

SEQ ID NO: 66314 - RNA, 33 nt, synthetic construct
  misc_feature 1..33: note = Heterogeneous nuclear ribonucleoproteins C1/C2 (187-197)
  source 1..33: mol_type = other RNA
aagctgaaaggcgacgatctccaggccatcaag

SEQ ID NO: 66315 - RNA, 27 nt, synthetic construct
  misc_feature 1..27: note = Rap guanine nucleotide exchange factor 2 (828-836)
  source 1..27: mol_type = other RNA
aagctgcccaacaaatacgagaagctc

SEQ ID NO: 66316 - RNA, 27 nt, synthetic construct
  misc_feature 1..27: note = Dynein heavy chain 1, axonemal (2025-2033)
  source 1..27: mol_type = other RNA
aagctgccccctctccttaaaccatac

SEQ ID NO: 66317 - RNA, 30 nt, synthetic construct
  misc_feature 1..30: note = Signal peptidase complex subunit 2 (173-182)
  source 1..30: mol_type = other RNA
aagctgaccttcatcagcggcagaacaaaa

SEQ ID NO: 66318 - RNA, 30 nt, synthetic construct
  misc_feature 1..30: note = Heterogeneous nuclear ribonucleoprotein U-like protein 2 (521-530)
  source 1..30: mol_type = other RNA
aagctggtgcagatcgccagcagaaccaaa

SEQ ID NO: 66319 - RNA, 30 nt, synthetic construct
  misc_feature 1..30: note = Dedicator of cytokinesis protein 3 (182-191)
  source 1..30: mol_type = other RNA
aagatgcacctgagctccagacagtctgtg

SEQ ID NO: 66320 - RNA, 27 nt, synthetic construct
  misc_feature 1..27: note = Neuroblast differentiation-associated protein AHNAK (5087-5095)
  source 1..27: mol_type = other RNA
aagatgtacttccccgacgtggagttt

SEQ ID NO: 66321 - RNA, 27 nt, synthetic construct
  misc_feature 1..27: note = A-kinase anchor protein 9 (1420-1428)
  source 1..27: mol_type = other RNA
aagaacatcgacggcaccattgagttc

SEQ ID NO: 66322 - RNA, 24 nt, synthetic construct
  misc_feature 1..24: note = Nucleoporin p58/p45 (71-78)
  source 1..24: mol_type = other RNA
aagcccgccaccggcttcacactg

SEQ ID NO: 66323 - RNA, 24 nt, synthetic construct
  misc_feature 1..24: note = MARCKS-related protein (96-103)
  source 1..24: mol_type = other RNA
aagcccttcaaactgagcggcctc

SEQ ID NO: 66324 - RNA, 27 nt, synthetic construct
  misc_feature 1..27: note = Zinc finger and BTB domain-containing protein 38 (175-183)
  source 1..27: mol_type = other RNA
aagcagttccaaagcccctccaccctg

SEQ ID NO: 66325 - RNA, 30 nt, synthetic construct
  misc_feature 1..30: note = ADP-sugar pyrophosphatase (81-90)
  source 1..30: mol_type = other RNA
aagcagttcagaccccctatgggcgggtac

SEQ ID NO: 66326 - RNA, 27 nt, synthetic construct
  misc_feature 1..27: note = 26S protease regulatory subunit 8 (30-38)
  source 1..27: mol_type = other RNA
aagcagatcaaagagattaaggaagtg

SEQ ID NO: 66327 - RNA, 27 nt, synthetic construct
  misc_feature 1..27: note = Ubiquitin-40S ribosomal protein S27a (48-56)
  source 1..27: mol_type = other RNA
aagcagctggaggacggcagaaccctc

SEQ ID NO: 66328 - RNA, 27 nt, synthetic construct
  misc_feature 1..27: note = tRNA selenocysteine 1-associated protein 1 (88-96)
  source 1..27: mol_type = other RNA
aagcagcccgacaacagccctgagtac

SEQ ID NO: 66329 - RNA, 27 nt, synthetic construct
  misc_feature 1..27: note = MARVEL domain-containing protein 2 (540-548)
  source 1..27: mol_type = other RNA
aagcagagaatccaagagtacgacaaa

SEQ ID NO: 66330 - RNA, 27 nt, synthetic construct
  misc_feature 1..27: note = Heat shock 70 kDa protein 1B (423-431)
  source 1..27: mol_type = other RNA
aagcagacccaaatcttcacaacttac

SEQ ID NO: 66331 - RNA, 27 nt, synthetic construct
  misc_feature 1..27: note = Mortality factor 4-like protein 1 (38-46)
  source 1..27: mol_type = other RNA
aagcaggtgaaatacttcatccactat

SEQ ID NO: 66332 - RNA, 30 nt, synthetic construct
  misc_feature 1..30: note = ADP-ribosylation factor-binding protein GGA2 (311-320)
  source 1..30: mol_type = other RNA
aagcaggtgatggagggcagagtcaccttc

SEQ ID NO: 66333 - RNA, 36 nt, synthetic construct
  misc_feature 1..36: note = 60S ribosomal protein L17 (74-85)
  source 1..36: mol_type = other RNA
aagcagtggggctggacccaagggagatggcccaaa

SEQ ID NO: 66334 - RNA, 27 nt, synthetic construct
  misc_feature 1..27: note = ATP-dependent RNA helicase DDX3X (264-272)
  source 1..27: mol_type = other RNA
aagcagtaccccatcagcctggtgctc

SEQ ID NO: 66335 - RNA, 27 nt, synthetic construct
  misc_feature 1..27: note = Cancer-related nucleoside-triphosphatase (73-81)
  source 1..27: mol_type = other RNA
aagagagagtgcagggtgggccagtac

SEQ ID NO: 66336 - RNA, 30 nt, synthetic construct
  misc_feature 1..30: note = Unconventional myosin-VIIb (624-633)
  source 1..30: mol_type = other RNA
aagagacccagcaccctgggctcccagttc

SEQ ID NO: 66337 - RNA, 33 nt, synthetic construct
  misc_feature 1..33: note = Vigilin (550-560)
  source 1..33: mol_type = other RNA
aagagcgacatcgtgcagctgagaggccccaaa

SEQ ID NO: 66338 - RNA, 30 nt, synthetic construct; identical to SEQ ID NO: 42111
  misc_feature 1..30: note = Cyclin-dependent kinase-like 5 (680-689)
  source 1..30: mol_type = other RNA

SEQ ID NO: 66339 - RNA, 27 nt, synthetic construct
  misc_feature 1..27: note = Clathrin heavy chain 1 (706-714)
  source 1..27: mol_type = other RNA
aagagcttcgagggcctgttttacttc

SEQ ID NO: 66340 - RNA, 27 nt, synthetic construct
  misc_feature 1..27: note = General transcription factor 3C polypeptide 2 (146-154)
  source 1..27: mol_type = other RNA
aagagcaaagccgagctgctccttctg

SEQ ID NO: 66341 - RNA, 33 nt, synthetic construct
  misc_feature 1..33: note = Calcyclin-binding protein (33-43)
  source 1..33: mol_type = other RNA
aagagcaaaatcgagaccgaaattaagaacaaa

SEQ ID NO: 66342 - RNA, 27 nt, synthetic construct
  misc_feature 1..27: note = Dol-P-Glc:Glc(2)Man(9)GlcNAc(2)-PP-Dol alpha-1,2-glucosyltransferase (389-397)
  source 1..27: mol_type = other RNA
aagagcaaatccatcttctggaacctg

SEQ ID NO: 66343 - RNA, 27 nt, synthetic construct
  misc_feature 1..27: note = Leucine-rich repeat-containing protein 40 (210-218)
  source 1..27: mol_type = other RNA
aagagcctgcccgccgagatcaacaga

SEQ ID NO: 66344 - RNA, 27 nt, synthetic construct
  misc_feature 1..27: note = Solute carrier family 7 member 13 (416-424)
  source 1..27: mol_type = other RNA
aagagccccaacgtgcactacgtctat

SEQ ID NO: 66345 - RNA, 27 nt, synthetic construct
  misc_feature 1..27: note = Aromatase (99-107)
  source 1..27: mol_type = other RNA
aagagctcctctatgttccacatcatg

SEQ ID NO: 66346 - RNA, 27 nt, synthetic construct
  misc_feature 1..27: note = Thromboxane-A synthase (118-126)
  source 1..27: mol_type = other RNA
aagagcgtggccgactccgtcctgttc

SEQ ID NO: 66347 - RNA, 33 nt, synthetic construct
  misc_feature 1..33: note = Hypoxia up-regulated protein 1 (249-259)
  source 1..33: mol_type = other RNA
aagaccaaagaggccggcatgcagccccaactg

SEQ ID NO: 66348 - RNA, 30 nt, synthetic construct
  misc_feature 1..30: note = Translin (76-85)
  source 1..30: mol_type = other RNA
aagaccaaattccccgccgagcagtactat

SEQ ID NO: 66349 - RNA, 27 nt, synthetic construct
  misc_feature 1..27: note = RNA-binding protein PNO1 (189-197)
  source 1..27: mol_type = other RNA
aagaccaaattcacaatcgagaacgtg

SEQ ID NO: 66350 - RNA, 27 nt, synthetic construct
  misc_feature 1..27: note = DNA damage-binding protein 1 (915-923)
  source 1..27: mol_type = other RNA
aagaccaaaggcgacttcatcctggtg

SEQ ID NO: 66351 - RNA, 27 nt, synthetic construct
  misc_feature 1..27: note = N-acetylgalactosamine kinase (102-110)
  source 1..27: mol_type = other RNA
aagaccaaacccctgtggcacaactac

SEQ ID NO: 66352 - RNA, 27 nt, synthetic construct
  misc_feature 1..27: note = Splicing factor 3B subunit 3 (294-302)
  source 1..27: mol_type = other RNA
aagaccaaaagcatgttctttttcctg

SEQ ID NO: 66353 - RNA, 36 nt, synthetic construct
  misc_feature 1..36: note = Heterogeneous nuclear ribonucleoproteins A2/B1 (3-14)
  source 1..36: mol_type = other RNA
aagaccctggagacagtgcccctcgaaagaaaaaag

SEQ ID NO: 66354 - RNA, 27 nt, synthetic construct
  misc_feature 1..27: note = ADP-ribosylation factor-like protein 11 (25-33)
  source 1..27: mol_type = other RNA
aagaccacactgctctacaaacttaag

SEQ ID NO: 66355 - RNA, 27 nt, synthetic construct
  misc_feature 1..27: note = Catenin alpha-2 (794-802)
  source 1..27: mol_type = other RNA
aaggtgaaagccgaggtccagaacctg

SEQ ID NO: 66356 - RNA, 27 nt, synthetic construct
  misc_feature 1..27: note = Serine/threonine-protein phosphatase 2A 65 kDa regulatory subunit A alpha isoform (305-313)
  source 1..27: mol_type = other RNA
aaggtgaaagagttctgcgaaaacctg

SEQ ID NO: 66357 - RNA, 27 nt, synthetic construct
  misc_feature 1..27: note = Septin-7 (364-372)
  source 1..27: mol_type = other RNA
aaggtgaaagagaaggtccagaaactg

SEQ ID NO: 66358 - RNA, 27 nt, synthetic construct
  misc_feature 1..27: note = Kelch-like protein 24 (128-136)
  source 1..27: mol_type = other RNA
aaggtgaaaatcaccacagagaacgtc

SEQ ID NO: 66359 - RNA, 33 nt, synthetic construct
  misc_feature 1..33: note = Ubiquitin-40S ribosomal protein S27a (97-107)
  source 1..33: mol_type = other RNA
aaggtgaaactggccgtcctcaagtactataaa

SEQ ID NO: 66360 - RNA, 30 nt, synthetic construct
  misc_feature 1..30: note = Thioredoxin-like protein 4A (51-60)
  source 1..30: mol_type = other RNA
aaggtgaaaaacttcgccgtcatctacctg

SEQ ID NO: 66361 - RNA, 27 nt, synthetic construct
  misc_feature 1..27: note = FACT complex subunit SPT16 (424-432)
  source 1..27: mol_type = other RNA
aaggtgaaaaacgtcggcatcttcctg

SEQ ID NO: 66362 - RNA, 30 nt, synthetic construct
  misc_feature 1..30: note = Peptidylprolyl isomerase domain and WD repeat-containing protein 1 (65-74)
  source 1..30: mol_type = other RNA
aaggtgctggagttcgaaagagtctacctc

SEQ ID NO: 66363 - RNA, 30 nt, synthetic construct
  misc_feature 1..30: note = Exocyst complex component 4 (568-577)
  source 1..30: mol_type = other RNA
aaggtgctgggcgtccagagacccctcctt

SEQ ID NO: 66364 - RNA, 30 nt, synthetic construct
  misc_feature 1..30: note = 60S ribosomal protein L15 (5-14)
  source 1..30: mol_type = other RNA
aagtacatccaggagctgtggagaaaaaag

SEQ ID NO: 66365 - RNA, 27 nt, synthetic construct
  misc_feature 1..27: note = Proto-oncogene vav (272-280)
  source 1..27: mol_type = other RNA
aagtacaaagagagattcctggtgtat

SEQ ID NO: 66366 - RNA, 30 nt, synthetic construct
  misc_feature 1..30: note = 60S ribosomal protein L35 (77-86)
  source 1..30: mol_type = other RNA
aagtacaaacccctggacctcagacctaag

SEQ ID NO: 66367 - RNA, 36 nt, synthetic construct
  misc_feature 1..36: note = Protein mab-21-like 3 (2-13)
  source 1..36: mol_type = other RNA
aagtacctgaccgtgggcgacctcgaggattgcctt

SEQ ID NO: 66368 - RNA, 27 nt, synthetic construct
  misc_feature 1..27: note = Protein archease (35-43)
  source 1..27: mol_type = other RNA
aagtacccccctgtgaacagaaaatat

SEQ ID NO: 66369 - RNA, 27 nt, synthetic construct
  misc_feature 1..27: note = RNA-binding protein 42 (445-453)
  source 1..27: mol_type = other RNA
aagtacgtgggcagcagacccatcaaa

SEQ ID NO: 66370 - RNA, 27 nt, synthetic construct
  misc_feature 1..27: note = Suppressor of tumorigenicity 7 protein-like (66-74)
  source 1..27: mol_type = other RNA
ctggccgctgtgaccgtcttcctcaac

SEQ ID NO: 66371 - RNA, 27 nt, synthetic construct
  misc_feature 1..27: note = Cytochrome c oxidase assembly protein COX14 (7-15)
  source 1..27: mol_type = other RNA
ctggccgacatcggctacaagaccttc

SEQ ID NO: 66372 - RNA, 30 nt, synthetic construct
  misc_feature 1..30: note = Serine/arginine repetitive matrix protein 2 (2256-2265)
  source 1..30: mol_type = other RNA
ctggccgacagcagaacccccgctgcagcc

SEQ ID NO: 66373 - RNA, 27 nt, synthetic construct
  misc_feature 1..27: note = Neutral amino acid transporter A (75-83)
  source 1..27: mol_type = other RNA
ctggccttccccggcgagatgctcctt

SEQ ID NO: 66374 - RNA, 27 nt, synthetic construct
  misc_feature 1..27: note = Apolipoprotein B receptor (1069-1077)
  source 1..27: mol_type = other RNA
ctggcccaccccggcatgatgcaggag

SEQ ID NO: 66375 - RNA, 30 nt, synthetic construct; identical to SEQ ID NO: 42148
  misc_feature 1..30: note = Dystrophin-related protein 2 (299-308)
  source 1..30: mol_type = other RNA

SEQ ID NO: 66376 - RNA, 27 nt, synthetic construct
  misc_feature 1..27: note = Microtubule-associated protein 4 (558-566)
  source 1..27: mol_type = other RNA
ctggccaaggacggcgtgctcaccctt

SEQ ID NO: 66377 - RNA, 27 nt, synthetic construct
  misc_feature 1..27: note = Renin receptor (203-211)
  source 1..27: mol_type = other RNA
ctggccaaggaccacagccccgatctc

SEQ ID NO: 66378 - RNA, 27 nt, synthetic construct
  misc_feature 1..27: note = Minor histocompatibility antigen H13 (335-343)
  source 1..27: mol_type = other RNA
ctggccaagggcgaggtgaccgaaatg

SEQ ID NO: 66379 - RNA, 27 nt, synthetic construct
  misc_feature 1..27: note = Nectin-1 (16-24)
  source 1..27: mol_type = other RNA
ctggccctcggccttaccgctttcttt

SEQ ID NO: 66380 - RNA, 33 nt, synthetic construct
  misc_feature 1..33: note = Heterogeneous nuclear ribonucleoprotein M (609-619)
  source 1..33: mol_type = other RNA
ctggccatgggcgggggaggtggcgctagcttc

SEQ ID NO: 66381 - RNA, 30 nt, synthetic construct; identical to SEQ ID NO: 42154
  misc_feature 1..30: note = Golgin subfamily A member 3 (204-213)
  source 1..30: mol_type = other RNA

SEQ ID NO: 66382 - RNA, 27 nt, synthetic construct
  misc_feature 1..27: note = Thioredoxin-interacting protein (222-230)
  source 1..27: mol_type = other RNA
ctggccaacggccagaccaaggtgctc

SEQ ID NO: 66383 - RNA, 33 nt, synthetic construct
  misc_feature 1..33: note = Orexin receptor type 1 (225-235)
  source 1..33: mol_type = other RNA
ctggcccccctcggccttatggctatggcatac

SEQ ID NO: 66384 - RNA, 27 nt, synthetic construct
  misc_feature 1..27: note = Dynein heavy chain 6, axonemal (1621-1629)
  source 1..27: mol_type = other RNA
ctggccagaaagatgacccagatgtac

SEQ ID NO: 66385 - RNA, 27 nt, synthetic construct
  misc_feature 1..27: note = Nucleolar protein 16 (58-66)
  source 1..27: mol_type = other RNA
ctggccgtggaccccaacagagctgtc

SEQ ID NO: 66386 - RNA, 27 nt, synthetic construct
  misc_feature 1..27: note = Ectonucleoside triphosphate diphosphohydrolase 1 (33-41)
  source 1..27: mol_type = other RNA
ctggccgtgggcctcacccagaacaag

SEQ ID NO: 66387 - RNA, 27 nt, synthetic construct
  misc_feature 1..27: note = 60S ribosomal protein L29 (96-104)
  source 1..27: mol_type = other RNA
ctggcctacatcgctcaccccaagctc

SEQ ID NO: 66388 - RNA, 27 nt, synthetic construct
  misc_feature 1..27: note = Potassium-transporting ATPase alpha chain 2 (598-606)
  source 1..27: mol_type = other RNA
ctgtgcttcgtgggcctccttagcatg

SEQ ID NO: 66389 - RNA, 30 nt, synthetic construct
  misc_feature 1..30: note = Eukaryotic translation initiation factor 3 subunit C-like protein (635-644)
  source 1..30: mol_type = other RNA
ctggacatccagagctccggcagagccaag

SEQ ID NO: 66390 - RNA, 27 nt, synthetic construct
  misc_feature 1..27: note = Cullin-7 (163-171)
  source 1..27: mol_type = other RNA
ctggacctccttatgcacatgctgagc

SEQ ID NO: 66391 - RNA, 27 nt, synthetic construct
  misc_feature 1..27: note = Sodium-driven chloride bicarbonate exchanger (854-862)
  source 1..27: mol_type = other RNA
ctggacctccttatggtggccgtcatg

SEQ ID NO: 66392 - RNA, 27 nt, synthetic construct
  misc_feature 1..27: note = Fibrillin-3 (2702-2710)
  source 1..27: mol_type = other RNA
ctggacagcgaggccctccttaccctg

SEQ ID NO: 66393 - RNA, 27 nt, synthetic construct
  misc_feature 1..27: note = Uncharacterized protein C9orf171 (285-293)
  source 1..27: mol_type = other RNA
ctggacaccttccccacagaggccgat

SEQ ID NO: 66394 - RNA, 30 nt, synthetic construct
  misc_feature 1..30: note = Ankyrin repeat and LEM domain-containing protein 1 (184-193)
  source 1..30: mol_type = other RNA
ctggaggccgaccccggccctccaagcctc

SEQ ID NO: 66395 - RNA, 24 nt, synthetic construct
  misc_feature 1..24: note = Core histone macro-H2A.1 (61-68)
  source 1..24: mol_type = other RNA
ctggagctcgccggcaacgctgca

SEQ ID NO: 66396 - RNA, 27 nt, synthetic construct
  misc_feature 1..27: note = Alpha-mannosidase 2x (1106-1114)
  source 1..27: mol_type = other RNA
ctgttccacggcctcgacgtggtcttt

SEQ ID NO: 66397 - RNA, 27 nt, synthetic construct
  misc_feature 1..27: note = Vasohibin-2 (48-56)
  source 1..27: mol_type = other RNA
ctgttccacgtgaacaagagcggcttt

SEQ ID NO: 66398 - RNA, 27 nt, synthetic construct
  misc_feature 1..27: note = Pre-mRNA-processing factor 17 (418-426)
  source 1..27: mol_type = other RNA
ctgggcgccgtgaacaccatcgtcttc

SEQ ID NO: 66399 - RNA, 27 nt, synthetic construct
  misc_feature 1..27: note = Pumilio homolog 1 (673-681)
  source 1..27: mol_type = other RNA
ctgggcttcgggagctcctcttcactc

SEQ ID NO: 66400 - RNA, 27 nt, synthetic construct
  misc_feature 1..27: note = Putative nuclease HARBI1 (77-85)
  source 1..27: mol_type = other RNA
ctgggcttctacaccagcgggtccttt

SEQ ID NO: 66401 - RNA, 30 nt, synthetic construct
  misc_feature 1..30: note = Hyaluronidase-4 (205-214)
  source 1..30: mol_type = other RNA
ctgggcatcaagagcagacccaaagggctc

SEQ ID NO: 66402 - RNA, 30 nt, synthetic construct
  misc_feature 1..30: note = NF-kappa-B-repressing factor (591-600)
  source 1..30: mol_type = other RNA
ctgggcctcgacgtggagagagtcaacaag

SEQ ID NO: 66403 - RNA, 27 nt, synthetic construct
  misc_feature 1..27: note = G-protein coupled receptor family C group 6 member A (447-455)
  source 1..27: mol_type = other RNA
ctgggcgtgctcaagaacgtcaccttc

SEQ ID NO: 66404 - RNA, 27 nt, synthetic construct
  misc_feature 1..27: note = L-xylulose reductase (27-35)
  source 1..27: mol_type = other RNA
ctgcacgccaccggcgctagagtggtc

SEQ ID NO: 66405 - RNA, 27 nt, synthetic construct
  misc_feature 1..27: note = Sterol regulatory element-binding protein 1 (1037-1045)
  source 1..27: mol_type = other RNA
ctgcacgaggccaccgctagactcatg

SEQ ID NO: 66406 - RNA, 27 nt, synthetic construct
  misc_feature 1..27: note = U3 small nucleolar ribonucleoprotein protein MPP10 (405-413)
  source 1..27: mol_type = other RNA
ctgcacttcgaccatgccgtgagaatg

SEQ ID NO: 66407 - RNA, 27 nt, synthetic construct
  misc_feature 1..27: note = Nucleoporin Nup43 (101-109)
  source 1..27: mol_type = other RNA
ctgcaccatcccaacaatcagaccctc

SEQ ID NO: 66408 - RNA, 27 nt, synthetic construct
  misc_feature 1..27: note = Delta(14)-sterol reductase (279-287)
  source 1..27: mol_type = other RNA
ctgcaccatccccagcctctcggcctt

SEQ ID NO: 66409 - RNA, 27 nt, synthetic construct
  misc_feature 1..27: note = Phospholipid-transporting ATPase ID (589-597)
  source 1..27: mol_type = other RNA
ctgcaccatagcacccaggagctcctt

SEQ ID NO: 66410 - RNA, 30 nt, synthetic construct
  misc_feature 1..30: note = Neuron navigator 3 (2128-2137)
  source 1..30: mol_type = other RNA
ctgcaccatgtgggcagcctctccgacatc

SEQ ID NO: 66411 - RNA, 27 nt, synthetic construct
  misc_feature 1..27: note = GTP-binding protein 1 (551-559)
  source 1..27: mol_type = other RNA
ctgcacatcgaccagagactcgtgttc

SEQ ID NO: 66412 - RNA, 27 nt, synthetic construct
  misc_feature 1..27: note = Cyclin-I (151-159)
  source 1..27: mol_type = other RNA
ctgcacatcttccatgccattgctgtg

SEQ ID NO: 66413 - RNA, 27 nt, synthetic construct
  misc_feature 1..27: note = Thioredoxin domain-containing protein 9 (138-146)
  source 1..27: mol_type = other RNA
ctgcacatcaaggtgattcccaccctc

SEQ ID NO: 66414 - RNA, 27 nt, synthetic construct
  misc_feature 1..27: note = Myb-binding protein 1A (438-446)
  source 1..27: mol_type = other RNA
ctgcacatgcccgagagagccgtgttc

SEQ ID NO: 66415 - RNA, 27 nt, synthetic construct
  misc_feature 1..27: note = Probable ATP-dependent RNA helicase DDX56 (212-220)
  source 1..27: mol_type = other RNA
ctgcacaaccccgtgaccctcaagctt

SEQ ID NO: 66416 - RNA, 27 nt, synthetic construct
  misc_feature 1..27: note = Gem-associated protein 5 (107-115)
  source 1..27: mol_type = other RNA
ctgcaccagcataccatcagcacactc

SEQ ID NO: 66417 - RNA, 27 nt, synthetic construct
  misc_feature 1..27: note = G patch domain-containing protein 8 (828-836)
  source 1..27: mol_type = other RNA
ctgcaccagaagagcccctcccaatac

SEQ ID NO: 66418 - RNA, 27 nt, synthetic construct
  misc_feature 1..27: note = Actin-binding LIM protein 1 (664-672)
  source 1..27: mol_type = other RNA
ctgcacagacccgtgagcaccgacttc

SEQ ID NO: 66419 - RNA, 27 nt, synthetic construct
  misc_feature 1..27: note = Cytochrome c oxidase subunit 2 (160-168)
  source 1..27: mol_type = other RNA
ctgcacagctgggccgtgcccaccctc

SEQ ID NO: 66420 - RNA, 27 nt, synthetic construct
  misc_feature 1..27: note = IQ motif and SEC7 domain-containing protein 1 (263-271)
  source 1..27: mol_type = other RNA
ctgcacaccgaggaagcccccgctctc

SEQ ID NO: 66421 - RNA, 27 nt, synthetic construct
  misc_feature 1..27: note = Selenoprotein S (22-30)
  source 1..27: mol_type = other RNA
ctgcacaccacagtgggcagcctcctt

SEQ ID NO: 66422 - RNA, 27 nt, synthetic construct
  misc_feature 1..27: note = Plectin (1023-1031)
  source 1..27: mol_type = other RNA
ctgcacgtggacatgaagagcctcctt

SEQ ID NO: 66423 - RNA, 27 nt, synthetic construct
  misc_feature 1..27: note = Unconventional myosin-Ih (186-194)
  source 1..27: mol_type = other RNA
ctgatcgagaagagcagagtggtctac

SEQ ID NO: 66424 - RNA, 33 nt, synthetic construct
  misc_feature 1..33: note = Heat shock 70 kDa protein 1-like (198-208)
  source 1..33: mol_type = other RNA
ctgatcttcgacctcggcgggggaacctttgat

SEQ ID NO: 66425 - RNA, 27 nt, synthetic construct
  misc_feature 1..27: note = DnaJ homolog subfamily C member 13 (1046-1054)
  source 1..27: mol_type = other RNA
ctgatcctcaacatgcttattaccatg

SEQ ID NO: 66426 - RNA, 27 nt, synthetic construct
  misc_feature 1..27: note = Probable ATP-dependent RNA helicase DDX59 (275-283)
  source 1..27: mol_type = other RNA
ctgatcctcacccccacaagagagctt

SEQ ID NO: 66427 - RNA, 27 nt, synthetic construct
  misc_feature 1..27: note = Integrin beta-7 (381-389)
  source 1..27: mol_type = other RNA
ctgatcatggacgcctacaacagcctc

SEQ ID NO: 66428 - RNA, 27 nt, synthetic construct
  misc_feature 1..27: note = Leucine-rich repeat and fibronectin type-III domain-containing protein 4 (447-455)
  source 1..27: mol_type = other RNA
ctgatctacagaattgtgcccgccagc

SEQ ID NO: 66429 - RNA, 27 nt, synthetic construct
  misc_feature 1..27: note = Protein disulfide-isomerase A2 (328-336)
  source 1..27: mol_type = other RNA
ctgaaggccgaggctgcacccaccctc

SEQ ID NO: 66430 - RNA, 27 nt, synthetic construct
  misc_feature 1..27: note = Mini-chromosome maintenance complex-binding protein (430-438)
  source 1..27: mol_type = other RNA
ctgaagttcatcccccacaaagactac

SEQ ID NO: 66431 - RNA, 27 nt, synthetic construct
  misc_feature 1..27: note = RNA-binding protein 8A (113-121)
  source 1..27: mol_type = other RNA
ctgaagggctacaccctcgtggagtat

SEQ ID NO: 66432 - RNA, 27 nt, synthetic construct
  misc_feature 1..27: note = Mannosyl-oligosaccharide glucosidase (326-334)
  source 1..27: mol_type = other RNA
ctgaagatccccattagcatagagttc

SEQ ID NO: 66433 - RNA, 27 nt, synthetic construct
  misc_feature 1..27: note = ER membrane protein complex subunit 1 (411-419)
  source 1..27: mol_type = other RNA
ctgaagaaagacgatagcgtgggctac

SEQ ID NO: 66434 - RNA, 33 nt, synthetic construct
  misc_feature 1..33: note = DENN domain-containing protein 4C (704-714)
  source 1..33: mol_type = other RNA
ctgaagctcttcgacagaccccaggagcttaaa

SEQ ID NO: 66435 - RNA, 27 nt, synthetic construct
  misc_feature 1..27: note = Eukaryotic translation initiation factor 3 subunit D (447-455)
  source 1..27: mol_type = other RNA
ctgaagctcggctacgtgagcagatat

SEQ ID NO: 66436 - RNA, 27 nt, synthetic construct
  misc_feature 1..27: note = Serine/threonine-protein kinase PAK 2 (301-309)
  source 1..27: mol_type = other RNA
ctgaagaaccccaatatcgtgaacttc

SEQ ID NO: 66437 - RNA, 27 nt, synthetic construct
  misc_feature 1..27: note = Elongation factor 1-alpha 1 (272-280)
  source 1..27: mol_type = other RNA
ctgaagcccggcatggtggtcaccttc

SEQ ID NO: 66438 - RNA, 27 nt, synthetic construct
  misc_feature 1..27: note = X-ray repair cross-complementing protein 6 (281-289)
  source 1..27: mol_type = other RNA
ctgaagccccctccaatcaaactctac

SEQ ID NO: 66439 - RNA, 27 nt, synthetic construct
  misc_feature 1..27: note = Choline/ethanolaminephosphotransferase 1 (48-56)
  source 1..27: mol_type = other RNA
ctgaagagactcgaggaacacaggtac

SEQ ID NO: 66440 - RNA, 27 nt, synthetic construct
  misc_feature 1..27: note = Renin receptor (22-30)
  source 1..27: mol_type = other RNA
ctgaagagccccggctccgtggtcttc

SEQ ID NO: 66441 - RNA, 27 nt, synthetic construct
  misc_feature 1..27: note = Nucleolin (323-331)
  source 1..27: mol_type = other RNA
ctgaagaccggcatcagcgacgtgttc

SEQ ID NO: 66442 - RNA, 27 nt, synthetic construct
  misc_feature 1..27: note = 26S protease regulatory subunit 7 (33-41)
  source 1..27: mol_type = other RNA
ctgaagacctacggccagagcacatat

SEQ ID NO: 66443 - RNA, 24 nt, synthetic construct
  misc_feature 1..24: note = 60S ribosomal protein L19 (125-132)
  source 1..24: mol_type = other RNA
ctgaaggtgaaaggcaacgtcttc

SEQ ID NO: 66444 - RNA, 27 nt, synthetic construct
  misc_feature 1..27: note = Forkhead box protein O3 (93-101)
  source 1..27: mol_type = other RNA
ctgctcgaggacagcgccagagtgctt

SEQ ID NO: 66445 - RNA, 27 nt, synthetic construct
  misc_feature 1..27: note = Dynein heavy chain 9, axonemal (368-376)
  source 1..27: mol_type = other RNA
ctgctcatccagcaagccagcaactac

SEQ ID NO: 66446 - RNA, 33 nt, synthetic construct
  misc_feature 1..33: note = Dynein heavy chain 10, axonemal (1334-1344)
  source 1..33: mol_type = other RNA
ctgctccttgacctgaagaacgaggccttgaga

SEQ ID NO: 66447 - RNA, 27 nt, synthetic construct
  misc_feature 1..27: note = ER membrane protein complex subunit 3 (6-14)
  source 1..27: mol_type = other RNA
ctgctccttgacagcaacatcagactg

SEQ ID NO: 66448 - RNA, 27 nt, synthetic construct
  misc_feature 1..27: note = Echinoderm microtubule-associated protein-like 4 (278-286)
  source 1..27: mol_type = other RNA
ctgctccccaccggcaagatcgtgtac

SEQ ID NO: 66449 - RNA, 27 nt, synthetic construct
  misc_feature 1..27: note = Chromodomain-helicase-DNA-binding protein 2 (628-636)
  source 1..27: mol_type = other RNA
ctgctctacaagacccttatcgacttc

SEQ ID NO: 66450 - RNA, 27 nt, synthetic construct
  misc_feature 1..27: note = Integrator complex subunit 10 (519-527)
  source 1..27: mol_type = other RNA
ctgatgtgctacatggtgctccccatc

SEQ ID NO: 66451 - RNA, 33 nt, synthetic construct
  misc_feature 1..33: note = Melatonin receptor type 1A (106-116)
  source 1..33: mol_type = other RNA
ctgatgggcctcagcgtgatcgggtccattttc

SEQ ID NO: 66452 - RNA, 27 nt, synthetic construct
  misc_feature 1..27: note = DNA-dependent protein kinase catalytic subunit (2219-2227)
  source 1..27: mol_type = other RNA
ctgatgaagcacgtgttccatcccaaa

SEQ ID NO: 66453 - RNA, 33 nt, synthetic construct
  misc_feature 1..33: note = Eukaryotic translation initiation factor 3 subunit H (211-221)
  source 1..33: mol_type = other RNA
ctgatgtgggagctcgaaaagaaaagcgccgtg

SEQ ID NO: 66454 - RNA, 27 nt, synthetic construct
  misc_feature 1..27: note = CTP synthase 2 (334-342)
  source 1..27: mol_type = other RNA
ctgatgtacatcgacagcattgatctc

SEQ ID NO: 66455 - RNA, 27 nt, synthetic construct
  misc_feature 1..27: note = Ubiquitin-like modifier-activating enzyme ATG7 (128-136)
  source 1..27: mol_type = other RNA
ctgaacaagttcctccttctgaccttt

SEQ ID NO: 66456 - RNA, 30 nt, synthetic construct
  misc_feature 1..30: note = Carboxy-terminal domain RNA polymerase II polypeptide A small phosphatase 1 (54-63)
  source 1..30: mol_type = other RNA
ctgcccgcccacagcggcgctcctctcctt

SEQ ID NO: 66457 - RNA, 27 nt, synthetic construct
  misc_feature 1..27: note = Neutrophil cytosol factor 4 (89-97)
  source 1..27: mol_type = other RNA
ctgcccgccaaggtgtacgtcggcgtt

SEQ ID NO: 66458 - RNA, 27 nt, synthetic construct
  misc_feature 1..27: note = GPI transamidase component PIG-T (430-438)
  source 1..27: mol_type = other RNA
ctgcccgccaacagcgtgaccaaggtc

SEQ ID NO: 66459 - RNA, 27 nt, synthetic construct
  misc_feature 1..27: note = Tyrosine-protein phosphatase non-receptor type 12 (677-685)
  source 1..27: mol_type = other RNA
ctgcccgagagaacccctgaaagcttc

SEQ ID NO: 66460 - RNA, 27 nt, synthetic construct
  misc_feature 1..27: note = Collagen alpha-2(IV) chain (385-393)
  source 1..27: mol_type = other RNA
ctgcccggccctccagggctcagcatc

SEQ ID NO: 66461 - RNA, 27 nt, synthetic construct
  misc_feature 1..27: note = DDB1- and CUL4-associated factor 13 (548-556)
  source 1..27: mol_type = other RNA
ctgcccaagagcatctactcccagatt

SEQ ID NO: 66462 - RNA, 27 nt, synthetic construct
  misc_feature 1..27: note = Interferon regulatory factor 2-binding protein-like (271-279)
  source 1..27: mol_type = other RNA
ctgccccctccaccgccccacgccctc

SEQ ID NO: 66463 - RNA, 27 nt, synthetic construct
  misc_feature 1..27: note = Neutral amino acid transporter A (142-150)
  source 1..27: mol_type = other RNA
ctgcccacccacgacctccctcttatc

SEQ ID NO: 66464 - RNA, 24 nt, synthetic construct
  misc_feature 1..24: note = General transcription factor 3C polypeptide 2 (665-672)
  source 1..24: mol_type = other RNA
ctgccctacaacggcgtgaccgtc

SEQ ID NO: 66465 - RNA, 27 nt, synthetic construct
  misc_feature 1..27: note = Signal peptidase complex catalytic subunit SEC11C (158-166)
  source 1..27: mol_type = other RNA
ctgccctacgtgggcatggtcaccatc

SEQ ID NO: 66466 - RNA, 27 nt, synthetic construct
  misc_feature 1..27: note = WD repeat-containing protein 34 (423-431)
  source 1..27: mol_type = other RNA
ctgcaggccccccctctcaccagcctt

SEQ ID NO: 66467 - RNA, 27 nt, synthetic construct
  misc_feature 1..27: note = Protein unc-13 homolog C (117-125)
  source 1..27: mol_type = other RNA
ctgcaggagctcagctccatcgaatct

SEQ ID NO: 66468 - RNA, 27 nt, synthetic construct
  misc_feature 1..27: note = TBC1 domain family member 4 (1186-1194)
  source 1..27: mol_type = other RNA
ctgcaggagagctcctactcttgcgaa

SEQ ID NO: 66469 - RNA, 30 nt, synthetic construct
  misc_feature 1..30: note = WD repeat-containing protein 82 (288-297)
  source 1..30: mol_type = other RNA
ctgcagttcaaccccaagtttatgaccttc

SEQ ID NO: 66470 - RNA, 33 nt, synthetic construct
  misc_feature 1..33: note = Serine/threonine-protein kinase RIO2 (521-531)
  source 1..33: mol_type = other RNA
ctgcagaagggcgaggccaacatcttcaccaaa

SEQ ID NO: 66471 - RNA, 30 nt, synthetic construct; identical to SEQ ID NO: 42244
  misc_feature 1..30: note = WAS protein family homolog 1 (40-49)
  source 1..30: mol_type = other RNA

SEQ ID NO: 66472 - RNA, 27 nt, synthetic construct
  misc_feature 1..27: note = Tubulin beta chain (42-50)
  source 1..27: mol_type = other RNA
ctgcagctcgacagaatcagcgtgtac

SEQ ID NO: 66473 - RNA, 27 nt, synthetic construct
  misc_feature 1..27: note = Tubulin beta-4B chain (42-50)
  source 1..27: mol_type = other RNA
ctgcagctcgagagaatcaacgtgtac

SEQ ID NO: 66474 - RNA, 27 nt, synthetic construct
  misc_feature 1..27: note = Acyl-coenzyme A synthetase ACSM5, mitochondrial (112-120)
  source 1..27: mol_type = other RNA
ctgcagcccggcgacagaatgatgctc

SEQ ID NO: 66475 - RNA, 27 nt, synthetic construct
  misc_feature 1..27: note = GPI transamidase component PIG-T (58-66)
  source 1..27: mol_type = other RNA
ctgcagagagagggcgtgagccactac

SEQ ID NO: 66476 - RNA, 27 nt, synthetic construct
  misc_feature 1..27: note = Splicing factor 1 (254-262)
  source 1..27: mol_type = other RNA
ctgagagaggacgataacaggatcctc

SEQ ID NO: 66477 - RNA, 27 nt, synthetic construct
  misc_feature 1..27: note = FH1/FH2 domain-containing protein 1 (1156-1164)
  source 1..27: mol_type = other RNA
ctgagcaagggccccgggctcgaggtg

SEQ ID NO: 66478 - RNA, 30 nt, synthetic construct
  misc_feature 1..30: note = Phosphatidylethanolamine-binding protein 1 (5-14)
  source 1..30: mol_type = other RNA
ctgagcaagtggtccggccccctctctctt

SEQ ID NO: 66479 - RNA, 24 nt, synthetic construct
  misc_feature 1..24: note = FYVE, RhoGEF and PH domain-containing protein 5 (524-531)
  source 1..24: mol_type = other RNA
ctgagcctcgagggcaagcccctt

SEQ ID NO: 66480 - RNA, 27 nt, synthetic construct
  misc_feature 1..27: note = Cilia- and flagella-associated protein 54 (689-697)
  source 1..27: mol_type = other RNA
ctgagcatgctcaagtccatgcttctg

SEQ ID NO: 66481 - RNA, 27 nt, synthetic construct
  misc_feature 1..27: note = Alpha-ketoglutarate-dependent dioxygenase alkB homolog 7, mitochondrial (104-112)
  source 1..27: mol_type = other RNA
ctgagctccgtgcacgtcctcgacctt

SEQ ID NO: 66482 - RNA, 27 nt, synthetic construct
  misc_feature 1..27: note = WD repeat-containing protein 7 (683-691)
  source 1..27: mol_type = other RNA
ctgaccgaccccgatatccacgtgctc

SEQ ID NO: 66483 - RNA, 27 nt, synthetic construct
  misc_feature 1..27: note = Transcription factor SOX-30 (235-243)
  source 1..27: mol_type = other RNA
ctggtgcacggcagcgccgaggtcatc

SEQ ID NO: 66484 - RNA, 27 nt, synthetic construct
  misc_feature 1..27: note = 60S ribosomal protein L32 (7-15)
  source 1..27: mol_type = other RNA
ctggtgaagcccaaaatcgtcaagaaa

SEQ ID NO: 66485 - RNA, 27 nt, synthetic construct
  misc_feature 1..27: note = Probable ATP-dependent RNA helicase DDX41 (390-398)
  source 1..27: mol_type = other RNA
ctggtgaagcccgtcaccatcaacgtt

SEQ ID NO: 66486 - RNA, 27 nt, synthetic construct
  misc_feature 1..27: note = Cationic amino acid transporter 3 (165-173)
  source 1..27: mol_type = other RNA
ctggtgctcatcgtcggcttcaccttt

SEQ ID NO: 66487 - RNA, 27 nt, synthetic construct
  misc_feature 1..27: note = Mitogen-activated protein kinase kinase kinase 10 (901-909)
  source 1..27: mol_type = other RNA
ctggtgagcttcggcagaaccctcaca

SEQ ID NO: 66488 - RNA, 27 nt, synthetic construct
  misc_feature 1..27: note = Glypican-4 (385-393)
  source 1..27: mol_type = other RNA
ctggtgaccgacgtcaaggagaaactc

SEQ ID NO: 66489 - RNA, 27 nt, synthetic construct
  misc_feature 1..27: note = Transmembrane protein with metallophosphoesterase domain (414-422)
  source 1..27: mol_type = other RNA
ctgtaccaggtggcccaagctaccttc

SEQ ID NO: 66490 - RNA, 27 nt, synthetic construct
  misc_feature 1..27: note = Transcription factor SOX-6 (312-320)
  source 1..27: mol_type = other RNA
atggccgctgcagccgcgagcggcctg

SEQ ID NO: 66491 - RNA, 27 nt, synthetic construct
  misc_feature 1..27: note = 28S ribosomal protein S14, mitochondrial (1-9)
  source 1..27: mol_type = other RNA
atggccgctttcatgctgggcagcctc

SEQ ID NO: 66492 - RNA, 27 nt, synthetic construct
  misc_feature 1..27: note = Steroid 21-hydroxylase (283-291)
  source 1..27: mol_type = other RNA
atggccgctgtggacctgctcatcggc

SEQ ID NO: 66493 - RNA, 27 nt, synthetic construct
  misc_feature 1..27: note = XK-related protein 5 (595-603)
  source 1..27: mol_type = other RNA
atggccgacatcagccccattctgggc

SEQ ID NO: 66494 - RNA, 24 nt, synthetic construct
  misc_feature 1..24: note = Histone-binding protein RBBP4 (1-8)
  source 1..24: mol_type = other RNA
atggccgacaaggaggctgcattc

SEQ ID NO: 66495 - RNA, 27 nt, synthetic construct
  misc_feature 1..27: note = N-acetylated-alpha-linked acidic dipeptidase 2 (1-9)
  source 1..27: mol_type = other RNA
atggccgagagcagaggcaggctgtac

SEQ ID NO: 66496 - RNA, 27 nt, synthetic construct
  misc_feature 1..27: note = Mucin-17 (161-169)
  source 1..27: mol_type = other RNA
atggccttcgtgagcaccgctcccctg

SEQ ID NO: 66497 - RNA, 27 nt, synthetic construct
  misc_feature 1..27: note = Butyrophilin-like protein 8 (1-9)
  source 1..27: mol_type = other RNA
atggccctgatgctcagccttgtgctg

SEQ ID NO: 66498 - RNA, 30 nt, synthetic construct
  misc_feature 1..30: note = Zinc finger protein 28 (1-10)
  source 1..30: mol_type = other RNA
atggccctgccccagggcctccttaccttc

SEQ ID NO: 66499 - RNA, 30 nt, synthetic construct
  misc_feature 1..30: note = Major facilitator superfamily domain-containing protein 9 (295-304)
  source 1..30: mol_type = other RNA
atggccatggctgtgatgctgtactatagc

SEQ ID NO: 66500 - RNA, 27 nt, synthetic construct
  misc_feature 1..27: note = Splicing factor 3A subunit 1 (775-783)
  source 1..27: mol_type = other RNA
atggccaacggcgctgtgatccacctg

SEQ ID NO: 66501 - RNA, 27 nt, synthetic construct
  misc_feature 1..27: note = Small nuclear ribonucleoprotein-associated protein N (189-197)
  source 1..27: mol_type = other RNA
atggccccccctccaggcatgagaccg

SEQ ID NO: 66502 - RNA, 24 nt, synthetic construct
  misc_feature 1..24: note = HLA class I histocompatibility antigen, Cw-7 alpha chain (4-11)
  source 1..24: mol_type = other RNA
atggcccccagagctctgctcctt

SEQ ID NO: 66503 - RNA, 27 nt, synthetic construct
  misc_feature 1..27: note = Coiled-coil domain-containing protein 42A (261-269)
  source 1..27: mol_type = other RNA
atggccaccctgaacctcttccagatc

SEQ ID NO: 66504 - RNA, 27 nt, synthetic construct
  misc_feature 1..27: note = Frizzled-4 (474-482)
  source 1..27: mol_type = other RNA
atggccgtggagatgctgaagatcttc

SEQ ID NO: 66505 - RNA, 27 nt, synthetic construct
  misc_feature 1..27: note = Interferon alpha-inducible protein 6 (45-53)
  source 1..27: mol_type = other RNA
atggccgtgggcgggggactggctgtc

SEQ ID NO: 66506 - RNA, 33 nt, synthetic construct
  misc_feature 1..33: note = Thyroid adenoma-associated protein (70-80)
  source 1..33: mol_type = other RNA
atgtgcgaccccaccatccagagctgtctggat

SEQ ID NO: 66507 - RNA, 27 nt, synthetic construct
  misc_feature 1..27: note = Putative tripartite motif-containing protein 49B (236-244)
  source 1..27: mol_type = other RNA
atgtgccacaagcccgacgtggagctg

SEQ ID NO: 66508 - RNA, 27 nt, synthetic construct
  misc_feature 1..27: note = C-C chemokine receptor type 9 (118-126)
  source 1..27: mol_type = other RNA
atgtgcaaggtggtcaacagcatgtac

SEQ ID NO: 66509 - RNA, 27 nt, synthetic construct
  misc_feature 1..27: note = Centrosomal protein of 72 kDa (190-198)
  source 1..27: mol_type = other RNA
atggacgccgatgacgaggctgtgctg

SEQ ID NO: 66510 - RNA, 30 nt, synthetic construct; identical to SEQ ID NO: 42283
  misc_feature 1..30: note = Rho guanine nucleotide exchange factor 12 (1356-1365)
  source 1..30: mol_type = other RNA

SEQ ID NO: 66511 - RNA, 27 nt, synthetic construct
  misc_feature 1..27: note = Adenosine receptor A2b (219-227)
  source 1..27: mol_type = other RNA
atggaccacagcagaaccacactgcag

SEQ ID NO: 66512 - RNA, 27 nt, synthetic construct
  misc_feature 1..27: note = Protein CREG1 (164-172)
  source 1..27: mol_type = other RNA
atggacatcgccaagcacagcctgttc

SEQ ID NO: 66513 - RNA, 27 nt, synthetic construct
  misc_feature 1..27: note = P2X purinoceptor 7 (140-148)
  source 1..27: mol_type = other RNA
atggacccccagagcaagggcatccaa

SEQ ID NO: 66514 - RNA, 30 nt, synthetic construct
  misc_feature 1..30: note = 40S ribosomal protein S28 (1-10)
  source 1..30: mol_type = other RNA
atggacaccagcagagtgcagcccatcaag

SEQ ID NO: 66515 - RNA, 27 nt, synthetic construct
  misc_feature 1..27: note = F-box only protein 44 (151-159)
  source 1..27: mol_type = other RNA
atggacaccacaagacccgatatcgag

SEQ ID NO: 66516 - RNA, 36 nt, synthetic construct
  misc_feature 1..36: note = BEN domain-containing protein 7 (1-12)
  source 1..36: mol_type = other RNA
atggagttcagcgaaagaaagaggtcccggaaatct

SEQ ID NO: 66517 - RNA, 30 nt, synthetic construct
  misc_feature 1..30: note = Rho guanine nucleotide exchange factor 11 (1442-1451)
  source 1..30: mol_type = other RNA
atggagctggcccacagagaactccttaag

SEQ ID NO: 66518 - RNA, 36 nt, synthetic construct
  misc_feature 1..36: note = Nitric oxide synthase, endothelial (1137-1148)
  source 1..36: mol_type = other RNA
atggagctggacgaagccggcgatgtgatcggggtc

SEQ ID NO: 66519 - RNA, 24 nt, synthetic construct
  misc_feature 1..24: note = Pseudouridylate synthase 7 homolog (1-8)
  source 1..24: mol_type = other RNA
atggagatgaccgaaatgacaggc

SEQ ID NO: 66520 - RNA, 27 nt, synthetic construct
  misc_feature 1..27: note = Lethal(3)malignant brain tumor-like protein 3 (52-60)
  source 1..27: mol_type = other RNA
atggagaacgtgaagaaagccaccgct

SEQ ID NO: 66521 - RNA, 36 nt, synthetic construct
  misc_feature 1..36: note = Heme oxygenase 1 (1-12)
  source 1..36: mol_type = other RNA
atggagagaccccagcctgacagcatgccacaagat

SEQ ID NO: 66522 - RNA, 27 nt, synthetic construct
  misc_feature 1..27: note = Metalloreductase STEAP2 (1-9)
  source 1..27: mol_type = other RNA
atggagagcatctccatgatgggctct

SEQ ID NO: 66523 - RNA, 27 nt, synthetic construct
  misc_feature 1..27: note = CD97 antigen (1-9)
  source 1..27: mol_type = other RNA
atgggcgggagagtgttcctggccttt

SEQ ID NO: 66524 - RNA, 30 nt, synthetic construct
  misc_feature 1..30: note = Putative uncharacterized protein ENSP00000381562 (1-10)
  source 1..30: mol_type = other RNA
atgggcagcatcccctccaagccttgcaac

SEQ ID NO: 66525 - RNA, 27 nt, synthetic construct
  misc_feature 1..27: note = Ubiquitin carboxyl-terminal hydrolase isozyme L3 (111-119)
  source 1..27: mol_type = other RNA
atgcacttcgagagcggctccaccctg

SEQ ID NO: 66526 - RNA, 27 nt, synthetic construct
  misc_feature 1..27: note = Complex I assembly factor TMEM126B, mitochondrial (35-43)
  source 1..27: mol_type = other RNA
atgcacggccagcccagcccttccctg

SEQ ID NO: 66527 - RNA, 27 nt, synthetic construct
  misc_feature 1..27: note = Transmembrane protein 114 (102-110)
  source 1..27: mol_type = other RNA
atgcacggcaccttcgtgatcctgctc

SEQ ID NO: 66528 - RNA, 30 nt, synthetic construct; identical to SEQ ID NO: 42301
  misc_feature 1..30: note = Leucine-twenty homeobox (1-10)
  source 1..30: mol_type = other RNA

SEQ ID NO: 66529 - RNA, 27 nt, synthetic construct
  misc_feature 1..27: note = Protein Tob1 (226-234)
  source 1..27: mol_type = other RNA
atgcacagcctgtacggcctcgggctt

SEQ ID NO: 66530 - RNA, 27 nt, synthetic construct
  misc_feature 1..27: note = Deoxyribonuclease-1-like 1 (1-9)
  source 1..27: mol_type = other RNA
atgcactaccccaccgccctgctcttc

SEQ ID NO: 66531 - RNA, 27 nt, synthetic construct
  misc_feature 1..27: note = Neuronal acetylcholine receptor subunit alpha-4 (314-322)
  source 1..27: mol_type = other RNA
atgatcttcgtgaccctgagcattgtc

SEQ ID NO: 66532 - RNA, 27 nt, synthetic construct
  misc_feature 1..27: note = Eukaryotic translation initiation factor 3 subunit L (359-367)
  source 1..27: mol_type = other RNA
atgatcaacaagcagaatgagcaaatg

SEQ ID NO: 66533 - RNA, 30 nt, synthetic construct
  misc_feature 1..30: note = Lysosomal protective protein (1-10)
  source 1..30: mol_type = other RNA
atgatcagagccgctccccctccactgttc

SEQ ID NO: 66534 - RNA, 30 nt, synthetic construct
  misc_feature 1..30: note = 60S ribosomal protein L18a (1-10)
  source 1..30: mol_type = other RNA
atgaaggccagcggcaccctgagagagtac

SEQ ID NO: 66535 - RNA, 27 nt, synthetic construct
  misc_feature 1..27: note = Lymphocyte antigen 86 (1-9)
  source 1..27: mol_type = other RNA
atgaagggcttcaccgccacactgttt

SEQ ID NO: 66536 - RNA, 27 nt, synthetic construct
  misc_feature 1..27: note = Sodium-coupled neutral amino acid transporter 5 (188-196)
  source 1..27: mol_type = other RNA
atgaagcacctgggctacctcgggtat

SEQ ID NO: 66537 - RNA, 27 nt, synthetic construct
  misc_feature 1..27: note = Neurexin-3 (694-702)
  source 1..27: mol_type = other RNA
atgaagatcattatgcccatggtgatg

SEQ ID NO: 66538 - RNA, 27 nt, synthetic construct
  misc_feature 1..27: note = Dentin matrix acidic phosphoprotein 1 (1-9)
  source 1..27: mol_type = other RNA
atgaagatcagcattctgctcatgttc

SEQ ID NO: 66539 - RNA, 27 nt, synthetic construct
  misc_feature 1..27: note = Sarcoplasmic/endoplasmic reticulum calcium ATPase 2 (479-487)
  source 1..27: mol_type = other RNA
atgaagaaagagttcaccctggaattt

SEQ ID NO: 66540 - RNA, 30 nt, synthetic construct
  misc_feature 1..30: note = 60S ribosomal protein L18a (54-63)
  source 1..30: mol_type = other RNA
atgaagaaaagctccggcgagatcgtgtac

SEQ ID NO: 66541 - RNA, 27 nt, synthetic construct
  misc_feature 1..27: note = Lysine-tRNA ligase (406-414)
  source 1..27: mol_type = other RNA
atgaagctgcccgagaccaacctcttc

SEQ ID NO: 66542 - RNA, 30 nt, synthetic construct; identical to SEQ ID NO: 42315
  misc_feature 1..30: note = Glucose-fructose oxidoreductase domain-containing protein 2 (1-10)
  source 1..30: mol_type = other RNA

SEQ ID NO: 66543 - RNA, 27 nt, synthetic construct
  misc_feature 1..27: note = Striatin-interacting protein 1 (733-741)
  source 1..27: mol_type = other RNA
atgaagaccatgagcgccatctaccag

SEQ ID NO: 66544 - RNA, 27 nt, synthetic construct
  misc_feature 1..27: note = Zinc finger protein 425 (38-46)
  source 1..27: mol_type = other RNA
atgaagaccaactacgagacactggac

SEQ ID NO: 66545 - RNA, 27 nt, synthetic construct
  misc_feature 1..27: note = Peptidyl-prolyl cis-trans isomerase B (9-17)
  source 1..27: mol_type = other RNA
atgaaggtgctgctcgccgctgcactt

SEQ ID NO: 66546 - RNA, 27 nt, synthetic construct
  misc_feature 1..27: note = Protein tyrosine phosphatase type IVA 1 (124-132)
  source 1..27: mol_type = other RNA
atgaagtacgaggacgccgtgcagttc

SEQ ID NO: 66547 - RNA, 33 nt, synthetic construct
  misc_feature 1..33: note = Transmembrane protein 50A (102-112)
  source 1..33: mol_type = other RNA
atgctggccttcggcagcctcatcgcttccatg

SEQ ID NO: 66548 - RNA, 33 nt, synthetic construct
  misc_feature 1..33: note = Inactive phospholipase C-like protein 1 (259-269)
  source 1..33: mol_type = other RNA
atgctggaggacaccagcgtggaactcatcaag

SEQ ID NO: 66549 - RNA, 30 nt, synthetic construct
  misc_feature 1..30: note = Tyrosine-protein phosphatase non-receptor type 2 (134-143)
  source 1..30: mol_type = other RNA
atgctgttcaaggagaccggctttagcgtg

SEQ ID NO: 66550 - RNA, 36 nt, synthetic construct
  misc_feature 1..36: note = SPARC-related modular calcium-binding protein 1 (1-12)
  source 1..36: mol_type = other RNA
atgctgcccgccagatgcgctaggctccttacccct

SEQ ID NO: 66551 - RNA, 27 nt, synthetic construct
  misc_feature 1..27: note = E3 ubiquitin-protein ligase TRIM22 (248-256)
  source 1..27: mol_type = other RNA
atgctgcaggacgtgatcgatgtcatg

SEQ ID NO: 66552 - RNA, 27 nt, synthetic construct
  misc_feature 1..27: note = Condensin complex subunit 1 (56-64)
  source 1..27: mol_type = other RNA
atgctgcagcacttcgacaccatctac

SEQ ID NO: 66553 - RNA, 27 nt, synthetic construct
  misc_feature 1..27: note = Fibronectin (1-9)
  source 1..27: mol_type = other RNA
atgctgagaggccccgggcctggactc

SEQ ID NO: 66554 - RNA, 27 nt, synthetic construct
  misc_feature 1..27: note = Protein S100-A8 (1-9)
  source 1..27: mol_type = other RNA
atgctgaccgagctcgaaaaggccctt

SEQ ID NO: 66555 - RNA, 30 nt, synthetic construct; identical to SEQ ID NO: 42328
  misc_feature 1..30: note = NACHT, LRR and PYD domains-containing protein 4 (169-178)
  source 1..30: mol_type = other RNA

SEQ ID NO: 66556 - RNA, 27 nt, synthetic construct
  misc_feature 1..27: note = Eukaryotic translation initiation factor 4 gamma 1 (88-96)
  source 1..27: mol_type = other RNA
atgatgatccccagccagatttcctac

SEQ ID NO: 66557 - RNA, 27 nt, synthetic construct
  misc_feature 1..27: note = Olfactory receptor 4K1 (112-120)
  source 1..27: mol_type = other RNA
atgatgctgctcgtggccatggcttac

SEQ ID NO: 66558 - RNA, 30 nt, synthetic construct
  misc_feature 1..30: note = BUB3-interacting and GLEBS motif-containing protein ZNF207 (185-194)
  source 1..30: mol_type = other RNA
atgatgcccatgggcgggatgatgcctcca

SEQ ID NO: 66559 - RNA, 24 nt, synthetic construct
  misc_feature 1..24: note = C-myc promoter-binding protein (618-625)
  source 1..24: mol_type = other RNA
atgatgaccaagacacagatgttc

SEQ ID NO: 66560 - RNA, 24 nt, synthetic construct
  misc_feature 1..24: note = Protein SSX4 (1-8)
  source 1..24: mol_type = other RNA
atgaacggcgacgatgccttcgct

SEQ ID NO: 66561 - RNA, 24 nt, synthetic construct
  misc_feature 1..24: note = Putative uncharacterized protein ENSP00000383407 (1-8)
  source 1..24: mol_type = other RNA
atgaacctgttctgcatcagcctc

SEQ ID NO: 66562 - RNA, 33 nt, synthetic construct
  misc_feature 1..33: note = Coiled-coil domain-containing protein 127 (1-11)
  source 1..33: mol_type = other RNA
atgaacaatctgaacgacccccctaattggaac

SEQ ID NO: 66563 - RNA, 27 nt, synthetic construct
  misc_feature 1..27: note = General transcription factor IIF subunit 1 (417-425)
  source 1..27: mol_type = other RNA
atgcccgccgctaagagactgaggctc

SEQ ID NO: 66564 - RNA, 27 nt, synthetic construct
  misc_feature 1..27: note = Actin-related protein 2/3 complex subunit 3 (1-9)
  source 1..27: mol_type = other RNA
atgcccgcctaccacagctccctgatg

SEQ ID NO: 66565 - RNA, 27 nt, synthetic construct
  misc_feature 1..27: note = Kelch domain-containing protein 10 (360-368)
  source 1..27: mol_type = other RNA
atgcccgagcctgtgtacttccactgc

SEQ ID NO: 66566 - RNA, 30 nt, synthetic construct
  misc_feature 1..30: note = von Willebrand factor A domain-containing protein 5B2 (1-10)
  source 1..30: mol_type = other RNA
atgcccggcctgtactgccctagctcctgg

SEQ ID NO: 66567 - RNA, 27 nt, synthetic construct
  misc_feature 1..27: note = Acid ceramidase (1-9)
  source 1..27: mol_type = other RNA
atgcccggcagaagctgcgtggccctg

SEQ ID NO: 66568 - RNA, 24 nt, synthetic construct
  misc_feature 1..24: note = Eukaryotic translation initiation factor 2 subunit 1 (223-230)
  source 1..24: mol_type = other RNA
atgcccatcaagattaacctgata

SEQ ID NO: 66569 - RNA, 36 nt, synthetic construct
  misc_feature 1..36: note = Cytochrome c oxidase subunit 8C, mitochondrial (1-12)
  source 1..36: mol_type = other RNA
atgcccctgctcagaggcaggtgccctgcccggcgc

SEQ ID NO: 66570 - RNA, 36 nt, synthetic construct
  misc_feature 1..36: note = Retrotransposon gag domain-containing protein 1 (964-975)
  source 1..36: mol_type = other RNA
atgcccctgatgagcgccatggcttccggcgagatg

SEQ ID NO: 66571 - RNA, 36 nt, synthetic construct
  misc_feature 1..36: note = BUB3-interacting and GLEBS motif-containing protein ZNF207 (181-192)
  source 1..36: mol_type = other RNA
atgccccctggcatgatgccaatggggggaatgatg

SEQ ID NO: 66572 - RNA, 27 nt, synthetic construct
  misc_feature 1..27: note = Pre-mRNA-processing-splicing factor 8 (108-116)
  source 1..27: mol_type = other RNA
atgccctgggagcagatcagagacgtg

SEQ ID NO: 66573 - RNA, 27 nt, synthetic construct
  misc_feature 1..27: note = Protein diaphanous homolog 2 (733-741)
  source 1..27: mol_type = other RNA
atgccctacgaggacatcagaaacgtg

SEQ ID NO: 66574 - RNA, 27 nt, synthetic construct
  misc_feature 1..27: note = Nuclear receptor coactivator 2 (1151-1159)
  source 1..27: mol_type = other RNA
atgcaggaccccaacttccacaccatg

SEQ ID NO: 66575 - RNA, 27 nt, synthetic construct
  misc_feature 1..27: note = Heterogeneous nuclear ribonucleoprotein H (352-360)
  source 1..27: mol_type = other RNA
atgcagcacagatacgtggagctgttc

SEQ ID NO: 66576 - RNA, 27 nt, synthetic construct
  misc_feature 1..27: note = Myosin-7 (77-85)
  source 1..27: mol_type = other RNA
atgcagcaaaacccccctaagttcgac

SEQ ID NO: 66577 - RNA, 27 nt, synthetic construct
  misc_feature 1..27: note = Laminin subunit alpha-2 (1349-1357)
  source 1..27: mol_type = other RNA
atgagacagagcaggatctccgagatt

SEQ ID NO: 66578 - RNA, 30 nt, synthetic construct
  misc_feature 1..30: note = Toll-like receptor 3 (1-10)
  source 1..30: mol_type = other RNA
atgagacagaccctgccctgcatctacttc

SEQ ID NO: 66579 - RNA, 24 nt, synthetic construct
  misc_feature 1..24: note = Transmembrane channel-like protein 2 (170-177)
  source 1..24: mol_type = other RNA
atgagaagcaagccctggcctatg

SEQ ID NO: 66580 - RNA, 27 nt, synthetic construct
  misc_feature 1..27: note = Clathrin coat assembly protein AP180 (156-164)
  source 1..27: mol_type = other RNA
atgagaaccatggcccccgagaagctg

SEQ ID NO: 66581 - RNA, 27 nt, synthetic construct
  misc_feature 1..27: note = Glucose-6-phosphate translocase (266-274)
  source 1..27: mol_type = other RNA
atgagcgccctggaggtgggcgggctc

SEQ ID NO: 66582 - RNA, 24 nt, synthetic construct
  misc_feature 1..24: note = RING finger protein 148 (1-8)
  source 1..24: mol_type = other RNA
atgagcttcctgagaatcaccccc

SEQ ID NO: 66583 - RNA, 27 nt, synthetic construct
  misc_feature 1..27: note = Nesprin-1 (4697-4705)
  source 1..27: mol_type = other RNA
atgagcaaggtgcccaccgacctggcc

SEQ ID NO: 66584 - RNA, 24 nt, synthetic construct
  misc_feature 1..24: note = Zinc finger protein ZFPM2 (1-8)
  source 1..24: mol_type = other RNA
atgagcagaaggaagcagtccaaa

SEQ ID NO: 66585 - RNA, 27 nt, synthetic construct
  misc_feature 1..27: note = Cerebral dopamine neurotrophic factor (103-111)
  source 1..27: mol_type = other RNA
atgagcgtgcacatgcccgccatgaag

SEQ ID NO: 66586 - RNA, 27 nt, synthetic construct
  misc_feature 1..27: note = Heat shock protein 105 kDa (1-9)
  source 1..27: mol_type = other RNA
atgagcgtggtcggcctggacgttggg

SEQ ID NO: 66587 - RNA, 27 nt, synthetic construct
  misc_feature 1..27: note = Solute carrier family 35 member E2B (144-152)
  source 1..27: mol_type = other RNA
atgaccatgctgttcgtgggcctcatg

SEQ ID NO: 66588 - RNA, 27 nt, synthetic construct
  misc_feature 1..27: note = Integrin beta-7 (1-9)
  source 1..27: mol_type = other RNA
atggtggccctgcccatggtcctcgtt

SEQ ID NO: 66589 - RNA, 30 nt, synthetic construct
  misc_feature 1..30: note = Testis- and ovary-specific PAZ domain-containing protein 1 (583-592)
  source 1..30: mol_type = other RNA
atggtgatcaaggagcccattataaaagac

SEQ ID NO: 66590 - RNA, 24 nt, synthetic construct
  misc_feature 1..24: note = Transmembrane and coiled-coil domain-containing protein 1 (85-92)
  source 1..24: mol_type = other RNA
atggtgagaatgaagagcatgttc

SEQ ID NO: 66591 - RNA, 24 nt, synthetic construct
  misc_feature 1..24: note = Vomeronasal type-1 receptor 3 (279-286)
  source 1..24: mol_type = other RNA
atggtgagccccttcgtcctgatg

SEQ ID NO: 66592 - RNA, 27 nt, synthetic construct
  misc_feature 1..27: note = Receptor expression-enhancing protein 2 (1-9)
  source 1..27: mol_type = other RNA
atggtgagctggatcatttccagactg

SEQ ID NO: 66593 - RNA, 27 nt, synthetic construct
  misc_feature 1..27: note = Secretogranin-1 (32-40)
  source 1..27: mol_type = other RNA
atggtgaccagatgcatcattgaggtc

SEQ ID NO: 66594 - RNA, 30 nt, synthetic construct
  misc_feature 1..30: note = Protocadherin-19 (125-134)
  source 1..30: mol_type = other RNA
aacgcccccagcttccctgctgcacagatc

SEQ ID NO: 66595 - RNA, 27 nt, synthetic construct
  misc_feature 1..27: note = Exportin-6 (750-758)
  source 1..27: mol_type = other RNA
aaccacgccagcctgatctccgctctc

SEQ ID NO: 66596 - RNA, 27 nt, synthetic construct
  misc_feature 1..27: note = Olfactomedin-like protein 2B (387-395)
  source 1..27: mol_type = other RNA
aaccacgccagcgtgggccccaccctg

SEQ ID NO: 66597 - RNA, 27 nt, synthetic construct
  misc_feature 1..27: note = Serine-protein kinase ATM (1801-1809)
  source 1..27: mol_type = other RNA
aaccacgacatctggattaagaccctg

SEQ ID NO: 66598 - RNA, 36 nt, synthetic construct
  misc_feature 1..36: note = Histone-binding protein RBBP4 (122-133)
  source 1..36: mol_type = other RNA
aaccacgagggcgaagtgaatagagccaggtacatg

SEQ ID NO: 66599 - RNA, 27 nt, synthetic construct
  misc_feature 1..27: note = WD repeat-containing protein 6 (772-780)
  source 1..27: mol_type = other RNA
aaccacatcagctccgtgagagccgtc

SEQ ID NO: 66600 - RNA, 27 nt, synthetic construct
  misc_feature 1..27: note = Integrator complex subunit 3 (462-470)
  source 1..27: mol_type = other RNA
aaccacatcgtggagaagagagtcctg

SEQ ID NO: 66601 - RNA, 27 nt, synthetic construct
  misc_feature 1..27: note = Protein RMD5 homolog A (226-234)
  source 1..27: mol_type = other RNA
aaccaccagaaggacatccaagtgctg

SEQ ID NO: 66602 - RNA, 27 nt, synthetic construct
  misc_feature 1..27: note = Protein dopey-2 (223-231)
  source 1..27: mol_type = other RNA
aaccaccagctgaccgtgaagagcctc

SEQ ID NO: 66603 - RNA, 27 nt, synthetic construct
  misc_feature 1..27: note = Protein FAM193A (991-999)
  source 1..27: mol_type = other RNA
aaccacagcgagcccagacctggcctg

SEQ ID NO: 66604 - RNA, 27 nt, synthetic construct
  misc_feature 1..27: note = Myb-binding protein 1A (554-562)
  source 1..27: mol_type = other RNA
aaccacagccataatgtgaccacagtc

SEQ ID NO: 66605 - RNA, 27 nt, synthetic construct
  misc_feature 1..27: note = E3 ubiquitin-protein ligase RNF19A (822-830)
  source 1..27: mol_type = other RNA
aaccacagccatcagaccatggagctg

SEQ ID NO: 66606 - RNA, 33 nt, synthetic construct
  misc_feature 1..33: note = Vesicle transport protein SFT2B (73-83)
  source 1..33: mol_type = other RNA
aacatcgccagcattggctccaccatattcctg

SEQ ID NO: 66607 - RNA, 27 nt, synthetic construct
  misc_feature 1..27: note = Bardet-Biedl syndrome 4 protein (82-90)
  source 1..27: mol_type = other RNA
aacatccaggagagcctggaactcttc

SEQ ID NO: 66608 - RNA, 27 nt, synthetic construct
  misc_feature 1..27: note = V-type proton ATPase 116 kDa subunit a isoform 3 (810-818)
  source 1..27: mol_type = other RNA
aacaagttctacagcggcaccgggtat

SEQ ID NO: 66609 - RNA, 27 nt, synthetic construct
  misc_feature 1..27: note = WD repeat-containing protein 82 (83-91)
  source 1..27: mol_type = other RNA
aacaagatcgacgataccattagatac

SEQ ID NO: 66610 - RNA, 27 nt, synthetic construct
  misc_feature 1..27: note = C-X-C chemokine receptor type 4 (37-45)
  source 1..27: mol_type = other RNA
aacaagatcttcctgcccaccatttac

SEQ ID NO: 66611 - RNA, 36 nt, synthetic construct
  misc_feature 1..36: note = Sialic acid-binding Ig-like lectin 9 (225-236)
  source 1..36: mol_type = other RNA
aacaagaccgtgcacctgaatgtcagctacccccct

SEQ ID NO: 66612 - RNA, 27 nt, synthetic construct
  misc_feature 1..27: note = Zinc finger and BTB domain-containing protein 38 (494-502)
  source 1..27: mol_type = other RNA
aacaaggtgttcgccctggctgagtac

SEQ ID NO: 66613 - RNA, 27 nt, synthetic construct
  misc_feature 1..27: note = Probable ubiquitin carboxyl-terminal hydrolase FAF-X (359-367)
  source 1..27: mol_type = other RNA
aacaaggtgatcagctccgtctcttac

SEQ ID NO: 66614 - RNA, 27 nt, synthetic construct
  misc_feature 1..27: note = Monocarboxylate transporter 1 (81-89)
  source 1..27: mol_type = other RNA
aacaagtacggcagcagaatcgtgatg

SEQ ID NO: 66615 - RNA, 27 nt, synthetic construct
  misc_feature 1..27: note = Bifunctional glutamate/proline-tRNA ligase (369-377)
  source 1..27: mol_type = other RNA
aacaagtacaatgtgtatcccacctac

SEQ ID NO: 66616 - RNA, 33 nt, synthetic construct
  misc_feature 1..33: note = 60S ribosomal protein L7 (146-156)
  source 1..33: mol_type = other RNA
aacctgaagagcgtgaatgagctcatctacaaa

SEQ ID NO: 66617 - RNA, 27 nt, synthetic construct
  misc_feature 1..27: note = Protein MMS22-like (862-870)
  source 1..27: mol_type = other RNA
aacctgagcgaggtgaagtccatcttc

SEQ ID NO: 66618 - RNA, 30 nt, synthetic construct
  misc_feature 1..30: note = Leucine-rich repeat and calponin homology domain-containing protein 2 (140-149)
  source 1..30: mol_type = other RNA
aacctgtaccacaattgcatcaagaccatt

SEQ ID NO: 66619 - RNA, 27 nt, synthetic construct
  misc_feature 1..27: note = Lysine-specific histone demethylase 1A (492-500)
  source 1..27: mol_type = other RNA
aacctgtacaaggcccccatcctcctt

SEQ ID NO: 66620 - RNA, 24 nt, synthetic construct
  misc_feature 1..24: note = Dynein regulatory complex protein 1 (2-9)
  source 1..24: mol_type = other RNA
aacccccctggcagcctggaggcc

SEQ ID NO: 66621 - RNA, 27 nt, synthetic construct
  misc_feature 1..27: note = F-box only protein 8 (11-19)
  source 1..27: mol_type = other RNA
aaccagcaactgcagcaggagggctac

SEQ ID NO: 66622 - RNA, 27 nt, synthetic construct
  misc_feature 1..27: note = Serine/arginine repetitive matrix protein 2 (1399-1407)
  source 1..27: mol_type = other RNA
aaccagagcatctcctctcccgtgctg

SEQ ID NO: 66623 - RNA, 27 nt, synthetic construct
  misc_feature 1..27: note = COP9 signalosome complex subunit 2 (34-42)
  source 1..27: mol_type = other RNA
aaccagtactataatagcaaggccctg

SEQ ID NO: 66624 - RNA, 30 nt, synthetic construct
  misc_feature 1..30: note = Gamma-aminobutyric acid receptor subunit delta (246-255)
  source 1..30: mol_type = other RNA
aacagaggcgtgtacatcattcagagctat

SEQ ID NO: 66625 - RNA, 33 nt, synthetic construct
  misc_feature 1..33: note = Anaphase-promoting complex subunit CDC26 (75-85)
  source 1..33: mol_type = other RNA
aacagaagctcccagttcggctctctggagttt

SEQ ID NO: 66626 - RNA, 27 nt, synthetic construct
  misc_feature 1..27: note = Ubiquitin-like modifier-activating enzyme 1 (449-457)
  source 1..27: mol_type = other RNA
aacagatacgacggccaggtggccgtc

SEQ ID NO: 66627 - RNA, 27 nt, synthetic construct
  misc_feature 1..27: note = Small G protein signaling modulator 3 (329-337)
  source 1..27: mol_type = other RNA
aacagcgcctccatcttcaataccctg

SEQ ID NO: 66628 - RNA, 24 nt, synthetic construct
  misc_feature 1..24: note = Nuclear transcription factor Y subunit alpha (232-239)
  source 1..24: mol_type = other RNA
aacagcggcgggatggtgatgatg

SEQ ID NO: 66629 - RNA, 27 nt, synthetic construct
  misc_feature 1..27: note = Unconventional myosin-XV (3472-3480)
  source 1..27: mol_type = other RNA
aacagctcctacccctatgtggagatc

SEQ ID NO: 66630 - RNA, 27 nt, synthetic construct
  misc_feature 1..27: note = Junction plakoglobin (584-592)
  source 1..27: mol_type = other RNA
aacaccatccccctgttcgtgcagctc

SEQ ID NO: 66631 - RNA, 27 nt, synthetic construct
  misc_feature 1..27: note = Olfactory receptor 5D18 (7-15)
  source 1..27: mol_type = other RNA
aacaccagcggcacaactttcacgctg

SEQ ID NO: 66632 - RNA, 27 nt, synthetic construct
  misc_feature 1..27: note = Kinetochore protein Nuf2 (10-18)
  source 1..27: mol_type = other RNA
aacgtggccgagatcgtcattcacata

SEQ ID NO: 66633 - RNA, 30 nt, synthetic construct
  misc_feature 1..30: note = Sodium- and chloride-dependentine transporter 2 (288-297)
  source 1..30: mol_type = other RNA
aacgtgatcatttgctacaccctgttctat

SEQ ID NO: 66634 - RNA, 36 nt, synthetic construct
  misc_feature 1..36: note = Alpha-enolase (118-129)
  source 1..36: mol_type = other RNA
aacgtgatcaatggcgggagccacgccggaaacaag

SEQ ID NO: 66635 - RNA, 27 nt, synthetic construct
  misc_feature 1..27: note = Clustered mitochondria protein homolog (96-104)
  source 1..27: mol_type = other RNA
aacgtgctggaccacttcagcgagctc

SEQ ID NO: 66636 - RNA, 30 nt, synthetic construct
  misc_feature 1..30: note = Myosin regulatory light chain 12B (155-164)
  source 1..30: mol_type = other RNA
aactacatcgagttcaccagaattctgaag

SEQ ID NO: 66637 - RNA, 24 nt, synthetic construct
  misc_feature 1..24: note = Protein LYRIC (498-505)
  source 1..24: mol_type = other RNA
cccgccgaggtgctggtcaagaac

SEQ ID NO: 66638 - RNA, 30 nt, synthetic construct
  misc_feature 1..30: note = Peroxiredoxin-4 (260-269)
  source 1..30: mol_type = other RNA
cccgccggcaagctgaaatacttcgacaag

SEQ ID NO: 66639 - RNA, 27 nt, synthetic construct
  misc_feature 1..27: note = Leucine-rich repeat-containing protein 26 (63-71)
  source 1..27: mol_type = other RNA
cccgccgtgcctccaggcctgagcctc

SEQ ID NO: 66640 - RNA, 27 nt, synthetic construct
  misc_feature 1..27: note = StAR-related lipid transfer protein 13 (243-251)
  source 1..27: mol_type = other RNA
cccttccaccctaagaacgagaaacca

SEQ ID NO: 66641 - RNA, 30 nt, synthetic construct
  misc_feature 1..30: note = Dystrophia myotonica WD repeat-containing protein (517-526)
  source 1..30: mol_type = other RNA
cccttcagcatcggcagatttgccaccctg

SEQ ID NO: 66642 - RNA, 30 nt, synthetic construct
  misc_feature 1..30: note = B-lymphocyte antigen CD19 (99-108)
  source 1..30: mol_type = other RNA
cccggccctccaagcgagaaggcctggcag

SEQ ID NO: 66643 - RNA, 27 nt, synthetic construct
  misc_feature 1..27: note = Zinc finger protein 853 (438-446)
  source 1..27: mol_type = other RNA
cccggctacgtggtcgttcaggagctg

SEQ ID NO: 66644 - RNA, 36 nt, synthetic construct
  misc_feature 1..36: note = DNA replication licensing factor MCM6 (505-516)
  source 1..36: mol_type = other RNA
cccatcagcggccactacgacagatccaagtctctg

SEQ ID NO: 66645 - RNA, 30 nt, synthetic construct
  misc_feature 1..30: note = UPF0428 protein CXorf56 (2-11)
  source 1..30: mol_type = other RNA
cccaaggtggtcagcagatccgttgtgtgc

SEQ ID NO: 66646 - RNA, 27 nt, synthetic construct
  misc_feature 1..27: note = Integrin beta-6 (709-717)
  source 1..27: mol_type = other RNA
cccatgatcatgctgggcgtgagcctc

SEQ ID NO: 66647 - RNA, 30 nt, synthetic construct
  misc_feature 1..30: note = AF4/FMR2 family member 2 (271-280)
  source 1..30: mol_type = other RNA
ccccctggcctgtactgcaagaccagcatg

SEQ ID NO: 66648 - RNA, 27 nt, synthetic construct
  misc_feature 1..27: note = Basic salivary proline-rich protein 4 (50-58)
  source 1..27: mol_type = other RNA
ccccctccaccgcccggcaagcctcag

SEQ ID NO: 66649 - RNA, 27 nt, synthetic construct
  misc_feature 1..27: note = RAS guanyl-releasing protein 2 (400-408)
  source 1..27: mol_type = other RNA
ccccctccaagaccgcccgtgctggag

SEQ ID NO: 66650 - RNA, 27 nt, synthetic construct
  misc_feature 1..27: note = Coiled-coil domain-containing protein 8 (89-97)
  source 1..27: mol_type = other RNA
ccccctagactggtggtcggcacctac

SEQ ID NO: 66651 - RNA, 36 nt, synthetic construct
  misc_feature 1..36: note = RNA-binding protein FUS (344-355)
  source 1..36: mol_type = other RNA
ccccctagcgccaaggctgcaatcgactggttcgat

SEQ ID NO: 66652 - RNA, 24 nt, synthetic construct
  misc_feature 1..24: note = Cornulin (2-9)
  source 1..24: mol_type = other RNA
ccccagctgctccaaaacatcaat

SEQ ID NO: 66653 - RNA, 27 nt, synthetic construct
  misc_feature 1..27: note = Sialate O-acetylesterase (378-386)
  source 1..27: mol_type = other RNA
cccagagacaagcagaccgtggcctac

SEQ ID NO: 66654 - RNA, 27 nt, synthetic construct
  misc_feature 1..27: note = Metastasis-associated in colon cancer protein 1 (382-390)
  source 1..27: mol_type = other RNA
cccagcttcaccgtggtcctgacagtt

SEQ ID NO: 66655 - RNA, 33 nt, synthetic construct
  misc_feature 1..33: note = ATP synthase F(0) complex subunit B1, mitochondrial (43-53)
  source 1..33: mol_type = other RNA
cccgtgcctccactgccggagtacggcgggaag

SEQ ID NO: 66656 - RNA, 27 nt, synthetic construct
  misc_feature 1..27: note = MAP7 domain-containing protein 3 (645-653)
  source 1..27: mol_type = other RNA
caggccgaggaccacctgaagctcaaa

SEQ ID NO: 66657 - RNA, 27 nt, synthetic construct
  misc_feature 1..27: note = 26S proteasome non-ATPase regulatory subunit 12 (265-273)
  source 1..27: mol_type = other RNA
caggccctgaagagcgtggtcctctac

SEQ ID NO: 66658 - RNA, 27 nt, synthetic construct
  misc_feature 1..27: note = Bromodomain-containing protein 8 (465-473)
  source 1..27: mol_type = other RNA
caggagagagacaagcccgtgcctctg

SEQ ID NO: 66659 - RNA, 30 nt, synthetic construct
  misc_feature 1..30: note = Prolyl endopeptidase (268-277)
  source 1..30: mol_type = other RNA
caggagagctccggcatcgccgggattctg

SEQ ID NO: 66660 - RNA, 27 nt, synthetic construct
  misc_feature 1..27: note = Mitochondrial import inner membrane translocase subunit Tim17-B (140-148)
  source 1..27: mol_type = other RNA
cagttcagaaacgcccccccttttctg

SEQ ID NO: 66661 - RNA, 27 nt, synthetic construct
  misc_feature 1..27: note = 60S acidic ribosomal protein P2 (57-65)
  source 1..27: mol_type = other RNA
cagggcatcgggaagctggccagcgtg

SEQ ID NO: 66662 - RNA, 33 nt, synthetic construct
  misc_feature 1..33: note = Salivary acidic proline-rich phosphoprotein 1/2 (82-92)
  source 1..33: mol_type = other RNA
cagggcccccctccaccgcaagggaagccccag

SEQ ID NO: 66663 - RNA, 27 nt, synthetic construct
  misc_feature 1..27: note = Protocadherin Fat 4 (557-565)
  source 1..27: mol_type = other RNA
cagggcgtgcaccccaaggtcagctac

SEQ ID NO: 66664 - RNA, 27 nt, synthetic construct
  misc_feature 1..27: note = Transmembrane protein 205 (75-83)
  source 1..27: mol_type = other RNA
cagcacgcctgggctcaactgaccttc

SEQ ID NO: 66665 - RNA, 27 nt, synthetic construct
  misc_feature 1..27: note = MICOS complex subunit MIC10 (59-67)
  source 1..27: mol_type = other RNA
cagcacgacttccaagccccctacctg

SEQ ID NO: 66666 - RNA, 24 nt, synthetic construct
  misc_feature 1..24: note = CX3C chemokine receptor 1 (144-151)
  source 1..24: mol_type = other RNA
cagcacggcgtgaccatcagcctg

SEQ ID NO: 66667 - RNA, 27 nt, synthetic construct
  misc_feature 1..27: note = 60S ribosomal protein L8 (217-225)
  source 1..27: mol_type = other RNA
cagcacatcggcaagcccagcaccatt

SEQ ID NO: 66668 - RNA, 27 nt, synthetic construct
  misc_feature 1..27: note = Inositol polyphosphate 5-phosphatase K (105-113)
  source 1..27: mol_type = other RNA
cagcacctgccctacatccaaattctc

SEQ ID NO: 66669 - RNA, 27 nt, synthetic construct
  misc_feature 1..27: note = Torsin-3A (137-145)
  source 1..27: mol_type = other RNA
cagcacctggtgcaacagctcgtcctt

SEQ ID NO: 66670 - RNA, 33 nt, synthetic construct
  misc_feature 1..33: note = Forkhead box protein J3 (593-603)
  source 1..33: mol_type = other RNA
cagcacatgatgcccagccaagccttccagatg

SEQ ID NO: 66671 - RNA, 27 nt, synthetic construct
  misc_feature 1..27: note = PAX-interacting protein 1 (506-514)
  source 1..27: mol_type = other RNA
cagcaccaactgcagcagcagcaactc

SEQ ID NO: 66672 - RNA, 27 nt, synthetic construct
  misc_feature 1..27: note = Dual specificity tyrosine-phosphorylation-regulated kinase 1A (475-483)
  source 1..27: mol_type = other RNA
cagcacagcttctttaagaaaaccgcc

SEQ ID NO: 66673 - RNA, 27 nt, synthetic construct
  misc_feature 1..27: note = G protein-regulated inducer of neurite outgrowth 3 (749-757)
  source 1..27: mol_type = other RNA
cagcacagcgtgttccaatccatgctg

SEQ ID NO: 66674 - RNA, 27 nt, synthetic construct
  misc_feature 1..27: note = Histone-lysine N-methyltransferase 2E (207-215)
  source 1..27: mol_type = other RNA
cagcacacccccacaagcatcactctg

SEQ ID NO: 66675 - RNA, 27 nt, synthetic construct
  misc_feature 1..27: note = Class A basic helix-loop-helix protein 15 (151-159)
  source 1..27: mol_type = other RNA
cagcactaccaacagcagcagcaagtg

SEQ ID NO: 66676 - RNA, 27 nt, synthetic construct
  misc_feature 1..27: note = Glutathione peroxidase 7 (62-70)
  source 1..27: mol_type = other RNA
cagcactacagagccctgcaacagctc

SEQ ID NO: 66677 - RNA, 27 nt, synthetic construct
  misc_feature 1..27: note = N-terminal EF-hand calcium-binding protein 2 (176-184)
  source 1..27: mol_type = other RNA
cagatccaaagcctgctctcctctgtg

SEQ ID NO: 66678 - RNA, 30 nt, synthetic construct
  misc_feature 1..30: note = Ig heavy chain V-II region MCE (1-10)
  source 1..30: mol_type = other RNA
cagatcaccctgaaggagagcggccccaca

SEQ ID NO: 66679 - RNA, 27 nt, synthetic construct
  misc_feature 1..27: note = CDGSH iron-sulfur domain-containing protein 3, mitochondrial (119-127)
  source 1..27: mol_type = other RNA
cagaaggccgaggtgggcagccccctg

SEQ ID NO: 66680 - RNA, 27 nt, synthetic construct
  misc_feature 1..27: note = Splicing factor 3B subunit 3 (1087-1095)
  source 1..27: mol_type = other RNA
cagaaggccgaggtgatcatgaactac

SEQ ID NO: 66681 - RNA, 27 nt, synthetic construct
  misc_feature 1..27: note = Apolipoprotein L6 (219-227)
  source 1..27: mol_type = other RNA
cagaaggccttcgctggcaccacactg

SEQ ID NO: 66682 - RNA, 30 nt, synthetic construct
  misc_feature 1..30: note = Synapsin-2 (317-326)
  source 1..30: mol_type = other RNA
cagaagatcggcaacaattacaaagcctat

SEQ ID NO: 66683 - RNA, 27 nt, synthetic construct
  misc_feature 1..27: note = E3 ubiquitin-protein ligase DTX3L (683-691)
  source 1..27: mol_type = other RNA
cagaagctgatcttcaccgtgggctac

SEQ ID NO: 66684 - RNA, 36 nt, synthetic construct
  misc_feature 1..36: note = Very-long-chain enoyl-CoA reductase (66-77)
  source 1..36: mol_type = other RNA
cagaagctgcccgtgggcaccacagccactctctac

SEQ ID NO: 66685 - RNA, 27 nt, synthetic construct
  misc_feature 1..27: note = ATP-dependent DNA helicase Q1 (438-446)
  source 1..27: mol_type = other RNA
cagaagctgtacgagatggtgagctat

SEQ ID NO: 66686 - RNA, 30 nt, synthetic construct
  misc_feature 1..30: note = Melanoma inhibitory activity protein 3 (1518-1527)
  source 1..30: mol_type = other RNA
cagaaggtggagatcctgaacgaactctac

SEQ ID NO: 66687 - RNA, 27 nt, synthetic construct
  misc_feature 1..27: note = Clathrin interactor 1 (130-138)
  source 1..27: mol_type = other RNA
cagaaggtgaaagagctggtcgaattc

SEQ ID NO: 66688 - RNA, 27 nt, synthetic construct
  misc_feature 1..27: note = Cell growth-regulating nucleolar protein (56-64)
  source 1..27: mol_type = other RNA
cagaagtacggcgggaaaggatatgag

SEQ ID NO: 66689 - RNA, 33 nt, synthetic construct
  misc_feature 1..33: note = Pre-mRNA-processing-splicing factor 8 (573-583)
  source 1..33: mol_type = other RNA
cagctggccgacggcctccaatacatcttcgct

SEQ ID NO: 66690 - RNA, 27 nt, synthetic construct
  misc_feature 1..27: note = Chloride transport protein 6 (651-659)
  source 1..27: mol_type = other RNA
cagctgatcagcaacaatattaagttc

SEQ ID NO: 66691 - RNA, 27 nt, synthetic construct
  misc_feature 1..27: note = Probable helicase senataxin (307-315)
  source 1..27: mol_type = other RNA
cagctgatggaccccatcgtggccttc

SEQ ID NO: 66692 - RNA, 27 nt, synthetic construct
  misc_feature 1..27: note = BRCA1-associated protein (505-513)
  source 1..27: mol_type = other RNA
cagaacaagctgaaagaggaagagaga

SEQ ID NO: 66693 - RNA, 27 nt, synthetic construct
  misc_feature 1..27: note = dCTP pyrophosphatase 1 (52-60)
  source 1..27: mol_type = other RNA
cagcccagaaacctgctccttgccctg

SEQ ID NO: 66694 - RNA, 27 nt, synthetic construct
  misc_feature 1..27: note = E3 ubiquitin-protein ligase TRIM37 (638-646)
  source 1..27: mol_type = other RNA
cagcccagacctccagccagcctgctc

SEQ ID NO: 66695 - RNA, 36 nt, synthetic construct
  misc_feature 1..36: note = Salivary acidic proline-rich phosphoprotein 1/2 (81-92)
  source 1..36: mol_type = other RNA
cagcaaggcccccctccaccgcaggggaagccccag

SEQ ID NO: 66696 - RNA, 27 nt, synthetic construct
  misc_feature 1..27: note = GTP-binding protein 1 (587-595)
  source 1..27: mol_type = other RNA
cagcaaatcaagatgcagagcaccaaa

SEQ ID NO: 66697 - RNA, 27 nt, synthetic construct
  misc_feature 1..27: note = Titin (1700-1708)
  source 1..27: mol_type = other RNA
cagcaaaagcccttctttaaaaagaaa

SEQ ID NO: 66698 - RNA, 27 nt, synthetic construct
  misc_feature 1..27: note = Histamine H1 receptor (130-138)
  source 1..27: mol_type = other RNA
cagcaacccctgagatacctcaagtat

SEQ ID NO: 66699 - RNA, 27 nt, synthetic construct
  misc_feature 1..27: note = 5-oxoprolinase (164-172)
  source 1..27: mol_type = other RNA
cagcaacccgtggacctgggcgccctc

SEQ ID NO: 66700 - RNA, 27 nt, synthetic construct
  misc_feature 1..27: note = Protein sel-1 homolog 3 (692-700)
  source 1..27: mol_type = other RNA
cagcaaagactggcccagatgctcttc

SEQ ID NO: 66701 - RNA, 27 nt, synthetic construct
  misc_feature 1..27: note = 60S ribosomal protein L3 (203-211)
  source 1..27: mol_type = other RNA
cagcaagtgcccgtcaaccaggttttc

SEQ ID NO: 66702 - RNA, 27 nt, synthetic construct
  misc_feature 1..27: note = Pyruvate dehydrogenase protein X component, mitochondrial (463-471)
  source 1..27: mol_type = other RNA
cagagacaactgatcaccgtgacaatg

SEQ ID NO: 66703 - RNA, 27 nt, synthetic construct
  misc_feature 1..27: note = E3 ubiquitin-protein ligase RBBP6 (887-895)
  source 1..27: mol_type = other RNA
cagagccacagatccaggaacatcggc

SEQ ID NO: 66704 - RNA, 27 nt, synthetic construct
  misc_feature 1..27: note = Mismatch repair endonuclease PMS2 (237-245)
  source 1..27: mol_type = other RNA
cagagcctgatccccttcgtgcaactc

SEQ ID NO: 66705 - RNA, 27 nt, synthetic construct
  misc_feature 1..27: note = Myosin-7 (419-427)
  source 1..27: mol_type = other RNA
caggtgatctacgccaccggcgctctg

SEQ ID NO: 66706 - RNA, 30 nt, synthetic construct
  misc_feature 1..30: note = CD160 antigen (101-110)
  source 1..30: mol_type = other RNA
caggtgacccccctgcacagcggcacatac

SEQ ID NO: 66707 - RNA, 27 nt, synthetic construct
  misc_feature 1..27: note = tRNA (adenine(58)-N(1))-methyltransferase non-catalytic subunit TRM6 (198-206)
  source 1..27: mol_type = other RNA
agagccggcaacaagatgatcgtgatg

SEQ ID NO: 66708 - RNA, 27 nt, synthetic construct
  misc_feature 1..27: note = Nucleolar GTP-binding protein 2 (400-408)
  source 1..27: mol_type = other RNA
agagccaagcccgagtacatcagcaaa

SEQ ID NO: 66709 - RNA, 30 nt, synthetic construct
  misc_feature 1..30: note = Solute carrier family 15 member 3 (102-111)
  source 1..30: mol_type = other RNA
agagccgtggctctgagcctccttctgtac

SEQ ID NO: 66710 - RNA, 27 nt, synthetic construct
  misc_feature 1..27: note = tRNA dimethylallyltransferase, mitochondrial (8-16)
  source 1..27: mol_type = other RNA
agagccgtgcccgtcggcagcgggctg

SEQ ID NO: 66711 - RNA, 30 nt, synthetic construct
  misc_feature 1..30: note = Translocating chain-associated membrane protein 1 (154-163)
  source 1..30: mol_type = other RNA
agagcctacccccacaacctgatgaccttc

SEQ ID NO: 66712 - RNA, 33 nt, synthetic construct
  misc_feature 1..33: note = Phosphoribosyl pyrophosphate synthase-associated protein 1 (68-78)
  source 1..33: mol_type = other RNA
agagacgtgaacaccgccgtcatggagctgctc

SEQ ID NO: 66713 - RNA, 27 nt, synthetic construct
  misc_feature 1..27: note = Voltage-dependent L-type calcium channel subunit alpha-1D (1825-1833)
  source 1..27: mol_type = other RNA
agagaggaccccgaaatccacggctac

SEQ ID NO: 66714 - RNA, 30 nt, synthetic construct
  misc_feature 1..30: note = Inner nuclear membrane protein Man1 (459-468)
  source 1..30: mol_type = other RNA
agagaggaagtgagccccaccggctccttc

SEQ ID NO: 66715 - RNA, 27 nt, synthetic construct
  misc_feature 1..27: note = Gamma-glutamyltranspeptidase 1 (107-115)
  source 1..27: mol_type = other RNA
agagaggtggcccccaggctggctttc

SEQ ID NO: 66716 - RNA, 27 nt, synthetic construct
  misc_feature 1..27: note = Ras-related protein Rab-30 (70-78)
  source 1..27: mol_type = other RNA
agattcaggagcatcacccagtcctac

SEQ ID NO: 66717 - RNA, 27 nt, synthetic construct
  misc_feature 1..27: note = UHRF1-binding protein 1-like (15-23)
  source 1..27: mol_type = other RNA
agattcaccaagaacctgagccccgac

SEQ ID NO: 66718 - RNA, 27 nt, synthetic construct
  misc_feature 1..27: note = DNA-directed RNA polymerase I subunit RPA2 (766-774)
  source 1..27: mol_type = other RNA
agaggcttcgcccacgggagcgtgtac

SEQ ID NO: 66719 - RNA, 33 nt, synthetic construct
  misc_feature 1..33: note = Endothelial differentiation-related factor 1 (133-143)
  source 1..33: mol_type = other RNA
agaggcaaggacatcgggaaacccattgagaag

SEQ ID NO: 66720 - RNA, 27 nt, synthetic construct
  misc_feature 1..27: note = NADH dehydrogenase (ubiquinone) iron-sulfur protein 2, mitochondrial (118-126)
  source 1..27: mol_type = other RNA
agaggcaccgagaagctgatcgaatac

SEQ ID NO: 66721 - RNA, 27 nt, synthetic construct
  misc_feature 1..27: note = Membrane-associated tyrosine- and threonine-specific cdc2-inhibitory kinase (33-41)
  source 1..27: mol_type = other RNA
agacacgccgagcccggcttcagcctg

SEQ ID NO: 66722 - RNA, 27 nt, synthetic construct
  misc_feature 1..27: note = Colorectal mutant cancer protein (800-808)
  source 1..27: mol_type = other RNA
agacacgagacccaggtgaggatgctg

SEQ ID NO: 66723 - RNA, 30 nt, synthetic construct
  misc_feature 1..30: note = Beta-1,4-galactosyltransferase 6 (247-256)
  source 1..30: mol_type = other RNA
agacacttcgccgctaagctggacaaatac

SEQ ID NO: 66724 - RNA, 27 nt, synthetic construct
  misc_feature 1..27: note = Exophilin-5 (1818-1826)
  source 1..27: mol_type = other RNA
agacacttcagcgagtccacctctatc

SEQ ID NO: 66725 - RNA, 27 nt, synthetic construct
  misc_feature 1..27: note = PDZ domain-containing protein GIPC1 (190-198)
  source 1..27: mol_type = other RNA
agacactacgaggtggccaggctgctc

SEQ ID NO: 66726 - RNA, 30 nt, synthetic construct
  misc_feature 1..30: note = 26S proteasome non-ATPase regulatory subunit 14 (198-207)
  source 1..30: mol_type = other RNA
agacactactatagcatcaccattaactac

SEQ ID NO: 66727 - RNA, 27 nt, synthetic construct
  misc_feature 1..27: note = Ubiquitin carboxyl-terminal hydrolase 40 (780-788)
  source 1..27: mol_type = other RNA
agaatcaaggccattaaagagctgaag

SEQ ID NO: 66728 - RNA, 30 nt, synthetic construct
  misc_feature 1..30: note = ADP-ribosylation factor-like protein 2-binding protein (84-93)
  source 1..30: mol_type = other RNA
agaatccccgagttcaacatggccgctttt

SEQ ID NO: 66729 - RNA, 27 nt, synthetic construct
  misc_feature 1..27: note = U5 small nuclear ribonucleoprotein 200 kDa helicase (234-242)
  source 1..27: mol_type = other RNA
agaatccagagcaagctgtacagggcc

SEQ ID NO: 66730 - RNA, 30 nt, synthetic construct
  misc_feature 1..30: note = 60S ribosomal protein L4 (268-277)
  source 1..30: mol_type = other RNA
agaaaggccgctagcctgaaatccaactac

SEQ ID NO: 66731 - RNA, 27 nt, synthetic construct
  misc_feature 1..27: note = Selenoprotein H (8-16)
  source 1..27: mol_type = other RNA
agaaaggccgaggctgcagtggtcgcc

SEQ ID NO: 66732 - RNA, 27 nt, synthetic construct
  misc_feature 1..27: note = Polyadenylate-binding protein 4 (374-382)
  source 1..27: mol_type = other RNA
agaaaggcccacctgaccaaccagtac

SEQ ID NO: 66733 - RNA, 27 nt, synthetic construct
  misc_feature 1..27: note = Sterol regulatory element-binding protein 2 (371-379)
  source 1..27: mol_type = other RNA
agaaaggccatcgactacattaaatat

SEQ ID NO: 66734 - RNA, 27 nt, synthetic construct
  misc_feature 1..27: note = DNA-directed RNA polymerase II subunit RPB1 (1375-1383)
  source 1..27: mol_type = other RNA
agaaaggccctggagagggaactctac

SEQ ID NO: 66735 - RNA, 30 nt, synthetic construct
  misc_feature 1..30: note = Mid1-interacting protein 1 (163-172)
  source 1..30: mol_type = other RNA
agaaaggccaacatcctgaccaataggtac

SEQ ID NO: 66736 - RNA, 33 nt, synthetic construct
  misc_feature 1..33: note = 26S proteasome non-ATPase regulatory subunit 3 (314-324)
  source 1..33: mol_type = other RNA
agaaaggccccccagcacaccgctgtgggcttc

SEQ ID NO: 66737 - RNA, 27 nt, synthetic construct
  misc_feature 1..27: note = 60S ribosomal protein L23 (90-98)
  source 1..27: mol_type = other RNA
agaaaggacggcgtgttcctgtacttt

SEQ ID NO: 66738 - RNA, 27 nt, synthetic construct
  misc_feature 1..27: note = Eukaryotic translation initiation factor 5B (376-384)
  source 1..27: mol_type = other RNA
agaaaggaggaagagaggctggaacag

SEQ ID NO: 66739 - RNA, 27 nt, synthetic construct
  misc_feature 1..27: note = Uridine-cytidine kinase 2 (119-127)
  source 1..27: mol_type = other RNA
agaaaggaggaaaccgtgacagtctac

SEQ ID NO: 66740 - RNA, 30 nt, synthetic construct
  misc_feature 1..30: note = Histone H2B type 1-K (34-43)
  source 1..30: mol_type = other RNA
agaaaggagagctactccgtgtatgtctac

SEQ ID NO: 66741 - RNA, 30 nt, synthetic construct
  misc_feature 1..30: note = MOB kinase activator 3A (20-29)
  source 1..30: mol_type = other RNA
agaaagttcgagcccggcacccagaggttt

SEQ ID NO: 66742 - RNA, 27 nt, synthetic construct
  misc_feature 1..27: note = Group XV phospholipase A2 (296-304)
  source 1..27: mol_type = other RNA
agaaagttctttcaggacatcggcttc

SEQ ID NO: 66743 - RNA, 33 nt, synthetic construct
  misc_feature 1..33: note = General transcription factor II-I (878-888)
  source 1..33: mol_type = other RNA
agaaagttcggcgaggccatcgggatgggattt

SEQ ID NO: 66744 - RNA, 27 nt, synthetic construct
  misc_feature 1..27: note = Ribosome biogenesis protein TSR3 homolog (186-194)
  source 1..27: mol_type = other RNA
agaaagttcaaatggggcaaggggttt

SEQ ID NO: 66745 - RNA, 33 nt, synthetic construct
  misc_feature 1..33: note = Elongation factor 1-gamma (51-61)
  source 1..33: mol_type = other RNA
agaaagttccccgccggcaaagtgcctgctttt

SEQ ID NO: 66746 - RNA, 27 nt, synthetic construct
  misc_feature 1..27: note = Actin filament-associated protein 1-like 2 (481-489)
  source 1..27: mol_type = other RNA
agaaagttcagcgagcccaacacctac

SEQ ID NO: 66747 - RNA, 27 nt, synthetic construct
  misc_feature 1..27: note = Casein kinase I isoform delta (98-106)
  source 1..27: mol_type = other RNA
agaaagttcagcctgaaaaccgtgctc

SEQ ID NO: 66748 - RNA, 27 nt, synthetic construct
  misc_feature 1..27: note = 60S ribosomal protein L35 (70-78)
  source 1..27: mol_type = other RNA
agaaagttctacaaaggcaagaaatat

SEQ ID NO: 66749 - RNA, 27 nt, synthetic construct
  misc_feature 1..27: note = Eukaryotic peptide chain release factor GTP-binding subunit ERF3B (315-323)
  source 1..27: mol_type = other RNA
agaaagggcgagttcgaaaccgggttt

SEQ ID NO: 66750 - RNA, 30 nt, synthetic construct
  misc_feature 1..30: note = Cytochrome c oxidase subunit 5A, mitochondrial (71-80)
  source 1..30: mol_type = other RNA
agaaagggcatcaacaccctggtgacatac

SEQ ID NO: 66751 - RNA, 27 nt, synthetic construct
  misc_feature 1..27: note = Heat shock protein HSP 90-alpha (512-520)
  source 1..27: mol_type = other RNA
agaaagcacggcctggaggtgatctac

SEQ ID NO: 66752 - RNA, 30 nt, synthetic construct
  misc_feature 1..30: note = Nardilysin (545-554)
  source 1..30: mol_type = other RNA
agaaagatcgaggacaacgaattccactac

SEQ ID NO: 66753 - RNA, 30 nt, synthetic construct
  misc_feature 1..30: note = Lamin-B1 (473-482)
  source 1..30: mol_type = other RNA
agaaagatcggcgacaccagcgtgtcctac

SEQ ID NO: 66754 - RNA, 27 nt, synthetic construct
  misc_feature 1..27: note = Mediator of RNA polymerase II transcription subunit 23 (123-131)
  source 1..27: mol_type = other RNA
agaaagatcattggcggggtggactac

SEQ ID NO: 66755 - RNA, 27 nt, synthetic construct
  misc_feature 1..27: note = Immunoglobulin superfamily member 10 (1201-1209)
  source 1..27: mol_type = other RNA
agaaagatcccctggcagcaaaacttc

SEQ ID NO: 66756 - RNA, 27 nt, synthetic construct
  misc_feature 1..27: note = Ubiquitin carboxyl-terminal hydrolase 22 (420-428)
  source 1..27: mol_type = other RNA
agaaagatcaccacatacgtgagcttc

SEQ ID NO: 66757 - RNA, 27 nt, synthetic construct
  misc_feature 1..27: note = 60S ribosomal protein L10 (38-46)
  source 1..27: mol_type = other RNA
agaaagaaagccaaggtggacgagttc

SEQ ID NO: 66758 - RNA, 27 nt, synthetic construct
  misc_feature 1..27: note = Cytochrome c oxidase subunit 6C (45-53)
  source 1..27: mol_type = other RNA
agaaagaaagcctacgctgacttctat

SEQ ID NO: 66759 - RNA, 27 nt, synthetic construct
  misc_feature 1..27: note = Protein ENL (20-28)
  source 1..27: mol_type = other RNA
agaaagaaacccaccacagagggcttc

SEQ ID NO: 66760 - RNA, 30 nt, synthetic construct
  misc_feature 1..30: note = 60S ribosomal protein L15 (12-21)
  source 1..30: mol_type = other RNA
agaaagaaacagagcgacgtgatgaggttc

SEQ ID NO: 66761 - RNA, 27 nt, synthetic construct
  misc_feature 1..27: note = Cytochrome c1, heme protein, mitochondrial (317-325)
  source 1..27: mol_type = other RNA
agaaagctggcctacaggccccctaaa

SEQ ID NO: 66762 - RNA, 33 nt, synthetic construct
  misc_feature 1..33: note = CD2 antigen cytoplasmic tail-binding protein 2 (320-330)
  source 1..33: mol_type = other RNA
agaaagctggacccccctggcgggcagttctac

SEQ ID NO: 66763 - RNA, 27 nt, synthetic construct
  misc_feature 1..27: note = Protein O-GlcNAcase (156-164)
  source 1..27: mol_type = other RNA
agaaagctggaccaggtgagccaattc

SEQ ID NO: 66764 - RNA, 27 nt, synthetic construct
  misc_feature 1..27: note = Neurabin-2 (179-187)
  source 1..27: mol_type = other RNA
agaaagctggacgtggtcgttaggttc

SEQ ID NO: 66765 - RNA, 33 nt, synthetic construct
  misc_feature 1..33: note = Prohibitin (239-249)
  source 1..33: mol_type = other RNA
agaaagctggaggccgctgaagacatcgcatac

SEQ ID NO: 66766 - RNA, 27 nt, synthetic construct
  misc_feature 1..27: note = Thyroid transcription factor 1-associated protein 26 (59-67)
  source 1..27: mol_type = other RNA
agaaagctgaaaatccagcaaagctac

SEQ ID NO: 66767 - RNA, 27 nt, synthetic construct
  misc_feature 1..27: note = Pre-mRNA-processing factor 19 (422-430)
  source 1..27: mol_type = other RNA
agaaagctgaaaaacttcaagaccctc

SEQ ID NO: 66768 - RNA, 27 nt, synthetic construct
  misc_feature 1..27: note = Toll-like receptor 9 (337-345)
  source 1..27: mol_type = other RNA
agaaagctgaacctcagcttcaattac

SEQ ID NO: 66769 - RNA, 30 nt, synthetic construct
  misc_feature 1..30: note = von Willebrand factor A domain-containing protein 9 (424-433)
  source 1..30: mol_type = other RNA
agaaagctgcccgagaaaacccagacattc

SEQ ID NO: 66770 - RNA, 27 nt, synthetic construct
  misc_feature 1..27: note = UAP56-interacting factor (165-173)
  source 1..27: mol_type = other RNA
agaaagaacaatatccccgccaacttc

SEQ ID NO: 66771 - RNA, 30 nt, synthetic construct
  misc_feature 1..30: note = Activating signal cointegrator 1 complex subunit 1 (17-26)
  source 1..30: mol_type = other RNA
agaaagaaccccgtgcaggagcaaacctac

SEQ ID NO: 66772 - RNA, 27 nt, synthetic construct
  misc_feature 1..27: note = 5'-AMP-activated protein kinase catalytic subunit alpha-1 (447-455)
  source 1..27: mol_type = other RNA
agaaagaaccccgtgaccagcacatac

SEQ ID NO: 66773 - RNA, 30 nt, synthetic construct
  misc_feature 1..30: note = Nuclear pore complex protein Nup98-Nup96 (1206-1215)
  source 1..30: mol_type = other RNA
agaaagcccgacgaggatatgaaactgtac

SEQ ID NO: 66774 - RNA, 30 nt, synthetic construct
  misc_feature 1..30: note = Ubiquitin carboxyl-terminal hydrolase 47 (700-709)
  source 1..30: mol_type = other RNA
agaaagcccgaccaggtgttccaaagctac

SEQ ID NO: 66775 - RNA, 27 nt, synthetic construct
  misc_feature 1..27: note = Transcriptional regulator ATRX (81-89)
  source 1..27: mol_type = other RNA
agaaagcccagcatcgtgaccaaatac

SEQ ID NO: 66776 - RNA, 27 nt, synthetic construct
  misc_feature 1..27: note = Bifunctional polynucleotide phosphatase/kinase (483-491)
  source 1..27: mol_type = other RNA
agaaagcagttcgaggcccccaccctg

SEQ ID NO: 66777 - RNA, 27 nt, synthetic construct
  misc_feature 1..27: note = DNA-dependent protein kinase catalytic subunit (70-78)
  source 1..27: mol_type = other RNA
agaaagagcctgaactccatcgagttc

SEQ ID NO: 66778 - RNA, 27 nt, synthetic construct
  misc_feature 1..27: note = Serine/threonine-protein phosphatase 6 regulatory subunit 1 (134-142)
  source 1..27: mol_type = other RNA
agaaagaccgaccagctggtgagcttc

SEQ ID NO: 66779 - RNA, 33 nt, synthetic construct
  misc_feature 1..33: note = Histone H4 (79-89)
  source 1..33: mol_type = other RNA
agaaagaccgtgacagccatggacgtcgtttac

SEQ ID NO: 66780 - RNA, 27 nt, synthetic construct
  misc_feature 1..27: note = Flap endonuclease 1 (29-37)
  source 1..27: mol_type = other RNA
agaaaggtggccatcgacgctagcatg

SEQ ID NO: 66781 - RNA, 33 nt, synthetic construct
  misc_feature 1..33: note = 60S ribosome subunit biogenesis protein NIP7 homolog (154-164)
  source 1..33: mol_type = other RNA
agaaaggtggaccccatggccatcgtcgttttc

SEQ ID NO: 66782 - RNA, 30 nt, synthetic construct
  misc_feature 1..30: note = E3 ubiquitin/ISG15 ligase TRIM25 (236-245)
  source 1..30: mol_type = other RNA
agaaaggtggagcagctgcaacaggaatac

SEQ ID NO: 66783 - RNA, 27 nt, synthetic construct
  misc_feature 1..27: note = Mitochondrial carrier homolog 2 (287-295)
  source 1..27: mol_type = other RNA
agaaaggtgcccttcggcaaaacctac

SEQ ID NO: 66784 - RNA, 27 nt, synthetic construct
  misc_feature 1..27: note = Fatty acid desaturase 1 (40-48)
  source 1..27: mol_type = other RNA
agaaaggtgtacaacatcagcgagttc

SEQ ID NO: 66785 - RNA, 27 nt, synthetic construct
  misc_feature 1..27: note = Glucose-6-phosphate translocase (126-134)
  source 1..27: mol_type = other RNA
agaaagtggttcgagcccagccagttt

SEQ ID NO: 66786 - RNA, 36 nt, synthetic construct
  misc_feature 1..36: note = Heterogeneous nuclear ribonucleoprotein R (145-156)
  source 1..36: mol_type = other RNA
agaaagtacggcgggccccctccagacagcgtgtat

SEQ ID NO: 66787 - RNA, 27 nt, synthetic construct
  misc_feature 1..27: note = Serine/threonine-protein phosphatase 4 catalytic subunit (132-140)
  source 1..27: mol_type = other RNA
agaaagtacggcagcgtgaccgtctgg

SEQ ID NO: 66788 - RNA, 27 nt, synthetic construct
  misc_feature 1..27: note = Vigilin (87-95)
  source 1..27: mol_type = other RNA
agaaagtacaaagacatgaaccagttc

SEQ ID NO: 66789 - RNA, 27 nt, synthetic construct
  misc_feature 1..27: note = Lysine-specific demethylase 5A (773-781)
  source 1..27: mol_type = other RNA
agaaagtaccccgagaacgacctgttc

SEQ ID NO: 66790 - RNA, 27 nt, synthetic construct
  misc_feature 1..27: note = Pre-mRNA-processing-splicing factor 8 (217-225)
  source 1..27: mol_type = other RNA
agaaagtacgtgaacggcagcacctat

SEQ ID NO: 66791 - RNA, 27 nt, synthetic construct
  misc_feature 1..27: note = Max-binding protein MNT (295-303)
  source 1..27: mol_type = other RNA
agactggccgagctcaagcacgaactt

SEQ ID NO: 66792 - RNA, 27 nt, synthetic construct
  misc_feature 1..27: note = Protein unc-93 homolog B1 (374-382)
  source 1..27: mol_type = other RNA
agactggcctacctccttgtggcttat

SEQ ID NO: 66793 - RNA, 27 nt, synthetic construct
  misc_feature 1..27: note = Nuclear pore complex protein Nup85 (162-170)
  source 1..27: mol_type = other RNA
agactggacgaggccaggcagatgctc

SEQ ID NO: 66794 - RNA, 27 nt, synthetic construct
  misc_feature 1..27: note = Acetyl-CoA carboxylase 2 (765-773)
  source 1..27: mol_type = other RNA
agactgggcgggatccccgtgggagtc

SEQ ID NO: 66795 - RNA, 27 nt, synthetic construct
  misc_feature 1..27: note = X-ray repair cross-complementing protein 6 (517-525)
  source 1..27: mol_type = other RNA
agactgggcagcctcgtggacgagttc

SEQ ID NO: 66796 - RNA, 27 nt, synthetic construct
  misc_feature 1..27: note = N-alpha-acetyltransferase 35, NatC auxiliary subunit (331-339)
  source 1..27: mol_type = other RNA
agactgatcgacaggattaagaccgtg

SEQ ID NO: 66797 - RNA, 30 nt, synthetic construct
  misc_feature 1..30: note = Cyclic GMP-AMP synthase (353-362)
  source 1..30: mol_type = other RNA
agactgaagcccttctacctcgtgcctaaa

SEQ ID NO: 66798 - RNA, 27 nt, synthetic construct
  misc_feature 1..27: note = Myosin light chain kinase 2, skeletal/cardiac muscle (553-561)
  source 1..27: mol_type = other RNA
agactgaagagccagatcctccttaaa

SEQ ID NO: 66799 - RNA, 27 nt, synthetic construct
  misc_feature 1..27: note = tRNA wybutosine-synthesizing protein 4 (311-319)
  source 1..27: mol_type = other RNA
agactgagccccgtgtcccctgccctc

SEQ ID NO: 66800 - RNA, 27 nt, synthetic construct
  misc_feature 1..27: note = DnaJ homolog subfamily C member 8 (45-53)
  source 1..27: mol_type = other RNA
agactgaccaggcccggcagctcctac

SEQ ID NO: 66801 - RNA, 27 nt, synthetic construct
  misc_feature 1..27: note = C-type lectin domain family 4 member F (36-44)
  source 1..27: mol_type = other RNA
agactggtgcaggccacccccgctttc

SEQ ID NO: 66802 - RNA, 27 nt, synthetic construct
  misc_feature 1..27: note = Proteasome assembly chaperone 4 (20-28)
  source 1..27: mol_type = other RNA
agactgtgggagcagctcgtgcacttc

SEQ ID NO: 66803 - RNA, 30 nt, synthetic construct
  misc_feature 1..30: note = Laminin subunit beta-3 (1125-1134)
  source 1..30: mol_type = other RNA
agaatgaaggacatggagctggaactcctt

SEQ ID NO: 66804 - RNA, 27 nt, synthetic construct
  misc_feature 1..27: note = Cytochrome c oxidase assembly protein COX15 homolog (153-161)
  source 1..27: mol_type = other RNA
agaatgtggggcaggctggtggggctc

SEQ ID NO: 66805 - RNA, 27 nt, synthetic construct
  misc_feature 1..27: note = Histone deacetylase complex subunit SAP18 (117-125)
  source 1..27: mol_type = other RNA
agacccggctacagggtgaaggagatc

SEQ ID NO: 66806 - RNA, 30 nt, synthetic construct
  misc_feature 1..30: note = R3H domain-containing protein 2 (2-11)
  source 1..30: mol_type = other RNA
agaccccctgtgaccaaggccagctccttc

SEQ ID NO: 66807 - RNA, 27 nt, synthetic construct
  misc_feature 1..27: note = Short transient receptor potential channel 4-associated protein (31-39)
  source 1..27: mol_type = other RNA
agacccaggcctggcaacatcctgctc

SEQ ID NO: 66808 - RNA, 27 nt, synthetic construct
  misc_feature 1..27: note = Glycogen synthase kinase-3 beta (306-314)
  source 1..27: mol_type = other RNA
agacccaggacccctccagaggccatc

SEQ ID NO: 66809 - RNA, 27 nt, synthetic construct
  misc_feature 1..27: note = Transcription initiation factor IIB (169-177)
  source 1..27: mol_type = other RNA
agacaggagggcgtgcccaggaccttc

SEQ ID NO: 66810 - RNA, 30 nt, synthetic construct
  misc_feature 1..30: note = Protein FAM46A (224-233)
  source 1..30: mol_type = other RNA
agacagttcgagtttagcgtggactccttc

SEQ ID NO: 66811 - RNA, 27 nt, synthetic construct
  misc_feature 1..27: note = Pre-rRNA-processing protein TSR1 homolog (574-582)
  source 1..27: mol_type = other RNA
agacagggcacccccctgatcgccttc

SEQ ID NO: 66812 - RNA, 27 nt, synthetic construct
  misc_feature 1..27: note = NADH dehydrogenase (ubiquinone) 1 subunit C2 (59-67)
  source 1..27: mol_type = other RNA
agacagctgctctacatcaccgccttc

SEQ ID NO: 66813 - RNA, 27 nt, synthetic construct
  misc_feature 1..27: note = Cytochrome b-245 heavy chain (147-155)
  source 1..27: mol_type = other RNA
agacagaacgagagctacctgaatttc

SEQ ID NO: 66814 - RNA, 27 nt, synthetic construct
  misc_feature 1..27: note = Rho GTPase-activating protein 4 (492-500)
  source 1..27: mol_type = other RNA
agacagcccaggcctagctcccaatac

SEQ ID NO: 66815 - RNA, 30 nt, synthetic construct
  misc_feature 1..30: note = Protein strawberry notch homolog 1 (79-88)
  source 1..30: mol_type = other RNA
agacagcaaccccctagcaccacaactttc

SEQ ID NO: 66816 - RNA, 27 nt, synthetic construct
  misc_feature 1..27: note = Large proline-rich protein BAG6 (780-788)
  source 1..27: mol_type = other RNA
agaagcttctttcaccagcattacctg

SEQ ID NO: 66817 - RNA, 27 nt, synthetic construct
  misc_feature 1..27: note = DnaJ homolog subfamily C member 10 (220-228)
  source 1..27: mol_type = other RNA
agaagcaaggagtccctggtgtctttc

SEQ ID NO: 66818 - RNA, 27 nt, synthetic construct
  misc_feature 1..27: note = DNA-dependent protein kinase catalytic subunit (3046-3054)
  source 1..27: mol_type = other RNA
agaagcaagctgaaactccttctgcag

SEQ ID NO: 66819 - RNA, 30 nt, synthetic construct
  misc_feature 1..30: note = Protein SON (1072-1081)
  source 1..30: mol_type = other RNA
agaagcatgatgtcccccatggccgacagg

SEQ ID NO: 66820 - RNA, 27 nt, synthetic construct
  misc_feature 1..27: note = Small nuclear ribonucleoprotein E (28-36)
  source 1..27: mol_type = other RNA
agaagccagatccaagtgtggctgtac

SEQ ID NO: 66821 - RNA, 30 nt, synthetic construct
  misc_feature 1..30: note = PHD finger protein 3 (815-824)
  source 1..30: mol_type = other RNA
agaaccaagtacatcgacgatacagtgaaa

SEQ ID NO: 66822 - RNA, 27 nt, synthetic construct
  misc_feature 1..27: note = 60S ribosomal protein L34 (24-32)
  source 1..27: mol_type = other RNA
agaacccccggcaacaggatcgtgtac

SEQ ID NO: 66823 - RNA, 27 nt, synthetic construct
  misc_feature 1..27: note = Androglobin (1138-1146)
  source 1..27: mol_type = other RNA
agaaccagcaagcccgacgccttcatc

SEQ ID NO: 66824 - RNA, 27 nt, synthetic construct
  misc_feature 1..27: note = Eukaryotic translation initiation factor 2 subunit 2 (182-190)
  source 1..27: mol_type = other RNA
agagtgttcaacatcatgagggagaag

SEQ ID NO: 66825 - RNA, 27 nt, synthetic construct
  misc_feature 1..27: note = Ankyrin repeat domain-containing protein 13C (353-361)
  source 1..27: mol_type = other RNA
agagtgggcaacttcctggccgacttt

SEQ ID NO: 66826 - RNA, 27 nt, synthetic construct
  misc_feature 1..27: note = Eyes absent homolog 1 (440-448)
  source 1..27: mol_type = other RNA
agagtgaaggagatctacaacacctat

SEQ ID NO: 66827 - RNA, 27 nt, synthetic construct
  misc_feature 1..27: note = NADH dehydrogenase (ubiquinone) 1 beta subcomplex subunit 5, mitochondrial (150-158)
  source 1..27: mol_type = other RNA
agagtgaaggagctggaagtcaggaaa

SEQ ID NO: 66828 - RNA, 27 nt, synthetic construct
  misc_feature 1..27: note = Histone-lysine N-methyltransferase EZH2 (18-26)
  source 1..27: mol_type = other RNA
agagtgaagagcgagtacatgaggctg

SEQ ID NO: 66829 - RNA, 27 nt, synthetic construct
  misc_feature 1..27: note = Bystin (257-265)
  source 1..27: mol_type = other RNA
agagtgagggacgatgtcgccgagtac

SEQ ID NO: 66830 - RNA, 27 nt, synthetic construct
  misc_feature 1..27: note = Ribonucleoside-diphosphate reductase subunit M2 (288-296)
  source 1..27: mol_type = other RNA
agagtgagggagatcattataaacgcc

SEQ ID NO: 66831 - RNA, 27 nt, synthetic construct
  misc_feature 1..27: note = Leydig cell tumor 10 kDa protein homolog (42-50)
  source 1..27: mol_type = other RNA
agagtggtccagcaacagaagctgaaa

SEQ ID NO: 66832 - RNA, 30 nt, synthetic construct
  misc_feature 1..30: note = Thioredoxin-related transmembrane protein 2 (198-207)
  source 1..30: mol_type = other RNA
agatacaccgacgtgagcacaaggtataag

SEQ ID NO: 66833 - RNA, 27 nt, synthetic construct
  misc_feature 1..27: note = Dipeptidyl peptidase 3 (692-700)
  source 1..27: mol_type = other RNA
agcgccgctggcctgatcagatccttc

SEQ ID NO: 66834 - RNA, 27 nt, synthetic construct
  misc_feature 1..27: note = Cyclin-dependent kinase 11B (785-793)
  source 1..27: mol_type = other RNA
agcgccgctggccccgggttctccctg

SEQ ID NO: 66835 - RNA, 27 nt, synthetic construct
  misc_feature 1..27: note = Fanconi anemia group M protein (1313-1321)
  source 1..27: mol_type = other RNA
agcgccgctaagaacgaggaactgctc

SEQ ID NO: 66836 - RNA, 27 nt, synthetic construct
  misc_feature 1..27: note = Integrin beta-7 (338-346)
  source 1..27: mol_type = other RNA
agcgccgctaacatccagcccattttc

SEQ ID NO: 66837 - RNA, 27 nt, synthetic construct
  misc_feature 1..27: note = Deleted in malignant brain tumors 1 protein (202-210)
  source 1..27: mol_type = other RNA
agcgccgctcagccccaatccaccctg

SEQ ID NO: 66838 - RNA, 27 nt, synthetic construct
  misc_feature 1..27: note = Cell division cycle and apoptosis regulator protein 1 (253-261)
  source 1..27: mol_type = other RNA
agcgccgcttccatcacccccctgctc

SEQ ID NO: 66839 - RNA, 27 nt, synthetic construct
  misc_feature 1..27: note = Magnesium transporter protein 1 (108-116)
  source 1..27: mol_type = other RNA
agcgccttcaccaacagaatctttttc

SEQ ID NO: 66840 - RNA, 27 nt, synthetic construct
  misc_feature 1..27: note = Rho guanine nucleotide exchange factor 2 (122-130)
  source 1..27: mol_type = other RNA
agcgccatctacccctccgactctttc

SEQ ID NO: 66841 - RNA, 27 nt, synthetic construct
  misc_feature 1..27: note = Pleckstrin homology domain-containing family B member 1 (11-19)
  source 1..27: mol_type = other RNA
agcgccctggagtcccccttcgaagag

SEQ ID NO: 66842 - RNA, 27 nt, synthetic construct
  misc_feature 1..27: note = 14-3-3 protein eta (25-33)
  source 1..27: mol_type = other RNA
agcgccatgaaggctgtgaccgagctg

SEQ ID NO: 66843 - RNA, 33 nt, synthetic construct
  misc_feature 1..33: note = Nuclease-sensitive element-binding protein 1 (314-324)
  source 1..33: mol_type = other RNA
agcgcccccgaggctgaacagggcggggcagag

SEQ ID NO: 66844 - RNA, 27 nt, synthetic construct
  misc_feature 1..27: note = Peroxisomal multifunctional enzyme type 2 (151-159)
  source 1..27: mol_type = other RNA
agcgcctccggcatctacgggaacttc

SEQ ID NO: 66845 - RNA, 27 nt, synthetic construct
  misc_feature 1..27: note = Multidrug resistance-associated protein 4 (326-334)
  source 1..27: mol_type = other RNA
agcgcctccaagatcattgtgttcgtc

SEQ ID NO: 66846 - RNA, 27 nt, synthetic construct
  misc_feature 1..27: note = CapZ-interacting protein (15-23)
  source 1..27: mol_type = other RNA
agcgcctccccctctgtggctcagctg

SEQ ID NO: 66847 - RNA, 27 nt, synthetic construct
  misc_feature 1..27: note = Mucin-20 (558-566)
  source 1..27: mol_type = other RNA
agcgccgtgggcaagaccacatccttc

SEQ ID NO: 66848 - RNA, 27 nt, synthetic construct
  misc_feature 1..27: note = ADP-dependent glucokinase (7-15)
  source 1..27: mol_type = other RNA
agcgcctacgctggcttcctggcactc

SEQ ID NO: 66849 - RNA, 27 nt, synthetic construct
  misc_feature 1..27: note = AFG3-like protein 2 (656-664)
  source 1..27: mol_type = other RNA
agcgcctacgctcagatcgtgcaattc

SEQ ID NO: 66850 - RNA, 33 nt, synthetic construct
  misc_feature 1..33: note = HLA class I histocompatibility antigen, Cw-7 alpha chain (115-125)
  source 1..33: mol_type = other RNA
agcgcctacgacggcaaggattatatcgctctg

SEQ ID NO: 66851 - RNA, 27 nt, synthetic construct
  misc_feature 1..27: note = Heterogeneous nuclear ribonucleoprotein D-like (363-371)
  source 1..27: mol_type = other RNA
agcgcctacggcggggaccagaactat

SEQ ID NO: 66852 - RNA, 27 nt, synthetic construct
  misc_feature 1..27: note = Cyclic AMP-responsive element-binding protein 1 (143-151)
  source 1..27: mol_type = other RNA
agcgacgcccccggcgtgcctagaatc

SEQ ID NO: 66853 - RNA, 27 nt, synthetic construct
  misc_feature 1..27: note = Obscurin (2339-2347)
  source 1..27: mol_type = other RNA
agcgacggcctgtacagaaagctcatc

SEQ ID NO: 66854 - RNA, 30 nt, synthetic construct
  misc_feature 1..30: note = Transgelin-2 (163-172)
  source 1..30: mol_type = other RNA
agcgacaaccagctgcaagagggcaagaat

SEQ ID NO: 66855 - RNA, 33 nt, synthetic construct
  misc_feature 1..33: note = Histone H2B type 1-K (113-123)
  source 1..33: mol_type = other RNA
agcgagggcaccaaggccgtgacaaaatacact

SEQ ID NO: 66856 - RNA, 30 nt, synthetic construct
  misc_feature 1..30: note = Tumor protein D54 (166-175)
  source 1..30: mol_type = other RNA
agcttcgaggacagagtgggcaccatcaag

SEQ ID NO: 66857 - RNA, 36 nt, synthetic construct
  misc_feature 1..36: note = Ubiquitin-conjugating enzyme E2 J1 (236-247)
  source 1..36: mol_type = other RNA
agcttccaccagcccacccaacctgtggccaagaac

SEQ ID NO: 66858 - RNA, 27 nt, synthetic construct
  misc_feature 1..27: note = Lipase member J (205-213)
  source 1..27: mol_type = other RNA
agcttcaagaaatttatcggctccaag

SEQ ID NO: 66859 - RNA, 30 nt, synthetic construct
  misc_feature 1..30: note = DNA damage-binding protein 1 (1096-1105)
  source 1..30: mol_type = other RNA
agcttcctggacatctccagacccaagatg

SEQ ID NO: 66860 - RNA, 30 nt, synthetic construct
  misc_feature 1..30: note = Dynein heavy chain 14, axonemal (3238-3247)
  source 1..30: mol_type = other RNA
agcttcctgaacatgagagtgcccaccctc

SEQ ID NO: 66861 - RNA, 27 nt, synthetic construct
  misc_feature 1..27: note = Actin-related protein 3 (170-178)
  source 1..27: mol_type = other RNA
agcggcgacggggtgacccacgtcatc

SEQ ID NO: 66862 - RNA, 27 nt, synthetic construct
  misc_feature 1..27: note = Protein phosphatase 1 regulatory subunit 14B (21-29)
  source 1..27: mol_type = other RNA
agcggcgggcccggacctagagtgtac

SEQ ID NO: 66863 - RNA, 30 nt, synthetic construct
  misc_feature 1..30: note Dolichyl-diphosphooligosaccharide-proteinosyltransferase subunit 1 (272-281)
  source 1..30: mol_type = other RNA
agcggcatctcctctattagatcattcaag

SEQ ID NO: 66864 - RNA, 27 nt, synthetic construct
  misc_feature 1..27: note = Kinesin-like protein KIFC2 (600-608)
  source 1..27: mol_type = other RNA
agccacgccctggtgaccctcacactt

SEQ ID NO: 66865 - RNA, 27 nt, synthetic construct
  misc_feature 1..27: note = Sorting nexin-19 (151-159)
  source 1..27: mol_type = other RNA
agccacgccgtggctcagtccgtcctg

SEQ ID NO: 66866 - RNA, 27 nt, synthetic construct
  misc_feature 1..27: note = Probable E3 ubiquitin-protein ligase HERC4 (280-288)
  source 1..27: mol_type = other RNA
agccacgagatcaaccccagaaaggtg

SEQ ID NO: 66867 - RNA, 36 nt, synthetic construct
  misc_feature 1..36: note = Mucin-7 (41-52)
  source 1..36: mol_type = other RNA
agccacttcgagctgccccattaccctggcctcctt

SEQ ID NO: 66868 - RNA, 27 nt, synthetic construct
  misc_feature 1..27: note = Histone-lysine N-methyltransferase 2D (2564-2572)
  source 1..27: mol_type = other RNA
agccacttcggccccgggcctaccctg

SEQ ID NO: 66869 - RNA, 24 nt, synthetic construct
  misc_feature 1..24: note = Putative uncharacterized protein FLJ37218 (158-165)
  source 1..24: mol_type = other RNA
agccacttcaccgaccaggagctg

SEQ ID NO: 66870 - RNA, 27 nt, synthetic construct
  misc_feature 1..27: note = Tapasin (318-326)
  source 1..27: mol_type = other RNA
agccacttctacccctccggcgggctg

SEQ ID NO: 66871 - RNA, 27 nt, synthetic construct
  misc_feature 1..27: note = Translational activator GCN1 (674-682)
  source 1..27: mol_type = other RNA
agccaccatccctccctggtggccgtc

SEQ ID NO: 66872 - RNA, 27 nt, synthetic construct
  misc_feature 1..27: note = Transcriptional repressor p66-beta (322-330)
  source 1..27: mol_type = other RNA
agccacatccagcccggcaccgtgaac

SEQ ID NO: 66873 - RNA, 27 nt, synthetic construct
  misc_feature 1..27: note = Disintegrin and metalloproteinase domain-containing protein 10 (377-385)
  source 1..27: mol_type = other RNA
agccacatcaccttcgcccatgaggtg

SEQ ID NO: 66874 - RNA, 27 nt, synthetic construct
  misc_feature 1..27: note = Niemann-Pick C1 protein (1169-1177)
  source 1..27: mol_type = other RNA
agccacatcaccagagccttcacagtg

SEQ ID NO: 66875 - RNA, 27 nt, synthetic construct
  misc_feature 1..27: note = Endothelial PAS domain-containing protein 1 (49-57)
  source 1..27: mol_type = other RNA
agccacctggacaaggcctccatcatg

SEQ ID NO: 66876 - RNA, 27 nt, synthetic construct
  misc_feature 1..27: note = Retrotransposon-derived protein PEG10 (219-227)
  source 1..27: mol_type = other RNA
agccacctggaggtggccaagtccctc

SEQ ID NO: 66877 - RNA, 27 nt, synthetic construct
  misc_feature 1..27: note Dolichyl-diphosphooligosaccharide-proteinosyltransferase subunit 2 (169-177)
  source 1..27: mol_type = other RNA
agccacctgtcccagcaagccgacctc

SEQ ID NO: 66878 - RNA, 27 nt, synthetic construct
  misc_feature 1..27: note = Protein FAM78A (95-103)
  source 1..27: mol_type = other RNA
agccacatggagttctacaaccagtat

SEQ ID NO: 66879 - RNA, 27 nt, synthetic construct
  misc_feature 1..27: note = THO complex subunit 5 homolog (470-478)
  source 1..27: mol_type = other RNA
agccacatggagaccacaatgaagctg

SEQ ID NO: 66880 - RNA, 27 nt, synthetic construct
  misc_feature 1..27: note = Nicastrin (219-227)
  source 1..27: mol_type = other RNA
agccacatgcatgccgtgatctccacc

SEQ ID NO: 66881 - RNA, 27 nt, synthetic construct
  misc_feature 1..27: note = Regulation of nuclear pre-mRNA domain-containing protein 2 (503-511)
  source 1..27: mol_type = other RNA
agccacaaccccctggccaatatcctc

SEQ ID NO: 66882 - RNA, 27 nt, synthetic construct
  misc_feature 1..27: note = Myotubularin-related protein 6 (41-49)
  source 1..27: mol_type = other RNA
agccaccagaaggagacctggatcctg

SEQ ID NO: 66883 - RNA, 36 nt, synthetic construct
  misc_feature 1..36: note = Cytochrome c oxidase subunit 7B, mitochondrial (25-36)
  source 1..36: mol_type = other RNA
agccaccagaagagaacccccgacttccatgataaa

SEQ ID NO: 66884 - RNA, 27 nt, synthetic construct
  misc_feature 1..27: note = Transmembrane protein 201 (295-303)
  source 1..27: mol_type = other RNA
agccaccagaccggcgtggtcgccctg

SEQ ID NO: 66885 - RNA, 27 nt, synthetic construct
  misc_feature 1..27: note = Squalene monooxygenase (461-469)
  source 1..27: mol_type = other RNA
agccactccttcgtggtcaacatcctg

SEQ ID NO: 66886 - RNA, 27 nt, synthetic construct
  misc_feature 1..27: note = Zinc transporter ZIP6 (388-396)
  source 1..27: mol_type = other RNA
agccactcccatgaggaacccgccatg

SEQ ID NO: 66887 - RNA, 27 nt, synthetic construct
  misc_feature 1..27: note = Transmembrane protein 214 (503-511)
  source 1..27: mol_type = other RNA
agccactcctctttccaggcctcactg

SEQ ID NO: 66888 - RNA, 27 nt, synthetic construct
  misc_feature 1..27: note = 39S ribosomal protein L17, mitochondrial (167-175)
  source 1..27: mol_type = other RNA
agccacaccgcccagacacccggcatc

SEQ ID NO: 66889 - RNA, 27 nt, synthetic construct
  misc_feature 1..27: note = CLOCK-interacting pacemaker (249-257)
  source 1..27: mol_type = other RNA
agccacgtggccaaggctccctccctg

SEQ ID NO: 66890 - RNA, 27 nt, synthetic construct
  misc_feature 1..27: note = Pre-mRNA-processing-splicing factor 8 (2254-2262)
  source 1..27: mol_type = other RNA
agccactacgagagagtgcagatgctg

SEQ ID NO: 66891 - RNA, 27 nt, synthetic construct
  misc_feature 1..27: note = DNA-binding protein RFX7 (154-162)
  source 1..27: mol_type = other RNA
agccactacatcggcaccaagtccatg

SEQ ID NO: 66892 - RNA, 27 nt, synthetic construct
  misc_feature 1..27: note = Dual specificity protein kinase CLK1 (54-62)
  source 1..27: mol_type = other RNA
agccactacctggagtccagatctatc

SEQ ID NO: 66893 - RNA, 27 nt, synthetic construct
  misc_feature 1..27: note = Protein EVI2B (202-210)
  source 1..27: mol_type = other RNA
agcatcgccgctattctgataggcgtg

SEQ ID NO: 66894 - RNA, 27 nt, synthetic construct
  misc_feature 1..27: note = DNA-directed RNA polymerase II subunit RPB2 (468-476)
  source 1..27: mol_type = other RNA
agcatcgcccccagaatgatgtccgtg

SEQ ID NO: 66895 - RNA, 27 nt, synthetic construct
  misc_feature 1..27: note = E3 ubiquitin-protein ligase RNF19A (93-101)
  source 1..27: mol_type = other RNA
agcatcgagtccattcactctgaaatg

SEQ ID NO: 66896 - RNA, 27 nt, synthetic construct
  misc_feature 1..27: note = Translocon-associated protein subunit delta (126-134)
  source 1..27: mol_type = other RNA
agcatcattccccctctgttcaccgtg

SEQ ID NO: 66897 - RNA, 36 nt, synthetic construct
  misc_feature 1..36: note = Alpha-enolase (2-13)
  source 1..36: mol_type = other RNA
agcatcctgaagattcacgccagagagatattcgac

SEQ ID NO: 66898 - RNA, 27 nt, synthetic construct
  misc_feature 1..27: note = Copper-transporting ATPase 2 (876-884)
  source 1..27: mol_type = other RNA
agcatcaacgcccacggctccgtgctg

SEQ ID NO: 66899 - RNA, 27 nt, synthetic construct
  misc_feature 1..27: note = Protein Smaug homolog 2 (352-360)
  source 1..27: mol_type = other RNA
agcatccagaagctgagagagaggcaa

SEQ ID NO: 66900 - RNA, 27 nt, synthetic construct
  misc_feature 1..27: note = CCR4-NOT transcription complex subunit 1 (312-320)
  source 1..27: mol_type = other RNA
agcatctccgcccccggctctgggatt

SEQ ID NO: 66901 - RNA, 27 nt, synthetic construct
  misc_feature 1..27: note = AP-5 complex subunit mu-1 (477-485)
  source 1..27: mol_type = other RNA
agcaaggcccccgctcctgtgacctac

SEQ ID NO: 66902 - RNA, 27 nt, synthetic construct
  misc_feature 1..27: note = Ubiquitin carboxyl-terminal hydrolase 19 (576-584)
  source 1..27: mol_type = other RNA
agcaaggcctcccagttcaccggctac

SEQ ID NO: 66903 - RNA, 27 nt, synthetic construct
  misc_feature 1..27: note = Putative tRNA (cytidine(32)/guanosine(34)-2'-O)-methyltransferase (5-13)
  source 1..27: mol_type = other RNA
agcaaggacaaaagagatgtgtactat

SEQ ID NO: 66904 - RNA, 27 nt, synthetic construct
  misc_feature 1..27: note = 40S ribosomal protein S6 (148-156)
  source 1..27: mol_type = other RNA
agcaaggaggacgatgtgagacagtac

SEQ ID NO: 66905 - RNA, 27 nt, synthetic construct
  misc_feature 1..27: note = 60S ribosomal protein L11 (158-166)
  source 1..27: mol_type = other RNA
agcaaggaggaagccatgagatggttc

SEQ ID NO: 66906 - RNA, 27 nt, synthetic construct
  misc_feature 1..27: note = Gamma-glutamyltranspeptidase 1 (30-38)
  source 1..27: mol_type = other RNA
agcaaggagcccgacaaccacgtgtac

SEQ ID NO: 66907 - RNA, 27 nt, synthetic construct
  misc_feature 1..27: note = NADH dehydrogenase (ubiquinone) 1 beta subcomplex subunit 8, mitochondrial (175-183)
  source 1..27: mol_type = other RNA
agcaaggagcccgaaagagtggtccac

SEQ ID NO: 66908 - RNA, 27 nt, synthetic construct
  misc_feature 1..27: note = Neuroblast differentiation-associated protein AHNAK (5611-5619)
  source 1..27: mol_type = other RNA
agcaagttcgccggcgggctgcacttt

SEQ ID NO: 66909 - RNA, 27 nt, synthetic construct
  misc_feature 1..27: note = Core-binding factor subunit beta (10-18)
  source 1..27: mol_type = other RNA
agcaagttcgagaacgaagagtttttc

SEQ ID NO: 66910 - RNA, 30 nt, synthetic construct
  misc_feature 1..30: note = Proteasomal ATPase-associated factor 1 (78-87)
  source 1..30: mol_type = other RNA
agcaagttcctggccccctacaccacattt

SEQ ID NO: 66911 - RNA, 33 nt, synthetic construct
  misc_feature 1..33: note = CWF19-like protein 2 (623-633)
  source 1..33: mol_type = other RNA
agcaagttcatgggcaaaaccgacggggattac

SEQ ID NO: 66912 - RNA, 27 nt, synthetic construct
  misc_feature 1..27: note = Transcription intermediary factor 1-alpha (457-465)
  source 1..27: mol_type = other RNA
agcaagttccccacccagatctccctg

SEQ ID NO: 66913 - RNA, 27 nt, synthetic construct
  misc_feature 1..27: note = 40S ribosomal protein S25 (101-109)
  source 1..27: mol_type = other RNA
agcaagcacagagcccaggtgatctac

SEQ ID NO: 66914 - RNA, 33 nt, synthetic construct
  misc_feature 1..33: note = Proteasome subunit beta type-7 (75-85)
  source 1..33: mol_type = other RNA
agcaagatccacttcatttcccccaacatatac

SEQ ID NO: 66915 - RNA, 27 nt, synthetic construct
  misc_feature 1..27: note = 60S ribosomal protein L18a (148-156)
  source 1..27: mol_type = other RNA
agcaagatcaaattccccctgcctcac

SEQ ID NO: 66916 - RNA, 27 nt, synthetic construct
  misc_feature 1..27: note = Serine/threonine-protein phosphatase 4 regulatory subunit 3B (54-62)
  source 1..27: mol_type = other RNA
agcaagatcaaccccaataccgcctac

SEQ ID NO: 66917 - RNA, 27 nt, synthetic construct
  misc_feature 1..27: note = Signal recognition particle receptor subunit alpha (128-136)
  source 1..27: mol_type = other RNA
agcaagatcagagcccccaccacaatg

SEQ ID NO: 66918 - RNA, 27 nt, synthetic construct
  misc_feature 1..27: note = NUAK family SNF1-like kinase 2 (123-131)
  source 1..27: mol_type = other RNA
agcaagatcgtgattgtcatggagtac

SEQ ID NO: 66919 - RNA, 30 nt, synthetic construct
  misc_feature 1..30: note = E3 ubiquitin-protein ligase RING1 (108-117)
  source 1..30: mol_type = other RNA
agcaagatctacccctccagagaggaatat

SEQ ID NO: 66920 - RNA, 27 nt, synthetic construct
  misc_feature 1..27: note = 60S ribosomal protein L19 (112-120)
  source 1..27: mol_type = other RNA
agcaagaaaatcgacagacacatgtac

SEQ ID NO: 66921 - RNA, 27 nt, synthetic construct
  misc_feature 1..27: note = HAUS augmin-like complex subunit 8 (124-132)
  source 1..27: mol_type = other RNA
agcaagaaacccgagtccacctctttc

SEQ ID NO: 66922 - RNA, 27 nt, synthetic construct
  misc_feature 1..27: note = 60S ribosomal protein L10 (168-176)
  source 1..27: mol_type = other RNA
agcaagaaatggggcttcaccaagttt

SEQ ID NO: 66923 - RNA, 30 nt, synthetic construct
  misc_feature 1..30: note = Golgi-associated PDZ and coiled-coil motif-containing protein (448-457)
  source 1..30: mol_type = other RNA
agcaagctggacgatctccacaccctttac

SEQ ID NO: 66924 - RNA, 27 nt, synthetic construct
  misc_feature 1..27: note = Protein yippee-like 5 (78-86)
  source 1..27: mol_type = other RNA
agcaagctgggctggatctacgagttc

SEQ ID NO: 66925 - RNA, 33 nt, synthetic construct
  misc_feature 1..33: note = Eukaryotic translation initiation factor 2A (459-469)
  source 1..33: mol_type = other RNA
agcaagctgcacgaggaagagccccctcagaac

SEQ ID NO: 66926 - RNA, 36 nt, synthetic construct; identical to SEQ ID NO: 42699
  misc_feature 1..36: note = T-complex protein 1 subunit eta (291-302)
  source 1..36: mol_type = other RNA

SEQ ID NO: 66927 - RNA, 27 nt, synthetic construct
  misc_feature 1..27: note = Ubiquitin-protein ligase E3C (217-225)
  source 1..27: mol_type = other RNA
agcaagctgccctcctctatcgagtac

SEQ ID NO: 66928 - RNA, 27 nt, synthetic construct
  misc_feature 1..27: note = Laminin subunit alpha-5 (3479-3487)
  source 1..27: mol_type = other RNA
agcaagctgcccgtgaccgtcggcttc

SEQ ID NO: 66929 - RNA, 27 nt, synthetic construct
  misc_feature 1..27: note = Anaphase-promoting complex subunit 5 (144-152)
  source 1..27: mol_type = other RNA
agcaagctgtccttctctcaggtgttt

SEQ ID NO: 66930 - RNA, 27 nt, synthetic construct
  misc_feature 1..27: note = Protein Red (280-288)
  source 1..27: mol_type = other RNA
agcaagctgacccagatcctctcctac

SEQ ID NO: 66931 - RNA, 27 nt, synthetic construct
  misc_feature 1..27: note = GPN-loop GTPase 2 (178-186)
  source 1..27: mol_type = other RNA
agcaagatggacctgatcgagcactac

SEQ ID NO: 66932 - RNA, 30 nt, synthetic construct
  misc_feature 1..30: note = Hsp90 co-chaperone Cdc37 (322-331)
  source 1..30: mol_type = other RNA
agcaagatggaccccaccgatgccaaatac

SEQ ID NO: 66933 - RNA, 27 nt, synthetic construct
  misc_feature 1..27: note = Ubiquitin-conjugating enzyme E2 A (74-82)
  source 1..27: mol_type = other RNA
agcaagatgttccaccccaacgtgtac

SEQ ID NO: 66934 - RNA, 27 nt, synthetic construct
  misc_feature 1..27: note = Deoxyribonuclease-2-alpha (168-176)
  source 1..27: mol_type = other RNA
agcaagatgggcaaacagctgacctac

SEQ ID NO: 66935 - RNA, 27 nt, synthetic construct
  misc_feature 1..27: note = Small nuclear ribonucleoprotein-associated protein N (7-15)
  source 1..27: mol_type = other RNA
agcaagatgctgcagcacatcgactac

SEQ ID NO: 66936 - RNA, 27 nt, synthetic construct
  misc_feature 1..27: note = A-kinase anchor protein 9 (893-901)
  source 1..27: mol_type = other RNA
agcaagaacaaacaggagctggaatac

SEQ ID NO: 66937 - RNA, 27 nt, synthetic construct
  misc_feature 1..27: note = Intraflagellar transport protein 80 homolog (558-566)
  source 1..27: mol_type = other RNA
agcaagaacccccacatcgtgtccttc

SEQ ID NO: 66938 - RNA, 27 nt, synthetic construct
  misc_feature 1..27: note = E3 SUMO-protein ligase RanBP2 (1103-1111)
  source 1..27: mol_type = other RNA
agcaagaacgtgtccggcatctctttc

SEQ ID NO: 66939 - RNA, 27 nt, synthetic construct
  misc_feature 1..27: note = Protein yippee-like 3 (5-13)
  source 1..27: mol_type = other RNA
agcaagcccaaaaccttccaggcctac

SEQ ID NO: 66940 - RNA, 27 nt, synthetic construct
  misc_feature 1..27: note = Coatomer subunit alpha (279-287)
  source 1..27: mol_type = other RNA
agcaagagaaccggcgtgcagacattc

SEQ ID NO: 66941 - RNA, 27 nt, synthetic construct
  misc_feature 1..27: note = Calcium-dependent secretion activator 1 (390-398)
  source 1..27: mol_type = other RNA
agcaagtccgacgtggtcctgtctttc

SEQ ID NO: 66942 - RNA, 27 nt, synthetic construct
  misc_feature 1..27: note = S-adenosylmethionine synthase isoform type-2 (180-188)
  source 1..27: mol_type = other RNA
agcaagacccaggtgacagtccaatac

SEQ ID NO: 66943 - RNA, 27 nt, synthetic construct
  misc_feature 1..27: note = Protein YIPF1 (188-196)
  source 1..27: mol_type = other RNA
agcaaggtgatgaacatcgtctcctac

SEQ ID NO: 66944 - RNA, 27 nt, synthetic construct
  misc_feature 1..27: note = Nucleolar complex protein 4 homolog (137-145)
  source 1..27: mol_type = other RNA
agcaagtgggagggcaactacctgttc

SEQ ID NO: 66945 - RNA, 27 nt, synthetic construct
  misc_feature 1..27: note = EBNA1-binding protein 2 (257-265)
  source 1..27: mol_type = other RNA
agcaagtggaacaccagagagtcctac

SEQ ID NO: 66946 - RNA, 30 nt, synthetic construct
  misc_feature 1..30: note = Nuclease-sensitive element-binding protein 1 (136-145)
  source 1..30: mol_type = other RNA
agcaagtacgccgctgacagaaaccactat

SEQ ID NO: 66947 - RNA, 27 nt, synthetic construct
  misc_feature 1..27: note = Transcription factor MafG (109-117)
  source 1..27: mol_type = other RNA
agcaagtacgaggccctgcagaccttc

SEQ ID NO: 66948 - RNA, 30 nt, synthetic construct
  misc_feature 1..30: note = 7-dehydrocholesterol reductase (453-462)
  source 1..30: mol_type = other RNA
agcaagtacggcagagactgggagaggtat

SEQ ID NO: 66949 - RNA, 27 nt, synthetic construct
  misc_feature 1..27: note = Gamma-tubulin complex component 6 (1622-1630)
  source 1..27: mol_type = other RNA
agcaagtactccggcgtgttctctttt

SEQ ID NO: 66950 - RNA, 33 nt, synthetic construct
  misc_feature 1..33: note = V-type proton ATPase catalytic subunit A (264-274)
  source 1..33: mol_type = other RNA
agcaagtactccaactctgacgtgatcatttat

SEQ ID NO: 66951 - RNA, 27 nt, synthetic construct
  misc_feature 1..27: note = DNA polymerase delta catalytic subunit (737-745)
  source 1..27: mol_type = other RNA
agcaagtacaccgtggagaacggctat

SEQ ID NO: 66952 - RNA, 33 nt, synthetic construct
  misc_feature 1..33: note = Fatty acid synthase (1747-1757)
  source 1..33: mol_type = other RNA
agcctggccgaggaaaagctccaggcttccgtg

SEQ ID NO: 66953 - RNA, 36 nt, synthetic construct
  misc_feature 1..36: note = Intraflagellar transport protein 140 homolog (561-572)
  source 1..36: mol_type = other RNA
agcctggccgagctcgtgcccggcgtcgggggaatc

SEQ ID NO: 66954 - RNA, 27 nt, synthetic construct
  misc_feature 1..27: note = DNA topoisomerase 3-beta-1 (12-20)
  source 1..27: mol_type = other RNA
agcctggcccagtccatcgctaagatt

SEQ ID NO: 66955 - RNA, 27 nt, synthetic construct
  misc_feature 1..27: note = PMS1 protein homolog 1 (605-613)
  source 1..27: mol_type = other RNA
agcctgttcaacggctcccactacctc

SEQ ID NO: 66956 - RNA, 27 nt, synthetic construct
  misc_feature 1..27: note = Nuclear pore membraneoprotein 210-like (625-633)
  source 1..27: mol_type = other RNA
agcctgggccacaccctcgtgacagtc

SEQ ID NO: 66957 - RNA, 27 nt, synthetic construct
  misc_feature 1..27: note = Bifunctional glutamate/proline-tRNA ligase (786-794)
  source 1..27: mol_type = other RNA
agcctgaaggccgagtacaaagaaaag

SEQ ID NO: 66958 - RNA, 27 nt, synthetic construct
  misc_feature 1..27: note = Bifunctional glutamate/proline-tRNA ligase (859-867)
  source 1..27: mol_type = other RNA
agcctgaaggcccagtacaaagagaag

SEQ ID NO: 66959 - RNA, 27 nt, synthetic construct
  misc_feature 1..27: note = Heterogeneous nuclear ribonucleoprotein M (86-94)
  source 1..27: mol_type = other RNA
agcctgaaggacctcgtgaaagagaag

SEQ ID NO: 66960 - RNA, 24 nt, synthetic construct
  misc_feature 1..24: note = Serine/threonine-protein phosphatase 2A 65 kDa regulatory subunit A alpha isoform (403-410)
  source 1..24: mol_type = other RNA
agcctgctccccgccatcgtggag

SEQ ID NO: 66961 - RNA, 30 nt, synthetic construct
  misc_feature 1..30: note = Protein transport protein Sec23B (156-165)
  source 1..30: mol_type = other RNA
agcctgctcccccctgacgcccttgtgggc

SEQ ID NO: 66962 - RNA, 27 nt, synthetic construct
  misc_feature 1..27: note = Nesprin-1 (5397-5405)
  source 1..27: mol_type = other RNA
agcctgcagctcgccgaggtggctctt

SEQ ID NO: 66963 - RNA, 27 nt, synthetic construct
  misc_feature 1..27: note = Tetratricopeptide repeat protein 28 (1301-1309)
  source 1..27: mol_type = other RNA
agcctgtggcccgtgcctgtcgccgct

SEQ ID NO: 66964 - RNA, 27 nt, synthetic construct
  misc_feature 1..27: note = Probable E3 ubiquitin-protein ligase HECTD4 (1660-1668)
  source 1..27: mol_type = other RNA
agcatggccgctgaggtgatcgcactg

SEQ ID NO: 66965 - RNA, 27 nt, synthetic construct
  misc_feature 1..27: note = Ribonuclease 3 (661-669)
  source 1..27: mol_type = other RNA
agcatgcaccagatcctgctctacctt

SEQ ID NO: 66966 - RNA, 36 nt, synthetic construct
  misc_feature 1..36: note = B-cell CLL/lymphoma 9-like protein (1201-1212)
  source 1..36: mol_type = other RNA
agcatgatgatggcccccggcgggcctgactccctg

SEQ ID NO: 66967 - RNA, 30 nt, synthetic construct; identical to SEQ ID NO: 42740
  misc_feature 1..30: note = Titin (34201-34210)
  source 1..30: mol_type = other RNA

SEQ ID NO: 66968 - RNA, 36 nt, synthetic construct
  misc_feature 1..36: note = Protein S100-A7 (2-13)
  source 1..36: mol_type = other RNA
agcaacacccaggccgagagatccatcattggcatg

SEQ ID NO: 66969 - RNA, 36 nt, synthetic construct
  misc_feature 1..36: note = Basic salivary proline-rich protein 4 (241-252)
  source 1..36: mol_type = other RNA
agcccccctggcaagccacaggggccgccccaacag

SEQ ID NO: 66970 - RNA, 24 nt, synthetic construct
  misc_feature 1..24: note = Protein kinase C-binding protein 1 (698-705)
  source 1..24: mol_type = other RNA
agccccaccgtgcacctgggcctc

SEQ ID NO: 66971 - RNA, 27 nt, synthetic construct
  misc_feature 1..27: note = Protein AF-17 (915-923)
  source 1..27: mol_type = other RNA
agccaggccggcggggctcccaccctg

SEQ ID NO: 66972 - RNA, 27 nt, synthetic construct
  misc_feature 1..27: note = 4F2 cell-surface antigen heavy chain (436-444)
  source 1..27: mol_type = other RNA
agccaggccagactgctcacctccttc

SEQ ID NO: 66973 - RNA, 27 nt, synthetic construct
  misc_feature 1..27: note Dolichyl-diphosphooligosaccharide-proteinosyltransferase subunit 1 (210-218)
  source 1..27: mol_type = other RNA
agccaggacaccttcaaggtgcactac

SEQ ID NO: 66974 - RNA, 27 nt, synthetic construct
  misc_feature 1..27: note = Arf-GAP with SH3 domain, ANK repeat and PH domain-containing protein 2 (285-293)
  source 1..27: mol_type = other RNA
agccagatcagacaatccaccgcctac

SEQ ID NO: 66975 - RNA, 27 nt, synthetic construct
  misc_feature 1..27: note = DNA mismatch repair protein Msh2 (717-725)
  source 1..27: mol_type = other RNA
agccagctgaagggcgtgtccaccttc

SEQ ID NO: 66976 - RNA, 30 nt, synthetic construct
  misc_feature 1..30: note = Fanconi anemia group E protein (322-331)
  source 1..30: mol_type = other RNA
agccagatggacctgctctgcgcccaactt

SEQ ID NO: 66977 - RNA, 27 nt, synthetic construct
  misc_feature 1..27: note = Multidrug resistance-associated protein 4 (661-669)
  source 1..27: mol_type = other RNA
agccagcaatcctctagaccctcactg

SEQ ID NO: 66978 - RNA, 27 nt, synthetic construct
  misc_feature 1..27: note = Heat shock protein 105 kDa (552-560)
  source 1..27: mol_type = other RNA
agccagtcccccccttctccagagctg

SEQ ID NO: 66979 - RNA, 27 nt, synthetic construct
  misc_feature 1..27: note = Cystatin-B (45-53)
  source 1..27: mol_type = other RNA
agccaggtggtcgccggcaccaactac

SEQ ID NO: 66980 - RNA, 30 nt, synthetic construct
  misc_feature 1..30: note = NEDD8-activating enzyme E1 catalytic subunit (290-299)
  source 1..30: mol_type = other RNA
agccagtacaacatcagaggcgtgacctat

SEQ ID NO: 66981 - RNA, 27 nt, synthetic construct
  misc_feature 1..27: note = WD repeat-containing protein 97 (311-319)
  source 1..27: mol_type = other RNA
agcagagactccaccgtgaaggtctgg

SEQ ID NO: 66982 - RNA, 36 nt, synthetic construct
  misc_feature 1..36: note = Nuclease-sensitive element-binding protein 1 (309-320)
  source 1..36: mol_type = other RNA
agctccgcccccgaggctgaacagggcggggcagag

SEQ ID NO: 66983 - RNA, 30 nt, synthetic construct
  misc_feature 1..30: note = Hematological and neurological expressed 1 protein (91-100)
  source 1..30: mol_type = other RNA
agctccggcgacttcctggatctcaagggg

SEQ ID NO: 66984 - RNA, 30 nt, synthetic construct
  misc_feature 1..30: note = Synaptotagmin-like protein 2 (602-611)
  source 1..30: mol_type = other RNA
agctccggcatgacctctctgtcaagtgtg

SEQ ID NO: 66985 - RNA, 27 nt, synthetic construct
  misc_feature 1..27: note = HLA class I histocompatibility antigen, alpha chain G (301-309)
  source 1..27: mol_type = other RNA
agctccctgcccaccatccctattatg

SEQ ID NO: 66986 - RNA, 27 nt, synthetic construct
  misc_feature 1..27: note = Mucin-1 (130-138)
  source 1..27: mol_type = other RNA
agcaccgccccccctgctcacggcgtg

SEQ ID NO: 66987 - RNA, 27 nt, synthetic construct
  misc_feature 1..27: note = Sperm-associated antigen 5 (305-313)
  source 1..27: mol_type = other RNA
agcacctgcctgacacccaacctcgtg

SEQ ID NO: 66988 - RNA, 27 nt, synthetic construct
  misc_feature 1..27: note = V-type proton ATPase catalytic subunit A (16-24)
  source 1..27: mol_type = other RNA
agcaccttcggctacgtgcacggggtc

SEQ ID NO: 66989 - RNA, 27 nt, synthetic construct
  misc_feature 1..27: note = Uncharacterized protein C20orf195 (2-10)
  source 1..27: mol_type = other RNA
agcacccacgtggccggcctggggctc

SEQ ID NO: 66990 - RNA, 30 nt, synthetic construct
  misc_feature 1..30: note = Ubiquitin carboxyl-terminal hydrolase 3 (394-403)
  source 1..30: mol_type = other RNA
agcaccaagaaattctggatccagaagctg

SEQ ID NO: 66991 - RNA, 27 nt, synthetic construct
  misc_feature 1..27: note = Heat shock cognate 71 kDa protein (340-348)
  source 1..27: mol_type = other RNA
agcaccagaatccccaagattcagaaa

SEQ ID NO: 66992 - RNA, 27 nt, synthetic construct
  misc_feature 1..27: note = Putativeosylation-dependent cell adhesion molecule 1 (14-22)
  source 1..27: mol_type = other RNA
agcacctccctggccatcctcgacgtg

SEQ ID NO: 66993 - RNA, 30 nt, synthetic construct
  misc_feature 1..30: note = Microtubule-actin cross-linking factor 1, isoforms 1/2/3/5 (844-853)
  source 1..30: mol_type = other RNA
agcgtggcctccctggtcggcagatctaag

SEQ ID NO: 66994 - RNA, 30 nt, synthetic construct
  misc_feature 1..30: note = Zinc finger protein 638 (1228-1237)
  source 1..30: mol_type = other RNA
agcgtgttcgccgaggaaagaaacctgaag

SEQ ID NO: 66995 - RNA, 27 nt, synthetic construct
  misc_feature 1..27: note = Heat shock protein HSP 90-alpha (658-666)
  source 1..27: mol_type = other RNA
agcgtgaaggacctggtcatcctcctt

SEQ ID NO: 66996 - RNA, 27 nt, synthetic construct
  misc_feature 1..27: note = Eukaryotic translation initiation factor 3 subunit E (27-35)
  source 1..27: mol_type = other RNA
agcgtgaaggagatctacaacgaaaaa

SEQ ID NO: 66997 - RNA, 36 nt, synthetic construct
  misc_feature 1..36: note = Cytoskeleton-associated protein 2 (388-399)
  source 1..36: mol_type = other RNA
agcgtggtcacccagcacgagcccgccggccaaaac

SEQ ID NO: 66998 - RNA, 30 nt, synthetic construct
  misc_feature 1..30: note = Echinoderm microtubule-associated protein-like 4 (184-193)
  source 1..30: mol_type = other RNA
agctgggagaactccgacgattctagaaat

SEQ ID NO: 66999 - RNA, 30 nt, synthetic construct
  misc_feature 1..30: note = Cold-inducible RNA-binding protein (163-172)
  source 1..30: mol_type = other RNA
agctacgactcctatgccacccacaacgag

SEQ ID NO: 67000 - RNA, 33 nt, synthetic construct; identical to SEQ ID NO: 42773
  misc_feature 1..33: note = 14-3-3 protein theta (210-220)
  source 1..33: mol_type = other RNA

SEQ ID NO: 67001 - RNA, 27 nt, synthetic construct
  misc_feature 1..27: note = Nucleolar and coiled-body phosphoprotein 1 (681-689)
  source 1..27: mol_type = other RNA
agctacagaggcgggtccatctctgtg

SEQ ID NO: 67002 - RNA, 24 nt, synthetic construct
  misc_feature 1..24: note = Asparagine synthetase (glutamine-hydrolyzing) (409-416)
  source 1..24: mol_type = other RNA
accgccgctcacggcctggagctc

SEQ ID NO: 67003 - RNA, 30 nt, synthetic construct
  misc_feature 1..30: note = Ribosome biogenesis protein BOP1 (10-19)
  source 1..30: mol_type = other RNA
accgccgctcccagcgtgagacctgagaag

SEQ ID NO: 67004 - RNA, 30 nt, synthetic construct
  misc_feature 1..30: note = Poly(rC)-binding protein 2 (91-100)
  source 1..30: mol_type = other RNA
accgccgctagcagaccccctgtgacactg

SEQ ID NO: 67005 - RNA, 27 nt, synthetic construct
  misc_feature 1..27: note = Elongation factor 2 (73-81)
  source 1..27: mol_type = other RNA
accgccatcagcctgttctacgagctc

SEQ ID NO: 67006 - RNA, 30 nt, synthetic construct
  misc_feature 1..30: note = Ubiquitin-associated protein 2-like (322-331)
  source 1..30: mol_type = other RNA
accgccatcagccagcccgcttccggcaac

SEQ ID NO: 67007 - RNA, 36 nt, synthetic construct
  misc_feature 1..36: note = Intraflagellar transport protein 88 homolog (62-73)
  source 1..36: mol_type = other RNA
accgccaagatcagctccacagctgtgactagaccc

SEQ ID NO: 67008 - RNA, 24 nt, synthetic construct
  misc_feature 1..24: note = Max-like protein X (152-159)
  source 1..24: mol_type = other RNA
accgccctgaagatcatgaaagtg

SEQ ID NO: 67009 - RNA, 27 nt, synthetic construct
  misc_feature 1..27: note = Nuclear pore membraneoprotein 210 (1573-1581)
  source 1..27: mol_type = other RNA
accgccagcaaggtgatcgtcgctgtt

SEQ ID NO: 67010 - RNA, 36 nt, synthetic construct
  misc_feature 1..36: note = Syndecan-1 (220-231)
  source 1..36: mol_type = other RNA
accgccgtggtcgctgttgagcccgacagaaggaac

SEQ ID NO: 67011 - RNA, 27 nt, synthetic construct
  misc_feature 1..27: note = Probable C-mannosyltransferase DPY19L3 (463-471)
  source 1..27: mol_type = other RNA
accgcctacaacctgatccacacaatt

SEQ ID NO: 67012 - RNA, 27 nt, synthetic construct
  misc_feature 1..27: note = XK-related protein 9 (255-263)
  source 1..27: mol_type = other RNA
acctgcatcagcatggagttcctgtac

SEQ ID NO: 67013 - RNA, 33 nt, synthetic construct
  misc_feature 1..33: note = Uncharacterized protein C9orf78 (274-284)
  source 1..33: mol_type = other RNA
accgacgattaccactatgagaagttcaaaaag

SEQ ID NO: 67014 - RNA, 24 nt, synthetic construct
  misc_feature 1..24: note = Bcl-2-associated transcription factor 1 (341-348)
  source 1..24: mol_type = other RNA
accgacgaggaaagcagagtgttc

SEQ ID NO: 67015 - RNA, 30 nt, synthetic construct
  misc_feature 1..30: note = Bcl-2-associated transcription factor 1 (341-350)
  source 1..30: mol_type = other RNA
accgacgaggaaagcagagtgttcctgctc

SEQ ID NO: 67016 - RNA, 36 nt, synthetic construct
  misc_feature 1..36: note = Pleiotropic regulator 1 (74-85)
  source 1..36: mol_type = other RNA
accgacagctacgtgcacaagcagtatcccgccaac

SEQ ID NO: 67017 - RNA, 27 nt, synthetic construct
  misc_feature 1..27: note = PRA1 family protein 3 (180-188)
  source 1..27: mol_type = other RNA
accgactacatcagcaaggtgaaagag

SEQ ID NO: 67018 - RNA, 27 nt, synthetic construct
  misc_feature 1..27: note = Testis-expressed sequence 10 protein (733-741)
  source 1..27: mol_type = other RNA
accgaggccgtgttccacagcctgctc

SEQ ID NO: 67019 - RNA, 33 nt, synthetic construct
  misc_feature 1..33: note = Pre-mRNA cleavage complex 2 protein Pcf11 (561-571)
  source 1..33: mol_type = other RNA
accgaggaagagagaccccaggaaacaactaac

SEQ ID NO: 67020 - RNA, 30 nt, synthetic construct
  misc_feature 1..30: note = cTAGE family member 5 (795-804)
  source 1..30: mol_type = other RNA
accgagcaccccgaacctcagcaagagaca

SEQ ID NO: 67021 - RNA, 36 nt, synthetic construct
  misc_feature 1..36: note = Tumor protein D52 (213-224)
  source 1..36: mol_type = other RNA
accgagcccctgcctgaaaagacacaggagagcctc

SEQ ID NO: 67022 - RNA, 36 nt, synthetic construct
  misc_feature 1..36: note = BAG family molecular chaperone regulator 4 (167-178)
  source 1..36: mol_type = other RNA
accgaggtgcccagcacatacagatcctctggcaac

SEQ ID NO: 67023 - RNA, 33 nt, synthetic construct
  misc_feature 1..33: note = Non-POU domain-containing octamer-binding protein (6-16)
  source 1..33: mol_type = other RNA
accttcaacctggagaagcagaatcacacaccc

SEQ ID NO: 67024 - RNA, 36 nt, synthetic construct
  misc_feature 1..36: note = Non-POU domain-containing octamer-binding protein (6-17)
  source 1..36: mol_type = other RNA
accttcaacctggagaagcagaatcacacacccaga

SEQ ID NO: 67025 - RNA, 30 nt, synthetic construct
  misc_feature 1..30: note = U2 snRNP-associated SURP motif-containing protein (134-143)
  source 1..30: mol_type = other RNA
accttcgtgagaggcggggtcgttaacgcc

SEQ ID NO: 67026 - RNA, 36 nt, synthetic construct
  misc_feature 1..36: note = Ubiquitin-associated protein 2-like (225-236)
  source 1..36: mol_type = other RNA
accggccacttcgagcccgacgatgggacaagcgcc

SEQ ID NO: 67027 - RNA, 36 nt, synthetic construct
  misc_feature 1..36: note = E3 ubiquitin-protein ligase HUWE1 (2557-2568)
  source 1..36: mol_type = other RNA
accggccacacaatccatgtgcactaccccgggaac

SEQ ID NO: 67028 - RNA, 30 nt, synthetic construct
  misc_feature 1..30: note = Transcriptional repressor p66-beta (558-567)
  source 1..30: mol_type = other RNA
accggcatcgggggacacaagggtcccagc

SEQ ID NO: 67029 - RNA, 36 nt, synthetic construct
  misc_feature 1..36: note = Peptidyl-prolyl cis-trans isomerase FKBP1A (28-39)
  source 1..36: mol_type = other RNA
accggcatgctggaggacgggaagaaattcgatagc

SEQ ID NO: 67030 - RNA, 33 nt, synthetic construct
  misc_feature 1..33: note = Probable ATP-dependent RNA helicase DDX5 (560-570)
  source 1..33: mol_type = other RNA
accggcaaccccacagggacttaccagaatgga

SEQ ID NO: 67031 - RNA, 24 nt, synthetic construct
  misc_feature 1..24: note = 60S ribosomal protein L13 (151-158)
  source 1..24: mol_type = other RNA
accggccccgtgatgcctgtcaga

SEQ ID NO: 67032 - RNA, 36 nt, synthetic construct
  misc_feature 1..36: note = AT-rich interactive domain-containing protein 1A (1514-1525)
  source 1..36: mol_type = other RNA
accggcagcgccccccaggggcctgcttaccacgga

SEQ ID NO: 67033 - RNA, 36 nt, synthetic construct
  misc_feature 1..36: note = Nuclear pore complex protein Nup153 (406-417)
  source 1..36: mol_type = other RNA
accggctacgagaagaacatgacacccgggcagaat

SEQ ID NO: 67034 - RNA, 27 nt, synthetic construct
  misc_feature 1..27: note = Pumilio homolog 3 (361-369)
  source 1..27: mol_type = other RNA
acccacgacggcgccagagtggctatg

SEQ ID NO: 67035 - RNA, 27 nt, synthetic construct
  misc_feature 1..27: note = Glutaryl-CoA dehydrogenase, mitochondrial (416-424)
  source 1..27: mol_type = other RNA
acccacgacatccatgccctgattctc

SEQ ID NO: 67036 - RNA, 27 nt, synthetic construct
  misc_feature 1..27: note = Nuclear pore complex protein Nup88 (408-416)
  source 1..27: mol_type = other RNA
acccacgaggccggcgtgcatagcgtc

SEQ ID NO: 67037 - RNA, 27 nt, synthetic construct
  misc_feature 1..27: note = Endonuclease G, mitochondrial (227-235)
  source 1..27: mol_type = other RNA
acccacttctttaaggtgctgatcctc

SEQ ID NO: 67038 - RNA, 27 nt, synthetic construct
  misc_feature 1..27: note = Bax inhibitor 1 (51-59)
  source 1..27: mol_type = other RNA
acccacttcatccaggccggcctgctc

SEQ ID NO: 67039 - RNA, 27 nt, synthetic construct
  misc_feature 1..27: note = BMP/retinoic acid-inducible neural-specific protein 2 (144-152)
  source 1..27: mol_type = other RNA
acccacttcctgctcagcgccacactt

SEQ ID NO: 67040 - RNA, 27 nt, synthetic construct
  misc_feature 1..27: note = HEAT repeat-containing protein 1 (721-729)
  source 1..27: mol_type = other RNA
acccacttcccctttgccatcagagtg

SEQ ID NO: 67041 - RNA, 27 nt, synthetic construct
  misc_feature 1..27: note = Transitional endoplasmic reticulum ATPase (403-411)
  source 1..27: mol_type = other RNA
acccacggccatgtgggggccgacctg

SEQ ID NO: 67042 - RNA, 27 nt, synthetic construct
  misc_feature 1..27: note = Zinc finger protein 638 (449-457)
  source 1..27: mol_type = other RNA
acccacatcgagagctgcagacagctg

SEQ ID NO: 67043 - RNA, 24 nt, synthetic construct
  misc_feature 1..24: note = Leucine-rich PPR motif-containing protein, mitochondrial (1095-1102)
  source 1..24: mol_type = other RNA
acccacatcaagggcttcacactg

SEQ ID NO: 67044 - RNA, 27 nt, synthetic construct
  misc_feature 1..27: note = Probable C-mannosyltransferase DPY19L1 (228-236)
  source 1..27: mol_type = other RNA
acccacatcctgagagccacaaagctc

SEQ ID NO: 67045 - RNA, 30 nt, synthetic construct
  misc_feature 1..30: note = Guanine nucleotide-binding protein-like 3-like protein (251-260)
  source 1..30: mol_type = other RNA
acccacatcagagtgggcgtcgttgggctg

SEQ ID NO: 67046 - RNA, 36 nt, synthetic construct; identical to SEQ ID NO: 42819
  misc_feature 1..36: note = Neuroblast differentiation-associated protein AHNAK (1576-1587)
  source 1..36: mol_type = other RNA

SEQ ID NO: 67047 - RNA, 27 nt, synthetic construct
  misc_feature 1..27: note = Homeodomain-interacting protein kinase 3 (1110-1118)
  source 1..27: mol_type = other RNA
acccacctgggcgggcagcccacactc

SEQ ID NO: 67048 - RNA, 27 nt, synthetic construct
  misc_feature 1..27: note = Nck-associated protein 1-like (1054-1062)
  source 1..27: mol_type = other RNA
acccacctgaaggagttcctcgtggtc

SEQ ID NO: 67049 - RNA, 24 nt, synthetic construct
  misc_feature 1..24: note = Bone marrow stromal antigen 2 (67-74)
  source 1..24: mol_type = other RNA
acccacctgctccagcaagagctt

SEQ ID NO: 67050 - RNA, 27 nt, synthetic construct
  misc_feature 1..27: note = Dol-P-Man:Man(5)GlcNAc(2)-PP-Dol alpha-1,3-mannosyltransferase (381-389)
  source 1..27: mol_type = other RNA
acccacctgctcagacttctggtgttg

SEQ ID NO: 67051 - RNA, 27 nt, synthetic construct
  misc_feature 1..27: note = Myocyte-specific enhancer factor 2C (372-380)
  source 1..27: mol_type = other RNA
acccacctgagccagtcctctaacctc

SEQ ID NO: 67052 - RNA, 27 nt, synthetic construct
  misc_feature 1..27: note Dolichyl-diphosphooligosaccharide-proteinosyltransferase 48 kDa subunit (400-408)
  source 1..27: mol_type = other RNA
acccacctgtacagctccacacaggtg

SEQ ID NO: 67053 - RNA, 27 nt, synthetic construct
  misc_feature 1..27: note = Bifunctional glutamate/proline-tRNA ligase (1422-1430)
  source 1..27: mol_type = other RNA
acccacatggtggtcgccaacacaatg

SEQ ID NO: 67054 - RNA, 27 nt, synthetic construct
  misc_feature 1..27: note = C-myc promoter-binding protein (1300-1308)
  source 1..27: mol_type = other RNA
acccacagctccccctctttcaacctg

SEQ ID NO: 67055 - RNA, 27 nt, synthetic construct
  misc_feature 1..27: note = Heterogeneous nuclear ribonucleoprotein R (25-33)
  source 1..27: mol_type = other RNA
acccacacagagcattacaagactctg

SEQ ID NO: 67056 - RNA, 27 nt, synthetic construct
  misc_feature 1..27: note = Stromal cell-derived factor 2 (95-103)
  source 1..27: mol_type = other RNA
acccacgtgaacacaggcagaaatctg

SEQ ID NO: 67057 - RNA, 27 nt, synthetic construct
  misc_feature 1..27: note Dolichyl-diphosphooligosaccharide-proteinosyltransferase subunit 2 (26-34)
  source 1..27: mol_type = other RNA
acccactacctgacaaagcatgacgtg

SEQ ID NO: 67058 - RNA, 33 nt, synthetic construct
  misc_feature 1..33: note = Lymphoid-restricted membrane protein (375-385)
  source 1..33: mol_type = other RNA
accatcgccagcctgcccagaaacattggcaat

SEQ ID NO: 67059 - RNA, 36 nt, synthetic construct
  misc_feature 1..36: note = Myosin-binding protein H-like (137-148)
  source 1..36: mol_type = other RNA
accatcgacattctggtgatagagagacccggccct

SEQ ID NO: 67060 - RNA, 27 nt, synthetic construct
  misc_feature 1..27: note = Glycerol-3-phosphate dehydrogenase 1-like protein (285-293)
  source 1..27: mol_type = other RNA
accatcgaggaactggagaaggaaatg

SEQ ID NO: 67061 - RNA, 36 nt, synthetic construct
  misc_feature 1..36: note = BPI fold-containing family A member 2 (157-168)
  source 1..36: mol_type = other RNA
accatcgagacagacccccagactcaccaacctgtg

SEQ ID NO: 67062 - RNA, 27 nt, synthetic construct
  misc_feature 1..27: note = MOB kinase activator 1A (192-200)
  source 1..27: mol_type = other RNA
accatcctgaagagactcttcagggtg

SEQ ID NO: 67063 - RNA, 27 nt, synthetic construct
  misc_feature 1..27: note = Protein sel-1 homolog 1 (219-227)
  source 1..27: mol_type = other RNA
accaaggccctggagagagtgagctac

SEQ ID NO: 67064 - RNA, 27 nt, synthetic construct
  misc_feature 1..27: note = WD repeat-containing protein 5 (45-53)
  source 1..27: mol_type = other RNA
accaaggccgtgagctccgtcaaattc

SEQ ID NO: 67065 - RNA, 27 nt, synthetic construct
  misc_feature 1..27: note = Transforming protein RhoA (163-171)
  source 1..27: mol_type = other RNA
accaaggacggcgtgagagaggtcttc

SEQ ID NO: 67066 - RNA, 27 nt, synthetic construct
  misc_feature 1..27: note = Disintegrin and metalloproteinase domain-containing protein 17 (159-167)
  source 1..27: mol_type = other RNA
accaaggacaaaagaatgctggtgtac

SEQ ID NO: 67067 - RNA, 27 nt, synthetic construct
  misc_feature 1..27: note = Ras GTPase-activating-like protein IQGAP2 (912-920)
  source 1..27: mol_type = other RNA
accaagttcatggacacagtgatcttt

SEQ ID NO: 67068 - RNA, 27 nt, synthetic construct
  misc_feature 1..27: note = Vigilin (613-621)
  source 1..27: mol_type = other RNA
accaagatcgacctgcccgccgagaac

SEQ ID NO: 67069 - RNA, 33 nt, synthetic construct
  misc_feature 1..33: note = Vigilin (613-623)
  source 1..33: mol_type = other RNA
accaagatcgacctgcccgccgagaacagcaat

SEQ ID NO: 67070 - RNA, 27 nt, synthetic construct
  misc_feature 1..27: note = Vesicular integral-membrane protein VIP36 (290-298)
  source 1..27: mol_type = other RNA
accaagatcgagcccagcgtgaacttc

SEQ ID NO: 67071 - RNA, 27 nt, synthetic construct
  misc_feature 1..27: note = Ubiquitin carboxyl-terminal hydrolase 33 (627-635)
  source 1..27: mol_type = other RNA
accaagatcagcacacacgtgtccttc

SEQ ID NO: 67072 - RNA, 27 nt, synthetic construct
  misc_feature 1..27: note = Nucleoprotein TPR (712-720)
  source 1..27: mol_type = other RNA
accaagatcagcacacagctggacttc

SEQ ID NO: 67073 - RNA, 36 nt, synthetic construct
  misc_feature 1..36: note = Eukaryotic translation initiation factor 4 gamma 1 (1070-1081)
  source 1..36: mol_type = other RNA
accaagatcacaaaacccggcagcattgactccaac

SEQ ID NO: 67074 - RNA, 27 nt, synthetic construct
  misc_feature 1..27: note = Pre-mRNA-processing factor 19 (264-272)
  source 1..27: mol_type = other RNA
accaagaaagtgacaagcgtcgttttc

SEQ ID NO: 67075 - RNA, 27 nt, synthetic construct
  misc_feature 1..27: note = Serine/threonine-protein kinase 24 (105-113)
  source 1..27: mol_type = other RNA
accaagctgtggatcattatggagtac

SEQ ID NO: 67076 - RNA, 27 nt, synthetic construct
  misc_feature 1..27: note = Parafibromin (282-290)
  source 1..27: mol_type = other RNA
accaagcagcccatccctgccgcttac

SEQ ID NO: 67077 - RNA, 27 nt, synthetic construct
  misc_feature 1..27: note = Cerebral cavernous malformations 2 protein (253-261)
  source 1..27: mol_type = other RNA
accaaggtggacatcaaagagacatac

SEQ ID NO: 67078 - RNA, 27 nt, synthetic construct
  misc_feature 1..27: note = S-adenosylmethionine synthase isoform type-2 (288-296)
  source 1..27: mol_type = other RNA
accaaggtggacagaagcgccgcttac

SEQ ID NO: 67079 - RNA, 27 nt, synthetic construct
  misc_feature 1..27: note = ER membrane protein complex subunit 3 (138-146)
  source 1..27: mol_type = other RNA
accaaggtgcccttccctctgacactc

SEQ ID NO: 67080 - RNA, 30 nt, synthetic construct; identical to SEQ ID NO: 42853
  misc_feature 1..30: note = ATP-binding cassette sub-family F member 2 (592-601)
  source 1..30: mol_type = other RNA

SEQ ID NO: 67081 - RNA, 27 nt, synthetic construct
  misc_feature 1..27: note = 60S ribosomal protein L17 (45-53)
  source 1..27: mol_type = other RNA
accaagtacctgaaagacgtgacactc

SEQ ID NO: 67082 - RNA, 24 nt, synthetic construct
  misc_feature 1..24: note = DNA dC-dU-editing enzyme APOBEC-3C (84-91)
  source 1..24: mol_type = other RNA
accaagtaccaggtgacatggtat

SEQ ID NO: 67083 - RNA, 30 nt, synthetic construct; identical to SEQ ID NO: 42856
  misc_feature 1..30: note = Tetratricopeptide repeat protein 27 (205-214)
  source 1..30: mol_type = other RNA

SEQ ID NO: 67084 - RNA, 27 nt, synthetic construct
  misc_feature 1..27: note = Proliferation-associated protein 2G4 (386-394)
  source 1..27: mol_type = other RNA
accctggaggaaaacgaggccggcgac

SEQ ID NO: 67085 - RNA, 27 nt, synthetic construct
  misc_feature 1..27: note = Protein FAM185A (259-267)
  source 1..27: mol_type = other RNA
accctgggcagcgtgcacgggaacatc

SEQ ID NO: 67086 - RNA, 36 nt, synthetic construct
  misc_feature 1..36: note = 60S ribosomal protein L23a (126-137)
  source 1..36: mol_type = other RNA
accctgatcagacccgacggcgagaagaaagcctac

SEQ ID NO: 67087 - RNA, 27 nt, synthetic construct
  misc_feature 1..27: note = Transcription elongation factor SPT6 (835-843)
  source 1..27: mol_type = other RNA
accctgaagaaattcctccttaacaag

SEQ ID NO: 67088 - RNA, 27 nt, synthetic construct
  misc_feature 1..27: note = AP-5 complex subunit mu-1 (115-123)
  source 1..27: mol_type = other RNA
accctgagccccagacctccactcatc

SEQ ID NO: 67089 - RNA, 27 nt, synthetic construct
  misc_feature 1..27: note = 40S ribosomal protein S7 (121-129)
  source 1..27: mol_type = other RNA
accctgacagccgtgcacgacgctatc

SEQ ID NO: 67090 - RNA, 33 nt, synthetic construct
  misc_feature 1..33: note = 40S ribosomal protein S7 (121-131)
  source 1..33: mol_type = other RNA
accctgacagccgtgcacgacgctatcctcgag

SEQ ID NO: 67091 - RNA, 36 nt, synthetic construct
  misc_feature 1..36: note = Translocating chain-associated membrane protein 1 (357-368)
  source 1..36: mol_type = other RNA
accctgacaagcaacgtggccgactcccccagaaat

SEQ ID NO: 67092 - RNA, 36 nt, synthetic construct
  misc_feature 1..36: note = Peptidyl-prolyl cis-trans isomerase FKBP1A (97-108)
  source 1..36: mol_type = other RNA
accctggtgttcgacgtcgagctccttaagctggaa

SEQ ID NO: 67093 - RNA, 27 nt, synthetic construct
  misc_feature 1..27: note = Serine/threonine-protein kinase RIO2 (243-251)
  source 1..27: mol_type = other RNA
accatgatcgacttcccccagatggtg

SEQ ID NO: 67094 - RNA, 30 nt, synthetic construct; identical to SEQ ID NO: 42867
  misc_feature 1..30: note = CDC42 small effector protein 1 (26-35)
  source 1..30: mol_type = other RNA

SEQ ID NO: 67095 - RNA, 36 nt, synthetic construct
  misc_feature 1..36: note = Far upstream element-binding protein 2 (277-288)
  source 1..36: mol_type = other RNA
accaacgtggacaagcccctgagaatcattggcgat

SEQ ID NO: 67096 - RNA, 36 nt, synthetic construct
  misc_feature 1..36: note = Cell division cycle 5-like protein (373-384)
  source 1..36: mol_type = other RNA
accaacgtggacacacccctgaagggcgggctcaat

SEQ ID NO: 67097 - RNA, 30 nt, synthetic construct
  misc_feature 1..30: note = Vacuolar protein sorting-associated protein VTA1 homolog (224-233)
  source 1..30: mol_type = other RNA
acccccgccgaggtgcctcacagcacaggc

SEQ ID NO: 67098 - RNA, 36 nt, synthetic construct
  misc_feature 1..36: note = Vacuolar protein sorting-associated protein VTA1 homolog (224-235)
  source 1..36: mol_type = other RNA
acccccgccgaggtgcctcacagcacaggcgtcgct

SEQ ID NO: 67099 - RNA, 30 nt, synthetic construct
  misc_feature 1..30: note = Polyadenylate-binding protein 1 (502-511)
  source 1..30: mol_type = other RNA
acccccgccgtgagaacagtccctcagtac

SEQ ID NO: 67100 - RNA, 24 nt, synthetic construct
  misc_feature 1..24: note = Ubiquitin-associated protein 2-like (952-959)
  source 1..24: mol_type = other RNA
acccccttccagcaacctagcggc

SEQ ID NO: 67101 - RNA, 27 nt, synthetic construct
  misc_feature 1..27: note = IST1 homolog (241-249)
  source 1..27: mol_type = other RNA
acccccttcagctaccctctgccaaag

SEQ ID NO: 67102 - RNA, 33 nt, synthetic construct
  misc_feature 1..33: note = IST1 homolog (241-251)
  source 1..33: mol_type = other RNA
acccccttcagctaccctctgccaaagggcccg

SEQ ID NO: 67103 - RNA, 36 nt, synthetic construct
  misc_feature 1..36: note = TBC1 domain family member 30 (869-880)
  source 1..36: mol_type = other RNA
acccccatcttcagcccttttccatccgtgaagccg

SEQ ID NO: 67104 - RNA, 24 nt, synthetic construct
  misc_feature 1..24: note = Eukaryotic translation initiation factor 4 gamma 1 (647-654)
  source 1..24: mol_type = other RNA
acccccctgagacctctcgaccca

SEQ ID NO: 67105 - RNA, 27 nt, synthetic construct
  misc_feature 1..27: note = Eukaryotic translation initiation factor 4 gamma 1 (647-655)
  source 1..27: mol_type = other RNA
acccccctgagacctctcgacccaaca

SEQ ID NO: 67106 - RNA, 30 nt, synthetic construct
  misc_feature 1..30: note = Eukaryotic translation initiation factor 4 gamma 1 (647-656)
  source 1..30: mol_type = other RNA
acccccctgagacctctcgacccaacaagg

SEQ ID NO: 67107 - RNA, 33 nt, synthetic construct
  misc_feature 1..33: note = Eukaryotic translation initiation factor 4 gamma 1 (647-657)
  source 1..33: mol_type = other RNA
acccccctgagacctctcgacccaacaaggctt

SEQ ID NO: 67108 - RNA, 36 nt, synthetic construct
  misc_feature 1..36: note = Intercellular adhesion molecule 1 (521-532)
  source 1..36: mol_type = other RNA
acccccatgaagcctaacacacaggccactccaccg

SEQ ID NO: 67109 - RNA, 36 nt, synthetic construct
  misc_feature 1..36: note = Vesicular, overexpressed in cancer, prosurvival protein 1 (160-171)
  source 1..36: mol_type = other RNA
accccccctccaccgtacgagcaggtggtcaaggcc

SEQ ID NO: 67110 - RNA, 36 nt, synthetic construct
  misc_feature 1..36: note = GTPase-activating protein and VPS9 domain-containing protein 1 (462-473)
  source 1..36: mol_type = other RNA
accccccagctgagccctgccacaactccagctaac

SEQ ID NO: 67111 - RNA, 27 nt, synthetic construct
  misc_feature 1..27: note = Translocating chain-associated membrane protein 2 (334-342)
  source 1..27: mol_type = other RNA
acccccagactgcctgccaggctcatc

SEQ ID NO: 67112 - RNA, 27 nt, synthetic construct
  misc_feature 1..27: note = Target of Nesh-SH3 (160-168)
  source 1..27: mol_type = other RNA
acccccagacctacaggcactccactg

SEQ ID NO: 67113 - RNA, 36 nt, synthetic construct
  misc_feature 1..36: note = Acidic leucine-rich nuclear phosphoprotein 32 family member A (15-26)
  source 1..36: mol_type = other RNA
acccccagcgacgtgaaggagctggtcctcgataac

SEQ ID NO: 67114 - RNA, 33 nt, synthetic construct
  misc_feature 1..33: note = ATP-dependent RNA helicase A (18-28)
  source 1..33: mol_type = other RNA
acccccagctacgagatcagagccgtgggcaac

SEQ ID NO: 67115 - RNA, 27 nt, synthetic construct
  misc_feature 1..27: note = Protein DENND6A (343-351)
  source 1..27: mol_type = other RNA
acccaggccccccctagcgtgatcctg

SEQ ID NO: 67116 - RNA, 27 nt, synthetic construct
  misc_feature 1..27: note = Gamma-glutamyltranspeptidase 1 (475-483)
  source 1..27: mol_type = other RNA
acccagatcacaactgccacggctctg

SEQ ID NO: 67117 - RNA, 27 nt, synthetic construct
  misc_feature 1..27: note = Disks large homolog 5 (356-364)
  source 1..27: mol_type = other RNA
acccagcaaagagacacagccatccag

SEQ ID NO: 67118 - RNA, 27 nt, synthetic construct
  misc_feature 1..27: note = U3 small nucleolar RNA-associated protein 14 homolog A (567-575)
  source 1..27: mol_type = other RNA
acccagagcccctccgtgaagtctctg

SEQ ID NO: 67119 - RNA, 27 nt, synthetic construct
  misc_feature 1..27: note = Splicing factor 1 (362-370)
  source 1..27: mol_type = other RNA
acccagagcagacccccttggatgaac

SEQ ID NO: 67120 - RNA, 33 nt, synthetic construct
  misc_feature 1..33: note = Serine/threonine-protein kinase VRK1 (378-388)
  source 1..33: mol_type = other RNA
acccagacagaggaagccatccaaactagaagc

SEQ ID NO: 67121 - RNA, 24 nt, synthetic construct
  misc_feature 1..24: note = Elongation factor 1-gamma (409-416)
  source 1..24: mol_type = other RNA
acccagacactggtgagagagtac

SEQ ID NO: 67122 - RNA, 27 nt, synthetic construct
  misc_feature 1..27: note = Nucleolar protein 58 (259-267)
  source 1..27: mol_type = other RNA
acccaggtgatcgagattagcgaatac

SEQ ID NO: 67123 - RNA, 27 nt, synthetic construct
  misc_feature 1..27: note = Lon protease homolog 2, peroxisomal (556-564)
  source 1..27: mol_type = other RNA
accagagaggccggcgtgaggagcctg

SEQ ID NO: 67124 - RNA, 33 nt, synthetic construct
  misc_feature 1..33: note = Fibronectin type III domain-containing protein 3B (182-192)
  source 1..33: mol_type = other RNA
accagagaggaccagtacagcaagccccctcac

SEQ ID NO: 67125 - RNA, 27 nt, synthetic construct
  misc_feature 1..27: note = Myotubularin-related protein 10 (495-503)
  source 1..27: mol_type = other RNA
accagaatcagcctgttcggcacattt

SEQ ID NO: 67126 - RNA, 27 nt, synthetic construct
  misc_feature 1..27: note = Uncharacterized protein DKFZp434B061 (517-525)
  source 1..27: mol_type = other RNA
accagaagcccccctacagcctccctg

SEQ ID NO: 67127 - RNA, 27 nt, synthetic construct
  misc_feature 1..27: note = Putative coiled-coil-helix-coiled-coil-helix domain-containing protein CHCHD2P9, mitochondrial (9-17)
  source 1..27: mol_type = other RNA
accagcagaatggccccccctgcttcc

SEQ ID NO: 67128 - RNA, 30 nt, synthetic construct
  misc_feature 1..30: note = Splicing factor 1 (361-370)
  source 1..30: mol_type = other RNA
accacacagagcagacccccttggatgaac

SEQ ID NO: 67129 - RNA, 27 nt, synthetic construct
  misc_feature 1..27: note = Ubiquitin carboxyl-terminal hydrolase 22 (424-432)
  source 1..27: mol_type = other RNA
acctacgtgagcttccccctggagctc

SEQ ID NO: 67130 - RNA, 27 nt, synthetic construct
  misc_feature 1..27: note = Ataxin-7 (448-456)
  source 1..27: mol_type = other RNA
gtggagaagcacctgaacgcccagctc

SEQ ID NO: 67131 - RNA, 27 nt, synthetic construct
  misc_feature 1..27: note = X-ray repair cross-complementing protein 6 (231-239)
  source 1..27: mol_type = other RNA
gtgcacttcgaggaaagctccaagctg

SEQ ID NO: 67132 - RNA, 27 nt, synthetic construct
  misc_feature 1..27: note = Sorting nexin-19 (246-254)
  source 1..27: mol_type = other RNA
gtgatcctgcccctcattagcagactt

SEQ ID NO: 67133 - RNA, 27 nt, synthetic construct
  misc_feature 1..27: note = Eukaryotic translation initiation factor 3 subunit G (59-67)
  source 1..27: mol_type = other RNA
gtgatcaacggcaatattaagaccgtc

SEQ ID NO: 67134 - RNA, 27 nt, synthetic construct
  misc_feature 1..27: note = Inositol-tetrakisphosphate 1-kinase (261-269)
  source 1..27: mol_type = other RNA
gtgatcagagagctgagcagggccctc

SEQ ID NO: 67135 - RNA, 27 nt, synthetic construct
  misc_feature 1..27: note = Serine/threonine-protein phosphatase 2A 65 kDa regulatory subunit A beta isoform (174-182)
  source 1..27: mol_type = other RNA
gtgaaggccgagatcagacagcaattc

SEQ ID NO: 67136 - RNA, 27 nt, synthetic construct
  misc_feature 1..27: note = T-complex protein 1 subunit theta (234-242)
  source 1..27: mol_type = other RNA
gtgaaggacgccaaaatcgctgtctac

SEQ ID NO: 67137 - RNA, 27 nt, synthetic construct
  misc_feature 1..27: note = Nodal modulator 2 (43-51)
  source 1..27: mol_type = other RNA
gtgaagagcgacgtcgagatcaactac

SEQ ID NO: 67138 - RNA, 27 nt, synthetic construct
  misc_feature 1..27: note = Elongation factor 2 (480-488)
  source 1..27: mol_type = other RNA
gtgaagaccggcacaatcactacgttc

SEQ ID NO: 67139 - RNA, 27 nt, synthetic construct
  misc_feature 1..27: note = Alpha/beta hydrolase domain-containing protein 14B (150-158)
  source 1..27: mol_type = other RNA
gtgaagacccccgccctgatcgtctac

SEQ ID NO: 67140 - RNA, 27 nt, synthetic construct
  misc_feature 1..27: note = Eukaryotic translation initiation factor 3 subunit E (278-286)
  source 1..27: mol_type = other RNA
gtgaaggtcatccagcaagagagctac

SEQ ID NO: 67141 - RNA, 27 nt, synthetic construct
  misc_feature 1..27: note = Exocyst complex component 3 (40-48)
  source 1..27: mol_type = other RNA
gtgctgcagagaagcctcgtcaccgtt

SEQ ID NO: 67142 - RNA, 27 nt, synthetic construct
  misc_feature 1..27: note = HLA class II histocompatibility antigen, DRB1-11 beta chain (21-29)
  source 1..27: mol_type = other RNA
gtgctgagctcccccctcgcccttgct

SEQ ID NO: 67143 - RNA, 27 nt, synthetic construct
  misc_feature 1..27: note = Cytoplasmic dynein 1 heavy chain 1 (1684-1692)
  source 1..27: mol_type = other RNA
gtgatgttcaagacccccgtcagcatc

SEQ ID NO: 67144 - RNA, 27 nt, synthetic construct
  misc_feature 1..27: note = HEAT repeat-containing protein 1 (171-179)
  source 1..27: mol_type = other RNA
gtgcccctggccaagggcaccctcatc

SEQ ID NO: 67145 - RNA, 27 nt, synthetic construct
  misc_feature 1..27: note = DNA-(apurinic or apyrimidinic site) lyase (172-180)
  source 1..27: mol_type = other RNA
gtgcccaacgccggcagagggctggtc

SEQ ID NO: 67146 - RNA, 27 nt, synthetic construct
  misc_feature 1..27: note = DDB1- and CUL4-associated factor 13 (189-197)
  source 1..27: mol_type = other RNA
gtgcccagagagtacatcagggccctg

SEQ ID NO: 67147 - RNA, 30 nt, synthetic construct
  misc_feature 1..30: note = Transketolase (505-514)
  source 1..30: mol_type = other RNA
gtgcccagaagcggcaagcctgccgagctg

SEQ ID NO: 67148 - RNA, 27 nt, synthetic construct
  misc_feature 1..27: note = Calcineurin-binding protein cabin-1 (1016-1024)
  source 1..27: mol_type = other RNA
gtgcccagaaccgagaggcctgccctg

SEQ ID NO: 67149 - RNA, 27 nt, synthetic construct
  misc_feature 1..27: note = ATP-dependent RNA helicase DDX24 (664-672)
  source 1..27: mol_type = other RNA
gtgcccagaaccagcgagatctacgtc

SEQ ID NO: 67150 - RNA, 27 nt, synthetic construct
  misc_feature 1..27: note = Transient receptor potential cation channel subfamily V member 2 (284-292)
  source 1..27: mol_type = other RNA
gtgcagctggaggacatcagaaacctc

SEQ ID NO: 67151 - RNA, 27 nt, synthetic construct
  misc_feature 1..27: note = Putative eukaryotic translation initiation factor 2 subunit 3-like protein (234-242)
  source 1..27: mol_type = other RNA
gtggtctgcgagtacatcgttaagaaa

SEQ ID NO: 67152 - RNA, 27 nt, synthetic construct
  misc_feature 1..27: note = ATP-citrate synthase (56-64)
  source 1..27: mol_type = other RNA
gtggtcaagcccgaccagctgatcaaa

SEQ ID NO: 67153 - RNA, 27 nt, synthetic construct
  misc_feature 1..27: note = U4/U6 small nuclear ribonucleoprotein Prp31 (433-441)
  source 1..27: mol_type = other RNA
gtggtctacggcgggaagagcaccatc

SEQ ID NO: 67154 - RNA, 27 nt, synthetic construct
  misc_feature 1..27: note = Integrin beta-7 (770-778)
  source 1..27: mol_type = other RNA
tggaagcaggacagcaaccccctgtac

SEQ ID NO: 67155 - RNA, 24 nt, synthetic construct
  misc_feature 1..24: note = Heterogeneous nuclear ribonucleoprotein U (421-428)
  source 1..24: mol_type = other RNA
tacgccaagaacggccaggacctg

SEQ ID NO: 67156 - RNA, 27 nt, synthetic construct
  misc_feature 1..27: note = Eukaryotic translation initiation factor 2 subunit 3 (83-91)
  source 1..27: mol_type = other RNA
tacgccaacgctaagatctataaactg

SEQ ID NO: 67157 - RNA, 27 nt, synthetic construct
  misc_feature 1..27: note = Pyruvate kinase PKM (83-91)
  source 1..27: mol_type = other RNA
taccacgccgagaccatcaagaacgtg

SEQ ID NO: 67158 - RNA, 27 nt, synthetic construct
  misc_feature 1..27: note = Interferon-induced GTP-binding protein Mx1 (584-592)
  source 1..27: mol_type = other RNA
taccaccaggaggccagcaagagaatc

SEQ ID NO: 67159 - RNA, 30 nt, synthetic construct
  misc_feature 1..30: note = 60S ribosomal protein L15 (53-62)
  source 1..30: mol_type = other RNA
tacaaggccaaacagggctatgtgatctac

SEQ ID NO: 67160 - RNA, 27 nt, synthetic construct
  misc_feature 1..27: note = Bifunctional glutamate/proline-tRNA ligase (791-799)
  source 1..27: mol_type = other RNA
tacaaggagaaaaccggccaggaatat

SEQ ID NO: 67161 - RNA, 30 nt, synthetic construct
  misc_feature 1..30: note = Eukaryotic translation initiation factor 3 subunit G (70-79)
  source 1..30: mol_type = other RNA
tacaagatcgacgaggatggcaaaaagttc

SEQ ID NO: 67162 - RNA, 27 nt, synthetic construct
  misc_feature 1..27: note = Elongation factor 1-alpha 1 (254-262)
  source 1..27: mol_type = other RNA
tacaagatcggcgggattggaaccgtg

SEQ ID NO: 67163 - RNA, 24 nt, synthetic construct
  misc_feature 1..24: note = Coatomer subunit alpha (73-80)
  source 1..24: mol_type = other RNA
tacaagatcaaagtgtggaactat

SEQ ID NO: 67164 - RNA, 24 nt, synthetic construct
  misc_feature 1..24: note = 60S ribosomal protein L5 (219-226)
  source 1..24: mol_type = other RNA
tacaagaaacagttcagccaatat

SEQ ID NO: 67165 - RNA, 27 nt, synthetic construct
  misc_feature 1..27: note = Eukaryotic translation initiation factor 3 subunit B (253-261)
  source 1..27: mol_type = other RNA
tacaagctggacaaacagcacaccttc

SEQ ID NO: 67166 - RNA, 27 nt, synthetic construct
  misc_feature 1..27: note = Cathepsin B (219-227)
  source 1..27: mol_type = other RNA
tacaagcaggacaaacactatggctac

SEQ ID NO: 67167 - RNA, 36 nt, synthetic construct
  misc_feature 1..36: note = Peroxisomal carnitine O-octanoyltransferase (254-265)
  source 1..36: mol_type = other RNA
tacctgatcggcctcgaccccgagaaccttgccctg

SEQ ID NO: 67168 - RNA, 27 nt, synthetic construct
  misc_feature 1..27: note = Putative ATP-dependent RNA helicase DDX11-like protein 8 (448-456)
  source 1..27: mol_type = other RNA
tacctgctcgagaagttcgtggccgtc

SEQ ID NO: 67169 - RNA, 30 nt, synthetic construct
  misc_feature 1..30: note = G1/S-specific cyclin-E1 (243-252)
  source 1..30: mol_type = other RNA
tacctgaacgacctccacgaggtgcttctg

SEQ ID NO: 67170 - RNA, 27 nt, synthetic construct
  misc_feature 1..27: note = DNA replication complex GINS protein PSF1 (79-87)
  source 1..27: mol_type = other RNA
tacctgtatgacagactccttaggatc

SEQ ID NO: 67171 - RNA, 27 nt, synthetic construct
  misc_feature 1..27: note = Adenomatous polyposis coli protein (899-907)
  source 1..27: mol_type = other RNA
taccccgccgacctggctcacaagatc

SEQ ID NO: 67172 - RNA, 27 nt, synthetic construct
  misc_feature 1..27: note = Cathepsin D (203-211)
  source 1..27: mol_type = other RNA
taccccagaatcagcgtgaacaatgtc

SEQ ID NO: 67173 - RNA, 27 nt, synthetic construct
  misc_feature 1..27: note Dolichyl-diphosphooligosaccharide-proteinosyltransferase subunit 2 (53-61)
  source 1..27: mol_type = other RNA
tacagcatcgtgggcctgtcctctctc

SEQ ID NO: 67174 - RNA, 27 nt, synthetic construct
  misc_feature 1..27: note = Staphylococcal nuclease domain-containing protein 1 (178-186)
  source 1..27: mol_type = other RNA
tacaccatcgagaaccccagacacttc

SEQ ID NO: 67175 - RNA, 27 nt, synthetic construct
  misc_feature 1..27: note = Glycogen synthase kinase-3 beta (134-142)
  source 1..27: mol_type = other RNA
tacgtgcccgagaccgtctatagagtt

SEQ ID NO: 67176 - RNA, 27 nt, synthetic construct
  misc_feature 1..27: note = Titin (24337-24345)
  source 1..27: mol_type = other RNA
gagagcgaccccatcgtggcccagtac

SEQ ID NO: 67177 - RNA, 24 nt, synthetic construct
  misc_feature 1..24: note = Thymidylate synthase (255-262)
  source 1..24: mol_type = other RNA
gcccacatctacctgaaccatatt

SEQ ID NO: 67178 - RNA, 24 nt, synthetic construct
  misc_feature 1..24: note = Store-operated calcium entry-associated regulatory factor (104-111)
  source 1..24: mol_type = other RNA
gcctacaagttcggcaaaaccgtg

SEQ ID NO: 67179 - RNA, 27 nt, synthetic construct
  misc_feature 1..27: note = Junction plakoglobin (136-144)
  source 1..27: mol_type = other RNA
gacgccgagctggctaccagagcactc

SEQ ID NO: 67180 - RNA, 24 nt, synthetic construct
  misc_feature 1..24: note = U1 small nuclear ribonucleoprotein 70 kDa (100-107)
  source 1..24: mol_type = other RNA
gacgccttcaagaccctgtttgtg

SEQ ID NO: 67181 - RNA, 24 nt, synthetic construct
  misc_feature 1..24: note = Interferon-induced helicase C domain-containing protein 1 (514-521)
  source 1..24: mol_type = other RNA
gacgccttcaccatcaagacagtg

SEQ ID NO: 67182 - RNA, 24 nt, synthetic construct
  misc_feature 1..24: note = Gamma-interferon-inducible protein 16 (59-66)
  source 1..24: mol_type = other RNA
gacgccggcctggggaagctcatc

SEQ ID NO: 67183 - RNA, 27 nt, synthetic construct
  misc_feature 1..27: note = Ubiquitin carboxyl-terminal hydrolase 30 (44-52)
  source 1..27: mol_type = other RNA
gacgcccacgagctgttccatgtgatc

SEQ ID NO: 67184 - RNA, 27 nt, synthetic construct
  misc_feature 1..27: note = Ubiquitin carboxyl-terminal hydrolase 51 (682-690)
  source 1..27: mol_type = other RNA
gacgccatcattaccaaggctacaata

SEQ ID NO: 67185 - RNA, 27 nt, synthetic construct
  misc_feature 1..27: note = ATP-dependent RNA helicase DDX50 (215-223)
  source 1..27: mol_type = other RNA
gacgccatcagaagcctggcttccgtg

SEQ ID NO: 67186 - RNA, 27 nt, synthetic construct
  misc_feature 1..27: note = WD repeat-containing protein 11 (348-356)
  source 1..27: mol_type = other RNA
gacgccatcagagtgaccaagacagtc

SEQ ID NO: 67187 - RNA, 27 nt, synthetic construct
  misc_feature 1..27: note = Protein disulfide-isomerase TMX3 (362-370)
  source 1..27: mol_type = other RNA
gacgccaagagcaccatcgtgtccatt

SEQ ID NO: 67188 - RNA, 27 nt, synthetic construct
  misc_feature 1..27: note = Cell division cycle protein 16 homolog (426-434)
  source 1..27: mol_type = other RNA
gacgccctggagaagatcaaagctatt

SEQ ID NO: 67189 - RNA, 24 nt, synthetic construct
  misc_feature 1..24: note = Protein FAM127A (61-68)
  source 1..24: mol_type = other RNA
gacgccctgaaggtgaccttcctc

SEQ ID NO: 67190 - RNA, 27 nt, synthetic construct
  misc_feature 1..27: note = Glucosamine-6-phosphate isomerase 2 (125-133)
  source 1..27: mol_type = other RNA
gacgccagagaggtgatgatcctgatt

SEQ ID NO: 67191 - RNA, 27 nt, synthetic construct
  misc_feature 1..27: note = Little elongation complex subunit 2 (170-178)
  source 1..27: mol_type = other RNA
gacgccagactgttcaccgagaagatc

SEQ ID NO: 67192 - RNA, 30 nt, synthetic construct
  misc_feature 1..30: note = Myotubularin (299-308)
  source 1..30: mol_type = other RNA
gacgcctaccacaacgctgagctgttcttt

SEQ ID NO: 67193 - RNA, 27 nt, synthetic construct
  misc_feature 1..27: note = C-Jun-amino-terminal kinase-interacting protein 4 (932-940)
  source 1..27: mol_type = other RNA
gacgcctacaaggatcagatcagcgtg

SEQ ID NO: 67194 - RNA, 27 nt, synthetic construct
  misc_feature 1..27: note = Interleukin-1 receptor accessory protein-like 1 (406-414)
  source 1..27: mol_type = other RNA
gacgcctacctgagctataccaaggtg

SEQ ID NO: 67195 - RNA, 24 nt, synthetic construct
  misc_feature 1..24: note = T-complex protein 1 subunit eta (49-56)
  source 1..24: mol_type = other RNA
gacggcgccaccatcctgaagctc

SEQ ID NO: 67196 - RNA, 24 nt, synthetic construct
  misc_feature 1..24: note = Non-specific lipid-transfer protein (348-355)
  source 1..24: mol_type = other RNA
gacggcttcaaggccaacctggtg

SEQ ID NO: 67197 - RNA, 24 nt, synthetic construct
  misc_feature 1..24: note = Ankyrin-1 (176-183)
  source 1..24: mol_type = other RNA
gacggcttcacccccctggccgtg

SEQ ID NO: 67198 - RNA, 24 nt, synthetic construct
  misc_feature 1..24: note = Transmembrane protein 106C (116-123)
  source 1..24: mol_type = other RNA
gacggcatcaaggtggtcaaagtt

SEQ ID NO: 67199 - RNA, 24 nt, synthetic construct
  misc_feature 1..24: note = Retrotransposon-derived protein PEG10 (644-651)
  source 1..24: mol_type = other RNA
gacggcctgatcacccccacaatt

SEQ ID NO: 67200 - RNA, 27 nt, synthetic construct
  misc_feature 1..27: note = Phosphatidate phosphatase LPIN1 (456-464)
  source 1..27: mol_type = other RNA
gacggcctgagagatctccccagcatc

SEQ ID NO: 67201 - RNA, 24 nt, synthetic construct
  misc_feature 1..24: note = Phosphatidylinositol transfer protein alpha isoform (159-166)
  source 1..24: mol_type = other RNA
gaccccgccaagttcaaaagcatc

SEQ ID NO: 67202 - RNA, 27 nt, synthetic construct
  misc_feature 1..27: note = Structural maintenance of chromosomes protein 3 (21-29)
  source 1..27: mol_type = other RNA
gaccccttcagctccaagcacaacgtg

SEQ ID NO: 67203 - RNA, 24 nt, synthetic construct
  misc_feature 1..24: note = Interferon regulatory factor 4 (120-127)
  source 1..24: mol_type = other RNA
gacccctacaaggtgtatagaatc

SEQ ID NO: 67204 - RNA, 27 nt, synthetic construct
  misc_feature 1..27: note = Interferon regulatory factor 4 (120-128)
  source 1..27: mol_type = other RNA
gacccctacaaggtgtatagaatcgtc

SEQ ID NO: 67205 - RNA, 24 nt, synthetic construct
  misc_feature 1..24: note = Plectin (4002-4009)
  source 1..24: mol_type = other RNA
gacccctacagcggcaagctgatc

SEQ ID NO: 67206 - RNA, 27 nt, synthetic construct
  misc_feature 1..27: note = All-trans-retinol 13,14-reductase (23-31)
  source 1..27: mol_type = other RNA
atcgccttccacaccattcccgtgata

SEQ ID NO: 67207 - RNA, 27 nt, synthetic construct
  misc_feature 1..27: note = Putative pre-mRNA-splicing factor ATP-dependent RNA helicase DHX16 (412-420)
  source 1..27: mol_type = other RNA
atcgccaaccaccaggtgctgattata

SEQ ID NO: 67208 - RNA, 27 nt, synthetic construct
  misc_feature 1..27: note = RNA-binding protein 12 (28-36)
  source 1..27: mol_type = other RNA
atccccgacggcggggtgcacattgtc

SEQ ID NO: 67209 - RNA, 27 nt, synthetic construct
  misc_feature 1..27: note = Integrator complex subunit 4 (508-516)
  source 1..27: mol_type = other RNA
atccccttcagcaagcctgtgaaagtc

SEQ ID NO: 67210 - RNA, 33 nt, synthetic construct
  misc_feature 1..33: note = 14-3-3 protein zeta/delta (126-136)
  source 1..33: mol_type = other RNA
atccccaacgccagccaggctgagtccaaggtg

SEQ ID NO: 67211 - RNA, 24 nt, synthetic construct
  misc_feature 1..24: note = U5 small nuclear ribonucleoprotein 200 kDa helicase (821-828)
  source 1..24: mol_type = other RNA
ctgcccgcccacaccgtgatcatt

SEQ ID NO: 67212 - RNA, 24 nt, synthetic construct
  misc_feature 1..24: note = Transportin-2 (392-399)
  source 1..24: mol_type = other RNA
ctgccccacctccttcctctgttg

SEQ ID NO: 67213 - RNA, 27 nt, synthetic construct
  misc_feature 1..27: note = Histone-lysine N-methyltransferase SETD1A (1210-1218)
  source 1..27: mol_type = other RNA
ctgcccctcgaccacgccagccttgtg

SEQ ID NO: 67214 - RNA, 27 nt, synthetic construct
  misc_feature 1..27: note = Polyhomeotic-like protein 3 (456-464)
  source 1..27: mol_type = other RNA
ctgcccctccctgccagcccagtggtc

SEQ ID NO: 67215 - RNA, 24 nt, synthetic construct
  misc_feature 1..24: note = Microphthalmia-associated transcription factor (107-114)
  source 1..24: mol_type = other RNA
ctgccccctccaggcctcaccatc

SEQ ID NO: 67216 - RNA, 24 nt, synthetic construct
  misc_feature 1..24: note = Flotillin-2 (345-352)
  source 1..24: mol_type = other RNA
ctgccccagatcgccgctaagatt

SEQ ID NO: 67217 - RNA, 27 nt, synthetic construct
  misc_feature 1..27: note = G1/S-specific cyclin-D3 (98-106)
  source 1..27: mol_type = other RNA
ctgcccagagacaggcaggccctcgtg

SEQ ID NO: 67218 - RNA, 27 nt, synthetic construct
  misc_feature 1..27: note = Cyclic AMP-dependent transcription factor ATF-6 beta (296-304)
  source 1..27: mol_type = other RNA
ctgcccagacctgagaggaagagcatc

SEQ ID NO: 67219 - RNA, 33 nt, synthetic construct
  misc_feature 1..33: note = Charged multivesicular body protein 2b (147-157)
  source 1..33: mol_type = other RNA
ctgcccagcgcctccacctctaaggctacaatc

SEQ ID NO: 67220 - RNA, 24 nt, synthetic construct
  misc_feature 1..24: note = Msx2-interacting protein (1295-1302)
  source 1..24: mol_type = other RNA
ctgccctacagcaacatcaccgtg

SEQ ID NO: 67221 - RNA, 24 nt, synthetic construct
  misc_feature 1..24: note = LIM domain kinase 2 (146-153)
  source 1..24: mol_type = other RNA
ctgccctacagcgtgaccctcatc

SEQ ID NO: 67222 - RNA, 27 nt, synthetic construct
  misc_feature 1..27: note = Isoleucine-tRNA ligase, cytoplasmic (986-994)
  source 1..27: mol_type = other RNA
atggccagagaggtgatcaacaggatt

SEQ ID NO: 67223 - RNA, 24 nt, synthetic construct
  misc_feature 1..24: note = Probable ATP-dependent RNA helicase DHX37 (780-787)
  source 1..24: mol_type = other RNA
aacgcctacaagacccccctgctc

SEQ ID NO: 67224 - RNA, 27 nt, synthetic construct
  misc_feature 1..27: note = Ubiquitin D (25-33)
  source 1..27: mol_type = other RNA
aacccctacgacagcgtgaagaaaatc

SEQ ID NO: 67225 - RNA, 30 nt, synthetic construct
  misc_feature 1..30: note = Host cell factor 1 (1378-1387)
  source 1..30: mol_type = other RNA
cccgacgccaccagctcccacagaacagtg

SEQ ID NO: 67226 - RNA, 24 nt, synthetic construct
  misc_feature 1..24: note = Queuine tRNA-ribosyltransferase subunit QTRTD1 (121-128)
  source 1..24: mol_type = other RNA
cccgaggacaagcctagactgatc

SEQ ID NO: 67227 - RNA, 27 nt, synthetic construct
  misc_feature 1..27: note = Zinc finger and BTB domain-containing protein 7B (219-227)
  source 1..27: mol_type = other RNA
cccctgcctccaccgccccctccaccc

SEQ ID NO: 67228 - RNA, 24 nt, synthetic construct
  misc_feature 1..24: note = E3 ubiquitin-protein ligase UBR5 (666-673)
  source 1..24: mol_type = other RNA
cccgtgggcaaggtcctgaaagtt

SEQ ID NO: 67229 - RNA, 27 nt, synthetic construct
  misc_feature 1..27: note = Probable ATP-dependent RNA helicase DDX5 (308-316)
  source 1..27: mol_type = other RNA
agcgccaaccacaatatcctgcagatt

SEQ ID NO: 67230 - RNA, 24 nt, synthetic construct
  misc_feature 1..24: note = Lys-63-specific deubiquitinase BRCC36 (236-243)
  source 1..24: mol_type = other RNA
agcgccgtggagctgcccaagatc

SEQ ID NO: 67231 - RNA, 27 nt, synthetic construct
  misc_feature 1..27: note = A-kinase anchor protein 9 (740-748)
  source 1..27: mol_type = other RNA
agcgacgcctaccagaccagagagatc

SEQ ID NO: 67232 - RNA, 27 nt, synthetic construct
  misc_feature 1..27: note = WD repeat-containing protein 35 (500-508)
  source 1..27: mol_type = other RNA
accgccagcgacaagatcctgattgtg

SEQ ID NO: 67233 - RNA, 24 nt, synthetic construct
  misc_feature 1..24: note = Ubiquitin carboxyl-terminal hydrolase 36 (521-528)
  source 1..24: mol_type = other RNA
acccccacacacatgcctactatc

SEQ ID NO: 67234 - RNA, 27 nt, synthetic construct
  misc_feature 1..27: note = DNA damage-binding protein 1 (463-471)
  source 1..27: mol_type = other RNA
gtggcccaccagcaactgatccagatt

SEQ ID NO: 67235 - RNA, 27 nt, synthetic construct
  misc_feature 1..27: note = Something about silencing protein 10 (290-298)
  source 1..27: mol_type = other RNA
gtgcccgcccacggccatcctgtcatc

SEQ ID NO: 67236 - RNA, 27 nt, synthetic construct
  misc_feature 1..27: note = RING finger protein unkempt homolog (549-557)
  source 1..27: mol_type = other RNA
gtgccccaccctggcagcatcaccatt

SEQ ID NO: 67237 - RNA, 27 nt, synthetic construct
  misc_feature 1..27: note = Ecto-NOX disulfide-thiol exchanger 1 (100-108)
  source 1..27: mol_type = other RNA
gtgccccctccaccgcccaccgaggtc

SEQ ID NO: 67238 - RNA, 27 nt, synthetic construct
  misc_feature 1..27: note = Epidermal growth factor receptor kinase substrate 8 (711-719)
  source 1..27: mol_type = other RNA
gtgcccagacagaacgtccctgttatc

SEQ ID NO: 67239 - RNA, 24 nt, synthetic construct
  misc_feature 1..24: note = NEDD8-conjugating enzyme Ubc12 (86-93)
  source 1..24: mol_type = other RNA
tacccccacgaccctccaaaggtg

SEQ ID NO: 67240 - RNA, 24 nt, synthetic construct
  misc_feature 1..24: note = Protein SMG7 (359-366)
  source 1..24: mol_type = other RNA
taccccctgcctgccgtgaaggtc

SEQ ID NO: 67241 - RNA, 24 nt, synthetic construct
  misc_feature 1..24: note = Nicotinamide phosphoribosyltransferase (26-33)
  source 1..24: mol_type = other RNA
tacccccctaacaccagcaaggtg

SEQ ID NO: 67242 - RNA, 27 nt, synthetic construct
  misc_feature 1..27: note = E3 ubiquitin-protein ligase RNF144A (27-35)
  source 1..27: mol_type = other RNA
taccccgtggagcagatgaccacaatc

SEQ ID NO: 67243 - RNA, 24 nt, synthetic construct
  misc_feature 1..24: note = Elongation of very long chain fatty acids protein 1 (202-209)
  source 1..24: mol_type = other RNA
taccccgtgatcattcacctgata

SEQ ID NO: 67244 - RNA, 27 nt, synthetic construct
  misc_feature 1..27: note = Mediator of RNA polymerase II transcription subunit 15 (438-446)
  source 1..27: mol_type = other RNA
gccagaaccccccagaacttcagcgtg

SEQ ID NO: 67245 - RNA, 30 nt, synthetic construct
  misc_feature 1..30: note = Tubulin beta chain (335-344)
  source 1..30: mol_type = other RNA
gccgtgttcagaggcaggatgagcatgaag

SEQ ID NO: 67246 - RNA, 48 nt, synthetic construct
  misc_feature 1..48: note = Myosin regulatory light chain 12A (110-125)
  source 1..48: mol_type = other RNA
gacgaggaagccaccggcacaatccaggaggattacctgagagaactc

SEQ ID NO: 67247 - RNA, 48 nt, synthetic construct
  misc_feature 1..48: note = MARCKS-related protein (153-168)
  source 1..48: mol_type = other RNA
gagccccaggccaagggcgctgaagcaagcgccgcgtccgaggaagag

SEQ ID NO: 67248 - RNA, 27 nt, synthetic construct
  misc_feature 1..27: note = Cytochrome c oxidase subunit 7C, mitochondrial (49-57)
  source 1..27: mol_type = other RNA
ttcgccaccccctttctggtggtcaga

SEQ ID NO: 67249 - RNA, 57 nt, synthetic construct
  misc_feature 1..57: note = Cytochrome c oxidase subunit 8A, mitochondrial (26-44)
  source 1..57: mol_type = other RNA
ttcctgctccccgccggctggatccttagccacctggagacctacagaaggcctgaa

SEQ ID NO: 67250 - RNA, 45 nt, synthetic construct
  misc_feature 1..45: note = Disintegrin and metalloproteinase domain-containing protein 10 (292-306)
  source 1..45: mol_type = other RNA
ttccccaacatcggcgtggagaagtttctggaactcaatagcgag

SEQ ID NO: 67251 - RNA, 27 nt, synthetic construct
  misc_feature 1..27: note = Hermansky-Pudlak syndrome 5 protein (380-388)
  source 1..27: mol_type = other RNA
ttccagaacagcgtgatcgcctccaga

SEQ ID NO: 67252 - RNA, 30 nt, synthetic construct
  misc_feature 1..30: note = NADH dehydrogenase (ubiquinone) flavoprotein 3, mitochondrial (107-116)
  source 1..30: mol_type = other RNA
ttcaccgacgagggcgtgcccaagtttctg

SEQ ID NO: 67253 - RNA, 48 nt, synthetic construct
  misc_feature 1..48: note = Myristoylated alanine-rich C-kinase substrate (191-206)
  source 1..48: mol_type = other RNA
ggcgggaaggacgaggccgctggaggtgcagccgcggctgccgcagaa

SEQ ID NO: 67254 - RNA, 39 nt, synthetic construct; identical to SEQ ID NO: 43027
  misc_feature 1..39: note = Heat shock cognate 71 kDa protein (484-496)
  source 1..39: mol_type = other RNA

SEQ ID NO: 67255 - RNA, 48 nt, synthetic construct
  misc_feature 1..48: note = Heat shock cognate 71 kDa protein (484-499)
  source 1..48: mol_type = other RNA
ggcatcctgaacgtgagcgccgtcgacaagtccaccgggaaagagaat

SEQ ID NO: 67256 - RNA, 45 nt, synthetic construct
  misc_feature 1..45: note = Myristoylated alanine-rich C-kinase substrate (192-206)
  source 1..45: mol_type = other RNA
ggcaaggacgaggccgctgggggagcagccgcggctgccgcagaa

SEQ ID NO: 67257 - RNA, 48 nt, synthetic construct
  misc_feature 1..48: note = Gamma-secretase C-terminal fragment 59 (185-200)
  source 1..48: mol_type = other RNA
ggcagcgaggacaaggtggtcgaagttgccgaggaagaggaagtggct

SEQ ID NO: 67258 - RNA, 24 nt, synthetic construct
  misc_feature 1..24: note = 26S proteasome non-ATPase regulatory subunit 12 (115-122)
  source 1..24: mol_type = other RNA
atcaccgacctgcccattaagctc

SEQ ID NO: 67259 - RNA, 42 nt, synthetic construct
  misc_feature 1..42: note = Myristoylated alanine-rich C-kinase substrate (193-206)
  source 1..42: mol_type = other RNA
aaggacgaggccgctggcggggcagccgcggctgccgcagaa

SEQ ID NO: 67260 - RNA, 51 nt, synthetic construct
  misc_feature 1..51: note = NEDD4 family-interacting protein 1 (63-79)
  source 1..51: mol_type = other RNA
aagccccctagctacaacgtggccaccacactgccatcctatgacgaggct

SEQ ID NO: 67261 - RNA, 42 nt, synthetic construct
  misc_feature 1..42: note = HLA class I histocompatibility antigen, A-24 alpha chain (143-156)
  source 1..42: mol_type = other RNA
aagagaaaatgggaggccgctcacgtggcagaacagcaaagg

SEQ ID NO: 67262 - RNA, 39 nt, synthetic construct
  misc_feature 1..39: note = Glyceraldehyde-3-phosphate dehydrogenase (27-39)
  source 1..39: mol_type = other RNA
aaggtggacatcgtcgccattaacgatcccttcatagac

SEQ ID NO: 67263 - RNA, 54 nt, synthetic construct
  misc_feature 1..54: note = Cytochrome c oxidase subunit 8A, mitochondrial (27-44)
  source 1..54: mol_type = other RNA
ctgctccccgccggctggatccttagccacctggagacctacagaaggcctgaa

SEQ ID NO: 67264 - RNA, 42 nt, synthetic construct
  misc_feature 1..42: note = HLA class I histocompatibility antigen, Cw-7 alpha chain (154-167)
  source 1..42: mol_type = other RNA
ctgagaagctggaccgccgctgacacagcagcccagatcact

SEQ ID NO: 67265 - RNA, 48 nt, synthetic construct
  misc_feature 1..48: note = HLA class I histocompatibility antigen, B-15 alpha chain (239-254)
  source 1..48: mol_type = other RNA
ctgacctggcagagagacggcgaggatcaaacacaggacactgaactc

SEQ ID NO: 67266 - RNA, 54 nt, synthetic construct
  misc_feature 1..54: note = HLA class I histocompatibility antigen, B-15 alpha chain (239-256)
  source 1..54: mol_type = other RNA
ctgacctggcagagagacggcgaggatcaaacacaggacactgaactcgtggag

SEQ ID NO: 67267 - RNA, 69 nt, synthetic construct
  misc_feature 1..69: note = NADH dehydrogenase (ubiquinone) 1 alpha subcomplex subunit 8 (150-172)
  source 1..69: mol_type = other RNA
cccagccctgagatcgaaggcgacctgcagccagccacccacgggtccagattctacttttggacaaag

SEQ ID NO: 67268 - RNA, 27 nt, synthetic construct
  misc_feature 1..27: note = Probable ATP-dependent RNA helicase DDX47 (371-379)
  source 1..27: mol_type = other RNA
cagagaatcgagcacctgattggcaag

SEQ ID NO: 67269 - RNA, 30 nt, synthetic construct
  misc_feature 1..30: note = Ras GTPase-activating-like protein IQGAP3 (482-491)
  source 1..30: mol_type = other RNA
cagagatacttcgacgccctgctcaagctt

SEQ ID NO: 67270 - RNA, 27 nt, synthetic construct
  misc_feature 1..27: note = Prelamin-A/C (213-221)
  source 1..27: mol_type = other RNA
cagagcagaatcaggattgactccctg

SEQ ID NO: 67271 - RNA, 27 nt, synthetic construct
  misc_feature 1..27: note = Proteasome subunit beta type-2 (170-178)
  source 1..27: mol_type = other RNA
agattcatcctgaacctccccaccttt

SEQ ID NO: 67272 - RNA, 30 nt, synthetic construct
  misc_feature 1..30: note = Unconventional myosin-IXa (1043-1052)
  source 1..30: mol_type = other RNA
agacaggccagcgtgatcattcaaaggttc

SEQ ID NO: 67273 - RNA, 36 nt, synthetic construct
  misc_feature 1..36: note = DNA polymerase delta subunit 3 (416-427)
  source 1..36: mol_type = other RNA
agacaggtgagcatcaccggcttctttcaaaggaag

SEQ ID NO: 67274 - RNA, 30 nt, synthetic construct
  misc_feature 1..30: note = Calcipressin-1 (161-170)
  source 1..30: mol_type = other RNA
agaaggcccgagtacacccctatccacctg

SEQ ID NO: 67275 - RNA, 45 nt, synthetic construct
  misc_feature 1..45: note = Glyceraldehyde-3-phosphate dehydrogenase (25-39)
  source 1..45: mol_type = other RNA
agcggcaaggtggacatcgtcgccattaacgatcccttcatagac

SEQ ID NO: 67276 - RNA, 27 nt, synthetic construct
  misc_feature 1..27: note = Mitotic checkpoint serine/threonine-protein kinase BUB1 beta (486-494)
  source 1..27: mol_type = other RNA
agccagaagatccccggcatgaccctg

SEQ ID NO: 67277 - RNA, 45 nt, synthetic construct
  misc_feature 1..45: note = HLA class I histocompatibility antigen, B-15 alpha chain (155-169)
  source 1..45: mol_type = other RNA
agctcctggaccgccgctgacacagcagcccagatcactcaaaga

SEQ ID NO: 67278 - RNA, 33 nt, synthetic construct
  misc_feature 1..33: note = L-lactate dehydrogenase A chain (255-265)
  source 1..33: mol_type = other RNA
agcgtggccgacctggctgagtccatcatgaag

SEQ ID NO: 67279 - RNA, 45 nt, synthetic construct
  misc_feature 1..45: note = IST1 homolog (278-292)
  source 1..45: mol_type = other RNA
accccccctagctacgagtccgtggacgatatcaacgccgacaag

SEQ ID NO: 67280 - RNA, 48 nt, synthetic construct
  misc_feature 1..48: note = IST1 homolog (278-293)
  source 1..48: mol_type = other RNA
accccccctagctacgagtccgtggacgatatcaacgccgacaagaat

SEQ ID NO: 67281 - RNA, 27 nt, synthetic construct
  misc_feature 1..27: note = Palladin (534-542)
  source 1..27: mol_type = other RNA
gtggccgacggctaccccgtcagactg

SEQ ID NO: 67282 - RNA, 30 nt, synthetic construct
  misc_feature 1..30: note = Interferon-induced transmembrane protein 2 (89-98)
  source 1..30: mol_type = other RNA
gtgggcgacgtcaccggggcccaggcttac

SEQ ID NO: 67283 - RNA, 60 nt, synthetic construct
  misc_feature 1..60: note = 78 kDa glucose-regulated protein (425-444)
  source 1..60: mol_type = other RNA
gtgcccaccaagaaaagccagatcttctccacagcctctgacaaccaacctactgtcacg

SEQ ID NO: 67284 - RNA, 63 nt, synthetic construct
  misc_feature 1..63: note = Cytochrome c oxidase subunit 8A, mitochondrial (24-44)
  source 1..63: mol_type = other RNA
gtgaccttcctgctccccgccggctggatccttagccacctggagacatacagaaggcctgaa

SEQ ID NO: 67285 - RNA, 42 nt, synthetic construct
  misc_feature 1..42: note = Alpha-enolase (70-83)
  source 1..42: mol_type = other RNA
gtggtcatcggcatggacgttgccgctagcgagttctttaga

SEQ ID NO: 67286 - RNA, 48 nt, synthetic construct
  misc_feature 1..48: note = HLA class I histocompatibility antigen, B-15 alpha chain (241-256)
  source 1..48: mol_type = other RNA
tggcagagagacggcgaggatcaaacccaggacacagaactggtggag

SEQ ID NO: 67287 - RNA, 42 nt, synthetic construct
  misc_feature 1..42: note = Vesicle-fusing ATPase (118-131)
  source 1..42: mol_type = other RNA
gccgctgagttcatccagcaatttaacaatcaggcattcagc

SEQ ID NO: 67288 - RNA, 45 nt, synthetic construct
  misc_feature 1..45: note = Moesin (14-28)
  source 1..45: mol_type = other RNA
gccgagctggaattcgctatccagcccaacaccacaggcaagcaa

SEQ ID NO: 67289 - RNA, 48 nt, synthetic construct
  misc_feature 1..48: note = Moesin (13-28)
  source 1..48: mol_type = other RNA
gacgccgagctggaattcgctatccagcccaacaccacaggcaagcaa

SEQ ID NO: 67290 - RNA, 45 nt, synthetic construct
  misc_feature 1..45: note = Dihydropyrimidinase-related protein 2 (340-354)
  source 1..45: mol_type = other RNA
gacgagaaccagttcgtggccgtcaccagcacaaatgctgcaaag

SEQ ID NO: 67291 - RNA, 48 nt, synthetic construct
  misc_feature 1..48: note = Dihydropyrimidinase-related protein 2 (340-355)
  source 1..48: mol_type = other RNA
gacgagaaccagttcgtggccgtcaccagcacaaatgctgcaaaggtt

SEQ ID NO: 67292 - RNA, 33 nt, synthetic construct
  misc_feature 1..33: note = Putative ATP-dependent RNA helicase DHX33 (87-97)
  source 1..33: mol_type = other RNA
gaggccatcagcgactccctgctcagaaagtac

SEQ ID NO: 67293 - RNA, 27 nt, synthetic construct
  misc_feature 1..27: note = Ubiquitin-associated protein 2-like (88-96)
  source 1..27: mol_type = other RNA
gagggcaaccccgacacccacagctgg

SEQ ID NO: 67294 - RNA, 42 nt, synthetic construct
  misc_feature 1..42: note = Moesin (15-28)
  source 1..42: mol_type = other RNA
gagctggaattcgccatccagcccaacaccacaggcaagcaa

SEQ ID NO: 67295 - RNA, 48 nt, synthetic construct
  misc_feature 1..48: note = Acylamino-acid-releasing enzyme (440-455)
  source 1..48: mol_type = other RNA
ggccaggacagcatcctgtccctccccgggaacgtgggacaccaagat

SEQ ID NO: 67296 - RNA, 45 nt, synthetic construct
  misc_feature 1..45: note = Serine/threonine-protein phosphatase 2A 65 kDa regulatory subunit A alpha isoform (202-216)
  source 1..45: mol_type = other RNA
aagagcgagatcattcccatgttctccaacctggcctctgacgaa

SEQ ID NO: 67297 - RNA, 27 nt, synthetic construct
  misc_feature 1..27: note = 60 kDa heat shock protein, mitochondrial (397-405)
  source 1..27: mol_type = other RNA
ctgagcgacggcgtggccgtcctcaag

SEQ ID NO: 67298 - RNA, 42 nt, synthetic construct
  misc_feature 1..42: note = Disintegrin and metalloproteinase domain-containing protein 10 (83-96)
  source 1..42: mol_type = other RNA
agcgacgagttcaaggtggaaacctccaacaaagtcctggat

SEQ ID NO: 67299 - RNA, 45 nt, synthetic construct
  misc_feature 1..45: note = Peptidyl-prolyl cis-trans isomerase A (77-91)
  source 1..45: mol_type = other RNA
agcatctacggcgagaagttcgaagacgagaactttattctgaaa

SEQ ID NO: 67300 - RNA, 48 nt, synthetic construct
  misc_feature 1..48: note = Serine/threonine-protein phosphatase 2A 65 kDa regulatory subunit A alpha isoform (201-216)
  source 1..48: mol_type = other RNA
gtgaagagcgagatcattcccatgttctccaacctggcctctgacgaa

SEQ ID NO: 67301 - RNA, 51 nt, synthetic construct
  misc_feature 1..51: note = Serine/threonine-protein phosphatase 2A 65 kDa regulatory subunit A alpha isoform (201-217)
  source 1..51: mol_type = other RNA
gtgaagagcgagatcattcccatgttctccaacctggcctctgacgaacag

SEQ ID NO: 67302 - RNA, 42 nt, synthetic construct
  misc_feature 1..42: note = Solute carrier family 2, facilitated glucose transporter member 1 (140-153)
  source 1..42: mol_type = other RNA
gtgcccatgtacgtcggcgaggttagccctaccgccctgaga

SEQ ID NO: 67303 - RNA, 45 nt, synthetic construct
  misc_feature 1..45: note = Glyceraldehyde-3-phosphate dehydrogenase (116-130)
  source 1..45: mol_type = other RNA
gccaagagagtgatcattagcgctccctccgcagacgcccctatg

SEQ ID NO: 67304 - RNA, 45 nt, synthetic construct
  misc_feature 1..45: note = Glyceraldehyde-3-phosphate dehydrogenase (202-216)
  source 1..45: mol_type = other RNA
gccctgcagaacatcattcccgctagcaccggcgcagccaaggcg

SEQ ID NO: 67305 - RNA, 45 nt, synthetic construct
  misc_feature 1..45: note = 60 kDa heat shock protein, mitochondrial (35-49)
  source 1..45: mol_type = other RNA
gacgccagagctctgatgctccagggcgtggatcttctggcagac

SEQ ID NO: 67306 - RNA, 45 nt, synthetic construct
  misc_feature 1..45: note = Tubulin beta-4B chain (22-36)
  source 1..45: mol_type = other RNA
gaggtgatcagcgacgaacacggcattgatcccaccgggacatac

SEQ ID NO: 67307 - RNA, 45 nt, synthetic construct
  misc_feature 1..45: note = Glyceraldehyde-3-phosphate dehydrogenase (269-283)
  source 1..45: mol_type = other RNA
atcagctggtacgacaacgagttcggctattccaatagagtggtc

SEQ ID NO: 67308 - RNA, 24 nt, synthetic construct
  misc_feature 1..24: note = RNA cytidine acetyltransferase (478-485)
  source 1..24: mol_type = other RNA
gacgcccccgctcaccatctgttc

SEQ ID NO: 67309 - RNA, 87 nt, synthetic construct
  misc_feature 1..87: note = Alpha-synuclein (103-131)
  source 1..87: mol_type = other RNA
aacgaggaaggcgccccccaggaggggatcctggaagacatgcctgtggatccagacaatgaggcttacgaaatgccgagcgaggag

SEQ ID NO: 67310 - RNA, 15 nt, synthetic construct
  misc_feature 1..15: note = Carbonic anhydrase 2 (85-89)
  source 1..15: mol_type = other RNA
gacggcacctacaga

SEQ ID NO: 67311 - RNA, 15 nt, synthetic construct
  misc_feature 1..15: note = Carbonic anhydrase 2 (155-159)
  source 1..15: mol_type = other RNA
ggcctgcagaaggtg

SEQ ID NO: 67312 - RNA, 15 nt, synthetic construct
  misc_feature 1..15: note = Carbonic anhydrase 2 (22-26)
  source 1..15: mol_type = other RNA
atcgccaagggcgag

SEQ ID NO: 67313 - RNA, 15 nt, synthetic construct
  misc_feature 1..15: note = Carbonic anhydrase 2 (253-257)
  source 1..15: mol_type = other RNA
agacagatcaaggcc

SEQ ID NO: 67314 - RNA, 15 nt, synthetic construct
  misc_feature 1..15: note = Carbonic anhydrase 2 (218-222)
  source 1..15: mol_type = other RNA
agctccgagcaggtg

SEQ ID NO: 67315 - RNA, 45 nt, synthetic construct
  misc_feature 1..45: note = Complement factor H (1110-1124)
  source 1..45: mol_type = other RNA
ggcccccctccaccgatcgacaacggggatattaccagcttcccc

SEQ ID NO: 67316 - RNA, 33 nt, synthetic construct
  misc_feature 1..33: note = Complement factor H (1112-1122)
  source 1..33: mol_type = other RNA
ccccctccaatcgacaacggcgatattaccagc

SEQ ID NO: 67317 - RNA, 30 nt, synthetic construct
  misc_feature 1..30: note = Glutathione peroxidase 1 (7-16)
  source 1..30: mol_type = other RNA
gccgctgcagccgcggctcagagcgtgtac

SEQ ID NO: 67318 - RNA, 36 nt, synthetic construct
  misc_feature 1..36: note = RalBP1-associated Eps domain-containing protein 2 (13-24)
  source 1..36: mol_type = other RNA
gccgctgcagccgcgggcgggggatgcggtagcggc

SEQ ID NO: 67319 - RNA, 75 nt, synthetic construct
  misc_feature 1..75: note = Pre-mRNA-processing factor 40 homolog A (251-275)
  source 1..75: mol_type = other RNA
gccgctgcagccgtggtcgcggctgccgcagccgctgcagccgctgccgcggcagccaacgctaatgccagcacc

SEQ ID NO: 67320 - RNA, 33 nt, synthetic construct
  misc_feature 1..33: note = Cytochrome b-c1 complex subunit 9 (2-12)
  source 1..33: mol_type = other RNA
gccgctgcaaccctgacaagcaagctctactcc

SEQ ID NO: 67321 - RNA, 186 nt, synthetic construct
  misc_feature 1..186: note = Cytochrome b-c1 complex subunit 9 (2-63)
  source 1..186: mol_type = other RNA
gccgctgcaaccctgacaagcaagctctactcccttctgttcagaaggacttctacgtttgccttgaccatcattgtgggcgtcatgttctttgagcgggcgttcgaccagggggctgatgccatatatgaccacatcaacgaaggaaaattatggaagcatattaaacacaagtacgagaataaa

SEQ ID NO: 67322 - RNA, 27 nt, synthetic construct
  misc_feature 1..27: note = Semaphorin-3A (191-199)
  source 1..27: mol_type = other RNA
gccgctgacttcatgggcagagatttt

SEQ ID NO: 67323 - RNA, 27 nt, synthetic construct
  misc_feature 1..27: note = 60S ribosomal protein L28 (54-62)
  source 1..27: mol_type = other RNA
gccgctgacggcaagggggtggtcgtt

SEQ ID NO: 67324 - RNA, 27 nt, synthetic construct
  misc_feature 1..27: note = Glia-derived nexin (209-217)
  source 1..27: mol_type = other RNA
gccgctgacggcaagagctaccaggtg

SEQ ID NO: 67325 - RNA, 27 nt, synthetic construct
  misc_feature 1..27: note = AF4/FMR2 family member 4 (993-1001)
  source 1..27: mol_type = other RNA
gccgctgacaagagactgaccgtgctc

SEQ ID NO: 67326 - RNA, 27 nt, synthetic construct
  misc_feature 1..27: note = Enhancer of mRNA-decapping protein 4 (854-862)
  source 1..27: mol_type = other RNA
gccgctgacctgaacctcgtgctttac

SEQ ID NO: 67327 - RNA, 42 nt, synthetic construct
  misc_feature 1..42: note = Core histone macro-H2A.2 (57-70)
  source 1..42: mol_type = other RNA
gccgctgagatcctggaactcgcaggcaacgccgcgagagac

SEQ ID NO: 67328 - RNA, 45 nt, synthetic construct
  misc_feature 1..45: note = Melanotransferrin (591-605)
  source 1..45: mol_type = other RNA
gccgctgagctgagaagcgaagactacgagctcctttgccccaac

SEQ ID NO: 67329 - RNA, 30 nt, synthetic construct
  misc_feature 1..30: note = Cholinesterase (211-220)
  source 1..30: mol_type = other RNA
gccgctttcggcgggaaccccaagagcgtg

SEQ ID NO: 67330 - RNA, 27 nt, synthetic construct
  misc_feature 1..27: note = Phospholipid transfer protein (155-163)
  source 1..27: mol_type = other RNA
gccgctttcggcgggacctttaagaaa

SEQ ID NO: 67331 - RNA, 27 nt, synthetic construct
  misc_feature 1..27: note = Bax inhibitor 1 (88-96)
  source 1..27: mol_type = other RNA
gccgctggcgcatacgtgcacatggtc

SEQ ID NO: 67332 - RNA, 39 nt, synthetic construct
  misc_feature 1..39: note = Ran-binding protein 9 (182-194)
  source 1..39: mol_type = other RNA
gccgctggccccgggcctgcaggaggtgccccaaccccg

SEQ ID NO: 67333 - RNA, 45 nt, synthetic construct
  misc_feature 1..45: note = SKI family transcriptional corepressor 2 (519-533)
  source 1..45: mol_type = other RNA
gccgctggcagcgcagaggccgcgccccctccagggcagccgccc

SEQ ID NO: 67334 - RNA, 42 nt, synthetic construct
  misc_feature 1..42: note = Fatty acid synthase (859-872)
  source 1..42: mol_type = other RNA
gccgctatctacaacattgacaccagctccgagtctcccgat

SEQ ID NO: 67335 - RNA, 45 nt, synthetic construct
  misc_feature 1..45: note = Fatty acid synthase (859-873)
  source 1..45: mol_type = other RNA
gccgctatctacaacattgacaccagctccgagtctcccgatcac

SEQ ID NO: 67336 - RNA, 48 nt, synthetic construct
  misc_feature 1..48: note = Fatty acid synthase (859-874)
  source 1..48: mol_type = other RNA
gccgctatctacaacattgacaccagctccgagtctcccgatcactat

SEQ ID NO: 67337 - RNA, 24 nt, synthetic construct
  misc_feature 1..24: note = Spectrin beta chain, non-erythrocytic 4 (2141-2148)
  source 1..24: mol_type = other RNA
gccgctaaggcagcccccctgctc

SEQ ID NO: 67338 - RNA, 45 nt, synthetic construct
  misc_feature 1..45: note = Talin-1 (859-873)
  source 1..45: mol_type = other RNA
gccgctaagatcctggcagacgccaccgcgaaaatggtggaggct

SEQ ID NO: 67339 - RNA, 36 nt, synthetic construct
  misc_feature 1..36: note = Prohibitin (2-13)
  source 1..36: mol_type = other RNA
gccgctaaggtgttcgagagcatcggcaaatttggg

SEQ ID NO: 67340 - RNA, 42 nt, synthetic construct
  misc_feature 1..42: note = Prohibitin (2-15)
  source 1..42: mol_type = other RNA
gccgctaaggtgttcgagagcatcggcaaatttgggctggca

SEQ ID NO: 67341 - RNA, 45 nt, synthetic construct
  misc_feature 1..45: note = Beta-secretase 2 (74-88)
  source 1..45: mol_type = other RNA
gccgctaacttcctggcaatggtggacaatctccagggcgatagc

SEQ ID NO: 67342 - RNA, 27 nt, synthetic construct
  misc_feature 1..27: note = Rho guanine nucleotide exchange factor 2 (516-524)
  source 1..27: mol_type = other RNA
gccgctccccctgagatgtacgaagtg

SEQ ID NO: 67343 - RNA, 27 nt, synthetic construct
  misc_feature 1..27: note = Collagen alpha-1(VI) chain (3-11)
  source 1..27: mol_type = other RNA
gccgctagagcactgctcccccttctg

SEQ ID NO: 67344 - RNA, 27 nt, synthetic construct
  misc_feature 1..27: note = U2 small nuclear ribonucleoprotein B'' (202-210)
  source 1..27: mol_type = other RNA
gccgctagagacgcactgcagggcttc

SEQ ID NO: 67345 - RNA, 39 nt, synthetic construct
  misc_feature 1..39: note = Transport and Golgi organization protein 6 homolog (2-14)
  source 1..39: mol_type = other RNA
gccgctagacaggcagtgggcagcggggcccaagagacc

SEQ ID NO: 67346 - RNA, 24 nt, synthetic construct
  misc_feature 1..24: note = Protein AATF (31-38)
  source 1..24: mol_type = other RNA
gccgctagagtgatcgacaggttc

SEQ ID NO: 67347 - RNA, 48 nt, synthetic construct
  misc_feature 1..48: note = Dachshund homolog 1 (110-125)
  source 1..48: mol_type = other RNA
gccgctagcaacggctccgggggaggtggcgggggaatctctgcaggc

SEQ ID NO: 67348 - RNA, 57 nt, synthetic construct
  misc_feature 1..57: note = HLA class I histocompatibility antigen, A-23 alpha chain (347-365)
  source 1..57: mol_type = other RNA
gccgctagctccgactctgcacagggctcagatgtgagtctgaccgcctgcaaggtc

SEQ ID NO: 67349 - RNA, 27 nt, synthetic construct
  misc_feature 1..27: note = Talin-1 (2432-2440)
  source 1..27: mol_type = other RNA
gccgctagcaccgcacagctgctcgtg

SEQ ID NO: 67350 - RNA, 27 nt, synthetic construct
  misc_feature 1..27: note = Amyloid-like protein 2 (10-18)
  source 1..27: mol_type = other RNA
gccgctaccggcagactgctccttctg

SEQ ID NO: 67351 - RNA, 27 nt, synthetic construct
  misc_feature 1..27: note = Protein BTG1 (17-25)
  source 1..27: mol_type = other RNA
gccgctgtgagcttcatctccaagttt

SEQ ID NO: 67352 - RNA, 27 nt, synthetic construct
  misc_feature 1..27: note = Basement membrane-specific heparan sulfate proteoglycan core protein (1409-1417)
  source 1..27: mol_type = other RNA
gccgcttacggcgggaagctgagatat

SEQ ID NO: 67353 - RNA, 27 nt, synthetic construct
  misc_feature 1..27: note = Glycogen phosphorylase, muscle form (154-162)
  source 1..27: mol_type = other RNA
gccgcttacggctatgggatcagatac

SEQ ID NO: 67354 - RNA, 30 nt, synthetic construct
  misc_feature 1..30: note = Tyrosine-tRNA ligase, cytoplasmic (339-348)
  source 1..30: mol_type = other RNA
gccgcttaccccgaccctagcaagcagaaa

SEQ ID NO: 67355 - RNA, 30 nt, synthetic construct
  misc_feature 1..30: note = SPRY domain-containing SOCS box protein 1 (218-227)
  source 1..30: mol_type = other RNA
gccgacgctcccctgcacagcgtgggctac

SEQ ID NO: 67356 - RNA, 27 nt, synthetic construct
  misc_feature 1..27: note = Ataxin-10 (381-389)
  source 1..27: mol_type = other RNA
gccgacgctagcctgctcaagaaagtg

SEQ ID NO: 67357 - RNA, 39 nt, synthetic construct
  misc_feature 1..39: note = Histidine triad nucleotide-binding protein 1 (2-14)
  source 1..39: mol_type = other RNA
gccgacgagatcgctaaggcacaggtggccagacccggc

SEQ ID NO: 67358 - RNA, 27 nt, synthetic construct
  misc_feature 1..27: note = Eukaryotic initiation factor 4A-II (185-193)
  source 1..27: mol_type = other RNA
gccgacgagatgctgagcagaggcttc

SEQ ID NO: 67359 - RNA, 27 nt, synthetic construct
  misc_feature 1..27: note = Cyclin-dependent kinase 4 (83-91)
  source 1..27: mol_type = other RNA
gccgacttcggcctggctagaatctac

SEQ ID NO: 67360 - RNA, 27 nt, synthetic construct
  misc_feature 1..27: note = Cyclin-dependent kinase 13 (240-248)
  source 1..27: mol_type = other RNA
gccgacttcggcctggctagactctac

SEQ ID NO: 67361 - RNA, 21 nt, synthetic construct
  misc_feature 1..21: note = Coatomer subunit gamma-1 (761-767)
  source 1..21: mol_type = other RNA
gccgaccacatccagaaggtg

SEQ ID NO: 67362 - RNA, 21 nt, synthetic construct
  misc_feature 1..21: note = Eukaryotic translation initiation factor 3 subunit H (222-228)
  source 1..21: mol_type = other RNA
gccgacaagcacgagctgctc

SEQ ID NO: 67363 - RNA, 21 nt, synthetic construct
  misc_feature 1..21: note = Dual specificity protein phosphatase 14 (94-100)
  source 1..21: mol_type = other RNA
gccgacaagatccacagcgtg

SEQ ID NO: 67364 - RNA, 21 nt, synthetic construct
  misc_feature 1..21: note = Transformation/transcription domain-associated protein (380-386)
  source 1..21: mol_type = other RNA
gccgacctggtgcaccatgtc

SEQ ID NO: 67365 - RNA, 27 nt, synthetic construct
  misc_feature 1..27: note = Threonine-tRNA ligase, cytoplasmic (147-155)
  source 1..27: mol_type = other RNA
gccgacaacaccgtgatcgctaaggtc

SEQ ID NO: 67366 - RNA, 51 nt, synthetic construct
  misc_feature 1..51: note = H(+)/Cl(-) exchange transporter 7 (526-542)
  source 1..51: mol_type = other RNA
gccgaccccggcaagtacgctctgatgggggcagccgcgcagctcggaggt

SEQ ID NO: 67367 - RNA, 27 nt, synthetic construct
  misc_feature 1..27: note = Cyclin-dependent kinase 18 (414-422)
  source 1..27: mol_type = other RNA
gccgaggctgcactgagccactcctac

SEQ ID NO: 67368 - RNA, 27 nt, synthetic construct
  misc_feature 1..27: note = Actin-binding protein anillin (758-766)
  source 1..27: mol_type = other RNA
gccgaggctgaaagactgctccttatc

SEQ ID NO: 67369 - RNA, 36 nt, synthetic construct
  misc_feature 1..36: note = T-box transcription factor TBX2 (61-72)
  source 1..36: mol_type = other RNA
gccgaggctggcctgcacgtgagcgcactcgggccc

SEQ ID NO: 67370 - RNA, 30 nt, synthetic construct
  misc_feature 1..30: note = Synemin (1056-1065)
  source 1..30: mol_type = other RNA
gccgaggctcccgcagccggcatcagattc

SEQ ID NO: 67371 - RNA, 30 nt, synthetic construct
  misc_feature 1..30: note = IgGFc-binding protein (407-416)
  source 1..30: mol_type = other RNA
gccgaggctaccacaaacctgggcctcctt

SEQ ID NO: 67372 - RNA, 36 nt, synthetic construct
  misc_feature 1..36: note = Probable methyltransferase TARBP1 (184-195)
  source 1..36: mol_type = other RNA
gccgaggacgctgcagccctggtggcgggcagactc

SEQ ID NO: 67373 - RNA, 27 nt, synthetic construct
  misc_feature 1..27: note = Filamin-B (9-17)
  source 1..27: mol_type = other RNA
gccgaggacgctccctggaagaaaatc

SEQ ID NO: 67374 - RNA, 30 nt, synthetic construct
  misc_feature 1..30: note = Cytochrome c oxidase subunit 6B1 (2-11)
  source 1..30: mol_type = other RNA
gccgaggacatggaaaccaagatcaaaaac

SEQ ID NO: 67375 - RNA, 30 nt, synthetic construct; identical to SEQ ID NO: 43148
  misc_feature 1..30: note = Voltage-dependent L-type calcium channel subunit alpha-1C (919-928)
  source 1..30: mol_type = other RNA

SEQ ID NO: 67376 - RNA, 30 nt, synthetic construct
  misc_feature 1..30: note = F-box/WD repeat-containing protein 8 (326-335)
  source 1..30: mol_type = other RNA
gccgaggacagcgctagaaccctgctctac

SEQ ID NO: 67377 - RNA, 33 nt, synthetic construct
  misc_feature 1..33: note = ATP-binding cassette sub-family B member 8, mitochondrial (351-361)
  source 1..33: mol_type = other RNA
gccgaggaactgggcagagggatcgctctcttc

SEQ ID NO: 67378 - RNA, 27 nt, synthetic construct
  misc_feature 1..27: note = Vimentin (287-295)
  source 1..27: mol_type = other RNA
gccgaggaatggtacaagagcaaattc

SEQ ID NO: 67379 - RNA, 63 nt, synthetic construct
  misc_feature 1..63: note = Proliferation-associated protein 2G4 (162-182)
  source 1..63: mol_type = other RNA
gccgagttcgaagtgcacgaggtctacgctgttgacgtgctggtaagctccggcgaagggaag

SEQ ID NO: 67380 - RNA, 36 nt, synthetic construct
  misc_feature 1..36: note = Gamma-secretase C-terminal fragment 59 (563-574)
  source 1..36: mol_type = other RNA
gccgagttcagacacgacagcggctacgaagtgcat

SEQ ID NO: 67381 - RNA, 39 nt, synthetic construct
  misc_feature 1..39: note = Gamma-secretase C-terminal fragment 59 (563-575)
  source 1..39: mol_type = other RNA
gccgagttcagacacgacagcggctacgaagtgcatcac

SEQ ID NO: 67382 - RNA, 42 nt, synthetic construct
  misc_feature 1..42: note = Gamma-secretase C-terminal fragment 59 (563-576)
  source 1..42: mol_type = other RNA
gccgagttcagacacgacagcggctacgaagtgcatcaccag

SEQ ID NO: 67383 - RNA, 45 nt, synthetic construct
  misc_feature 1..45: note = Gamma-secretase C-terminal fragment 59 (563-577)
  source 1..45: mol_type = other RNA
gccgagttcagacacgacagcggctacgaagtgcatcaccagaag

SEQ ID NO: 67384 - RNA, 36 nt, synthetic construct
  misc_feature 1..36: note = Ataxin-10 (295-306)
  source 1..36: mol_type = other RNA
gccgagggcgacatcagcaacgtggctaatgggttc

SEQ ID NO: 67385 - RNA, 21 nt, synthetic construct
  misc_feature 1..21: note = Baculoviral IAP repeat-containing protein 6 (1093-1099)
  source 1..21: mol_type = other RNA
gccgagggcatccacaacttc

SEQ ID NO: 67386 - RNA, 30 nt, synthetic construct; identical to SEQ ID NO: 43159
  misc_feature 1..30: note = Zinc finger protein 516 (373-382)
  source 1..30: mol_type = other RNA

SEQ ID NO: 67387 - RNA, 33 nt, synthetic construct
  misc_feature 1..33: note = Synemin (327-337)
  source 1..33: mol_type = other RNA
gccgagcacgtggaaaacatgcccagcgagttc

SEQ ID NO: 67388 - RNA, 27 nt, synthetic construct
  misc_feature 1..27: note = Intraflagellar transport protein 81 homolog (43-51)
  source 1..27: mol_type = other RNA
gccgagatcgaccccaagcagctggtg

SEQ ID NO: 67389 - RNA, 33 nt, synthetic construct
  misc_feature 1..33: note = Nucleolar pre-ribosomal-associated protein 1 (403-413)
  source 1..33: mol_type = other RNA
gccgagatcattggcggggaaagaagcgtgttc

SEQ ID NO: 67390 - RNA, 21 nt, synthetic construct
  misc_feature 1..21: note = Poly (ADP-ribose) polymerase 1 (811-817)
  source 1..21: mol_type = other RNA
gccgagatcattagaaagtac

SEQ ID NO: 67391 - RNA, 36 nt, synthetic construct
  misc_feature 1..36: note = Sorting nexin-18 (397-408)
  source 1..36: mol_type = other RNA
gccgagaaggacgaaatggtgggcgctaacttcttt

SEQ ID NO: 67392 - RNA, 36 nt, synthetic construct
  misc_feature 1..36: note = Actin-binding protein anillin (451-462)
  source 1..36: mol_type = other RNA
gccgagaagggcgggaacagcaaatccaagcagctg

SEQ ID NO: 67393 - RNA, 27 nt, synthetic construct
  misc_feature 1..27: note = A-kinase anchor protein 9 (834-842)
  source 1..27: mol_type = other RNA
gccgagaagaacttcgaagtgaattac

SEQ ID NO: 67394 - RNA, 27 nt, synthetic construct
  misc_feature 1..27: note = Ribosomal protein S6 kinase alpha-5 (41-49)
  source 1..27: mol_type = other RNA
gccgagaaggtgggcatcgaaaacttc

SEQ ID NO: 67395 - RNA, 24 nt, synthetic construct
  misc_feature 1..24: note = Guanine nucleotide-binding protein G(olf) subunit alpha (78-85)
  source 1..24: mol_type = other RNA
gccgagaaggtgctggctggcaaa

SEQ ID NO: 67396 - RNA, 36 nt, synthetic construct
  misc_feature 1..36: note = Myosin-10 (1603-1614)
  source 1..36: mol_type = other RNA
gccgagctggaagacgagagaaagcagagggctctc

SEQ ID NO: 67397 - RNA, 30 nt, synthetic construct
  misc_feature 1..30: note = Synemin (111-120)
  source 1..30: mol_type = other RNA
gccgagctgggcgctcagcaaagagaactc

SEQ ID NO: 67398 - RNA, 27 nt, synthetic construct
  misc_feature 1..27: note = YTH domain-containing family protein 3 (480-488)
  source 1..27: mol_type = other RNA
gccgagatgaagagcgtggtcgactac

SEQ ID NO: 67399 - RNA, 36 nt, synthetic construct
  misc_feature 1..36: note = YTH domain-containing family protein 3 (480-491)
  source 1..36: mol_type = other RNA
gccgagatgaagagcgtggtcgactacaacgcttat

SEQ ID NO: 67400 - RNA, 33 nt, synthetic construct
  misc_feature 1..33: note = Melanoma-associated antigen 4 (134-144)
  source 1..33: mol_type = other RNA
gccgagatgctggaaagagtgatcaagaactac

SEQ ID NO: 67401 - RNA, 33 nt, synthetic construct
  misc_feature 1..33: note = Melanoma-associated antigen 9 (132-142)
  source 1..33: mol_type = other RNA
gccgagatgctggaaagcgtgatcaagaactac

SEQ ID NO: 67402 - RNA, 21 nt, synthetic construct
  misc_feature 1..21: note = Probable ATP-dependent RNA helicase DHX37 (108-114)
  source 1..21: mol_type = other RNA
gccgagatgagactgttctac

SEQ ID NO: 67403 - RNA, 33 nt, synthetic construct
  misc_feature 1..33: note = Synemin (1391-1401)
  source 1..33: mol_type = other RNA
gccgagatgaccagcggcgtgtccagatctttc

SEQ ID NO: 67404 - RNA, 27 nt, synthetic construct
  misc_feature 1..27: note = Obscurin (5874-5882)
  source 1..27: mol_type = other RNA
gccgagaacaagctgcacgtgagcctc

SEQ ID NO: 67405 - RNA, 27 nt, synthetic construct
  misc_feature 1..27: note = Plexin-B2 (399-407)
  source 1..27: mol_type = other RNA
gccgagaacaatcacaccgtggctttc

SEQ ID NO: 67406 - RNA, 30 nt, synthetic construct
  misc_feature 1..30: note = Heterogeneous nuclear ribonucleoprotein U (399-408)
  source 1..30: mol_type = other RNA
gccgagaaccccggcaagtacaatatcctg

SEQ ID NO: 67407 - RNA, 27 nt, synthetic construct
  misc_feature 1..27: note = Protocadherin gamma-B2 (110-118)
  source 1..27: mol_type = other RNA
gccgagaaccccctgaatatcttctac

SEQ ID NO: 67408 - RNA, 27 nt, synthetic construct
  misc_feature 1..27: note Dolichyl-diphosphooligosaccharide-proteinosyltransferase subunit 2 (312-320)
  source 1..27: mol_type = other RNA
gccgagcccgacaacaagaatgtgtac

SEQ ID NO: 67409 - RNA, 30 nt, synthetic construct
  misc_feature 1..30: note = RING finger protein 112 (134-143)
  source 1..30: mol_type = other RNA
gccgagcccctgctccttgtgagaatcaac

SEQ ID NO: 67410 - RNA, 33 nt, synthetic construct
  misc_feature 1..33: note = Plectin (1676-1686)
  source 1..33: mol_type = other RNA
gccgagcaggaactggagaagcaaagacagctc

SEQ ID NO: 67411 - RNA, 30 nt, synthetic construct
  misc_feature 1..30: note = Intraflagellar transport protein 81 homolog (40-49)
  source 1..30: mol_type = other RNA
gccgagcaggaaaacctgggcaagaaactc

SEQ ID NO: 67412 - RNA, 39 nt, synthetic construct
  misc_feature 1..39: note = Transcription factor SOX-10 (195-207)
  source 1..39: mol_type = other RNA
gccgagcagggcgggaccgctgcaatccaagcccactac

SEQ ID NO: 67413 - RNA, 30 nt, synthetic construct
  misc_feature 1..30: note = Vacuolar protein sorting-associated protein 13D (998-1007)
  source 1..30: mol_type = other RNA
gccgagcagggcgggacccccatcagatac

SEQ ID NO: 67414 - RNA, 27 nt, synthetic construct
  misc_feature 1..27: note = Tetratricopeptide repeat protein 19, mitochondrial (155-163)
  source 1..27: mol_type = other RNA
gccgagcagctgttcaaggctaccatg

SEQ ID NO: 67415 - RNA, 30 nt, synthetic construct
  misc_feature 1..30: note = Vacuolar protein sorting-associated protein 18 homolog (210-219)
  source 1..30: mol_type = other RNA
gccgagagaggccccgacgggaggagcttc

SEQ ID NO: 67416 - RNA, 27 nt, synthetic construct
  misc_feature 1..27: note = COP9 signalosome complex subunit 7a (56-64)
  source 1..27: mol_type = other RNA
gccgagagcgacttcgcttccaccttt

SEQ ID NO: 67417 - RNA, 27 nt, synthetic construct
  misc_feature 1..27: note = Tumor suppressor candidate 3 (279-287)
  source 1..27: mol_type = other RNA
gccgagagccacatcattctggtgctc

SEQ ID NO: 67418 - RNA, 27 nt, synthetic construct
  misc_feature 1..27: note = Melanoma-associated antigen 4 (102-110)
  source 1..27: mol_type = other RNA
gccgagagcctgttcagagaagctctc

SEQ ID NO: 67419 - RNA, 30 nt, synthetic construct; identical to SEQ ID NO: 43192
  misc_feature 1..30: note = Peroxisome assembly protein 12 (45-54)
  source 1..30: mol_type = other RNA

SEQ ID NO: 67420 - RNA, 30 nt, synthetic construct
  misc_feature 1..30: note = Collagen alpha-1(XI) chain (281-290)
  source 1..30: mol_type = other RNA
gccgagagcgtgaccgaaggccccacagtc

SEQ ID NO: 67421 - RNA, 27 nt, synthetic construct
  misc_feature 1..27: note = Procollagen-lysine,2-oxoglutarate 5-dioxygenase 3 (47-55)
  source 1..27: mol_type = other RNA
gccgagaccgaaggctacctgagattc

SEQ ID NO: 67422 - RNA, 30 nt, synthetic construct
  misc_feature 1..30: note = Procollagen-lysine,2-oxoglutarate 5-dioxygenase 3 (47-56)
  source 1..30: mol_type = other RNA
gccgagaccgaaggctacctgagattcctc

SEQ ID NO: 67423 - RNA, 27 nt, synthetic construct
  misc_feature 1..27: note = Melanoma-associated antigen 4 (280-288)
  source 1..27: mol_type = other RNA
gccgagaccagctacgtgaaggtcctg

SEQ ID NO: 67424 - RNA, 33 nt, synthetic construct
  misc_feature 1..33: note = Melanoma-associated antigen 1 (272-282)
  source 1..33: mol_type = other RNA
gccgagaccagctacgtgaaggtcctggaatat

SEQ ID NO: 67425 - RNA, 36 nt, synthetic construct
  misc_feature 1..36: note = THO complex subunit 5 homolog (41-52)
  source 1..36: mol_type = other RNA
gccgaggtggacctgagagatcccggcagggactac

SEQ ID NO: 67426 - RNA, 33 nt, synthetic construct
  misc_feature 1..33: note = Peptidase M20 domain-containing protein 2 (78-88)
  source 1..33: mol_type = other RNA
gccgaggtgggcgctgcagccgcgctgggggtc

SEQ ID NO: 67427 - RNA, 21 nt, synthetic construct
  misc_feature 1..21: note = Probable cation-transporting ATPase 13A2 (443-449)
  source 1..21: mol_type = other RNA
gccttcctgcccctcgtgcct

SEQ ID NO: 67428 - RNA, 93 nt, synthetic construct
  misc_feature 1..93: note = Heat shock protein HSP 90-beta (38-68)
  source 1..93: mol_type = other RNA
gccttcatggaggctctgcaggcaggcgccgacatcagcatgattgggcaatttggagtgggtttctactccgcgtatctcgtcgctgaaaag

SEQ ID NO: 67429 - RNA, 33 nt, synthetic construct
  misc_feature 1..33: note = Integrin alpha-7 (107-117)
  source 1..33: mol_type = other RNA
gccttcagccccgactcccactacctgctcttt

SEQ ID NO: 67430 - RNA, 21 nt, synthetic construct
  misc_feature 1..21: note = Clustered mitochondria protein homolog (332-338)
  source 1..21: mol_type = other RNA
gccttcgtggagcacagatac

SEQ ID NO: 67431 - RNA, 27 nt, synthetic construct
  misc_feature 1..27: note = DnaJ homolog subfamily C member 3 (224-232)
  source 1..27: mol_type = other RNA
gccttctacaagatcagcaccctgtat

SEQ ID NO: 67432 - RNA, 33 nt, synthetic construct
  misc_feature 1..33: note = SKI family transcriptional corepressor 2 (437-447)
  source 1..33: mol_type = other RNA
gccggcgctgggggagcaggtgccgcgcccaag

SEQ ID NO: 67433 - RNA, 27 nt, synthetic construct
  misc_feature 1..27: note = Actin, gamma-enteric smooth muscle (23-31)
  source 1..27: mol_type = other RNA
gccggcgacgatgctcccagagcagtg

SEQ ID NO: 67434 - RNA, 48 nt, synthetic construct
  misc_feature 1..48: note = Tripartite motif-containing protein 67 (85-100)
  source 1..48: mol_type = other RNA
gccggcgggctgggaggtggcgctgggggaggcggtgaccacgcagat

SEQ ID NO: 67435 - RNA, 24 nt, synthetic construct
  misc_feature 1..24: note = Cytochrome c oxidase subunit 6C (68-75)
  source 1..24: mol_type = other RNA
gccggcatcttccagagcgtgaag

SEQ ID NO: 67436 - RNA, 69 nt, synthetic construct
  misc_feature 1..69: note = Histone-lysine N-methyltransferase EHMT1 (702-724)
  source 1..69: mol_type = other RNA
gccggcctggggagacccacccctggactcagccagggtccaggcaaggagacacttgaatccgctctg

SEQ ID NO: 67437 - RNA, 78 nt, synthetic construct
  misc_feature 1..78: note = Trifunctional enzyme subunit beta, mitochondrial (344-369)
  source 1..78: mol_type = other RNA
gccggcctgaccatgaacgacatcgatgctttcgagtttcacgaagcattcagcgggcagattctcgccaattttaag

SEQ ID NO: 67438 - RNA, 36 nt, synthetic construct
  misc_feature 1..36: note = Collagen alpha-2(IV) chain (15-26)
  source 1..36: mol_type = other RNA
gccggcccccctgggatcaccggattcccaggtttt

SEQ ID NO: 67439 - RNA, 30 nt, synthetic construct; identical to SEQ ID NO: 43212
  misc_feature 1..30: note = HLA class I histocompatibility antigen, B-8 alpha chain (89-98)
  source 1..30: mol_type = other RNA

SEQ ID NO: 67440 - RNA, 24 nt, synthetic construct
  misc_feature 1..24: note = Actin-related protein 2/3 complex subunit 5 (75-82)
  source 1..24: mol_type = other RNA
gccggcagcatcgtgctgaaggtc

SEQ ID NO: 67441 - RNA, 27 nt, synthetic construct
  misc_feature 1..27: note = Glucosylceramidase (22-30)
  source 1..27: mol_type = other RNA
gccggcagcctgaccgggctccttctg

SEQ ID NO: 67442 - RNA, 39 nt, synthetic construct
  misc_feature 1..39: note = CD44 antigen (31-43)
  source 1..39: mol_type = other RNA
gccggcgtgttccacgtcgagaagaacgggagatacagc

SEQ ID NO: 67443 - RNA, 36 nt, synthetic construct
  misc_feature 1..36: note = Cytochrome c oxidase subunit 5B, mitochondrial (118-129)
  source 1..36: mol_type = other RNA
gcccactacaagctggtgccccagcaactcgctcat

SEQ ID NO: 67444 - RNA, 27 nt, synthetic construct
  misc_feature 1..27: note = H(+)/Cl(-) exchange transporter 5 (533-541)
  source 1..27: mol_type = other RNA
gccatcgctggcagactgctcggggtg

SEQ ID NO: 67445 - RNA, 27 nt, synthetic construct
  misc_feature 1..27: note = HEAT repeat-containing protein 2 (474-482)
  source 1..27: mol_type = other RNA
gccatcgctaccgagctggcacaggcc

SEQ ID NO: 67446 - RNA, 27 nt, synthetic construct
  misc_feature 1..27: note = Tetratricopeptide repeat protein 28 (1994-2002)
  source 1..27: mol_type = other RNA
gccatcgacgagaaggtgcaggctgtc

SEQ ID NO: 67447 - RNA, 27 nt, synthetic construct
  misc_feature 1..27: note = Prolow-density lipoprotein receptor-related protein 1 (1748-1756)
  source 1..27: mol_type = other RNA
gccatcgacttccccgagagcaagctg

SEQ ID NO: 67448 - RNA, 24 nt, synthetic construct
  misc_feature 1..24: note = L-dopachrome tautomerase (63-70)
  source 1..24: mol_type = other RNA
gccatcgacctgcccgtgagcgtc

SEQ ID NO: 67449 - RNA, 24 nt, synthetic construct
  misc_feature 1..24: note = CCR4-NOT transcription complex subunit 1 (94-101)
  source 1..24: mol_type = other RNA
gccatcgacaaccccctgcactac

SEQ ID NO: 67450 - RNA, 27 nt, synthetic construct
  misc_feature 1..27: note = Leucine-rich repeat-containing protein 1 (516-524)
  source 1..27: mol_type = other RNA
gccatcgacagagtgaccacaagcgtc

SEQ ID NO: 67451 - RNA, 42 nt, synthetic construct
  misc_feature 1..42: note = Clathrin heavy chain 1 (1124-1137)
  source 1..42: mol_type = other RNA
gccatcgacagctacattaaggctgatgacccctcctcttat

SEQ ID NO: 67452 - RNA, 45 nt, synthetic construct
  misc_feature 1..45: note = Clathrin heavy chain 1 (1124-1138)
  source 1..45: mol_type = other RNA
gccatcgacagctacattaaggctgatgacccctcctcttatatg

SEQ ID NO: 67453 - RNA, 24 nt, synthetic construct
  misc_feature 1..24: note = Eukaryotic translation initiation factor 4 gamma 1 (748-755)
  source 1..24: mol_type = other RNA
gccatcgacaccgaggaaagactg

SEQ ID NO: 67454 - RNA, 27 nt, synthetic construct
  misc_feature 1..27: note = Probable phospholipid-transporting ATPase VB (1005-1013)
  source 1..27: mol_type = other RNA
gccatcttccagggcaagctggagaaa

SEQ ID NO: 67455 - RNA, 30 nt, synthetic construct
  misc_feature 1..30: note = Tubulin beta-2A chain (315-324)
  source 1..30: mol_type = other RNA
gccatcttcagaggcaggatgagcatgaag

SEQ ID NO: 67456 - RNA, 66 nt, synthetic construct
  misc_feature 1..66: note = Aldose reductase (156-177)
  source 1..66: mol_type = other RNA
gccatcggcattagcaacttcaatcacctgcaggtggagatgatactcaacaagcccgggcttaaa

SEQ ID NO: 67457 - RNA, 27 nt, synthetic construct
  misc_feature 1..27: note = General transcription factor 3C polypeptide 1 (642-650)
  source 1..27: mol_type = other RNA
gccatcattgctaccggctgcttcggg

SEQ ID NO: 67458 - RNA, 27 nt, synthetic construct
  misc_feature 1..27: note = Receptor-type tyrosine-protein phosphatase zeta (195-203)
  source 1..27: mol_type = other RNA
gccatcattgacggcgtggagagcgtc

SEQ ID NO: 67459 - RNA, 27 nt, synthetic construct
  misc_feature 1..27: note = Protein TANC1 (414-422)
  source 1..27: mol_type = other RNA
gccatcattagcaagctggtggctctc

SEQ ID NO: 67460 - RNA, 27 nt, synthetic construct
  misc_feature 1..27: note = Putative endoplasmin-like protein (265-273)
  source 1..27: mol_type = other RNA
gccatcaaggacaaaattgagaaggct

SEQ ID NO: 67461 - RNA, 27 nt, synthetic construct
  misc_feature 1..27: note = Kinesin-like protein KIF2A (638-646)
  source 1..27: mol_type = other RNA
gccatcctggagcagaagattgacata

SEQ ID NO: 67462 - RNA, 27 nt, synthetic construct
  misc_feature 1..27: note = CLIP-associating protein 2 (795-803)
  source 1..27: mol_type = other RNA
gccatcctgaagtacattgagaccctc

SEQ ID NO: 67463 - RNA, 27 nt, synthetic construct
  misc_feature 1..27: note = Heat shock 70 kDa protein 4 (381-389)
  source 1..27: mol_type = other RNA
gccatcctgagccccgctttcaaggtg

SEQ ID NO: 67464 - RNA, 27 nt, synthetic construct
  misc_feature 1..27: note = Arginyl-tRNA-protein transferase 1 (382-390)
  source 1..27: mol_type = other RNA
gccatcatgccctacggcgtgtataag

SEQ ID NO: 67465 - RNA, 27 nt, synthetic construct
  misc_feature 1..27: note = Probable ATP-dependent RNA helicase DDX17 (464-472)
  source 1..27: mol_type = other RNA
gccatcaaccccaagctgatgcagctc

SEQ ID NO: 67466 - RNA, 30 nt, synthetic construct
  misc_feature 1..30: note = Polypyrimidine tract-binding protein 1 (346-355)
  source 1..30: mol_type = other RNA
gccatccccggcctggctggggcaggaaac

SEQ ID NO: 67467 - RNA, 33 nt, synthetic construct
  misc_feature 1..33: note = Moesin (19-29)
  source 1..33: mol_type = other RNA
gccatccagcccaacaccacaggcaagcaactg

SEQ ID NO: 67468 - RNA, 39 nt, synthetic construct
  misc_feature 1..39: note = Moesin (19-31)
  source 1..39: mol_type = other RNA
gccatccagcccaacaccacaggcaagcaactgttcgac

SEQ ID NO: 67469 - RNA, 27 nt, synthetic construct
  misc_feature 1..27: note = EH domain-containing protein 2 (17-25)
  source 1..27: mol_type = other RNA
gccatcagaaccgtgacaagcgctctg

SEQ ID NO: 67470 - RNA, 30 nt, synthetic construct
  misc_feature 1..30: note = DNA-dependent protein kinase catalytic subunit (460-469)
  source 1..30: mol_type = other RNA
gccatcgtgaaggtcttcctggctctcgca

SEQ ID NO: 67471 - RNA, 36 nt, synthetic construct
  misc_feature 1..36: note = Solute carrier family 23 member 2 (58-69)
  source 1..36: mol_type = other RNA
gccatctacaccacagagaacggcattgctgaaaag

SEQ ID NO: 67472 - RNA, 24 nt, synthetic construct
  misc_feature 1..24: note = Nuclear factor of activated T-cells 5 (154-161)
  source 1..24: mol_type = other RNA
gccaaggctccccactacgtgctg

SEQ ID NO: 67473 - RNA, 96 nt, synthetic construct
  misc_feature 1..96: note = ATP synthase subunit epsilon, mitochondrial (20-51)
  source 1..96: mol_type = other RNA
gccaaggctgtgagagacgcactgaaaaccgagttcaaggccaacgcggaaaaaacaagcggctccaatgtcaagatcgttaaagtgaagaaggag

SEQ ID NO: 67474 - RNA, 42 nt, synthetic construct
  misc_feature 1..42: note = Alpha-protein kinase 2 (1992-2005)
  source 1..42: mol_type = other RNA
gccaagatctacgctgcagaggcccagcccctggaaggcttc

SEQ ID NO: 67475 - RNA, 27 nt, synthetic construct
  misc_feature 1..27: note = Choline-phosphate cytidylyltransferase A (99-107)
  source 1..27: mol_type = other RNA
gccaagaacctgttccccaatacctac

SEQ ID NO: 67476 - RNA, 27 nt, synthetic construct
  misc_feature 1..27: note = Putative hexokinase HKDC1 (389-397)
  source 1..27: mol_type = other RNA
gccctggctgcaatcctcaccagactt

SEQ ID NO: 67477 - RNA, 39 nt, synthetic construct
  misc_feature 1..39: note = AT-rich interactive domain-containing protein 1B (2130-2142)
  source 1..39: mol_type = other RNA
gccctggctgcaagagccatcgcggtgcagaagggcagc

SEQ ID NO: 67478 - RNA, 27 nt, synthetic construct
  misc_feature 1..27: note = Lamin-B receptor (330-338)
  source 1..27: mol_type = other RNA
gccctggctgcaaccgtgttctgcgtc

SEQ ID NO: 67479 - RNA, 42 nt, synthetic construct
  misc_feature 1..42: note = Chondroitin sulfate proteoglycan 4 (1294-1307)
  source 1..42: mol_type = other RNA
gccctggctgacgagccccctagcctcgatccagtgcagtcc

SEQ ID NO: 67480 - RNA, 33 nt, synthetic construct
  misc_feature 1..33: note = Metastasis-associated protein MTA1 (57-67)
  source 1..33: mol_type = other RNA
gccctggctgacaagcacgcaaccctcagcgtg

SEQ ID NO: 67481 - RNA, 33 nt, synthetic construct
  misc_feature 1..33: note = Probable ATP-dependent RNA helicase DDX27 (69-79)
  source 1..33: mol_type = other RNA
gccctggctgacgtgatgagccagctcaagaaa

SEQ ID NO: 67482 - RNA, 27 nt, synthetic construct
  misc_feature 1..27: note = Seizure 6-like protein 2 (50-58)
  source 1..27: mol_type = other RNA
gccctggctgagctccttcacggcgca

SEQ ID NO: 67483 - RNA, 27 nt, synthetic construct
  misc_feature 1..27: note = Helicase SKI2W (784-792)
  source 1..27: mol_type = other RNA
gccctggctgagctcaccaagagactt

SEQ ID NO: 67484 - RNA, 30 nt, synthetic construct
  misc_feature 1..30: note = Chloride channel protein 2 (506-515)
  source 1..30: mol_type = other RNA
gccctggctggcgcagtgacccacacagtc

SEQ ID NO: 67485 - RNA, 27 nt, synthetic construct
  misc_feature 1..27: note = RNA 3'-terminal phosphate cyclase (317-325)
  source 1..27: mol_type = other RNA
gccctggctaacggcgtgagcagaatc

SEQ ID NO: 67486 - RNA, 27 nt, synthetic construct
  misc_feature 1..27: note = La-related protein 1 (672-680)
  source 1..27: mol_type = other RNA
gccctggctaacaagctcttcggcgca

SEQ ID NO: 67487 - RNA, 27 nt, synthetic construct
  misc_feature 1..27: note = Beclin-1 (316-324)
  source 1..27: mol_type = other RNA
gccctggctaacaagatgggcctcaaa

SEQ ID NO: 67488 - RNA, 30 nt, synthetic construct
  misc_feature 1..30: note = Nicastrin (550-559)
  source 1..30: mol_type = other RNA
gccctggctaacctcaccggcacagtggtc

SEQ ID NO: 67489 - RNA, 27 nt, synthetic construct
  misc_feature 1..27: note = Poly(rC)-binding protein 4 (256-264)
  source 1..27: mol_type = other RNA
gccctggctcagtacctcatcaccgca

SEQ ID NO: 67490 - RNA, 27 nt, synthetic construct
  misc_feature 1..27: note = Oxidation resistance protein 1 (776-784)
  source 1..27: mol_type = other RNA
gccctggctagcgagcccctcaaggtg

SEQ ID NO: 67491 - RNA, 27 nt, synthetic construct
  misc_feature 1..27: note = Kinesin light chain 4 (108-116)
  source 1..27: mol_type = other RNA
gccctggctagccacctctccaccgtg

SEQ ID NO: 67492 - RNA, 27 nt, synthetic construct
  misc_feature 1..27: note = E3 ubiquitin-protein ligase TRIM33 (830-838)
  source 1..27: mol_type = other RNA
gccctggctagcctcgagaaccacgtg

SEQ ID NO: 67493 - RNA, 30 nt, synthetic construct
  misc_feature 1..30: note = Ataxin-10 (300-309)
  source 1..30: mol_type = other RNA
gccctggctaccatcagactccttgacgtg

SEQ ID NO: 67494 - RNA, 27 nt, synthetic construct
  misc_feature 1..27: note = Catenin alpha-1 (336-344)
  source 1..27: mol_type = other RNA
gccctgtgcccccaggtgatcaacgct

SEQ ID NO: 67495 - RNA, 27 nt, synthetic construct
  misc_feature 1..27: note = Pre-mRNA-processing factor 40 homolog B (616-624)
  source 1..27: mol_type = other RNA
gccctggacgctggcaacatcaagctc

SEQ ID NO: 67496 - RNA, 27 nt, synthetic construct
  misc_feature 1..27: note = Coiled-coil domain-containing protein 14 (192-200)
  source 1..27: mol_type = other RNA
gccctggacgctaacatcgcaagactc

SEQ ID NO: 67497 - RNA, 27 nt, synthetic construct
  misc_feature 1..27: note = Hyccin (259-267)
  source 1..27: mol_type = other RNA
gccctggacgatatcatttacagagct

SEQ ID NO: 67498 - RNA, 27 nt, synthetic construct
  misc_feature 1..27: note = Protein transport protein Sec16A (815-823)
  source 1..27: mol_type = other RNA
gccctggacttcaccctcagcagaaca

SEQ ID NO: 67499 - RNA, 27 nt, synthetic construct
  misc_feature 1..27: note = Rho GTPase-activating protein 5 (624-632)
  source 1..27: mol_type = other RNA
gccctggacggcaagatctacgagctc

SEQ ID NO: 67500 - RNA, 24 nt, synthetic construct
  misc_feature 1..24: note = Endoplasmin (90-97)
  source 1..24: mol_type = other RNA
gccctggacaagatcagactcatt

SEQ ID NO: 67501 - RNA, 21 nt, synthetic construct
  misc_feature 1..21: note = Heat shock protein HSP 90-beta (1-7)
  source 1..21: mol_type = other RNA
gccctggacaagatcagatac

SEQ ID NO: 67502 - RNA, 30 nt, synthetic construct; identical to SEQ ID NO: 43275
  misc_feature 1..30: note = Puromycin-sensitive aminopeptidase-like protein (412-421)
  source 1..30: mol_type = other RNA

SEQ ID NO: 67503 - RNA, 33 nt, synthetic construct
  misc_feature 1..33: note = Ubiquitin-like modifier-activating enzyme 1 (574-584)
  source 1..33: mol_type = other RNA
gccctggacaacgtggatgctagaatgtacatg

SEQ ID NO: 67504 - RNA, 27 nt, synthetic construct
  misc_feature 1..27: note = Receptor-type tyrosine-protein phosphatase gamma (213-221)
  source 1..27: mol_type = other RNA
gccctggaccccatcattcacggcctc

SEQ ID NO: 67505 - RNA, 27 nt, synthetic construct
  misc_feature 1..27: note = Chromobox protein homolog 8 (299-307)
  source 1..27: mol_type = other RNA
gccctggaccccaacggcaccagagtg

SEQ ID NO: 67506 - RNA, 27 nt, synthetic construct
  misc_feature 1..27: note = Microtubule-associated protein 1A (1498-1506)
  source 1..27: mol_type = other RNA
gccctggaccagaaggtgagaagcgtc

SEQ ID NO: 67507 - RNA, 27 nt, synthetic construct
  misc_feature 1..27: note = Cathepsin F (223-231)
  source 1..27: mol_type = other RNA
gccctggacagaggcaccgctcagtac

SEQ ID NO: 67508 - RNA, 27 nt, synthetic construct
  misc_feature 1..27: note = Probable helicase with zinc finger domain (1495-1503)
  source 1..27: mol_type = other RNA
gccctggacagaatccacggcagcgtg

SEQ ID NO: 67509 - RNA, 27 nt, synthetic construct
  misc_feature 1..27: note = Integrin beta-8 (291-299)
  source 1..27: mol_type = other RNA
gccctggacagcaagctcgctggcatc

SEQ ID NO: 67510 - RNA, 27 nt, synthetic construct
  misc_feature 1..27: note = C-type lectin domain family 11 member A (131-139)
  source 1..27: mol_type = other RNA
gccctggacaccagagtggtcgagctc

SEQ ID NO: 67511 - RNA, 27 nt, synthetic construct
  misc_feature 1..27: note = Keratin, type I cytoskeletal 27 (352-360)
  source 1..27: mol_type = other RNA
gccctggaggaacagctccaccaagtg

SEQ ID NO: 67512 - RNA, 27 nt, synthetic construct
  misc_feature 1..27: note = Serine-protein kinase ATM (1512-1520)
  source 1..27: mol_type = other RNA
gccctggagaaccacctccatgtgatc

SEQ ID NO: 67513 - RNA, 27 nt, synthetic construct
  misc_feature 1..27: note = Tetratricopeptide repeat protein 28 (936-944)
  source 1..27: mol_type = other RNA
gccctggagcagcacatcgctagcgtg

SEQ ID NO: 67514 - RNA, 27 nt, synthetic construct
  misc_feature 1..27: note = DNA-dependent protein kinase catalytic subunit (315-323)
  source 1..27: mol_type = other RNA
gccctggagagcttcctcaagcaggtg

SEQ ID NO: 67515 - RNA, 27 nt, synthetic construct
  misc_feature 1..27: note = Uridine phosphorylase 1 (48-56)
  source 1..27: mol_type = other RNA
gccctgttcggcgacgtgaagtttgtc

SEQ ID NO: 67516 - RNA, 27 nt, synthetic construct
  misc_feature 1..27: note = Ankyrin repeat and SAM domain-containing protein 1A (255-263)
  source 1..27: mol_type = other RNA
gccctgttcggcaagaccgacgtggtc

SEQ ID NO: 67517 - RNA, 33 nt, synthetic construct; identical to SEQ ID NO: 43290
  misc_feature 1..33: note = Eukaryotic translation initiation factor 2-alpha kinase 4 (1102-1112)
  source 1..33: mol_type = other RNA

SEQ ID NO: 67518 - RNA, 27 nt, synthetic construct
  misc_feature 1..27: note = Protein transport protein Sec61 subunit alpha isoform 2 (88-96)
  source 1..27: mol_type = other RNA
gccctgttcaacggcgctcagaagctc

SEQ ID NO: 67519 - RNA, 30 nt, synthetic construct
  misc_feature 1..30: note = Transforming growth factor-beta-induced protein ig-h3 (2-11)
  source 1..30: mol_type = other RNA
gccctgttcgtgagactccttgctctggca

SEQ ID NO: 67520 - RNA, 24 nt, synthetic construct
  misc_feature 1..24: note = Jerky protein homolog (486-493)
  source 1..24: mol_type = other RNA
gccctgggcgctgtggtcaaggtt

SEQ ID NO: 67521 - RNA, 30 nt, synthetic construct
  misc_feature 1..30: note = GTP-binding protein 2 (438-447)
  source 1..30: mol_type = other RNA
gccctgggcgacttcgatagagctctcctt

SEQ ID NO: 67522 - RNA, 24 nt, synthetic construct
  misc_feature 1..24: note = Ankyrin repeat domain-containing protein 40 (19-26)
  source 1..24: mol_type = other RNA
gccctgggcgacatcagagaggtg

SEQ ID NO: 67523 - RNA, 27 nt, synthetic construct
  misc_feature 1..27: note = Integrin alpha-11 (344-352)
  source 1..27: mol_type = other RNA
gccctgggcgacagaatcttcagcctc

SEQ ID NO: 67524 - RNA, 78 nt, synthetic construct
  misc_feature 1..78: note = Collagen alpha-3(VI) chain (105-130)
  source 1..78: mol_type = other RNA
gccctgggcttcgctgggggagagctcgcaaacatcggtcttgccctggactttgtggtcgaaaatcacttcaccaga

SEQ ID NO: 67525 - RNA, 24 nt, synthetic construct
  misc_feature 1..24: note = Fucose-1-phosphate guanylyltransferase (126-133)
  source 1..24: mol_type = other RNA
gccctgggcaagatcttcaccgct

SEQ ID NO: 67526 - RNA, 36 nt, synthetic construct
  misc_feature 1..36: note = NAD(P) transhydrogenase, mitochondrial (649-660)
  source 1..36: mol_type = other RNA
gccctgggcatgatcggggtggctggaggtctcgca

SEQ ID NO: 67527 - RNA, 30 nt, synthetic construct
  misc_feature 1..30: note = ATP-binding cassette sub-family A member 13 (1237-1246)
  source 1..30: mol_type = other RNA
gccctgggcaacgctctcgtgagcgtcaag

SEQ ID NO: 67528 - RNA, 24 nt, synthetic construct
  misc_feature 1..24: note = ATP-binding cassette sub-family B member 8, mitochondrial (320-327)
  source 1..24: mol_type = other RNA
gccctgggcaacgtgagaaccgtc

SEQ ID NO: 67529 - RNA, 27 nt, synthetic construct
  misc_feature 1..27: note = T-box transcription factor TBX2 (69-77)
  source 1..27: mol_type = other RNA
gccctgggcccccaccctccagctgca

SEQ ID NO: 67530 - RNA, 27 nt, synthetic construct
  misc_feature 1..27: note = Dolichol-phosphate mannosyltransferase subunit 3 (74-82)
  source 1..27: mol_type = other RNA
gccctgggcaccgtggggtacagagtc

SEQ ID NO: 67531 - RNA, 27 nt, synthetic construct
  misc_feature 1..27: note = Methionine-tRNA ligase, cytoplasmic (168-176)
  source 1..27: mol_type = other RNA
gccctgcacagctggttccagaccctc

SEQ ID NO: 67532 - RNA, 27 nt, synthetic construct
  misc_feature 1..27: note = X-ray repair cross-complementing protein 5 (456-464)
  source 1..27: mol_type = other RNA
gccctgatcgacagcatgtccctcgct

SEQ ID NO: 67533 - RNA, 30 nt, synthetic construct
  misc_feature 1..30: note = Gamma-tubulin complex component 2 (186-195)
  source 1..30: mol_type = other RNA
gccctgatcggcgacttcctcattggggct

SEQ ID NO: 67534 - RNA, 30 nt, synthetic construct
  misc_feature 1..30: note = Sodium-dependent phosphate transporter 2 (216-225)
  source 1..30: mol_type = other RNA
gccctgatcagcttcggcgtggctctcctt

SEQ ID NO: 67535 - RNA, 27 nt, synthetic construct
  misc_feature 1..27: note = Outer dense fiber protein 2-like (357-365)
  source 1..27: mol_type = other RNA
gccctgaaggacgaggtggtcagcgtt

SEQ ID NO: 67536 - RNA, 27 nt, synthetic construct
  misc_feature 1..27: note = Lysine-specific demethylase 5B (1044-1052)
  source 1..27: mol_type = other RNA
gccctgaaggacagcgtgcagagagct

SEQ ID NO: 67537 - RNA, 21 nt, synthetic construct
  misc_feature 1..21: note = Max-like protein X (153-159)
  source 1..21: mol_type = other RNA
gccctgaagatcatgaaagtg

SEQ ID NO: 67538 - RNA, 27 nt, synthetic construct
  misc_feature 1..27: note = Poly (ADP-ribose) polymerase 1 (194-202)
  source 1..27: mol_type = other RNA
gccctgaagaaacagctccccggcgtg

SEQ ID NO: 67539 - RNA, 27 nt, synthetic construct
  misc_feature 1..27: note = Chondroitin sulfate proteoglycan 4 (2314-2322)
  source 1..27: mol_type = other RNA
gccctgaagaacggccagtactgggtg

SEQ ID NO: 67540 - RNA, 78 nt, synthetic construct
  misc_feature 1..78: note = ATP synthase subunit epsilon, mitochondrial (26-51)
  source 1..78: mol_type = other RNA
gccctgaagaccgagttcaaagctaacgcagaaaagacaagcggctccaatgtgaaaatcgtcaaggttaaaaaggag

SEQ ID NO: 67541 - RNA, 27 nt, synthetic construct
  misc_feature 1..27: note = Ubiquitin thioesterase OTUB1 (103-111)
  source 1..27: mol_type = other RNA
gccctgctcgacgatagcaaggagctt

SEQ ID NO: 67542 - RNA, 33 nt, synthetic construct
  misc_feature 1..33: note = Eukaryotic translation initiation factor 3 subunit C-like protein (633-643)
  source 1..33: mol_type = other RNA
gccctgctcgacatccagagctccggcagagct

SEQ ID NO: 67543 - RNA, 27 nt, synthetic construct
  misc_feature 1..27: note = Dystonin (5774-5782)
  source 1..27: mol_type = other RNA
gccctgctcgacagccttaacgaggtg

SEQ ID NO: 67544 - RNA, 30 nt, synthetic construct
  misc_feature 1..30: note = G1/S-specific cyclin-D1 (253-262)
  source 1..30: mol_type = other RNA
gccctgctcgagagctcccttagacaggct

SEQ ID NO: 67545 - RNA, 33 nt, synthetic construct
  misc_feature 1..33: note = Phosphatidylinositol 3-kinase catalytic subunit type 3 (575-585)
  source 1..33: mol_type = other RNA
gccctgctcggcgacaacgagaagatgaatctt

SEQ ID NO: 67546 - RNA, 27 nt, synthetic construct
  misc_feature 1..27: note = WD repeat and FYVE domain-containing protein 3 (1152-1160)
  source 1..27: mol_type = other RNA
gccctgctcggccacaccgacacagtg

SEQ ID NO: 67547 - RNA, 36 nt, synthetic construct
  misc_feature 1..36: note = ATP-binding cassette sub-family A member 13 (940-951)
  source 1..36: mol_type = other RNA
gccctgctcggcaccaacggggctggaaagacaact

SEQ ID NO: 67548 - RNA, 27 nt, synthetic construct
  misc_feature 1..27: note = Immunity-related GTPase family Q protein (318-326)
  source 1..27: mol_type = other RNA
gccctgctccttcccgacgctcctctg

SEQ ID NO: 67549 - RNA, 27 nt, synthetic construct
  misc_feature 1..27: note = Ubiquitin-like modifier-activating enzyme 6 (782-790)
  source 1..27: mol_type = other RNA
gccctgctcaacatccttagcgaggtg

SEQ ID NO: 67550 - RNA, 27 nt, synthetic construct
  misc_feature 1..27: note = Transmembrane O-methyltransferase (232-240)
  source 1..27: mol_type = other RNA
gccctgctccccgctggcgcaaccgtg

SEQ ID NO: 67551 - RNA, 33 nt, synthetic construct
  misc_feature 1..33: note = Insulin receptor substrate 2 (417-427)
  source 1..33: mol_type = other RNA
gccctgctccccgctggcggggcacttcagcac

SEQ ID NO: 67552 - RNA, 27 nt, synthetic construct
  misc_feature 1..27: note = General vesicular transport factor p115 (852-860)
  source 1..27: mol_type = other RNA
gccctgctccaggagaccaaggaactt

SEQ ID NO: 67553 - RNA, 30 nt, synthetic construct
  misc_feature 1..30: note = Sulfate transporter (251-260)
  source 1..30: mol_type = other RNA
gccctgctcagcggcttcgtgaccggggct

SEQ ID NO: 67554 - RNA, 27 nt, synthetic construct
  misc_feature 1..27: note = Protein eva-1 homolog A (15-23)
  source 1..27: mol_type = other RNA
gccctgctcagcaacatccttgctgca

SEQ ID NO: 67555 - RNA, 27 nt, synthetic construct
  misc_feature 1..27: note = Putative tyrosine-protein phosphatase auxilin (822-830)
  source 1..27: mol_type = other RNA
gccctgctcagcaccatgcacacagtg

SEQ ID NO: 67556 - RNA, 30 nt, synthetic construct; identical to SEQ ID NO: 43329
  misc_feature 1..30: note = Ankyrin repeat and SOCS box protein 11 (33-42)
  source 1..30: mol_type = other RNA

SEQ ID NO: 67557 - RNA, 27 nt, synthetic construct
  misc_feature 1..27: note = Multiple epidermal growth factor-like domains protein 8 (1267-1275)
  source 1..27: mol_type = other RNA
gccctgctcaccaacgtgagctccgtc

SEQ ID NO: 67558 - RNA, 33 nt, synthetic construct
  misc_feature 1..33: note = Protein TANC2 (1001-1011)
  source 1..33: mol_type = other RNA
gccctgatggacaaggagggcctcaccgctctt

SEQ ID NO: 67559 - RNA, 33 nt, synthetic construct
  misc_feature 1..33: note = Calpain-3 (37-47)
  source 1..33: mol_type = other RNA
gccctgatggacaccgatggcagcgggaagctc

SEQ ID NO: 67560 - RNA, 39 nt, synthetic construct
  misc_feature 1..39: note = Calpain-3 (37-49)
  source 1..39: mol_type = other RNA
gccctgatggacaccgatggcagcgggaagctcaacctt

SEQ ID NO: 67561 - RNA, 27 nt, synthetic construct
  misc_feature 1..27: note = Protein cordon-bleu (1169-1177)
  source 1..27: mol_type = other RNA
gccctgatggaggctatccacagcgca

SEQ ID NO: 67562 - RNA, 33 nt, synthetic construct
  misc_feature 1..33: note = Bestrophin-1 (462-472)
  source 1..33: mol_type = other RNA
gccctgatggagcaccccgaagtgagccaggtc

SEQ ID NO: 67563 - RNA, 27 nt, synthetic construct
  misc_feature 1..27: note = Integrin beta-8 (662-670)
  source 1..27: mol_type = other RNA
gccctgatggagcagcaacactacgtg

SEQ ID NO: 67564 - RNA, 63 nt, synthetic construct
  misc_feature 1..63: note = 60 kDa heat shock protein, mitochondrial (38-58)
  source 1..63: mol_type = other RNA
gccctgatgctccagggcgtggaccttctggctgatgcagtcgccgttaccatggggcccaag

SEQ ID NO: 67565 - RNA, 27 nt, synthetic construct
  misc_feature 1..27: note = HLA class II histocompatibility antigen, DQ beta 1 chain (103-111)
  source 1..27: mol_type = other RNA
gccctgaaccaccataatctccttgtg

SEQ ID NO: 67566 - RNA, 27 nt, synthetic construct
  misc_feature 1..27: note = Putative ribosome-binding factor A, mitochondrial (243-251)
  source 1..27: mol_type = other RNA
gccctgaacaagcagatcatggagtac

SEQ ID NO: 67567 - RNA, 30 nt, synthetic construct
  misc_feature 1..30: note = Protocadherin gamma-A2 (171-180)
  source 1..30: mol_type = other RNA
gccctgaaccccaatgaccacttcagcctc

SEQ ID NO: 67568 - RNA, 33 nt, synthetic construct
  misc_feature 1..33: note = RELT-like protein 1 (5-15)
  source 1..33: mol_type = other RNA
gccctgcccggcagcgctgtgctcgcagccgcg

SEQ ID NO: 67569 - RNA, 27 nt, synthetic construct
  misc_feature 1..27: note = Formin-1 (867-875)
  source 1..27: mol_type = other RNA
gccctgccccctccaccggctagcatc

SEQ ID NO: 67570 - RNA, 27 nt, synthetic construct
  misc_feature 1..27: note = E3 ubiquitin/ISG15 ligase TRIM25 (398-406)
  source 1..27: mol_type = other RNA
gccctgcccagcaagctccctaccttc

SEQ ID NO: 67571 - RNA, 33 nt, synthetic construct
  misc_feature 1..33: note = Epsin-2 (283-293)
  source 1..33: mol_type = other RNA
gccctgcccagctccggccctgctgcacagaag

SEQ ID NO: 67572 - RNA, 30 nt, synthetic construct
  misc_feature 1..30: note = Transcription factor SOX-10 (341-350)
  source 1..30: mol_type = other RNA
gccctgcccaccgtgagccctccaggcgtc

SEQ ID NO: 67573 - RNA, 27 nt, synthetic construct
  misc_feature 1..27: note = Nuclear receptor subfamily 1 group D member 2 (527-535)
  source 1..27: mol_type = other RNA
gccctgcaggagaccctcatcagagct

SEQ ID NO: 67574 - RNA, 27 nt, synthetic construct
  misc_feature 1..27: note = Interleukin-17 receptor D (642-650)
  source 1..27: mol_type = other RNA
gccctgcagcccctccttcacaccgtg

SEQ ID NO: 67575 - RNA, 27 nt, synthetic construct
  misc_feature 1..27: note = Golgin subfamily A member 3 (542-550)
  source 1..27: mol_type = other RNA
gccctgcagagccaactccagcaggtg

SEQ ID NO: 67576 - RNA, 27 nt, synthetic construct
  misc_feature 1..27: note = V-type proton ATPase subunit C 1 (264-272)
  source 1..27: mol_type = other RNA
gccctgagagtgttcgtcgagagcgtt

SEQ ID NO: 67577 - RNA, 27 nt, synthetic construct
  misc_feature 1..27: note = Rootletin (252-260)
  source 1..27: mol_type = other RNA
gccctgagcgaggacatcagaaaggtg

SEQ ID NO: 67578 - RNA, 33 nt, synthetic construct
  misc_feature 1..33: note = Catenin alpha-1 (773-783)
  source 1..33: mol_type = other RNA
gccctgagcgagttcaaggctatggactccatc

SEQ ID NO: 67579 - RNA, 27 nt, synthetic construct
  misc_feature 1..27: note = Staphylococcal nuclease domain-containing protein 1 (626-634)
  source 1..27: mol_type = other RNA
gccctgagcaaggtgcacttcaccgct

SEQ ID NO: 67580 - RNA, 33 nt, synthetic construct
  misc_feature 1..33: note = Ubiquitin carboxyl-terminal hydrolase isozyme L5 (129-139)
  source 1..33: mol_type = other RNA
gccctgagcaactccgacgtgatcagacaggtc

SEQ ID NO: 67581 - RNA, 27 nt, synthetic construct
  misc_feature 1..27: note = Serine incorporator 5 (278-286)
  source 1..27: mol_type = other RNA
gccctgagctccaagcccgctgaggtg

SEQ ID NO: 67582 - RNA, 27 nt, synthetic construct
  misc_feature 1..27: note = NudC domain-containing protein 3 (153-161)
  source 1..27: mol_type = other RNA
gccctgagctcctcttcaatcagagtg

SEQ ID NO: 67583 - RNA, 27 nt, synthetic construct
  misc_feature 1..27: note = Piezo-type mechanosensitive ion channel component 1 (218-226)
  source 1..27: mol_type = other RNA
gccctgagctccgtgtacctccttctg

SEQ ID NO: 67584 - RNA, 30 nt, synthetic construct
  misc_feature 1..30: note = Glutamate receptor ionotropic, kainate 3 (632-641)
  source 1..30: mol_type = other RNA
gccctgagcaccagaatcattggcgggata

SEQ ID NO: 67585 - RNA, 27 nt, synthetic construct
  misc_feature 1..27: note = A-kinase anchor protein 9 (1723-1731)
  source 1..27: mol_type = other RNA
gccctgaccgactacatcacaagactc

SEQ ID NO: 67586 - RNA, 27 nt, synthetic construct
  misc_feature 1..27: note = Transmembraneoprotein NMB (477-485)
  source 1..27: mol_type = other RNA
gccctgaccagcacactcatctccgtg

SEQ ID NO: 67587 - RNA, 27 nt, synthetic construct
  misc_feature 1..27: note = Glutamine-tRNA ligase (715-723)
  source 1..27: mol_type = other RNA
gccctggtggactgcagcgtcgctctc

SEQ ID NO: 67588 - RNA, 27 nt, synthetic construct
  misc_feature 1..27: note = (4658-4666)
  source 1..27: mol_type = other RNA
gccctggtggactggctctacaaggtc

SEQ ID NO: 67589 - RNA, 33 nt, synthetic construct
  misc_feature 1..33: note = Ribosome biogenesis protein BRX1 homolog (228-238)
  source 1..33: mol_type = other RNA
gccctggtggagatcggccccagattcgtcctc

SEQ ID NO: 67590 - RNA, 39 nt, synthetic construct
  misc_feature 1..39: note = Kinesin-like protein KIF1A (397-409)
  source 1..39: mol_type = other RNA
gccctggtgggcatgagcccctcctcttcactcagtgct

SEQ ID NO: 67591 - RNA, 30 nt, synthetic construct
  misc_feature 1..30: note = Plexin-A2 (475-484)
  source 1..30: mol_type = other RNA
gccctggtgggcaccacaagcgggcccgtc

SEQ ID NO: 67592 - RNA, 30 nt, synthetic construct
  misc_feature 1..30: note = E3 ubiquitin-protein ligase TRIP12 (1669-1678)
  source 1..30: mol_type = other RNA
gccctggtgagccaggagctccaaagagct

SEQ ID NO: 67593 - RNA, 27 nt, synthetic construct
  misc_feature 1..27: note = Diphthamide biosynthesis protein 1 (172-180)
  source 1..27: mol_type = other RNA
gccctggtgagcaccatccagttcgtc

SEQ ID NO: 67594 - RNA, 30 nt, synthetic construct
  misc_feature 1..30: note = ER membrane protein complex subunit 7 (4-13)
  source 1..30: mol_type = other RNA
gccctgtggggcttctttcccgtgctcctt

SEQ ID NO: 67595 - RNA, 30 nt, synthetic construct
  misc_feature 1..30: note = Transmembrane protein 234 (16-25)
  source 1..30: mol_type = other RNA
gccctgtggggcgggacccagcccctcctt

SEQ ID NO: 67596 - RNA, 30 nt, synthetic construct
  misc_feature 1..30: note = tRNA (uracil-5-)-methyltransferase homolog A (132-141)
  source 1..30: mol_type = other RNA
gccctgtggaagggcagacccctcagcgtg

SEQ ID NO: 67597 - RNA, 30 nt, synthetic construct
  misc_feature 1..30: note = WD repeat-containing protein 60 (1057-1066)
  source 1..30: mol_type = other RNA
gccctgtggcccgagggcaagctccacaaa

SEQ ID NO: 67598 - RNA, 27 nt, synthetic construct
  misc_feature 1..27: note = Beta-hexosaminidase subunit beta (43-51)
  source 1..27: mol_type = other RNA
gccctgtggcccctccctcttagcgtg

SEQ ID NO: 67599 - RNA, 45 nt, synthetic construct
  misc_feature 1..45: note = Phosphatidate phosphatase LPIN1 (411-425)
  source 1..45: mol_type = other RNA
gccctgtacttccccaagaacggcgaccctagcgggctcgctaaa

SEQ ID NO: 67600 - RNA, 27 nt, synthetic construct
  misc_feature 1..27: note = Caskin-2 (229-237)
  source 1..27: mol_type = other RNA
gccctgtacggcaagaccgaggtggtc

SEQ ID NO: 67601 - RNA, 27 nt, synthetic construct
  misc_feature 1..27: note = Ankyrin repeat and SAM domain-containing protein 1A (190-198)
  source 1..27: mol_type = other RNA
gccctgtacggcagactcgaggtggtc

SEQ ID NO: 67602 - RNA, 30 nt, synthetic construct
  misc_feature 1..30: note = Hemicentin-1 (1594-1603)
  source 1..30: mol_type = other RNA
gccctgtacatcgacaagggccagtatctc

SEQ ID NO: 67603 - RNA, 36 nt, synthetic construct
  misc_feature 1..36: note = Cytoplasmic dynein 1 heavy chain 1 (3101-3112)
  source 1..36: mol_type = other RNA
gccctgtaccaggtgggcaaggagttcaccagcaaa

SEQ ID NO: 67604 - RNA, 36 nt, synthetic construct
  misc_feature 1..36: note = Type II inositol 3,4-bisphosphate 4-phosphatase (472-483)
  source 1..36: mol_type = other RNA
gccctgtacaccgctagacccggcgggatcctcaag

SEQ ID NO: 67605 - RNA, 39 nt, synthetic construct
  misc_feature 1..39: note = Type II inositol 3,4-bisphosphate 4-phosphatase (472-484)
  source 1..39: mol_type = other RNA
gccctgtacaccgctagacccggcgggatcctcaagaaa

SEQ ID NO: 67606 - RNA, 27 nt, synthetic construct
  misc_feature 1..27: note = Dedicator of cytokinesis protein 7 (712-720)
  source 1..27: mol_type = other RNA
gccatggctagcatcattaacagactg

SEQ ID NO: 67607 - RNA, 27 nt, synthetic construct
  misc_feature 1..27: note = Protein transport protein Sec31A (697-705)
  source 1..27: mol_type = other RNA
gccatggacaccagcacagtgggcgtc

SEQ ID NO: 67608 - RNA, 24 nt, synthetic construct
  misc_feature 1..24: note = Synemin (36-43)
  source 1..24: mol_type = other RNA
gccatgttcgacaagaaagtgcag

SEQ ID NO: 67609 - RNA, 33 nt, synthetic construct; identical to SEQ ID NO: 43382
  misc_feature 1..33: note = Exportin-4 (248-258)
  source 1..33: mol_type = other RNA

SEQ ID NO: 67610 - RNA, 33 nt, synthetic construct
  misc_feature 1..33: note = NAD(P)H dehydrogenase (quinone) 1 (21-31)
  source 1..33: mol_type = other RNA
gccatgaaggaggctgcagccgcggctctgaaa

SEQ ID NO: 67611 - RNA, 30 nt, synthetic construct
  misc_feature 1..30: note = Tryptophan-tRNA ligase, cytoplasmic (424-433)
  source 1..30: mol_type = other RNA
gccatgctgaccggcgagctcaagaaagct

SEQ ID NO: 67612 - RNA, 27 nt, synthetic construct
  misc_feature 1..27: note = Nucleoporin p58/p45 (376-384)
  source 1..27: mol_type = other RNA
gccatgcagaagatctaccaaaccttc

SEQ ID NO: 67613 - RNA, 27 nt, synthetic construct
  misc_feature 1..27: note = Tenascin (3-11)
  source 1..27: mol_type = other RNA
gccatgacccagctgctcgctggcgtg

SEQ ID NO: 67614 - RNA, 27 nt, synthetic construct
  misc_feature 1..27: note = S-adenosylmethionine synthase isoform type-1 (75-83)
  source 1..27: mol_type = other RNA
gccatggtggactaccagagagtcgtt

SEQ ID NO: 67615 - RNA, 30 nt, synthetic construct
  misc_feature 1..30: note = Zinc finger protein 697 (233-242)
  source 1..30: mol_type = other RNA
gccatggtgggcatgatgggggtcggagtt

SEQ ID NO: 67616 - RNA, 33 nt, synthetic construct
  misc_feature 1..33: note = Leucine zipper putative tumor suppressor 1 (529-539)
  source 1..33: mol_type = other RNA
gccatgtaccagagaaaccaaaggctggagaag

SEQ ID NO: 67617 - RNA, 24 nt, synthetic construct
  misc_feature 1..24: note = Eukaryotic translation initiation factor 2 subunit 3 (84-91)
  source 1..24: mol_type = other RNA
gccaacgctaagatctacaaactg

SEQ ID NO: 67618 - RNA, 42 nt, synthetic construct
  misc_feature 1..42: note = Beta-secretase 2 (75-88)
  source 1..42: mol_type = other RNA
gccaacttcctggctatggtggacaatctccagggcgatagc

SEQ ID NO: 67619 - RNA, 21 nt, synthetic construct
  misc_feature 1..21: note = EH domain-containing protein 1 (504-510)
  source 1..21: mol_type = other RNA
gccaaccacctgatcaaggtg

SEQ ID NO: 67620 - RNA, 24 nt, synthetic construct
  misc_feature 1..24: note = Galectin-3 (142-149)
  source 1..24: mol_type = other RNA
gccaacagaatcgctctggacttc

SEQ ID NO: 67621 - RNA, 27 nt, synthetic construct
  misc_feature 1..27: note = Spectrin alpha chain, non-erythrocytic 1 (94-102)
  source 1..27: mol_type = other RNA
gccaacagcggcgctatcgtgaagctg

SEQ ID NO: 67622 - RNA, 27 nt, synthetic construct
  misc_feature 1..27: note = AT-rich interactive domain-containing protein 2 (940-948)
  source 1..27: mol_type = other RNA
gcccccgctatccaccagattgtgctg

SEQ ID NO: 67623 - RNA, 33 nt, synthetic construct
  misc_feature 1..33: note = E3 ubiquitin-protein ligase MIB2 (408-418)
  source 1..33: mol_type = other RNA
gcccccgctctgggcagagtggggaaggtcgtt

SEQ ID NO: 67624 - RNA, 30 nt, synthetic construct
  misc_feature 1..30: note = Biogenesis of lysosome-related organelles complex 1 subunit 3 (99-108)
  source 1..30: mol_type = other RNA
gcccccgctcctgcaccagccagaagcctg

SEQ ID NO: 67625 - RNA, 27 nt, synthetic construct
  misc_feature 1..27: note = Protein capicua homolog (1681-1689)
  source 1..27: mol_type = other RNA
gcccccgctcctccagcagtgcagttc

SEQ ID NO: 67626 - RNA, 30 nt, synthetic construct
  misc_feature 1..30: note = Cathepsin F (20-29)
  source 1..30: mol_type = other RNA
gcccccgctcagcctagagcagccagcttc

SEQ ID NO: 67627 - RNA, 27 nt, synthetic construct
  misc_feature 1..27: note = Serum paraoxonase/arylesterase 2 (78-86)
  source 1..27: mol_type = other RNA
gcccccgacaagcctggcgggatcctg

SEQ ID NO: 67628 - RNA, 54 nt, synthetic construct
  misc_feature 1..54: note = Fructose-bisphosphate aldolase A (79-96)
  source 1..54: mol_type = other RNA
gcccccggcaaggggatcctggctgcagacgagagcaccggatccattgccaaa

SEQ ID NO: 67629 - RNA, 30 nt, synthetic construct
  misc_feature 1..30: note = Lysosome-associated membraneoprotein 1 (3-12)
  source 1..30: mol_type = other RNA
gcccccggcagcgctagaaggcctctgctc

SEQ ID NO: 67630 - RNA, 36 nt, synthetic construct
  misc_feature 1..36: note = Dynein heavy chain domain-containing protein 1 (4690-4701)
  source 1..36: mol_type = other RNA
gcccccggcaccagcgacctgcctgctccagcagat

SEQ ID NO: 67631 - RNA, 27 nt, synthetic construct
  misc_feature 1..27: note = Protein SEC13 homolog (98-106)
  source 1..27: mol_type = other RNA
gccccccacgactacggcctgatcctc

SEQ ID NO: 67632 - RNA, 27 nt, synthetic construct
  misc_feature 1..27: note = Chondroitin sulfate proteoglycan 4 (1875-1883)
  source 1..27: mol_type = other RNA
gccccccacaacggcttcctgagcctc

SEQ ID NO: 67633 - RNA, 30 nt, synthetic construct
  misc_feature 1..30: note = Hypoxia-inducible factor 1-alpha (828-837)
  source 1..30: mol_type = other RNA
gcccccatccagggcagcagaaacctgctc

SEQ ID NO: 67634 - RNA, 24 nt, synthetic construct
  misc_feature 1..24: note = TRAF2 and NCK-interacting protein kinase (326-333)
  source 1..24: mol_type = other RNA
gcccccaagccttaccacaaattc

SEQ ID NO: 67635 - RNA, 30 nt, synthetic construct
  misc_feature 1..30: note = Ankyrin repeat and SOCS box protein 11 (248-257)
  source 1..30: mol_type = other RNA
gcccccaagagctccgtggagcaggctctg

SEQ ID NO: 67636 - RNA, 27 nt, synthetic construct
  misc_feature 1..27: note = Cancer/testis antigen 2 (114-122)
  source 1..27: mol_type = other RNA
gcccccctgcctagaccaggcgctgtg

SEQ ID NO: 67637 - RNA, 48 nt, synthetic construct
  misc_feature 1..48: note = GTP-binding nuclear protein Ran (203-218)
  source 1..48: mol_type = other RNA
gccccccctgaggtggtcatggacccagctctggcagcccagtacgaa

SEQ ID NO: 67638 - RNA, 51 nt, synthetic construct
  misc_feature 1..51: note = GTP-binding nuclear protein Ran (203-219)
  source 1..51: mol_type = other RNA
gccccccctgaggtggtcatggacccagctctggcagcccagtacgaacac

SEQ ID NO: 67639 - RNA, 30 nt, synthetic construct
  misc_feature 1..30: note = DNA-binding protein inhibitor ID-4 (131-140)
  source 1..30: mol_type = other RNA
gccccccctagaaccccactgacagctctc

SEQ ID NO: 67640 - RNA, 39 nt, synthetic construct
  misc_feature 1..39: note = Heat shock cognate 71 kDa protein (630-642)
  source 1..39: mol_type = other RNA
gccccccctagcggcggggcttcctctggaccaaccatc

SEQ ID NO: 67641 - RNA, 33 nt, synthetic construct
  misc_feature 1..33: note = Uncharacterized protein C17orf51 (66-76)
  source 1..33: mol_type = other RNA
gccccccctaccagaagggctcaggcagccctg

SEQ ID NO: 67642 - RNA, 36 nt, synthetic construct
  misc_feature 1..36: note = UPF0669 protein C6orf120 (3-14)
  source 1..36: mol_type = other RNA
gcccccagaggcagggctgcaccttggaccacagcc

SEQ ID NO: 67643 - RNA, 24 nt, synthetic construct
  misc_feature 1..24: note = Procollagen-lysine,2-oxoglutarate 5-dioxygenase 1 (691-698)
  source 1..24: mol_type = other RNA
gcccccagaaagggctggaccctg

SEQ ID NO: 67644 - RNA, 27 nt, synthetic construct
  misc_feature 1..27: note = La-related protein 7 (193-201)
  source 1..27: mol_type = other RNA
gcccccagaaagcctggcatcttccca

SEQ ID NO: 67645 - RNA, 123 nt, synthetic construct
  misc_feature 1..123: note = DNA-binding protein RFX5 (352-392)
  source 1..123: mol_type = other RNA
gcccccagactgagctccggcgctctcaaggtggcaacccttcctctgtcttcaagggccggggcgccaccggctgccgtccccatcattaacatgatattgcctacagttccagcattaccc

SEQ ID NO: 67646 - RNA, 30 nt, synthetic construct
  misc_feature 1..30: note = RNA-binding protein 33 (702-711)
  source 1..30: mol_type = other RNA
gcccccagaaacagcaatctgagggagctc

SEQ ID NO: 67647 - RNA, 27 nt, synthetic construct
  misc_feature 1..27: note = Alpha-2-macroglobulin receptor-associated protein (2-10)
  source 1..27: mol_type = other RNA
gcccccagaagggtgcggagcttcctg

SEQ ID NO: 67648 - RNA, 27 nt, synthetic construct
  misc_feature 1..27: note = Alpha-1-syntrophin (7-15)
  source 1..27: mol_type = other RNA
gcccccagaaccggcctgctcgagctt

SEQ ID NO: 67649 - RNA, 36 nt, synthetic construct
  misc_feature 1..36: note = Nance-Horan syndrome protein (1306-1317)
  source 1..36: mol_type = other RNA
gcccccagcgctggcctggaggaagtggcacagcct

SEQ ID NO: 67650 - RNA, 27 nt, synthetic construct
  misc_feature 1..27: note = Eukaryotic translation initiation factor 3 subunit C-like protein (203-211)
  source 1..27: mol_type = other RNA
gcccccagcggcgagtccagaaagttc

SEQ ID NO: 67651 - RNA, 27 nt, synthetic construct
  misc_feature 1..27: note = Rho GTPase-activating protein 7 (241-249)
  source 1..27: mol_type = other RNA
gcccccagcaagctgggcctcatcatt

SEQ ID NO: 67652 - RNA, 27 nt, synthetic construct
  misc_feature 1..27: note = Dickkopf-related protein 3 (30-38)
  source 1..27: mol_type = other RNA
gcccccgtgaagcctggcccagctctg

SEQ ID NO: 67653 - RNA, 27 nt, synthetic construct
  misc_feature 1..27: note = Hemicentin-1 (1702-1710)
  source 1..27: mol_type = other RNA
gcccaggagatcgacagaggccaatac

SEQ ID NO: 67654 - RNA, 33 nt, synthetic construct; identical to SEQ ID NO: 43427
  misc_feature 1..33: note = Coatomer subunit alpha (141-151)
  source 1..33: mol_type = other RNA

SEQ ID NO: 67655 - RNA, 30 nt, synthetic construct
  misc_feature 1..30: note = Voltage-dependent T-type calcium channel subunit alpha-1H (1841-1850)
  source 1..30: mol_type = other RNA
gcccagttcgtgctggtcaacgttgtggta

SEQ ID NO: 67656 - RNA, 24 nt, synthetic construct
  misc_feature 1..24: note = Ran GTPase-activating protein 1 (175-182)
  source 1..24: mol_type = other RNA
gcccagggcaagcccctggctctc

SEQ ID NO: 67657 - RNA, 36 nt, synthetic construct
  misc_feature 1..36: note = Heat shock 70 kDa protein 1B (623-634)
  source 1..36: mol_type = other RNA
gcccagggccccaaggggggaagcggttccggccct

SEQ ID NO: 67658 - RNA, 39 nt, synthetic construct
  misc_feature 1..39: note = HLA class I histocompatibility antigen, A-69 alpha chain (234-246)
  source 1..39: mol_type = other RNA
gcccagggcagcgacgtgtccctgaccgcttgcaaggtc

SEQ ID NO: 67659 - RNA, 51 nt, synthetic construct
  misc_feature 1..51: note = T-complex protein 1 subunit zeta (291-307)
  source 1..51: mol_type = other RNA
gcccagctgggcgtgcaagctttcgcagacgccctccttatcattcccaag

SEQ ID NO: 67660 - RNA, 27 nt, synthetic construct
  misc_feature 1..27: note = Retrotransposon-derived protein PEG10 (460-468)
  source 1..27: mol_type = other RNA
gcccagaacggcatccccctgagaatt

SEQ ID NO: 67661 - RNA, 33 nt, synthetic construct
  misc_feature 1..33: note = F-box/LRR-repeat protein 18 (437-447)
  source 1..33: mol_type = other RNA
gcccagcccgctatgcacgcagtgcctagaggc

SEQ ID NO: 67662 - RNA, 30 nt, synthetic construct
  misc_feature 1..30: note = Actin, aortic smooth muscle (60-69)
  source 1..30: mol_type = other RNA
gcccagagcaagagaggcatcctgaccctc

SEQ ID NO: 67663 - RNA, 30 nt, synthetic construct
  misc_feature 1..30: note = Histone-lysine N-methyltransferase NSD3 (366-375)
  source 1..30: mol_type = other RNA
gcccagtgggacatcggcattgctcacgca

SEQ ID NO: 67664 - RNA, 27 nt, synthetic construct
  misc_feature 1..27: note = Arrestin domain-containing protein 1 (236-244)
  source 1..27: mol_type = other RNA
gcccagtggcacgagcaaatcctggtg

SEQ ID NO: 67665 - RNA, 27 nt, synthetic construct
  misc_feature 1..27: note = Glycogen phosphorylase, liver form (247-255)
  source 1..27: mol_type = other RNA
gccagagctcccaacgacttcaatctg

SEQ ID NO: 67666 - RNA, 27 nt, synthetic construct
  misc_feature 1..27: note = Myosin-10 (1639-1647)
  source 1..27: mol_type = other RNA
gccagagacgaggtgatcaagcagctg

SEQ ID NO: 67667 - RNA, 27 nt, synthetic construct
  misc_feature 1..27: note = Apoptosis-inducing factor 1, mitochondrial (148-156)
  source 1..27: mol_type = other RNA
gccagagaccccggcgctagggtgctg

SEQ ID NO: 67668 - RNA, 30 nt, synthetic construct
  misc_feature 1..30: note = HLA class II histocompatibility antigen, DQ beta 1 chain (33-42)
  source 1..30: mol_type = other RNA
gccagattcgacagcgatgtgggcgtctac

SEQ ID NO: 67669 - RNA, 33 nt, synthetic construct
  misc_feature 1..33: note = HLA class II histocompatibility antigen, DQ beta 1 chain (33-43)
  source 1..33: mol_type = other RNA
gccagattcgacagcgatgtgggcgtctacagg

SEQ ID NO: 67670 - RNA, 30 nt, synthetic construct
  misc_feature 1..30: note = H/ACA ribonucleoprotein complex subunit 3 (33-42)
  source 1..30: mol_type = other RNA
gccagattcagccccgacgataagtactcc

SEQ ID NO: 67671 - RNA, 24 nt, synthetic construct
  misc_feature 1..24: note = ATP-dependent RNA helicase DDX24 (411-418)
  source 1..24: mol_type = other RNA
gccagattcaccggcatcaagaca

SEQ ID NO: 67672 - RNA, 27 nt, synthetic construct
  misc_feature 1..27: note = 60S ribosomal protein L7 (75-83)
  source 1..27: mol_type = other RNA
gccagaaaggctggcaacttctacgtg

SEQ ID NO: 67673 - RNA, 27 nt, synthetic construct
  misc_feature 1..27: note = Phospholipid transfer protein (319-327)
  source 1..27: mol_type = other RNA
gccagactgagcgctaagatggcactc

SEQ ID NO: 67674 - RNA, 27 nt, synthetic construct
  misc_feature 1..27: note = V-type proton ATPase subunit S1 (217-225)
  source 1..27: mol_type = other RNA
gccagactgagcctcacctacgagagg

SEQ ID NO: 67675 - RNA, 27 nt, synthetic construct
  misc_feature 1..27: note = Peroxisomal acyl-coenzyme A oxidase 1 (492-500)
  source 1..27: mol_type = other RNA
gccagactggtggagatcgctgcaaag

SEQ ID NO: 67676 - RNA, 33 nt, synthetic construct
  misc_feature 1..33: note = Membrane-associated guanylate kinase, WW and PDZ domain-containing protein 2 (849-859)
  source 1..33: mol_type = other RNA
gccagaaacggccaggtgaatctgaccgtcagg

SEQ ID NO: 67677 - RNA, 33 nt, synthetic construct
  misc_feature 1..33: note = Melanotransferrin (274-284)
  source 1..33: mol_type = other RNA
gccagagtgcccgctcacgcagtcgttgtgagg

SEQ ID NO: 67678 - RNA, 36 nt, synthetic construct
  misc_feature 1..36: note = Syntenin-1 (35-46)
  source 1..36: mol_type = other RNA
gccagcgctcccatccctcacgacggcaacctgtac

SEQ ID NO: 67679 - RNA, 39 nt, synthetic construct
  misc_feature 1..39: note = Receptor-type tyrosine-protein phosphatase mu (849-861)
  source 1..39: mol_type = other RNA
gccagcgacacctcctctctggtgcagtcacacacatac

SEQ ID NO: 67680 - RNA, 27 nt, synthetic construct
  misc_feature 1..27: note = Heterogeneous nuclear ribonucleoprotein M (578-586)
  source 1..27: mol_type = other RNA
gccagcttcgacagagctatcgagatg

SEQ ID NO: 67681 - RNA, 24 nt, synthetic construct
  misc_feature 1..24: note = Cytochrome c oxidase subunit 7A2, mitochondrial (76-83)
  source 1..24: mol_type = other RNA
gccagcttccccaagaaacaggag

SEQ ID NO: 67682 - RNA, 87 nt, synthetic construct
  misc_feature 1..87: note = Cytochrome c oxidase subunit 5B, mitochondrial (32-60)
  source 1..87: mol_type = other RNA
gccagcggcgggggagtgcccaccgacgaggaacaggctacaggtctggagagagaaatcatgctcgcagccaagaaaggccttgat

SEQ ID NO: 67683 - RNA, 24 nt, synthetic construct
  misc_feature 1..24: note = Chromodomain-helicase-DNA-binding protein 4 (1045-1052)
  source 1..24: mol_type = other RNA
gccagcggcaagctgctccttctg

SEQ ID NO: 67684 - RNA, 24 nt, synthetic construct
  misc_feature 1..24: note = Thioredoxin domain-containing protein 12 (52-59)
  source 1..24: mol_type = other RNA
gccagcggcctgcccctcatggtg

SEQ ID NO: 67685 - RNA, 24 nt, synthetic construct
  misc_feature 1..24: note = Histone deacetylase 6 (38-45)
  source 1..24: mol_type = other RNA
gccagcggctccgtgctgagactc

SEQ ID NO: 67686 - RNA, 27 nt, synthetic construct
  misc_feature 1..27: note = DNA damage-binding protein 1 (882-890)
  source 1..27: mol_type = other RNA
gccagcatcaactccaccgtgagactg

SEQ ID NO: 67687 - RNA, 24 nt, synthetic construct
  misc_feature 1..24: note = Alpha-actinin-3 (115-122)
  source 1..24: mol_type = other RNA
gccagcaagggcgtgaaactggtc

SEQ ID NO: 67688 - RNA, 27 nt, synthetic construct
  misc_feature 1..27: note = Adhesion G protein-coupled receptor A3 (756-764)
  source 1..27: mol_type = other RNA
gccagcctgctccaccccgtggtctac

SEQ ID NO: 67689 - RNA, 27 nt, synthetic construct
  misc_feature 1..27: note = Dynein light chain roadblock-type 1 (43-51)
  source 1..27: mol_type = other RNA
gccagcctgatgcactccttcatcctc

SEQ ID NO: 67690 - RNA, 27 nt, synthetic construct
  misc_feature 1..27: note = Proline synthase co-transcribed bacterial homolog protein (77-85)
  source 1..27: mol_type = other RNA
gccagcaaccccaagatcctgtccctc

SEQ ID NO: 67691 - RNA, 30 nt, synthetic construct
  misc_feature 1..30: note = Solute carrier family 52, riboflavin transporter, member 2 (127-136)
  source 1..30: mol_type = other RNA
gccagcaacgtgaccttcctgccctttctc

SEQ ID NO: 67692 - RNA, 27 nt, synthetic construct
  misc_feature 1..27: note = Alanine-tRNA ligase, cytoplasmic (341-349)
  source 1..27: mol_type = other RNA
gccagcagaggcttctttgctaccctg

SEQ ID NO: 67693 - RNA, 21 nt, synthetic construct
  misc_feature 1..21: note = Histone H2B type 2-F (78-84)
  source 1..21: mol_type = other RNA
gccagcagactggctcactac

SEQ ID NO: 67694 - RNA, 54 nt, synthetic construct
  misc_feature 1..54: note = HLA class I histocompatibility antigen, A-23 alpha chain (348-365)
  source 1..54: mol_type = other RNA
gccagctccgactctgctcagggctcagatgtgagtctgaccgcatgcaaggtc

SEQ ID NO: 67695 - RNA, 27 nt, synthetic construct
  misc_feature 1..27: note = OTU domain-containing protein 5 (237-245)
  source 1..27: mol_type = other RNA
gccagctcccccgagcaccctgaactg

SEQ ID NO: 67696 - RNA, 27 nt, synthetic construct
  misc_feature 1..27: note = 40S ribosomal protein S19 (58-66)
  source 1..27: mol_type = other RNA
gccagcaccgctagacacctgtacctc

SEQ ID NO: 67697 - RNA, 30 nt, synthetic construct
  misc_feature 1..30: note = Cullin-1 (195-204)
  source 1..30: mol_type = other RNA
gccagcaccttccagatggctatcctgctc

SEQ ID NO: 67698 - RNA, 27 nt, synthetic construct
  misc_feature 1..27: note Dolichyl-diphosphooligosaccharide-proteinosyltransferase subunit DAD1 (100-108)
  source 1..27: mol_type = other RNA
gccagcaccatcctgcacctcgtggtc

SEQ ID NO: 67699 - RNA, 30 nt, synthetic construct
  misc_feature 1..30: note = Thyroid adenoma-associated protein (153-162)
  source 1..30: mol_type = other RNA
gccagcgtgaacaatctgctcaagaacgtc

SEQ ID NO: 67700 - RNA, 24 nt, synthetic construct
  misc_feature 1..24: note = Cystic fibrosis transmembrane conductance regulator (9-16)
  source 1..24: mol_type = other RNA
gccagcgtggtctccaagctgttc

SEQ ID NO: 67701 - RNA, 27 nt, synthetic construct
  misc_feature 1..27: note = ATP-citrate synthase (223-231)
  source 1..27: mol_type = other RNA
gccaccgctgactacatctgcaaggtg

SEQ ID NO: 67702 - RNA, 27 nt, synthetic construct
  misc_feature 1..27: note = Leucine-rich repeat-containing protein 47 (393-401)
  source 1..27: mol_type = other RNA
gccaccgctccccctcacgtgacagtc

SEQ ID NO: 67703 - RNA, 30 nt, synthetic construct
  misc_feature 1..30: note = Hermansky-Pudlak syndrome 1 protein (7-16)
  source 1..30: mol_type = other RNA
gccaccgagggcgctgaagtgctgttctac

SEQ ID NO: 67704 - RNA, 27 nt, synthetic construct
  misc_feature 1..27: note = Kinesin-like protein KIF3C (506-514)
  source 1..27: mol_type = other RNA
gccaccgagctgctcgctgcaaagtac

SEQ ID NO: 67705 - RNA, 27 nt, synthetic construct
  misc_feature 1..27: note = EF-hand calcium-binding domain-containing protein 4B isoform a (677-685)
  source 1..27: mol_type = other RNA
gccaccgagaacaatctgatcttctac

SEQ ID NO: 67706 - RNA, 27 nt, synthetic construct
  misc_feature 1..27: note = Bestrophin-1 (573-581)
  source 1..27: mol_type = other RNA
gccaccttcacaggcatcctggggaag

SEQ ID NO: 67707 - RNA, 27 nt, synthetic construct
  misc_feature 1..27: note = Apoptosis inhibitor 5 (19-27)
  source 1..27: mol_type = other RNA
gccaccggcgagaacctgcccagagtg

SEQ ID NO: 67708 - RNA, 24 nt, synthetic construct
  misc_feature 1..24: note = (11-18)
  source 1..24: mol_type = other RNA
gccaccggcagactgctccttctg

SEQ ID NO: 67709 - RNA, 33 nt, synthetic construct
  misc_feature 1..33: note = 40S ribosomal protein S15 (135-145)
  source 1..33: mol_type = other RNA
gccacccacagctccagattcatccccctgaag

SEQ ID NO: 67710 - RNA, 27 nt, synthetic construct
  misc_feature 1..27: note = Poly(rC)-binding protein 4 (135-143)
  source 1..27: mol_type = other RNA
gccaccatcccctaccaccctagcctg

SEQ ID NO: 67711 - RNA, 30 nt, synthetic construct
  misc_feature 1..30: note = Phosphatidylinositol 4-kinase alpha (169-178)
  source 1..30: mol_type = other RNA
gccaccatcagaaacgtgctgagggagaag

SEQ ID NO: 67712 - RNA, 27 nt, synthetic construct
  misc_feature 1..27: note = Cathepsin D (182-190)
  source 1..27: mol_type = other RNA
gccaccaagcagcccggcatcacattc

SEQ ID NO: 67713 - RNA, 36 nt, synthetic construct
  misc_feature 1..36: note = Protein FAM171B (413-424)
  source 1..36: mol_type = other RNA
gccaccctgcccagaaagggccagctcgtgtacggg

SEQ ID NO: 67714 - RNA, 27 nt, synthetic construct
  misc_feature 1..27: note = Nuclear fragile X mental retardation-interacting protein 2 (116-124)
  source 1..27: mol_type = other RNA
gccaccaaccccatcagcagagtgctg

SEQ ID NO: 67715 - RNA, 39 nt, synthetic construct
  misc_feature 1..39: note = UPF0606 protein KIAA1549L (947-959)
  source 1..39: mol_type = other RNA
gccaccacactgggcagctacactgtgcagatggtcaag

SEQ ID NO: 67716 - RNA, 27 nt, synthetic construct
  misc_feature 1..27: note = PH domain leucine-rich repeat-containing protein phosphatase 1 (7-15)
  source 1..27: mol_type = other RNA
gccaccgtgcagagactgcccgagctc

SEQ ID NO: 67717 - RNA, 27 nt, synthetic construct
  misc_feature 1..27: note = Myelin proteolipid protein (206-214)
  source 1..27: mol_type = other RNA
gccacctacaacttcgctgtgctgaag

SEQ ID NO: 67718 - RNA, 30 nt, synthetic construct
  misc_feature 1..30: note = Eyes absent homolog 1 (124-133)
  source 1..30: mol_type = other RNA
gccacctacccccagcctggccaaccatat

SEQ ID NO: 67719 - RNA, 27 nt, synthetic construct
  misc_feature 1..27: note = Sigma non-opioid intracellular receptor 1 (17-25)
  source 1..27: mol_type = other RNA
gccgtggctgcagtcctgacccaggtt

SEQ ID NO: 67720 - RNA, 27 nt, synthetic construct
  misc_feature 1..27: note = Unconventional myosin-Ic (83-91)
  source 1..27: mol_type = other RNA
gccgtggctgacaccgtctacagagca

SEQ ID NO: 67721 - RNA, 27 nt, synthetic construct
  misc_feature 1..27: note = Membrane-associated guanylate kinase, WW and PDZ domain-containing protein 2 (1428-1436)
  source 1..27: mol_type = other RNA
gccgtggctcccggcccttggaaggtc

SEQ ID NO: 67722 - RNA, 27 nt, synthetic construct
  misc_feature 1..27: note = Endothelin B receptor (291-299)
  source 1..27: mol_type = other RNA
gccgtggctagctggtccagaatcaag

SEQ ID NO: 67723 - RNA, 27 nt, synthetic construct
  misc_feature 1..27: note = Sideroflexin-3 (161-169)
  source 1..27: mol_type = other RNA
gccgtggctaccgcactgggcctcaag

SEQ ID NO: 67724 - RNA, 27 nt, synthetic construct
  misc_feature 1..27: note = Ubiquitin-like modifier-activating enzyme 1 (786-794)
  source 1..27: mol_type = other RNA
gccgtggctaccttcctgcagagcgtc

SEQ ID NO: 67725 - RNA, 51 nt, synthetic construct
  misc_feature 1..51: note = Tubulin alpha-3E chain (374-390)
  source 1..51: mol_type = other RNA
gccgtgtgcatgctgagcaacaccacagctatcgcagaggcctgggcgaga

SEQ ID NO: 67726 - RNA, 30 nt, synthetic construct
  misc_feature 1..30: note = SH3 domain-containing RING finger protein 3 (442-451)
  source 1..30: mol_type = other RNA
gccgtggacgctctgctccagggcgcagtc

SEQ ID NO: 67727 - RNA, 27 nt, synthetic construct
  misc_feature 1..27: note = Ribosome biogenesis protein WDR12 (196-204)
  source 1..27: mol_type = other RNA
gccgtggacggcagcgggaccaagttc

SEQ ID NO: 67728 - RNA, 27 nt, synthetic construct
  misc_feature 1..27: note = Protein fem-1 homolog A (542-550)
  source 1..27: mol_type = other RNA
gccgtggacaaggataccacaaacgtc

SEQ ID NO: 67729 - RNA, 45 nt, synthetic construct
  misc_feature 1..45: note = Transmembraneoprotein NMB (550-564)
  source 1..45: mol_type = other RNA
gccgtgttctttcccggcaaccaggagaaggaccctctgctcaaa

SEQ ID NO: 67730 - RNA, 30 nt, synthetic construct
  misc_feature 1..30: note = GTP-binding protein Di-Ras2 (11-20)
  source 1..30: mol_type = other RNA
gccgtgttcggcgctgggggagtcggtaag

SEQ ID NO: 67731 - RNA, 30 nt, synthetic construct
  misc_feature 1..30: note = Ankyrin-2 (1172-1181)
  source 1..30: mol_type = other RNA
gccgtgttccccgagggcgctctgaccaag

SEQ ID NO: 67732 - RNA, 24 nt, synthetic construct
  misc_feature 1..24: note = Mitochondrial coenzyme A transporter SLC25A42 (298-305)
  source 1..24: mol_type = other RNA
gccgtgggcatcagcttcaccaca

SEQ ID NO: 67733 - RNA, 27 nt, synthetic construct
  misc_feature 1..27: note = Low-density lipoprotein receptor-related protein 2 (1967-1975)
  source 1..27: mol_type = other RNA
gccgtgcacgacagcttcctgtactat

SEQ ID NO: 67734 - RNA, 27 nt, synthetic construct
  misc_feature 1..27: note = Exosome complex exonuclease RRP44 (286-294)
  source 1..27: mol_type = other RNA
gccgtgcacgaggacatcgtcgctgtt

SEQ ID NO: 67735 - RNA, 36 nt, synthetic construct
  misc_feature 1..36: note = Structural maintenance of chromosomes flexible hinge domain-containing protein 1 (181-192)
  source 1..36: mol_type = other RNA
gccgtgatcgacaacggcagagggatgaccagcaag

SEQ ID NO: 67736 - RNA, 33 nt, synthetic construct
  misc_feature 1..33: note = Pirin (150-160)
  source 1..33: mol_type = other RNA
gccgtgatcagcggcgaggctctggggattaag

SEQ ID NO: 67737 - RNA, 33 nt, synthetic construct
  misc_feature 1..33: note = Protein disulfide-isomerase (199-209)
  source 1..33: mol_type = other RNA
gccgtgaaggtccacagcttccccaccctgaaa

SEQ ID NO: 67738 - RNA, 27 nt, synthetic construct
  misc_feature 1..27: note = Influenza virus NS1A-binding protein (306-314)
  source 1..27: mol_type = other RNA
gccgtgctggacggcatcttctgcgtc

SEQ ID NO: 67739 - RNA, 27 nt, synthetic construct
  misc_feature 1..27: note = HLA class I histocompatibility antigen, Cw-5 alpha chain (322-330)
  source 1..27: mol_type = other RNA
gccgtgctgggcgctgtcatggcagtt

SEQ ID NO: 67740 - RNA, 27 nt, synthetic construct
  misc_feature 1..27: note = HLA class I histocompatibility antigen, Cw-3 alpha chain (322-330)
  source 1..27: mol_type = other RNA
gccgtgctgggcgctgtcgttgcagtg

SEQ ID NO: 67741 - RNA, 27 nt, synthetic construct
  misc_feature 1..27: note = Kelch-like protein 21 (508-516)
  source 1..27: mol_type = other RNA
gccgtgctgggcgggaagctctacgtc

SEQ ID NO: 67742 - RNA, 27 nt, synthetic construct
  misc_feature 1..27: note = Transmembrane protein 147 (17-25)
  source 1..27: mol_type = other RNA
gccgtgctgggccacttcctcagccat

SEQ ID NO: 67743 - RNA, 24 nt, synthetic construct
  misc_feature 1..24: note = ER membrane protein complex subunit 1 (144-151)
  source 1..24: mol_type = other RNA
gccgtgctgaagaaaaccacactc

SEQ ID NO: 67744 - RNA, 27 nt, synthetic construct
  misc_feature 1..27: note = Coronin-1B (42-50)
  source 1..27: mol_type = other RNA
gccgtgaaccccaagttcctggctgtc

SEQ ID NO: 67745 - RNA, 36 nt, synthetic construct
  misc_feature 1..36: note = Trinucleotide repeat-containing gene 6C protein (287-298)
  source 1..36: mol_type = other RNA
gccgtgcagaaggagggcagcgggggaaacgcttgg

SEQ ID NO: 67746 - RNA, 27 nt, synthetic construct
  misc_feature 1..27: note = Constitutive coactivator of peroxisome proliferator-activated receptor gamma (278-286)
  source 1..27: mol_type = other RNA
gccgtgagcgaccacatctccaaggtc

SEQ ID NO: 67747 - RNA, 51 nt, synthetic construct
  misc_feature 1..51: note = Histone H2B type 2-F (111-127)
  source 1..51: mol_type = other RNA
gccgtgagcgagggcaccaaggctgtcacaaaatacacttcctctaagctg

SEQ ID NO: 67748 - RNA, 30 nt, synthetic construct
  misc_feature 1..30: note = Unconventional myosin-Ib (273-282)
  source 1..30: mol_type = other RNA
gccgtggtcgctgcagttctgaagctcggc

SEQ ID NO: 67749 - RNA, 39 nt, synthetic construct
  misc_feature 1..39: note = HLA class I histocompatibility antigen, Cw-7 alpha chain (270-282)
  source 1..39: mol_type = other RNA
gccgtggtcgttcccagcggccaggagcaaagatacacc

SEQ ID NO: 67750 - RNA, 54 nt, synthetic construct
  misc_feature 1..54: note = Transketolase (84-101)
  source 1..54: mol_type = other RNA
gccgtgtgggctgaggcaggcttcctggccgaagcggagctccttaacctgaga

SEQ ID NO: 67751 - RNA, 27 nt, synthetic construct
  misc_feature 1..27: note = Fanconi anemia group B protein (310-318)
  source 1..27: mol_type = other RNA
gccgtgtggaaggagagcttccaggtc

SEQ ID NO: 67752 - RNA, 27 nt, synthetic construct
  misc_feature 1..27: note = Glia-derived nexin (198-206)
  source 1..27: mol_type = other RNA
gccgtgtacttcaagggcctgtggaaa

SEQ ID NO: 67753 - RNA, 30 nt, synthetic construct
  misc_feature 1..30: note = Ras GTPase-activating protein-binding protein 1 (54-63)
  source 1..30: mol_type = other RNA
gccgtgtacggccagaaggagatccacaga

SEQ ID NO: 67754 - RNA, 27 nt, synthetic construct
  misc_feature 1..27: note = Probable helicase with zinc finger domain (533-541)
  source 1..27: mol_type = other RNA
gccgtgtacctgctccccgtccctaag

SEQ ID NO: 67755 - RNA, 27 nt, synthetic construct
  misc_feature 1..27: note = Coagulation factor VIII (1262-1270)
  source 1..27: mol_type = other RNA
gcctacgctcccgtgctgcaggacttc

SEQ ID NO: 67756 - RNA, 30 nt, synthetic construct
  misc_feature 1..30: note = E3 ubiquitin-protein ligase TTC3 (578-587)
  source 1..30: mol_type = other RNA
gcctactgcggcatcgggaaggtgtatctg

SEQ ID NO: 67757 - RNA, 27 nt, synthetic construct
  misc_feature 1..27: note = Serine/threonine-protein kinase SIK3 (371-379)
  source 1..27: mol_type = other RNA
gcctacgaccactatagcgctatctac

SEQ ID NO: 67758 - RNA, 27 nt, synthetic construct
  misc_feature 1..27: note = E3 ubiquitin-protein ligase TRIM13 (217-225)
  source 1..27: mol_type = other RNA
gcctacgaccccgagatcaacaagctg

SEQ ID NO: 67759 - RNA, 27 nt, synthetic construct
  misc_feature 1..27: note = Lysophosphatidic acid receptor 1 (291-299)
  source 1..27: mol_type = other RNA
gcctacgagaagttctttctgctcctt

SEQ ID NO: 67760 - RNA, 24 nt, synthetic construct
  misc_feature 1..24: note = Annexin A5 (93-100)
  source 1..24: mol_type = other RNA
gcctacgagctgaagcacgctctc

SEQ ID NO: 67761 - RNA, 24 nt, synthetic construct
  misc_feature 1..24: note = Collagen alpha-1(VI) chain (997-1004)
  source 1..24: mol_type = other RNA
gcctacggcgagagccacctgttc

SEQ ID NO: 67762 - RNA, 24 nt, synthetic construct
  misc_feature 1..24: note = Ribosomal protein S6 kinase alpha-4 (27-34)
  source 1..24: mol_type = other RNA
gcctacggcaaggtgttcctggtc

SEQ ID NO: 67763 - RNA, 24 nt, synthetic construct
  misc_feature 1..24: note = Lipase maturation factor 2 (303-310)
  source 1..24: mol_type = other RNA
gcctacggcaccgtgcactatttc

SEQ ID NO: 67764 - RNA, 27 nt, synthetic construct
  misc_feature 1..27: note = Transportin-1 (520-528)
  source 1..27: mol_type = other RNA
gcctacatcctggacaccctcgtgttc

SEQ ID NO: 67765 - RNA, 27 nt, synthetic construct
  misc_feature 1..27: note = Poly(A)-specific ribonuclease PARN (337-345)
  source 1..27: mol_type = other RNA
gcctacatcaccggcctgtgcttcatt

SEQ ID NO: 67766 - RNA, 27 nt, synthetic construct
  misc_feature 1..27: note = Collagen alpha-1(XXII) chain (141-149)
  source 1..27: mol_type = other RNA
gcctacaagcaggtggctatcctgctc

SEQ ID NO: 67767 - RNA, 27 nt, synthetic construct
  misc_feature 1..27: note = Nuclear receptor subfamily 2 group C member 2 (493-501)
  source 1..27: mol_type = other RNA
gcctacctgaaggctatcgtgctcttc

SEQ ID NO: 67768 - RNA, 27 nt, synthetic construct
  misc_feature 1..27: note = Low affinity sodium-glucose cotransporter (318-326)
  source 1..27: mol_type = other RNA
gcctacctgaagctccttcccatgttc

SEQ ID NO: 67769 - RNA, 27 nt, synthetic construct
  misc_feature 1..27: note = Phosphatidylinositide phosphatase SAC2 (390-398)
  source 1..27: mol_type = other RNA
gcctacctgaagcaggtgctccttttc

SEQ ID NO: 67770 - RNA, 30 nt, synthetic construct
  misc_feature 1..30: note = TRPM8 channel-associated factor 1 (477-486)
  source 1..30: mol_type = other RNA
gcctacctgcccgagtggaaggaaaacatc

SEQ ID NO: 67771 - RNA, 27 nt, synthetic construct
  misc_feature 1..27: note = Catenin alpha-2 (811-819)
  source 1..27: mol_type = other RNA
gcctacctgcagagaatcgctctctat

SEQ ID NO: 67772 - RNA, 27 nt, synthetic construct
  misc_feature 1..27: note = Signal recognition particle subunit SRP68 (191-199)
  source 1..27: mol_type = other RNA
gcctacctgagcggcatgctcagattc

SEQ ID NO: 67773 - RNA, 27 nt, synthetic construct
  misc_feature 1..27: note = Transmembraneoprotein NMB (36-44)
  source 1..27: mol_type = other RNA
gcctacatgagagagcacaaccagctg

SEQ ID NO: 67774 - RNA, 30 nt, synthetic construct
  misc_feature 1..30: note = Serine/threonine-protein kinase mTOR (1308-1317)
  source 1..30: mol_type = other RNA
gcctacaaccccatggctagagacctgttc

SEQ ID NO: 67775 - RNA, 27 nt, synthetic construct
  misc_feature 1..27: note = Eukaryotic translation initiation factor 2-alpha kinase 4 (919-927)
  source 1..27: mol_type = other RNA
gcctacaaccagaaggtggacctgttc

SEQ ID NO: 67776 - RNA, 27 nt, synthetic construct
  misc_feature 1..27: note = Regulation of nuclear pre-mRNA domain-containing protein 2 (70-78)
  source 1..27: mol_type = other RNA
gcctacccccacagactgaacctcttc

SEQ ID NO: 67777 - RNA, 27 nt, synthetic construct
  misc_feature 1..27: note = Alpha-mannosidase 2C1 (924-932)
  source 1..27: mol_type = other RNA
gcctacagcctgaacttccccctcctt

SEQ ID NO: 67778 - RNA, 27 nt, synthetic construct
  misc_feature 1..27: note = Glutamine-fructose-6-phosphate aminotransferase (isomerizing) 1 (477-485)
  source 1..27: mol_type = other RNA
gcctacaccagccagttcgtgtccctg

SEQ ID NO: 67779 - RNA, 24 nt, synthetic construct
  misc_feature 1..24: note = Bax inhibitor 1 (91-98)
  source 1..24: mol_type = other RNA
gcctacgtgcacatggtcacccat

SEQ ID NO: 67780 - RNA, 147 nt, synthetic construct
  misc_feature 1..147: note = ATP synthase subunit epsilon, mitochondrial (3-51)
  source 1..147: mol_type = other RNA
gcctactggagacaggctggcctgagctatatcaggtactcccaaatttgcgcaaaggccgtgcgggacgcgctcaaaaccgagttcaaggctaacgccgaaaaaacatctgggtcaaatgtcaagatagttaaagtgaagaaggag

SEQ ID NO: 67781 - RNA, 27 nt, synthetic construct
  misc_feature 1..27: note = Serum albumin (500-508)
  source 1..27: mol_type = other RNA
tgctgtaccgagagcctggtgaacaga

SEQ ID NO: 67782 - RNA, 27 nt, synthetic construct
  misc_feature 1..27: note = Phosphoglycerate kinase 1 (50-58)
  source 1..27: mol_type = other RNA
tgcctggacaacggcgccaagagcgtg

SEQ ID NO: 67783 - RNA, 27 nt, synthetic construct
  misc_feature 1..27: note = Sodium/potassium-transporting ATPase subunit alpha-3 (359-367)
  source 1..27: mol_type = other RNA
tgcctggtgaagaacctcgaggccgtc

SEQ ID NO: 67784 - RNA, 24 nt, synthetic construct
  misc_feature 1..24: note = Unconventional myosin-Id (243-250)
  source 1..24: mol_type = other RNA
gacgccgctgagttcagagtggtc

SEQ ID NO: 67785 - RNA, 27 nt, synthetic construct
  misc_feature 1..27: note = Dual serine/threonine and tyrosine protein kinase (357-365)
  source 1..27: mol_type = other RNA
gacgccgctaaggcactgaacctcgtg

SEQ ID NO: 67786 - RNA, 27 nt, synthetic construct
  misc_feature 1..27: note = Dynactin subunit 1 (411-419)
  source 1..27: mol_type = other RNA
gacgccgctctgggcgcagaggaaatg

SEQ ID NO: 67787 - RNA, 27 nt, synthetic construct
  misc_feature 1..27: note = Cytoplasmic dynein 2 heavy chain 1 (311-319)
  source 1..27: mol_type = other RNA
gacgccgctctgcagatgatcaccgtg

SEQ ID NO: 67788 - RNA, 24 nt, synthetic construct
  misc_feature 1..24: note = Unconventional myosin-Ib (247-254)
  source 1..24: mol_type = other RNA
gacgccgctaacttcagaaccgtg

SEQ ID NO: 67789 - RNA, 24 nt, synthetic construct
  misc_feature 1..24: note = HLA class I histocompatibility antigen, alpha chain E (60-67)
  source 1..24: mol_type = other RNA
gacgccgctagccccagaatggtg

SEQ ID NO: 67790 - RNA, 30 nt, synthetic construct
  misc_feature 1..30: note = Density-regulated protein (69-78)
  source 1..30: mol_type = other RNA
gacgccgattaccccctgagagtgctctat

SEQ ID NO: 67791 - RNA, 42 nt, synthetic construct
  misc_feature 1..42: note = Gamma-secretase C-terminal fragment 59 (562-575)
  source 1..42: mol_type = other RNA
gacgccgagttcagacacgatagcggctacgaagtgcatcac

SEQ ID NO: 67792 - RNA, 27 nt, synthetic construct
  misc_feature 1..27: note = Uncharacterized protein C15orf52 (63-71)
  source 1..27: mol_type = other RNA
gacgccgagctggatagaaggatcgtg

SEQ ID NO: 67793 - RNA, 24 nt, synthetic construct
  misc_feature 1..24: note = Zinc finger SWIM domain-containing protein 6 (875-882)
  source 1..24: mol_type = other RNA
gacgccttcaagatcgctaccctg

SEQ ID NO: 67794 - RNA, 27 nt, synthetic construct
  misc_feature 1..27: note = Fructosamine-3-kinase (34-42)
  source 1..27: mol_type = other RNA
gacgccggccccgtgttcgtcaaggtt

SEQ ID NO: 67795 - RNA, 27 nt, synthetic construct
  misc_feature 1..27: note = WD repeat-containing protein 81 (428-436)
  source 1..27: mol_type = other RNA
gacgcccacttccattttcaccagatc

SEQ ID NO: 67796 - RNA, 27 nt, synthetic construct
  misc_feature 1..27: note = Farnesyl pyrophosphate synthase (33-41)
  source 1..27: mol_type = other RNA
gacgccatcgctagactgaaggaggtg

SEQ ID NO: 67797 - RNA, 27 nt, synthetic construct
  misc_feature 1..27: note Dolichyl-diphosphooligosaccharide-proteinosyltransferase subunit 2 (67-75)
  source 1..27: mol_type = other RNA
gacgccaagaaagcttgcacctacatc

SEQ ID NO: 67798 - RNA, 27 nt, synthetic construct
  misc_feature 1..27: note = Heat shock 70 kDa protein 1B (323-331)
  source 1..27: mol_type = other RNA
gacgccaagctggataaagctcagatc

SEQ ID NO: 67799 - RNA, 27 nt, synthetic construct
  misc_feature 1..27: note = FERM, RhoGEF and pleckstrin domain-containing protein 2 (711-719)
  source 1..27: mol_type = other RNA
gacgccctgaaggctatcaccgaggtg

SEQ ID NO: 67800 - RNA, 27 nt, synthetic construct
  misc_feature 1..27: note = Protocadherin gamma-A12 (636-644)
  source 1..27: mol_type = other RNA
gacgccctgaagcagagcctcgtggtc

SEQ ID NO: 67801 - RNA, 27 nt, synthetic construct
  misc_feature 1..27: note = Short-chain dehydrogenase/reductase 3 (138-146)
  source 1..27: mol_type = other RNA
gacgccctgctcaagagccagcacatc

SEQ ID NO: 67802 - RNA, 27 nt, synthetic construct
  misc_feature 1..27: note = Importin subunit alpha-3 (326-334)
  source 1..27: mol_type = other RNA
gacgccctgagccacttccccgctctc

SEQ ID NO: 67803 - RNA, 27 nt, synthetic construct
  misc_feature 1..27: note = Rab GDP dissociation inhibitor beta (233-241)
  source 1..27: mol_type = other RNA
gacgccaacagctgccagatcattata

SEQ ID NO: 67804 - RNA, 24 nt, synthetic construct
  misc_feature 1..24: note = Cubilin (2289-2296)
  source 1..24: mol_type = other RNA
gacgcccccatcctgagcaagttc

SEQ ID NO: 67805 - RNA, 24 nt, synthetic construct
  misc_feature 1..24: note = Fibronectin isoform 11 (1163-1170)
  source 1..24: mol_type = other RNA
gacgcccccatcgtgaacaaggtc

SEQ ID NO: 67806 - RNA, 27 nt, synthetic construct
  misc_feature 1..27: note = Fibronectin isoform 11 (1163-1171)
  source 1..27: mol_type = other RNA
gacgcccccatcgtgaacaaggtcgtt

SEQ ID NO: 67807 - RNA, 24 nt, synthetic construct
  misc_feature 1..24: note = Transcription activator BRG1 (696-703)
  source 1..24: mol_type = other RNA
gacgcccccaaggctggccagctg

SEQ ID NO: 67808 - RNA, 27 nt, synthetic construct
  misc_feature 1..27: note = Protein scribble homolog (439-447)
  source 1..27: mol_type = other RNA
gacgccccccctagcagagtgtccgtc

SEQ ID NO: 67809 - RNA, 27 nt, synthetic construct
  misc_feature 1..27: note = Protocadherin gamma-C3 (256-264)
  source 1..27: mol_type = other RNA
gacgcccccagcggcaccagagtggtc

SEQ ID NO: 67810 - RNA, 27 nt, synthetic construct
  misc_feature 1..27: note = Fc receptor-like A (54-62)
  source 1..27: mol_type = other RNA
gacgccagagaggctggcttccaggtg

SEQ ID NO: 67811 - RNA, 24 nt, synthetic construct
  misc_feature 1..24: note = Polymerase delta-interacting protein 3 (116-123)
  source 1..24: mol_type = other RNA
gacgccagagagaagatcagcctg

SEQ ID NO: 67812 - RNA, 24 nt, synthetic construct
  misc_feature 1..24: note = Forkhead-associated domain-containing protein 1 (180-187)
  source 1..24: mol_type = other RNA
gacgccagaaagccccctgtgatc

SEQ ID NO: 67813 - RNA, 24 nt, synthetic construct
  misc_feature 1..24: note = Polymerase delta-interacting protein 3 (55-62)
  source 1..24: mol_type = other RNA
gacgccagacagaagatcggcctg

SEQ ID NO: 67814 - RNA, 39 nt, synthetic construct
  misc_feature 1..39: note = Filamin-A (1614-1626)
  source 1..39: mol_type = other RNA
gacgccagcaagtgcaccgtgacaggcgctgggatcgga

SEQ ID NO: 67815 - RNA, 24 nt, synthetic construct
  misc_feature 1..24: note = Ataxin-10 (382-389)
  source 1..24: mol_type = other RNA
gacgccagcctgctcaagaaagtg

SEQ ID NO: 67816 - RNA, 30 nt, synthetic construct
  misc_feature 1..30: note = Rootletin (478-487)
  source 1..30: mol_type = other RNA
gacgccagcaacggctccctgagagggctc

SEQ ID NO: 67817 - RNA, 27 nt, synthetic construct
  misc_feature 1..27: note = Basement membrane-specific heparan sulfate proteoglycan core protein (2026-2034)
  source 1..27: mol_type = other RNA
gacgccagcccccctccagtgaagatc

SEQ ID NO: 67818 - RNA, 27 nt, synthetic construct
  misc_feature 1..27: note = Poly(A)-specific ribonuclease PARN (220-228)
  source 1..27: mol_type = other RNA
gacgccgtgggcttcagcagagtcatc

SEQ ID NO: 67819 - RNA, 24 nt, synthetic construct
  misc_feature 1..24: note = Uncharacterized protein KIAA1522 (204-211)
  source 1..24: mol_type = other RNA
gacgccgtgagaatccccaccgtc

SEQ ID NO: 67820 - RNA, 24 nt, synthetic construct
  misc_feature 1..24: note = Peptidylprolyl isomerase domain and WD repeat-containing protein 1 (214-221)
  source 1..24: mol_type = other RNA
gacgccgtgagactgatcaacatt

SEQ ID NO: 67821 - RNA, 24 nt, synthetic construct
  misc_feature 1..24: note = GCN1 general control of amino-acid synthesis 1-like 1 (1074-1081)
  source 1..24: mol_type = other RNA
gacgccgtgagacagagcgtcgtt

SEQ ID NO: 67822 - RNA, 27 nt, synthetic construct
  misc_feature 1..27: note = Putative segment polarity protein dishevelled homolog DVL1P1 (316-324)
  source 1..27: mol_type = other RNA
gacgccgtgagagtcctgagggagatc

SEQ ID NO: 67823 - RNA, 24 nt, synthetic construct
  misc_feature 1..24: note = WD repeat-containing protein 60 (576-583)
  source 1..24: mol_type = other RNA
gacgccgtggtcatgcccaagatc

SEQ ID NO: 67824 - RNA, 27 nt, synthetic construct
  misc_feature 1..27: note = Acyl-coenzyme A thioesterase 1 isoform X1 (280-288)
  source 1..27: mol_type = other RNA
gacgcctggaagcagctgcaaaccttc

SEQ ID NO: 67825 - RNA, 24 nt, synthetic construct
  misc_feature 1..24: note = Nuclear factor erythroid 2-related factor 3 (109-116)
  source 1..24: mol_type = other RNA
gacgcctggctggtgcacagcgtc

SEQ ID NO: 67826 - RNA, 27 nt, synthetic construct
  misc_feature 1..27: note = Zinc finger protein 148 (493-501)
  source 1..27: mol_type = other RNA
gacgcctacctgaacagcccctccctc

SEQ ID NO: 67827 - RNA, 24 nt, synthetic construct
  misc_feature 1..24: note = Phosphatidylinositide phosphatase SAC2 (555-562)
  source 1..24: mol_type = other RNA
gacgcctacagacaggctgtgatc

SEQ ID NO: 67828 - RNA, 27 nt, synthetic construct
  misc_feature 1..27: note = Type II inositol 3,4-bisphosphate 4-phosphatase (589-597)
  source 1..27: mol_type = other RNA
gactgcatgggcgaggtggtcaacaga

SEQ ID NO: 67829 - RNA, 54 nt, synthetic construct
  misc_feature 1..54: note = Prolow-density lipoprotein receptor-related protein 1 (2270-2287)
  source 1..54: mol_type = other RNA
gacgatggcagcagaaggatcaccattgtggagaacgtcgggtccgttgaagga

SEQ ID NO: 67830 - RNA, 48 nt, synthetic construct
  misc_feature 1..48: note = HLA class I histocompatibility antigen, alpha chain E (50-65)
  source 1..48: mol_type = other RNA
gacgatacccagttcgtgagatttgacaacgatgccgctagccccagg

SEQ ID NO: 67831 - RNA, 39 nt, synthetic construct
  misc_feature 1..39: note = HLA class I histocompatibility antigen, B-15 alpha chain (53-65)
  source 1..39: mol_type = other RNA
gacgatacccagttcgtgagatttgacagcgatgccgct

SEQ ID NO: 67832 - RNA, 24 nt, synthetic construct
  misc_feature 1..24: note = Serum paraoxonase/arylesterase 2 (123-130)
  source 1..24: mol_type = other RNA
gacgataccgtgtacctgttcgtc

SEQ ID NO: 67833 - RNA, 30 nt, synthetic construct
  misc_feature 1..30: note = Prohibitin (166-175)
  source 1..30: mol_type = other RNA
gacgatgtgagcctgacccacctcacattc

SEQ ID NO: 67834 - RNA, 33 nt, synthetic construct
  misc_feature 1..33: note = Eukaryotic initiation factor 4A-II (183-193)
  source 1..33: mol_type = other RNA
gacgaggccgatgaaatgctgagcagaggcttc

SEQ ID NO: 67835 - RNA, 30 nt, synthetic construct
  misc_feature 1..30: note = Protein Red (199-208)
  source 1..30: mol_type = other RNA
gacgaggatcccgaaaacaagatcgagttc

SEQ ID NO: 67836 - RNA, 30 nt, synthetic construct
  misc_feature 1..30: note = Nuclear pore complex protein Nup98-Nup96 (633-642)
  source 1..30: mol_type = other RNA
gacgaggatagcctggtgtcccacttctac

SEQ ID NO: 67837 - RNA, 24 nt, synthetic construct
  misc_feature 1..24: note = Caseinolytic peptidase B protein homolog (340-347)
  source 1..24: mol_type = other RNA
gacgaggaacaccccctggtgttc

SEQ ID NO: 67838 - RNA, 30 nt, synthetic construct
  misc_feature 1..30: note = Splicing factor, proline- and glutamine-rich (311-320)
  source 1..30: mol_type = other RNA
gacgagttcaagagactgtttgccaaatac

SEQ ID NO: 67839 - RNA, 27 nt, synthetic construct
  misc_feature 1..27: note = ER membrane protein complex subunit 1 (527-535)
  source 1..27: mol_type = other RNA
gacgagttcaacctgcagaagatgatg

SEQ ID NO: 67840 - RNA, 27 nt, synthetic construct
  misc_feature 1..27: note = Aggrecan core protein (225-233)
  source 1..27: mol_type = other RNA
gacgagttccccggcgtgagaacctac

SEQ ID NO: 67841 - RNA, 27 nt, synthetic construct
  misc_feature 1..27: note = Alpha-actinin-3 (248-256)
  source 1..27: mol_type = other RNA
gacgagaaggccatcatgacctacgtg

SEQ ID NO: 67842 - RNA, 21 nt, synthetic construct
  misc_feature 1..21: note = Probable ATP-dependent RNA helicase DDX27 (87-93)
  source 1..21: mol_type = other RNA
gacgagaagatcgaaaaagtg

SEQ ID NO: 67843 - RNA, 27 nt, synthetic construct
  misc_feature 1..27: note = Heterogeneous nuclear ribonucleoprotein U (281-289)
  source 1..27: mol_type = other RNA
gacgagaacgatgtgatcacctgcttc

SEQ ID NO: 67844 - RNA, 30 nt, synthetic construct
  misc_feature 1..30: note = SURP and G-patch domain-containing protein 2 (569-578)
  source 1..30: mol_type = other RNA
gacgagaacagcctggaatacaagtattac

SEQ ID NO: 67845 - RNA, 27 nt, synthetic construct
  misc_feature 1..27: note = Serine/threonine-protein phosphatase 2A 65 kDa regulatory subunit A beta isoform (227-235)
  source 1..27: mol_type = other RNA
gacgagcaggatagcgtgagactgctc

SEQ ID NO: 67846 - RNA, 39 nt, synthetic construct
  misc_feature 1..39: note = Cytochrome c oxidase subunit 6B1 (5-17)
  source 1..39: mol_type = other RNA
gacgagcagagagccgaaggcaccttccccgggaagatc

SEQ ID NO: 67847 - RNA, 27 nt, synthetic construct
  misc_feature 1..27: note = Glycine-tRNA ligase (545-553)
  source 1..27: mol_type = other RNA
gacgagcagagaaccttctttagcttc

SEQ ID NO: 67848 - RNA, 48 nt, synthetic construct
  misc_feature 1..48: note = Prohibitin-2 (246-261)
  source 1..48: mol_type = other RNA
gacgagagcttcaccagaggctccgattctctgatcaaggggaaaaag

SEQ ID NO: 67849 - RNA, 45 nt, synthetic construct
  misc_feature 1..45: note = Annexin A2 (52-66)
  source 1..45: mol_type = other RNA
gacgaggtgaccatcgtcaacattctgacaaatagaagcaacgcc

SEQ ID NO: 67850 - RNA, 72 nt, synthetic construct
  misc_feature 1..72: note = Beta-2-microglobulin (75-98)
  source 1..72: mol_type = other RNA
gacgagtacgcctgcagagtgaaccacgtcaccctgagccagcccaagatcgttaaatgggatagggacatg

SEQ ID NO: 67851 - RNA, 27 nt, synthetic construct
  misc_feature 1..27: note = Rho GTPase-activating protein 33 (76-84)
  source 1..27: mol_type = other RNA
gacttcggccacatccagctgctcctt

SEQ ID NO: 67852 - RNA, 21 nt, synthetic construct
  misc_feature 1..21: note = Exocyst complex component 1 (516-522)
  source 1..21: mol_type = other RNA
gacttcatcagcaagtttttc

SEQ ID NO: 67853 - RNA, 30 nt, synthetic construct
  misc_feature 1..30: note = Chromodomain-helicase-DNA-binding protein 4 (1081-1090)
  source 1..30: mol_type = other RNA
gacttcctggagcacgaaggctacaagtat

SEQ ID NO: 67854 - RNA, 21 nt, synthetic construct
  misc_feature 1..21: note = Prelamin-A/C (56-62)
  source 1..21: mol_type = other RNA
gacttccagaagaacatctac

SEQ ID NO: 67855 - RNA, 30 nt, synthetic construct
  misc_feature 1..30: note = Vacuolar protein sorting-associated protein 51 homolog (75-84)
  source 1..30: mol_type = other RNA
gacttcagcgccagaatctccgctaccctg

SEQ ID NO: 67856 - RNA, 54 nt, synthetic construct
  misc_feature 1..54: note = Prohibitin-2 (174-191)
  source 1..54: mol_type = other RNA
gacttcagcctgatcctcgatgacgtggccattaccgagctttccttttctaga

SEQ ID NO: 67857 - RNA, 75 nt, synthetic construct
  misc_feature 1..75: note = Cytochrome c oxidase subunit 6C (51-75)
  source 1..75: mol_type = other RNA
gacttctacagaaactatgatgtgatgaaggactttgaggaaatgaggaaagccggcatcttccagagcgtcaag

SEQ ID NO: 67858 - RNA, 24 nt, synthetic construct
  misc_feature 1..24: note = Histone-lysine N-methyltransferase 2C (1502-1509)
  source 1..24: mol_type = other RNA
gacggcgccatcctggggaagctc

SEQ ID NO: 67859 - RNA, 24 nt, synthetic construct
  misc_feature 1..24: note = Melanocyte protein PMEL (233-240)
  source 1..24: mol_type = other RNA
gacggcgggaacaagcacttcctg

SEQ ID NO: 67860 - RNA, 66 nt, synthetic construct
  misc_feature 1..66: note = Cytochrome c oxidase subunit 6A1, mitochondrial (65-86)
  source 1..66: mol_type = other RNA
gacggcaaccacaccctgttccataatccccacgtgaaccctctcccaacagggtacgaggatgaa

SEQ ID NO: 67861 - RNA, 27 nt, synthetic construct
  misc_feature 1..27: note = E3 ubiquitin-protein ligase UBR4 (503-511)
  source 1..27: mol_type = other RNA
gacggcccccctgccgctctgagcatc

SEQ ID NO: 67862 - RNA, 24 nt, synthetic construct
  misc_feature 1..24: note = Signal transducer and activator of transcription 2 (570-577)
  source 1..24: mol_type = other RNA
gacggcagaatcatggggttcgtg

SEQ ID NO: 67863 - RNA, 27 nt, synthetic construct
  misc_feature 1..27: note = Protein transport protein Sec31A (325-333)
  source 1..27: mol_type = other RNA
gacggcagaatcagcgtgtactccatt

SEQ ID NO: 67864 - RNA, 48 nt, synthetic construct
  misc_feature 1..48: note = Roundabout homolog 1 (1436-1451)
  source 1..48: mol_type = other RNA
gacggcagacaggtggtcgatatgaggaccaaccccggggaccctcgg

SEQ ID NO: 67865 - RNA, 24 nt, synthetic construct
  misc_feature 1..24: note = Ubiquitin-60S ribosomal protein L40 (57-64)
  source 1..24: mol_type = other RNA
gacggcagaaccctgagcgattac

SEQ ID NO: 67866 - RNA, 27 nt, synthetic construct
  misc_feature 1..27: note = Low-density lipoprotein receptor-related protein 2 (857-865)
  source 1..27: mol_type = other RNA
gacggcagccacctgctccccgtgatc

SEQ ID NO: 67867 - RNA, 45 nt, synthetic construct
  misc_feature 1..45: note = Annexin A2 (182-196)
  source 1..45: mol_type = other RNA
gacggcagcgtgatcgattacgagctgattgaccaggatgccaga

SEQ ID NO: 67868 - RNA, 24 nt, synthetic construct
  misc_feature 1..24: note = Neuroblast differentiation-associated protein AHNAK (730-737)
  source 1..24: mol_type = other RNA
gacggcgtgaaggtccccgggatc

SEQ ID NO: 67869 - RNA, 60 nt, synthetic construct
  misc_feature 1..60: note = Glia-derived nexin (187-206)
  source 1..60: mol_type = other RNA
gacggcgtgctgaccagactcgtccttgttaacgccgtgtacttcaaggggctgtggaaa

SEQ ID NO: 67870 - RNA, 27 nt, synthetic construct
  misc_feature 1..27: note = Myotubularin-related protein 3 (99-107)
  source 1..27: mol_type = other RNA
gacggctgggatagaaccccccagatc

SEQ ID NO: 67871 - RNA, 27 nt, synthetic construct
  misc_feature 1..27: note = Phosphorylase b kinase regulatory subunit alpha, skeletal muscle isoform (591-599)
  source 1..27: mol_type = other RNA
gacggctacttcgggggagccagagtg

SEQ ID NO: 67872 - RNA, 24 nt, synthetic construct
  misc_feature 1..24: note = Molybdenum cofactor sulfurase (53-60)
  source 1..24: mol_type = other RNA
gaccacgccggcgctaccctgttc

SEQ ID NO: 67873 - RNA, 36 nt, synthetic construct
  misc_feature 1..36: note = Trifunctional enzyme subunit alpha, mitochondrial (752-763)
  source 1..36: mol_type = other RNA
gaccacgccaacagccccaataagaaattctaccag

SEQ ID NO: 67874 - RNA, 21 nt, synthetic construct
  misc_feature 1..21: note = tRNA-splicing ligase RtcB homolog (149-155)
  source 1..21: mol_type = other RNA
gaccacatccccgtgggcgtc

SEQ ID NO: 67875 - RNA, 24 nt, synthetic construct
  misc_feature 1..24: note = T-complex protein 1 subunit beta (336-343)
  source 1..24: mol_type = other RNA
gaccaccccgagctggtgaagctc

SEQ ID NO: 67876 - RNA, 21 nt, synthetic construct
  misc_feature 1..21: note = Syntenin-1 (292-298)
  source 1..21: mol_type = other RNA
gaccacaccatccccgaggtg

SEQ ID NO: 67877 - RNA, 21 nt, synthetic construct
  misc_feature 1..21: note = GPI transamidase component PIG-T (163-169)
  source 1..21: mol_type = other RNA
gaccactacttcctgagatat

SEQ ID NO: 67878 - RNA, 21 nt, synthetic construct
  misc_feature 1..21: note = Probable helicase with zinc finger domain (343-349)
  source 1..21: mol_type = other RNA
gaccactacgtgtataaggtc

SEQ ID NO: 67879 - RNA, 27 nt, synthetic construct
  misc_feature 1..27: note = Probable helicase with zinc finger domain (343-351)
  source 1..27: mol_type = other RNA
gaccactacgtgtataaggtcggcatc

SEQ ID NO: 67880 - RNA, 27 nt, synthetic construct
  misc_feature 1..27: note = Putative Polycomb group protein ASXL1 (616-624)
  source 1..27: mol_type = other RNA
gacatcaaggccagagctctgcaggtg

SEQ ID NO: 67881 - RNA, 27 nt, synthetic construct
  misc_feature 1..27: note = Protein zyg-11 homolog B (263-271)
  source 1..27: mol_type = other RNA
gacatcctgcccaacctcgtgagcctt

SEQ ID NO: 67882 - RNA, 42 nt, synthetic construct
  misc_feature 1..42: note = Collagen alpha-1(XI) chain (219-232)
  source 1..42: mol_type = other RNA
gacatccagcaattcctgattaccggcgatcccaaggccgct

SEQ ID NO: 67883 - RNA, 48 nt, synthetic construct
  misc_feature 1..48: note = Collagen alpha-1(XI) chain (219-234)
  source 1..48: mol_type = other RNA
gacatccagcaattcctgattaccggcgatcccaaggccgcttacgac

SEQ ID NO: 67884 - RNA, 27 nt, synthetic construct
  misc_feature 1..27: note = Eukaryotic translation initiation factor 3 subunit C-like protein (636-644)
  source 1..27: mol_type = other RNA
gacatccagagctccggcagagccaag

SEQ ID NO: 67885 - RNA, 42 nt, synthetic construct
  misc_feature 1..42: note = Protocadherin Fat 1 (2630-2643)
  source 1..42: mol_type = other RNA
gacatcacctacgccattgaggctgatagcgaatccgtgaag

SEQ ID NO: 67886 - RNA, 45 nt, synthetic construct
  misc_feature 1..45: note = Glia-derived nexin (118-132)
  source 1..45: mol_type = other RNA
gacatcgtgaccgtcgccaacgctgttttcgtgaagaatgcaagc

SEQ ID NO: 67887 - RNA, 24 nt, synthetic construct
  misc_feature 1..24: note = SWI/SNF complex subunit SMARCC1 (603-610)
  source 1..24: mol_type = other RNA
gacatctacagcaagaaaaccctg

SEQ ID NO: 67888 - RNA, 36 nt, synthetic construct
  misc_feature 1..36: note = Spectrin alpha chain, non-erythrocytic 1 (662-673)
  source 1..36: mol_type = other RNA
gacaagggcgatagcctggactccgtggaggccctc

SEQ ID NO: 67889 - RNA, 21 nt, synthetic construct
  misc_feature 1..21: note = V-type proton ATPase catalytic subunit A (466-472)
  source 1..21: mol_type = other RNA
gacaagcacttcaccgagttt

SEQ ID NO: 67890 - RNA, 21 nt, synthetic construct
  misc_feature 1..21: note = Heat shock protein HSP 90-beta (498-504)
  source 1..21: mol_type = other RNA
gacaagaaagtggagaaggtc

SEQ ID NO: 67891 - RNA, 21 nt, synthetic construct
  misc_feature 1..21: note = Protein O-GlcNAcase (831-837)
  source 1..21: mol_type = other RNA
gacaagagaatcctggagttc

SEQ ID NO: 67892 - RNA, 42 nt, synthetic construct
  misc_feature 1..42: note = Beta-enolase (195-208)
  source 1..42: mol_type = other RNA
gacaaggtggtcatcggcatggatgttgccgctagcgagttc

SEQ ID NO: 67893 - RNA, 45 nt, synthetic construct
  misc_feature 1..45: note = L-lactate dehydrogenase A chain (43-57)
  source 1..45: mol_type = other RNA
gacctggccgatgagctcgctcttgtggacgtcatcgaagataag

SEQ ID NO: 67894 - RNA, 69 nt, synthetic construct
  misc_feature 1..69: note = Neutral alpha-glucosidase AB (213-235)
  source 1..69: mol_type = other RNA
gacctgggcatcttctggctcaacgccgctgagacctgggtggatattagctccaatacagcagggaag

SEQ ID NO: 67895 - RNA, 57 nt, synthetic construct
  misc_feature 1..57: note = Biotin-protein ligase (615-633)
  source 1..57: mol_type = other RNA
gacctgatcaccgagtacaacaagcagcacaaagccgaactcaagccccttagagct

SEQ ID NO: 67896 - RNA, 24 nt, synthetic construct
  misc_feature 1..24: note = 1-phosphatidylinositol 4,5-bisphosphate phosphodiesterase beta-4 (280-287)
  source 1..24: mol_type = other RNA
gacctgaagaaaaagggcctcatc

SEQ ID NO: 67897 - RNA, 27 nt, synthetic construct
  misc_feature 1..27: note = Protein AHNAK2 (2044-2052)
  source 1..27: mol_type = other RNA
gacctgaaggtgcagaccggccaagtc

SEQ ID NO: 67898 - RNA, 48 nt, synthetic construct
  misc_feature 1..48: note = Inosine triphosphate pyrophosphatase (41-56)
  source 1..48: mol_type = other RNA
gacctgcccgagtaccagggcgaacctgatgagatcagcattcaaaag

SEQ ID NO: 67899 - RNA, 81 nt, synthetic construct
  misc_feature 1..81: note = Heat shock protein HSP 90-alpha (477-503)
  source 1..81: mol_type = other RNA
gacctggtgatcctcctttacgagaccgccctgttgagctccggcttctctttagaagatccccagacacacgctaacaga

SEQ ID NO: 67900 - RNA, 24 nt, synthetic construct
  misc_feature 1..24: note = Melanocyte protein PMEL (9-16)
  source 1..24: mol_type = other RNA
gacctggtgctcaagagatgcctt

SEQ ID NO: 67901 - RNA, 81 nt, synthetic construct
  misc_feature 1..81: note = Heat shock protein HSP 90-beta (579-605)
  source 1..81: mol_type = other RNA
gacctggtggtcctccttttcgagaccgccctgttgagctccggcttttctttagaagatccccagacacactcaaacaga

SEQ ID NO: 67902 - RNA, 33 nt, synthetic construct
  misc_feature 1..33: note = Fibronectin isoform 6 (1235-1245)
  source 1..33: mol_type = other RNA
gacaacctgagccccggcctcgagtacaatgtg

SEQ ID NO: 67903 - RNA, 57 nt, synthetic construct
  misc_feature 1..57: note = Serine/threonine-protein phosphatase 2A 65 kDa regulatory subunit A alpha isoform (199-217)
  source 1..57: mol_type = other RNA
gacaacgtgaagagcgagatcattcccatgttctccaatctggcctctgatgaacag

SEQ ID NO: 67904 - RNA, 24 nt, synthetic construct
  misc_feature 1..24: note = GPN-loop GTPase 2 (151-158)
  source 1..24: mol_type = other RNA
gaccccgccaagttcatcagcgtg

SEQ ID NO: 67905 - RNA, 48 nt, synthetic construct
  misc_feature 1..48: note = Cadherin-2 (380-395)
  source 1..48: mol_type = other RNA
gaccccgccaactggctgaagatcgatcctgtgaatggccagattacc

SEQ ID NO: 67906 - RNA, 27 nt, synthetic construct
  misc_feature 1..27: note = DNA helicase MCM9 (298-306)
  source 1..27: mol_type = other RNA
gaccccttcgccggcagaaacgtgatc

SEQ ID NO: 67907 - RNA, 24 nt, synthetic construct
  misc_feature 1..24: note = Putative signal peptidase complex catalytic subunit SEC11B (62-69)
  source 1..24: mol_type = other RNA
gaccccatcagagtgggcgagatt

SEQ ID NO: 67908 - RNA, 30 nt, synthetic construct
  misc_feature 1..30: note = Maestro heat-like repeat-containing protein family member 6 (652-661)
  source 1..30: mol_type = other RNA
gaccccaagcctgccgtggctgcagccgcg

SEQ ID NO: 67909 - RNA, 27 nt, synthetic construct
  misc_feature 1..27: note = Prolyl 4-hydroxylase subunit alpha-2 (368-376)
  source 1..27: mol_type = other RNA
gaccccaagaccggcgtgctgacagtc

SEQ ID NO: 67910 - RNA, 24 nt, synthetic construct
  misc_feature 1..24: note = Sulfate transporter (642-649)
  source 1..24: mol_type = other RNA
gaccccctggagctccacaccatc

SEQ ID NO: 67911 - RNA, 24 nt, synthetic construct
  misc_feature 1..24: note = Signal recognition particle 9 kDa protein (21-28)
  source 1..24: mol_type = other RNA
gaccccatgaaggccagagtggtc

SEQ ID NO: 67912 - RNA, 27 nt, synthetic construct
  misc_feature 1..27: note = Titin (17217-17225)
  source 1..27: mol_type = other RNA
gacccccctggcaccccagagccgatc

SEQ ID NO: 67913 - RNA, 27 nt, synthetic construct
  misc_feature 1..27: note = Titin (16908-16916)
  source 1..27: mol_type = other RNA
gaccccagaagcctggccgtgcctatc

SEQ ID NO: 67914 - RNA, 27 nt, synthetic construct
  misc_feature 1..27: note = Dedicator of cytokinesis protein 7 (1087-1095)
  source 1..27: mol_type = other RNA
gaccccagatacagcgatcctcagatc

SEQ ID NO: 67915 - RNA, 30 nt, synthetic construct
  misc_feature 1..30: note = Integral membrane protein DGCR2/IDD (52-61)
  source 1..30: mol_type = other RNA
gaccccagccacttccatgccgtgaacgtc

SEQ ID NO: 67916 - RNA, 45 nt, synthetic construct
  misc_feature 1..45: note = Cadherin-2 (267-281)
  source 1..45: mol_type = other RNA
gaccccaccggcagattcgccatccagacagatcctaacagcaat

SEQ ID NO: 67917 - RNA, 48 nt, synthetic construct
  misc_feature 1..48: note = Cadherin-2 (267-282)
  source 1..48: mol_type = other RNA
gaccccaccggcagattcgccatccagacagatcctaacagcaatgac

SEQ ID NO: 67918 - RNA, 51 nt, synthetic construct
  misc_feature 1..51: note = Cadherin-2 (267-283)
  source 1..51: mol_type = other RNA
gaccccaccggcagattcgccatccagacagatcctaacagcaatgacggg

SEQ ID NO: 67919 - RNA, 27 nt, synthetic construct
  misc_feature 1..27: note = Zinc finger protein 469 (3286-3294)
  source 1..27: mol_type = other RNA
gacccctgggccggcggggagcctctg

SEQ ID NO: 67920 - RNA, 24 nt, synthetic construct
  misc_feature 1..24: note = Poly (ADP-ribose) polymerase 12 (148-155)
  source 1..24: mol_type = other RNA
gacccctggctgctccctgagatc

SEQ ID NO: 67921 - RNA, 78 nt, synthetic construct
  misc_feature 1..78: note = Protein S100-A6 (65-90)
  source 1..78: mol_type = other RNA
gaccaggaggtgaacttccaagaatacgtcacctttctgggcgccctcgctcttatctataatgaggcactgaagggg

SEQ ID NO: 67922 - RNA, 72 nt, synthetic construct
  misc_feature 1..72: note = CREB-binding protein (539-562)
  source 1..72: mol_type = other RNA
gaccagcaaccccctaacctgatcagcgagtccgccctcccaacctctcttggcgctacaaatccgctgatg

SEQ ID NO: 67923 - RNA, 21 nt, synthetic construct
  misc_feature 1..21: note = Paired amphipathic helix protein Sin3a (131-137)
  source 1..21: mol_type = other RNA
gaccaggtgaagctgcaattc

SEQ ID NO: 67924 - RNA, 21 nt, synthetic construct
  misc_feature 1..21: note = Cyclin-I (74-80)
  source 1..21: mol_type = other RNA
gacagattcctggccaccgtg

SEQ ID NO: 67925 - RNA, 24 nt, synthetic construct
  misc_feature 1..24: note = SUN domain-containing protein 2 (41-48)
  source 1..24: mol_type = other RNA
gacagaatcggcctggccgattac

SEQ ID NO: 67926 - RNA, 63 nt, synthetic construct
  misc_feature 1..63: note = Heterogeneous nuclear ribonucleoprotein U (184-204)
  source 1..63: mol_type = other RNA
gacagactgagcgcctcctctctcaccatggagtcattcgcttttctttgggcaggcgggagg

SEQ ID NO: 67927 - RNA, 45 nt, synthetic construct
  misc_feature 1..45: note = HLA class I histocompatibility antigen, A-23 alpha chain (351-365)
  source 1..45: mol_type = other RNA
gacagcgcccagggctccgatgtgtctctgaccgcttgcaaggtc

SEQ ID NO: 67928 - RNA, 33 nt, synthetic construct
  misc_feature 1..33: note = HLA class I histocompatibility antigen, alpha chain E (338-348)
  source 1..33: mol_type = other RNA
gacagcgcccagggctccgagtctcactcactg

SEQ ID NO: 67929 - RNA, 33 nt, synthetic construct
  misc_feature 1..33: note = DNA-directed RNA polymerase I subunit RPA1 (1009-1019)
  source 1..33: mol_type = other RNA
gacagcgatggctccgtggtccagttcctgtac

SEQ ID NO: 67930 - RNA, 33 nt, synthetic construct
  misc_feature 1..33: note = ATP-dependent RNA helicase DHX29 (1132-1142)
  source 1..33: mol_type = other RNA
gacagcgatcacctgaccatctacaacgcctat

SEQ ID NO: 67931 - RNA, 27 nt, synthetic construct
  misc_feature 1..27: note = Sorbin and SH3 domain-containing protein 1 (255-263)
  source 1..27: mol_type = other RNA
gacagcgatctgtactcccccagatat

SEQ ID NO: 67932 - RNA, 30 nt, synthetic construct
  misc_feature 1..30: note = Tyrosinase (454-463)
  source 1..30: mol_type = other RNA
gacagcgatcccgactccttccaggattac

SEQ ID NO: 67933 - RNA, 21 nt, synthetic construct
  misc_feature 1..21: note = Cullin-4B (365-371)
  source 1..21: mol_type = other RNA
gacagcttcgagcagagattt

SEQ ID NO: 67934 - RNA, 48 nt, synthetic construct
  misc_feature 1..48: note = Alpha-endosulfine (66-81)
  source 1..48: mol_type = other RNA
gacagcggcgattacaacatggccaaggctaaaatgaagaataaacag

SEQ ID NO: 67935 - RNA, 30 nt, synthetic construct
  misc_feature 1..30: note = Ral GTPase-activating protein subunit alpha-1 (921-930)
  source 1..30: mol_type = other RNA
gacagccactccgattctttctcagccttt

SEQ ID NO: 67936 - RNA, 42 nt, synthetic construct
  misc_feature 1..42: note = Acylamino-acid-releasing enzyme (442-455)
  source 1..42: mol_type = other RNA
gacagcatcctgtccctccccggcaacgtggggcaccaggat

SEQ ID NO: 67937 - RNA, 39 nt, synthetic construct
  misc_feature 1..39: note = Endoplasmin (205-217)
  source 1..39: mol_type = other RNA
gacagcaacgagttctccgtgatcgccgatcccagaggc

SEQ ID NO: 67938 - RNA, 42 nt, synthetic construct
  misc_feature 1..42: note = Endoplasmin (205-218)
  source 1..42: mol_type = other RNA
gacagcaacgagttctccgtgatcgccgatcccagaggcaat

SEQ ID NO: 67939 - RNA, 45 nt, synthetic construct
  misc_feature 1..45: note = Endoplasmin (205-219)
  source 1..45: mol_type = other RNA
gacagcaacgagttctccgtgatcgccgatcccagaggcaatacc

SEQ ID NO: 67940 - RNA, 48 nt, synthetic construct
  misc_feature 1..48: note = Endoplasmin (205-220)
  source 1..48: mol_type = other RNA
gacagcaacgagttctccgtgatcgccgatcccagaggcaataccctg

SEQ ID NO: 67941 - RNA, 51 nt, synthetic construct
  misc_feature 1..51: note = Endoplasmin (205-221)
  source 1..51: mol_type = other RNA
gacagcaacgagttctccgtgatcgccgatcccagaggcaataccctgggg

SEQ ID NO: 67942 - RNA, 24 nt, synthetic construct
  misc_feature 1..24: note = Serine/threonine-protein phosphatase 2A 65 kDa regulatory subunit A beta isoform isoform e (103-110)
  source 1..24: mol_type = other RNA
gacagcgtgagactgctcgccgtc

SEQ ID NO: 67943 - RNA, 30 nt, synthetic construct
  misc_feature 1..30: note = Calpain-3 (40-49)
  source 1..30: mol_type = other RNA
gacaccgatggcagcgggaagctgaacctc

SEQ ID NO: 67944 - RNA, 57 nt, synthetic construct
  misc_feature 1..57: note = Beta-secretase 2 (110-128)
  source 1..57: mol_type = other RNA
gacaccggcagctccaacttcgccgtggctgggacaccccactcttacatcgatact

SEQ ID NO: 67945 - RNA, 33 nt, synthetic construct
  misc_feature 1..33: note = Fibronectin isoform 6 (1261-1271)
  source 1..33: mol_type = other RNA
gacaccatcattcccgccgtgcctccaccgaca

SEQ ID NO: 67946 - RNA, 36 nt, synthetic construct
  misc_feature 1..36: note = IST1 homolog (333-344)
  source 1..36: mol_type = other RNA
gacaccctgcccacagccagcgctggcgcatccact

SEQ ID NO: 67947 - RNA, 27 nt, synthetic construct
  misc_feature 1..27: note = Pre-mRNA-processing-splicing factor 8 (1782-1790)
  source 1..27: mol_type = other RNA
gacaccaacgtgtacagagtcacaatc

SEQ ID NO: 67948 - RNA, 48 nt, synthetic construct
  misc_feature 1..48: note = Glutamate receptor ionotropic, kainate 2 (79-94)
  source 1..48: mol_type = other RNA
gacacccagaagatcaacctgtacgatagcttcgaggcctccaaaaag

SEQ ID NO: 67949 - RNA, 21 nt, synthetic construct
  misc_feature 1..21: note = Zinc finger MYM-type protein 2 (612-618)
  source 1..21: mol_type = other RNA
gacacctggagaacagagtac

SEQ ID NO: 67950 - RNA, 27 nt, synthetic construct
  misc_feature 1..27: note = V-type proton ATPase subunit S1 (142-150)
  source 1..27: mol_type = other RNA
gacgtggccgtcgttgctggcgggctg

SEQ ID NO: 67951 - RNA, 27 nt, synthetic construct
  misc_feature 1..27: note = Coatomer subunit epsilon (49-57)
  source 1..27: mol_type = other RNA
gacgtggagagagatgtcttcctgtac

SEQ ID NO: 67952 - RNA, 24 nt, synthetic construct
  misc_feature 1..24: note = Endothelial differentiation-related factor 1 (37-44)
  source 1..24: mol_type = other RNA
gacgtggagaccagcaagaaatgg

SEQ ID NO: 67953 - RNA, 30 nt, synthetic construct
  misc_feature 1..30: note = Inhibitor of nuclear factor kappa-B kinase subunit alpha (123-132)
  source 1..30: mol_type = other RNA
gacgtgggcgggaagatcattcacaaaata

SEQ ID NO: 67954 - RNA, 36 nt, synthetic construct
  misc_feature 1..36: note = Gamma-secretase C-terminal fragment 59 (584-595)
  source 1..36: mol_type = other RNA
gacgtgggcagcaacaagggggccatcattggactg

SEQ ID NO: 67955 - RNA, 54 nt, synthetic construct
  misc_feature 1..54: note = Gamma-secretase C-terminal fragment 59 (584-601)
  source 1..54: mol_type = other RNA
gacgtgggcagcaacaagggggccatcattggactgatggtcggtggcgttgtg

SEQ ID NO: 67956 - RNA, 21 nt, synthetic construct
  misc_feature 1..21: note = 40S ribosomal protein S13 (21-27)
  source 1..21: mol_type = other RNA
gacgtgaaggagcagatctac

SEQ ID NO: 67957 - RNA, 48 nt, synthetic construct
  misc_feature 1..48: note = Laminin subunit alpha-4 (1287-1302)
  source 1..48: mol_type = other RNA
gacgtgaagggcatcaaagtccagagcgttgataagcaatacaacgac

SEQ ID NO: 67958 - RNA, 51 nt, synthetic construct
  misc_feature 1..51: note = Laminin subunit alpha-4 (1287-1303)
  source 1..51: mol_type = other RNA
gacgtgaagggcatcaaagtccagagcgttgataagcaatacaacgacggg

SEQ ID NO: 67959 - RNA, 24 nt, synthetic construct
  misc_feature 1..24: note = N6-adenosine-methyltransferase 70 kDa subunit (382-389)
  source 1..24: mol_type = other RNA
gacgtgagcatcctgggcaagttc

SEQ ID NO: 67960 - RNA, 27 nt, synthetic construct
  misc_feature 1..27: note = HLA class I histocompatibility antigen, A-23 alpha chain (357-365)
  source 1..27: mol_type = other RNA
gacgtgagcctgaccgcctgcaaggtc

SEQ ID NO: 67961 - RNA, 36 nt, synthetic construct
  misc_feature 1..36: note = Ubiquitin carboxyl-terminal hydrolase 36 (576-587)
  source 1..36: mol_type = other RNA
gacgtggtcctgagcacctcccccaagctccttgcc

SEQ ID NO: 67962 - RNA, 18 nt, synthetic construct
  misc_feature 1..18: note = U5 small nuclear ribonucleoprotein 200 kDa helicase (1392-1397)
  source 1..18: mol_type = other RNA
gactggtacgagaagttc

SEQ ID NO: 67963 - RNA, 27 nt, synthetic construct
  misc_feature 1..27: note = Growth arrest-specific protein 7 (285-293)
  source 1..27: mol_type = other RNA
gactacgccaagaacctggctaaactc

SEQ ID NO: 67964 - RNA, 27 nt, synthetic construct
  misc_feature 1..27: note = ER membrane protein complex subunit 1 (634-642)
  source 1..27: mol_type = other RNA
gactacgccaaggtgctgctccttatc

SEQ ID NO: 67965 - RNA, 27 nt, synthetic construct
  misc_feature 1..27: note = Multidrug resistance-associated protein 5 (776-784)
  source 1..27: mol_type = other RNA
gactacgccaccatcttcaacaatctg

SEQ ID NO: 67966 - RNA, 27 nt, synthetic construct
  misc_feature 1..27: note = Protein Niban (485-493)
  source 1..27: mol_type = other RNA
gactacgatagctccaccatcagaaag

SEQ ID NO: 67967 - RNA, 21 nt, synthetic construct
  misc_feature 1..21: note = Plastin-3 (34-40)
  source 1..21: mol_type = other RNA
gactacgagctgcacgaactc

SEQ ID NO: 67968 - RNA, 27 nt, synthetic construct
  misc_feature 1..27: note = 14-3-3 protein epsilon (127-135)
  source 1..27: mol_type = other RNA
gactaccacagatatctggccgagttc

SEQ ID NO: 67969 - RNA, 27 nt, synthetic construct
  misc_feature 1..27: note = Cyclic AMP-dependent transcription factor ATF-4 (36-44)
  source 1..27: mol_type = other RNA
gactacctggaggtggccaagcacttc

SEQ ID NO: 67970 - RNA, 27 nt, synthetic construct
  misc_feature 1..27: note = Lysosomal-trafficking regulator (2228-2236)
  source 1..27: mol_type = other RNA
gactacctgaagggcctcgccagcttc

SEQ ID NO: 67971 - RNA, 27 nt, synthetic construct
  misc_feature 1..27: note = Importin-7 (93-101)
  source 1..27: mol_type = other RNA
gactaccccagcagatggaccgccatc

SEQ ID NO: 67972 - RNA, 27 nt, synthetic construct
  misc_feature 1..27: note = L-dopachrome tautomerase (155-163)
  source 1..27: mol_type = other RNA
gactacgtgatcaccacacagcactgg

SEQ ID NO: 67973 - RNA, 27 nt, synthetic construct
  misc_feature 1..27: note = Down syndrome critical region protein 3 (203-211)
  source 1..27: mol_type = other RNA
gaggccgctatcagaagcgtggaactg

SEQ ID NO: 67974 - RNA, 30 nt, synthetic construct
  misc_feature 1..30: note = V-set and immunoglobulin domain-containing protein 10-like (447-456)
  source 1..30: mol_type = other RNA
gaggccgctgtgcccgcaggcagcagactg

SEQ ID NO: 67975 - RNA, 24 nt, synthetic construct
  misc_feature 1..24: note = Laminin subunit gamma-1 (1193-1200)
  source 1..24: mol_type = other RNA
gaggccgacgatatcgtgagagtc

SEQ ID NO: 67976 - RNA, 24 nt, synthetic construct
  misc_feature 1..24: note = Poly (ADP-ribose) polymerase 1 (810-817)
  source 1..24: mol_type = other RNA
gaggccgaaatcattagaaagtac

SEQ ID NO: 67977 - RNA, 30 nt, synthetic construct
  misc_feature 1..30: note = Poly (ADP-ribose) polymerase 14 (805-814)
  source 1..30: mol_type = other RNA
gaggccttcgctgaagcagtgaagaccgtc

SEQ ID NO: 67978 - RNA, 24 nt, synthetic construct
  misc_feature 1..24: note = Alpha-mannosidase 2x (749-756)
  source 1..24: mol_type = other RNA
gaggccttccccctgagagtgatc

SEQ ID NO: 67979 - RNA, 36 nt, synthetic construct
  misc_feature 1..36: note = Coronin-6 (123-134)
  source 1..36: mol_type = other RNA
gaggccggcgggggaggtgctttcatcgtgctgccc

SEQ ID NO: 67980 - RNA, 24 nt, synthetic construct
  misc_feature 1..24: note = Leucine-tRNA ligase, cytoplasmic (462-469)
  source 1..24: mol_type = other RNA
gaggccaaggaaaaaatctacctg

SEQ ID NO: 67981 - RNA, 27 nt, synthetic construct
  misc_feature 1..27: note = Guanine nucleotide-binding protein G(s) subunit alpha isoforms short (258-266)
  source 1..27: mol_type = other RNA
gaggccctgaacctcttcaagagcatc

SEQ ID NO: 67982 - RNA, 27 nt, synthetic construct
  misc_feature 1..27: note = 60 kDa heat shock protein, mitochondrial (165-173)
  source 1..27: mol_type = other RNA
gaggccctgagcaccctcgtgcttaac

SEQ ID NO: 67983 - RNA, 24 nt, synthetic construct
  misc_feature 1..24: note = Sulfhydryl oxidase 1 (224-231)
  source 1..24: mol_type = other RNA
gaggccaacgtggtcagaaagttc

SEQ ID NO: 67984 - RNA, 30 nt, synthetic construct
  misc_feature 1..30: note = General transcription factor IIF subunit 1 (356-365)
  source 1..30: mol_type = other RNA
gaggccagctccgctctgttcatggcaaag

SEQ ID NO: 67985 - RNA, 27 nt, synthetic construct
  misc_feature 1..27: note = Spectrin beta chain, non-erythrocytic 2 (1585-1593)
  source 1..27: mol_type = other RNA
gaggacgccctgagagctcagcaattc

SEQ ID NO: 67986 - RNA, 24 nt, synthetic construct
  misc_feature 1..24: note = Tyrosine-protein kinase BAZ1B (275-282)
  source 1..24: mol_type = other RNA
gaggacgaactggtgaagaaatac

SEQ ID NO: 67987 - RNA, 27 nt, synthetic construct
  misc_feature 1..27: note = ATP-dependent RNA helicase DDX50 (3-11)
  source 1..27: mol_type = other RNA
gaggacaacccccagaccctgctcttc

SEQ ID NO: 67988 - RNA, 27 nt, synthetic construct
  misc_feature 1..27: note = Kinesin-like protein KIF13B (775-783)
  source 1..27: mol_type = other RNA
gaggacaaccccgtgatcagaagctac

SEQ ID NO: 67989 - RNA, 24 nt, synthetic construct
  misc_feature 1..24: note = F-box only protein 32 (101-108)
  source 1..24: mol_type = other RNA
gaggaccagcaaaacatcagactg

SEQ ID NO: 67990 - RNA, 27 nt, synthetic construct
  misc_feature 1..27: note = Peptidyl-prolyl cis-trans isomerase FKBP9 (198-206)
  source 1..27: mol_type = other RNA
gaggaccaggtgcaaatccacacctac

SEQ ID NO: 67991 - RNA, 24 nt, synthetic construct
  misc_feature 1..24: note = Eukaryotic translation initiation factor 3 subunit A (755-762)
  source 1..24: mol_type = other RNA
gaggacagagatctgttcgtgatg

SEQ ID NO: 67992 - RNA, 27 nt, synthetic construct
  misc_feature 1..27: note = Cullin-4B (405-413)
  source 1..27: mol_type = other RNA
gaggaagccgacagactgatcacctac

SEQ ID NO: 67993 - RNA, 30 nt, synthetic construct
  misc_feature 1..30: note = Proteasome activator complex subunit 3 (93-102)
  source 1..30: mol_type = other RNA
gaggaagccttccagggcaccaaggtgttt

SEQ ID NO: 67994 - RNA, 30 nt, synthetic construct
  misc_feature 1..30: note = Heterogeneous nuclear ribonucleoprotein U (540-549)
  source 1..30: mol_type = other RNA
gaggaagcccagaagctgctcgagcaatac

SEQ ID NO: 67995 - RNA, 30 nt, synthetic construct
  misc_feature 1..30: note = Staphylococcal nuclease domain-containing protein 1 (554-563)
  source 1..30: mol_type = other RNA
gaggaagccaccctgttcacaaaggagctc

SEQ ID NO: 67996 - RNA, 27 nt, synthetic construct
  misc_feature 1..27: note = Tribbles homolog 2 (149-157)
  source 1..27: mol_type = other RNA
gaggaagaggccgctagactgttctac

SEQ ID NO: 67997 - RNA, 30 nt, synthetic construct
  misc_feature 1..30: note = Cullin-4B (404-413)
  source 1..30: mol_type = other RNA
gaggaagaggccgacagactgatcacctac

SEQ ID NO: 67998 - RNA, 27 nt, synthetic construct
  misc_feature 1..27: note = Negative elongation factor E (11-19)
  source 1..27: mol_type = other RNA
gaggaagaggccctgcagaagaaattc

SEQ ID NO: 67999 - RNA, 30 nt, synthetic construct
  misc_feature 1..30: note = Synemin (68-77)
  source 1..30: mol_type = other RNA
gaggaagaggaaaacgacggccactggttc

SEQ ID NO: 68000 - RNA, 33 nt, synthetic construct
  misc_feature 1..33: note = Nestin (503-513)
  source 1..33: mol_type = other RNA
gaggaagagggcagcgccctgaagacctcctgg

SEQ ID NO: 68001 - RNA, 30 nt, synthetic construct
  misc_feature 1..30: note = Angiomotin-like protein 1 (596-605)
  source 1..30: mol_type = other RNA
gaggaagagctgagagaaaagcaggcctac

SEQ ID NO: 68002 - RNA, 30 nt, synthetic construct
  misc_feature 1..30: note = Nestin (316-325)
  source 1..30: mol_type = other RNA
gaggaagagaacctgggcaagggggaatac

SEQ ID NO: 68003 - RNA, 27 nt, synthetic construct
  misc_feature 1..27: note = SHC-transforming protein 1 (341-349)
  source 1..27: mol_type = other RNA
gaggaagagccccctgaccaccagtac

SEQ ID NO: 68004 - RNA, 30 nt, synthetic construct
  misc_feature 1..30: note = Synemin (856-865)
  source 1..30: mol_type = other RNA
gaggaagagagcaccatcagatactcctgg

SEQ ID NO: 68005 - RNA, 27 nt, synthetic construct
  misc_feature 1..27: note = (1052-1060)
  source 1..27: mol_type = other RNA
gaggaattcgagaccctgaaggaattt

SEQ ID NO: 68006 - RNA, 39 nt, synthetic construct
  misc_feature 1..39: note = HLA class II histocompatibility antigen, DR alpha chain (41-53)
  source 1..39: mol_type = other RNA
gaggaattcggcagatttgccagcttcgaggctcagggg

SEQ ID NO: 68007 - RNA, 21 nt, synthetic construct
  misc_feature 1..21: note = cAMP-dependent protein kinase type I-beta regulatory subunit (247-253)
  source 1..21: mol_type = other RNA
gaggaattcctgagcaaggtg

SEQ ID NO: 68008 - RNA, 27 nt, synthetic construct
  misc_feature 1..27: note = Erlin-2 (50-58)
  source 1..27: mol_type = other RNA
gaggaaggccacatcggggtgtactat

SEQ ID NO: 68009 - RNA, 27 nt, synthetic construct
  misc_feature 1..27: note = STAM-binding protein (50-58)
  source 1..27: mol_type = other RNA
gaggaaggcaacatcgagcacgccttc

SEQ ID NO: 68010 - RNA, 27 nt, synthetic construct
  misc_feature 1..27: note = Rho guanine nucleotide exchange factor 11 (801-809)
  source 1..27: mol_type = other RNA
gaggaaggccccatcattaaggagata

SEQ ID NO: 68011 - RNA, 30 nt, synthetic construct
  misc_feature 1..30: note = Nestin (504-513)
  source 1..30: mol_type = other RNA
gaggaaggcagcgccctgaagacctcctgg

SEQ ID NO: 68012 - RNA, 24 nt, synthetic construct
  misc_feature 1..24: note = Cytochrome c oxidase subunit 6A1, mitochondrial (8-15)
  source 1..24: mol_type = other RNA
gaggaaggcagcgccagaatgtgg

SEQ ID NO: 68013 - RNA, 27 nt, synthetic construct
  misc_feature 1..27: note = Phosphopantothenate-cysteine ligase (283-291)
  source 1..27: mol_type = other RNA
gaggaaatcgagaagggcgtggaaatt

SEQ ID NO: 68014 - RNA, 30 nt, synthetic construct
  misc_feature 1..30: note = A-kinase anchor protein 9 (822-831)
  source 1..30: mol_type = other RNA
gaggaaatcgagaagcagagaaacaccttc

SEQ ID NO: 68015 - RNA, 30 nt, synthetic construct
  misc_feature 1..30: note = Vimentin (240-249)
  source 1..30: mol_type = other RNA
gaggaaatccaggagctgcaagcccagatt

SEQ ID NO: 68016 - RNA, 27 nt, synthetic construct
  misc_feature 1..27: note = Zinc finger E-box-binding homeobox 2 (457-465)
  source 1..27: mol_type = other RNA
gaggaaatcagcaagctgaaaggctac

SEQ ID NO: 68017 - RNA, 27 nt, synthetic construct
  misc_feature 1..27: note = Nuclear pore complex protein Nup205 (77-85)
  source 1..27: mol_type = other RNA
gaggaaatcagcaccgtgctgcagtac

SEQ ID NO: 68018 - RNA, 27 nt, synthetic construct
  misc_feature 1..27: note = Cadherin-2 (138-146)
  source 1..27: mol_type = other RNA
gaggaaatcgtgttccccagacagttt

SEQ ID NO: 68019 - RNA, 27 nt, synthetic construct
  misc_feature 1..27: note = Leucine zipper putative tumor suppressor 1 (511-519)
  source 1..27: mol_type = other RNA
gaggaaaaggagaaagtgatccagtac

SEQ ID NO: 68020 - RNA, 33 nt, synthetic construct
  misc_feature 1..33: note = Intraflagellar transport protein 81 homolog (450-460)
  source 1..33: mol_type = other RNA
gaggaaaagaaaggcatcagcgggtactcctat

SEQ ID NO: 68021 - RNA, 27 nt, synthetic construct
  misc_feature 1..27: note = FERM domain-containing protein 5 (259-267)
  source 1..27: mol_type = other RNA
gaggaaaagaaaatcattctgacctac

SEQ ID NO: 68022 - RNA, 27 nt, synthetic construct
  misc_feature 1..27: note = Receptor-type tyrosine-protein phosphatase zeta (1495-1503)
  source 1..27: mol_type = other RNA
gaggaaaagctgatcattcaggacttc

SEQ ID NO: 68023 - RNA, 33 nt, synthetic construct
  misc_feature 1..33: note = Cyclic AMP-responsive element-binding protein 3-like protein 2 (268-278)
  source 1..33: mol_type = other RNA
gaggaaaagagaaccctgatcgccgagggctac

SEQ ID NO: 68024 - RNA, 33 nt, synthetic construct
  misc_feature 1..33: note = Nestin (176-186)
  source 1..33: mol_type = other RNA
gaggaactggccagaaggctcggcgaggcttgg

SEQ ID NO: 68025 - RNA, 42 nt, synthetic construct
  misc_feature 1..42: note = L-dopachrome tautomerase (49-62)
  source 1..42: mol_type = other RNA
gaggaactgttcctcaccagcgaccagcttggctactcctat

SEQ ID NO: 68026 - RNA, 36 nt, synthetic construct
  misc_feature 1..36: note = Glia-derived nexin (40-51)
  source 1..36: mol_type = other RNA
gaggaactgggcagcaacaccgggatccaggtgttc

SEQ ID NO: 68027 - RNA, 30 nt, synthetic construct
  misc_feature 1..30: note = Myotubularin-related protein 6 (290-299)
  source 1..30: mol_type = other RNA
gaggaactgaagctcaaagagaagacctac

SEQ ID NO: 68028 - RNA, 27 nt, synthetic construct
  misc_feature 1..27: note = HEAT repeat-containing protein 1 (773-781)
  source 1..27: mol_type = other RNA
gaggaactgaacagcacccagagagtg

SEQ ID NO: 68029 - RNA, 24 nt, synthetic construct
  misc_feature 1..24: note = E3 ubiquitin-protein ligase RNF213 (1762-1769)
  source 1..24: mol_type = other RNA
gaggaactgcccctcatgcttctg

SEQ ID NO: 68030 - RNA, 30 nt, synthetic construct
  misc_feature 1..30: note = Protein KRI1 homolog (27-36)
  source 1..30: mol_type = other RNA
gaggaactgcagagactcaaggacaggtac

SEQ ID NO: 68031 - RNA, 27 nt, synthetic construct
  misc_feature 1..27: note = Angiomotin-like protein 1 (597-605)
  source 1..27: mol_type = other RNA
gaggaactgagagagaagcaggcctac

SEQ ID NO: 68032 - RNA, 30 nt, synthetic construct
  misc_feature 1..30: note = Serpin H1 (373-382)
  source 1..30: mol_type = other RNA
gaggaactgagaagccccaagctcttctac

SEQ ID NO: 68033 - RNA, 30 nt, synthetic construct
  misc_feature 1..30: note = Vimentin (374-383)
  source 1..30: mol_type = other RNA
gaggaaatggccagacacctgagggagtac

SEQ ID NO: 68034 - RNA, 30 nt, synthetic construct
  misc_feature 1..30: note = RANBP2-like and GRIP domain-containing protein 1 (1180-1189)
  source 1..30: mol_type = other RNA
gaggaaatgaagagcggcctgaaagacttc

SEQ ID NO: 68035 - RNA, 30 nt, synthetic construct
  misc_feature 1..30: note = Non-POU domain-containing octamer-binding protein (88-97)
  source 1..30: mol_type = other RNA
gaggaaatgagaaagctgttcgagaaatac

SEQ ID NO: 68036 - RNA, 27 nt, synthetic construct
  misc_feature 1..27: note = NudC domain-containing protein 3 (165-173)
  source 1..27: mol_type = other RNA
gaggaaaacggcgagagagtgctgatg

SEQ ID NO: 68037 - RNA, 30 nt, synthetic construct
  misc_feature 1..30: note = cGMP-inhibited 3',5'-cyclic phosphodiesterase B (605-614)
  source 1..30: mol_type = other RNA
gaggaaaacatcttcagcaaggagtccttt

SEQ ID NO: 68038 - RNA, 33 nt, synthetic construct
  misc_feature 1..33: note = Pituitary tumor-transforming gene 1 protein-interacting protein (169-179)
  source 1..33: mol_type = other RNA
gaggaaaacccctacgccagattcgagaataac

SEQ ID NO: 68039 - RNA, 30 nt, synthetic construct
  misc_feature 1..30: note = Nestin (283-292)
  source 1..30: mol_type = other RNA
gaggaaaaccaggagagcctgagatccctc

SEQ ID NO: 68040 - RNA, 27 nt, synthetic construct
  misc_feature 1..27: note = Tropomodulin-2 (273-281)
  source 1..27: mol_type = other RNA
gaggaaaacagcagaatcctgaagttc

SEQ ID NO: 68041 - RNA, 30 nt, synthetic construct
  misc_feature 1..30: note = Syndecan-3 (422-431)
  source 1..30: mol_type = other RNA
gaggaacccaagcaggccagcgtgacctac

SEQ ID NO: 68042 - RNA, 27 nt, synthetic construct
  misc_feature 1..27: note = Lymphoid enhancer-binding factor 1 (247-255)
  source 1..27: mol_type = other RNA
gaggaacaggccaagtactatgagctg

SEQ ID NO: 68043 - RNA, 27 nt, synthetic construct
  misc_feature 1..27: note = Receptor-type tyrosine-protein phosphatase gamma (1261-1269)
  source 1..27: mol_type = other RNA
gaggaacagatcattatacacgacttc

SEQ ID NO: 68044 - RNA, 27 nt, synthetic construct
  misc_feature 1..27: note = Eukaryotic translation initiation factor 4 gamma 2 (197-205)
  source 1..27: mol_type = other RNA
gaggaacagagagccatcgctaagatt

SEQ ID NO: 68045 - RNA, 30 nt, synthetic construct
  misc_feature 1..30: note = General receptor for phosphoinositides 1-associated scaffold protein (125-134)
  source 1..30: mol_type = other RNA
gaggaacagagagtggagatggtcaccttc

SEQ ID NO: 68046 - RNA, 30 nt, synthetic construct
  misc_feature 1..30: note = 14-3-3 protein beta/alpha (41-50)
  source 1..30: mol_type = other RNA
gaggaaagaaacctgctcagcgtggcctac

SEQ ID NO: 68047 - RNA, 27 nt, synthetic construct
  misc_feature 1..27: note = Unconventional myosin-Va (255-263)
  source 1..27: mol_type = other RNA
gaggaaagaaactaccacatcttctat

SEQ ID NO: 68048 - RNA, 27 nt, synthetic construct
  misc_feature 1..27: note = Protein RTF2 homolog (273-281)
  source 1..27: mol_type = other RNA
gaggaaagcgaggcctacaagtccctg

SEQ ID NO: 68049 - RNA, 30 nt, synthetic construct
  misc_feature 1..30: note = Protein RTF2 homolog (273-282)
  source 1..30: mol_type = other RNA
gaggaaagcgaggcctacaagtccctgttc

SEQ ID NO: 68050 - RNA, 30 nt, synthetic construct
  misc_feature 1..30: note = Rho-associated protein kinase 2 (440-449)
  source 1..30: mol_type = other RNA
gaggaaagccaggagatccaaaagaaactg

SEQ ID NO: 68051 - RNA, 33 nt, synthetic construct
  misc_feature 1..33: note = Rho-associated protein kinase 2 (440-450)
  source 1..33: mol_type = other RNA
gaggaaagccaggagatccaaaagaaactgtac

SEQ ID NO: 68052 - RNA, 27 nt, synthetic construct
  misc_feature 1..27: note = Spectrin beta chain, non-erythrocytic 1 (635-643)
  source 1..27: mol_type = other RNA
gaggaaagcagaaggctgtggaagttc

SEQ ID NO: 68053 - RNA, 27 nt, synthetic construct
  misc_feature 1..27: note = Synemin (857-865)
  source 1..27: mol_type = other RNA
gaggaaagcaccatcagatactcctgg

SEQ ID NO: 68054 - RNA, 30 nt, synthetic construct
  misc_feature 1..30: note = Caldesmon (163-172)
  source 1..30: mol_type = other RNA
gaggaaaccgagacagtgactaagagctac

SEQ ID NO: 68055 - RNA, 27 nt, synthetic construct
  misc_feature 1..27: note = Putative segment polarity protein dishevelled homolog DVL1P1 (13-21)
  source 1..27: mol_type = other RNA
gaggaaaccccctacctggtgaagctc

SEQ ID NO: 68056 - RNA, 27 nt, synthetic construct
  misc_feature 1..27: note = Trinucleotide repeat-containing gene 18 protein (2863-2871)
  source 1..27: mol_type = other RNA
gaggaaaccagccccggcaagcagttc

SEQ ID NO: 68057 - RNA, 24 nt, synthetic construct
  misc_feature 1..24: note = Dedicator of cytokinesis protein 10 (2044-2051)
  source 1..24: mol_type = other RNA
gaggaagtggacatgatcagactg

SEQ ID NO: 68058 - RNA, 30 nt, synthetic construct
  misc_feature 1..30: note = ATR-interacting protein (133-142)
  source 1..30: mol_type = other RNA
gaggaagtgctgatcaagaacggcgagatt

SEQ ID NO: 68059 - RNA, 27 nt, synthetic construct
  misc_feature 1..27: note = V-type proton ATPase subunit B, kidney isoform (273-281)
  source 1..27: mol_type = other RNA
gaggaagtgcccggcagaagggggttc

SEQ ID NO: 68060 - RNA, 24 nt, synthetic construct
  misc_feature 1..24: note = Protein ITFG3 (235-242)
  source 1..24: mol_type = other RNA
gaggaagtgagcggccacctgtac

SEQ ID NO: 68061 - RNA, 27 nt, synthetic construct
  misc_feature 1..27: note = Tyrosinase (280-288)
  source 1..27: mol_type = other RNA
gaggaatacaacagccaccagtccctg

SEQ ID NO: 68062 - RNA, 30 nt, synthetic construct
  misc_feature 1..30: note = Hom s 1 (51-60)
  source 1..30: mol_type = other RNA
gaggaatacagaggcttcacccaggacttt

SEQ ID NO: 68063 - RNA, 36 nt, synthetic construct
  misc_feature 1..36: note = Moesin (17-28)
  source 1..36: mol_type = other RNA
gagttcgccatccagcccaacaccacaggcaagcaa

SEQ ID NO: 68064 - RNA, 39 nt, synthetic construct
  misc_feature 1..39: note = Moesin (17-29)
  source 1..39: mol_type = other RNA
gagttcgccatccagcccaacaccacaggcaagcaactg

SEQ ID NO: 68065 - RNA, 30 nt, synthetic construct
  misc_feature 1..30: note = Lamin-B receptor (208-217)
  source 1..30: mol_type = other RNA
gagttcggcggggtgcccggagtctttctg

SEQ ID NO: 68066 - RNA, 27 nt, synthetic construct
  misc_feature 1..27: note = Nuclear factor erythroid 2-related factor 1 (312-320)
  source 1..27: mol_type = other RNA
gagttcaacgaactgctcagcaagtac

SEQ ID NO: 68067 - RNA, 30 nt, synthetic construct
  misc_feature 1..30: note = Maltase-glucoamylase (594-603)
  source 1..30: mol_type = other RNA
gagttcaacctgtttggcatccccatggtg

SEQ ID NO: 68068 - RNA, 27 nt, synthetic construct
  misc_feature 1..27: note = Signal peptidase complex subunit 2 (188-196)
  source 1..27: mol_type = other RNA
gagttcaccaagagcatcgccaaattt

SEQ ID NO: 68069 - RNA, 24 nt, synthetic construct
  misc_feature 1..24: note = Inositol 1,4,5-trisphosphate receptor type 3 (835-842)
  source 1..24: mol_type = other RNA
gagttcgtggaagactacctgaac

SEQ ID NO: 68070 - RNA, 21 nt, synthetic construct
  misc_feature 1..21: note = Melanoma-associated antigen D1 (610-616)
  source 1..21: mol_type = other RNA
gagttcgtgaagcagaaatac

SEQ ID NO: 68071 - RNA, 27 nt, synthetic construct
  misc_feature 1..27: note = Vimentin (405-413)
  source 1..27: mol_type = other RNA
gagggcgaagagagcagaatctccctg

SEQ ID NO: 68072 - RNA, 36 nt, synthetic construct
  misc_feature 1..36: note = Disintegrin and metalloproteinase domain-containing protein 10 (17-28)
  source 1..36: mol_type = other RNA
gagggcttcatccagaccagagggggaacattttac

SEQ ID NO: 68073 - RNA, 24 nt, synthetic construct
  misc_feature 1..24: note = Coiled-coil-helix-coiled-coil-helix domain-containing protein 2 (135-142)
  source 1..24: mol_type = other RNA
gagggcttcaacgaagtgctgaag

SEQ ID NO: 68074 - RNA, 21 nt, synthetic construct
  misc_feature 1..21: note = Dual specificity protein phosphatase 6 (133-139)
  source 1..21: mol_type = other RNA
gagggcgggttcagcaagttt

SEQ ID NO: 68075 - RNA, 27 nt, synthetic construct
  misc_feature 1..27: note = Heat shock protein beta-8 (131-139)
  source 1..27: mol_type = other RNA
gagggcgggatcgtgagcaagaacttc

SEQ ID NO: 68076 - RNA, 27 nt, synthetic construct
  misc_feature 1..27: note = Chondroitin sulfate proteoglycan 4 (257-265)
  source 1..27: mol_type = other RNA
gagggccacctgagagccgtggtcgaa

SEQ ID NO: 68077 - RNA, 24 nt, synthetic construct
  misc_feature 1..24: note = Zinc finger protein 106 (925-932)
  source 1..24: mol_type = other RNA
gagggccacagcaagaccatcctg

SEQ ID NO: 68078 - RNA, 21 nt, synthetic construct
  misc_feature 1..21: note = Activator of 90 kDa heat shock protein ATPase homolog 1 (249-255)
  source 1..21: mol_type = other RNA
gagggcatcaagcagaccttc

SEQ ID NO: 68079 - RNA, 21 nt, synthetic construct
  misc_feature 1..21: note = Kremen protein 2 (107-113)
  source 1..21: mol_type = other RNA
gagggcatctactggagatat

SEQ ID NO: 68080 - RNA, 27 nt, synthetic construct
  misc_feature 1..27: note = Secretory phospholipase A2 receptor (1283-1291)
  source 1..27: mol_type = other RNA
gagggcagcaacctgctcaccatcaag

SEQ ID NO: 68081 - RNA, 18 nt, synthetic construct
  misc_feature 1..18: note = Leucine-tRNA ligase, cytoplasmic (177-182)
  source 1..18: mol_type = other RNA
gagcacatctggaccctg

SEQ ID NO: 68082 - RNA, 30 nt, synthetic construct
  misc_feature 1..30: note = Protein DBF4 homolog A (541-550)
  source 1..30: mol_type = other RNA
gagcacctgaccgtgcaggccaaggctccc

SEQ ID NO: 68083 - RNA, 24 nt, synthetic construct
  misc_feature 1..24: note = Bestrophin-1 (465-472)
  source 1..24: mol_type = other RNA
gagcaccccgaagtgagccaggtc

SEQ ID NO: 68084 - RNA, 18 nt, synthetic construct
  misc_feature 1..18: note = Glycine-tRNA ligase (536-541)
  source 1..18: mol_type = other RNA
gagcacaccttccatgtg

SEQ ID NO: 68085 - RNA, 24 nt, synthetic construct
  misc_feature 1..24: note = Fibronectin 1 (1541-1548)
  source 1..24: mol_type = other RNA
gagatcgacaagcccagccagatg

SEQ ID NO: 68086 - RNA, 39 nt, synthetic construct
  misc_feature 1..39: note = 39S ribosomal protein L37, mitochondrial (51-63)
  source 1..39: mol_type = other RNA
gagatccccggcctggaacctattaccttcgccgggaag

SEQ ID NO: 68087 - RNA, 21 nt, synthetic construct
  misc_feature 1..21: note = ATP-dependent RNA helicase DDX24 (574-580)
  source 1..21: mol_type = other RNA
gagaaggacttctacctgtat

SEQ ID NO: 68088 - RNA, 24 nt, synthetic construct
  misc_feature 1..24: note = Tyrosinase (517-524)
  source 1..24: mol_type = other RNA
gagaaggaagactaccacagcctg

SEQ ID NO: 68089 - RNA, 33 nt, synthetic construct
  misc_feature 1..33: note = Nuclear autoantigenic sperm protein (365-375)
  source 1..33: mol_type = other RNA
gagaagcccggccaggaagcccctgtgctgcca

SEQ ID NO: 68090 - RNA, 27 nt, synthetic construct
  misc_feature 1..27: note = Exocyst complex component 3 (32-40)
  source 1..27: mol_type = other RNA
gagctggccaagcagctctggatggtg

SEQ ID NO: 68091 - RNA, 27 nt, synthetic construct
  misc_feature 1..27: note = Eukaryotic initiation factor 4A-II (112-120)
  source 1..27: mol_type = other RNA
gagctggcccagcaaatccagaaggtg

SEQ ID NO: 68092 - RNA, 27 nt, synthetic construct
  misc_feature 1..27: note = Probable ATP-dependent RNA helicase DDX5 (178-186)
  source 1..27: mol_type = other RNA
gagctggcccagcaagtgcagcaggtc

SEQ ID NO: 68093 - RNA, 27 nt, synthetic construct
  misc_feature 1..27: note = Splicing factor 3B subunit 3 (1196-1204)
  source 1..27: mol_type = other RNA
gagctggacagaaccccccctgaagtg

SEQ ID NO: 68094 - RNA, 27 nt, synthetic construct
  misc_feature 1..27: note = Microtubule cross-linking factor 1 (532-540)
  source 1..27: mol_type = other RNA
gagctggaacaggagctccaaaagtac

SEQ ID NO: 68095 - RNA, 21 nt, synthetic construct
  misc_feature 1..21: note = Clathrin heavy chain 1 (362-368)
  source 1..21: mol_type = other RNA
gagctgttcgccagaaagttt

SEQ ID NO: 68096 - RNA, 66 nt, synthetic construct
  misc_feature 1..66: note = HEAT repeat-containing protein 5B (423-444)
  source 1..66: mol_type = other RNA
gagctgggcagcctcgtgcagtcccttaacgccaccgcttctcccctgatccaagaagcatcaatt

SEQ ID NO: 68097 - RNA, 24 nt, synthetic construct
  misc_feature 1..24: note = Leucine-rich repeat flightless-interacting protein 2 (198-205)
  source 1..24: mol_type = other RNA
gagctgatcgaaaagcacggcctc

SEQ ID NO: 68098 - RNA, 27 nt, synthetic construct
  misc_feature 1..27: note = Golgin subfamily B member 1 (2901-2909)
  source 1..27: mol_type = other RNA
gagctgaagaacctccagcaacagtac

SEQ ID NO: 68099 - RNA, 21 nt, synthetic construct
  misc_feature 1..21: note = Eukaryotic translation initiation factor 3 subunit C-like protein (84-90)
  source 1..21: mol_type = other RNA
gagctgctcggcaaggcctac

SEQ ID NO: 68100 - RNA, 27 nt, synthetic construct
  misc_feature 1..27: note = RHO/RAC effector protein (236-244)
  source 1..27: mol_type = other RNA
gagctgaacaatcagaacttctacctc

SEQ ID NO: 68101 - RNA, 24 nt, synthetic construct
  misc_feature 1..24: note = Presenilin-1 (3-10)
  source 1..24: mol_type = other RNA
gagctgcccgcccctctcagctac

SEQ ID NO: 68102 - RNA, 18 nt, synthetic construct
  misc_feature 1..18: note = FERM domain-containing protein 4A (927-932)
  source 1..18: mol_type = other RNA
gagctgagacagtggtac

SEQ ID NO: 68103 - RNA, 27 nt, synthetic construct
  misc_feature 1..27: note = Proteasome maturation protein (49-57)
  source 1..27: mol_type = other RNA
gagctgagcgaaaagaacttccagctc

SEQ ID NO: 68104 - RNA, 24 nt, synthetic construct
  misc_feature 1..24: note = FACT complex subunit SSRP1 (312-319)
  source 1..24: mol_type = other RNA
gagatggtgagcagagtcatgaag

SEQ ID NO: 68105 - RNA, 30 nt, synthetic construct
  misc_feature 1..30: note = Ras GTPase-activating-like protein IQGAP2 (450-459)
  source 1..30: mol_type = other RNA
gagaacgacagagtggtcgccgttggctac

SEQ ID NO: 68106 - RNA, 21 nt, synthetic construct
  misc_feature 1..21: note = Eukaryotic translation initiation factor 3 subunit L (295-301)
  source 1..21: mol_type = other RNA
gagaacatcgaactgaataag

SEQ ID NO: 68107 - RNA, 102 nt, synthetic construct
  misc_feature 1..102: note = Glia-derived nexin (343-376)
  source 1..102: mol_type = other RNA
gagaacctgcacgtgagccatatcctccagaaggccaaaattgaagtctccgaggacggcaccaaggcttctgcagccacaactgcgatacttatcgctaga

SEQ ID NO: 68108 - RNA, 105 nt, synthetic construct
  misc_feature 1..105: note = Proteasome activator complex subunit 4 (1077-1111)
  source 1..105: mol_type = other RNA
gagaacctgaatcacgacgccatcgtggtcagaaagatggctattagcgcagttgccggcatactcaaacagcttaagaggacccataaaaagctgacaatcaac

SEQ ID NO: 68109 - RNA, 33 nt, synthetic construct
  misc_feature 1..33: note = FYVE, RhoGEF and PH domain-containing protein 6 (143-153)
  source 1..33: mol_type = other RNA
gagaacagcaagatcgacgaaaccctgacaatt

SEQ ID NO: 68110 - RNA, 27 nt, synthetic construct
  misc_feature 1..27: note = Ankyrin repeat domain-containing protein SOWAHB (248-256)
  source 1..27: mol_type = other RNA
gagcccgcccctgtgccagctgtcgca

SEQ ID NO: 68111 - RNA, 33 nt, synthetic construct
  misc_feature 1..33: note = 39S ribosomal protein L3, mitochondrial (91-101)
  source 1..33: mol_type = other RNA
gagcccggcagcttcagagtggggctgatcgcc

SEQ ID NO: 68112 - RNA, 27 nt, synthetic construct
  misc_feature 1..27: note = Nurim (116-124)
  source 1..27: mol_type = other RNA
gagcccatccctaagggcccagtgctg

SEQ ID NO: 68113 - RNA, 30 nt, synthetic construct
  misc_feature 1..30: note = Ryanodine receptor 1 (370-379)
  source 1..30: mol_type = other RNA
gagccccctaccccagaaggcagcccgatc

SEQ ID NO: 68114 - RNA, 27 nt, synthetic construct
  misc_feature 1..27: note = WD repeat-containing protein 18 (350-358)
  source 1..27: mol_type = other RNA
gagcccagacacggcgggctgaccctc

SEQ ID NO: 68115 - RNA, 33 nt, synthetic construct
  misc_feature 1..33: note = Gamma-secretase C-terminal fragment 59 (473-483)
  source 1..33: mol_type = other RNA
gagcccagaatcagctacggcaacgacgccctg

SEQ ID NO: 68116 - RNA, 54 nt, synthetic construct
  misc_feature 1..54: note = Integral membrane protein GPR137C (19-36)
  source 1..54: mol_type = other RNA
gagcccagcacccctggcgggggatccggtggcgggggagccgtggctgcagcc

SEQ ID NO: 68117 - RNA, 123 nt, synthetic construct
  misc_feature 1..123: note = Ubiquitin-associated protein 2-like (364-404)
  source 1..123: mol_type = other RNA
gagcagttcaagaccgcccaagctctggcacagctcgccgcgcagcacagccagtccggctctacaactacgtcaagttgggacatggggagcaccacacaatccccctctcttgtgcagtac

SEQ ID NO: 68118 - RNA, 30 nt, synthetic construct
  misc_feature 1..30: note = Keratin, type II cytoskeletal 1b (186-195)
  source 1..30: mol_type = other RNA
gagcagcaaaaccaggtgctgcagaccaag

SEQ ID NO: 68119 - RNA, 30 nt, synthetic construct
  misc_feature 1..30: note = Histone-lysine N-methyltransferase 2D (2989-2998)
  source 1..30: mol_type = other RNA
gagcagcaaagcaagatccagaaacagctg

SEQ ID NO: 68120 - RNA, 24 nt, synthetic construct
  misc_feature 1..24: note = Hsp90 co-chaperone Cdc37 (207-214)
  source 1..24: mol_type = other RNA
gagcaggtggcccaccaaaccatc

SEQ ID NO: 68121 - RNA, 24 nt, synthetic construct
  misc_feature 1..24: note = Mucin-16 (582-589)
  source 1..24: mol_type = other RNA
gagcaggtgttcctggacaagacc

SEQ ID NO: 68122 - RNA, 21 nt, synthetic construct
  misc_feature 1..21: note = Serine/arginine-rich splicing factor 3 (27-33)
  source 1..21: mol_type = other RNA
gagagagccttcggctactat

SEQ ID NO: 68123 - RNA, 27 nt, synthetic construct
  misc_feature 1..27: note = Kinectin (367-375)
  source 1..27: mol_type = other RNA
gagagaagcaacgtggtcatcaccagg

SEQ ID NO: 68124 - RNA, 21 nt, synthetic construct
  misc_feature 1..21: note = RAB6A-GEF complex partner protein 2 (263-269)
  source 1..21: mol_type = other RNA
gagagagtgcagcccgaatac

SEQ ID NO: 68125 - RNA, 18 nt, synthetic construct
  misc_feature 1..18: note = Vacuolar protein sorting-associated protein 18 homolog (309-314)
  source 1..18: mol_type = other RNA
gagagagtgtgggaatac

SEQ ID NO: 68126 - RNA, 33 nt, synthetic construct
  misc_feature 1..33: note = Pre-mRNA-splicing factor ATP-dependent RNA helicase PRP16 (1005-1015)
  source 1..33: mol_type = other RNA
gagagcgaccacctgacctacctcaacgtgtat

SEQ ID NO: 68127 - RNA, 57 nt, synthetic construct
  misc_feature 1..57: note = Endoplasmin (203-221)
  source 1..57: mol_type = other RNA
gagagcgactccaacgaattctctgtgatcgccgatcccagaggcaataccctgggg

SEQ ID NO: 68128 - RNA, 30 nt, synthetic construct
  misc_feature 1..30: note = Netrin receptor UNC5A (438-447)
  source 1..30: mol_type = other RNA
gagagcgaagccggcgtgcccgctctggtc

SEQ ID NO: 68129 - RNA, 27 nt, synthetic construct
  misc_feature 1..27: note = DNA-directed RNA polymerase I subunit RPA1 (186-194)
  source 1..27: mol_type = other RNA
gagagcaagtccaaactgatcgccctc

SEQ ID NO: 68130 - RNA, 24 nt, synthetic construct
  misc_feature 1..24: note = Four and a half LIM domains protein 2 (122-129)
  source 1..24: mol_type = other RNA
gagagcctgttcggcaagaaatac

SEQ ID NO: 68131 - RNA, 24 nt, synthetic construct
  misc_feature 1..24: note = T-complex protein 1 subunit beta (114-121)
  source 1..24: mol_type = other RNA
gagagcctgatcgccaagaaaatt

SEQ ID NO: 68132 - RNA, 21 nt, synthetic construct
  misc_feature 1..21: note = Heterogeneous nuclear ribonucleoproteins A2/B1 (23-29)
  source 1..21: mol_type = other RNA
gagagcctgagaaactactat

SEQ ID NO: 68133 - RNA, 51 nt, synthetic construct
  misc_feature 1..51: note = AT-rich interactive domain-containing protein 1A (78-94)
  source 1..51: mol_type = other RNA
gagagcaacggcgggggaggtggcgggggagccggctccggtgggggaccc

SEQ ID NO: 68134 - RNA, 21 nt, synthetic construct
  misc_feature 1..21: note = DENN domain-containing protein 4B (1394-1400)
  source 1..21: mol_type = other RNA
gagagcgtgctgagacacgtc

SEQ ID NO: 68135 - RNA, 27 nt, synthetic construct
  misc_feature 1..27: note = Protein kinase C-binding protein 1 (695-703)
  source 1..27: mol_type = other RNA
gagaccgacagccccacagtgcacctg

SEQ ID NO: 68136 - RNA, 27 nt, synthetic construct
  misc_feature 1..27: note = HEAT repeat-containing protein 1 (1479-1487)
  source 1..27: mol_type = other RNA
gagaccatccccaaggccgtgagcttc

SEQ ID NO: 68137 - RNA, 27 nt, synthetic construct
  misc_feature 1..27: note = Receptor-type tyrosine-protein phosphatase C (52-60)
  source 1..27: mol_type = other RNA
gagaccaagctgttcacagccaaactc

SEQ ID NO: 68138 - RNA, 30 nt, synthetic construct
  misc_feature 1..30: note = Uridine-cytidine kinase-like 1 (329-338)
  source 1..30: mol_type = other RNA
gagaccagcagagacgaattcatcttttac

SEQ ID NO: 68139 - RNA, 54 nt, synthetic construct
  misc_feature 1..54: note = UPF0606 protein KIAA1549 (278-295)
  source 1..54: mol_type = other RNA
gagaccacactgttcctcagctccagatctcttatgccccagcctctgggcgac

SEQ ID NO: 68140 - RNA, 66 nt, synthetic construct
  misc_feature 1..66: note = ATP synthase subunit alpha, mitochondrial (339-360)
  source 1..66: mol_type = other RNA
gaggtggccgctttcgcacagtttggcagcgacctggatgccgcgacccaacagctcctttccaga

SEQ ID NO: 68141 - RNA, 27 nt, synthetic construct
  misc_feature 1..27: note = 40S ribosomal protein S21 (38-46)
  source 1..27: mol_type = other RNA
gaggtggacaaggtcaccggcagattc

SEQ ID NO: 68142 - RNA, 27 nt, synthetic construct
  misc_feature 1..27: note = Melanoma-associated antigen 4 (169-177)
  source 1..27: mol_type = other RNA
gaggtggaccccgccagcaacacctac

SEQ ID NO: 68143 - RNA, 30 nt, synthetic construct
  misc_feature 1..30: note = Dystrophin (1633-1642)
  source 1..30: mol_type = other RNA
gaggtgggcgaagccctgaagaccgtcctc

SEQ ID NO: 68144 - RNA, 48 nt, synthetic construct
  misc_feature 1..48: note = Filamin-A (1150-1165)
  source 1..48: mol_type = other RNA
gaggtgggccagttccaagtcgactgcagctccgccgggtctgctgaa

SEQ ID NO: 68145 - RNA, 57 nt, synthetic construct
  misc_feature 1..57: note = Titin (5338-5356)
  source 1..57: mol_type = other RNA
gaggtgggcagctcctcttgcgaaaccacattcactgtcctggacagagatatcgcc

SEQ ID NO: 68146 - RNA, 27 nt, synthetic construct
  misc_feature 1..27: note = Nucleosome assembly protein 1-like 4 (87-95)
  source 1..27: mol_type = other RNA
gaggtgcacgacctggaaagaaagtac

SEQ ID NO: 68147 - RNA, 24 nt, synthetic construct
  misc_feature 1..24: note = Pseudouridylate synthase 7 homolog-like protein (87-94)
  source 1..24: mol_type = other RNA
gaggtgcacaccctgatcaagtac

SEQ ID NO: 68148 - RNA, 30 nt, synthetic construct
  misc_feature 1..30: note = Midasin (595-604)
  source 1..30: mol_type = other RNA
gaggtgatcggcagcaagctgaacatttcc

SEQ ID NO: 68149 - RNA, 30 nt, synthetic construct
  misc_feature 1..30: note = Protein ZGRF1 (72-81)
  source 1..30: mol_type = other RNA
gaggtgaaggtcgccggcgctatcgggatt

SEQ ID NO: 68150 - RNA, 30 nt, synthetic construct
  misc_feature 1..30: note = RNA-binding protein Nova-1 (277-286)
  source 1..30: mol_type = other RNA
gaggtgctgcccaccgccgctgcagccgcg

SEQ ID NO: 68151 - RNA, 30 nt, synthetic construct
  misc_feature 1..30: note = Hemicentin-1 (2987-2996)
  source 1..30: mol_type = other RNA
gaggtgagcggcttcccccctccagacctg

SEQ ID NO: 68152 - RNA, 21 nt, synthetic construct
  misc_feature 1..21: note = Basigin (49-55)
  source 1..21: mol_type = other RNA
gaggtgaccggccacagatgg

SEQ ID NO: 68153 - RNA, 39 nt, synthetic construct
  misc_feature 1..39: note = Annexin A2 (53-65)
  source 1..39: mol_type = other RNA
gaggtgaccatcgtcaacattctgacaaatagaagcaac

SEQ ID NO: 68154 - RNA, 45 nt, synthetic construct
  misc_feature 1..45: note = Annexin A2 (53-67)
  source 1..45: mol_type = other RNA
gaggtgaccatcgtcaacattctgacaaatagaagcaacgcccag

SEQ ID NO: 68155 - RNA, 27 nt, synthetic construct
  misc_feature 1..27: note = Myotubularin (410-418)
  source 1..27: mol_type = other RNA
gagtggatcagcttcggccacaagttt

SEQ ID NO: 68156 - RNA, 27 nt, synthetic construct
  misc_feature 1..27: note = Zinc finger protein 317 (82-90)
  source 1..27: mol_type = other RNA
gagtacgcccacctgttcgaagtgttt

SEQ ID NO: 68157 - RNA, 27 nt, synthetic construct
  misc_feature 1..27: note = Lysophosphatidylcholine acyltransferase 2 (495-503)
  source 1..27: mol_type = other RNA
gagtacgccaagatcttcaccacatat

SEQ ID NO: 68158 - RNA, 30 nt, synthetic construct
  misc_feature 1..30: note = Meiosis arrest female protein 1 (1363-1372)
  source 1..30: mol_type = other RNA
gagtacgccaagaccttcggctatacattt

SEQ ID NO: 68159 - RNA, 27 nt, synthetic construct
  misc_feature 1..27: note = Tyrosine-protein kinase Fer (41-49)
  source 1..27: mol_type = other RNA
gagtacgccagcaccctgcagaacctc

SEQ ID NO: 68160 - RNA, 27 nt, synthetic construct
  misc_feature 1..27: note = Origin recognition complex subunit 3 (309-317)
  source 1..27: mol_type = other RNA
gagtacgccagcgtgctgcagctcctt

SEQ ID NO: 68161 - RNA, 27 nt, synthetic construct
  misc_feature 1..27: note = Gamma-tubulin complex component 2 (312-320)
  source 1..27: mol_type = other RNA
gagtacggccaggtgaaccacgccctg

SEQ ID NO: 68162 - RNA, 27 nt, synthetic construct
  misc_feature 1..27: note = Nuclear pore complex protein Nup214 (115-123)
  source 1..27: mol_type = other RNA
gagtacggcagcatcattgccttcttt

SEQ ID NO: 68163 - RNA, 27 nt, synthetic construct
  misc_feature 1..27: note = GDH/6PGL endoplasmic bifunctional protein (267-275)
  source 1..27: mol_type = other RNA
gagtacggcgtgatcagagacgtcctg

SEQ ID NO: 68164 - RNA, 27 nt, synthetic construct
  misc_feature 1..27: note = Probable ATP-dependent RNA helicase DDX52 (539-547)
  source 1..27: mol_type = other RNA
gagtacatcaagggcttccagaaactg

SEQ ID NO: 68165 - RNA, 27 nt, synthetic construct
  misc_feature 1..27: note = Myotubularin (566-574)
  source 1..27: mol_type = other RNA
gagtacatcaagagactggaagagctc

SEQ ID NO: 68166 - RNA, 27 nt, synthetic construct
  misc_feature 1..27: note = Probable ATP-dependent RNA helicase DDX60-like (1185-1193)
  source 1..27: mol_type = other RNA
gagtacatcaacttcctggaaaatctc

SEQ ID NO: 68167 - RNA, 33 nt, synthetic construct
  misc_feature 1..33: note = Aspartate aminotransferase, mitochondrial (95-105)
  source 1..33: mol_type = other RNA
gagtacctgcccatcggcgggctcgccgaattc

SEQ ID NO: 68168 - RNA, 27 nt, synthetic construct
  misc_feature 1..27: note = Phosphatidylinositol-glycan biosynthesis class W protein (124-132)
  source 1..27: mol_type = other RNA
gagtacaaccccgccatcagctgcttc

SEQ ID NO: 68169 - RNA, 27 nt, synthetic construct
  misc_feature 1..27: note = Lysosomal protective protein (111-119)
  source 1..27: mol_type = other RNA
gagtacaacccctatagctggaatctg

SEQ ID NO: 68170 - RNA, 27 nt, synthetic construct
  misc_feature 1..27: note Dolichyl-diphosphooligosaccharide-proteinosyltransferase 48 kDa subunit (332-340)
  source 1..27: mol_type = other RNA
gagtacagcatcgtgattcagcaactg

SEQ ID NO: 68171 - RNA, 27 nt, synthetic construct
  misc_feature 1..27: note = MAU2 chromatid cohesion factor homolog (89-97)
  source 1..27: mol_type = other RNA
gagtacaccagagccctgttcctcctt

SEQ ID NO: 68172 - RNA, 27 nt, synthetic construct
  misc_feature 1..27: note = FERM, RhoGEF and pleckstrin domain-containing protein 2 (134-142)
  source 1..27: mol_type = other RNA
gagtacaccagatatctgttcgccctc

SEQ ID NO: 68173 - RNA, 27 nt, synthetic construct
  misc_feature 1..27: note = Dual specificity protein kinase CLK3 (343-351)
  source 1..27: mol_type = other RNA
gagtactatagaggcttcaccctgttt

SEQ ID NO: 68174 - RNA, 24 nt, synthetic construct
  misc_feature 1..24: note = Nuclear receptor corepressor 2 (1025-1032)
  source 1..24: mol_type = other RNA
ttcgccgctgaggcacagaagctg

SEQ ID NO: 68175 - RNA, 24 nt, synthetic construct
  misc_feature 1..24: note = UDP-N-acetylglucosamine-peptide N-acetylglucosaminyltransferase 110 kDa subunit (428-435)
  source 1..24: mol_type = other RNA
ttcgccgacgctcacagcaacctg

SEQ ID NO: 68176 - RNA, 27 nt, synthetic construct
  misc_feature 1..27: note = Catenin alpha-2 (110-118)
  source 1..27: mol_type = other RNA
ttcgccgacgatccctgcagctccgtg

SEQ ID NO: 68177 - RNA, 27 nt, synthetic construct
  misc_feature 1..27: note = Zinc finger MYM-type protein 1 (482-490)
  source 1..27: mol_type = other RNA
ttcgccgacgagctgagccacctcctt

SEQ ID NO: 68178 - RNA, 30 nt, synthetic construct
  misc_feature 1..30: note = E3 ubiquitin-protein ligase UBR4 (495-504)
  source 1..30: mol_type = other RNA
ttcgccgacaaggagaccctgatccagttt

SEQ ID NO: 68179 - RNA, 30 nt, synthetic construct
  misc_feature 1..30: note = Histone-lysine N-methyltransferase SETDB1 (995-1004)
  source 1..30: mol_type = other RNA
ttcgccgacagcgattcccactcttcattt

SEQ ID NO: 68180 - RNA, 30 nt, synthetic construct
  misc_feature 1..30: note = Staphylococcal nuclease domain-containing protein 1 (819-828)
  source 1..30: mol_type = other RNA
ttcgccgacagcaagggcgatgtggggctg

SEQ ID NO: 68181 - RNA, 27 nt, synthetic construct
  misc_feature 1..27: note = Frizzled-1 (386-394)
  source 1..27: mol_type = other RNA
ttcgccgaggacggcgctagaaccgtg

SEQ ID NO: 68182 - RNA, 39 nt, synthetic construct
  misc_feature 1..39: note = Amyloid beta A4 protein (18-30)
  source 1..39: mol_type = other RNA
ttcgccgaggacgtgggcagcaacaagggggctatcatt

SEQ ID NO: 68183 - RNA, 42 nt, synthetic construct
  misc_feature 1..42: note = Amyloid beta A4 protein (20-33)
  source 1..42: mol_type = other RNA
ttcgccgaggacgtgggcagcaacaagggggctatcattgga

SEQ ID NO: 68184 - RNA, 27 nt, synthetic construct
  misc_feature 1..27: note = Centromere protein F (1090-1098)
  source 1..27: mol_type = other RNA
ttcgccgaggaaagaaaccagaatctg

SEQ ID NO: 68185 - RNA, 24 nt, synthetic construct
  misc_feature 1..24: note = Superkiller viralicidic activity 2-like 2 (1024-1031)
  source 1..24: mol_type = other RNA
ttcgccgagggcatcaccaagatt

SEQ ID NO: 68186 - RNA, 27 nt, synthetic construct
  misc_feature 1..27: note = ATP-binding cassette sub-family C member 11 (241-249)
  source 1..27: mol_type = other RNA
ttcgcctttgagaagctgatccagttc

SEQ ID NO: 68187 - RNA, 27 nt, synthetic construct
  misc_feature 1..27: note = Arf-GAP with SH3 domain, ANK repeat and PH domain-containing protein 3 (673-681)
  source 1..27: mol_type = other RNA
ttcgcctttcccctgcacgtggactac

SEQ ID NO: 68188 - RNA, 24 nt, synthetic construct
  misc_feature 1..24: note = Filamin-A (333-340)
  source 1..24: mol_type = other RNA
ttcgccggccagcacatcgctaag

SEQ ID NO: 68189 - RNA, 27 nt, synthetic construct
  misc_feature 1..27: note = Elongation factor 1-gamma (198-206)
  source 1..27: mol_type = other RNA
ttcgcccacctgcccaagagcaccttt

SEQ ID NO: 68190 - RNA, 27 nt, synthetic construct
  misc_feature 1..27: note = Nuclear pore complex protein Nup85 (365-373)
  source 1..27: mol_type = other RNA
ttcgcccaccccagcctgtggcagctc

SEQ ID NO: 68191 - RNA, 36 nt, synthetic construct
  misc_feature 1..36: note = Moesin (18-29)
  source 1..36: mol_type = other RNA
ttcgccatccagcccaacaccacaggcaagcaactg

SEQ ID NO: 68192 - RNA, 27 nt, synthetic construct
  misc_feature 1..27: note = Sodium-dependent phosphate transport protein 2C (387-395)
  source 1..27: mol_type = other RNA
ttcgccctgcagagctcctctgtgttt

SEQ ID NO: 68193 - RNA, 45 nt, synthetic construct
  misc_feature 1..45: note = Cytochrome c oxidase subunit 7C, mitochondrial (49-63)
  source 1..45: mol_type = other RNA
ttcgccaccccctttctggtggtcagacaccagctccttaagaca

SEQ ID NO: 68194 - RNA, 36 nt, synthetic construct
  misc_feature 1..36: note = Beta-secretase 2 (116-127)
  source 1..36: mol_type = other RNA
ttcgccgtggctggcaccccccacagctacatcgac

SEQ ID NO: 68195 - RNA, 27 nt, synthetic construct
  misc_feature 1..27: note = Protein FAM179B (1301-1309)
  source 1..27: mol_type = other RNA
ttcgccgtggtccaggaggttaagaac

SEQ ID NO: 68196 - RNA, 24 nt, synthetic construct
  misc_feature 1..24: note = WD repeat-containing protein 35 (933-940)
  source 1..24: mol_type = other RNA
ttcgacgccgctaagctgatgttt

SEQ ID NO: 68197 - RNA, 21 nt, synthetic construct
  misc_feature 1..21: note = Synemin (38-44)
  source 1..21: mol_type = other RNA
ttcgacaagaaagtgcagctg

SEQ ID NO: 68198 - RNA, 24 nt, synthetic construct
  misc_feature 1..24: note = Protein SET (138-145)
  source 1..24: mol_type = other RNA
ttcgaggacatcaagagcggctac

SEQ ID NO: 68199 - RNA, 42 nt, synthetic construct
  misc_feature 1..42: note = ATP synthase-coupling factor 6, mitochondrial (95-108)
  source 1..42: mol_type = other RNA
ttcgaggaccccaagtttgaagtgatcgagaaacctcaggcc

SEQ ID NO: 68200 - RNA, 42 nt, synthetic construct
  misc_feature 1..42: note = Cytochrome c oxidase subunit 6C (62-75)
  source 1..42: mol_type = other RNA
ttcgaggaaatgagaaaggccggcatctttcagagcgtgaaa

SEQ ID NO: 68201 - RNA, 21 nt, synthetic construct
  misc_feature 1..21: note = Myotubularin-related protein 13 (1490-1496)
  source 1..21: mol_type = other RNA
ttcgagtttaacctgtactat

SEQ ID NO: 68202 - RNA, 33 nt, synthetic construct
  misc_feature 1..33: note = FACT complex subunit SSRP1 (391-401)
  source 1..33: mol_type = other RNA
ttcgagatcgaaaccaagcagggcacacaatac

SEQ ID NO: 68203 - RNA, 27 nt, synthetic construct
  misc_feature 1..27: note = Myosin-9 (456-464)
  source 1..27: mol_type = other RNA
ttcgagatctttgacctgaacagcttc

SEQ ID NO: 68204 - RNA, 24 nt, synthetic construct
  misc_feature 1..24: note = F-box/LRR-repeat protein 5 (75-82)
  source 1..24: mol_type = other RNA
ttcgagaagggcctgaaaaacgtg

SEQ ID NO: 68205 - RNA, 27 nt, synthetic construct
  misc_feature 1..27: note = Integrin beta-5 (536-544)
  source 1..27: mol_type = other RNA
ttcgagagcgaatttggcaagatctac

SEQ ID NO: 68206 - RNA, 21 nt, synthetic construct
  misc_feature 1..21: note = Small subunit processome component 20 homolog (1420-1426)
  source 1..21: mol_type = other RNA
ttcgagagcggcctgaagtac

SEQ ID NO: 68207 - RNA, 27 nt, synthetic construct
  misc_feature 1..27: note = ATP synthase-coupling factor 6, mitochondrial (100-108)
  source 1..27: mol_type = other RNA
ttcgaggtgatcgaaaagccccaggcc

SEQ ID NO: 68208 - RNA, 30 nt, synthetic construct
  misc_feature 1..30: note = Nuclear pore membraneoprotein 210 (396-405)
  source 1..30: mol_type = other RNA
ttctttgaggtgctgagctcctctcagaac

SEQ ID NO: 68209 - RNA, 27 nt, synthetic construct
  misc_feature 1..27: note = Dynein heavy chain 10, axonemal (148-156)
  source 1..27: mol_type = other RNA
ttctttttcatcagcgacgatgagctg

SEQ ID NO: 68210 - RNA, 18 nt, synthetic construct
  misc_feature 1..18: note = FACT complex subunit SSRP1 (88-93)
  source 1..18: mol_type = other RNA
ttctttaagacccactac

SEQ ID NO: 68211 - RNA, 27 nt, synthetic construct
  misc_feature 1..27: note = Sterol regulatory element-binding protein 2 (769-777)
  source 1..27: mol_type = other RNA
ttctttatggagagaagctggtccgtg

SEQ ID NO: 68212 - RNA, 27 nt, synthetic construct
  misc_feature 1..27: note = L-dopachrome tautomerase (339-347)
  source 1..27: mol_type = other RNA
ttctttcagaacagcaccttctccttt

SEQ ID NO: 68213 - RNA, 21 nt, synthetic construct
  misc_feature 1..21: note = Protein MCM10 homolog (335-341)
  source 1..21: mol_type = other RNA
ttcggcgaggtgcacaaggcc

SEQ ID NO: 68214 - RNA, 27 nt, synthetic construct
  misc_feature 1..27: note = Dynein light chain 4, axonemal (77-85)
  source 1..27: mol_type = other RNA
ttcggctttgagatcacccacgaagtg

SEQ ID NO: 68215 - RNA, 27 nt, synthetic construct
  misc_feature 1..27: note = Myelin basic protein (46-54)
  source 1..27: mol_type = other RNA
ttcggcggggacagaggagcccccaag

SEQ ID NO: 68216 - RNA, 87 nt, synthetic construct
  misc_feature 1..87: note = Keratin, type I cytoskeletal 9 (90-118)
  source 1..87: mol_type = other RNA
ttcggcgggggaagcagaggttttggcggggcctccggaggcggttactcttcaagtgggggattcggcggcgggtttggaggtggc

SEQ ID NO: 68217 - RNA, 24 nt, synthetic construct
  misc_feature 1..24: note = Oxysterol-binding protein-related protein 1 (367-374)
  source 1..24: mol_type = other RNA
ttcggcaaggagctgcacaaagtg

SEQ ID NO: 68218 - RNA, 27 nt, synthetic construct
  misc_feature 1..27: note = Cyclin-dependent kinase 3 (146-154)
  source 1..27: mol_type = other RNA
ttcggcctggccagagcttttggggtg

SEQ ID NO: 68219 - RNA, 48 nt, synthetic construct
  misc_feature 1..48: note = Pyruvate kinase PKM (157-172)
  source 1..48: mol_type = other RNA
ttcggcgtggagcaggacgtcgatatggtttttgccagcttcatcaga

SEQ ID NO: 68220 - RNA, 33 nt, synthetic construct
  misc_feature 1..33: note = AP-2 complex subunit beta (776-786)
  source 1..33: mol_type = other RNA
ttcggcgtgatccccagcacccctctggccatt

SEQ ID NO: 68221 - RNA, 30 nt, synthetic construct
  misc_feature 1..30: note = Myelin basic protein (152-161)
  source 1..30: mol_type = other RNA
ttcggctacgggggaagagccagcgactat

SEQ ID NO: 68222 - RNA, 48 nt, synthetic construct
  misc_feature 1..48: note = Cytochrome c oxidase subunit 6A1, mitochondrial (71-86)
  source 1..48: mol_type = other RNA
ttccacaacccccatgtgaatcctctgccaaccggctacgaggacgaa

SEQ ID NO: 68223 - RNA, 18 nt, synthetic construct
  misc_feature 1..18: note = Large proline-rich protein BAG6 (789-794)
  source 1..18: mol_type = other RNA
ttccaccagcattacctg

SEQ ID NO: 68224 - RNA, 27 nt, synthetic construct
  misc_feature 1..27: note = Transformation/transcription domain-associated protein (280-288)
  source 1..27: mol_type = other RNA
ttcatcgccgctcagattaagaccctg

SEQ ID NO: 68225 - RNA, 30 nt, synthetic construct
  misc_feature 1..30: note = Vitamin K-dependent gamma-carboxylase (474-483)
  source 1..30: mol_type = other RNA
ttcatcgccgactttcccggcctgcacctc

SEQ ID NO: 68226 - RNA, 27 nt, synthetic construct
  misc_feature 1..27: note = Ubiquitin carboxyl-terminal hydrolase 7 (183-191)
  source 1..27: mol_type = other RNA
ttcatcgacgatgacaaggtgaccttt

SEQ ID NO: 68227 - RNA, 27 nt, synthetic construct
  misc_feature 1..27: note = Histone-lysine N-methyltransferase SETDB1 (43-51)
  source 1..27: mol_type = other RNA
ttcatcgacgaggaactggagaagatg

SEQ ID NO: 68228 - RNA, 27 nt, synthetic construct
  misc_feature 1..27: note Dolichyl-diphosphooligosaccharide-proteinosyltransferase 48 kDa subunit (119-127)
  source 1..27: mol_type = other RNA
ttcatcgacggcgggggaagcgtgctg

SEQ ID NO: 68229 - RNA, 30 nt, synthetic construct
  misc_feature 1..30: note Dolichyl-diphosphooligosaccharide-proteinosyltransferase 48 kDa subunit (119-128)
  source 1..30: mol_type = other RNA
ttcatcgacggcgggggaagcgtgctggtc

SEQ ID NO: 68230 - RNA, 27 nt, synthetic construct
  misc_feature 1..27: note = Nck-associated protein 1 (400-408)
  source 1..27: mol_type = other RNA
ttcatcgacaagcacattgccgagctg

SEQ ID NO: 68231 - RNA, 27 nt, synthetic construct
  misc_feature 1..27: note = ATP-dependent RNA helicase DDX19B (230-238)
  source 1..27: mol_type = other RNA
ttcatcgaccccaagaaaattaaggtg

SEQ ID NO: 68232 - RNA, 27 nt, synthetic construct
  misc_feature 1..27: note = BTB/POZ domain-containing protein KCTD15 (102-110)
  source 1..27: mol_type = other RNA
ttcatcgacagagatggcgagattttt

SEQ ID NO: 68233 - RNA, 78 nt, synthetic construct
  misc_feature 1..78: note = Tubulin beta chain (387-412)
  source 1..78: mol_type = other RNA
ttcatcggcaacagcaccgccattcaggagctgtttaagagaatatccgaacaattcacagctatgtttaggcggaaa

SEQ ID NO: 68234 - RNA, 27 nt, synthetic construct
  misc_feature 1..27: note = Receptor-type protein tyrosine phosphatase beta (1317-1325)
  source 1..27: mol_type = other RNA
ttcatccacgacaccctggtggaggcc

SEQ ID NO: 68235 - RNA, 27 nt, synthetic construct
  misc_feature 1..27: note = Kelch-like protein 7 (120-128)
  source 1..27: mol_type = other RNA
ttcatccaccagcattttaccgaggtg

SEQ ID NO: 68236 - RNA, 27 nt, synthetic construct
  misc_feature 1..27: note = Kelch-like protein 18 (97-105)
  source 1..27: mol_type = other RNA
ttcatccaccagcattttgtggaggtc

SEQ ID NO: 68237 - RNA, 27 nt, synthetic construct
  misc_feature 1..27: note = Myotubularin-related protein 13 (272-280)
  source 1..27: mol_type = other RNA
ttcatcattggcgtgcacagcgtcttt

SEQ ID NO: 68238 - RNA, 27 nt, synthetic construct
  misc_feature 1..27: note = LisH domain-containing protein ARMC9 (551-559)
  source 1..27: mol_type = other RNA
ttcatcaaggagggcaacgccgaaatg

SEQ ID NO: 68239 - RNA, 27 nt, synthetic construct
  misc_feature 1..27: note = Importin-5 (200-208)
  source 1..27: mol_type = other RNA
ttcatcctggccaacgagcacaatgtg

SEQ ID NO: 68240 - RNA, 27 nt, synthetic construct
  misc_feature 1..27: note = WD repeat and FYVE domain-containing protein 3 (419-427)
  source 1..27: mol_type = other RNA
ttcatcctggagagccagcacaccctc

SEQ ID NO: 68241 - RNA, 27 nt, synthetic construct
  misc_feature 1..27: note = Cyclin-related protein FAM58A (33-41)
  source 1..27: mol_type = other RNA
ttcatcatggaggccggcgtgaagctg

SEQ ID NO: 68242 - RNA, 27 nt, synthetic construct
  misc_feature 1..27: note = Protein EFR3 homolog A (468-476)
  source 1..27: mol_type = other RNA
ttcatcatgggcaaggtgcccgtcttt

SEQ ID NO: 68243 - RNA, 27 nt, synthetic construct
  misc_feature 1..27: note = Translocated to HRX in t(11,19) leukemia (81-89)
  source 1..27: mol_type = other RNA
ttcatcatgcccattgaggtgcacttt

SEQ ID NO: 68244 - RNA, 18 nt, synthetic construct
  misc_feature 1..18: note = Endoplasmic reticulum metallopeptidase 1 (110-115)
  source 1..18: mol_type = other RNA
ttcatcaactttatttac

SEQ ID NO: 68245 - RNA, 30 nt, synthetic construct
  misc_feature 1..30: note = Sacsin (114-123)
  source 1..30: mol_type = other RNA
ttcatcaacggcaattttcccgggaccttc

SEQ ID NO: 68246 - RNA, 27 nt, synthetic construct
  misc_feature 1..27: note = Tripartite motif-containing protein 2 (185-193)
  source 1..27: mol_type = other RNA
ttcatcagcgagattatacaccagctg

SEQ ID NO: 68247 - RNA, 27 nt, synthetic construct
  misc_feature 1..27: note = Protein TANC1 (603-611)
  source 1..27: mol_type = other RNA
ttcatcaccaagattataagcaaattt

SEQ ID NO: 68248 - RNA, 21 nt, synthetic construct
  misc_feature 1..21: note = Gelsolin (365-371)
  source 1..21: mol_type = other RNA
ttcatcaccaagatggactac

SEQ ID NO: 68249 - RNA, 27 nt, synthetic construct
  misc_feature 1..27: note = Calcium/calmodulin-dependent 3',5'-cyclic nucleotide phosphodiesterase 1C (433-441)
  source 1..27: mol_type = other RNA
ttcatcgtggagcccacctttacagtc

SEQ ID NO: 68250 - RNA, 30 nt, synthetic construct
  misc_feature 1..30: note = Dopamine D4 receptor (72-81)
  source 1..30: mol_type = other RNA
ttcatcgtgagcctggccgctgcagacctc

SEQ ID NO: 68251 - RNA, 27 nt, synthetic construct
  misc_feature 1..27: note = Regulatory-associated protein of mTOR (277-285)
  source 1..27: mol_type = other RNA
ttcatctgggccaagattctggctgtg

SEQ ID NO: 68252 - RNA, 27 nt, synthetic construct
  misc_feature 1..27: note = Unconventional myosin-X (583-591)
  source 1..27: mol_type = other RNA
ttcatctacgacctgtttgagcacgtg

SEQ ID NO: 68253 - RNA, 30 nt, synthetic construct
  misc_feature 1..30: note = Cullin-4B (578-587)
  source 1..30: mol_type = other RNA
ttcatctacggcaaggacgtgtttgaggcc

SEQ ID NO: 68254 - RNA, 39 nt, synthetic construct
  misc_feature 1..39: note = Cytochrome c oxidase subunit 7A2, mitochondrial (24-36)
  source 1..39: mol_type = other RNA
ttcaagaacaaagtgcccgagaagcagaaactgtttcaa

SEQ ID NO: 68255 - RNA, 84 nt, synthetic construct
  misc_feature 1..84: note = Cytochrome c oxidase subunit 7A2, mitochondrial (24-51)
  source 1..84: mol_type = other RNA
ttcaagaacaaagtgcccgagaagcagaaactgtttcaagaagacgatgagatccctctctaccttaagggcggggtcgccgac

SEQ ID NO: 68256 - RNA, 180 nt, synthetic construct
  misc_feature 1..180: note = Cytochrome c oxidase subunit 7A2, mitochondrial (24-83)
  source 1..180: mol_type = other RNA
ttcaagaacaaagtgcccgagaagcagaaactgtttcaagaagacgatgagatccctctctaccttaagggcggggtcgccgacgctctgttgtatagagcaaccatgattttaacagttggaggtactgcctacgcgatatatgaactggctgtggccagcttcccaaaaaagcaggag

SEQ ID NO: 68257 - RNA, 21 nt, synthetic construct
  misc_feature 1..21: note = Histone deacetylase 1 (241-247)
  source 1..21: mol_type = other RNA
ttcaagcccgtgatgagcaaa

SEQ ID NO: 68258 - RNA, 21 nt, synthetic construct
  misc_feature 1..21: note = Protein kinase C-binding protein 1 (213-219)
  source 1..21: mol_type = other RNA
ttcctggccgacgctaagtgg

SEQ ID NO: 68259 - RNA, 30 nt, synthetic construct
  misc_feature 1..30: note = Methionine-tRNA ligase, cytoplasmic (395-404)
  source 1..30: mol_type = other RNA
ttcctggccgacagatttgtggagggcgtc

SEQ ID NO: 68260 - RNA, 30 nt, synthetic construct
  misc_feature 1..30: note = Ras GTPase-activating-like protein IQGAP3 (868-877)
  source 1..30: mol_type = other RNA
ttcctggccgaggctgaactccttaagctg

SEQ ID NO: 68261 - RNA, 30 nt, synthetic construct
  misc_feature 1..30: note = Protein sel-1 homolog 1 (366-375)
  source 1..30: mol_type = other RNA
ttcctggccgagaagggcgacgtgcaggct

SEQ ID NO: 68262 - RNA, 27 nt, synthetic construct
  misc_feature 1..27: note = H(+)/Cl(-) exchange transporter 3 (206-214)
  source 1..27: mol_type = other RNA
ttcctggccgtgagcctcgtcaaggtt

SEQ ID NO: 68263 - RNA, 27 nt, synthetic construct
  misc_feature 1..27: note = Sodium/potassium-transporting ATPase subunit alpha-1 (28-36)
  source 1..27: mol_type = other RNA
ttcctggcctacagcatccaggctgca

SEQ ID NO: 68264 - RNA, 24 nt, synthetic construct
  misc_feature 1..24: note = B-cell receptor-associated protein 29 (63-70)
  source 1..24: mol_type = other RNA
ttcctggacgccgtgagagaggtc

SEQ ID NO: 68265 - RNA, 27 nt, synthetic construct
  misc_feature 1..27: note = Cytoplasmic dynein 2 heavy chain 1 (42-50)
  source 1..27: mol_type = other RNA
ttcctggacgatggcaaccagatgctc

SEQ ID NO: 68266 - RNA, 27 nt, synthetic construct
  misc_feature 1..27: note = Guanine nucleotide-binding protein G(I)/G(S)/G(T) subunit beta-2 (151-159)
  source 1..27: mol_type = other RNA
ttcctggacgataaccagatcattacc

SEQ ID NO: 68267 - RNA, 27 nt, synthetic construct
  misc_feature 1..27: note = Polycystin-1 (3400-3408)
  source 1..27: mol_type = other RNA
ttcctggacgatagcaagtccctcgtg

SEQ ID NO: 68268 - RNA, 27 nt, synthetic construct
  misc_feature 1..27: note = Guanine nucleotide-binding protein subunit beta-4 (151-159)
  source 1..27: mol_type = other RNA
ttcctggacgatagccagatcgtgacc

SEQ ID NO: 68269 - RNA, 27 nt, synthetic construct
  misc_feature 1..27: note = F-box only protein 32 (25-33)
  source 1..27: mol_type = other RNA
ttcctggacgagaagagcggctccttt

SEQ ID NO: 68270 - RNA, 30 nt, synthetic construct
  misc_feature 1..30: note = F-box only protein 32 (25-34)
  source 1..30: mol_type = other RNA
ttcctggacgagaagagcggctcctttgtg

SEQ ID NO: 68271 - RNA, 24 nt, synthetic construct
  misc_feature 1..24: note = Dipeptidyl peptidase 8 (72-79)
  source 1..24: mol_type = other RNA
ttcctggacgagaacgtgcacttt

SEQ ID NO: 68272 - RNA, 27 nt, synthetic construct
  misc_feature 1..27: note = Ubiquitin-like-conjugating enzyme ATG10 (117-125)
  source 1..27: mol_type = other RNA
ttcctggacggcagacccctcaccctt

SEQ ID NO: 68273 - RNA, 27 nt, synthetic construct
  misc_feature 1..27: note = Mediator of RNA polymerase II transcription subunit 18 (51-59)
  source 1..27: mol_type = other RNA
ttcctggaccacgagatggtgtttctc

SEQ ID NO: 68274 - RNA, 24 nt, synthetic construct
  misc_feature 1..24: note = Protein SMG8 (484-491)
  source 1..24: mol_type = other RNA
ttcctggacatcgataccaagttt

SEQ ID NO: 68275 - RNA, 27 nt, synthetic construct
  misc_feature 1..27: note = Unconventional myosin-Ic (523-531)
  source 1..27: mol_type = other RNA
ttcctggacaagaacaatgatctcctt

SEQ ID NO: 68276 - RNA, 27 nt, synthetic construct
  misc_feature 1..27: note = Sterol regulatory element-binding protein cleavage-activating protein (641-649)
  source 1..27: mol_type = other RNA
ttcctggacaagagaatcgtggccgct

SEQ ID NO: 68277 - RNA, 27 nt, synthetic construct
  misc_feature 1..27: note = Major facilitator superfamily domain-containing protein 12 (410-418)
  source 1..27: mol_type = other RNA
ttcctggacaaggtggccaacggcctc

SEQ ID NO: 68278 - RNA, 24 nt, synthetic construct
  misc_feature 1..24: note = Putative bifunctional UDP-N-acetylglucosamine transferase and deubiquitinase ALG13 (156-163)
  source 1..24: mol_type = other RNA
ttcctggacaaggtggtcggcctc

SEQ ID NO: 68279 - RNA, 24 nt, synthetic construct
  misc_feature 1..24: note = Formin-1 (471-478)
  source 1..24: mol_type = other RNA
ttcctggacctcccccacaaggtg

SEQ ID NO: 68280 - RNA, 27 nt, synthetic construct
  misc_feature 1..27: note = Group XV phospholipase A2 (126-134)
  source 1..27: mol_type = other RNA
ttcctggaccccagcaagtcctctgtg

SEQ ID NO: 68281 - RNA, 24 nt, synthetic construct
  misc_feature 1..24: note = Glycogen phosphorylase, muscle form (144-151)
  source 1..24: mol_type = other RNA
ttcctggacagcatggccaccctc

SEQ ID NO: 68282 - RNA, 27 nt, synthetic construct
  misc_feature 1..27: note = Basic leucine zipper and W2 domain-containing protein 2 (51-59)
  source 1..27: mol_type = other RNA
ttcctggacagcaccggctccagactc

SEQ ID NO: 68283 - RNA, 27 nt, synthetic construct
  misc_feature 1..27: note = Tuftelin-interacting protein 11 (507-515)
  source 1..27: mol_type = other RNA
ttcctggacagctgggtgcacatcatt

SEQ ID NO: 68284 - RNA, 30 nt, synthetic construct
  misc_feature 1..30: note = Sulfate transporter (658-667)
  source 1..30: mol_type = other RNA
ttcctggacaccgccggcatccacacactc

SEQ ID NO: 68285 - RNA, 27 nt, synthetic construct
  misc_feature 1..27: note = Protein naked cuticle homolog 1 (320-328)
  source 1..27: mol_type = other RNA
ttcctggacacccccatcgccaaggtg

SEQ ID NO: 68286 - RNA, 27 nt, synthetic construct
  misc_feature 1..27: note = Protein S100-A1 (45-53)
  source 1..27: mol_type = other RNA
ttcctggacgtgaaggagctcatgctt

SEQ ID NO: 68287 - RNA, 27 nt, synthetic construct
  misc_feature 1..27: note = Electron transfer flavoprotein subunit beta (232-240)
  source 1..27: mol_type = other RNA
ttcctggactggccccagggcaccttt

SEQ ID NO: 68288 - RNA, 27 nt, synthetic construct
  misc_feature 1..27: note = A-kinase anchor protein 9 (882-890)
  source 1..27: mol_type = other RNA
ttcctggaggaaagaagcgtgctcctt

SEQ ID NO: 68289 - RNA, 27 nt, synthetic construct
  misc_feature 1..27: note = Paraneoplastic antigen Ma2 (107-115)
  source 1..27: mol_type = other RNA
ttcctggagaaggaaggccagaccgtg

SEQ ID NO: 68290 - RNA, 27 nt, synthetic construct
  misc_feature 1..27: note = Nitric oxide synthase-interacting protein (114-122)
  source 1..27: mol_type = other RNA
ttcctggagaaggaaagcgccatcgtg

SEQ ID NO: 68291 - RNA, 30 nt, synthetic construct
  misc_feature 1..30: note = Cytochrome c oxidase subunit 2 (127-136)
  source 1..30: mol_type = other RNA
ttcctggagcccggcgacctcagacttctg

SEQ ID NO: 68292 - RNA, 21 nt, synthetic construct
  misc_feature 1..21: note = Calnexin (139-145)
  source 1..21: mol_type = other RNA
ttcctgtttgacaccaagccc

SEQ ID NO: 68293 - RNA, 27 nt, synthetic construct
  misc_feature 1..27: note = Transmembrane protein 97 (118-126)
  source 1..27: mol_type = other RNA
ttcctgtttgaggacttcagcaaggcc

SEQ ID NO: 68294 - RNA, 27 nt, synthetic construct
  misc_feature 1..27: note = Melanoma-associated antigen 11 (321-329)
  source 1..27: mol_type = other RNA
ttcctgtttggcgagcccaagagactc

SEQ ID NO: 68295 - RNA, 27 nt, synthetic construct
  misc_feature 1..27: note = Transmembrane protein 106B (155-163)
  source 1..27: mol_type = other RNA
ttcctgtttcccagaagcatcgacgtg

SEQ ID NO: 68296 - RNA, 27 nt, synthetic construct
  misc_feature 1..27: note = Hephaestin (680-688)
  source 1..27: mol_type = other RNA
ttcctgtttagcaacctccccagactt

SEQ ID NO: 68297 - RNA, 27 nt, synthetic construct
  misc_feature 1..27: note = Unconventional myosin-Ib (362-370)
  source 1..27: mol_type = other RNA
ttcctgtttagctccgaccacctcatc

SEQ ID NO: 68298 - RNA, 24 nt, synthetic construct
  misc_feature 1..24: note = POU domain, class 2, transcription factor 1 (70-77)
  source 1..24: mol_type = other RNA
ttcctgggccacctccatcaggtg

SEQ ID NO: 68299 - RNA, 27 nt, synthetic construct
  misc_feature 1..27: note = Glutathione S-transferase Mu 4 (141-149)
  source 1..27: mol_type = other RNA
ttcctgggcaagagaccctggtttgtg

SEQ ID NO: 68300 - RNA, 27 nt, synthetic construct
  misc_feature 1..27: note = Maltase-glucoamylase, intestinal (1217-1225)
  source 1..27: mol_type = other RNA
ttcctgggccccacccctgagctcgtg

SEQ ID NO: 68301 - RNA, 27 nt, synthetic construct
  misc_feature 1..27: note = Asparagine synthetase (glutamine-hydrolyzing) (51-59)
  source 1..27: mol_type = other RNA
ttcctgggcagagacacctacggggtg

SEQ ID NO: 68302 - RNA, 27 nt, synthetic construct
  misc_feature 1..27: note = Ras GTPase-activating protein 1 (583-591)
  source 1..27: mol_type = other RNA
ttcctgcacgagaagctcgaaagcctt

SEQ ID NO: 68303 - RNA, 27 nt, synthetic construct
  misc_feature 1..27: note = Kelch domain-containing protein 8B (171-179)
  source 1..27: mol_type = other RNA
ttcctgcacggcaacaagatctacgtg

SEQ ID NO: 68304 - RNA, 30 nt, synthetic construct
  misc_feature 1..30: note = VWFA and cache domain-containing protein 1 (212-221)
  source 1..30: mol_type = other RNA
ttcctgatcgacgataagggctacaccctc

SEQ ID NO: 68305 - RNA, 30 nt, synthetic construct
  misc_feature 1..30: note = Adenylate kinase isoenzyme 5 (224-233)
  source 1..30: mol_type = other RNA
ttcctgatcgacggctaccccagagaggtg

SEQ ID NO: 68306 - RNA, 27 nt, synthetic construct
  misc_feature 1..27: note = BTB/POZ domain-containing protein KCTD9 (136-144)
  source 1..27: mol_type = other RNA
ttcctgatcgacagaagccccgagtac

SEQ ID NO: 68307 - RNA, 30 nt, synthetic construct; identical to SEQ ID NO: 44080
  misc_feature 1..30: note = Tensin-2 (1202-1211)
  source 1..30: mol_type = other RNA

SEQ ID NO: 68308 - RNA, 27 nt, synthetic construct
  misc_feature 1..27: note = Protein phosphatase 1 regulatory subunit 12A (37-45)
  source 1..27: mol_type = other RNA
ttcctgatcggccagggggcccacgtg

SEQ ID NO: 68309 - RNA, 27 nt, synthetic construct
  misc_feature 1..27: note = Proline-rich protein 12 (641-649)
  source 1..27: mol_type = other RNA
ttcctgatccagcacctccttcaagcc

SEQ ID NO: 68310 - RNA, 33 nt, synthetic construct
  misc_feature 1..33: note = Protein FAM73A (567-577)
  source 1..33: mol_type = other RNA
ttcctgaaggacatctttgatttcgagaaagtg

SEQ ID NO: 68311 - RNA, 27 nt, synthetic construct
  misc_feature 1..27: note = Catenin alpha-1 (85-93)
  source 1..27: mol_type = other RNA
ttcctgaaggaggaactcgtggccgct

SEQ ID NO: 68312 - RNA, 27 nt, synthetic construct
  misc_feature 1..27: note = Threonylcarbamoyladenosine tRNA methylthiotransferase (278-286)
  source 1..27: mol_type = other RNA
ttcctgaaggagaaagtgcccggcatc

SEQ ID NO: 68313 - RNA, 27 nt, synthetic construct
  misc_feature 1..27: note = Ankyrin-3 (171-179)
  source 1..27: mol_type = other RNA
ttcctgctcgaccacggcgccagcctt

SEQ ID NO: 68314 - RNA, 30 nt, synthetic construct
  misc_feature 1..30: note = DNA-binding protein RFX7 (684-693)
  source 1..30: mol_type = other RNA
ttcctgctcgacagcgattccaagtctgtg

SEQ ID NO: 68315 - RNA, 30 nt, synthetic construct
  misc_feature 1..30: note = Protein TANC2 (96-105)
  source 1..30: mol_type = other RNA
ttcctgctcggcgagaaggtgaccgaagtc

SEQ ID NO: 68316 - RNA, 27 nt, synthetic construct
  misc_feature 1..27: note = Transmembrane emp24 domain-containing protein 10 (22-30)
  source 1..27: mol_type = other RNA
ttcctgctcggccccagacttgtgctg

SEQ ID NO: 68317 - RNA, 27 nt, synthetic construct
  misc_feature 1..27: note = TBC1 domain family member 8B (190-198)
  source 1..27: mol_type = other RNA
ttcctgctcggcagcgagatcaagctt

SEQ ID NO: 68318 - RNA, 27 nt, synthetic construct
  misc_feature 1..27: note = Intraflagellar transport protein 56 (385-393)
  source 1..27: mol_type = other RNA
ttcctgctcatccagagcgagaagatg

SEQ ID NO: 68319 - RNA, 30 nt, synthetic construct
  misc_feature 1..30: note = Peptidyl-prolyl cis-trans isomerase B (15-24)
  source 1..30: mol_type = other RNA
ttcctgctccttcccggccctagcgccgct

SEQ ID NO: 68320 - RNA, 27 nt, synthetic construct
  misc_feature 1..27: note = G-protein coupled receptor 56 (460-468)
  source 1..27: mol_type = other RNA
ttcctgctcagcgagcccgtggccctt

SEQ ID NO: 68321 - RNA, 27 nt, synthetic construct
  misc_feature 1..27: note = Huntingtin (694-702)
  source 1..27: mol_type = other RNA
ttcctgctcaccggcgggaagaacgtg

SEQ ID NO: 68322 - RNA, 36 nt, synthetic construct; identical to SEQ ID NO: 44095
  misc_feature 1..36: note = Protocadherin Fat 3 (2442-2453)
  source 1..36: mol_type = other RNA

SEQ ID NO: 68323 - RNA, 27 nt, synthetic construct
  misc_feature 1..27: note = Cortactin-binding protein 2 (1244-1252)
  source 1..27: mol_type = other RNA
ttcctgatgggcaccatcgccaaggct

SEQ ID NO: 68324 - RNA, 33 nt, synthetic construct
  misc_feature 1..33: note = 5,6-dihydroxyindole-2-carboxylic acid oxidase (383-393)
  source 1..33: mol_type = other RNA
ttcctgaacggcaccgggggacagacacacctc

SEQ ID NO: 68325 - RNA, 27 nt, synthetic construct
  misc_feature 1..27: note = Multidrug and toxin extrusion protein 1 (134-142)
  source 1..27: mol_type = other RNA
ttcctgaacacccagcacatcctcctt

SEQ ID NO: 68326 - RNA, 27 nt, synthetic construct
  misc_feature 1..27: note = Peroxisome biogenesis factor 1 (613-621)
  source 1..27: mol_type = other RNA
ttcctgcccgccagcctcagatccgtg

SEQ ID NO: 68327 - RNA, 27 nt, synthetic construct
  misc_feature 1..27: note = Paired amphipathic helix protein Sin3a (379-387)
  source 1..27: mol_type = other RNA
ttcctgcccgacgccaacagctccgtg

SEQ ID NO: 68328 - RNA, 36 nt, synthetic construct
  misc_feature 1..36: note = Eukaryotic translation initiation factor 4 gamma 1 (1367-1378)
  source 1..36: mol_type = other RNA
ttcctgcccgagggccaggacatcggggcctttgtg

SEQ ID NO: 68329 - RNA, 27 nt, synthetic construct
  misc_feature 1..27: note = NADH dehydrogenase (ubiquinone) 1 alpha subcomplex subunit 9, mitochondrial (286-294)
  source 1..27: mol_type = other RNA
ttcctgccctttcctctcccacttttc

SEQ ID NO: 68330 - RNA, 27 nt, synthetic construct
  misc_feature 1..27: note = Mitochondrial dynamics protein MID51 (470-478)
  source 1..27: mol_type = other RNA
ttcctgcccagacaggccctccttttt

SEQ ID NO: 68331 - RNA, 30 nt, synthetic construct; identical to SEQ ID NO: 44104
  misc_feature 1..30: note = Ubiquitin carboxyl-terminal hydrolase 19 (742-751)
  source 1..30: mol_type = other RNA

SEQ ID NO: 68332 - RNA, 27 nt, synthetic construct
  misc_feature 1..27: note = Peroxisomal acyl-coenzyme A oxidase 1 (107-115)
  source 1..27: mol_type = other RNA
ttcctgcccaccctccttcaccaggcc

SEQ ID NO: 68333 - RNA, 30 nt, synthetic construct
  misc_feature 1..30: note = ATP-binding cassette sub-family C member 11 (455-464)
  source 1..30: mol_type = other RNA
ttcctgcaggagagccccgtgttttacgtc

SEQ ID NO: 68334 - RNA, 27 nt, synthetic construct
  misc_feature 1..27: note = Hemicentin-1 (2534-2542)
  source 1..27: mol_type = other RNA
ttcctgcagatcaccaacgtgcaagtc

SEQ ID NO: 68335 - RNA, 27 nt, synthetic construct
  misc_feature 1..27: note = Protocadherin gamma-A12 (749-757)
  source 1..27: mol_type = other RNA
ttcctgcagacctacagccacgaggtg

SEQ ID NO: 68336 - RNA, 27 nt, synthetic construct
  misc_feature 1..27: note = Melanocyte protein PMEL (239-247)
  source 1..27: mol_type = other RNA
ttcctgagaaaccagcccctcaccttt

SEQ ID NO: 68337 - RNA, 33 nt, synthetic construct
  misc_feature 1..33: note = Hemoglobin subunit alpha (5-15)
  source 1..33: mol_type = other RNA
ttcctgagctttcccaccacaaagacttacttc

SEQ ID NO: 68338 - RNA, 27 nt, synthetic construct
  misc_feature 1..27: note = Insulin receptor substrate 2 (1325-1333)
  source 1..27: mol_type = other RNA
ttcctgagccaccatctcaaggaggcc

SEQ ID NO: 68339 - RNA, 27 nt, synthetic construct
  misc_feature 1..27: note = Tensin-3 (1065-1073)
  source 1..27: mol_type = other RNA
ttcctgagccacaactttctcaccgtg

SEQ ID NO: 68340 - RNA, 27 nt, synthetic construct
  misc_feature 1..27: note = Protein capicua homolog (1061-1069)
  source 1..27: mol_type = other RNA
ttcctgagcatcatgtcccccgagatt

SEQ ID NO: 68341 - RNA, 33 nt, synthetic construct
  misc_feature 1..33: note = Vitamin K-dependent protein S (26-36)
  source 1..33: mol_type = other RNA
ttcctgagcaagcagcaagcctcccaggtgctc

SEQ ID NO: 68342 - RNA, 36 nt, synthetic construct
  misc_feature 1..36: note = Vitamin K-dependent protein S (26-37)
  source 1..36: mol_type = other RNA
ttcctgagcaagcagcaagcctcccaggtgctcgtc

SEQ ID NO: 68343 - RNA, 24 nt, synthetic construct
  misc_feature 1..24: note = mRNA-decapping enzyme 1A (523-530)
  source 1..24: mol_type = other RNA
ttcctgagcaccctccacgaggtg

SEQ ID NO: 68344 - RNA, 27 nt, synthetic construct
  misc_feature 1..27: note = Lysosomal-trafficking regulator (12-20)
  source 1..27: mol_type = other RNA
ttcctgaccgacgtgaacagactctgc

SEQ ID NO: 68345 - RNA, 30 nt, synthetic construct; identical to SEQ ID NO: 44118
  misc_feature 1..30: note = L-dopachrome tautomerase (52-61)
  source 1..30: mol_type = other RNA

SEQ ID NO: 68346 - RNA, 33 nt, synthetic construct
  misc_feature 1..33: note = L-dopachrome tautomerase (52-62)
  source 1..33: mol_type = other RNA
ttcctgaccagcgaccagctcggctactcctat

SEQ ID NO: 68347 - RNA, 27 nt, synthetic construct
  misc_feature 1..27: note = Bifunctional glutamate/proline-tRNA ligase (1167-1175)
  source 1..27: mol_type = other RNA
ttcctgtggcaggagggccacagcgcc

SEQ ID NO: 68348 - RNA, 27 nt, synthetic construct
  misc_feature 1..27: note = Fatty acyl-CoA reductase 1 (362-370)
  source 1..27: mol_type = other RNA
ttcctgtacgacatctatctcagaatg

SEQ ID NO: 68349 - RNA, 27 nt, synthetic construct
  misc_feature 1..27: note = Tetratricopeptide repeat protein 17 (740-748)
  source 1..27: mol_type = other RNA
ttcctgtacaacatcaccagctccgtg

SEQ ID NO: 68350 - RNA, 27 nt, synthetic construct
  misc_feature 1..27: note = Chromodomain-helicase-DNA-binding protein 1-like (358-366)
  source 1..27: mol_type = other RNA
ttcctgtacagcggcgggcacagagtg

SEQ ID NO: 68351 - RNA, 27 nt, synthetic construct
  misc_feature 1..27: note = Ropporin-1A (163-171)
  source 1..27: mol_type = other RNA
ttcctgtacacctatatcgccaaggtg

SEQ ID NO: 68352 - RNA, 27 nt, synthetic construct
  misc_feature 1..27: note = Histone deacetylase 11 (141-149)
  source 1..27: mol_type = other RNA
ttcatggacgataagagagtgtacatc

SEQ ID NO: 68353 - RNA, 27 nt, synthetic construct
  misc_feature 1..27: note = Pre-mRNA-processing-splicing factor 8 (1561-1569)
  source 1..27: mol_type = other RNA
ttcatgcacggcaagatccccaccctg

SEQ ID NO: 68354 - RNA, 27 nt, synthetic construct
  misc_feature 1..27: note = Maltase-glucoamylase (551-559)
  source 1..27: mol_type = other RNA
ttcatgaacaatagaagctttatcctg

SEQ ID NO: 68355 - RNA, 27 nt, synthetic construct
  misc_feature 1..27: note = Adenosine 3'-phospho 5'-phosphosulfate transporter 1 (49-57)
  source 1..27: mol_type = other RNA
ttcatggtgcccggctacctgctcgtc

SEQ ID NO: 68356 - RNA, 27 nt, synthetic construct
  misc_feature 1..27: note = DNA-directed RNA polymerase II subunit RPB1 (1247-1255)
  source 1..27: mol_type = other RNA
ttcaacgacgataatgccgagaagctg

SEQ ID NO: 68357 - RNA, 27 nt, synthetic construct
  misc_feature 1..27: note = Tumor susceptibility gene 101 protein (44-52)
  source 1..27: mol_type = other RNA
ttcaacgacggcagctccagagagctg

SEQ ID NO: 68358 - RNA, 27 nt, synthetic construct
  misc_feature 1..27: note = Amyloid-like protein 2 (10-18)
  source 1..27: mol_type = other RNA
ttcaacggcaatgggaagatcaacgtg

SEQ ID NO: 68359 - RNA, 21 nt, synthetic construct
  misc_feature 1..21: note = Cytoplasmic FMR1-interacting protein 1 (472-478)
  source 1..21: mol_type = other RNA
ttcaaccacgccatcagacat

SEQ ID NO: 68360 - RNA, 30 nt, synthetic construct
  misc_feature 1..30: note = WD repeat-containing protein 19 (187-196)
  source 1..30: mol_type = other RNA
ttccccgaccctaacggcaccagactggtg

SEQ ID NO: 68361 - RNA, 24 nt, synthetic construct
  misc_feature 1..24: note = WD repeat-containing protein 6 (464-471)
  source 1..24: mol_type = other RNA
ttccccggcaaggtgcacagcctg

SEQ ID NO: 68362 - RNA, 30 nt, synthetic construct
  misc_feature 1..30: note = Collagen alpha-1(VIII) chain (279-288)
  source 1..30: mol_type = other RNA
ttccccggccctcaggggccactgggaaag

SEQ ID NO: 68363 - RNA, 24 nt, synthetic construct
  misc_feature 1..24: note = Proline and serine-rich protein 1 (159-166)
  source 1..24: mol_type = other RNA
ttccccggcacccctctgaagaaa

SEQ ID NO: 68364 - RNA, 24 nt, synthetic construct
  misc_feature 1..24: note = Patatin-like phospholipase domain-containing protein 2 (454-461)
  source 1..24: mol_type = other RNA
ttcccccctgaggccctgagaatg

SEQ ID NO: 68365 - RNA, 27 nt, synthetic construct
  misc_feature 1..27: note = Non-POU domain-containing octamer-binding protein (129-137)
  source 1..27: mol_type = other RNA
ttccccagacctgtgaccgtcgagcca

SEQ ID NO: 68366 - RNA, 27 nt, synthetic construct
  misc_feature 1..27: note = Alpha-mannosidase 2x (42-50)
  source 1..27: mol_type = other RNA
ttccccagaagccagatctccgtgctg

SEQ ID NO: 68367 - RNA, 30 nt, synthetic construct
  misc_feature 1..30: note = Transformation/transcription domain-associated protein (2223-2232)
  source 1..30: mol_type = other RNA
ttccccaccgagcctagcacatcctctgtg

SEQ ID NO: 68368 - RNA, 27 nt, synthetic construct
  misc_feature 1..27: note = Protein 4.1 (223-231)
  source 1..27: mol_type = other RNA
ttcccctggcctaaggtgctgaaaatc

SEQ ID NO: 68369 - RNA, 24 nt, synthetic construct
  misc_feature 1..24: note = DNA polymerase alpha catalytic subunit (594-601)
  source 1..24: mol_type = other RNA
ttcccctacgcctttaaggaggtg

SEQ ID NO: 68370 - RNA, 27 nt, synthetic construct
  misc_feature 1..27: note = DnaJ homolog subfamily C member 11 (314-322)
  source 1..27: mol_type = other RNA
ttccaggacgatgaccaaaccagagtg

SEQ ID NO: 68371 - RNA, 24 nt, synthetic construct
  misc_feature 1..24: note = Structural maintenance of chromosomes flexible hinge domain-containing protein 1 (1128-1135)
  source 1..24: mol_type = other RNA
ttccaggacgatcacgtgagcctg

SEQ ID NO: 68372 - RNA, 27 nt, synthetic construct
  misc_feature 1..27: note = Serine/threonine-protein kinase MRCK alpha (144-152)
  source 1..27: mol_type = other RNA
ttccaggacgataacaatctgtacctc

SEQ ID NO: 68373 - RNA, 27 nt, synthetic construct
  misc_feature 1..27: note = Zinc finger HIT domain-containing protein 1 (40-48)
  source 1..27: mol_type = other RNA
ttccaggacgatccccacgccggcctg

SEQ ID NO: 68374 - RNA, 27 nt, synthetic construct
  misc_feature 1..27: note = General transcription factor 3C polypeptide 1 (734-742)
  source 1..27: mol_type = other RNA
ttccaggacaaggatcaagtgtttatc

SEQ ID NO: 68375 - RNA, 27 nt, synthetic construct
  misc_feature 1..27: note = Citron Rho-interacting kinase (164-172)
  source 1..27: mol_type = other RNA
ttccaggacaagaaccacctgtacctc

SEQ ID NO: 68376 - RNA, 27 nt, synthetic construct
  misc_feature 1..27: note = Protein PRR14L (1088-1096)
  source 1..27: mol_type = other RNA
ttccaggaggacagcagatccaccctg

SEQ ID NO: 68377 - RNA, 24 nt, synthetic construct
  misc_feature 1..24: note = Plectin (2903-2910)
  source 1..24: mol_type = other RNA
ttccagggcaagaccgtgacaatc

SEQ ID NO: 68378 - RNA, 21 nt, synthetic construct
  misc_feature 1..21: note = Proteasome activator complex subunit 4 (789-795)
  source 1..21: mol_type = other RNA
ttccagggcagccacaagcat

SEQ ID NO: 68379 - RNA, 27 nt, synthetic construct
  misc_feature 1..27: note = Heat shock 70 kDa protein 1B (21-29)
  source 1..27: mol_type = other RNA
ttccagcacggcaaggtggagatcatt

SEQ ID NO: 68380 - RNA, 27 nt, synthetic construct
  misc_feature 1..27: note = Spatacsin (332-340)
  source 1..27: mol_type = other RNA
ttccagatcgacagaagctggaaggcc

SEQ ID NO: 68381 - RNA, 24 nt, synthetic construct
  misc_feature 1..24: note = Sodium/potassium-transporting ATPase subunit alpha-3 (948-955)
  source 1..24: mol_type = other RNA
ttccagcaaggcatgaagaacaaa

SEQ ID NO: 68382 - RNA, 33 nt, synthetic construct
  misc_feature 1..33: note = Gamma-secretase C-terminal fragment 59 (565-575)
  source 1..33: mol_type = other RNA
ttcagacacgacagcggctacgaggtgcatcac

SEQ ID NO: 68383 - RNA, 36 nt, synthetic construct
  misc_feature 1..36: note = Gamma-secretase C-terminal fragment 59 (565-576)
  source 1..36: mol_type = other RNA
ttcagacacgacagcggctacgaggtgcatcaccag

SEQ ID NO: 68384 - RNA, 24 nt, synthetic construct
  misc_feature 1..24: note = 60S ribosomal protein L4 (257-264)
  source 1..24: mol_type = other RNA
ttcagaaagctggacgagctctac

SEQ ID NO: 68385 - RNA, 27 nt, synthetic construct
  misc_feature 1..27: note = Annexin A5 (288-296)
  source 1..27: mol_type = other RNA
ttcagaaagaactttgccaccagcctg

SEQ ID NO: 68386 - RNA, 27 nt, synthetic construct
  misc_feature 1..27: note = Glycogen phosphorylase, brain form (546-554)
  source 1..27: mol_type = other RNA
ttcagcgcctttctggagaaggaatac

SEQ ID NO: 68387 - RNA, 21 nt, synthetic construct
  misc_feature 1..21: note = Erlin-2 (43-49)
  source 1..21: mol_type = other RNA
ttcagcgccgtgcacaagatc

SEQ ID NO: 68388 - RNA, 27 nt, synthetic construct
  misc_feature 1..27: note = Myb-binding protein 1A (239-247)
  source 1..27: mol_type = other RNA
ttcagcgacgagaacgtgcccagactg

SEQ ID NO: 68389 - RNA, 24 nt, synthetic construct
  misc_feature 1..24: note = Leucine zipper putative tumor suppressor 1 (232-239)
  source 1..24: mol_type = other RNA
ttcagcgacggcgggtccaagctg

SEQ ID NO: 68390 - RNA, 27 nt, synthetic construct
  misc_feature 1..27: note = Basic leucine zipper and W2 domain-containing protein 2 (143-151)
  source 1..27: mol_type = other RNA
ttcagcgagaccgaacagacaaagctg

SEQ ID NO: 68391 - RNA, 30 nt, synthetic construct
  misc_feature 1..30: note = Cytoplasmic dynein 2 heavy chain 1 (202-211)
  source 1..30: mol_type = other RNA
ttcagcgagaccggcgggggagaaaagtac

SEQ ID NO: 68392 - RNA, 27 nt, synthetic construct
  misc_feature 1..27: note = Dual specificity protein phosphatase 4 (366-374)
  source 1..27: mol_type = other RNA
ttcagctttcccgtgtccgtcggcgtt

SEQ ID NO: 68393 - RNA, 30 nt, synthetic construct; identical to SEQ ID NO: 44166
  misc_feature 1..30: note = Protein FAM135A (667-676)
  source 1..30: mol_type = other RNA

SEQ ID NO: 68394 - RNA, 27 nt, synthetic construct
  misc_feature 1..27: note = Uncharacterized protein C20orf194 (1005-1013)
  source 1..27: mol_type = other RNA
ttcagcggcaacatctaccacattctg

SEQ ID NO: 68395 - RNA, 24 nt, synthetic construct
  misc_feature 1..24: note = RNA-binding protein FUS (355-362)
  source 1..24: mol_type = other RNA
ttcagcggcaaccccatcaaggtg

SEQ ID NO: 68396 - RNA, 24 nt, synthetic construct
  misc_feature 1..24: note = 5,6-dihydroxyindole-2-carboxylic acid oxidase (213-220)
  source 1..24: mol_type = other RNA
ttcagccacgagggccccgccttt

SEQ ID NO: 68397 - RNA, 24 nt, synthetic construct
  misc_feature 1..24: note = L-dopachrome tautomerase (209-216)
  source 1..24: mol_type = other RNA
ttcagccaccagggccccgccttt

SEQ ID NO: 68398 - RNA, 33 nt, synthetic construct
  misc_feature 1..33: note = Homeobox protein Hox-B7 (11-21)
  source 1..33: mol_type = other RNA
ttcagcaagtaccccgcctcctcttcagtgttt

SEQ ID NO: 68399 - RNA, 33 nt, synthetic construct
  misc_feature 1..33: note = Sodium/potassium/calcium exchanger 1 (352-362)
  source 1..33: mol_type = other RNA
ttcagcctgatcaacggcctccagcccgtgcct

SEQ ID NO: 68400 - RNA, 27 nt, synthetic construct
  misc_feature 1..27: note = Small subunit processome component 20 homolog (925-933)
  source 1..27: mol_type = other RNA
ttcagcaaccccagagccctgtacctc

SEQ ID NO: 68401 - RNA, 42 nt, synthetic construct
  misc_feature 1..42: note = Paired box protein Pax-1 (59-72)
  source 1..42: mol_type = other RNA
ttcagcccctccggctctctgctctcaggggccagtgctgag

SEQ ID NO: 68402 - RNA, 21 nt, synthetic construct
  misc_feature 1..21: note = ADP-ribosylation factor 4 (9-15)
  source 1..21: mol_type = other RNA
ttcagcagactgtttggcaag

SEQ ID NO: 68403 - RNA, 30 nt, synthetic construct
  misc_feature 1..30: note = Synemin (764-773)
  source 1..30: mol_type = other RNA
ttcagcgtgccctttaaggtcgaggaagtt

SEQ ID NO: 68404 - RNA, 30 nt, synthetic construct
  misc_feature 1..30: note = Elongation factor 1-gamma (335-344)
  source 1..30: mol_type = other RNA
ttcagctgggagggcgcctttcagcacgtg

SEQ ID NO: 68405 - RNA, 27 nt, synthetic construct
  misc_feature 1..27: note = Eukaryotic translation initiation factor 3 subunit H (135-143)
  source 1..27: mol_type = other RNA
ttcagctaccagcacgccatcgaggaa

SEQ ID NO: 68406 - RNA, 24 nt, synthetic construct
  misc_feature 1..24: note = Bcl-2-associated transcription factor 1 (338-345)
  source 1..24: mol_type = other RNA
ttcaccgacgaggaaagcagagtg

SEQ ID NO: 68407 - RNA, 27 nt, synthetic construct
  misc_feature 1..27: note = Nuclear pore complex protein Nup160 (151-159)
  source 1..27: mol_type = other RNA
ttcaccgacatcggcaaggtggatttt

SEQ ID NO: 68408 - RNA, 24 nt, synthetic construct
  misc_feature 1..24: note = Homeobox protein TGIF1 (222-229)
  source 1..24: mol_type = other RNA
ttcaccgacacaagcctgatgtac

SEQ ID NO: 68409 - RNA, 27 nt, synthetic construct
  misc_feature 1..27: note = Transmembrane 9 superfamily member 4 (168-176)
  source 1..27: mol_type = other RNA
ttcaccgacgtgaacaagatctacctg

SEQ ID NO: 68410 - RNA, 27 nt, synthetic construct
  misc_feature 1..27: note = Fibronectin isoform 7 (286-294)
  source 1..27: mol_type = other RNA
ttcaccgacgtgagagccgctgtctac

SEQ ID NO: 68411 - RNA, 27 nt, synthetic construct
  misc_feature 1..27: note = Integrator complex subunit 1 (745-753)
  source 1..27: mol_type = other RNA
ttcaccgagcagcccgaaacatactat

SEQ ID NO: 68412 - RNA, 27 nt, synthetic construct
  misc_feature 1..27: note = CUB and sushi domain-containing protein 1 (3053-3061)
  source 1..27: mol_type = other RNA
ttcacctttaacaagacagtgagctac

SEQ ID NO: 68413 - RNA, 21 nt, synthetic construct
  misc_feature 1..21: note = Up-regulated during skeletal muscle growth protein 5 (12-18)
  source 1..21: mol_type = other RNA
ttcaccggcatcaagaaatac

SEQ ID NO: 68414 - RNA, 21 nt, synthetic construct
  misc_feature 1..21: note = Bestrophin-1 (575-581)
  source 1..21: mol_type = other RNA
ttcaccggcatcctggggaag

SEQ ID NO: 68415 - RNA, 27 nt, synthetic construct
  misc_feature 1..27: note = Ribosomal protein S6 kinase alpha-3 (519-527)
  source 1..27: mol_type = other RNA
ttcaccatcacaaagactgtggagtac

SEQ ID NO: 68416 - RNA, 27 nt, synthetic construct
  misc_feature 1..27: note = Nuclear factor erythroid 2-related factor 1 (300-308)
  source 1..27: mol_type = other RNA
ttcaccaacgacaagatcattaatctg

SEQ ID NO: 68417 - RNA, 27 nt, synthetic construct
  misc_feature 1..27: note = Serine-threonine kinase receptor-associated protein (108-116)
  source 1..27: mol_type = other RNA
ttcacccaggacagcaactacctgctc

SEQ ID NO: 68418 - RNA, 39 nt, synthetic construct
  misc_feature 1..39: note = FXYD domain-containing ion transport regulator 3 isoform 3 (28-40)
  source 1..39: mol_type = other RNA
ttcacccagagccccctgcacggcgccgctgcagcctac

SEQ ID NO: 68419 - RNA, 30 nt, synthetic construct
  misc_feature 1..30: note = FRAS1-related extracellular matrix protein 1 (471-480)
  source 1..30: mol_type = other RNA
ttcaccgtggccgacctgcaggctggcgtc

SEQ ID NO: 68420 - RNA, 27 nt, synthetic construct
  misc_feature 1..27: note = CUB and sushi domain-containing protein 1 (2875-2883)
  source 1..27: mol_type = other RNA
ttcacctacggcgccgtggtccactat

SEQ ID NO: 68421 - RNA, 27 nt, synthetic construct
  misc_feature 1..27: note = Fibronectin (364-372)
  source 1..27: mol_type = other RNA
ttcacctacaacggcagaacattttat

SEQ ID NO: 68422 - RNA, 27 nt, synthetic construct
  misc_feature 1..27: note = Leucine-rich repeat protein 1 (73-81)
  source 1..27: mol_type = other RNA
ttcgtggacgagggcaaggccaccgtc

SEQ ID NO: 68423 - RNA, 21 nt, synthetic construct
  misc_feature 1..21: note = Protein FAM127B (50-56)
  source 1..21: mol_type = other RNA
ttcgtggacgagaacaccttt

SEQ ID NO: 68424 - RNA, 27 nt, synthetic construct
  misc_feature 1..27: note = Calsyntenin-1 (820-828)
  source 1..27: mol_type = other RNA
ttcgtggacctgagcggccacaacctc

SEQ ID NO: 68425 - RNA, 27 nt, synthetic construct
  misc_feature 1..27: note = Ras-specific guanine nucleotide-releasing factor RalGPS2 (272-280)
  source 1..27: mol_type = other RNA
ttcgtggaggacgataactacaagctg

SEQ ID NO: 68426 - RNA, 27 nt, synthetic construct
  misc_feature 1..27: note = Smith-Magenis syndrome chromosomal region candidate gene 8 protein (117-125)
  source 1..27: mol_type = other RNA
ttcgtggaggacagcaaggtcgttctg

SEQ ID NO: 68427 - RNA, 27 nt, synthetic construct
  misc_feature 1..27: note = (38-46)
  source 1..27: mol_type = other RNA
ttcgtggaggaaaccgtctacctgctc

SEQ ID NO: 68428 - RNA, 39 nt, synthetic construct
  misc_feature 1..39: note = Tubulin beta chain (110-122)
  source 1..39: mol_type = other RNA
ttcgtgtttggccagagcggggccggaaacaattgggct

SEQ ID NO: 68429 - RNA, 27 nt, synthetic construct
  misc_feature 1..27: note = 2-hydroxyacylsphingosine 1-beta-galactosyltransferase (145-153)
  source 1..27: mol_type = other RNA
ttcgtgatcgcccacctgctcggcgtc

SEQ ID NO: 68430 - RNA, 27 nt, synthetic construct
  misc_feature 1..27: note = Glioma tumor suppressor candidate region gene 1 protein (784-792)
  source 1..27: mol_type = other RNA
ttcgtgatccagaaccaactgggcgtc

SEQ ID NO: 68431 - RNA, 27 nt, synthetic construct
  misc_feature 1..27: note = 40S ribosomal protein S26 (39-47)
  source 1..27: mol_type = other RNA
ttcgtgatcagaaacattgtcgaggcc

SEQ ID NO: 68432 - RNA, 27 nt, synthetic construct
  misc_feature 1..27: note = Kelch-like protein 7 (430-438)
  source 1..27: mol_type = other RNA
ttcgtgaaggacaaaatctttgccgtc

SEQ ID NO: 68433 - RNA, 27 nt, synthetic construct
  misc_feature 1..27: note = Tectonic-1 (346-354)
  source 1..27: mol_type = other RNA
ttcgtgctgggcaccgtcagctccgtt

SEQ ID NO: 68434 - RNA, 27 nt, synthetic construct
  misc_feature 1..27: note = Zinc finger protein 618 (573-581)
  source 1..27: mol_type = other RNA
ttcgtgatgagcgagatcagaaccgtc

SEQ ID NO: 68435 - RNA, 30 nt, synthetic construct; identical to SEQ ID NO: 44208
  misc_feature 1..30: note = Integrin alpha-11 (525-534)
  source 1..30: mol_type = other RNA

SEQ ID NO: 68436 - RNA, 33 nt, synthetic construct; identical to SEQ ID NO: 44209
  misc_feature 1..33: note = Protein disulfide-isomerase TMX3 (154-164)
  source 1..33: mol_type = other RNA

SEQ ID NO: 68437 - RNA, 27 nt, synthetic construct
  misc_feature 1..27: note = Palmitoyl-protein thioesterase 1 (194-202)
  source 1..27: mol_type = other RNA
ttctacgcccacatcattccctttctg

SEQ ID NO: 68438 - RNA, 27 nt, synthetic construct
  misc_feature 1..27: note = Serine/threonine-protein kinase 36 (200-208)
  source 1..27: mol_type = other RNA
ttctacgccaccagcatctttcagctg

SEQ ID NO: 68439 - RNA, 27 nt, synthetic construct
  misc_feature 1..27: note = Tetratricopeptide repeat protein 31 (320-328)
  source 1..27: mol_type = other RNA
ttctaccacgaggccgtggtcctgttt

SEQ ID NO: 68440 - RNA, 30 nt, synthetic construct
  misc_feature 1..30: note = Ubinuclein-1 (160-169)
  source 1..30: mol_type = other RNA
ttctacatcaacagcggcaccctgcagttt

SEQ ID NO: 68441 - RNA, 21 nt, synthetic construct
  misc_feature 1..21: note = HLA class I histocompatibility antigen, B-15 alpha chain (232-238)
  source 1..21: mol_type = other RNA
ttctaccccgccgagatcacc

SEQ ID NO: 68442 - RNA, 27 nt, synthetic construct
  misc_feature 1..27: note = PX domain-containing protein kinase-like protein (233-241)
  source 1..27: mol_type = other RNA
ttctacagaagctatttttcccagttc

SEQ ID NO: 68443 - RNA, 27 nt, synthetic construct
  misc_feature 1..27: note = HLA class II histocompatibility antigen, DO alpha chain (163-171)
  source 1..27: mol_type = other RNA
ttctacagccagcccgaccacctgttt

SEQ ID NO: 68444 - RNA, 33 nt, synthetic construct
  misc_feature 1..33: note = Hypoxia-inducible factor 1-alpha (545-555)
  source 1..33: mol_type = other RNA
ttctacgtggacagcgatatggtcaacgagttt

SEQ ID NO: 68445 - RNA, 66 nt, synthetic construct
  misc_feature 1..66: note = Neurobeachin (23-44)
  source 1..66: mol_type = other RNA
ggcgccgctgggggaggtggcgggggaagcggcggtgggggaaccggcggctccgggatgggagag

SEQ ID NO: 68446 - RNA, 27 nt, synthetic construct
  misc_feature 1..27: note = Myb-binding protein 1A (310-318)
  source 1..27: mol_type = other RNA
ggcgccgctctgcccctccttaccaag

SEQ ID NO: 68447 - RNA, 27 nt, synthetic construct
  misc_feature 1..27: note = Neutral amino acid transporter A (59-67)
  source 1..27: mol_type = other RNA
ggcgccgctctgagagggctcagcctt

SEQ ID NO: 68448 - RNA, 48 nt, synthetic construct
  misc_feature 1..48: note = Beta-secretase 2 (73-88)
  source 1..48: mol_type = other RNA
ggcgccgctaacttcctggcaatggtggacaatctccagggggatagc

SEQ ID NO: 68449 - RNA, 39 nt, synthetic construct
  misc_feature 1..39: note = Transcription factor E2F3 (21-33)
  source 1..39: mol_type = other RNA
ggcgccgctgtggtcgcagccgcggctgccgcaagcatg

SEQ ID NO: 68450 - RNA, 27 nt, synthetic construct
  misc_feature 1..27: note = U3 small nucleolar RNA-associated protein 15 homolog (121-129)
  source 1..27: mol_type = other RNA
ggcgccgacgattacaccgtgaagctg

SEQ ID NO: 68451 - RNA, 27 nt, synthetic construct
  misc_feature 1..27: note = Pre-mRNA-processing factor 19 (241-249)
  source 1..27: mol_type = other RNA
ggcgccgacaagaacgtggtcgttttc

SEQ ID NO: 68452 - RNA, 57 nt, synthetic construct
  misc_feature 1..57: note = Myc-associated zinc finger protein (303-321)
  source 1..57: mol_type = other RNA
ggcgccgggggaggtggcggggaggctggagcaggcggtggggccgcggctgtggcc

SEQ ID NO: 68453 - RNA, 36 nt, synthetic construct
  misc_feature 1..36: note = High affinity cationic amino acid transporter 1 (35-46)
  source 1..36: mol_type = other RNA
ggcgccggggtgtacgtcctggctggagcagttgcc

SEQ ID NO: 68454 - RNA, 39 nt, synthetic construct
  misc_feature 1..39: note = Cytochrome c oxidase subunit 5B, mitochondrial (117-129)
  source 1..39: mol_type = other RNA
ggcgcccactacaagctggtgccccagcaactcgctcat

SEQ ID NO: 68455 - RNA, 45 nt, synthetic construct
  misc_feature 1..45: note = Adenosylhomocysteinase 3 (39-53)
  source 1..45: mol_type = other RNA
ggcgccatggctccccctgcagggggaggtgacccagaggccccg

SEQ ID NO: 68456 - RNA, 39 nt, synthetic construct
  misc_feature 1..39: note = Sickle tail protein homolog (296-308)
  source 1..39: mol_type = other RNA
ggcgcccccagacctgggagcaccgctcacccaccgcat

SEQ ID NO: 68457 - RNA, 33 nt, synthetic construct
  misc_feature 1..33: note = Fibrocystin (1261-1271)
  source 1..33: mol_type = other RNA
ggcgcccccaccgtgcctgctgcagtcgaggtt

SEQ ID NO: 68458 - RNA, 57 nt, synthetic construct
  misc_feature 1..57: note = Collagen alpha-1(XVIII) chain (992-1010)
  source 1..57: mol_type = other RNA
ggcgccagaggggagagcggactggctggtgcacccggccctgccgggccaccggga

SEQ ID NO: 68459 - RNA, 24 nt, synthetic construct
  misc_feature 1..24: note = Mastermind-like protein 2 (85-92)
  source 1..24: mol_type = other RNA
ggcgccagaaaggctgggaaacac

SEQ ID NO: 68460 - RNA, 99 nt, synthetic construct
  misc_feature 1..99: note = Frizzled-8 (634-666)
  source 1..99: mol_type = other RNA
ggcgccaccgctgcagggggaggtggcgggcccggaggcggtgggggaggcggccctgggggaggtggcgggccaggaggcggtgggggaagcctgtac

SEQ ID NO: 68461 - RNA, 60 nt, synthetic construct
  misc_feature 1..60: note = 26S protease regulatory subunit 6A (376-395)
  source 1..60: mol_type = other RNA
ggcgccaccgagctgacacacgaagactacatggaggggatcctcgaagtgcaggctaag

SEQ ID NO: 68462 - RNA, 36 nt, synthetic construct
  misc_feature 1..36: note = Vesicle transport protein SFT2C (154-165)
  source 1..36: mol_type = other RNA
ggcgccaccctgttcgctgcactcgggcttagaagc

SEQ ID NO: 68463 - RNA, 45 nt, synthetic construct
  misc_feature 1..45: note = Chondroitin sulfate proteoglycan 4 (2058-2072)
  source 1..45: mol_type = other RNA
ggcgccaccctgagactcgaccccacagtgcttgatgctggggag

SEQ ID NO: 68464 - RNA, 27 nt, synthetic construct
  misc_feature 1..27: note = Pecanex-like protein 3 (1088-1096)
  source 1..27: mol_type = other RNA
ggcgccgtggggttctttacccactac

SEQ ID NO: 68465 - RNA, 27 nt, synthetic construct
  misc_feature 1..27: note = Pecanex-like protein 2 (267-275)
  source 1..27: mol_type = other RNA
ggcgccgtggggttcgtcacccactac

SEQ ID NO: 68466 - RNA, 27 nt, synthetic construct
  misc_feature 1..27: note = Tensin-3 (1204-1212)
  source 1..27: mol_type = other RNA
ggcgcctacgggctggctatgaaggtg

SEQ ID NO: 68467 - RNA, 69 nt, synthetic construct
  misc_feature 1..69: note = Cytochrome c oxidase subunit 6A1, mitochondrial (64-86)
  source 1..69: mol_type = other RNA
ggcgacgggaaccacaccctgttccataatccccacgtgaaccctctcccaacaggatacgaggatgaa

SEQ ID NO: 68468 - RNA, 54 nt, synthetic construct
  misc_feature 1..54: note = Cadherin-2 (266-283)
  source 1..54: mol_type = other RNA
ggcgaccccaccgggagattcgccatccagacagatcctaacagcaatgacgga

SEQ ID NO: 68469 - RNA, 30 nt, synthetic construct
  misc_feature 1..30: note = E3 ubiquitin-protein ligase makorin-1 (147-156)
  source 1..30: mol_type = other RNA
ggcgaggccgaaagcagaaactccaatttc

SEQ ID NO: 68470 - RNA, 30 nt, synthetic construct
  misc_feature 1..30: note = Suppression of tumorigenicity 5 protein (770-779)
  source 1..30: mol_type = other RNA
ggcgaggacgggagcagaaggttcggatac

SEQ ID NO: 68471 - RNA, 33 nt, synthetic construct
  misc_feature 1..33: note = Melanotransferrin (422-432)
  source 1..33: mol_type = other RNA
ggcgaggacatctacaccgccgggaagacatat

SEQ ID NO: 68472 - RNA, 30 nt, synthetic construct
  misc_feature 1..30: note = Protein capicua homolog (1390-1399)
  source 1..30: mol_type = other RNA
ggcgaggaccccgaagggaacaagggattc

SEQ ID NO: 68473 - RNA, 63 nt, synthetic construct
  misc_feature 1..63: note = Eukaryotic translation initiation factor 5A-1 (130-150)
  source 1..63: mol_type = other RNA
ggcgaggaaatcctgattaccgtgctcagcgccatgacagaggaagctgcagtcgccataaag

SEQ ID NO: 68474 - RNA, 27 nt, synthetic construct
  misc_feature 1..27: note = Nucleosome-remodeling factor subunit BPTF (1023-1031)
  source 1..27: mol_type = other RNA
ggcgaggaatacagagtgaccgggtat

SEQ ID NO: 68475 - RNA, 48 nt, synthetic construct
  misc_feature 1..48: note = Gamma-interferon-inducible protein 16 (644-659)
  source 1..48: mol_type = other RNA
ggcgagttcacctactatgaaatccaggacaacacagggaagatggag

SEQ ID NO: 68476 - RNA, 27 nt, synthetic construct
  misc_feature 1..27: note = Cyclin-dependent kinase 6 (20-28)
  source 1..27: mol_type = other RNA
ggcgagggggcctacggaaaggtgttc

SEQ ID NO: 68477 - RNA, 24 nt, synthetic construct
  misc_feature 1..24: note = Nestin (495-502)
  source 1..24: mol_type = other RNA
ggcgagggggaaggacagatctgg

SEQ ID NO: 68478 - RNA, 27 nt, synthetic construct
  misc_feature 1..27: note = Zinc finger and BTB domain-containing protein 10 (226-234)
  source 1..27: mol_type = other RNA
ggcgagggggaaaccgtgcagcacttc

SEQ ID NO: 68479 - RNA, 30 nt, synthetic construct
  misc_feature 1..30: note = Matrix metalloproteinase-24 (185-194)
  source 1..30: mol_type = other RNA
ggcgaggggggattcctggcccacgcttac

SEQ ID NO: 68480 - RNA, 27 nt, synthetic construct
  misc_feature 1..27: note = Filamin-B (1548-1556)
  source 1..27: mol_type = other RNA
ggcgaggggctgctcgccgtgcagatc

SEQ ID NO: 68481 - RNA, 30 nt, synthetic construct
  misc_feature 1..30: note = Chondroitin sulfate proteoglycan 4 (1563-1572)
  source 1..30: mol_type = other RNA
ggcgagcacaccagccccgggcatttcttt

SEQ ID NO: 68482 - RNA, 27 nt, synthetic construct
  misc_feature 1..27: note = EKC/KEOPS complex subunit TPRKB (113-121)
  source 1..27: mol_type = other RNA
ggcgagaagcagatcaaccaagaatac

SEQ ID NO: 68483 - RNA, 27 nt, synthetic construct
  misc_feature 1..27: note = Peroxisomal biogenesis factor 19 (180-188)
  source 1..27: mol_type = other RNA
ggcgagatgccccctgggctgaacttc

SEQ ID NO: 68484 - RNA, 27 nt, synthetic construct
  misc_feature 1..27: note = TRAF2 and NCK-interacting protein kinase (434-442)
  source 1..27: mol_type = other RNA
ggcgagatgcccaccagcgtggcctac

SEQ ID NO: 68485 - RNA, 30 nt, synthetic construct
  misc_feature 1..30: note = Girdin (1244-1253)
  source 1..30: mol_type = other RNA
ggcgagaacgacagactgaatcacacctac

SEQ ID NO: 68486 - RNA, 30 nt, synthetic construct
  misc_feature 1..30: note = Plectin (1154-1163)
  source 1..30: mol_type = other RNA
ggcgagagagacgtggaagtcgagaggtgg

SEQ ID NO: 68487 - RNA, 27 nt, synthetic construct
  misc_feature 1..27: note = Fragile X mental retardation syndrome-related protein 1 (266-274)
  source 1..27: mol_type = other RNA
ggcgagagcgccgacgctgtgaagaaa

SEQ ID NO: 68488 - RNA, 27 nt, synthetic construct
  misc_feature 1..27: note = Nestin (482-490)
  source 1..27: mol_type = other RNA
ggcgagagcgggggatccagagtgttc

SEQ ID NO: 68489 - RNA, 27 nt, synthetic construct
  misc_feature 1..27: note = Protein MON2 homolog (918-926)
  source 1..27: mol_type = other RNA
ggcgagagcctgatcagaaccgccttc

SEQ ID NO: 68490 - RNA, 30 nt, synthetic construct
  misc_feature 1..30: note = Synemin (317-326)
  source 1..30: mol_type = other RNA
ggcgagagcaaccccgaaatcgtgatttgg

SEQ ID NO: 68491 - RNA, 27 nt, synthetic construct
  misc_feature 1..27: note = Protein piccolo (255-263)
  source 1..27: mol_type = other RNA
ggcgagagcgtgaagccctccctgcct

SEQ ID NO: 68492 - RNA, 30 nt, synthetic construct
  misc_feature 1..30: note = Vacuolar protein sorting-associated protein 18 homolog (657-666)
  source 1..30: mol_type = other RNA
ggcgagaccgaacaggccatccacaactac

SEQ ID NO: 68493 - RNA, 30 nt, synthetic construct
  misc_feature 1..30: note = Spectrin beta chain, non-erythrocytic 2 (1112-1121)
  source 1..30: mol_type = other RNA
ggcgaggtggaaagagcccagagcgagtac

SEQ ID NO: 68494 - RNA, 27 nt, synthetic construct
  misc_feature 1..27: note = ATP-citrate synthase (392-400)
  source 1..27: mol_type = other RNA
ggcgaggtggggaagaccacaggaatc

SEQ ID NO: 68495 - RNA, 27 nt, synthetic construct
  misc_feature 1..27: note = Hermansky-Pudlak syndrome 5 protein (252-260)
  source 1..27: mol_type = other RNA
ggcgaggtgatcagcacccaccagttc

SEQ ID NO: 68496 - RNA, 36 nt, synthetic construct
  misc_feature 1..36: note = Serum albumin (423-434)
  source 1..36: mol_type = other RNA
ggcgagtacaagttccagaacgccctgctcgtgaga

SEQ ID NO: 68497 - RNA, 33 nt, synthetic construct
  misc_feature 1..33: note = HLA class I histocompatibility antigen, B-15 alpha chain (231-241)
  source 1..33: mol_type = other RNA
ggcttctaccccgccgagatcaccctgacatgg

SEQ ID NO: 68498 - RNA, 60 nt, synthetic construct
  misc_feature 1..60: note = Transcription factor Maf (211-230)
  source 1..60: mol_type = other RNA
ggcggggccggaggtgctggcgggggaggccccgcaagcgccggtgggggaggcggcggg

SEQ ID NO: 68499 - RNA, 21 nt, synthetic construct
  misc_feature 1..21: note = Inhibitor of nuclear factor kappa-B kinase subunit beta (42-48)
  source 1..21: mol_type = other RNA
ggcggggacctgagaaagtac

SEQ ID NO: 68500 - RNA, 57 nt, synthetic construct
  misc_feature 1..57: note = Cadherin-2 (265-283)
  source 1..57: mol_type = other RNA
ggcggggaccccaccggaagattcgccatccagacagatcctaacagcaatgacggt

SEQ ID NO: 68501 - RNA, 93 nt, synthetic construct
  misc_feature 1..93: note = Keratin, type I cytoskeletal 9 (593-623)
  source 1..93: mol_type = other RNA
ggcggggagagcggaggttcctacggcgggggagaagaggcctctggctcaggtgggggatatggcggcgggagtggaaagagctcccactct

SEQ ID NO: 68502 - RNA, 69 nt, synthetic construct
  misc_feature 1..69: note = Prostaglandin reductase 1 (141-163)
  source 1..69: mol_type = other RNA
ggcggggagaccgtgatggtcaacgccgctgcaggagccgttggtagcgtggtaggccagatcgcgaag

SEQ ID NO: 68503 - RNA, 51 nt, synthetic construct
  misc_feature 1..51: note = Hemicentin-1 (3579-3595)
  source 1..51: mol_type = other RNA
ggcgggggagaggtgctgagaatcagcaccgcccaggtcgaagacacaggt

SEQ ID NO: 68504 - RNA, 57 nt, synthetic construct
  misc_feature 1..57: note = Regulator of nonsense transcripts 1 (55-73)
  source 1..57: mol_type = other RNA
ggcgggggaggtgccggcgggcccggaggcgctggtgcaggggccgcggctggacag

SEQ ID NO: 68505 - RNA, 69 nt, synthetic construct
  misc_feature 1..69: note = Electrogenic sodium bicarbonate cotransporter 4 (440-462)
  source 1..69: mol_type = other RNA
ggcgggggaggtggcgcccccgggggaggcaacggtgggggaggcggcgggggaagcggtggcggggct

SEQ ID NO: 68506 - RNA, 51 nt, synthetic construct
  misc_feature 1..51: note = AT-rich interactive domain-containing protein 1B (322-338)
  source 1..51: mol_type = other RNA
ggcgggggaggtggcgggggagccggcgctggtggggcaggagccggcgcg

SEQ ID NO: 68507 - RNA, 45 nt, synthetic construct
  misc_feature 1..45: note = Neuronal PAS domain-containing protein 3 (734-748)
  source 1..45: mol_type = other RNA
ggcgggggaggtggcgggggagccggcggtgggggacccagcgct

SEQ ID NO: 68508 - RNA, 57 nt, synthetic construct
  misc_feature 1..57: note = Homeobox even-skipped homolog protein 2 (416-434)
  source 1..57: mol_type = other RNA
ggcgggggaggtggcgggggaggcggtgggggaggcggcgccggggctggaggtggc

SEQ ID NO: 68509 - RNA, 66 nt, synthetic construct
  misc_feature 1..66: note = WD repeat-containing protein 26 (8-29)
  source 1..66: mol_type = other RNA
ggcgggggaggtggcgggggaggcggtgggggaggcggcgggggaggtggcgggcagggacaaacc

SEQ ID NO: 68510 - RNA, 54 nt, synthetic construct
  misc_feature 1..54: note = Keratin, type I cytoskeletal 9 (15-32)
  source 1..54: mol_type = other RNA
ggcgggggaggtggcgggggactgggcagcggtgggtccatcagatcttcatac

SEQ ID NO: 68511 - RNA, 45 nt, synthetic construct
  misc_feature 1..45: note = Zinc finger SWIM domain-containing protein 6 (150-164)
  source 1..45: mol_type = other RNA
ggcgggggaggtggcagctcctcttcacccgccgctaccagtgca

SEQ ID NO: 68512 - RNA, 39 nt, synthetic construct
  misc_feature 1..39: note = 40S ribosomal protein S16 (74-86)
  source 1..39: mol_type = other RNA
ggcgggggacacgtggcccagatctacggtgagagccaa

SEQ ID NO: 68513 - RNA, 30 nt, synthetic construct
  misc_feature 1..30: note = Serine/threonine-protein kinase TAO2 (869-878)
  source 1..30: mol_type = other RNA
ggcgggggactgcaggccgctctccttgca

SEQ ID NO: 68514 - RNA, 54 nt, synthetic construct
  misc_feature 1..54: note = Keratin, type II cytoskeletal 1 (595-612)
  source 1..54: mol_type = other RNA
ggcgggggaagctccggtggcagagggtctggaggcggttcaagtgggggaagc

SEQ ID NO: 68515 - RNA, 39 nt, synthetic construct
  misc_feature 1..39: note = Keratin, type II cytoskeletal 3 (144-156)
  source 1..39: mol_type = other RNA
ggcgggggatacggtggcgggatgggaggcggtctgggg

SEQ ID NO: 68516 - RNA, 60 nt, synthetic construct
  misc_feature 1..60: note = Protein scribble homolog (1289-1308)
  source 1..60: mol_type = other RNA
ggcgggaagatggccgagagcccctgctccccttctggacagcaaccaccgtcaccccct

SEQ ID NO: 68517 - RNA, 39 nt, synthetic construct
  misc_feature 1..39: note = Protein TASOR (44-56)
  source 1..39: mol_type = other RNA
ggcgggctgaacatcgccgagcccagcggaggtgctggc

SEQ ID NO: 68518 - RNA, 78 nt, synthetic construct
  misc_feature 1..78: note = Keratin, type I cytoskeletal 18 (56-81)
  source 1..78: mol_type = other RNA
ggcgggatgggaagcggtggcctggccaccgggatcgctggaggcctcgcaggtatggggggaattcagaacgagaag

SEQ ID NO: 68519 - RNA, 54 nt, synthetic construct
  misc_feature 1..54: note = Inositol 1,4,5-trisphosphate receptor type 1 (1761-1778)
  source 1..54: mol_type = other RNA
ggcgggcccggaaagcctggtggcgggggaggcggtagcgggtcctcttcaatg

SEQ ID NO: 68520 - RNA, 30 nt, synthetic construct
  misc_feature 1..30: note = KN motif and ankyrin repeat domain-containing protein 2 (473-482)
  source 1..30: mol_type = other RNA
ggcgggccccctgccggagtgagaagcatc

SEQ ID NO: 68521 - RNA, 39 nt, synthetic construct
  misc_feature 1..39: note = AT-rich interactive domain-containing protein 1A (277-289)
  source 1..39: mol_type = other RNA
ggcgggcccagcgccgctggaggtggcacccctcagcca

SEQ ID NO: 68522 - RNA, 48 nt, synthetic construct
  misc_feature 1..48: note = Protein transport protein Sec24C (725-740)
  source 1..48: mol_type = other RNA
ggcgggagcgtgtacaagtatgcctccttccaggtcgagaacgaccaa

SEQ ID NO: 68523 - RNA, 75 nt, synthetic construct
  misc_feature 1..75: note = HLA class I histocompatibility antigen, A-1 alpha chain (316-340)
  source 1..75: mol_type = other RNA
ggcgggagctacacccaggccgcttcctctgactcagcacaaggaagtgatgtgagcctgacagcctgcaaggtc

SEQ ID NO: 68524 - RNA, 27 nt, synthetic construct
  misc_feature 1..27: note = Abl interactor 2 (222-230)
  source 1..27: mol_type = other RNA
ggccaccccgtgcagttctacagcatg

SEQ ID NO: 68525 - RNA, 84 nt, synthetic construct
  misc_feature 1..84: note = Guanine nucleotide-binding protein subunit beta-2-like 1 (61-88)
  source 1..84: mol_type = other RNA
ggccacagccatttcgtgtccgacgtcgttatctcttcagatgggcagtttgccctgagtggaagctgggacggtaccctcaga

SEQ ID NO: 68526 - RNA, 27 nt, synthetic construct
  misc_feature 1..27: note = Spatacsin (1079-1087)
  source 1..27: mol_type = other RNA
ggccacaccctgctcgcccttgctaca

SEQ ID NO: 68527 - RNA, 27 nt, synthetic construct
  misc_feature 1..27: note = Protein Jumonji (51-59)
  source 1..27: mol_type = other RNA
ggcatcgccgggagcctgaagaccgtg

SEQ ID NO: 68528 - RNA, 27 nt, synthetic construct
  misc_feature 1..27: note = Lipoprotein lipase (23-31)
  source 1..27: mol_type = other RNA
ggcatcgccgggagcctgaccaacaag

SEQ ID NO: 68529 - RNA, 39 nt, synthetic construct
  misc_feature 1..39: note = Protein transport protein Sec16A (84-96)
  source 1..39: mol_type = other RNA
ggcatcgccaaccccctgctcgctgtgcctgcaccaagc

SEQ ID NO: 68530 - RNA, 30 nt, synthetic construct
  misc_feature 1..30: note = Interferon alpha-inducible protein 27, mitochondrial (57-66)
  source 1..30: mol_type = other RNA
ggcatcgccagctcctctattgctgcaaag

SEQ ID NO: 68531 - RNA, 27 nt, synthetic construct
  misc_feature 1..27: note = HLA class II histocompatibility antigen, DQ beta 1 chain (233-241)
  source 1..27: mol_type = other RNA
ggcatcgggggattcgtgctgggtctc

SEQ ID NO: 68532 - RNA, 27 nt, synthetic construct
  misc_feature 1..27: note = Probable methyltransferase TARBP1 (1190-1198)
  source 1..27: mol_type = other RNA
ggcatcattgacagaatattccaggcc

SEQ ID NO: 68533 - RNA, 114 nt, synthetic construct
  misc_feature 1..114: note = Glyceraldehyde-3-phosphate dehydrogenase (272-309)
  source 1..114: mol_type = other RNA
ggcatcctggggtacaccgagcaccaggtggtcagctccgacttcaactctgatacacattcaagtacttttgacgccggagctggtattgcactcaatgatcacttcgttaag

SEQ ID NO: 68534 - RNA, 27 nt, synthetic construct
  misc_feature 1..27: note = Zinc finger ZZ-type and EF-hand domain-containing protein 1 (2890-2898)
  source 1..27: mol_type = other RNA
ggcatcctgctcccccttcacagagcc

SEQ ID NO: 68535 - RNA, 24 nt, synthetic construct
  misc_feature 1..24: note = HEAT repeat-containing protein 5A (975-982)
  source 1..24: mol_type = other RNA
ggcatcagaaacgggagctgctcc

SEQ ID NO: 68536 - RNA, 27 nt, synthetic construct
  misc_feature 1..27: note = NHP2-like protein 1 (49-57)
  source 1..27: mol_type = other RNA
ggcatcagcgagttcattgtgatggcc

SEQ ID NO: 68537 - RNA, 27 nt, synthetic construct
  misc_feature 1..27: note = Putative segment polarity protein dishevelled homolog DVL1P1 (277-285)
  source 1..27: mol_type = other RNA
ggcatctacattgggagcataatgaag

SEQ ID NO: 68538 - RNA, 27 nt, synthetic construct
  misc_feature 1..27: note = Afadin (1018-1026)
  source 1..27: mol_type = other RNA
ggcatctacgtgaagagcgtcgttaaa

SEQ ID NO: 68539 - RNA, 21 nt, synthetic construct
  misc_feature 1..21: note = Mesoderm induction early response protein 3 (303-309)
  source 1..21: mol_type = other RNA
ggcaaggacttccacctgatc

SEQ ID NO: 68540 - RNA, 36 nt, synthetic construct
  misc_feature 1..36: note = Leucine-rich repeat serine/threonine-protein kinase 2 (780-791)
  source 1..36: mol_type = other RNA
ggcaagggggacagccagatcatttccctgctcctt

SEQ ID NO: 68541 - RNA, 33 nt, synthetic construct
  misc_feature 1..33: note = E1A-binding protein p400 (281-291)
  source 1..33: mol_type = other RNA
ggcaagaccatcacacccgcccacttccagctg

SEQ ID NO: 68542 - RNA, 30 nt, synthetic construct
  misc_feature 1..30: note = Probable E3 ubiquitin-protein ligase HERC1 (2585-2594)
  source 1..30: mol_type = other RNA
ggcctggccgacctcgagagagctcaggca

SEQ ID NO: 68543 - RNA, 27 nt, synthetic construct
  misc_feature 1..27: note = Minor histocompatibility antigen H13 (189-197)
  source 1..27: mol_type = other RNA
ggcctggccttcagcctcaacggggtg

SEQ ID NO: 68544 - RNA, 27 nt, synthetic construct
  misc_feature 1..27: note = Serpin H1 (48-56)
  source 1..27: mol_type = other RNA
ggcctggccttcagcctctaccaggct

SEQ ID NO: 68545 - RNA, 27 nt, synthetic construct
  misc_feature 1..27: note = Ral GTPase-activating protein subunit beta (790-798)
  source 1..27: mol_type = other RNA
ggcctggccaaggtgaaagtcatggtt

SEQ ID NO: 68546 - RNA, 33 nt, synthetic construct
  misc_feature 1..33: note = Equilibrative nucleoside transporter 1 (483-493)
  source 1..33: mol_type = other RNA
ggcctggccctcggggctgtgttcagctttctt

SEQ ID NO: 68547 - RNA, 33 nt, synthetic construct
  misc_feature 1..33: note = Prominin-2 (17-27)
  source 1..33: mol_type = other RNA
ggcctggccctcagccagcttgctgcaggggcc

SEQ ID NO: 68548 - RNA, 27 nt, synthetic construct
  misc_feature 1..27: note = Vacuolar protein sorting-associated protein 41 homolog (323-331)
  source 1..27: mol_type = other RNA
ggcctggcctacatcaaccacctcgtg

SEQ ID NO: 68549 - RNA, 27 nt, synthetic construct
  misc_feature 1..27: note = Zinc finger and BTB domain-containing protein 39 (63-71)
  source 1..27: mol_type = other RNA
ggcctggacgccgctagaacctacgtg

SEQ ID NO: 68550 - RNA, 27 nt, synthetic construct
  misc_feature 1..27: note = C-type lectin domain family 11 member A (117-125)
  source 1..27: mol_type = other RNA
ggcctggacgccgggctccaccagctt

SEQ ID NO: 68551 - RNA, 30 nt, synthetic construct
  misc_feature 1..30: note = Protein PRR14L (130-139)
  source 1..30: mol_type = other RNA
ggcctggacgagctcgatggggtgaaggcc

SEQ ID NO: 68552 - RNA, 27 nt, synthetic construct
  misc_feature 1..27: note = Protein furry homolog-like (621-629)
  source 1..27: mol_type = other RNA
ggcctggacaacgagacccacttcctc

SEQ ID NO: 68553 - RNA, 27 nt, synthetic construct
  misc_feature 1..27: note = Heat shock 70 kDa protein 12A (522-530)
  source 1..27: mol_type = other RNA
ggcctggaccccgccgtgatcaaggtc

SEQ ID NO: 68554 - RNA, 27 nt, synthetic construct
  misc_feature 1..27: note = DNA polymerase alpha catalytic subunit (1240-1248)
  source 1..27: mol_type = other RNA
ggcctggaccccacccagttcagagtg

SEQ ID NO: 68555 - RNA, 27 nt, synthetic construct
  misc_feature 1..27: note = Sodium- and chloride-dependent creatine transporter 1 (299-307)
  source 1..27: mol_type = other RNA
ggcctggacagccagttcgtgggggtc

SEQ ID NO: 68556 - RNA, 27 nt, synthetic construct
  misc_feature 1..27: note = ADP-ribosylation factor 5 (169-177)
  source 1..27: mol_type = other RNA
ggcctggactggctcagccacgagctt

SEQ ID NO: 68557 - RNA, 30 nt, synthetic construct
  misc_feature 1..30: note = Trinucleotide repeat-containing gene 18 protein (737-746)
  source 1..30: mol_type = other RNA
ggcctggaggaaagcgggctcggacttctg

SEQ ID NO: 68558 - RNA, 30 nt, synthetic construct
  misc_feature 1..30: note = Rho GTPase-activating protein 23 (525-534)
  source 1..30: mol_type = other RNA
ggcctggagagcaccgggatctacagagtg

SEQ ID NO: 68559 - RNA, 30 nt, synthetic construct
  misc_feature 1..30: note = Ciliary neurotrophic factor (150-159)
  source 1..30: mol_type = other RNA
ggcctgttcgagaagaaactctgggggctt

SEQ ID NO: 68560 - RNA, 30 nt, synthetic construct
  misc_feature 1..30: note = Oxysterol-binding protein-related protein 1 (365-374)
  source 1..30: mol_type = other RNA
ggcctgttcgggaaggagctccacaaagtg

SEQ ID NO: 68561 - RNA, 27 nt, synthetic construct
  misc_feature 1..27: note = Receptor-interacting serine/threonine-protein kinase 4 (180-188)
  source 1..27: mol_type = other RNA
ggcctgttcgggaccatcgcctacctc

SEQ ID NO: 68562 - RNA, 30 nt, synthetic construct
  misc_feature 1..30: note = Presenilin-2 (364-373)
  source 1..30: mol_type = other RNA
ggcctgggggacttcatcttttacagcgtg

SEQ ID NO: 68563 - RNA, 27 nt, synthetic construct
  misc_feature 1..27: note = Nurim (175-183)
  source 1..27: mol_type = other RNA
ggcctgggggagcccctcgcccttaag

SEQ ID NO: 68564 - RNA, 24 nt, synthetic construct
  misc_feature 1..24: note = Unconventional myosin-Va (1848-1855)
  source 1..24: mol_type = other RNA
ggcctggggttcatcagcagagtg

SEQ ID NO: 68565 - RNA, 24 nt, synthetic construct
  misc_feature 1..24: note = Probable ATP-dependent RNA helicase YTHDC2 (1364-1371)
  source 1..24: mol_type = other RNA
ggcctggggggagtgttcaaggtc

SEQ ID NO: 68566 - RNA, 24 nt, synthetic construct
  misc_feature 1..24: note = Sodium-dependent multivitamin transporter (227-234)
  source 1..24: mol_type = other RNA
ggcctggggagagtgtgggccgtc

SEQ ID NO: 68567 - RNA, 33 nt, synthetic construct
  misc_feature 1..33: note = Vacuole membrane protein 1 (126-136)
  source 1..33: mol_type = other RNA
ggcctggggaccggactccacacattccttctg

SEQ ID NO: 68568 - RNA, 36 nt, synthetic construct
  misc_feature 1..36: note = Elastin (104-115)
  source 1..36: mol_type = other RNA
ggcctgggggtgggagccggtgtccccggcttcggg

SEQ ID NO: 68569 - RNA, 27 nt, synthetic construct
  misc_feature 1..27: note = Bifunctional heparan sulfate N-deacetylase/N-sulfotransferase 3 (265-273)
  source 1..27: mol_type = other RNA
ggcctgcacgacgggatccagagagtg

SEQ ID NO: 68570 - RNA, 27 nt, synthetic construct
  misc_feature 1..27: note = Vacuolar protein sorting-associated protein 13D (747-755)
  source 1..27: mol_type = other RNA
ggcctgcacgggctcgtggtccaggcc

SEQ ID NO: 68571 - RNA, 27 nt, synthetic construct
  misc_feature 1..27: note = Ribosome-binding protein 1 (183-191)
  source 1..27: mol_type = other RNA
ggcctgcacgggcagctccaagaggcc

SEQ ID NO: 68572 - RNA, 33 nt, synthetic construct
  misc_feature 1..33: note = Dystonin (1614-1624)
  source 1..33: mol_type = other RNA
ggcctgatcgacgagcagattctctgccaactt

SEQ ID NO: 68573 - RNA, 33 nt, synthetic construct
  misc_feature 1..33: note = 28 kDa heat- and acid-stable phosphoprotein (79-89)
  source 1..33: mol_type = other RNA
ggcctgatcgacattgagaaccccaatagagtg

SEQ ID NO: 68574 - RNA, 33 nt, synthetic construct
  misc_feature 1..33: note = Dystonin (1576-1586)
  source 1..33: mol_type = other RNA
ggcctgatcgactacgataccgggattagactc

SEQ ID NO: 68575 - RNA, 42 nt, synthetic construct
  misc_feature 1..42: note = ATP-citrate synthase (832-845)
  source 1..42: mol_type = other RNA
ggcctgatcagaaagcccgccagcttcatgacctccatttgc

SEQ ID NO: 68576 - RNA, 21 nt, synthetic construct
  misc_feature 1..21: note = Rho-related BTB domain-containing protein 3 (23-29)
  source 1..21: mol_type = other RNA
ggcctgatcagaacctacctc

SEQ ID NO: 68577 - RNA, 27 nt, synthetic construct
  misc_feature 1..27: note = Nucleolar protein 6 (323-331)
  source 1..27: mol_type = other RNA
ggcctgaaggacggggtggccctcctt

SEQ ID NO: 68578 - RNA, 30 nt, synthetic construct
  misc_feature 1..30: note = Matrin-3 (27-36)
  source 1..30: mol_type = other RNA
ggcctgctcgccgctgcaacccagagcctt

SEQ ID NO: 68579 - RNA, 27 nt, synthetic construct
  misc_feature 1..27: note = Transmembrane protein 223 (112-120)
  source 1..27: mol_type = other RNA
ggcctgctcttcagccttagatccgtg

SEQ ID NO: 68580 - RNA, 27 nt, synthetic construct
  misc_feature 1..27: note = Receptor-type tyrosine-protein phosphatase T (1083-1091)
  source 1..27: mol_type = other RNA
ggcctgctcgggttcgtgagacaggtc

SEQ ID NO: 68581 - RNA, 27 nt, synthetic construct
  misc_feature 1..27: note = LanC-like protein 1 (313-321)
  source 1..27: mol_type = other RNA
ggcctgctcaagaaagggtacggactt

SEQ ID NO: 68582 - RNA, 30 nt, synthetic construct
  misc_feature 1..30: note = Protein ELYS (20-29)
  source 1..30: mol_type = other RNA
ggcctgctccccttccctgaggtgaccctt

SEQ ID NO: 68583 - RNA, 27 nt, synthetic construct
  misc_feature 1..27: note = Protein farnesyltransferase subunit beta (256-264)
  source 1..27: mol_type = other RNA
ggcctgctcccccttctgcacagagcc

SEQ ID NO: 68584 - RNA, 27 nt, synthetic construct
  misc_feature 1..27: note = Angiomotin (797-805)
  source 1..27: mol_type = other RNA
ggcctgctcagccactcctctaccctt

SEQ ID NO: 68585 - RNA, 27 nt, synthetic construct
  misc_feature 1..27: note = Helicase SKI2W (380-388)
  source 1..27: mol_type = other RNA
ggcctgctcaccggggacgtgcagctt

SEQ ID NO: 68586 - RNA, 27 nt, synthetic construct
  misc_feature 1..27: note = Glycerol-3-phosphate acyltransferase 3 (87-95)
  source 1..27: mol_type = other RNA
ggcctgatggggatcattcagagagcc

SEQ ID NO: 68587 - RNA, 27 nt, synthetic construct
  misc_feature 1..27: note = Glycerol-3-phosphate acyltransferase 4 (150-158)
  source 1..27: mol_type = other RNA
ggcctgatgggggtgatccagagagcc

SEQ ID NO: 68588 - RNA, 30 nt, synthetic construct; identical to SEQ ID NO: 44361
  misc_feature 1..30: note = Contactin-associated protein-like 3B (447-456)
  source 1..30: mol_type = other RNA

SEQ ID NO: 68589 - RNA, 27 nt, synthetic construct
  misc_feature 1..27: note = Basement membrane-specific heparan sulfate proteoglycan core protein (280-288)
  source 1..27: mol_type = other RNA
ggcctgaacctccacacccttctgtac

SEQ ID NO: 68590 - RNA, 30 nt, synthetic construct
  misc_feature 1..30: note = Sorting nexin-18 (488-497)
  source 1..30: mol_type = other RNA
ggcctgaaccaggccatcgctttcaccggg

SEQ ID NO: 68591 - RNA, 30 nt, synthetic construct
  misc_feature 1..30: note = Cell surfaceoprotein MUC18 (416-425)
  source 1..30: mol_type = other RNA
ggcctgaacagaacccagctcgtgaatgtc

SEQ ID NO: 68592 - RNA, 33 nt, synthetic construct
  misc_feature 1..33: note = DnaJ homolog subfamily B member 11 (305-315)
  source 1..33: mol_type = other RNA
ggcctgcccaacttcgacaataacaatatcaag

SEQ ID NO: 68593 - RNA, 39 nt, synthetic construct
  misc_feature 1..39: note = Epidermal growth factor receptor substrate 15 (256-268)
  source 1..39: mol_type = other RNA
ggcctgcccagcaccctccttgcccacatctggtccctg

SEQ ID NO: 68594 - RNA, 27 nt, synthetic construct
  misc_feature 1..27: note = Uridine phosphorylase 1 (55-63)
  source 1..27: mol_type = other RNA
ggcctgcaggccgctgtggtctgcgtt

SEQ ID NO: 68595 - RNA, 36 nt, synthetic construct
  misc_feature 1..36: note = Nestin (434-445)
  source 1..36: mol_type = other RNA
ggcctgcaggaccccgaggggcaaagccagcaggtg

SEQ ID NO: 68596 - RNA, 45 nt, synthetic construct
  misc_feature 1..45: note = Ryanodine receptor 1 (135-149)
  source 1..45: mol_type = other RNA
ggcctgcaggaggacgccaccggggaagcttgctggtggacaatg

SEQ ID NO: 68597 - RNA, 27 nt, synthetic construct
  misc_feature 1..27: note = Catenin beta-1 (278-286)
  source 1..27: mol_type = other RNA
ggcctgcagaagatggtggccctcctt

SEQ ID NO: 68598 - RNA, 27 nt, synthetic construct
  misc_feature 1..27: note = Serine hydroxymethyltransferase, mitochondrial (399-407)
  source 1..27: mol_type = other RNA
ggcctgagactcggggcccccgctctt

SEQ ID NO: 68599 - RNA, 51 nt, synthetic construct
  misc_feature 1..51: note = AP-5 complex subunit beta-1 (121-137)
  source 1..51: mol_type = other RNA
ggcctgagacagagggccgctctcgacgggggaccccgggcacttgccacc

SEQ ID NO: 68600 - RNA, 30 nt, synthetic construct
  misc_feature 1..30: note = Actin-like protein 6B (313-322)
  source 1..30: mol_type = other RNA
ggcctgagcgggaacaccatgctcggagtg

SEQ ID NO: 68601 - RNA, 27 nt, synthetic construct
  misc_feature 1..27: note = Melanoma antigen preferentially expressed in tumors (432-440)
  source 1..27: mol_type = other RNA
ggcctgagcaacctcacccacgtgctt

SEQ ID NO: 68602 - RNA, 27 nt, synthetic construct
  misc_feature 1..27: note = G-protein coupled receptor 143 (150-158)
  source 1..27: mol_type = other RNA
ggcctgagcaccatcctcctttaccac

SEQ ID NO: 68603 - RNA, 27 nt, synthetic construct
  misc_feature 1..27: note = Purine nucleoside phosphorylase (37-45)
  source 1..27: mol_type = other RNA
ggcctgaccgacaagctcacacaggcc

SEQ ID NO: 68604 - RNA, 30 nt, synthetic construct; identical to SEQ ID NO: 44377
  misc_feature 1..30: note = Beta-glucuronidase (23-32)
  source 1..30: mol_type = other RNA

SEQ ID NO: 68605 - RNA, 114 nt, synthetic construct
  misc_feature 1..114: note = Testis anion transporter 1 (103-140)
  source 1..114: mol_type = other RNA
ggcctggtgcaggtcccccaagggctcacccttagcctgttggccagacagttaatccctccactgaacattgcttacgcagccttctgctcctctgttatatatgtgatcttt

SEQ ID NO: 68606 - RNA, 27 nt, synthetic construct
  misc_feature 1..27: note = Laminin subunit alpha-4 (1544-1552)
  source 1..27: mol_type = other RNA
ggcctgtggcacgacgtgatcttcatt

SEQ ID NO: 68607 - RNA, 30 nt, synthetic construct; identical to SEQ ID NO: 44380
  misc_feature 1..30: note = Disco-interacting protein 2 homolog C (547-556)
  source 1..30: mol_type = other RNA

SEQ ID NO: 68608 - RNA, 30 nt, synthetic construct; identical to SEQ ID NO: 44381
  misc_feature 1..30: note = Disco-interacting protein 2 homolog B (156-165)
  source 1..30: mol_type = other RNA

SEQ ID NO: 68609 - RNA, 27 nt, synthetic construct
  misc_feature 1..27: note = Adhesion G protein-coupled receptor A3 (1170-1178)
  source 1..27: mol_type = other RNA
ggcctgtggaagcacgagaccacagtg

SEQ ID NO: 68610 - RNA, 27 nt, synthetic construct
  misc_feature 1..27: note = Zinc transporter ZIP14 (20-28)
  source 1..27: mol_type = other RNA
ggcctgtggagaaccacacccgaggcc

SEQ ID NO: 68611 - RNA, 30 nt, synthetic construct; identical to SEQ ID NO: 44384
  misc_feature 1..30: note = RNA pseudouridylate synthase domain-containing protein 1 (32-41)
  source 1..30: mol_type = other RNA

SEQ ID NO: 68612 - RNA, 27 nt, synthetic construct
  misc_feature 1..27: note = Lysosomal-trafficking regulator (2306-2314)
  source 1..27: mol_type = other RNA
ggcctgtacgagctccttagcggggtg

SEQ ID NO: 68613 - RNA, 27 nt, synthetic construct
  misc_feature 1..27: note = Zinc finger BED domain-containing protein 1 (137-145)
  source 1..27: mol_type = other RNA
ggcctgtaccccgccagcatcgtggac

SEQ ID NO: 68614 - RNA, 27 nt, synthetic construct
  misc_feature 1..27: note = ATP-dependent RNA helicase DHX36 (824-832)
  source 1..27: mol_type = other RNA
ggcctgtaccccaaggtggccaaaatc

SEQ ID NO: 68615 - RNA, 27 nt, synthetic construct
  misc_feature 1..27: note = E3 ubiquitin-protein ligase HERC2 (1628-1636)
  source 1..27: mol_type = other RNA
ggcctgtacccccagagccctctcctt

SEQ ID NO: 68616 - RNA, 27 nt, synthetic construct
  misc_feature 1..27: note = Unconventional myosin-XVIIIa (758-766)
  source 1..27: mol_type = other RNA
ggcctgtacagcgagctcttcaccctt

SEQ ID NO: 68617 - RNA, 27 nt, synthetic construct
  misc_feature 1..27: note = Gamma-tubulin complex component 2 (879-887)
  source 1..27: mol_type = other RNA
ggcatggccagcgtgatctccagactg

SEQ ID NO: 68618 - RNA, 27 nt, synthetic construct
  misc_feature 1..27: note = Intraflagellar transport protein 27 homolog (41-49)
  source 1..27: mol_type = other RNA
ggcatggacctggtggtcaagaccgtt

SEQ ID NO: 68619 - RNA, 30 nt, synthetic construct; identical to SEQ ID NO: 44392
  misc_feature 1..30: note = Lysophosphatidic acid phosphatase type 6 (118-127)
  source 1..30: mol_type = other RNA

SEQ ID NO: 68620 - RNA, 36 nt, synthetic construct
  misc_feature 1..36: note = AP-3 complex subunit beta-1 (317-328)
  source 1..36: mol_type = other RNA
ggcatgttcgagccctacctgaagagcttttatgtg

SEQ ID NO: 68621 - RNA, 30 nt, synthetic construct
  misc_feature 1..30: note = ATP-dependent RNA helicase DHX29 (113-122)
  source 1..30: mol_type = other RNA
ggcatgatcagcgggagactgaccgccaag

SEQ ID NO: 68622 - RNA, 27 nt, synthetic construct
  misc_feature 1..27: note = Glucocorticoid modulatory element-binding protein 2 (289-297)
  source 1..27: mol_type = other RNA
ggcatgctggacctcgtgaagaaagtc

SEQ ID NO: 68623 - RNA, 27 nt, synthetic construct
  misc_feature 1..27: note = E3 ubiquitin-protein ligase HUWE1 (407-415)
  source 1..27: mol_type = other RNA
ggcatgatggaggccctgctcaaggtg

SEQ ID NO: 68624 - RNA, 27 nt, synthetic construct
  misc_feature 1..27: note = Complement receptor type 1 (563-571)
  source 1..27: mol_type = other RNA
ggcatggtgcacgtcatcaccgacatt

SEQ ID NO: 68625 - RNA, 33 nt, synthetic construct
  misc_feature 1..33: note = Chromodomain-helicase-DNA-binding protein 4 (1035-1045)
  source 1..33: mol_type = other RNA
ggcatgtacgacgggagcgccctgatcagagct

SEQ ID NO: 68626 - RNA, 30 nt, synthetic construct
  misc_feature 1..30: note = Peroxisomal acyl-coenzyme A oxidase 3 (111-120)
  source 1..30: mol_type = other RNA
ggcatgtacgacagctccctggccgctaag

SEQ ID NO: 68627 - RNA, 78 nt, synthetic construct
  misc_feature 1..78: note = ATP synthase-coupling factor 6, mitochondrial (83-108)
  source 1..78: mol_type = other RNA
ggcaacgccgacatgaataccttccccacatttaagttcgaggatcctaaatttgaagtgatcgagaagccacaggct

SEQ ID NO: 68628 - RNA, 21 nt, synthetic construct
  misc_feature 1..21: note = Sorbitol dehydrogenase (58-64)
  source 1..21: mol_type = other RNA
ggcaacttcatcgtgaagaaa

SEQ ID NO: 68629 - RNA, 63 nt, synthetic construct
  misc_feature 1..63: note = Fibrillin-2 (463-483)
  source 1..63: mol_type = other RNA
ggcaacgggttcagccccggagtgggtggcgccggggtcggagctggcggtcaggggcctatc

SEQ ID NO: 68630 - RNA, 63 nt, synthetic construct
  misc_feature 1..63: note = Cytochrome c oxidase subunit 6A1, mitochondrial (66-86)
  source 1..63: mol_type = other RNA
ggcaaccacaccctgttccataatccccacgtgaaccctctcccaacagggtacgaggacgaa

SEQ ID NO: 68631 - RNA, 27 nt, synthetic construct
  misc_feature 1..27: note = Tyrosine-protein phosphatase non-receptor type substrate 1 (5-13)
  source 1..27: mol_type = other RNA
ggccccgcccctgggagactgggacca

SEQ ID NO: 68632 - RNA, 66 nt, synthetic construct
  misc_feature 1..66: note = Heat shock cognate 71 kDa protein (4-25)
  source 1..66: mol_type = other RNA
ggccccgccgtggggatcgacctgggaaccacatacagctgcgtcggtgttttccagcacggcaag

SEQ ID NO: 68633 - RNA, 33 nt, synthetic construct; identical to SEQ ID NO: 44406
  misc_feature 1..33: note = Kinesin-like protein KIF13A (1193-1203)
  source 1..33: mol_type = other RNA

SEQ ID NO: 68634 - RNA, 51 nt, synthetic construct
  misc_feature 1..51: note = Myosin-IIIb (1132-1148)
  source 1..51: mol_type = other RNA
ggcccccacagccctgtggccgctgggaccagaggatccgcagaggtccag

SEQ ID NO: 68635 - RNA, 30 nt, synthetic construct
  misc_feature 1..30: note = Obscurin (6240-6249)
  source 1..30: mol_type = other RNA
ggccccaaggcccctgggccaagcaccgga

SEQ ID NO: 68636 - RNA, 36 nt, synthetic construct
  misc_feature 1..36: note = Collagen alpha-2(XI) chain (739-750)
  source 1..36: mol_type = other RNA
ggccccaagggggccaaaggagctaccggtcctggc

SEQ ID NO: 68637 - RNA, 39 nt, synthetic construct
  misc_feature 1..39: note = Collagen alpha-1(III) chain (660-672)
  source 1..39: mol_type = other RNA
ggccccaagggggacgccggagctcctggtgcaccaggc

SEQ ID NO: 68638 - RNA, 27 nt, synthetic construct
  misc_feature 1..27: note = Synaptic vesicle membrane protein VAT-1 homolog (289-297)
  source 1..27: mol_type = other RNA
ggccccaagagaaacctgatggccctc

SEQ ID NO: 68639 - RNA, 48 nt, synthetic construct
  misc_feature 1..48: note = Fibronectin isoform 6 (1673-1688)
  source 1..48: mol_type = other RNA
ggccccatgaaggagatcaacctggcccctgacagctcctctgtggtc

SEQ ID NO: 68640 - RNA, 51 nt, synthetic construct
  misc_feature 1..51: note = Fibronectin isoform 6 (1673-1689)
  source 1..51: mol_type = other RNA
ggccccatgaaggagatcaacctggcccctgacagctcctctgtggtcgtt

SEQ ID NO: 68641 - RNA, 36 nt, synthetic construct
  misc_feature 1..36: note = Histone acetyltransferase p300 (672-683)
  source 1..36: mol_type = other RNA
ggccccaacatggggcagcctcaaccaggaatgacc

SEQ ID NO: 68642 - RNA, 51 nt, synthetic construct
  misc_feature 1..51: note = Collagen alpha-3(IV) chain (637-653)
  source 1..51: mol_type = other RNA
ggcccccctggggaggccggaccaagaggtgaactgagcgtgtccaccccg

SEQ ID NO: 68643 - RNA, 36 nt, synthetic construct
  misc_feature 1..36: note = Collagen alpha-1(III) chain (43-54)
  source 1..36: mol_type = other RNA
ggcccccctgggccagccggaaacaccggtgctccg

SEQ ID NO: 68644 - RNA, 30 nt, synthetic construct
  misc_feature 1..30: note = ETS translocation variant 5 (359-368)
  source 1..30: mol_type = other RNA
ggccccccttaccagagaagggggagcctg

SEQ ID NO: 68645 - RNA, 45 nt, synthetic construct
  misc_feature 1..45: note = REST corepressor 2 (504-518)
  source 1..45: mol_type = other RNA
ggcccccagcctccaccgaccctgatcgggacacccctcgagcct

SEQ ID NO: 68646 - RNA, 27 nt, synthetic construct
  misc_feature 1..27: note = Cathepsin D (303-311)
  source 1..27: mol_type = other RNA
ggccccgtggacgaggtcagagaactg

SEQ ID NO: 68647 - RNA, 48 nt, synthetic construct
  misc_feature 1..48: note = Collagen alpha-1(V) chain (1225-1240)
  source 1..48: mol_type = other RNA
ggccccgtggggctgcagggactccctggtccaccgggcgagaagggg

SEQ ID NO: 68648 - RNA, 21 nt, synthetic construct
  misc_feature 1..21: note = Barrier-to-autointegration factor (47-53)
  source 1..21: mol_type = other RNA
ggccagttcctggtgctcaag

SEQ ID NO: 68649 - RNA, 51 nt, synthetic construct
  misc_feature 1..51: note = Filamin-A (1240-1256)
  source 1..51: mol_type = other RNA
ggccagggggtgttcagagaggccaccacagaatttagcgtcgacgctagg

SEQ ID NO: 68650 - RNA, 30 nt, synthetic construct
  misc_feature 1..30: note = UHRF1-binding protein 1-like (784-793)
  source 1..30: mol_type = other RNA
ggccagaagcccagctcctctgacaccttc

SEQ ID NO: 68651 - RNA, 30 nt, synthetic construct; identical to SEQ ID NO: 44424
  misc_feature 1..30: note = Pleckstrin homology-like domain family B member 1 (354-363)
  source 1..30: mol_type = other RNA

SEQ ID NO: 68652 - RNA, 27 nt, synthetic construct
  misc_feature 1..27: note = Transcription elongation factor SPT5 (995-1003)
  source 1..27: mol_type = other RNA
ggccagaccggggtgatcagaagcgtc

SEQ ID NO: 68653 - RNA, 27 nt, synthetic construct
  misc_feature 1..27: note = Protein prune homolog 2 (1236-1244)
  source 1..27: mol_type = other RNA
ggccaggtggagatcgtcaccaaggtt

SEQ ID NO: 68654 - RNA, 27 nt, synthetic construct
  misc_feature 1..27: note = E3 SUMO-protein ligase RanBP2 (112-120)
  source 1..27: mol_type = other RNA
ggcagagccaagtactggctggagagg

SEQ ID NO: 68655 - RNA, 27 nt, synthetic construct
  misc_feature 1..27: note = Hemicentin-1 (3137-3145)
  source 1..27: mol_type = other RNA
ggcagagacgataagaacttccacctg

SEQ ID NO: 68656 - RNA, 114 nt, synthetic construct
  misc_feature 1..114: note = DnaJ homolog subfamily B member 11 (23-60)
  source 1..114: mol_type = other RNA
ggcagagacttctacaagatcctgggggtgcccaggagcgcctccattaaagatataaagaaagcttatcggaagctcgcacttcagctgcaccctgaccgcaacccagatgac

SEQ ID NO: 68657 - RNA, 27 nt, synthetic construct
  misc_feature 1..27: note = Integrin alpha-X (519-527)
  source 1..27: mol_type = other RNA
ggcagattcggggccgctctgaccgtg

SEQ ID NO: 68658 - RNA, 27 nt, synthetic construct
  misc_feature 1..27: note = Phosphorylase b kinase regulatory subunit alpha, skeletal muscle isoform (1123-1131)
  source 1..27: mol_type = other RNA
ggcagattcgggaccatgacatacctg

SEQ ID NO: 68659 - RNA, 27 nt, synthetic construct
  misc_feature 1..27: note = Glycerol-3-phosphate acyltransferase 4 (81-89)
  source 1..27: mol_type = other RNA
ggcagattcaaggagtttatgagcaaa

SEQ ID NO: 68660 - RNA, 27 nt, synthetic construct
  misc_feature 1..27: note = Tyrosine-protein phosphatase non-receptor type 21 (1024-1032)
  source 1..27: mol_type = other RNA
ggcagattcaagatcaccacaaggttt

SEQ ID NO: 68661 - RNA, 27 nt, synthetic construct
  misc_feature 1..27: note = Hemicentin-1 (2532-2540)
  source 1..27: mol_type = other RNA
ggcagattcctgcagatcaccaacgtg

SEQ ID NO: 68662 - RNA, 27 nt, synthetic construct
  misc_feature 1..27: note = 40S ribosomal protein S21 (44-52)
  source 1..27: mol_type = other RNA
ggcagattcaacgggcagtttaagacc

SEQ ID NO: 68663 - RNA, 27 nt, synthetic construct
  misc_feature 1..27: note = Serine/threonine-protein kinase WNK1 (228-236)
  source 1..27: mol_type = other RNA
ggcagagggagcttcaagaccgtgtac

SEQ ID NO: 68664 - RNA, 30 nt, synthetic construct
  misc_feature 1..30: note = Homeodomain-interacting protein kinase 1 (197-206)
  source 1..30: mol_type = other RNA
ggcagagggaccttcggacaggtggccaag

SEQ ID NO: 68665 - RNA, 27 nt, synthetic construct
  misc_feature 1..27: note = Exosome component 10 (399-407)
  source 1..27: mol_type = other RNA
ggcagacacagcctggaccatctcctt

SEQ ID NO: 68666 - RNA, 27 nt, synthetic construct
  misc_feature 1..27: note = Eukaryotic translation initiation factor 3 subunit L (261-269)
  source 1..27: mol_type = other RNA
ggcagacacagcctgtacaagatgctc

SEQ ID NO: 68667 - RNA, 30 nt, synthetic construct
  misc_feature 1..30: note = Hemicentin-1 (305-314)
  source 1..30: mol_type = other RNA
ggcagacacagcgtgaggatcaccgggctg

SEQ ID NO: 68668 - RNA, 27 nt, synthetic construct
  misc_feature 1..27: note = Sulfiredoxin-1 (29-37)
  source 1..27: mol_type = other RNA
ggcagaatcgccgctgtgcacaacgtc

SEQ ID NO: 68669 - RNA, 27 nt, synthetic construct
  misc_feature 1..27: note = FH2 domain-containing protein 1 (1122-1130)
  source 1..27: mol_type = other RNA
ggcagaatcctgaaccccctcaggaag

SEQ ID NO: 68670 - RNA, 78 nt, synthetic construct
  misc_feature 1..78: note = 40S ribosomal protein S19 (120-145)
  source 1..78: mol_type = other RNA
ggcagaaagctgaccccccaggggcaaagggacctcgatcggatcgccggacaggtggctgcagccaacaaaaagcac

SEQ ID NO: 68671 - RNA, 27 nt, synthetic construct
  misc_feature 1..27: note = Plectin (581-589)
  source 1..27: mol_type = other RNA
ggcagactggacctccagtacgccaag

SEQ ID NO: 68672 - RNA, 27 nt, synthetic construct
  misc_feature 1..27: note = Chondroitin sulfate proteoglycan 4 (2121-2129)
  source 1..27: mol_type = other RNA
ggcagactggggctcgaggtgggaagg

SEQ ID NO: 68673 - RNA, 27 nt, synthetic construct
  misc_feature 1..27: note = CDK-activating kinase assembly factor MAT1 (225-233)
  source 1..27: mol_type = other RNA
ggcagactggggtacctcaaccacgtg

SEQ ID NO: 68674 - RNA, 27 nt, synthetic construct
  misc_feature 1..27: note = Coiled-coil domain-containing protein 85B (43-51)
  source 1..27: mol_type = other RNA
ggcagactgatgcaggaggtgaacagg

SEQ ID NO: 68675 - RNA, 30 nt, synthetic construct
  misc_feature 1..30: note = Up-regulator of cell proliferation (625-634)
  source 1..30: mol_type = other RNA
ggcagactgcccgccgggcagaggcggttc

SEQ ID NO: 68676 - RNA, 27 nt, synthetic construct
  misc_feature 1..27: note = Pleckstrin homology-like domain family B member 1 (536-544)
  source 1..27: mol_type = other RNA
ggcagactgagccccgcctactccctc

SEQ ID NO: 68677 - RNA, 27 nt, synthetic construct
  misc_feature 1..27: note = Muscleblind-like protein 3 (34-42)
  source 1..27: mol_type = other RNA
ggcagaaacaatctgatccagcaaaag

SEQ ID NO: 68678 - RNA, 30 nt, synthetic construct
  misc_feature 1..30: note = L-dopachrome tautomerase (313-322)
  source 1..30: mol_type = other RNA
ggcagaaacagcatgaagctgcccaccctc

SEQ ID NO: 68679 - RNA, 33 nt, synthetic construct
  misc_feature 1..33: note = Probable ATP-dependent RNA helicase DDX17 (123-133)
  source 1..33: mol_type = other RNA
ggcagaagctcccagtcttcaagtcaacagttc

SEQ ID NO: 68680 - RNA, 27 nt, synthetic construct
  misc_feature 1..27: note = DNA-dependent protein kinase catalytic subunit (2721-2729)
  source 1..27: mol_type = other RNA
ggcagaaccgacctgctcaggcttcgg

SEQ ID NO: 68681 - RNA, 27 nt, synthetic construct
  misc_feature 1..27: note = Alpha-1,3-mannosyl-glycoprotein 4-beta-N-acetylglucosaminyltransferase B (36-44)
  source 1..27: mol_type = other RNA
ggcagaaccggggtgagcgtcgttatg

SEQ ID NO: 68682 - RNA, 27 nt, synthetic construct
  misc_feature 1..27: note = Ubiquitin-associated protein 2-like (711-719)
  source 1..27: mol_type = other RNA
ggcagaaccagcacatccactctgctc

SEQ ID NO: 68683 - RNA, 27 nt, synthetic construct
  misc_feature 1..27: note = Multidrug resistance protein 1 (515-523)
  source 1..27: mol_type = other RNA
ggcagaaccacaatcgtgattgcccac

SEQ ID NO: 68684 - RNA, 30 nt, synthetic construct
  misc_feature 1..30: note = Transmembraneoprotein NMB (76-85)
  source 1..30: mol_type = other RNA
ggcagagtgcaggccgtcctgaccagcgac

SEQ ID NO: 68685 - RNA, 27 nt, synthetic construct
  misc_feature 1..27: note = DNA-directed RNA polymerase III subunit RPC4 (335-343)
  source 1..27: mol_type = other RNA
ggcagagtgcagctgctccttgggaag

SEQ ID NO: 68686 - RNA, 27 nt, synthetic construct
  misc_feature 1..27: note = Retinoic acid-induced protein 1 (110-118)
  source 1..27: mol_type = other RNA
ggcagatacgccggggaggaaagcctg

SEQ ID NO: 68687 - RNA, 39 nt, synthetic construct
  misc_feature 1..39: note = CD44 antigen (40-52)
  source 1..39: mol_type = other RNA
ggcagatacagcatctccaggaccgaggccgctgacctg

SEQ ID NO: 68688 - RNA, 54 nt, synthetic construct
  misc_feature 1..54: note = Cytochrome c oxidase subunit 7C, mitochondrial (46-63)
  source 1..54: mol_type = other RNA
ggcagcgccttcgctaccccctttctggtggtcagacaccagctccttaagaca

SEQ ID NO: 68689 - RNA, 39 nt, synthetic construct
  misc_feature 1..39: note = Vimentin (41-53)
  source 1..39: mol_type = other RNA
ggcagcgccctgagaccctccacctctaggtcactctac

SEQ ID NO: 68690 - RNA, 27 nt, synthetic construct
  misc_feature 1..27: note = WD repeat-containing protein 81 (728-736)
  source 1..27: mol_type = other RNA
ggcagcgacaacggggtgatcagactg

SEQ ID NO: 68691 - RNA, 30 nt, synthetic construct; identical to SEQ ID NO: 44464
  misc_feature 1..30: note = Protein-methionine sulfoxide oxidase MICAL1 (594-603)
  source 1..30: mol_type = other RNA

SEQ ID NO: 68692 - RNA, 36 nt, synthetic construct
  misc_feature 1..36: note = A-kinase anchor protein 8 (159-170)
  source 1..36: mol_type = other RNA
ggcagcgacagaaacgggtccttcggaggtcagtac

SEQ ID NO: 68693 - RNA, 30 nt, synthetic construct
  misc_feature 1..30: note = Plasminogen activator inhibitor 1 RNA-binding protein (114-123)
  source 1..30: mol_type = other RNA
ggcagcgacagatcctctttctcacactac

SEQ ID NO: 68694 - RNA, 36 nt, synthetic construct
  misc_feature 1..36: note = Retinoic acid-induced protein 1 (520-531)
  source 1..36: mol_type = other RNA
ggcagcgaggaccccctggaaagatccttcctctac

SEQ ID NO: 68695 - RNA, 27 nt, synthetic construct
  misc_feature 1..27: note = Ribosomal protein S6 kinase alpha-6 (82-90)
  source 1..27: mol_type = other RNA
ggcagcttcgggaaggtgtttctggtc

SEQ ID NO: 68696 - RNA, 33 nt, synthetic construct
  misc_feature 1..33: note = V-type proton ATPase subunit H (179-189)
  source 1..33: mol_type = other RNA
ggcagcggggtggccgtcgagaccggaacagtt

SEQ ID NO: 68697 - RNA, 42 nt, synthetic construct
  misc_feature 1..42: note = HLA class I histocompatibility antigen, A-1 alpha chain (25-38)
  source 1..42: mol_type = other RNA
ggcagccactccatgagatacttctttacctctgtgtcaagg

SEQ ID NO: 68698 - RNA, 45 nt, synthetic construct
  misc_feature 1..45: note = HLA class I histocompatibility antigen, A-1 alpha chain (25-39)
  source 1..45: mol_type = other RNA
ggcagccactccatgagatacttctttacctctgtgtcaaggccc

SEQ ID NO: 68699 - RNA, 51 nt, synthetic construct
  misc_feature 1..51: note = HLA class I histocompatibility antigen, A-1 alpha chain (25-41)
  source 1..51: mol_type = other RNA
ggcagccactccatgagatacttctttacctctgtgtcaaggcccgggcgg

SEQ ID NO: 68700 - RNA, 54 nt, synthetic construct
  misc_feature 1..54: note = HLA class I histocompatibility antigen, A-1 alpha chain (25-42)
  source 1..54: mol_type = other RNA
ggcagccactccatgagatacttctttacctctgtgtcaaggcccgggcgggga

SEQ ID NO: 68701 - RNA, 78 nt, synthetic construct
  misc_feature 1..78: note = HLA class I histocompatibility antigen, A-1 alpha chain (25-50)
  source 1..78: mol_type = other RNA
ggcagccactccatgagatacttctttacctctgtgtcaaggcccgggcggggagagcctcgcttcatcgccgtcggt

SEQ ID NO: 68702 - RNA, 87 nt, synthetic construct
  misc_feature 1..87: note = HLA class I histocompatibility antigen, A-1 alpha chain (25-53)
  source 1..87: mol_type = other RNA
ggcagccactccatgagatacttctttacctctgtgtcaaggcccgggcggggagagcctcgcttcatcgccgtcggttatgttgac

SEQ ID NO: 68703 - RNA, 111 nt, synthetic construct
  misc_feature 1..111: note = HLA class I histocompatibility antigen, A-1 alpha chain (25-61)
  source 1..111: mol_type = other RNA
ggcagccactccatgagatacttctttacctctgtgtcaaggcccgggcggggagagcctcgcttcatcgccgtcggttatgttgacgatacacagtttgtgcgattcgac

SEQ ID NO: 68704 - RNA, 117 nt, synthetic construct
  misc_feature 1..117: note = HLA class I histocompatibility antigen, A-1 alpha chain (25-63)
  source 1..117: mol_type = other RNA
ggcagccactccatgagatacttctttacctctgtgtcaaggcccgggcggggagagcctcgcttcatcgccgtcggttatgttgacgatacacagtttgtgcgattcgacagtgat

SEQ ID NO: 68705 - RNA, 48 nt, synthetic construct
  misc_feature 1..48: note = HLA class I histocompatibility antigen, A-23 alpha chain (25-40)
  source 1..48: mol_type = other RNA
ggcagccactccatgagatacttctctacctcagtgagtaggcccggg

SEQ ID NO: 68706 - RNA, 54 nt, synthetic construct
  misc_feature 1..54: note = HLA class I histocompatibility antigen, A-23 alpha chain (25-42)
  source 1..54: mol_type = other RNA
ggcagccactccatgagatacttctctacctcagtgagtaggcccgggcgggga

SEQ ID NO: 68707 - RNA, 57 nt, synthetic construct
  misc_feature 1..57: note = HLA class I histocompatibility antigen, A-23 alpha chain (25-43)
  source 1..57: mol_type = other RNA
ggcagccactccatgagatacttctctacctcagtgagtaggcccgggcggggagag

SEQ ID NO: 68708 - RNA, 63 nt, synthetic construct
  misc_feature 1..63: note = HLA class I histocompatibility antigen, A-23 alpha chain (25-45)
  source 1..63: mol_type = other RNA
ggcagccactccatgagatacttctctacctcagtgagtaggcccgggcggggagagcctcgc

SEQ ID NO: 68709 - RNA, 78 nt, synthetic construct
  misc_feature 1..78: note = HLA class I histocompatibility antigen, A-23 alpha chain (25-50)
  source 1..78: mol_type = other RNA
ggcagccactccatgagatacttctctacctcagtgagtaggcccgggcggggagagcctcgctttatcgccgtcggt

SEQ ID NO: 68710 - RNA, 87 nt, synthetic construct
  misc_feature 1..87: note = HLA class I histocompatibility antigen, A-23 alpha chain (25-53)
  source 1..87: mol_type = other RNA
ggcagccactccatgagatacttctctacctcagtgagtaggcccgggcggggagagcctcgctttatcgccgtcggttatgttgac

SEQ ID NO: 68711 - RNA, 90 nt, synthetic construct
  misc_feature 1..90: note = HLA class I histocompatibility antigen, A-23 alpha chain (25-54)
  source 1..90: mol_type = other RNA
ggcagccactccatgagatacttctctacctcagtgagtaggcccgggcggggagagcctcgctttatcgccgtcggttatgttgacgat

SEQ ID NO: 68712 - RNA, 108 nt, synthetic construct
  misc_feature 1..108: note = HLA class I histocompatibility antigen, A-23 alpha chain (25-60)
  source 1..108: mol_type = other RNA
ggcagccactccatgagatacttctctacctcagtgagtaggcccgggcggggagagcctcgctttatcgccgtcggttatgttgacgatacacagttcgtgcgattt

SEQ ID NO: 68713 - RNA, 111 nt, synthetic construct
  misc_feature 1..111: note = HLA class I histocompatibility antigen, A-23 alpha chain (25-61)
  source 1..111: mol_type = other RNA
ggcagccactccatgagatacttctctacctcagtgagtaggcccgggcggggagagcctcgctttatcgccgtcggttatgttgacgatacacagttcgtgcgatttgac

SEQ ID NO: 68714 - RNA, 117 nt, synthetic construct
  misc_feature 1..117: note = HLA class I histocompatibility antigen, A-23 alpha chain (25-63)
  source 1..117: mol_type = other RNA
ggcagccactccatgagatacttctctacctcagtgagtaggcccgggcggggagagcctcgctttatcgccgtcggttatgttgacgatacacagttcgtgcgatttgacagcgat

SEQ ID NO: 68715 - RNA, 111 nt, synthetic construct
  misc_feature 1..111: note = HLA class I histocompatibility antigen, B-39 alpha chain (25-61)
  source 1..111: mol_type = other RNA
ggcagccactccatgagatacttctatacctctgtgtcaaggcccgggcggggagagcctcgctttatcagtgtcggttacgttgacgatacacagttcgtgcgatttgac

SEQ ID NO: 68716 - RNA, 117 nt, synthetic construct
  misc_feature 1..117: note = HLA class I histocompatibility antigen, B-39 alpha chain (25-63)
  source 1..117: mol_type = other RNA
ggcagccactccatgagatacttctatacctctgtgtcaaggcccgggcggggagagcctcgctttatcagtgtcggttacgttgacgatacacagttcgtgcgatttgacagcgat

SEQ ID NO: 68717 - RNA, 24 nt, synthetic construct
  misc_feature 1..24: note = Inosine-5'-monophosphate dehydrogenase 1 (142-149)
  source 1..24: mol_type = other RNA
ggcagcaagctggtggggatcgtc

SEQ ID NO: 68718 - RNA, 42 nt, synthetic construct
  misc_feature 1..42: note = Leucine-tRNA ligase, cytoplasmic (286-299)
  source 1..42: mol_type = other RNA
ggcagcatgcccgagctgaagaaatacatgaagaaagtgatg

SEQ ID NO: 68719 - RNA, 48 nt, synthetic construct
  misc_feature 1..48: note = Beta-secretase 2 (112-127)
  source 1..48: mol_type = other RNA
ggcagctccaacttcgccgtggctgggaccccccactcttacatcgac

SEQ ID NO: 68720 - RNA, 51 nt, synthetic construct
  misc_feature 1..51: note = Beta-secretase 2 (112-128)
  source 1..51: mol_type = other RNA
ggcagctccaacttcgccgtggctgggaccccccactcttacatcgacaca

SEQ ID NO: 68721 - RNA, 54 nt, synthetic construct
  misc_feature 1..54: note = Keratin, type II cytoskeletal 71 (27-44)
  source 1..54: mol_type = other RNA
ggcagctcctcttcattcagagccgggagtaagggactgagcggtggctttggg

SEQ ID NO: 68722 - RNA, 27 nt, synthetic construct
  misc_feature 1..27: note = PH-interacting protein (339-347)
  source 1..27: mol_type = other RNA
ggcagcaccgaccacatcattagagtg

SEQ ID NO: 68723 - RNA, 27 nt, synthetic construct
  misc_feature 1..27: note = WD repeat-containing protein 48 (104-112)
  source 1..27: mol_type = other RNA
ggcagcaccgagaaggtgctgagagtc

SEQ ID NO: 68724 - RNA, 27 nt, synthetic construct
  misc_feature 1..27: note = Interferon-induced protein with tetratricopeptide repeats 1 (265-273)
  source 1..27: mol_type = other RNA
ggcagcgtggacaaggccctggagctc

SEQ ID NO: 68725 - RNA, 27 nt, synthetic construct
  misc_feature 1..27: note = Polyadenylate-binding protein 2 (223-231)
  source 1..27: mol_type = other RNA
ggcagcgtgaacagagtcaccatcctg

SEQ ID NO: 68726 - RNA, 33 nt, synthetic construct
  misc_feature 1..33: note = Immunoglobulin superfamily member 8 (138-148)
  source 1..33: mol_type = other RNA
ggcagctactccgggaaggtggagctgagagtc

SEQ ID NO: 68727 - RNA, 72 nt, synthetic construct
  misc_feature 1..72: note = HLA class I histocompatibility antigen, A-23 alpha chain (342-365)
  source 1..72: mol_type = other RNA
ggcagctactcccaggccgcttcttcagacagtgcacaagggagcgatgtgtccctgaccgcctgcaaggtc

SEQ ID NO: 68728 - RNA, 72 nt, synthetic construct
  misc_feature 1..72: note = HLA class I histocompatibility antigen, A-1 alpha chain (317-340)
  source 1..72: mol_type = other RNA
ggcagctacacccaggccgcttcctctgactcagcacaagggagtgatgtgagcctgacagcctgcaaggtc

SEQ ID NO: 68729 - RNA, 27 nt, synthetic construct
  misc_feature 1..27: note = Myelin proteolipid protein (19-27)
  source 1..27: mol_type = other RNA
ggcaccgccagcttctttttcctgtac

SEQ ID NO: 68730 - RNA, 33 nt, synthetic construct
  misc_feature 1..33: note = Hemicentin-1 (688-698)
  source 1..33: mol_type = other RNA
ggcaccgacaagcagaacagcacactgagatac

SEQ ID NO: 68731 - RNA, 27 nt, synthetic construct
  misc_feature 1..27: note = Chondroitin sulfate proteoglycan 4 (1612-1620)
  source 1..27: mol_type = other RNA
ggcaccgacccccagctgctcctttac

SEQ ID NO: 68732 - RNA, 24 nt, synthetic construct
  misc_feature 1..24: note = Cathepsin F (454-461)
  source 1..24: mol_type = other RNA
ggcaccgactggggggagaaggga

SEQ ID NO: 68733 - RNA, 30 nt, synthetic construct
  misc_feature 1..30: note = Cathepsin F (454-463)
  source 1..30: mol_type = other RNA
ggcaccgactggggggagaagggatactat

SEQ ID NO: 68734 - RNA, 33 nt, synthetic construct
  misc_feature 1..33: note = Cathepsin F (454-464)
  source 1..33: mol_type = other RNA
ggcaccgactggggggagaagggatactattac

SEQ ID NO: 68735 - RNA, 27 nt, synthetic construct
  misc_feature 1..27: note = Cytoplasmic dynein 1 heavy chain 1 (2749-2757)
  source 1..27: mol_type = other RNA
ggcaccttcaacagagccatgctgagg

SEQ ID NO: 68736 - RNA, 93 nt, synthetic construct
  misc_feature 1..93: note = Nucleoporin p58/p45 (64-94)
  source 1..93: mol_type = other RNA
ggcaccgggctgttcggaagcaagcccgccacaggttttactctcggcgggacgaacaccggaacacctgctactacctccgcagccacaacc

SEQ ID NO: 68737 - RNA, 27 nt, synthetic construct
  misc_feature 1..27: note = DNA damage-binding protein 1 (702-710)
  source 1..27: mol_type = other RNA
ggcaccatcgacgagattcagaagctg

SEQ ID NO: 68738 - RNA, 30 nt, synthetic construct
  misc_feature 1..30: note = 60S ribosomal protein L6 (147-156)
  source 1..30: mol_type = other RNA
ggcaccatcctgattatactcacagggaga

SEQ ID NO: 68739 - RNA, 39 nt, synthetic construct
  misc_feature 1..39: note = D-3-phosphoglycerate dehydrogenase (49-61)
  source 1..39: mol_type = other RNA
ggcaccatccaggtgattacacaagggactagcctgaag

SEQ ID NO: 68740 - RNA, 27 nt, synthetic construct
  misc_feature 1..27: note = Hexokinase-1 (535-543)
  source 1..27: mol_type = other RNA
ggcaccaacttcagagtgctgctcgtc

SEQ ID NO: 68741 - RNA, 27 nt, synthetic construct
  misc_feature 1..27: note = Calponin-3 (207-215)
  source 1..27: mol_type = other RNA
ggcaccaacaaggtggccagccagaaa

SEQ ID NO: 68742 - RNA, 30 nt, synthetic construct
  misc_feature 1..30: note = Tripeptidyl-peptidase 1 (306-315)
  source 1..30: mol_type = other RNA
ggcacccccaacttccctgccctgctcaag

SEQ ID NO: 68743 - RNA, 27 nt, synthetic construct
  misc_feature 1..27: note = Histone-lysine N-methyltransferase ASH1L (311-319)
  source 1..27: mol_type = other RNA
ggcaccacagccgtgttcatcaacaag

SEQ ID NO: 68744 - RNA, 27 nt, synthetic construct
  misc_feature 1..27: note = L-dopachrome tautomerase (301-309)
  source 1..27: mol_type = other RNA
ggcacctacgaggggctgctcagaagg

SEQ ID NO: 68745 - RNA, 132 nt, synthetic construct
  misc_feature 1..132: note = Cytochrome c oxidase subunit 6C (32-75)
  source 1..132: mol_type = other RNA
ggcgtggccgctctgtacaagttcagagtcgcagaccagaggaaaaaggcctatgcggatttttaccggaactatgacgttatgaaagatttcgaggaaatgcgcaaggctgggatctttcaaagcgtgaaa

SEQ ID NO: 68746 - RNA, 45 nt, synthetic construct
  misc_feature 1..45: note = Hemicentin-2 (666-680)
  source 1..45: mol_type = other RNA
ggcgtggcccccgaggacgctgggaactacagctgccaggcaacc

SEQ ID NO: 68747 - RNA, 33 nt, synthetic construct
  misc_feature 1..33: note = Unconventional myosin-Ib (244-254)
  source 1..33: mol_type = other RNA
ggcgtggacgatgccgctaacttcagaaccgtc

SEQ ID NO: 68748 - RNA, 48 nt, synthetic construct
  misc_feature 1..48: note = Annexin A2 (50-65)
  source 1..48: mol_type = other RNA
ggcgtggacgaggtcaccatcgttaacattctgacaaatagaagcaac

SEQ ID NO: 68749 - RNA, 54 nt, synthetic construct
  misc_feature 1..54: note = Annexin A2 (50-67)
  source 1..54: mol_type = other RNA
ggcgtggacgaggtcaccatcgttaacattctgacaaatagaagcaacgcccag

SEQ ID NO: 68750 - RNA, 27 nt, synthetic construct
  misc_feature 1..27: note = Complement C3 (1424-1432)
  source 1..27: mol_type = other RNA
ggcgtggacagatacatcagcaagtat

SEQ ID NO: 68751 - RNA, 27 nt, synthetic construct
  misc_feature 1..27: note = Biotinidase (443-451)
  source 1..27: mol_type = other RNA
ggcgtgttcgacgggctgcacaccgtc

SEQ ID NO: 68752 - RNA, 27 nt, synthetic construct
  misc_feature 1..27: note = T-cell immunomodulatory protein (25-33)
  source 1..27: mol_type = other RNA
ggcgtggggcccgtccctgccagagct

SEQ ID NO: 68753 - RNA, 27 nt, synthetic construct
  misc_feature 1..27: note = CD109 antigen (187-195)
  source 1..27: mol_type = other RNA
ggcgtgatcagcaagaccttccagctg

SEQ ID NO: 68754 - RNA, 27 nt, synthetic construct
  misc_feature 1..27: note = Zinc finger CCCH domain-containing protein 14 (68-76)
  source 1..27: mol_type = other RNA
ggcgtgctggacaagctcagaagcgtc

SEQ ID NO: 68755 - RNA, 33 nt, synthetic construct; identical to SEQ ID NO: 44528
  misc_feature 1..33: note = Probable E3 ubiquitin-protein ligase HERC1 (3840-3850)
  source 1..33: mol_type = other RNA

SEQ ID NO: 68756 - RNA, 57 nt, synthetic construct
  misc_feature 1..57: note = Glia-derived nexin (188-206)
  source 1..57: mol_type = other RNA
ggcgtgctgaccagactcgtccttgttaacgccgtgtacttcaaggggctgtggaaa

SEQ ID NO: 68757 - RNA, 24 nt, synthetic construct
  misc_feature 1..24: note = Nucleolar RNA helicase 2 (421-428)
  source 1..24: mol_type = other RNA
ggcgtgctggtcgccaccaacgtt

SEQ ID NO: 68758 - RNA, 39 nt, synthetic construct
  misc_feature 1..39: note = Neuronal cell adhesion molecule (398-410)
  source 1..39: mol_type = other RNA
ggcgtgcccatcgagattgcccctgacgatccaagcaga

SEQ ID NO: 68759 - RNA, 42 nt, synthetic construct
  misc_feature 1..42: note = Neuronal cell adhesion molecule (398-411)
  source 1..42: mol_type = other RNA
ggcgtgcccatcgagattgcccctgacgatccaagcagaaag

SEQ ID NO: 68760 - RNA, 72 nt, synthetic construct
  misc_feature 1..72: note = Heat shock cognate 71 kDa protein (470-493)
  source 1..72: mol_type = other RNA
ggcgtgccccagatcgaggtcaccttcgacattgatgccaacgggatactgaatgttagcgctgtggacaag

SEQ ID NO: 68761 - RNA, 102 nt, synthetic construct
  misc_feature 1..102: note = Apolipoprotein L1 (146-179)
  source 1..102: mol_type = other RNA
ggcgtgcagaaggtccacaaagggaccacaatcgccaacgttgtgagcggatccctgtctatttcaagtggtatactcactcttgtaggcatggggctggct

SEQ ID NO: 68762 - RNA, 27 nt, synthetic construct
  misc_feature 1..27: note = Ropporin-1B (131-139)
  source 1..27: mol_type = other RNA
ggcgtgaccatcacaaagactctgaaa

SEQ ID NO: 68763 - RNA, 27 nt, synthetic construct
  misc_feature 1..27: note = Alpha-synuclein (47-55)
  source 1..27: mol_type = other RNA
ggcgtggtccacggggttgccaccgtg

SEQ ID NO: 68764 - RNA, 30 nt, synthetic construct
  misc_feature 1..30: note = Melanoma-associated antigen C2 (257-266)
  source 1..30: mol_type = other RNA
ggcgtgtacgccgggagagagcacttcgtc

SEQ ID NO: 68765 - RNA, 141 nt, synthetic construct
  misc_feature 1..141: note = Protein CDV3 homolog (167-213)
  source 1..141: mol_type = other RNA
ggcgtgtacagaccccctggggccaggctgaccacaactcggaagacgccacagggaccgcccgagatctatagcgacacccaattcccttccctccagtctacagctaaacacgtcgaatcacgcaaccgataccttaag

SEQ ID NO: 68766 - RNA, 27 nt, synthetic construct
  misc_feature 1..27: note = Procollagen-lysine,2-oxoglutarate 5-dioxygenase 1 (159-167)
  source 1..27: mol_type = other RNA
ggctacgcccccaacctgagcaagctc

SEQ ID NO: 68767 - RNA, 45 nt, synthetic construct
  misc_feature 1..45: note = Interferon alpha-inducible protein 6 (116-130)
  source 1..45: mol_type = other RNA
ggctacgccacccacaagtatctggacagcgaggaagatgaggaa

SEQ ID NO: 68768 - RNA, 48 nt, synthetic construct
  misc_feature 1..48: note = HLA class I histocompatibility antigen, B-44 alpha chain (136-151)
  source 1..48: mol_type = other RNA
ggctacgaccaggatgcctatgacgggaaggattacatcgctctgaac

SEQ ID NO: 68769 - RNA, 27 nt, synthetic construct
  misc_feature 1..27: note = Alpha-parvin (305-313)
  source 1..27: mol_type = other RNA
ggctacttcgtgcccctgcacagcttt

SEQ ID NO: 68770 - RNA, 30 nt, synthetic construct
  misc_feature 1..30: note = Keratin, type II cytoskeletal 3 (100-109)
  source 1..30: mol_type = other RNA
ggctacgggggaggtttcggcgggggattt

SEQ ID NO: 68771 - RNA, 48 nt, synthetic construct
  misc_feature 1..48: note = HLA class I histocompatibility antigen, A-2 alpha chain (111-126)
  source 1..48: mol_type = other RNA
ggctaccaccagtatgcctacgacgggaaggattatatcgctctgaaa

SEQ ID NO: 68772 - RNA, 48 nt, synthetic construct
  misc_feature 1..48: note = Laminin subunit gamma-1 (666-681)
  source 1..48: mol_type = other RNA
ggctacctggacgatgtgaccctcgccagcgctagacccgggcctgga

SEQ ID NO: 68773 - RNA, 33 nt, synthetic construct
  misc_feature 1..33: note = Unconventional myosin-XVIIIa (1111-1121)
  source 1..33: mol_type = other RNA
ggctaccccgaccacatggtgttcagcgagttt

SEQ ID NO: 68774 - RNA, 27 nt, synthetic construct
  misc_feature 1..27: note = Heterogeneous nuclear ribonucleoprotein U-like protein 1 (231-239)
  source 1..27: mol_type = other RNA
ggctaccccctgaccatcgaggggttc

SEQ ID NO: 68775 - RNA, 30 nt, synthetic construct
  misc_feature 1..30: note = Spectrin beta chain, non-erythrocytic 1 (189-198)
  source 1..30: mol_type = other RNA
ggctaccccaacgtgaatatccacaacttc

SEQ ID NO: 68776 - RNA, 27 nt, synthetic construct
  misc_feature 1..27: note = FERM domain-containing protein 5 (67-75)
  source 1..27: mol_type = other RNA
ggctacagctccaagttccagtttttc

SEQ ID NO: 68777 - RNA, 60 nt, synthetic construct
  misc_feature 1..60: note = L-lactate dehydrogenase B chain (247-266)
  source 1..60: mol_type = other RNA
ggctacaccaactgggccatcgggctgagcgtggctgacctcattgagtccatgcttaag

SEQ ID NO: 68778 - RNA, 60 nt, synthetic construct
  misc_feature 1..60: note = L-lactate dehydrogenase A chain (275-294)
  source 1..60: mol_type = other RNA
ggctacaccagctgggccatcgggctgtccgtggctgacctcgcagagtctattatgaag

SEQ ID NO: 68779 - RNA, 27 nt, synthetic construct
  misc_feature 1..27: note = Beta-hexosaminidase subunit alpha (369-377)
  source 1..27: mol_type = other RNA
ggctacgtggtctggcaggaggttttc

SEQ ID NO: 68780 - RNA, 27 nt, synthetic construct
  misc_feature 1..27: note = Nestin (55-63)
  source 1..27: mol_type = other RNA
cacgccgacgatgagctggctgcactc

SEQ ID NO: 68781 - RNA, 27 nt, synthetic construct
  misc_feature 1..27: note = Centrosomal protein C10orf90 (226-234)
  source 1..27: mol_type = other RNA
cacgccgacgataaggagaccagcttc

SEQ ID NO: 68782 - RNA, 27 nt, synthetic construct
  misc_feature 1..27: note = Sentrin-specific protease 6 (139-147)
  source 1..27: mol_type = other RNA
cacgcccatgctcagatccccgtggtc

SEQ ID NO: 68783 - RNA, 27 nt, synthetic construct
  misc_feature 1..27: note = Sodium/potassium/calcium exchanger 1 (212-220)
  source 1..27: mol_type = other RNA
cacgccatcacccccagaacaactgtg

SEQ ID NO: 68784 - RNA, 24 nt, synthetic construct
  misc_feature 1..24: note = Growth/differentiation factor 15 (241-248)
  source 1..24: mol_type = other RNA
cacgcccagatcaagaccagcctg

SEQ ID NO: 68785 - RNA, 27 nt, synthetic construct
  misc_feature 1..27: note = Beta-parvin (157-165)
  source 1..27: mol_type = other RNA
cacgacctgctcagacccaggggctgg

SEQ ID NO: 68786 - RNA, 36 nt, synthetic construct
  misc_feature 1..36: note = Kinase D-interacting substrate of 220 kDa (21-32)
  source 1..36: mol_type = other RNA
cacgagggcccccctagagccccaagcgggtactcc

SEQ ID NO: 68787 - RNA, 27 nt, synthetic construct
  misc_feature 1..27: note = Sex comb on midleg-like protein 2 (691-699)
  source 1..27: mol_type = other RNA
cacgagatcgacggcaaggccctgttc

SEQ ID NO: 68788 - RNA, 27 nt, synthetic construct
  misc_feature 1..27: note = Aldehyde dehydrogenase family 1 member A3 (41-49)
  source 1..27: mol_type = other RNA
cacgagagcaagtccggcaaaaagttc

SEQ ID NO: 68789 - RNA, 27 nt, synthetic construct
  misc_feature 1..27: note = Echinoderm microtubule-associated protein-like 6 (1842-1850)
  source 1..27: mol_type = other RNA
cacgaggtgcccctgggcaagcaggtc

SEQ ID NO: 68790 - RNA, 18 nt, synthetic construct
  misc_feature 1..18: note = Leucine-rich repeat-containing protein 42 (71-76)
  source 1..18: mol_type = other RNA
cacttcatctttacctac

SEQ ID NO: 68791 - RNA, 45 nt, synthetic construct
  misc_feature 1..45: note = Laminin subunit gamma-1 (101-115)
  source 1..45: mol_type = other RNA
cacggcgccgctttcctgaccgactacaacaatcaggcagataca

SEQ ID NO: 68792 - RNA, 48 nt, synthetic construct
  misc_feature 1..48: note = Laminin subunit gamma-1 (101-116)
  source 1..48: mol_type = other RNA
cacggcgccgctttcctgaccgactacaacaatcaggcagatacaact

SEQ ID NO: 68793 - RNA, 27 nt, synthetic construct
  misc_feature 1..27: note = Fibrocystin-L (1809-1817)
  source 1..27: mol_type = other RNA
caccatagcgtgtccgtcgttgtgggc

SEQ ID NO: 68794 - RNA, 27 nt, synthetic construct
  misc_feature 1..27: note = DIS3-like exonuclease 1 (421-429)
  source 1..27: mol_type = other RNA
cacatcgccgacgtgacccatttcgtc

SEQ ID NO: 68795 - RNA, 27 nt, synthetic construct
  misc_feature 1..27: note = Protein arginine N-methyltransferase 3 (190-198)
  source 1..27: mol_type = other RNA
cacatcttcaaggacaaagtggtcctg

SEQ ID NO: 68796 - RNA, 27 nt, synthetic construct
  misc_feature 1..27: note = Carbonic anhydrase 14 (176-184)
  source 1..27: mol_type = other RNA
cacatcctgagccatctccacgaggtg

SEQ ID NO: 68797 - RNA, 27 nt, synthetic construct
  misc_feature 1..27: note = Coatomer subunit gamma-2 (46-54)
  source 1..27: mol_type = other RNA
cacatcctgaccaagattctctacctt

SEQ ID NO: 68798 - RNA, 27 nt, synthetic construct
  misc_feature 1..27: note = Chondroitin sulfate proteoglycan 4 (290-298)
  source 1..27: mol_type = other RNA
cacatcaacgcccatagactggagatt

SEQ ID NO: 68799 - RNA, 21 nt, synthetic construct
  misc_feature 1..21: note = Mediator of RNA polymerase II transcription subunit 23 (178-184)
  source 1..21: mol_type = other RNA
cacatcaaccagattggctac

SEQ ID NO: 68800 - RNA, 72 nt, synthetic construct
  misc_feature 1..72: note = Histidine triad nucleotide-binding protein 1 (59-82)
  source 1..72: mol_type = other RNA
cacatcagccagatttccgtggccgaggacgatgacgaatctctgctcggccatcttatgatagtcgggaag

SEQ ID NO: 68801 - RNA, 21 nt, synthetic construct
  misc_feature 1..21: note = Thymidylate synthase (256-262)
  source 1..21: mol_type = other RNA
cacatctacctgaaccatatt

SEQ ID NO: 68802 - RNA, 27 nt, synthetic construct
  misc_feature 1..27: note = Vesicle-trafficking protein SEC22c (208-216)
  source 1..27: mol_type = other RNA
cacctggccgagcatagcctccaggtg

SEQ ID NO: 68803 - RNA, 27 nt, synthetic construct
  misc_feature 1..27: note = Leucine-rich repeat-containing protein C10orf11 (68-76)
  source 1..27: mol_type = other RNA
cacctggccgaggtgacccccgctctc

SEQ ID NO: 68804 - RNA, 33 nt, synthetic construct
  misc_feature 1..33: note = Cytochrome c oxidase subunit 1 (151-161)
  source 1..33: mol_type = other RNA
cacctggccggcgtgagctccatcctcggggct

SEQ ID NO: 68805 - RNA, 27 nt, synthetic construct
  misc_feature 1..27: note = Beta-hexosaminidase subunit beta (59-67)
  source 1..27: mol_type = other RNA
cacctggcccccgagaacttctacatc

SEQ ID NO: 68806 - RNA, 27 nt, synthetic construct
  misc_feature 1..27: note = Zinc finger protein 638 (1613-1621)
  source 1..27: mol_type = other RNA
cacctggcccaggctctcgtgaccgtc

SEQ ID NO: 68807 - RNA, 27 nt, synthetic construct
  misc_feature 1..27: note = Receptor-interacting serine/threonine-protein kinase 4 (730-738)
  source 1..27: mol_type = other RNA
cacctggccaccgtgaagctccttgtc

SEQ ID NO: 68808 - RNA, 27 nt, synthetic construct
  misc_feature 1..27: note = Unconventional myosin-Ic (1017-1025)
  source 1..27: mol_type = other RNA
cacctggccgtggtcgctcccagactc

SEQ ID NO: 68809 - RNA, 30 nt, synthetic construct
  misc_feature 1..30: note = Zinc finger protein 879 (30-39)
  source 1..30: mol_type = other RNA
cacctggacagcgcccagagagctctctac

SEQ ID NO: 68810 - RNA, 27 nt, synthetic construct
  misc_feature 1..27: note = Vacuolar protein sorting-associated protein 13C (1304-1312)
  source 1..27: mol_type = other RNA
cacctggacagcatgaacgtgtccctc

SEQ ID NO: 68811 - RNA, 27 nt, synthetic construct
  misc_feature 1..27: note = Membrane-associated transporter protein (324-332)
  source 1..27: mol_type = other RNA
cacctgatcggctggaccgccttcctc

SEQ ID NO: 68812 - RNA, 24 nt, synthetic construct
  misc_feature 1..24: note = Neutral alpha-glucosidase AB (77-84)
  source 1..24: mol_type = other RNA
cacctgatccatgaggtgaccaag

SEQ ID NO: 68813 - RNA, 27 nt, synthetic construct
  misc_feature 1..27: note = Polypeptide N-acetylgalactosaminyltransferase 2 (166-174)
  source 1..27: mol_type = other RNA
cacctgatcaaggagattatactcgtg

SEQ ID NO: 68814 - RNA, 33 nt, synthetic construct
  misc_feature 1..33: note = Myomegalin (201-211)
  source 1..33: mol_type = other RNA
cacctgctcgaggaacccaccagcatggaggtg

SEQ ID NO: 68815 - RNA, 27 nt, synthetic construct
  misc_feature 1..27: note = Transmembrane and TPR repeat-containing protein 3 (93-101)
  source 1..27: mol_type = other RNA
cacctgctcaacatgatcttccatgcc

SEQ ID NO: 68816 - RNA, 27 nt, synthetic construct
  misc_feature 1..27: note = Gamma-tubulin complex component 5 (435-443)
  source 1..27: mol_type = other RNA
cacctgctcaacaccctttacaaggcc

SEQ ID NO: 68817 - RNA, 27 nt, synthetic construct
  misc_feature 1..27: note = RNA-binding protein EWS (499-507)
  source 1..27: mol_type = other RNA
cacctgaacggccatatcaagcaggtg

SEQ ID NO: 68818 - RNA, 27 nt, synthetic construct
  misc_feature 1..27: note = Triple functional domain protein (852-860)
  source 1..27: mol_type = other RNA
cacctgcaggccgaggtgaagcaagtc

SEQ ID NO: 68819 - RNA, 27 nt, synthetic construct
  misc_feature 1..27: note = Eukaryotic translation initiation factor 3 subunit C-like protein (594-602)
  source 1..27: mol_type = other RNA
cacctgcaggacaacatccaacatgcc

SEQ ID NO: 68820 - RNA, 51 nt, synthetic construct
  misc_feature 1..51: note = Histone H2A.V (60-76)
  source 1..51: mol_type = other RNA
cacctgcagctcgccatcagaggcgacgaggaacttgatagcctgattaag

SEQ ID NO: 68821 - RNA, 27 nt, synthetic construct
  misc_feature 1..27: note = Inhibitor of nuclear factor kappa-B kinase subunit alpha (688-696)
  source 1..27: mol_type = other RNA
cacctgagcaccatcattcatgaggcc

SEQ ID NO: 68822 - RNA, 27 nt, synthetic construct
  misc_feature 1..27: note = Protein TANC1 (1149-1157)
  source 1..27: mol_type = other RNA
cacctgagcaccgtggagttcctcctt

SEQ ID NO: 68823 - RNA, 27 nt, synthetic construct
  misc_feature 1..27: note = Pre-mRNA-splicing factor ATP-dependent RNA helicase PRP16 (1008-1016)
  source 1..27: mol_type = other RNA
cacctgacctacctcaacgtgtatctt

SEQ ID NO: 68824 - RNA, 30 nt, synthetic construct
  misc_feature 1..30: note = ATPase family AAA domain-containing protein 1 (79-88)
  source 1..30: mol_type = other RNA
cacctggtggaccccctcaacatgcatgtc

SEQ ID NO: 68825 - RNA, 27 nt, synthetic construct
  misc_feature 1..27: note = Dedicator of cytokinesis protein 1 (422-430)
  source 1..27: mol_type = other RNA
cacctggtggacagaaccacagccgtc

SEQ ID NO: 68826 - RNA, 27 nt, synthetic construct
  misc_feature 1..27: note = Putative inactive carbonic anhydrase 5B-like protein (29-37)
  source 1..27: mol_type = other RNA
cacctggtgcattggaacgccgtcaag

SEQ ID NO: 68827 - RNA, 27 nt, synthetic construct
  misc_feature 1..27: note = UDP-galactose translocator (109-117)
  source 1..27: mol_type = other RNA
cacctggtgctcttccttcatgaggcc

SEQ ID NO: 68828 - RNA, 27 nt, synthetic construct
  misc_feature 1..27: note = Tonsoku-like protein (37-45)
  source 1..27: mol_type = other RNA
cacctgtacgaggacctcttcagagcc

SEQ ID NO: 68829 - RNA, 27 nt, synthetic construct
  misc_feature 1..27: note = Alpha/beta hydrolase domain-containing protein 13 (38-46)
  source 1..27: mol_type = other RNA
cacctgtacggcgggatcattctcctt

SEQ ID NO: 68830 - RNA, 27 nt, synthetic construct
  misc_feature 1..27: note = Interferon-related developmental regulator 1 (373-381)
  source 1..27: mol_type = other RNA
cacctgtacaacagcgccgctttcaag

SEQ ID NO: 68831 - RNA, 18 nt, synthetic construct
  misc_feature 1..18: note = Bax inhibitor 1 (94-99)
  source 1..18: mol_type = other RNA
cacatggtgacccatttc

SEQ ID NO: 68832 - RNA, 27 nt, synthetic construct
  misc_feature 1..27: note = Eukaryotic translation initiation factor 3 subunit C-like protein (433-441)
  source 1..27: mol_type = other RNA
cacaacgccgaccagcccctgagagtg

SEQ ID NO: 68833 - RNA, 45 nt, synthetic construct
  misc_feature 1..45: note = Tartrate-resistant acid phosphatase type 5 (240-254)
  source 1..45: mol_type = other RNA
cacaacctgcagtacctccaagacgagaatggcgtggggtatgtc

SEQ ID NO: 68834 - RNA, 27 nt, synthetic construct
  misc_feature 1..27: note = GMP synthase (glutamine-hydrolyzing) (555-563)
  source 1..27: mol_type = other RNA
cacaacgtgaatagagtcgtttacatc

SEQ ID NO: 68835 - RNA, 24 nt, synthetic construct
  misc_feature 1..24: note = 60S ribosomal protein L10 (92-99)
  source 1..24: mol_type = other RNA
caccccttccatgtgatcagaatt

SEQ ID NO: 68836 - RNA, 27 nt, synthetic construct
  misc_feature 1..27: note = Protein EURL homolog (214-222)
  source 1..27: mol_type = other RNA
cacccccattacagcagagaggaactg

SEQ ID NO: 68837 - RNA, 27 nt, synthetic construct
  misc_feature 1..27: note = Porphobilinogen deaminase (109-117)
  source 1..27: mol_type = other RNA
caccccaagttcgtgggcaaaaccctg

SEQ ID NO: 68838 - RNA, 30 nt, synthetic construct
  misc_feature 1..30: note = Transmembrane protein 209 (465-474)
  source 1..30: mol_type = other RNA
caccccaagtaccctgacggcaaaaccttc

SEQ ID NO: 68839 - RNA, 27 nt, synthetic construct
  misc_feature 1..27: note = WD repeat-containing protein 43 (361-369)
  source 1..27: mol_type = other RNA
caccccaacagcgccgtgctgatggtc

SEQ ID NO: 68840 - RNA, 24 nt, synthetic construct
  misc_feature 1..24: note = Angio-associated migratory cell protein (51-58)
  source 1..24: mol_type = other RNA
caccccagagcccctgtgctgctc

SEQ ID NO: 68841 - RNA, 24 nt, synthetic construct
  misc_feature 1..24: note = Microtubule-associated proteins 1A/1B light chain 3B (27-34)
  source 1..24: mol_type = other RNA
caccccaccaagatccctgtgatt

SEQ ID NO: 68842 - RNA, 27 nt, synthetic construct
  misc_feature 1..27: note = Uncharacterized protein C18orf8 (244-252)
  source 1..27: mol_type = other RNA
caccccgtgctgcctgccagaagcatc

SEQ ID NO: 68843 - RNA, 27 nt, synthetic construct
  misc_feature 1..27: note = Melanoma-derived growth regulatory protein (65-73)
  source 1..27: mol_type = other RNA
cacagaggccaggtggtctacgttttc

SEQ ID NO: 68844 - RNA, 27 nt, synthetic construct
  misc_feature 1..27: note = Platelet-derived growth factor D (2-10)
  source 1..27: mol_type = other RNA
cacagactgatcttcgtgtacaccctc

SEQ ID NO: 68845 - RNA, 24 nt, synthetic construct
  misc_feature 1..24: note = Serine protease HTRA1 (143-150)
  source 1..24: mol_type = other RNA
cacagaccccctgtgatcgtcctg

SEQ ID NO: 68846 - RNA, 27 nt, synthetic construct
  misc_feature 1..27: note = Asparagine synthetase (glutamine-hydrolyzing) (86-94)
  source 1..27: mol_type = other RNA
cacagcgccacccccttcctgaaggtg

SEQ ID NO: 68847 - RNA, 24 nt, synthetic construct
  misc_feature 1..24: note = Histone deacetylase 1 (68-75)
  source 1..24: mol_type = other RNA
cacagcgacgattacatcaagttc

SEQ ID NO: 68848 - RNA, 33 nt, synthetic construct
  misc_feature 1..33: note = Histone-lysine N-methyltransferase NSD3 (877-887)
  source 1..33: mol_type = other RNA
cacagcgaccccatgttctcctcttacgcctat

SEQ ID NO: 68849 - RNA, 27 nt, synthetic construct
  misc_feature 1..27: note = Histone deacetylase 9 (697-705)
  source 1..27: mol_type = other RNA
cacagcgagcatcactccctgctctac

SEQ ID NO: 68850 - RNA, 42 nt, synthetic construct
  misc_feature 1..42: note = Tubulin alpha-1C chain (209-222)
  source 1..42: mol_type = other RNA
cacagcttcggcgggggaaccggttccggctttacatctctg

SEQ ID NO: 68851 - RNA, 24 nt, synthetic construct
  misc_feature 1..24: note = Neuropilin-2 (415-422)
  source 1..24: mol_type = other RNA
cacagcggcatcgccctgagactc

SEQ ID NO: 68852 - RNA, 24 nt, synthetic construct
  misc_feature 1..24: note = Pre-mRNA-processing factor 19 (391-398)
  source 1..24: mol_type = other RNA
cacagcggccccatcacctccatt

SEQ ID NO: 68853 - RNA, 27 nt, synthetic construct
  misc_feature 1..27: note = Centrosome-associated protein 350 (1116-1124)
  source 1..27: mol_type = other RNA
cacagcatctccattcccaccaagctg

SEQ ID NO: 68854 - RNA, 27 nt, synthetic construct
  misc_feature 1..27: note = Serine/threonine-protein kinase MRCK alpha (1363-1371)
  source 1..27: mol_type = other RNA
cacagcaacgaccataccctgtccttc

SEQ ID NO: 68855 - RNA, 27 nt, synthetic construct
  misc_feature 1..27: note = Heterogeneous nuclear ribonucleoprotein K (187-195)
  source 1..27: mol_type = other RNA
cacagcaccgacagagtggtcctgatc

SEQ ID NO: 68856 - RNA, 24 nt, synthetic construct
  misc_feature 1..24: note = COP9 signalosome complex subunit 6 (130-137)
  source 1..24: mol_type = other RNA
cacaccgacctgcccgtgagcgtc

SEQ ID NO: 68857 - RNA, 42 nt, synthetic construct
  misc_feature 1..42: note = Sodium/potassium-transporting ATPase subunit alpha-3 (688-701)
  source 1..42: mol_type = other RNA
cacaccgagatcgtgttcgccagaacaagcccccagcaaaag

SEQ ID NO: 68858 - RNA, 45 nt, synthetic construct
  misc_feature 1..45: note = Sodium/potassium-transporting ATPase subunit alpha-3 (688-702)
  source 1..45: mol_type = other RNA
cacaccgagatcgtgttcgccagaacaagcccccagcaaaagctg

SEQ ID NO: 68859 - RNA, 42 nt, synthetic construct
  misc_feature 1..42: note = Tyrosine-protein phosphatase non-receptor type substrate 1 (453-466)
  source 1..42: mol_type = other RNA
cacaccgagtacgccagcatccagacatccccccaacctgct

SEQ ID NO: 68860 - RNA, 27 nt, synthetic construct
  misc_feature 1..27: note = H(+)/Cl(-) exchange transporter 3 (72-80)
  source 1..27: mol_type = other RNA
cacaccatcgactgggtgagagagaag

SEQ ID NO: 68861 - RNA, 33 nt, synthetic construct; identical to SEQ ID NO: 44634
  misc_feature 1..33: note = Tensin-3 (344-354)
  source 1..33: mol_type = other RNA

SEQ ID NO: 68862 - RNA, 27 nt, synthetic construct
  misc_feature 1..27: note = Bifunctional glutamate/proline-tRNA ligase (1093-1101)
  source 1..27: mol_type = other RNA
cacgtggccgacttcgctcccgaggtc

SEQ ID NO: 68863 - RNA, 36 nt, synthetic construct
  misc_feature 1..36: note = Cytochrome c oxidase subunit 6A1, mitochondrial (75-86)
  source 1..36: mol_type = other RNA
cacgtgaaccccctgcctaccggctacgaggacgaa

SEQ ID NO: 68864 - RNA, 48 nt, synthetic construct
  misc_feature 1..48: note = Beta-2-microglobulin (83-98)
  source 1..48: mol_type = other RNA
cacgtgaccctgagccagcccaagatcgtcaaatgggacagagatatg

SEQ ID NO: 68865 - RNA, 18 nt, synthetic construct
  misc_feature 1..18: note = GPI transamidase component PIG-T (164-169)
  source 1..18: mol_type = other RNA
cactacttcctgagatat

SEQ ID NO: 68866 - RNA, 24 nt, synthetic construct
  misc_feature 1..24: note = Vacuolar protein sorting-associated protein 41 homolog (13-20)
  source 1..24: mol_type = other RNA
cactacggcaaggtgtatctgctc

SEQ ID NO: 68867 - RNA, 24 nt, synthetic construct
  misc_feature 1..24: note = Interferon-induced protein with tetratricopeptide repeats 1 (383-390)
  source 1..24: mol_type = other RNA
cactacggcagattccaggagttt

SEQ ID NO: 68868 - RNA, 27 nt, synthetic construct
  misc_feature 1..27: note = Transcription factor SOX-10 (387-395)
  source 1..27: mol_type = other RNA
cactacggcagcgccttcccctccatc

SEQ ID NO: 68869 - RNA, 27 nt, synthetic construct
  misc_feature 1..27: note = AF4/FMR2 family member 4 (917-925)
  source 1..27: mol_type = other RNA
cactacctgcaggaggccaagaaactc

SEQ ID NO: 68870 - RNA, 27 nt, synthetic construct
  misc_feature 1..27: note = KN motif and ankyrin repeat domain-containing protein 1 (1167-1175)
  source 1..27: mol_type = other RNA
cactacagcgtgtcccattctaacttc

SEQ ID NO: 68871 - RNA, 27 nt, synthetic construct
  misc_feature 1..27: note = L-dopachrome tautomerase (189-197)
  source 1..27: mol_type = other RNA
cactactatagcgtgagagacaccctg

SEQ ID NO: 68872 - RNA, 24 nt, synthetic construct
  misc_feature 1..24: note = Brefeldin A-inhibited guanine nucleotide-exchange protein 2 (340-347)
  source 1..24: mol_type = other RNA
atcgccgacgatagacagagcctg

SEQ ID NO: 68873 - RNA, 27 nt, synthetic construct
  misc_feature 1..27: note = Tripartite motif-containing protein 44 (270-278)
  source 1..27: mol_type = other RNA
atcgccgacgaggaacagaaggctctg

SEQ ID NO: 68874 - RNA, 30 nt, synthetic construct
  misc_feature 1..30: note = Serine hydroxymethyltransferase, cytosolic (79-88)
  source 1..30: mol_type = other RNA
atcgccgacgagaacggcgcttacctgatg

SEQ ID NO: 68875 - RNA, 27 nt, synthetic construct
  misc_feature 1..27: note = Vitamin K-dependent gamma-carboxylase (475-483)
  source 1..27: mol_type = other RNA
atcgccgacttccccggcctgcacctc

SEQ ID NO: 68876 - RNA, 27 nt, synthetic construct
  misc_feature 1..27: note = Chromodomain-helicase-DNA-binding protein 3 (372-380)
  source 1..27: mol_type = other RNA
atcgccgacggcgggttcaccgagctg

SEQ ID NO: 68877 - RNA, 24 nt, synthetic construct
  misc_feature 1..24: note = Probable dimethyladenosine transferase (116-123)
  source 1..24: mol_type = other RNA
atcgccgacaagattcagcaaata

SEQ ID NO: 68878 - RNA, 24 nt, synthetic construct
  misc_feature 1..24: note = Mitotic checkpoint serine/threonine-protein kinase BUB1 beta (956-963)
  source 1..24: mol_type = other RNA
atcgccgacctggctcacctcctt

SEQ ID NO: 68879 - RNA, 27 nt, synthetic construct
  misc_feature 1..27: note = Gamma-interferon-inducible protein 16 (48-56)
  source 1..27: mol_type = other RNA
atcgccgacctgatggaggaaaagttc

SEQ ID NO: 68880 - RNA, 24 nt, synthetic construct
  misc_feature 1..24: note = Ras association domain-containing protein 5 (335-342)
  source 1..24: mol_type = other RNA
atcgccgacagacccctgtacctc

SEQ ID NO: 68881 - RNA, 24 nt, synthetic construct
  misc_feature 1..24: note Dolichyl-diphosphooligosaccharide-proteinosyltransferase subunit 2 (268-275)
  source 1..24: mol_type = other RNA
atcgccgacagccaccagaacttc

SEQ ID NO: 68882 - RNA, 27 nt, synthetic construct
  misc_feature 1..27: note = Consortin (202-210)
  source 1..27: mol_type = other RNA
atcgccgaggaccccaaggtgttcctg

SEQ ID NO: 68883 - RNA, 27 nt, synthetic construct
  misc_feature 1..27: note = Eukaryotic translation initiation factor 4 gamma 2 (5-13)
  source 1..27: mol_type = other RNA
atcgccgagggcggggctagcagattc

SEQ ID NO: 68884 - RNA, 27 nt, synthetic construct
  misc_feature 1..27: note = Tensin-3 (154-162)
  source 1..27: mol_type = other RNA
atcgccttcagcagacccgtgaagtac

SEQ ID NO: 68885 - RNA, 90 nt, synthetic construct
  misc_feature 1..90: note = Flavin reductaseADPH) (6-35)
  source 1..90: mol_type = other RNA
atcgccattttcggcgctaccgggcagacaggactgactacgctcgcacaagccgtgcaggcgggttacgaggtcaccgttcttgtgaga

SEQ ID NO: 68886 - RNA, 27 nt, synthetic construct
  misc_feature 1..27: note = Ras GTPase-activating-like protein IQGAP2 (219-227)
  source 1..27: mol_type = other RNA
atcgccattaacgaggctgtggaaaag

SEQ ID NO: 68887 - RNA, 27 nt, synthetic construct
  misc_feature 1..27: note = Ubiquitin carboxyl-terminal hydrolase 15 (259-267)
  source 1..27: mol_type = other RNA
atcgccaagagctacgctgagctgatt

SEQ ID NO: 68888 - RNA, 27 nt, synthetic construct
  misc_feature 1..27: note = Prolow-density lipoprotein receptor-related protein 1 (1392-1400)
  source 1..27: mol_type = other RNA
atcgccctggaccccagagatggcatt

SEQ ID NO: 68889 - RNA, 36 nt, synthetic construct
  misc_feature 1..36: note = Transcription factor Sp1 (551-562)
  source 1..36: mol_type = other RNA
atcgccaacgctcccggcgaccacggggcacagctg

SEQ ID NO: 68890 - RNA, 27 nt, synthetic construct
  misc_feature 1..27: note Dolichyl-diphosphooligosaccharide-proteinosyltransferase subunit 2 (220-228)
  source 1..27: mol_type = other RNA
atcgccaacaccgtggagctgagagtc

SEQ ID NO: 68891 - RNA, 42 nt, synthetic construct
  misc_feature 1..42: note = Solute carrier family 2, facilitated glucose transporter member 1 (21-34)
  source 1..42: mol_type = other RNA
atcgcccaggtgttcggcctggacagcattatggggaacaag

SEQ ID NO: 68892 - RNA, 48 nt, synthetic construct
  misc_feature 1..48: note = Solute carrier family 2, facilitated glucose transporter member 1 (21-36)
  source 1..48: mol_type = other RNA
atcgcccaggtgttcggcctggacagcattatggggaacaaggatctc

SEQ ID NO: 68893 - RNA, 24 nt, synthetic construct
  misc_feature 1..24: note = 60S ribosomal protein L35 (54-61)
  source 1..24: mol_type = other RNA
atcgccagagtgctgaccgtcatt

SEQ ID NO: 68894 - RNA, 27 nt, synthetic construct
  misc_feature 1..27: note = Alpha-actinin-3 (114-122)
  source 1..27: mol_type = other RNA
atcgccagcaagggcgtgaaactggtc

SEQ ID NO: 68895 - RNA, 27 nt, synthetic construct
  misc_feature 1..27: note = Derlin-2 (50-58)
  source 1..27: mol_type = other RNA
atcgccgtgggccacatttacttcttt

SEQ ID NO: 68896 - RNA, 21 nt, synthetic construct
  misc_feature 1..21: note = Solute carrier family 25 member 35 (138-144)
  source 1..21: mol_type = other RNA
atcgccgtgggccaccagtac

SEQ ID NO: 68897 - RNA, 27 nt, synthetic construct
  misc_feature 1..27: note = Ectonucleoside triphosphate diphosphohydrolase 4 (279-287)
  source 1..27: mol_type = other RNA
atcgcctacgaggtgcccaagaccgtc

SEQ ID NO: 68898 - RNA, 27 nt, synthetic construct
  misc_feature 1..27: note = DNA topoisomerase 3-beta-1 (521-529)
  source 1..27: mol_type = other RNA
atctgccagagaaactacgtgaccgtc

SEQ ID NO: 68899 - RNA, 30 nt, synthetic construct
  misc_feature 1..30: note = Zinc transporter ZIP14 (350-359)
  source 1..30: mol_type = other RNA
atcgacggcctggccattggggctagcttc

SEQ ID NO: 68900 - RNA, 27 nt, synthetic construct
  misc_feature 1..27: note = Nucleolin (454-462)
  source 1..27: mol_type = other RNA
atcgacggcagaagcatttccctgtac

SEQ ID NO: 68901 - RNA, 30 nt, synthetic construct
  misc_feature 1..30: note = Nucleolin (454-463)
  source 1..30: mol_type = other RNA
atcgacggcagaagcatttccctgtactat

SEQ ID NO: 68902 - RNA, 21 nt, synthetic construct
  misc_feature 1..21: note = Keratin, type II cytoskeletal 1b (179-185)
  source 1..21: mol_type = other RNA
atcgacaaggtgagattcctg

SEQ ID NO: 68903 - RNA, 69 nt, synthetic construct
  misc_feature 1..69: note = Puromycin-sensitive aminopeptidase (305-327)
  source 1..69: mol_type = other RNA
atcgacctgattgccatagctgatttcgcagccggcgcgatggagaactgggggctcgtgacctacaga

SEQ ID NO: 68904 - RNA, 27 nt, synthetic construct
  misc_feature 1..27: note = Prelamin-A/C (80-88)
  source 1..27: mol_type = other RNA
atcgacaacggcaagcagagagagttc

SEQ ID NO: 68905 - RNA, 30 nt, synthetic construct
  misc_feature 1..30: note = Structural maintenance of chromosomes flexible hinge domain-containing protein 1 (183-192)
  source 1..30: mol_type = other RNA
atcgacaacggcagagggatgaccagcaag

SEQ ID NO: 68906 - RNA, 27 nt, synthetic construct
  misc_feature 1..27: note = DNA damage-binding protein 1 (794-802)
  source 1..27: mol_type = other RNA
atcgaccagcacaccttcgaggtgctg

SEQ ID NO: 68907 - RNA, 21 nt, synthetic construct
  misc_feature 1..21: note = Pre-mRNA-processing-splicing factor 8 (1380-1386)
  source 1..21: mol_type = other RNA
atcgacagccagagagtgtgg

SEQ ID NO: 68908 - RNA, 42 nt, synthetic construct
  misc_feature 1..42: note = Clathrin heavy chain 1 (1125-1138)
  source 1..42: mol_type = other RNA
atcgacagctacattaaggccgatgacccctcctcttatatg

SEQ ID NO: 68909 - RNA, 45 nt, synthetic construct
  misc_feature 1..45: note = Clathrin heavy chain 1 (1125-1139)
  source 1..45: mol_type = other RNA
atcgacagctacattaaggccgatgacccctcctcttatatggag

SEQ ID NO: 68910 - RNA, 21 nt, synthetic construct
  misc_feature 1..21: note = Talin-1 (292-298)
  source 1..21: mol_type = other RNA
atcgaggccaaggtgagatac

SEQ ID NO: 68911 - RNA, 27 nt, synthetic construct
  misc_feature 1..27: note = Microtubule-associated protein 4 (17-25)
  source 1..27: mol_type = other RNA
atcgagggcgaaattaagagagacttc

SEQ ID NO: 68912 - RNA, 27 nt, synthetic construct
  misc_feature 1..27: note = Actin, cytoplasmic 2 (71-79)
  source 1..27: mol_type = other RNA
atcgagcacggcattgtgaccaactgg

SEQ ID NO: 68913 - RNA, 18 nt, synthetic construct
  misc_feature 1..18: note = Fatty acid desaturase 2 (352-357)
  source 1..18: mol_type = other RNA
atcgagcaccatctgttc

SEQ ID NO: 68914 - RNA, 21 nt, synthetic construct
  misc_feature 1..21: note = Programmed cell death protein 5 (93-99)
  source 1..21: mol_type = other RNA
atcgagattctgaagaaagtg

SEQ ID NO: 68915 - RNA, 27 nt, synthetic construct
  misc_feature 1..27: note = DnaJ homolog subfamily C member 7 (216-224)
  source 1..27: mol_type = other RNA
atcgagaaggccgtgcagttctttgtc

SEQ ID NO: 68916 - RNA, 21 nt, synthetic construct
  misc_feature 1..21: note = Cysteine-rich protein 2-binding protein (156-162)
  source 1..21: mol_type = other RNA
atcgagaagcactggaccttc

SEQ ID NO: 68917 - RNA, 24 nt, synthetic construct
  misc_feature 1..24: note = rRNA-processing protein FCF1 homolog (110-117)
  source 1..24: mol_type = other RNA
atcgagaagctgggccagaaatac

SEQ ID NO: 68918 - RNA, 30 nt, synthetic construct
  misc_feature 1..30: note = Lysosomal-trafficking regulator (3604-3613)
  source 1..30: mol_type = other RNA
atcgagatggaaacccagattcacctgtac

SEQ ID NO: 68919 - RNA, 27 nt, synthetic construct
  misc_feature 1..27: note = Cholinesterase (384-392)
  source 1..27: mol_type = other RNA
atcttctttcccggcgtgagcgagttc

SEQ ID NO: 68920 - RNA, 27 nt, synthetic construct
  misc_feature 1..27: note = Inositol 1,4,5-trisphosphate receptor type 2 (1770-1778)
  source 1..27: mol_type = other RNA
atcttcagcgagggcatttttctgggg

SEQ ID NO: 68921 - RNA, 30 nt, synthetic construct
  misc_feature 1..30: note = E3 ubiquitin-protein ligase UBR4 (2405-2414)
  source 1..30: mol_type = other RNA
atcggcgccagcgtggaccccgctggggtc

SEQ ID NO: 68922 - RNA, 27 nt, synthetic construct
  misc_feature 1..27: note = Mannose-6-phosphate isomerase (121-129)
  source 1..27: mol_type = other RNA
atcggcgacgaggccgctacccacctg

SEQ ID NO: 68923 - RNA, 27 nt, synthetic construct
  misc_feature 1..27: note = Beta-catenin-like protein 1 (430-438)
  source 1..27: mol_type = other RNA
atcggcgacgggagaagccccgagttc

SEQ ID NO: 68924 - RNA, 27 nt, synthetic construct
  misc_feature 1..27: note = Fructose-bisphosphate aldolase A (208-216)
  source 1..27: mol_type = other RNA
atcggcgagcacacccccagcgccctg

SEQ ID NO: 68925 - RNA, 21 nt, synthetic construct
  misc_feature 1..21: note = 40S ribosomal protein S29 (50-56)
  source 1..21: mol_type = other RNA
atcggcttcattaagctggac

SEQ ID NO: 68926 - RNA, 24 nt, synthetic construct
  misc_feature 1..24: note = Transmembrane protein 263 (60-67)
  source 1..24: mol_type = other RNA
atcggcgggaagagcctggaggtg

SEQ ID NO: 68927 - RNA, 30 nt, synthetic construct
  misc_feature 1..30: note = RNA-binding Raly-like protein (25-34)
  source 1..30: mol_type = other RNA
atcggcaacctgaataccgccattgtgaag

SEQ ID NO: 68928 - RNA, 30 nt, synthetic construct
  misc_feature 1..30: note = RNA-binding protein Raly (25-34)
  source 1..30: mol_type = other RNA
atcggcaacctgaataccgccctcgtgaag

SEQ ID NO: 68929 - RNA, 45 nt, synthetic construct
  misc_feature 1..45: note = Protocadherin Fat 1 (1606-1620)
  source 1..45: mol_type = other RNA
atcggcaacagcttcatgattgaccccgtgctggggtccataaag

SEQ ID NO: 68930 - RNA, 45 nt, synthetic construct
  misc_feature 1..45: note = Protocadherin Fat 1 (1682-1696)
  source 1..45: mol_type = other RNA
atcggcagcttcgtggggatggtcaccgcccactcccagtcttca

SEQ ID NO: 68931 - RNA, 24 nt, synthetic construct
  misc_feature 1..24: note = Cilia- and flagella-associated protein 20 (17-24)
  source 1..24: mol_type = other RNA
atcggcagcaagcccctgcagatt

SEQ ID NO: 68932 - RNA, 21 nt, synthetic construct
  misc_feature 1..21: note = Retinoblastoma-like protein 1 (197-203)
  source 1..21: mol_type = other RNA
atcggcacccccagaaagttc

SEQ ID NO: 68933 - RNA, 72 nt, synthetic construct
  misc_feature 1..72: note = Heterogeneous nuclear ribonucleoprotein U (241-264)
  source 1..72: mol_type = other RNA
atcggctggagcctgaccacatccgggatgctccttggagaggaagagttctcttacggttattcactgaag

SEQ ID NO: 68934 - RNA, 24 nt, synthetic construct
  misc_feature 1..24: note = Zinc finger protein 148 (258-265)
  source 1..24: mol_type = other RNA
atccacccccctaagctggtgctc

SEQ ID NO: 68935 - RNA, 27 nt, synthetic construct
  misc_feature 1..27: note = Trifunctional purine biosynthetic protein adenosine-3 (206-214)
  source 1..27: mol_type = other RNA
atccaccccagcctgctcccttccttc

SEQ ID NO: 68936 - RNA, 21 nt, synthetic construct
  misc_feature 1..21: note = Dedicator of cytokinesis protein 7 (741-747)
  source 1..21: mol_type = other RNA
atccactacgtgttcagactg

SEQ ID NO: 68937 - RNA, 24 nt, synthetic construct
  misc_feature 1..24: note = MICOS complex subunit MIC27 (159-166)
  source 1..24: mol_type = other RNA
atcattgccaaggtgaccgctaaa

SEQ ID NO: 68938 - RNA, 24 nt, synthetic construct
  misc_feature 1..24: note = Protein PRRC2C (1659-1666)
  source 1..24: mol_type = other RNA
atcattgacgatcaccccgaggtg

SEQ ID NO: 68939 - RNA, 27 nt, synthetic construct
  misc_feature 1..27: note = 26S protease regulatory subunit 4 (115-123)
  source 1..27: mol_type = other RNA
atcattgacgataaccacgccatagtg

SEQ ID NO: 68940 - RNA, 24 nt, synthetic construct
  misc_feature 1..24: note = Lambda-crystallin homolog (90-97)
  source 1..24: mol_type = other RNA
atcattgacgatagagtgatactg

SEQ ID NO: 68941 - RNA, 27 nt, synthetic construct
  misc_feature 1..27: note = RANBP2-like and GRIP domain-containing protein 1 (712-720)
  source 1..27: mol_type = other RNA
atcattgacgatagcgactccaacctg

SEQ ID NO: 68942 - RNA, 27 nt, synthetic construct
  misc_feature 1..27: note = Niemann-Pick C1 protein (1094-1102)
  source 1..27: mol_type = other RNA
atcattgacgataccatattcaacctg

SEQ ID NO: 68943 - RNA, 27 nt, synthetic construct
  misc_feature 1..27: note = Eukaryotic translation initiation factor 3 subunit L (186-194)
  source 1..27: mol_type = other RNA
atcattgacgagttcatataccagttt

SEQ ID NO: 68944 - RNA, 30 nt, synthetic construct
  misc_feature 1..30: note = UDP-N-acetylhexosamine pyrophosphorylase (491-500)
  source 1..30: mol_type = other RNA
atcattgacgagaacggcgtgcacgaactg

SEQ ID NO: 68945 - RNA, 27 nt, synthetic construct
  misc_feature 1..27: note = Serine/threonine-protein kinase Kist (152-160)
  source 1..27: mol_type = other RNA
atcattgaccacatattcgccagcaag

SEQ ID NO: 68946 - RNA, 27 nt, synthetic construct
  misc_feature 1..27: note = AP-3 complex subunit mu-2 (190-198)
  source 1..27: mol_type = other RNA
atcattgacaagagcggctccaccata

SEQ ID NO: 68947 - RNA, 27 nt, synthetic construct
  misc_feature 1..27: note = Caspase recruitment domain-containing protein 19 (143-151)
  source 1..27: mol_type = other RNA
atcattgacagacacgtgagcaggtac

SEQ ID NO: 68948 - RNA, 24 nt, synthetic construct
  misc_feature 1..24: note = Double-strand-break repair protein rad21 homolog (444-451)
  source 1..24: mol_type = other RNA
atcattgaggaacccagcagactg

SEQ ID NO: 68949 - RNA, 63 nt, synthetic construct
  misc_feature 1..63: note = T-complex protein 1 subunit alpha (160-180)
  source 1..63: mol_type = other RNA
atcattggcataaacggggacttctttgccaatatggtggtcgatgctgttctggcaatcaag

SEQ ID NO: 68950 - RNA, 27 nt, synthetic construct
  misc_feature 1..27: note = Ubiquitin-like modifier-activating enzyme 1 (91-99)
  source 1..27: mol_type = other RNA
atcattctgggcggggtgaaggccgtc

SEQ ID NO: 68951 - RNA, 27 nt, synthetic construct
  misc_feature 1..27: note = Transportin-1 (757-765)
  source 1..27: mol_type = other RNA
atcattaacagacccaatacccctaag

SEQ ID NO: 68952 - RNA, 27 nt, synthetic construct
  misc_feature 1..27: note = Far upstream element-binding protein 1 (359-367)
  source 1..27: mol_type = other RNA
atcattaccgacctgctcagaagcgtg

SEQ ID NO: 68953 - RNA, 27 nt, synthetic construct
  misc_feature 1..27: note = Glycerol-3-phosphate acyltransferase 4 (30-38)
  source 1..27: mol_type = other RNA
atcattgtgcccgccatattcggcgtc

SEQ ID NO: 68954 - RNA, 45 nt, synthetic construct
  misc_feature 1..45: note = Syntaxin-7 (70-84)
  source 1..45: mol_type = other RNA
atcaaggagttcggcagcctgcccaccacaccttccgaacagaga

SEQ ID NO: 68955 - RNA, 48 nt, synthetic construct
  misc_feature 1..48: note = Alpha-enolase (26-41)
  source 1..48: mol_type = other RNA
atcaaggagaaatacggcaaggacgccaccaacgtgggggatgaagga

SEQ ID NO: 68956 - RNA, 21 nt, synthetic construct
  misc_feature 1..21: note = 26S proteasome non-ATPase regulatory subunit 8 (133-139)
  source 1..21: mol_type = other RNA
atcaagcaccccgtgagcctg

SEQ ID NO: 68957 - RNA, 33 nt, synthetic construct
  misc_feature 1..33: note = Keratin, type II cytoskeletal 1 (184-194)
  source 1..33: mol_type = other RNA
atcaagagcctgaacaatcagttcgcctccttt

SEQ ID NO: 68958 - RNA, 30 nt, synthetic construct
  misc_feature 1..30: note = Synaptojanin-1 (895-904)
  source 1..30: mol_type = other RNA
atcaagagctccctgcccgagaacaatttc

SEQ ID NO: 68959 - RNA, 69 nt, synthetic construct
  misc_feature 1..69: note = Vimentin (444-466)
  source 1..69: mol_type = other RNA
atcaagaccgtggagacaagagacggccaggtcattaacgaaactagccaacaccatgatgacctggag

SEQ ID NO: 68960 - RNA, 27 nt, synthetic construct
  misc_feature 1..27: note = Talin-1 (862-870)
  source 1..27: mol_type = other RNA
atcctggccgacgctaccgcaaagatg

SEQ ID NO: 68961 - RNA, 30 nt, synthetic construct
  misc_feature 1..30: note = DNA-dependent protein kinase catalytic subunit (544-553)
  source 1..30: mol_type = other RNA
atcctggccgacgaggctttctttagcgtg

SEQ ID NO: 68962 - RNA, 30 nt, synthetic construct
  misc_feature 1..30: note = Exonuclease 3'-5' domain-containing protein 2 (30-39)
  source 1..30: mol_type = other RNA
atcctggccgacggcaccattctcaaggtg

SEQ ID NO: 68963 - RNA, 36 nt, synthetic construct
  misc_feature 1..36: note = Globoside alpha-1,3-N-acetylgalactosaminyltransferase 1 (266-277)
  source 1..36: mol_type = other RNA
atcctggccgacaaggctaacggcattatggcagcc

SEQ ID NO: 68964 - RNA, 33 nt, synthetic construct
  misc_feature 1..33: note = Catenin alpha-1 (140-150)
  source 1..33: mol_type = other RNA
atcctggccgacatggctgatgtgtacaagctc

SEQ ID NO: 68965 - RNA, 27 nt, synthetic construct
  misc_feature 1..27: note = Dynactin subunit 3 (87-95)
  source 1..27: mol_type = other RNA
atcctggccgaggaacagttcattctc

SEQ ID NO: 68966 - RNA, 27 nt, synthetic construct
  misc_feature 1..27: note = Transmembrane protein 87A (234-242)
  source 1..27: mol_type = other RNA
atcctggccgagctccttagcgctgtg

SEQ ID NO: 68967 - RNA, 27 nt, synthetic construct
  misc_feature 1..27: note = Serum paraoxonase/arylesterase 2 (239-247)
  source 1..27: mol_type = other RNA
atcctggcccacgagattcatgtgctc

SEQ ID NO: 68968 - RNA, 27 nt, synthetic construct
  misc_feature 1..27: note = Centrosomal protein of 170 kDa protein B (1269-1277)
  source 1..27: mol_type = other RNA
atcctggcccaggagattcacgacgtg

SEQ ID NO: 68969 - RNA, 27 nt, synthetic construct
  misc_feature 1..27: note = Unconventional myosin-XV (2127-2135)
  source 1..27: mol_type = other RNA
atcctggcccagctcgctaaccaagtg

SEQ ID NO: 68970 - RNA, 27 nt, synthetic construct
  misc_feature 1..27: note = Multidrug resistance-associated protein 1 (560-568)
  source 1..27: mol_type = other RNA
atcctggacgcccagaccgctttcgtg

SEQ ID NO: 68971 - RNA, 27 nt, synthetic construct
  misc_feature 1..27: note = Unconventional myosin-Id (455-463)
  source 1..27: mol_type = other RNA
atcctggacgatgcctgcatgaacgtg

SEQ ID NO: 68972 - RNA, 27 nt, synthetic construct
  misc_feature 1..27: note = Acyl-CoA synthetase short-chain family member 3, mitochondrial (486-494)
  source 1..27: mol_type = other RNA
atcctggacgataacatgcagaagctc

SEQ ID NO: 68973 - RNA, 27 nt, synthetic construct
  misc_feature 1..27: note = FRAS1-related extracellular matrix protein 1 (98-106)
  source 1..27: mol_type = other RNA
atcctggacgaggataccgtgaagctc

SEQ ID NO: 68974 - RNA, 27 nt, synthetic construct
  misc_feature 1..27: note = HEAT repeat-containing protein 1 (1277-1285)
  source 1..27: mol_type = other RNA
atcctggacgaggaaaagttcaacgtg

SEQ ID NO: 68975 - RNA, 24 nt, synthetic construct
  misc_feature 1..24: note = Hemicentin-1 (2341-2348)
  source 1..24: mol_type = other RNA
atcctggacgagggccacattctc

SEQ ID NO: 68976 - RNA, 30 nt, synthetic construct
  misc_feature 1..30: note = Hemicentin-1 (2341-2350)
  source 1..30: mol_type = other RNA
atcctggacgagggccacattctccagctt

SEQ ID NO: 68977 - RNA, 27 nt, synthetic construct
  misc_feature 1..27: note = Pleckstrin homology domain-containing family H member 1 (1314-1322)
  source 1..27: mol_type = other RNA
atcctggaccacaacaccatgcaggtg

SEQ ID NO: 68978 - RNA, 27 nt, synthetic construct
  misc_feature 1..27: note = Mitochondrial tRNA-specific 2-thiouridylase 1 (63-71)
  source 1..27: mol_type = other RNA
atcctggacattcccttccaccaggtg

SEQ ID NO: 68979 - RNA, 27 nt, synthetic construct
  misc_feature 1..27: note = Protein GPR107 (122-130)
  source 1..27: mol_type = other RNA
atcctggacattagcagatccgaggtg

SEQ ID NO: 68980 - RNA, 24 nt, synthetic construct
  misc_feature 1..24: note = Heat shock protein HSP 90-beta (496-503)
  source 1..24: mol_type = other RNA
atcctggacaagaaagtggagaag

SEQ ID NO: 68981 - RNA, 27 nt, synthetic construct
  misc_feature 1..27: note = Anthrax toxin receptor 1 (48-56)
  source 1..27: mol_type = other RNA
atcctggacaagagcggctccgtgctc

SEQ ID NO: 68982 - RNA, 30 nt, synthetic construct
  misc_feature 1..30: note = UDP-glucose 4-epimerase (67-76)
  source 1..30: mol_type = other RNA
atcctggaccagggcgccctccaaagactt

SEQ ID NO: 68983 - RNA, 33 nt, synthetic construct
  misc_feature 1..33: note = Pleckstrin homology-like domain family B member 1 (850-860)
  source 1..33: mol_type = other RNA
atcctggacagccaggccggccaaattagagct

SEQ ID NO: 68984 - RNA, 27 nt, synthetic construct
  misc_feature 1..27: note = Chromobox protein homolog 6 (48-56)
  source 1..27: mol_type = other RNA
atcctggacagcagactcattgccgct

SEQ ID NO: 68985 - RNA, 30 nt, synthetic construct
  misc_feature 1..30: note = Voltage-dependent calcium channel subunit alpha-2/delta-2 (731-740)
  source 1..30: mol_type = other RNA
atcctggacaccggcattacacagcaactc

SEQ ID NO: 68986 - RNA, 27 nt, synthetic construct
  misc_feature 1..27: note = Kinesin-like protein KIF1B (1497-1505)
  source 1..27: mol_type = other RNA
atcctggacaccagcgtggcctacgtc

SEQ ID NO: 68987 - RNA, 27 nt, synthetic construct
  misc_feature 1..27: note = CAP-Gly domain-containing linker protein 4 (12-20)
  source 1..27: mol_type = other RNA
atcctgttcgaccccaagaccagcgtg

SEQ ID NO: 68988 - RNA, 27 nt, synthetic construct
  misc_feature 1..27: note = ATP-binding cassette sub-family A member 13 (826-834)
  source 1..27: mol_type = other RNA
atcctgttcgagattaaccccaagctc

SEQ ID NO: 68989 - RNA, 27 nt, synthetic construct
  misc_feature 1..27: note = Carbonic anhydrase-related protein (233-241)
  source 1..27: mol_type = other RNA
atcctgttcagataccccctcaccatt

SEQ ID NO: 68990 - RNA, 27 nt, synthetic construct
  misc_feature 1..27: note = Tribbles homolog 1 (150-158)
  source 1..27: mol_type = other RNA
atcctgggcgagaccaaggcctacgtg

SEQ ID NO: 68991 - RNA, 27 nt, synthetic construct
  misc_feature 1..27: note = KH domain-containing, RNA-binding, signal transduction-associated protein 1 (176-184)
  source 1..27: mol_type = other RNA
atcctgggcccccaggggaacaccatt

SEQ ID NO: 68992 - RNA, 24 nt, synthetic construct
  misc_feature 1..24: note = Epidermal growth factor receptor substrate 15 (164-171)
  source 1..24: mol_type = other RNA
atcctgggcagagtgtgggagctc

SEQ ID NO: 68993 - RNA, 24 nt, synthetic construct
  misc_feature 1..24: note = Lecithin retinol acyltransferase (98-105)
  source 1..24: mol_type = other RNA
atcctgggcgtgattgtcaaggtt

SEQ ID NO: 68994 - RNA, 111 nt, synthetic construct
  misc_feature 1..111: note = Glyceraldehyde-3-phosphate dehydrogenase (273-309)
  source 1..111: mol_type = other RNA
atcctgggctacaccgagcaccaggtggtcagctccgacttcaactctgatacacattcaagtacttttgacgccggggctggaattgcactcaatgatcacttcgttaag

SEQ ID NO: 68995 - RNA, 24 nt, synthetic construct
  misc_feature 1..24: note = Sperm-associated antigen 7 (80-87)
  source 1..24: mol_type = other RNA
atcctgcacgacgtggtcgaggtt

SEQ ID NO: 68996 - RNA, 36 nt, synthetic construct
  misc_feature 1..36: note = Lysosomal-trafficking regulator (1804-1815)
  source 1..36: mol_type = other RNA
atcctgcacgagattggcgggaccggaatattcgtg

SEQ ID NO: 68997 - RNA, 27 nt, synthetic construct
  misc_feature 1..27: note = Coiled-coil domain-containing protein 93 (480-488)
  source 1..27: mol_type = other RNA
atcctgcacagaaagattgacgaggtg

SEQ ID NO: 68998 - RNA, 27 nt, synthetic construct
  misc_feature 1..27: note = S1 RNA-binding domain-containing protein 1 (186-194)
  source 1..27: mol_type = other RNA
atcctgcacaccgacgtggtctacctc

SEQ ID NO: 68999 - RNA, 27 nt, synthetic construct
  misc_feature 1..27: note = Prolow-density lipoprotein receptor-related protein 1 (408-416)
  source 1..27: mol_type = other RNA
atcctgattgagcacctctacggcctt

SEQ ID NO: 69000 - RNA, 27 nt, synthetic construct
  misc_feature 1..27: note = Tissue-type plasminogen activator (243-251)
  source 1..27: mol_type = other RNA
atcctgattggcaaggtgtacaccgcc

SEQ ID NO: 69001 - RNA, 57 nt, synthetic construct
  misc_feature 1..57: note = ATP-citrate synthase (337-355)
  source 1..57: mol_type = other RNA
atcctgattataggcgggagcatcgccaacttcaccaatgtggctgcaacatttaag

SEQ ID NO: 69002 - RNA, 27 nt, synthetic construct
  misc_feature 1..27: note = Laminin subunit beta-1 (612-620)
  source 1..27: mol_type = other RNA
atcctgattagatacgagccccagctc

SEQ ID NO: 69003 - RNA, 27 nt, synthetic construct
  misc_feature 1..27: note = Receptor-interacting serine/threonine-protein kinase 4 (149-157)
  source 1..27: mol_type = other RNA
atcctgctcgacgcccactaccatgtg

SEQ ID NO: 69004 - RNA, 30 nt, synthetic construct
  misc_feature 1..30: note = CD109 antigen (864-873)
  source 1..30: mol_type = other RNA
atcctgctcgaccttaccgataacagactg

SEQ ID NO: 69005 - RNA, 27 nt, synthetic construct
  misc_feature 1..27: note = Lon protease homolog 2, peroxisomal (293-301)
  source 1..27: mol_type = other RNA
atcctgctcgacaacgatcactacgcc

SEQ ID NO: 69006 - RNA, 27 nt, synthetic construct
  misc_feature 1..27: note = Zinc finger protein basonuclin-1 (109-117)
  source 1..27: mol_type = other RNA
atcctgctcgacagacttttcagcgtg

SEQ ID NO: 69007 - RNA, 27 nt, synthetic construct
  misc_feature 1..27: note = COP9 signalosome complex subunit 3 (213-221)
  source 1..27: mol_type = other RNA
atcctgctcggcaaggtgcagcaactt

SEQ ID NO: 69008 - RNA, 30 nt, synthetic construct
  misc_feature 1..30: note = T-lymphoma invasion and metastasis-inducing protein 1 (425-434)
  source 1..30: mol_type = other RNA
atcctgctcaccgccgctcagggcacagtg

SEQ ID NO: 69009 - RNA, 27 nt, synthetic construct
  misc_feature 1..27: note = Transcription factor IIIB 90 kDa subunit (434-442)
  source 1..27: mol_type = other RNA
atcctgaacgagagcgaagccagagtg

SEQ ID NO: 69010 - RNA, 30 nt, synthetic construct
  misc_feature 1..30: note = G-protein coupled receptor 143 (297-306)
  source 1..30: mol_type = other RNA
atcctgaaccccgcccagggcttcctcctt

SEQ ID NO: 69011 - RNA, 27 nt, synthetic construct
  misc_feature 1..27: note = Adipocyte enhancer-binding protein 1 (945-953)
  source 1..27: mol_type = other RNA
atcctgaaccccggcgagtacagagtg

SEQ ID NO: 69012 - RNA, 27 nt, synthetic construct
  misc_feature 1..27: note = Kinesin-like protein KIF13B (36-44)
  source 1..27: mol_type = other RNA
atcctgaaccccgtgaataccaacctc

SEQ ID NO: 69013 - RNA, 27 nt, synthetic construct
  misc_feature 1..27: note = Lysine-specific demethylase 5B (178-186)
  source 1..27: mol_type = other RNA
atcctgaacccctacaatctcttcctt

SEQ ID NO: 69014 - RNA, 27 nt, synthetic construct
  misc_feature 1..27: note = Importin-7 (833-841)
  source 1..27: mol_type = other RNA
atcctgcccgccttcattctccttttt

SEQ ID NO: 69015 - RNA, 33 nt, synthetic construct
  misc_feature 1..33: note = Lysosome-associated membraneoprotein 1 (248-258)
  source 1..33: mol_type = other RNA
atcctgcccgacgccagagatcctgctttcaag

SEQ ID NO: 69016 - RNA, 33 nt, synthetic construct; identical to SEQ ID NO: 44789
  misc_feature 1..33: note = Peroxisome biogenesis factor 1 (908-918)
  source 1..33: mol_type = other RNA

SEQ ID NO: 69017 - RNA, 27 nt, synthetic construct
  misc_feature 1..27: note = E3 ubiquitin-protein ligase CBL-B (77-85)
  source 1..27: mol_type = other RNA
atcctgcccgacacctaccagcacctc

SEQ ID NO: 69018 - RNA, 27 nt, synthetic construct
  misc_feature 1..27: note = Estradiol 17-beta-dehydrogenase 11 (272-280)
  source 1..27: mol_type = other RNA
atcctgcccgagagattcctcgccgtg

SEQ ID NO: 69019 - RNA, 27 nt, synthetic construct
  misc_feature 1..27: note = E1A-binding protein p400 (1032-1040)
  source 1..27: mol_type = other RNA
atcctgcccaagggcagcgccagagtg

SEQ ID NO: 69020 - RNA, 27 nt, synthetic construct
  misc_feature 1..27: note = LINE-1 retrotransposable element ORF2 protein (817-825)
  source 1..27: mol_type = other RNA
atcctgcccaaggtgatttacagattc

SEQ ID NO: 69021 - RNA, 27 nt, synthetic construct
  misc_feature 1..27: note = Aryl hydrocarbon receptor (23-31)
  source 1..27: mol_type = other RNA
atcctgccccctcagctcgcccttttc

SEQ ID NO: 69022 - RNA, 27 nt, synthetic construct
  misc_feature 1..27: note = Zinc finger and SCAN domain-containing protein 25 (93-101)
  source 1..27: mol_type = other RNA
atcctgcccagagagttctacgcctgg

SEQ ID NO: 69023 - RNA, 27 nt, synthetic construct
  misc_feature 1..27: note = DDB1- and CUL4-associated factor 4 (318-326)
  source 1..27: mol_type = other RNA
atcctgcaggacgagcaatacctcatg

SEQ ID NO: 69024 - RNA, 27 nt, synthetic construct
  misc_feature 1..27: note = Zinc finger protein RFP (330-338)
  source 1..27: mol_type = other RNA
atcctgagcgacaacctcagacaggtg

SEQ ID NO: 69025 - RNA, 27 nt, synthetic construct
  misc_feature 1..27: note = AP2-associated protein kinase 1 (635-643)
  source 1..27: mol_type = other RNA
atcctgagcgacgtgacccactccgcc

SEQ ID NO: 69026 - RNA, 27 nt, synthetic construct
  misc_feature 1..27: note = Ras GTPase-activating protein 1 (674-682)
  source 1..27: mol_type = other RNA
atcctgagcgagctcgtggaaaagatt

SEQ ID NO: 69027 - RNA, 27 nt, synthetic construct
  misc_feature 1..27: note = Mediator of RNA polymerase II transcription subunit 13 (1076-1084)
  source 1..27: mol_type = other RNA
atcctgagcgagtccgtgatgaacctc

SEQ ID NO: 69028 - RNA, 27 nt, synthetic construct
  misc_feature 1..27: note = Endoplasmic reticulum metallopeptidase 1 (340-348)
  source 1..27: mol_type = other RNA
atcctgaccgacagcattcagagagcc

SEQ ID NO: 69029 - RNA, 27 nt, synthetic construct
  misc_feature 1..27: note = Ankyrin repeat domain-containing protein 17 (886-894)
  source 1..27: mol_type = other RNA
atcctgaccgagacacagcaaggcctc

SEQ ID NO: 69030 - RNA, 27 nt, synthetic construct
  misc_feature 1..27: note = Notchless protein homolog 1 (240-248)
  source 1..27: mol_type = other RNA
atcctgaccggccacacacagagcgtg

SEQ ID NO: 69031 - RNA, 24 nt, synthetic construct
  misc_feature 1..24: note = InaD-like protein (50-57)
  source 1..24: mol_type = other RNA
atcctgaccctccagcaaagcatt

SEQ ID NO: 69032 - RNA, 27 nt, synthetic construct
  misc_feature 1..27: note = Fibrous sheath-interacting protein 2 (3738-3746)
  source 1..27: mol_type = other RNA
atcctgaccaacaatctccagcttagc

SEQ ID NO: 69033 - RNA, 27 nt, synthetic construct
  misc_feature 1..27: note = Midasin (1057-1065)
  source 1..27: mol_type = other RNA
atcctgaccagctccgtgaagctcaac

SEQ ID NO: 69034 - RNA, 27 nt, synthetic construct
  misc_feature 1..27: note = Spatacsin (642-650)
  source 1..27: mol_type = other RNA
atcctgaccagctacattaacgagctc

SEQ ID NO: 69035 - RNA, 27 nt, synthetic construct
  misc_feature 1..27: note = Eukaryotic translation initiation factor 2-alpha kinase 4 (377-385)
  source 1..27: mol_type = other RNA
atcctggtggagcacattagcggcgtc

SEQ ID NO: 69036 - RNA, 27 nt, synthetic construct
  misc_feature 1..27: note = Plexin-B2 (432-440)
  source 1..27: mol_type = other RNA
atcctggtggagattaacaagagagtc

SEQ ID NO: 69037 - RNA, 27 nt, synthetic construct
  misc_feature 1..27: note = Heat shock factor protein 4 (167-175)
  source 1..27: mol_type = other RNA
atcctgtggagagaggtggtcaccctc

SEQ ID NO: 69038 - RNA, 27 nt, synthetic construct
  misc_feature 1..27: note = 1-phosphatidylinositol 4,5-bisphosphate phosphodiesterase gamma-1 (109-117)
  source 1..27: mol_type = other RNA
atcctgtacggcatggagttcagactc

SEQ ID NO: 69039 - RNA, 30 nt, synthetic construct; identical to SEQ ID NO: 44812
  misc_feature 1..30: note = 116 kDa U5 small nuclear ribonucleoprotein component (202-211)
  source 1..30: mol_type = other RNA

SEQ ID NO: 69040 - RNA, 27 nt, synthetic construct
  misc_feature 1..27: note = Eukaryotic translation initiation factor 4 gamma 3 (915-923)
  source 1..27: mol_type = other RNA
atcatgcacgactgcgtggtcaagctg

SEQ ID NO: 69041 - RNA, 30 nt, synthetic construct
  misc_feature 1..30: note = Syntenin-1 (269-278)
  source 1..30: mol_type = other RNA
atcatgcccgccttcatttttgagcacata

SEQ ID NO: 69042 - RNA, 27 nt, synthetic construct
  misc_feature 1..27: note = CLIP-associating protein 1 (410-418)
  source 1..27: mol_type = other RNA
atcatgcccaccattttcaacctgata

SEQ ID NO: 69043 - RNA, 30 nt, synthetic construct
  misc_feature 1..30: note = Hexokinase-2 (118-127)
  source 1..30: mol_type = other RNA
atcatgagaggcagcgggacccagctgttc

SEQ ID NO: 69044 - RNA, 36 nt, synthetic construct
  misc_feature 1..36: note = Protein ERGIC-53 (496-507)
  source 1..36: mol_type = other RNA
atcatgtacagaagccagcaagaggccgctgcaaag

SEQ ID NO: 69045 - RNA, 66 nt, synthetic construct
  misc_feature 1..66: note = T-complex protein 1 subunit eta (413-434)
  source 1..66: mol_type = other RNA
atcaacgccctgaccgctgcaagcgaggccgcgtgcctcattgtgtccgtcgacgaaacaataaag

SEQ ID NO: 69046 - RNA, 36 nt, synthetic construct
  misc_feature 1..36: note = Vimentin (455-466)
  source 1..36: mol_type = other RNA
atcaacgagaccagccagcaccatgacgatctggaa

SEQ ID NO: 69047 - RNA, 24 nt, synthetic construct
  misc_feature 1..24: note = DNA-dependent protein kinase catalytic subunit (866-873)
  source 1..24: mol_type = other RNA
atcaacaagaatctgctcaccgtg

SEQ ID NO: 69048 - RNA, 21 nt, synthetic construct
  misc_feature 1..21: note = Deoxynucleotidyltransferase terminal-interacting protein 2 (255-261)
  source 1..21: mol_type = other RNA
atcaacaagcccaatttctac

SEQ ID NO: 69049 - RNA, 33 nt, synthetic construct
  misc_feature 1..33: note = Pleckstrin homology domain-containing family H member 1 (922-932)
  source 1..33: mol_type = other RNA
atcaacgtgcccgtcgaggccgctagcgttgac

SEQ ID NO: 69050 - RNA, 24 nt, synthetic construct
  misc_feature 1..24: note = Sodium/potassium-transporting ATPase subunit alpha-1 (2-9)
  source 1..24: mol_type = other RNA
atccccgccgacctgagaattata

SEQ ID NO: 69051 - RNA, 30 nt, synthetic construct
  misc_feature 1..30: note = Far upstream element-binding protein 1 (213-222)
  source 1..30: mol_type = other RNA
atccccgccagcaaggctggcctggtgatt

SEQ ID NO: 69052 - RNA, 30 nt, synthetic construct
  misc_feature 1..30: note = Collagen alpha-1(XV) chain (185-194)
  source 1..30: mol_type = other RNA
atccccttccagagaagctcccaagccctg

SEQ ID NO: 69053 - RNA, 45 nt, synthetic construct
  misc_feature 1..45: note = Leucine-rich repeat-containing G-protein coupled receptor 6 (62-76)
  source 1..45: mol_type = other RNA
atccccggccaggccttcagcgggctgtactccctcaagattctt

SEQ ID NO: 69054 - RNA, 27 nt, synthetic construct
  misc_feature 1..27: note = Low-density lipoprotein receptor-related protein 2 (601-609)
  source 1..27: mol_type = other RNA
atcccccaccctttcggcgtgagcctg

SEQ ID NO: 69055 - RNA, 24 nt, synthetic construct
  misc_feature 1..24: note = BCL-6 corepressor (730-737)
  source 1..24: mol_type = other RNA
atcccccacacccctattgagata

SEQ ID NO: 69056 - RNA, 27 nt, synthetic construct
  misc_feature 1..27: note = Chondroitin sulfate proteoglycan 4 (108-116)
  source 1..27: mol_type = other RNA
atcccccacaccgtggtcctgacagtt

SEQ ID NO: 69057 - RNA, 27 nt, synthetic construct
  misc_feature 1..27: note = C-syn protooncogene (266-274)
  source 1..27: mol_type = other RNA
atccccagagagagcctgcagctcatt

SEQ ID NO: 69058 - RNA, 27 nt, synthetic construct
  misc_feature 1..27: note = Interferon-induced transmembrane protein 10 (62-70)
  source 1..27: mol_type = other RNA
atccccagacctccagccggcagcccg

SEQ ID NO: 69059 - RNA, 27 nt, synthetic construct
  misc_feature 1..27: note = Basement membrane-specific heparan sulfate proteoglycan core protein (447-455)
  source 1..27: mol_type = other RNA
atccccagccaccctagagtgaccgtc

SEQ ID NO: 69060 - RNA, 45 nt, synthetic construct
  misc_feature 1..45: note = E3 ubiquitin-protein ligase RNF13 (145-159)
  source 1..45: mol_type = other RNA
atccccagcgtgttcattggcgagtcctctgccaactcactgaag

SEQ ID NO: 69061 - RNA, 27 nt, synthetic construct
  misc_feature 1..27: note = Sorbin and SH3 domain-containing protein 2 (262-270)
  source 1..27: mol_type = other RNA
atccccaccgccattagaacaactgtg

SEQ ID NO: 69062 - RNA, 27 nt, synthetic construct
  misc_feature 1..27: note = Procollagen-lysine,2-oxoglutarate 5-dioxygenase 2 (34-42)
  source 1..27: mol_type = other RNA
atccccaccgacaagctgctcgtgatt

SEQ ID NO: 69063 - RNA, 27 nt, synthetic construct
  misc_feature 1..27: note = Rap1 GTPase-activating protein 1 (28-36)
  source 1..27: mol_type = other RNA
atcccctaccctagcgtgcacgaggtc

SEQ ID NO: 69064 - RNA, 27 nt, synthetic construct
  misc_feature 1..27: note = Spectrin beta chain, non-erythrocytic 1 (579-587)
  source 1..27: mol_type = other RNA
atccaggccgagagagtgaggggcgtc

SEQ ID NO: 69065 - RNA, 24 nt, synthetic construct
  misc_feature 1..24: note = N6-adenosine-methyltransferase 70 kDa subunit (8-15)
  source 1..24: mol_type = other RNA
atccaggcccacaagaaacaactg

SEQ ID NO: 69066 - RNA, 30 nt, synthetic construct
  misc_feature 1..30: note = Potassium/sodium hyperpolarization-activated cyclic nucleotide-gated channel 4 (778-787)
  source 1..30: mol_type = other RNA
atccaggcccccctgcaagctgcagccgcg

SEQ ID NO: 69067 - RNA, 27 nt, synthetic construct
  misc_feature 1..27: note = CCAAT/enhancer-binding protein zeta (255-263)
  source 1..27: mol_type = other RNA
atccaggacgatgccgtgcacaccctg

SEQ ID NO: 69068 - RNA, 42 nt, synthetic construct
  misc_feature 1..42: note = Beta-2-microglobulin (21-34)
  source 1..42: mol_type = other RNA
atccagagaacccccaagattcaagtgtacagcaggcaccct

SEQ ID NO: 69069 - RNA, 45 nt, synthetic construct
  misc_feature 1..45: note = Beta-2-microglobulin (21-35)
  source 1..45: mol_type = other RNA
atccagagaacccccaagattcaagtgtacagcaggcaccctgcc

SEQ ID NO: 69070 - RNA, 51 nt, synthetic construct
  misc_feature 1..51: note = Beta-2-microglobulin (21-37)
  source 1..51: mol_type = other RNA
atccagagaacccccaagattcaagtgtacagcaggcaccctgccgagaac

SEQ ID NO: 69071 - RNA, 54 nt, synthetic construct
  misc_feature 1..54: note = Beta-2-microglobulin (21-38)
  source 1..54: mol_type = other RNA
atccagagaacccccaagattcaagtgtacagcaggcaccctgccgagaacggc

SEQ ID NO: 69072 - RNA, 57 nt, synthetic construct
  misc_feature 1..57: note = Beta-2-microglobulin (21-39)
  source 1..57: mol_type = other RNA
atccagagaacccccaagattcaagtgtacagcaggcaccctgccgagaacggcaaa

SEQ ID NO: 69073 - RNA, 60 nt, synthetic construct
  misc_feature 1..60: note = Beta-2-microglobulin (1-20)
  source 1..60: mol_type = other RNA
atccagagaacccccaagattcaagtgtacagcaggcaccctgccgagaacggcaaatcc

SEQ ID NO: 69074 - RNA, 63 nt, synthetic construct
  misc_feature 1..63: note = Beta-2-microglobulin (1-21)
  source 1..63: mol_type = other RNA
atccagagaacccccaagattcaagtgtacagcaggcaccctgccgagaacggcaaatccaat

SEQ ID NO: 69075 - RNA, 69 nt, synthetic construct
  misc_feature 1..69: note = Beta-2-microglobulin (21-43)
  source 1..69: mol_type = other RNA
atccagagaacccccaagattcaagtgtacagcaggcaccctgccgagaacggcaaatccaatttcctg

SEQ ID NO: 69076 - RNA, 72 nt, synthetic construct
  misc_feature 1..72: note = Beta-2-microglobulin (21-44)
  source 1..72: mol_type = other RNA
atccagagaacccccaagattcaagtgtacagcaggcaccctgccgagaacggcaaatccaatttcctgaac

SEQ ID NO: 69077 - RNA, 27 nt, synthetic construct
  misc_feature 1..27: note = Hemicentin-1 (876-884)
  source 1..27: mol_type = other RNA
atccagagcgagaccacagtgactgtc

SEQ ID NO: 69078 - RNA, 33 nt, synthetic construct
  misc_feature 1..33: note = Glia-derived nexin (392-402)
  source 1..33: mol_type = other RNA
atcagacacaaccccaccggcgccgtgctgttc

SEQ ID NO: 69079 - RNA, 27 nt, synthetic construct
  misc_feature 1..27: note = Protein wntless homolog (302-310)
  source 1..27: mol_type = other RNA
atcagacagggcattttctacgccatg

SEQ ID NO: 69080 - RNA, 21 nt, synthetic construct
  misc_feature 1..21: note = Synembryn-B (156-162)
  source 1..21: mol_type = other RNA
atcagaagccagctgaggtac

SEQ ID NO: 69081 - RNA, 27 nt, synthetic construct
  misc_feature 1..27: note = Clathrin heavy chain 1 (170-178)
  source 1..27: mol_type = other RNA
atcagcgcccagcaaaacagagtggtc

SEQ ID NO: 69082 - RNA, 24 nt, synthetic construct
  misc_feature 1..24: note = HLA class I histocompatibility antigen, B-44 alpha chain (218-225)
  source 1..24: mol_type = other RNA
atcagcgaccacgaggtgaccctg

SEQ ID NO: 69083 - RNA, 27 nt, synthetic construct
  misc_feature 1..27: note = Integrin-alpha FG-GAP repeat-containing protein 2 (132-140)
  source 1..27: mol_type = other RNA
atcagcgacattggcgggcacgcctac

SEQ ID NO: 69084 - RNA, 24 nt, synthetic construct
  misc_feature 1..24: note = Protein arginine N-methyltransferase 1 (112-119)
  source 1..24: mol_type = other RNA
atcagcgactacgccgtgaagatt

SEQ ID NO: 69085 - RNA, 27 nt, synthetic construct
  misc_feature 1..27: note = Membrane-associated transporter protein (237-245)
  source 1..27: mol_type = other RNA
atcagcgaggcccccctgaccgaagtg

SEQ ID NO: 69086 - RNA, 24 nt, synthetic construct
  misc_feature 1..24: note = 26S proteasome non-ATPase regulatory subunit 13 (64-71)
  source 1..24: mol_type = other RNA
atcagcgagttcgaacacagagtg

SEQ ID NO: 69087 - RNA, 21 nt, synthetic construct
  misc_feature 1..21: note = Cleft lip and palate transmembrane protein 1 (109-115)
  source 1..21: mol_type = other RNA
atcagcgagcacgaacatttc

SEQ ID NO: 69088 - RNA, 27 nt, synthetic construct
  misc_feature 1..27: note = Zinc finger protein ZFPM2 (861-869)
  source 1..27: mol_type = other RNA
atcagcttcaacaaggtggagaattac

SEQ ID NO: 69089 - RNA, 30 nt, synthetic construct
  misc_feature 1..30: note = Neprilysin (536-545)
  source 1..30: mol_type = other RNA
atcagcggcgccgctgtggtcaacgcattc

SEQ ID NO: 69090 - RNA, 33 nt, synthetic construct
  misc_feature 1..33: note = Annexin A2 (214-224)
  source 1..33: mol_type = other RNA
atcagcattatgaccgagagatccgtgccccac

SEQ ID NO: 69091 - RNA, 27 nt, synthetic construct
  misc_feature 1..27: note = Integrin alpha-6 (516-524)
  source 1..27: mol_type = other RNA
atcagcattgtgggcaccctggaggcc

SEQ ID NO: 69092 - RNA, 27 nt, synthetic construct
  misc_feature 1..27: note = Transcription factor SOX-10 (334-342)
  source 1..27: mol_type = other RNA
atcagcaagccccctggcgtggccctg

SEQ ID NO: 69093 - RNA, 24 nt, synthetic construct
  misc_feature 1..24: note = Serine-protein kinase ATM (1999-2006)
  source 1..24: mol_type = other RNA
atcagcctgcaggacctccttctg

SEQ ID NO: 69094 - RNA, 45 nt, synthetic construct
  misc_feature 1..45: note = Glia-derived nexin (263-277)
  source 1..45: mol_type = other RNA
atcagcatgctgattgccctccccaccgagtcctctacacctctt

SEQ ID NO: 69095 - RNA, 27 nt, synthetic construct
  misc_feature 1..27: note = Unconventional myosin-XVIIIa (62-70)
  source 1..27: mol_type = other RNA
atcagcaaccccattcctataaaggtg

SEQ ID NO: 69096 - RNA, 27 nt, synthetic construct
  misc_feature 1..27: note = Interferon regulatory factor 3 (68-76)
  source 1..27: mol_type = other RNA
atcagcaactcccaccccctgtctctc

SEQ ID NO: 69097 - RNA, 27 nt, synthetic construct
  misc_feature 1..27: note = Poly (ADP-ribose) polymerase 14 (310-318)
  source 1..27: mol_type = other RNA
atcagccccggcagatacttcctgctc

SEQ ID NO: 69098 - RNA, 48 nt, synthetic construct
  misc_feature 1..48: note = Disintegrin and metalloproteinase domain-containing protein 10 (189-204)
  source 1..48: mol_type = other RNA
atcagctcccacgtgaaggccattgacaccatataccagacaactgat

SEQ ID NO: 69099 - RNA, 30 nt, synthetic construct
  misc_feature 1..30: note Dolichyl-diphosphooligosaccharide-proteinosyltransferase subunit 2 (230-239)
  source 1..30: mol_type = other RNA
atcagcaccgaggtgggcattacaaacgtc

SEQ ID NO: 69100 - RNA, 27 nt, synthetic construct
  misc_feature 1..27: note = Peroxisome biogenesis factor 1 (593-601)
  source 1..27: mol_type = other RNA
atcagcaccagagagaagctggtgctc

SEQ ID NO: 69101 - RNA, 27 nt, synthetic construct
  misc_feature 1..27: note = Hemicentin-1 (2-10)
  source 1..27: mol_type = other RNA
atcagctgggaggtggtccacaccgtt

SEQ ID NO: 69102 - RNA, 27 nt, synthetic construct
  misc_feature 1..27: note = UDP-N-acetylhexosamine pyrophosphorylase (463-471)
  source 1..27: mol_type = other RNA
atcaccgccgacgtgaaccacaatctg

SEQ ID NO: 69103 - RNA, 33 nt, synthetic construct
  misc_feature 1..33: note = Endoplasmin (418-428)
  source 1..33: mol_type = other RNA
atcaccgacgatttccacgacatgatgcccaag

SEQ ID NO: 69104 - RNA, 27 nt, synthetic construct
  misc_feature 1..27: note = Maltase-glucoamylase (141-149)
  source 1..27: mol_type = other RNA
atcaccgacttcaacaatattagatac

SEQ ID NO: 69105 - RNA, 21 nt, synthetic construct
  misc_feature 1..21: note = Hemicentin-1 (2935-2941)
  source 1..21: mol_type = other RNA
atcaccgacattggcagatac

SEQ ID NO: 69106 - RNA, 24 nt, synthetic construct
  misc_feature 1..24: note = Ral GTPase-activating protein subunit beta (1463-1470)
  source 1..24: mol_type = other RNA
atcaccgacattgtgaacaagtac

SEQ ID NO: 69107 - RNA, 24 nt, synthetic construct
  misc_feature 1..24: note = Myosin-9 (315-322)
  source 1..24: mol_type = other RNA
atcaccgacctggaggaaagactc

SEQ ID NO: 69108 - RNA, 27 nt, synthetic construct
  misc_feature 1..27: note = Protein piccolo (883-891)
  source 1..27: mol_type = other RNA
atcaccgacctgcagaaggagttctac

SEQ ID NO: 69109 - RNA, 30 nt, synthetic construct
  misc_feature 1..30: note = Titin (15513-15522)
  source 1..30: mol_type = other RNA
atcaccggcctgacagagaaccaggaatac

SEQ ID NO: 69110 - RNA, 27 nt, synthetic construct
  misc_feature 1..27: note = Leucine-rich repeat-containing protein 34 (306-314)
  source 1..27: mol_type = other RNA
atcacccacgacggcatggtgtacctg

SEQ ID NO: 69111 - RNA, 24 nt, synthetic construct
  misc_feature 1..24: note = Titin (14574-14581)
  source 1..24: mol_type = other RNA
atcaccaaggacagcgtgacactg

SEQ ID NO: 69112 - RNA, 21 nt, synthetic construct
  misc_feature 1..21: note = Elongation factor 2 (165-171)
  source 1..21: mol_type = other RNA
atcaccaagggcgtgcagtac

SEQ ID NO: 69113 - RNA, 27 nt, synthetic construct
  misc_feature 1..27: note = CLIP-associating protein 1 (390-398)
  source 1..27: mol_type = other RNA
atcaccctgggccacctcagctccgtg

SEQ ID NO: 69114 - RNA, 27 nt, synthetic construct
  misc_feature 1..27: note = Armadillo repeat-containing X-linked protein 2 (498-506)
  source 1..27: mol_type = other RNA
atcaccaacgactaccagcacctgctc

SEQ ID NO: 69115 - RNA, 30 nt, synthetic construct
  misc_feature 1..30: note = Titin (16885-16894)
  source 1..30: mol_type = other RNA
atcaccaacctgacacagggcgaggaatac

SEQ ID NO: 69116 - RNA, 27 nt, synthetic construct
  misc_feature 1..27: note = Heat shock 70 kDa protein 1-like (299-307)
  source 1..27: mol_type = other RNA
atcaccagagccaggttcgaggaactg

SEQ ID NO: 69117 - RNA, 60 nt, synthetic construct
  misc_feature 1..60: note = L-lactate dehydrogenase A chain (23-42)
  source 1..60: mol_type = other RNA
atcaccgtggtcggcgttggggccgtgggaatggcttgcgcaattagcatactgatgaag

SEQ ID NO: 69118 - RNA, 60 nt, synthetic construct
  misc_feature 1..60: note = L-lactate dehydrogenase B chain (24-43)
  source 1..60: mol_type = other RNA
atcaccgtggtcggcgttgggcaggtgggaatggcctgcgctattagcatactgggtaag

SEQ ID NO: 69119 - RNA, 27 nt, synthetic construct
  misc_feature 1..27: note = G protein-coupled receptor kinase 4 (6-14)
  source 1..27: mol_type = other RNA
atcgtggccaacagcctgctccttaag

SEQ ID NO: 69120 - RNA, 27 nt, synthetic construct
  misc_feature 1..27: note = G protein-coupled receptor kinase 6 (6-14)
  source 1..27: mol_type = other RNA
atcgtggccaacaccgtcctgctcaag

SEQ ID NO: 69121 - RNA, 27 nt, synthetic construct
  misc_feature 1..27: note = T-cell surfaceoprotein CD8 beta chain (211-219)
  source 1..27: mol_type = other RNA
atcgtgtgcctgaagattagcggcttc

SEQ ID NO: 69122 - RNA, 27 nt, synthetic construct
  misc_feature 1..27: note = Sorting nexin-13 (161-169)
  source 1..27: mol_type = other RNA
atcgtggacgatttcggcacccacctg

SEQ ID NO: 69123 - RNA, 27 nt, synthetic construct
  misc_feature 1..27: note = Tripartite motif-containing protein 2 (200-208)
  source 1..27: mol_type = other RNA
atcgtggacgatattcacagcaccttc

SEQ ID NO: 69124 - RNA, 27 nt, synthetic construct
  misc_feature 1..27: note = Fibronectin isoform 7 (519-527)
  source 1..27: mol_type = other RNA
atcgtggacgatattacctacaacgtc

SEQ ID NO: 69125 - RNA, 27 nt, synthetic construct
  misc_feature 1..27: note = U3 small nucleolar ribonucleoprotein protein MPP10 (190-198)
  source 1..27: mol_type = other RNA
atcgtggacgataagttctttaaactg

SEQ ID NO: 69126 - RNA, 24 nt, synthetic construct
  misc_feature 1..24: note = Alpha-actinin-1 (115-122)
  source 1..24: mol_type = other RNA
atcgtggacggcaacgtcaagatg

SEQ ID NO: 69127 - RNA, 30 nt, synthetic construct
  misc_feature 1..30: note = Methylcrotonoyl-CoA carboxylase beta chain, mitochondrial (300-309)
  source 1..30: mol_type = other RNA
atcgtggacggcagcagattcaccgagttt

SEQ ID NO: 69128 - RNA, 27 nt, synthetic construct
  misc_feature 1..27: note = Proteasome inhibitor PI31 subunit (209-217)
  source 1..27: mol_type = other RNA
atcgtggaccccctgagaagcggcttc

SEQ ID NO: 69129 - RNA, 27 nt, synthetic construct
  misc_feature 1..27: note = Neutral amino acid transporter A (156-164)
  source 1..27: mol_type = other RNA
atcgtggacagaaccacaactgtcgtt

SEQ ID NO: 69130 - RNA, 27 nt, synthetic construct
  misc_feature 1..27: note = HMG domain-containing protein 3 (1356-1364)
  source 1..27: mol_type = other RNA
atcgtggacagcaagcccaacggcgtc

SEQ ID NO: 69131 - RNA, 27 nt, synthetic construct
  misc_feature 1..27: note = Synemin (748-756)
  source 1..27: mol_type = other RNA
atcgtggaggaacccgtcagctacgtt

SEQ ID NO: 69132 - RNA, 33 nt, synthetic construct
  misc_feature 1..33: note = Glia-derived nexin (63-73)
  source 1..33: mol_type = other RNA
atcgtgattagcccccacggcatagcctccgtc

SEQ ID NO: 69133 - RNA, 36 nt, synthetic construct
  misc_feature 1..36: note = Sterol regulatory element-binding protein 2 (1129-1140)
  source 1..36: mol_type = other RNA
atcgtgaagctgggcgggggaaccgccattgctgca

SEQ ID NO: 69134 - RNA, 51 nt, synthetic construct
  misc_feature 1..51: note = Melanoma-associated antigen 4 (205-221)
  source 1..51: mol_type = other RNA
atcgtgctgggcaccattgccatggagggggacagcgcttccgaagaggaa

SEQ ID NO: 69135 - RNA, 27 nt, synthetic construct
  misc_feature 1..27: note = Elongator complex protein 4 (107-115)
  source 1..27: mol_type = other RNA
atcgtgaacggccacaccctgctcgtc

SEQ ID NO: 69136 - RNA, 30 nt, synthetic construct
  misc_feature 1..30: note = Rho guanine nucleotide exchange factor 2 (500-509)
  source 1..30: mol_type = other RNA
atcgtgagagacattgccaaccaggagaag

SEQ ID NO: 69137 - RNA, 27 nt, synthetic construct
  misc_feature 1..27: note = Cytoplasmic dynein 1 heavy chain 1 (1043-1051)
  source 1..27: mol_type = other RNA
atcgtgagcgaggtcgaacagtacgtt

SEQ ID NO: 69138 - RNA, 42 nt, synthetic construct
  misc_feature 1..42: note = Glia-derived nexin (119-132)
  source 1..42: mol_type = other RNA
atcgtgaccgtcgccaacgctgttttcgtgaagaatgcaagc

SEQ ID NO: 69139 - RNA, 30 nt, synthetic construct
  misc_feature 1..30: note = Neuropilin-2 (58-67)
  source 1..30: mol_type = other RNA
atcgtgtacgcccccgagcctaaccagaag

SEQ ID NO: 69140 - RNA, 27 nt, synthetic construct
  misc_feature 1..27: note = Mitochondrial calcium uniporter regulator 1 (3-11)
  source 1..27: mol_type = other RNA
atcgtgtacaaggacatggtcaccaaa

SEQ ID NO: 69141 - RNA, 27 nt, synthetic construct
  misc_feature 1..27: note = Transmembrane emp24 domain-containing protein 5 (5-13)
  source 1..27: mol_type = other RNA
atctggctgcccttccctgtgctcctt

SEQ ID NO: 69142 - RNA, 27 nt, synthetic construct
  misc_feature 1..27: note = Unconventional myosin-Va (407-415)
  source 1..27: mol_type = other RNA
atctacgccaagctgttcaactggatt

SEQ ID NO: 69143 - RNA, 27 nt, synthetic construct
  misc_feature 1..27: note = Alpha-soluble NSF attachment protein (44-52)
  source 1..27: mol_type = other RNA
atctacgccagagctgcaaacatgttc

SEQ ID NO: 69144 - RNA, 27 nt, synthetic construct
  misc_feature 1..27: note = DNA polymerase delta subunit 2 (88-96)
  source 1..27: mol_type = other RNA
atctacgccaccagactgattcagatg

SEQ ID NO: 69145 - RNA, 24 nt, synthetic construct
  misc_feature 1..24: note = 39S ribosomal protein L20, mitochondrial (107-114)
  source 1..24: mol_type = other RNA
atctacgagcccaagaccttcaaa

SEQ ID NO: 69146 - RNA, 27 nt, synthetic construct
  misc_feature 1..27: note = V-type proton ATPase 116 kDa subunit a isoform 1 (560-568)
  source 1..27: mol_type = other RNA
atctacttcaagaaacccctgaacatt

SEQ ID NO: 69147 - RNA, 33 nt, synthetic construct
  misc_feature 1..33: note = Antizyme inhibitor 1 (258-268)
  source 1..33: mol_type = other RNA
atctacttccccgagggcagcggggtgaagatt

SEQ ID NO: 69148 - RNA, 30 nt, synthetic construct
  misc_feature 1..30: note = Protein disulfide-isomerase A3 (453-462)
  source 1..30: mol_type = other RNA
atctacttcagccccgccaacaagaaactg

SEQ ID NO: 69149 - RNA, 24 nt, synthetic construct
  misc_feature 1..24: note = Zinc finger protein 382 (116-123)
  source 1..24: mol_type = other RNA
atctacggcaagaccttcacactg

SEQ ID NO: 69150 - RNA, 27 nt, synthetic construct
  misc_feature 1..27: note = Protein kinase C and casein kinase substrate in neurons protein 2 (266-274)
  source 1..27: mol_type = other RNA
atctaccacgacctggagcagagcatt

SEQ ID NO: 69151 - RNA, 27 nt, synthetic construct
  misc_feature 1..27: note = Ubiquitin-conjugating enzyme E2 N (75-83)
  source 1..27: mol_type = other RNA
atctaccaccccaacgtggacaagctg

SEQ ID NO: 69152 - RNA, 27 nt, synthetic construct
  misc_feature 1..27: note = Diacylglycerol kinase zeta (748-756)
  source 1..27: mol_type = other RNA
atctacattctggaccccgagctcctt

SEQ ID NO: 69153 - RNA, 27 nt, synthetic construct
  misc_feature 1..27: note = Lysosomal protective protein (183-191)
  source 1..27: mol_type = other RNA
atctacattcccaccctggccgtgctc

SEQ ID NO: 69154 - RNA, 27 nt, synthetic construct
  misc_feature 1..27: note = Protein unc-119 homolog A (83-91)
  source 1..27: mol_type = other RNA
atctacaagattgacttcgtgagattt

SEQ ID NO: 69155 - RNA, 30 nt, synthetic construct
  misc_feature 1..30: note = Alpha-2-macroglobulin (162-171)
  source 1..30: mol_type = other RNA
atctacaagcccggccagaccgtgaaattc

SEQ ID NO: 69156 - RNA, 27 nt, synthetic construct
  misc_feature 1..27: note = Tubby-related protein 4 (640-648)
  source 1..27: mol_type = other RNA
atctacctgcccgaggtgagaaagatt

SEQ ID NO: 69157 - RNA, 27 nt, synthetic construct
  misc_feature 1..27: note = Alpha-adducin (165-173)
  source 1..27: mol_type = other RNA
atctacaaccacattaccacaagagtg

SEQ ID NO: 69158 - RNA, 27 nt, synthetic construct
  misc_feature 1..27: note = Sprouty-related, EVH1 domain-containing protein 1 (81-89)
  source 1..27: mol_type = other RNA
atctacaacaaggtgacccccacattc

SEQ ID NO: 69159 - RNA, 27 nt, synthetic construct
  misc_feature 1..27: note = Serine-protein kinase ATM (1147-1155)
  source 1..27: mol_type = other RNA
atctacaacagaaagagcgtgctgctc

SEQ ID NO: 69160 - RNA, 27 nt, synthetic construct
  misc_feature 1..27: note = Spermine synthase (46-54)
  source 1..27: mol_type = other RNA
atctacccccacggcctggtgctcctt

SEQ ID NO: 69161 - RNA, 27 nt, synthetic construct
  misc_feature 1..27: note = E3 ubiquitin-protein ligase RNF213 (3834-3842)
  source 1..27: mol_type = other RNA
atctacccccaggtgctgcacagcctc

SEQ ID NO: 69162 - RNA, 30 nt, synthetic construct; identical to SEQ ID NO: 44935
  misc_feature 1..30: note = Nuclear fragile X mental retardation-interacting protein 2 (473-482)
  source 1..30: mol_type = other RNA

SEQ ID NO: 69163 - RNA, 27 nt, synthetic construct
  misc_feature 1..27: note = Zinc finger protein castor homolog 1 (463-471)
  source 1..27: mol_type = other RNA
atctaccagaagtatattgccagattc

SEQ ID NO: 69164 - RNA, 27 nt, synthetic construct
  misc_feature 1..27: note = Renin receptor (327-335)
  source 1..27: mol_type = other RNA
atctacagaatgaccaaccagaagatt

SEQ ID NO: 69165 - RNA, 27 nt, synthetic construct
  misc_feature 1..27: note = Pericentriolar material 1 protein (1385-1393)
  source 1..27: mol_type = other RNA
atctacagcgaggtggccaccctgatt

SEQ ID NO: 69166 - RNA, 33 nt, synthetic construct
  misc_feature 1..33: note = Perilipin-2 (353-363)
  source 1..33: mol_type = other RNA
atctacagcgtgttcagaaacgccgcttccttt

SEQ ID NO: 69167 - RNA, 27 nt, synthetic construct
  misc_feature 1..27: note = Poly (ADP-ribose) polymerase 14 (1584-1592)
  source 1..27: mol_type = other RNA
atctacacccacggcaaccatagcctg

SEQ ID NO: 69168 - RNA, 27 nt, synthetic construct
  misc_feature 1..27: note = Transmembraneoprotein NMB (174-182)
  source 1..27: mol_type = other RNA
atctacgtgttccacaccctgggctgg

SEQ ID NO: 69169 - RNA, 27 nt, synthetic construct
  misc_feature 1..27: note = Protein-methionine sulfoxide oxidase MICAL3 (1990-1998)
  source 1..27: mol_type = other RNA
atctacgtgccccacgccctggctttc

SEQ ID NO: 69170 - RNA, 27 nt, synthetic construct
  misc_feature 1..27: note = Clathrin heavy chain 1 (1130-1138)
  source 1..27: mol_type = other RNA
aaggccgacgatcccagctcctacatg

SEQ ID NO: 69171 - RNA, 33 nt, synthetic construct
  misc_feature 1..33: note = L-dopachrome tautomerase (356-366)
  source 1..33: mol_type = other RNA
aaggccgacggcaccctggatagccaggtgatg

SEQ ID NO: 69172 - RNA, 27 nt, synthetic construct
  misc_feature 1..27: note = Activating signal cointegrator 1 complex subunit 2 (32-40)
  source 1..27: mol_type = other RNA
aaggccgacagatacttcgtgctgtat

SEQ ID NO: 69173 - RNA, 27 nt, synthetic construct
  misc_feature 1..27: note = Lupus La protein (148-156)
  source 1..27: mol_type = other RNA
aaggccttcaaaggcagcatctttgtg

SEQ ID NO: 69174 - RNA, 27 nt, synthetic construct
  misc_feature 1..27: note = Neuronal PAS domain-containing protein 3 (509-517)
  source 1..27: mol_type = other RNA
aaggccggcgaggacgggttcggagct

SEQ ID NO: 69175 - RNA, 27 nt, synthetic construct
  misc_feature 1..27: note = Filamin-A (2252-2260)
  source 1..27: mol_type = other RNA
aaggccggcaacaatatgctgctcgtg

SEQ ID NO: 69176 - RNA, 27 nt, synthetic construct
  misc_feature 1..27: note = Alpha-soluble NSF attachment protein (180-188)
  source 1..27: mol_type = other RNA
aaggccatcgacatttacgagcaggtg

SEQ ID NO: 69177 - RNA, 27 nt, synthetic construct
  misc_feature 1..27: note = Phosphorylase b kinase regulatory subunit beta (81-89)
  source 1..27: mol_type = other RNA
aaggccaaaatccaggacagcctgtac

SEQ ID NO: 69178 - RNA, 33 nt, synthetic construct
  misc_feature 1..33: note = Vacuolar protein sorting-associated protein 13A (1058-1068)
  source 1..33: mol_type = other RNA
aaggccctggtgggcggggctgtcggaggtctc

SEQ ID NO: 69179 - RNA, 33 nt, synthetic construct
  misc_feature 1..33: note = Zinc finger homeobox protein 3 (2172-2182)
  source 1..33: mol_type = other RNA
aaggccaacgaggtgctgggcctcgctgcacag

SEQ ID NO: 69180 - RNA, 54 nt, synthetic construct
  misc_feature 1..54: note = Bifunctional glutamate/proline-tRNA ligase (778-795)
  source 1..54: mol_type = other RNA
aaggcccccaaagaggacgtggatgctgcagtcaagcagctgctcagccttaaa

SEQ ID NO: 69181 - RNA, 27 nt, synthetic construct
  misc_feature 1..27: note = Treacle protein (215-223)
  source 1..27: mol_type = other RNA
aaggccagcgagaaaatcctgcaggtg

SEQ ID NO: 69182 - RNA, 30 nt, synthetic construct
  misc_feature 1..30: note = Cytoplasmic dynein 1 heavy chain 1 (1729-1738)
  source 1..30: mol_type = other RNA
aaggccaccagcatcgaccccaacacatac

SEQ ID NO: 69183 - RNA, 27 nt, synthetic construct
  misc_feature 1..27: note = Tubulin alpha-1A chain (171-179)
  source 1..27: mol_type = other RNA
aaggcctaccacgagcagctgagcgtg

SEQ ID NO: 69184 - RNA, 30 nt, synthetic construct
  misc_feature 1..30: note = UDP-N-acetylhexosamine pyrophosphorylase-like protein 1 (151-160)
  source 1..30: mol_type = other RNA
aaggcctaccccgaggaacctgtgggcgtc

SEQ ID NO: 69185 - RNA, 75 nt, synthetic construct
  misc_feature 1..75: note = Beta-2-microglobulin (74-98)
  source 1..75: mol_type = other RNA
aaggacgagtacgcctgcagagtgaaccacgtcaccctgagccagcccaaaatcgttaagtgggatagggacatg

SEQ ID NO: 69186 - RNA, 45 nt, synthetic construct
  misc_feature 1..45: note = Glia-derived nexin (117-131)
  source 1..45: mol_type = other RNA
aaggacatcgtgaccgtcgccaacgctgttttcgtgaaaaatgca

SEQ ID NO: 69187 - RNA, 48 nt, synthetic construct
  misc_feature 1..48: note = Glia-derived nexin (117-132)
  source 1..48: mol_type = other RNA
aaggacatcgtgaccgtcgccaacgctgttttcgtgaaaaatgcaagc

SEQ ID NO: 69188 - RNA, 27 nt, synthetic construct
  misc_feature 1..27: note = Serine-protein kinase ATM (129-137)
  source 1..27: mol_type = other RNA
aaggacagctccaacggcgccatctac

SEQ ID NO: 69189 - RNA, 27 nt, synthetic construct
  misc_feature 1..27: note = E3 ubiquitin-protein ligase RNF213 (4774-4782)
  source 1..27: mol_type = other RNA
aaggaggccgaactgagactcgtgaaa

SEQ ID NO: 69190 - RNA, 27 nt, synthetic construct
  misc_feature 1..27: note = Neuron navigator 2 (1035-1043)
  source 1..27: mol_type = other RNA
aaggaggacagcagaccccacctgttc

SEQ ID NO: 69191 - RNA, 30 nt, synthetic construct
  misc_feature 1..30: note = Multidrug resistance-associated protein 7 (836-845)
  source 1..30: mol_type = other RNA
aaggagggcgccgtggctctgcacgtctac

SEQ ID NO: 69192 - RNA, 30 nt, synthetic construct
  misc_feature 1..30: note = Hemicentin-1 (4939-4948)
  source 1..30: mol_type = other RNA
aaggagatcggcgaagccgtgaacgggttc

SEQ ID NO: 69193 - RNA, 27 nt, synthetic construct
  misc_feature 1..27: note = Synemin (925-933)
  source 1..27: mol_type = other RNA
aaggagatcaaaattccccacgaattc

SEQ ID NO: 69194 - RNA, 30 nt, synthetic construct
  misc_feature 1..30: note = Annexin A1 (147-156)
  source 1..30: mol_type = other RNA
aaggagatcagagacattaacagggtgtac

SEQ ID NO: 69195 - RNA, 27 nt, synthetic construct
  misc_feature 1..27: note = Probable global transcription activator SNF2L1 (774-782)
  source 1..27: mol_type = other RNA
aaggagaaactgctcacccagggcttc

SEQ ID NO: 69196 - RNA, 57 nt, synthetic construct
  misc_feature 1..57: note = Protein FAM208B (1764-1782)
  source 1..57: mol_type = other RNA
aaggagaacctgagcaaagaacccctcgcctccttcgtgtctgagtcatttgacacc

SEQ ID NO: 69197 - RNA, 27 nt, synthetic construct
  misc_feature 1..27: note = Cullin-4B (885-893)
  source 1..27: mol_type = other RNA
aaggagaaccccaatcagtacaactat

SEQ ID NO: 69198 - RNA, 69 nt, synthetic construct
  misc_feature 1..69: note = 60S ribosomal protein L18 (16-38)
  source 1..69: mol_type = other RNA
aaggagcccaaaagccaggacatctacctgagactccttgtgaagctgtataggttcttggcccggcgc

SEQ ID NO: 69199 - RNA, 30 nt, synthetic construct; identical to SEQ ID NO: 44972
  misc_feature 1..30: note = Melanoma-associated antigen 10 (192-201)
  source 1..30: mol_type = other RNA

SEQ ID NO: 69200 - RNA, 30 nt, synthetic construct; identical to SEQ ID NO: 44973
  misc_feature 1..30: note = Melanoma-associated antigen 11 (251-260)
  source 1..30: mol_type = other RNA

SEQ ID NO: 69201 - RNA, 30 nt, synthetic construct
  misc_feature 1..30: note = Melanoma-associated antigen 4 (168-177)
  source 1..30: mol_type = other RNA
aaggaggtggaccccaccagcaacacatac

SEQ ID NO: 69202 - RNA, 57 nt, synthetic construct
  misc_feature 1..57: note = ATP-dependent RNA helicase A (392-410)
  source 1..57: mol_type = other RNA
aagttcgagagcgaaatcctggaggccatttcccagaactctgtggtcataatcaga

SEQ ID NO: 69203 - RNA, 30 nt, synthetic construct
  misc_feature 1..30: note = ATP synthase-coupling factor 6, mitochondrial (99-108)
  source 1..30: mol_type = other RNA
aagttcgaggtgatcgaaaaaccccaggcc

SEQ ID NO: 69204 - RNA, 42 nt, synthetic construct
  misc_feature 1..42: note = B-cell CLL/lymphoma 9 protein (45-58)
  source 1..42: mol_type = other RNA
aagttcagcaaccagggcaaacaagggggatccgcctctcag

SEQ ID NO: 69205 - RNA, 27 nt, synthetic construct
  misc_feature 1..27: note = Collagen alpha-1(IV) chain (238-246)
  source 1..27: mol_type = other RNA
aagttcagcaccatgccctttctgttc

SEQ ID NO: 69206 - RNA, 27 nt, synthetic construct
  misc_feature 1..27: note = Protein diaphanous homolog 2 (949-957)
  source 1..27: mol_type = other RNA
aagttcgtggagaaaatgaccagcttt

SEQ ID NO: 69207 - RNA, 30 nt, synthetic construct
  misc_feature 1..30: note = V-type proton ATPase 116 kDa subunit a isoform 1 (813-822)
  source 1..30: mol_type = other RNA
aagttctacagcggcaccgggtttaaattc

SEQ ID NO: 69208 - RNA, 60 nt, synthetic construct
  misc_feature 1..60: note = Collagen alpha-2(I) chain (441-460)
  source 1..60: mol_type = other RNA
aagggcgagcccggggtggtcggagccgttggtaccgctggccctagcgggccatccgga

SEQ ID NO: 69209 - RNA, 48 nt, synthetic construct
  misc_feature 1..48: note = Calpain small subunit 1 (9-24)
  source 1..48: mol_type = other RNA
aagggcgggggaggtggcgggggaggcggtgggggactgggcggcggg

SEQ ID NO: 69210 - RNA, 78 nt, synthetic construct
  misc_feature 1..78: note = HLA class I histocompatibility antigen, A-23 alpha chain (340-365)
  source 1..78: mol_type = other RNA
aagggcgggagctactcccaggccgcttcttcagacagtgcacaaggaagcgatgtgtccctgaccgcctgcaaagtc

SEQ ID NO: 69211 - RNA, 78 nt, synthetic construct
  misc_feature 1..78: note = HLA class I histocompatibility antigen, A-1 alpha chain (315-340)
  source 1..78: mol_type = other RNA
aagggcgggagctacacccaggccgcttcctctgactcagcacaaggaagtgatgtgagcctgacagcctgcaaagtc

SEQ ID NO: 69212 - RNA, 114 nt, synthetic construct
  misc_feature 1..114: note = Cytochrome c oxidase subunit 7A2, mitochondrial (46-83)
  source 1..114: mol_type = other RNA
aagggcggggtggccgacgctctgctctacagagcaaccatgatccttacagtcggaggtactgcctatgcgatttacgagctggctgttgccagcttccccaaaaagcaggaa

SEQ ID NO: 69213 - RNA, 30 nt, synthetic construct
  misc_feature 1..30: note = Nebulin (852-861)
  source 1..30: mol_type = other RNA
aagggcaaaatgatcggggccctgagcatt

SEQ ID NO: 69214 - RNA, 30 nt, synthetic construct
  misc_feature 1..30: note = Fatty acid synthase (2391-2400)
  source 1..30: mol_type = other RNA
aagggcctggaggaaagagtggccgctgca

SEQ ID NO: 69215 - RNA, 27 nt, synthetic construct
  misc_feature 1..27: note = E3 ubiquitin-protein ligase HUWE1 (1718-1726)
  source 1..27: mol_type = other RNA
aagggcaacgacacccccctggccctc

SEQ ID NO: 69216 - RNA, 27 nt, synthetic construct
  misc_feature 1..27: note = Vigilin (314-322)
  source 1..27: mol_type = other RNA
aagggcaacagcctgcaggagatcctc

SEQ ID NO: 69217 - RNA, 24 nt, synthetic construct
  misc_feature 1..24: note = UDP-glucose:glycoprotein glucosyltransferase 1 (1055-1062)
  source 1..24: mol_type = other RNA
aagggccccatcgccaaattcctg

SEQ ID NO: 69218 - RNA, 27 nt, synthetic construct
  misc_feature 1..27: note = Serine/arginine-rich splicing factor 4 (23-31)
  source 1..27: mol_type = other RNA
aagggctacgggaaaatcctggaggtg

SEQ ID NO: 69219 - RNA, 75 nt, synthetic construct
  misc_feature 1..75: note = Histidine triad nucleotide-binding protein 1 (58-82)
  source 1..75: mol_type = other RNA
aagcacatcagccagatttccgtggccgaggacgatgacgaatctctgctcggccatcttatgatagtcgggaaa

SEQ ID NO: 69220 - RNA, 24 nt, synthetic construct
  misc_feature 1..24: note = Trabeculin-alpha (4579-4586)
  source 1..24: mol_type = other RNA
aagcacaaagagttccagaagacc

SEQ ID NO: 69221 - RNA, 27 nt, synthetic construct
  misc_feature 1..27: note = Unconventional myosin-VIIa (1948-1956)
  source 1..27: mol_type = other RNA
aagatcgccgacaaagtgctgagcgtc

SEQ ID NO: 69222 - RNA, 21 nt, synthetic construct
  misc_feature 1..21: note = LIM domain transcription factor LMO4 (29-35)
  source 1..21: mol_type = other RNA
aagatcgccgacagattcctg

SEQ ID NO: 69223 - RNA, 30 nt, synthetic construct
  misc_feature 1..30: note = MICOS complex subunit MIC60 (45-54)
  source 1..30: mol_type = other RNA
aagatcgccggcgctgggctgctcttcgtg

SEQ ID NO: 69224 - RNA, 36 nt, synthetic construct
  misc_feature 1..36: note = Calcium-binding mitochondrial carrier protein SCaMC-2 (252-263)
  source 1..36: mol_type = other RNA
aagatcgcccccgagagcgctattaaattcatggca

SEQ ID NO: 69225 - RNA, 27 nt, synthetic construct
  misc_feature 1..27: note = Protein TASOR (673-681)
  source 1..27: mol_type = other RNA
aagatcgccagcaaccccctggagaga

SEQ ID NO: 69226 - RNA, 27 nt, synthetic construct
  misc_feature 1..27: note = UV excision repair protein RAD23 homolog B (42-50)
  source 1..27: mol_type = other RNA
aagatcgacgagaaaaacttcgtggtc

SEQ ID NO: 69227 - RNA, 27 nt, synthetic construct
  misc_feature 1..27: note = RNA-binding protein 5 (302-310)
  source 1..27: mol_type = other RNA
aagatcgacggcaaaaccattggggtg

SEQ ID NO: 69228 - RNA, 27 nt, synthetic construct
  misc_feature 1..27: note = 26S protease regulatory subunit 7 (156-164)
  source 1..27: mol_type = other RNA
aagatcgaccccaccgtgacaatgatg

SEQ ID NO: 69229 - RNA, 33 nt, synthetic construct
  misc_feature 1..33: note = 26S protease regulatory subunit 7 (156-166)
  source 1..33: mol_type = other RNA
aagatcgaccccaccgtgacaatgatgcaggtc

SEQ ID NO: 69230 - RNA, 27 nt, synthetic construct
  misc_feature 1..27: note = Thioredoxin reductase 1, cytoplasmic (299-307)
  source 1..27: mol_type = other RNA
aagatcggcctggagaccgtgggggtc

SEQ ID NO: 69231 - RNA, 30 nt, synthetic construct
  misc_feature 1..30: note = 1-phosphatidylinositol 4,5-bisphosphate phosphodiesterase gamma-1 (969-978)
  source 1..30: mol_type = other RNA
aagatcggcaccgagagagcctgctacagg

SEQ ID NO: 69232 - RNA, 24 nt, synthetic construct
  misc_feature 1..24: note = Heat shock protein 105 kDa (711-718)
  source 1..24: mol_type = other RNA
aagatcggcacccccgtgaaagtc

SEQ ID NO: 69233 - RNA, 30 nt, synthetic construct
  misc_feature 1..30: note = Pleckstrin homology domain-containing family G member 3 (122-131)
  source 1..30: mol_type = other RNA
aagatcattgacacccccggcctgctcaaa

SEQ ID NO: 69234 - RNA, 27 nt, synthetic construct
  misc_feature 1..27: note = Unconventional myosin-Id (269-277)
  source 1..27: mol_type = other RNA
aagatcctggccgctattctccacctt

SEQ ID NO: 69235 - RNA, 30 nt, synthetic construct; identical to SEQ ID NO: 45008
  misc_feature 1..30: note = Kinesin-like protein KIF1B (1496-1505)
  source 1..30: mol_type = other RNA

SEQ ID NO: 69236 - RNA, 27 nt, synthetic construct
  misc_feature 1..27: note = 28S ribosomal protein S2, mitochondrial (61-69)
  source 1..27: mol_type = other RNA
aagatcctgaacgagcccctcaaacac

SEQ ID NO: 69237 - RNA, 33 nt, synthetic construct
  misc_feature 1..33: note = D-3-phosphoglycerate dehydrogenase (21-31)
  source 1..33: mol_type = other RNA
aagatcctgcaggacggcgggctccaagtggtc

SEQ ID NO: 69238 - RNA, 27 nt, synthetic construct
  misc_feature 1..27: note = Endothelial differentiation-related factor 1 (98-106)
  source 1..27: mol_type = other RNA
aagatcaacgagaaaccccaggtgatt

SEQ ID NO: 69239 - RNA, 27 nt, synthetic construct
  misc_feature 1..27: note = Upstream stimulatory factor 2 (138-146)
  source 1..27: mol_type = other RNA
aagatcaacaattggattgtgcagctg

SEQ ID NO: 69240 - RNA, 27 nt, synthetic construct
  misc_feature 1..27: note = Sodium/potassium/calcium exchanger 5 (219-227)
  source 1..27: mol_type = other RNA
aagatcaaccagtacattataaaaaag

SEQ ID NO: 69241 - RNA, 27 nt, synthetic construct
  misc_feature 1..27: note = Protein sidekick-1 (309-317)
  source 1..27: mol_type = other RNA
aagatccagggcctgagctccctcacc

SEQ ID NO: 69242 - RNA, 27 nt, synthetic construct
  misc_feature 1..27: note = Keratinocyte-associated protein 2 (136-144)
  source 1..27: mol_type = other RNA
aagatcagctccaccctgtaccaggcc

SEQ ID NO: 69243 - RNA, 33 nt, synthetic construct
  misc_feature 1..33: note Dolichyl-diphosphooligosaccharide-proteinosyltransferase subunit 2 (368-378)
  source 1..33: mol_type = other RNA
aagatcagcaccgaggtgggcattacaaacgtc

SEQ ID NO: 69244 - RNA, 33 nt, synthetic construct
  misc_feature 1..33: note = Melanoma-associated antigen 6 (220-230)
  source 1..33: mol_type = other RNA
aagatctgggaggaactgagcgtgctcgaggtc

SEQ ID NO: 69245 - RNA, 33 nt, synthetic construct
  misc_feature 1..33: note = Ras GTPase-activating-like protein IQGAP1 (94-104)
  source 1..33: mol_type = other RNA
aagatctacgacagagagcagaccaggtataaa

SEQ ID NO: 69246 - RNA, 27 nt, synthetic construct
  misc_feature 1..27: note = NADH dehydrogenase (ubiquinone) 1 beta subcomplex subunit 5, mitochondrial (79-87)
  source 1..27: mol_type = other RNA
aagatctacgagagaaccatggccgtg

SEQ ID NO: 69247 - RNA, 24 nt, synthetic construct
  misc_feature 1..24: note = Lariat debranching enzyme (72-79)
  source 1..24: mol_type = other RNA
aagaaagcccccgtgctgaccctc

SEQ ID NO: 69248 - RNA, 24 nt, synthetic construct
  misc_feature 1..24: note = Myc proto-oncogene protein (412-419)
  source 1..24: mol_type = other RNA
aagaaagccaccgcttacatcctg

SEQ ID NO: 69249 - RNA, 27 nt, synthetic construct
  misc_feature 1..27: note = Zinc phosphodiesterase ELAC protein 2 (366-374)
  source 1..27: mol_type = other RNA
aagaaagagggccccaccctgagcgtg

SEQ ID NO: 69250 - RNA, 48 nt, synthetic construct
  misc_feature 1..48: note = Serum albumin (437-452)
  source 1..48: mol_type = other RNA
aagaaagtgccccaggtcagcacccctacactggttgaggtgtccaga

SEQ ID NO: 69251 - RNA, 27 nt, synthetic construct
  misc_feature 1..27: note = Nuclear mitotic apparatus protein 1 (1-9)
  source 1..27: mol_type = other RNA
aagctggccgacgatctcagcaccctt

SEQ ID NO: 69252 - RNA, 27 nt, synthetic construct
  misc_feature 1..27: note = SNW domain-containing protein 1 (28-36)
  source 1..27: mol_type = other RNA
aagctggccgaggctctctacatcgca

SEQ ID NO: 69253 - RNA, 27 nt, synthetic construct
  misc_feature 1..27: note = Vesicle transport protein USE1 (171-179)
  source 1..27: mol_type = other RNA
aagctggccgaggaaatgctcggcctt

SEQ ID NO: 69254 - RNA, 27 nt, synthetic construct
  misc_feature 1..27: note = SLIT-ROBO Rho GTPase-activating protein 2C (69-77)
  source 1..27: mol_type = other RNA
aagctggccgagcacttcctcgctaaa

SEQ ID NO: 69255 - RNA, 27 nt, synthetic construct
  misc_feature 1..27: note = Plexin-A3 (55-63)
  source 1..27: mol_type = other RNA
aagctggcccccaacctcaccgagctt

SEQ ID NO: 69256 - RNA, 27 nt, synthetic construct
  misc_feature 1..27: note = Peroxisome biogenesis factor 1 (411-419)
  source 1..27: mol_type = other RNA
aagctggacgcccacgtggagagagtc

SEQ ID NO: 69257 - RNA, 27 nt, synthetic construct
  misc_feature 1..27: note = Probable helicase with zinc finger domain (944-952)
  source 1..27: mol_type = other RNA
aagctggacgatggcagcatcggggtg

SEQ ID NO: 69258 - RNA, 27 nt, synthetic construct
  misc_feature 1..27: note = Afadin (391-399)
  source 1..27: mol_type = other RNA
aagctggacgataacagcatccagctc

SEQ ID NO: 69259 - RNA, 27 nt, synthetic construct
  misc_feature 1..27: note = E3 ubiquitin-protein ligase RNF139 (456-464)
  source 1..27: mol_type = other RNA
aagctggacgattacgtgtattacgtc

SEQ ID NO: 69260 - RNA, 27 nt, synthetic construct
  misc_feature 1..27: note = Transcriptional regulator ATRX (1499-1507)
  source 1..27: mol_type = other RNA
aagctggacttcagcaccgccctcgtg

SEQ ID NO: 69261 - RNA, 27 nt, synthetic construct
  misc_feature 1..27: note = Probable ATP-dependent RNA helicase DHX58 (177-185)
  source 1..27: mol_type = other RNA
aagctggacggcgccatcaaccacgtg

SEQ ID NO: 69262 - RNA, 27 nt, synthetic construct
  misc_feature 1..27: note = Serine/threonine-protein kinase Sgk3 (115-123)
  source 1..27: mol_type = other RNA
aagctggacggcaaattctacgccgtg

SEQ ID NO: 69263 - RNA, 27 nt, synthetic construct
  misc_feature 1..27: note = Inter-alpha-trypsin inhibitor heavy chain H5 (522-530)
  source 1..27: mol_type = other RNA
aagctggaccacctccatgtggaggtc

SEQ ID NO: 69264 - RNA, 27 nt, synthetic construct
  misc_feature 1..27: note = Kin of IRRE-like protein 1 (435-443)
  source 1..27: mol_type = other RNA
aagctggacatcaaagtggagaccgtc

SEQ ID NO: 69265 - RNA, 27 nt, synthetic construct
  misc_feature 1..27: note = Tectonic-1 (198-206)
  source 1..27: mol_type = other RNA
aagctggacatccccaccgccgctaaa

SEQ ID NO: 69266 - RNA, 30 nt, synthetic construct; identical to SEQ ID NO: 45039
  misc_feature 1..30: note = Lactoperoxidase (313-322)
  source 1..30: mol_type = other RNA

SEQ ID NO: 69267 - RNA, 27 nt, synthetic construct
  misc_feature 1..27: note = WD repeat-containing protein 26 (306-314)
  source 1..27: mol_type = other RNA
aagctggacaacaatctcgatagcgtg

SEQ ID NO: 69268 - RNA, 27 nt, synthetic construct
  misc_feature 1..27: note = Cytoplasmic dynein 1 heavy chain 1 (828-836)
  source 1..27: mol_type = other RNA
aagctggacccctacgtgcagagactc

SEQ ID NO: 69269 - RNA, 27 nt, synthetic construct
  misc_feature 1..27: note = cAMP-dependent protein kinase type I-beta regulatory subunit (349-357)
  source 1..27: mol_type = other RNA
aagctggacagacccaggttcgagcgg

SEQ ID NO: 69270 - RNA, 33 nt, synthetic construct; identical to SEQ ID NO: 45043
  misc_feature 1..33: note = SH3 domain-binding protein 4 (249-259)
  source 1..33: mol_type = other RNA

SEQ ID NO: 69271 - RNA, 27 nt, synthetic construct
  misc_feature 1..27: note = Eukaryotic initiation factor 4A-II (260-268)
  source 1..27: mol_type = other RNA
aagctggacaccctctgcgatctttac

SEQ ID NO: 69272 - RNA, 30 nt, synthetic construct
  misc_feature 1..30: note = Eukaryotic translation initiation factor 3 subunit I (213-222)
  source 1..30: mol_type = other RNA
aagctgttcgacagcaccacactcgagcac

SEQ ID NO: 69273 - RNA, 27 nt, synthetic construct
  misc_feature 1..27: note = Centromere protein R (110-118)
  source 1..27: mol_type = other RNA
aagctgttcgagaaaagcaccggcctc

SEQ ID NO: 69274 - RNA, 27 nt, synthetic construct
  misc_feature 1..27: note = Protein kinase C delta type (581-589)
  source 1..27: mol_type = other RNA
aagctgttcgagagagaacccaccaaa

SEQ ID NO: 69275 - RNA, 27 nt, synthetic construct
  misc_feature 1..27: note = Nucleolar complex protein 2 homolog (168-176)
  source 1..27: mol_type = other RNA
aagctgttccacgaggtggtccaggcc

SEQ ID NO: 69276 - RNA, 30 nt, synthetic construct
  misc_feature 1..30: note = Unconventional myosin-Va (410-419)
  source 1..30: mol_type = other RNA
aagctgttcaactggatcgtggacaatgtc

SEQ ID NO: 69277 - RNA, 27 nt, synthetic construct
  misc_feature 1..27: note = Constitutive coactivator of PPAR-gamma-like protein 1 (805-813)
  source 1..27: mol_type = other RNA
aagctgttccagagcaaactccttaag

SEQ ID NO: 69278 - RNA, 30 nt, synthetic construct
  misc_feature 1..30: note = GTPase-activating protein and VPS9 domain-containing protein 1 (42-51)
  source 1..30: mol_type = other RNA
aagctgttcagcgagggcctcttttccgcc

SEQ ID NO: 69279 - RNA, 24 nt, synthetic construct
  misc_feature 1..24: note = Pleckstrin homology domain-containing family M member 2 (338-345)
  source 1..24: mol_type = other RNA
aagctgggcgacatcagcgccgtg

SEQ ID NO: 69280 - RNA, 27 nt, synthetic construct
  misc_feature 1..27: note = Atrial natriuretic peptide receptor 2 (148-156)
  source 1..27: mol_type = other RNA
aagctgggcgagttcgtggtcaccctc

SEQ ID NO: 69281 - RNA, 24 nt, synthetic construct
  misc_feature 1..24: note = Destrin (151-158)
  source 1..24: mol_type = other RNA
aagctgggcgggagcctcatcgtg

SEQ ID NO: 69282 - RNA, 24 nt, synthetic construct
  misc_feature 1..24: note = Transformation/transcription domain-associated protein (1157-1164)
  source 1..24: mol_type = other RNA
aagctgggcggggtggtcagcatc

SEQ ID NO: 69283 - RNA, 24 nt, synthetic construct
  misc_feature 1..24: note = Laminin subunit beta-2 (55-62)
  source 1..24: mol_type = other RNA
aagctgggcatcgtgcaggggatt

SEQ ID NO: 69284 - RNA, 27 nt, synthetic construct
  misc_feature 1..27: note = TRPM8 channel-associated factor 1 (281-289)
  source 1..27: mol_type = other RNA
aagctgggccccttcctccttaacgcc

SEQ ID NO: 69285 - RNA, 36 nt, synthetic construct
  misc_feature 1..36: note = Transcription and mRNA export factor ENY2 (19-30)
  source 1..36: mol_type = other RNA
aagctgatcgagaccggcgaaagagagaggctcaaa

SEQ ID NO: 69286 - RNA, 27 nt, synthetic construct
  misc_feature 1..27: note = Ral GTPase-activating protein subunit beta (194-202)
  source 1..27: mol_type = other RNA
aagctgatcggcgtgctcttcgaggtc

SEQ ID NO: 69287 - RNA, 27 nt, synthetic construct
  misc_feature 1..27: note = Protein FAM179B (1545-1553)
  source 1..27: mol_type = other RNA
aagctgatcaccggcctccttaacgcc

SEQ ID NO: 69288 - RNA, 36 nt, synthetic construct
  misc_feature 1..36: note = L-lactate dehydrogenase B chain (308-319)
  source 1..36: mol_type = other RNA
aagctgaaagacgatgaggtggcccagctcaagaaa

SEQ ID NO: 69289 - RNA, 30 nt, synthetic construct
  misc_feature 1..30: note = Formin-1 (1119-1128)
  source 1..30: mol_type = other RNA
aagctgctcgacaaacccgagcagttcctt

SEQ ID NO: 69290 - RNA, 33 nt, synthetic construct
  misc_feature 1..33: note = Formin-1 (1119-1129)
  source 1..33: mol_type = other RNA
aagctgctcgacaaacccgagcagttccttcac

SEQ ID NO: 69291 - RNA, 30 nt, synthetic construct
  misc_feature 1..30: note = Inositol 1,4,5-trisphosphate receptor type 2 (474-483)
  source 1..30: mol_type = other RNA
aagctgctcgaggaccttatcttctttgtg

SEQ ID NO: 69292 - RNA, 30 nt, synthetic construct
  misc_feature 1..30: note = AP-3 complex delta subunit (1019-1028)
  source 1..30: mol_type = other RNA
aagctgctcgagagcggcgacctttccatg

SEQ ID NO: 69293 - RNA, 33 nt, synthetic construct
  misc_feature 1..33: note = Catenin beta-1 (158-168)
  source 1..33: mol_type = other RNA
aagctgctcaacgacgaggatcaggtggtcgtt

SEQ ID NO: 69294 - RNA, 27 nt, synthetic construct
  misc_feature 1..27: note = Laminin subunit gamma-1 (646-654)
  source 1..27: mol_type = other RNA
aagctgctcaacaatcttaccagcatc

SEQ ID NO: 69295 - RNA, 30 nt, synthetic construct
  misc_feature 1..30: note = Laminin subunit gamma-1 (646-655)
  source 1..30: mol_type = other RNA
aagctgctcaacaatcttaccagcatcaaa

SEQ ID NO: 69296 - RNA, 30 nt, synthetic construct
  misc_feature 1..30: note = Dedicator of cytokinesis protein 5 (404-413)
  source 1..30: mol_type = other RNA
aagctgctccccggcgaccttacccaggtg

SEQ ID NO: 69297 - RNA, 30 nt, synthetic construct
  misc_feature 1..30: note = Myosin-10 (1002-1011)
  source 1..30: mol_type = other RNA
aagctgatggaggacagaatcgccgaatgc

SEQ ID NO: 69298 - RNA, 27 nt, synthetic construct
  misc_feature 1..27: note = Heat shock protein HSP 90-beta (491-499)
  source 1..27: mol_type = other RNA
aagctgatgaaagagatcctcgacaag

SEQ ID NO: 69299 - RNA, 27 nt, synthetic construct
  misc_feature 1..27: note = Nuclear envelope integral membrane protein 1 (123-131)
  source 1..27: mol_type = other RNA
aagctgaacgacacctacgtgaatgtc

SEQ ID NO: 69300 - RNA, 27 nt, synthetic construct
  misc_feature 1..27: note = Zinc finger protein ZIC 1 (48-56)
  source 1..27: mol_type = other RNA
aagctgaaccccagctcccacgagctc

SEQ ID NO: 69301 - RNA, 27 nt, synthetic construct
  misc_feature 1..27: note = Lysine-specific histone demethylase 1A (609-617)
  source 1..27: mol_type = other RNA
aagctgaacaccgccgtgagacaggtc

SEQ ID NO: 69302 - RNA, 24 nt, synthetic construct
  misc_feature 1..24: note = Probable ATP-dependent RNA helicase DDX60-like (1106-1113)
  source 1..24: mol_type = other RNA
aagctgcccgccatcttctttctc

SEQ ID NO: 69303 - RNA, 27 nt, synthetic construct
  misc_feature 1..27: note = Probable ATP-dependent RNA helicase DDX60-like (1106-1114)
  source 1..27: mol_type = other RNA
aagctgcccgccatcttctttctcttc

SEQ ID NO: 69304 - RNA, 24 nt, synthetic construct
  misc_feature 1..24: note = Probable ATP-dependent RNA helicase DDX60 (1126-1133)
  source 1..24: mol_type = other RNA
aagctgcccgccctcttctttctt

SEQ ID NO: 69305 - RNA, 27 nt, synthetic construct
  misc_feature 1..27: note = Probable ATP-dependent RNA helicase DDX60 (1126-1134)
  source 1..27: mol_type = other RNA
aagctgcccgccctcttctttcttttc

SEQ ID NO: 69306 - RNA, 30 nt, synthetic construct
  misc_feature 1..30: note = Nuclear receptor coactivator 7 (189-198)
  source 1..30: mol_type = other RNA
aagctgcccgacgccgatctcgctagaaaa

SEQ ID NO: 69307 - RNA, 27 nt, synthetic construct
  misc_feature 1..27: note Dolichyl-diphosphooligosaccharide-proteinosyltransferase 48 kDa subunit (380-388)
  source 1..27: mol_type = other RNA
aagctgcccgacgtgtacggcgtcttc

SEQ ID NO: 69308 - RNA, 27 nt, synthetic construct
  misc_feature 1..27: note = Neuropathy target esterase (713-721)
  source 1..27: mol_type = other RNA
aagctgcccgagggcaccctcgggcac

SEQ ID NO: 69309 - RNA, 27 nt, synthetic construct
  misc_feature 1..27: note = von Willebrand factor A domain-containing protein 9 (368-376)
  source 1..27: mol_type = other RNA
aagctgcccgagaaaacccagacattc

SEQ ID NO: 69310 - RNA, 27 nt, synthetic construct
  misc_feature 1..27: note = Puratrophin-1 (608-616)
  source 1..27: mol_type = other RNA
aagctgccccctgtgggcagcaccgcc

SEQ ID NO: 69311 - RNA, 27 nt, synthetic construct
  misc_feature 1..27: note = MAU2 chromatid cohesion factor homolog (108-116)
  source 1..27: mol_type = other RNA
aagctgcaggaggtgcaccccctcctt

SEQ ID NO: 69312 - RNA, 27 nt, synthetic construct
  misc_feature 1..27: note = Myosin-10 (1284-1292)
  source 1..27: mol_type = other RNA
aagctgcagaacgagctcgacaatgtg

SEQ ID NO: 69313 - RNA, 27 nt, synthetic construct
  misc_feature 1..27: note = Unconventional myosin-If (409-417)
  source 1..27: mol_type = other RNA
aagctgcagcaaatcttcattgagctc

SEQ ID NO: 69314 - RNA, 33 nt, synthetic construct
  misc_feature 1..33: note = High affinity cAMP-specific and IBMX-insensitive 3',5'-cyclic phosphodiesterase 8B (264-274)
  source 1..33: mol_type = other RNA
aagctgagagcctgcaacagcgtgttcaccgct

SEQ ID NO: 69315 - RNA, 27 nt, synthetic construct
  misc_feature 1..27: note = Laminin subunit beta-2 (210-218)
  source 1..27: mol_type = other RNA
aagctgagcgcccacacccatacactc

SEQ ID NO: 69316 - RNA, 30 nt, synthetic construct; identical to SEQ ID NO: 45089
  misc_feature 1..30: note = Nischarin (1228-1237)
  source 1..30: mol_type = other RNA

SEQ ID NO: 69317 - RNA, 27 nt, synthetic construct
  misc_feature 1..27: note = Threonine synthase-like 2 (359-367)
  source 1..27: mol_type = other RNA
aagctgagcgaggccgtgacctccgtc

SEQ ID NO: 69318 - RNA, 27 nt, synthetic construct
  misc_feature 1..27: note = Rho GTPase-activating protein 7 (720-728)
  source 1..27: mol_type = other RNA
aagctgagcgagaccttcctccagatc

SEQ ID NO: 69319 - RNA, 24 nt, synthetic construct
  misc_feature 1..24: note = Myristoylated alanine-rich C-kinase substrate (165-172)
  source 1..24: mol_type = other RNA
aagctgagcggcttctcctttaaa

SEQ ID NO: 69320 - RNA, 27 nt, synthetic construct
  misc_feature 1..27: note = Kinesin-1 heavy chain (222-230)
  source 1..27: mol_type = other RNA
aagctgagcggcaaactctaccttgtg

SEQ ID NO: 69321 - RNA, 30 nt, synthetic construct
  misc_feature 1..30: note = Cathepsin D (348-357)
  source 1..30: mol_type = other RNA
aagctgagccccgaggactacaccctcaaa

SEQ ID NO: 69322 - RNA, 27 nt, synthetic construct
  misc_feature 1..27: note = 26S proteasome non-ATPase regulatory subunit 4 (83-91)
  source 1..27: mol_type = other RNA
aagctgaccgccttcgtgaacacactc

SEQ ID NO: 69323 - RNA, 27 nt, synthetic construct
  misc_feature 1..27: note = Kinesin-like protein KIF13A (701-709)
  source 1..27: mol_type = other RNA
aagctgaccgactaccaggtgacactc

SEQ ID NO: 69324 - RNA, 27 nt, synthetic construct
  misc_feature 1..27: note = Cyclin-dependent kinase 2 (24-32)
  source 1..27: mol_type = other RNA
aagctgaccggcgaggtggtcgccctc

SEQ ID NO: 69325 - RNA, 27 nt, synthetic construct
  misc_feature 1..27: note = E3 ubiquitin-protein ligase UBR2 (543-551)
  source 1..27: mol_type = other RNA
aagctgacccacgtgatcagcatgatg

SEQ ID NO: 69326 - RNA, 27 nt, synthetic construct
  misc_feature 1..27: note = AP-1 complex subunit beta-1 (901-909)
  source 1..27: mol_type = other RNA
aagctgaccaacggcatctgggtgctc

SEQ ID NO: 69327 - RNA, 27 nt, synthetic construct
  misc_feature 1..27: note = Copine-3 (110-118)
  source 1..27: mol_type = other RNA
aagctgaccagacccctcgtgatgaaa

SEQ ID NO: 69328 - RNA, 27 nt, synthetic construct
  misc_feature 1..27: note = Rab3 GTPase-activating protein non-catalytic subunit (337-345)
  source 1..27: mol_type = other RNA
aagctgaccagcgccctcttcaacgct

SEQ ID NO: 69329 - RNA, 27 nt, synthetic construct
  misc_feature 1..27: note = Endothelin B receptor (175-183)
  source 1..27: mol_type = other RNA
aagctggtgcccttcatccagaaagcc

SEQ ID NO: 69330 - RNA, 27 nt, synthetic construct
  misc_feature 1..27: note = Platelet-activating factor acetylhydrolase IB subunit alpha (53-61)
  source 1..27: mol_type = other RNA
aagctgtgggacttccagggctttgag

SEQ ID NO: 69331 - RNA, 27 nt, synthetic construct
  misc_feature 1..27: note = Interleukin-24 (68-76)
  source 1..27: mol_type = other RNA
aagctgtgggaggccttctgggctgtg

SEQ ID NO: 69332 - RNA, 27 nt, synthetic construct
  misc_feature 1..27: note = Coatomer subunit beta' (771-779)
  source 1..27: mol_type = other RNA
aagctgtggagagagaacctcagcaaa

SEQ ID NO: 69333 - RNA, 27 nt, synthetic construct
  misc_feature 1..27: note = Cullin-9 (1503-1511)
  source 1..27: mol_type = other RNA
aagctgtacgagcacctccagagagcc

SEQ ID NO: 69334 - RNA, 27 nt, synthetic construct
  misc_feature 1..27: note = Phosphatidylinositol 4,5-bisphosphate 3-kinase catalytic subunit beta isoform (191-199)
  source 1..27: mol_type = other RNA
aagctgtacggcgggaaactcatcgtg

SEQ ID NO: 69335 - RNA, 33 nt, synthetic construct
  misc_feature 1..33: note = Protein FAM3C (30-40)
  source 1..33: mol_type = other RNA
aagatggacgccagcctgggcaacctcttcgct

SEQ ID NO: 69336 - RNA, 30 nt, synthetic construct; identical to SEQ ID NO: 45109
  misc_feature 1..30: note = Dihydropyrimidinase-related protein 2 (338-347)
  source 1..30: mol_type = other RNA

SEQ ID NO: 69337 - RNA, 36 nt, synthetic construct
  misc_feature 1..36: note = Splicing factor, arginine/serine-rich 19 (1112-1123)
  source 1..36: mol_type = other RNA
aagatggaggaagccaacctggctagcagagcaaaa

SEQ ID NO: 69338 - RNA, 36 nt, synthetic construct
  misc_feature 1..36: note = Leucine-tRNA ligase, cytoplasmic (497-508)
  source 1..36: mol_type = other RNA
aagatgatcgacgccggcgatgctctgatttacatg

SEQ ID NO: 69339 - RNA, 33 nt, synthetic construct; identical to SEQ ID NO: 45112
  misc_feature 1..33: note = LisH domain-containing protein ARMC9 (259-269)
  source 1..33: mol_type = other RNA

SEQ ID NO: 69340 - RNA, 30 nt, synthetic construct; identical to SEQ ID NO: 45113
  misc_feature 1..30: note = Neuron navigator 1 (1349-1358)
  source 1..30: mol_type = other RNA

SEQ ID NO: 69341 - RNA, 27 nt, synthetic construct
  misc_feature 1..27: note = Eukaryotic translation initiation factor 3 subunit L (267-275)
  source 1..27: mol_type = other RNA
aagatgctgggctacttcagcctcgtg

SEQ ID NO: 69342 - RNA, 27 nt, synthetic construct
  misc_feature 1..27: note = KDEL motif-containing protein 1 (7-15)
  source 1..27: mol_type = other RNA
aagatgcccgacgtggagctgttcgtc

SEQ ID NO: 69343 - RNA, 27 nt, synthetic construct
  misc_feature 1..27: note = Ceramide synthase 1 (98-106)
  source 1..27: mol_type = other RNA
aagatgcccgagagcgcctggaaattc

SEQ ID NO: 69344 - RNA, 39 nt, synthetic construct
  misc_feature 1..39: note = Amyloid-like protein 2 (688-700)
  source 1..39: mol_type = other RNA
aagatgcagaaccacggctacgagaatcccacctataaa

SEQ ID NO: 69345 - RNA, 39 nt, synthetic construct
  misc_feature 1..39: note = Gamma-secretase C-terminal fragment 59 (641-653)
  source 1..39: mol_type = other RNA
aagatgcagcaaaacggctacgagaatcccacctataaa

SEQ ID NO: 69346 - RNA, 33 nt, synthetic construct
  misc_feature 1..33: note = E3 ubiquitin-protein ligase UBR4 (905-915)
  source 1..33: mol_type = other RNA
aagatggtggacggcgtcggggtttgcaccgtg

SEQ ID NO: 69347 - RNA, 27 nt, synthetic construct
  misc_feature 1..27: note = Polypyrimidine tract-binding protein 2 (415-423)
  source 1..27: mol_type = other RNA
aagatgtacggcaaaatcattagagtg

SEQ ID NO: 69348 - RNA, 30 nt, synthetic construct
  misc_feature 1..30: note = Protein diaphanous homolog 2 (637-646)
  source 1..30: mol_type = other RNA
aagatgtacaaacccgaggtgagcatgaag

SEQ ID NO: 69349 - RNA, 27 nt, synthetic construct
  misc_feature 1..27: note = Nuclear pore complex protein Nup93 (510-518)
  source 1..27: mol_type = other RNA
aagaacgccgacaaagtgctggagctc

SEQ ID NO: 69350 - RNA, 27 nt, synthetic construct
  misc_feature 1..27: note = 5'-nucleotidase domain-containing protein 1 (159-167)
  source 1..27: mol_type = other RNA
aagaacgccggcaaaatcctgctcctt

SEQ ID NO: 69351 - RNA, 27 nt, synthetic construct
  misc_feature 1..27: note = 60S ribosomal protein L13 (174-182)
  source 1..27: mol_type = other RNA
aagaacttcaaagcctttgctagcctg

SEQ ID NO: 69352 - RNA, 27 nt, synthetic construct
  misc_feature 1..27: note = Centrosome-associated protein 350 (625-633)
  source 1..27: mol_type = other RNA
aagaacaaaagactgcaggagctctac

SEQ ID NO: 69353 - RNA, 27 nt, synthetic construct
  misc_feature 1..27: note = Aldehyde dehydrogenase family 1 member A3 (446-454)
  source 1..27: mol_type = other RNA
aagaacctggacaaagccctcaagctt

SEQ ID NO: 69354 - RNA, 27 nt, synthetic construct
  misc_feature 1..27: note = Junction plakoglobin (278-286)
  source 1..27: mol_type = other RNA
aagaacaatcccaaattcctggccatc

SEQ ID NO: 69355 - RNA, 27 nt, synthetic construct
  misc_feature 1..27: note = COX assembly mitochondrial protein homolog (43-51)
  source 1..27: mol_type = other RNA
aagaacagcggcgtgctgatggtcgtt

SEQ ID NO: 69356 - RNA, 27 nt, synthetic construct
  misc_feature 1..27: note = Cytosolic acyl coenzyme A thioester hydrolase (126-134)
  source 1..27: mol_type = other RNA
aagaacgtggacaaagtcctggaggtt

SEQ ID NO: 69357 - RNA, 27 nt, synthetic construct
  misc_feature 1..27: note = Synaptic vesicle membrane protein VAT-1 homolog (374-382)
  source 1..27: mol_type = other RNA
aagaacgtgggcaaagtcctgctcgtt

SEQ ID NO: 69358 - RNA, 27 nt, synthetic construct
  misc_feature 1..27: note = DnaJ homolog subfamily A member 4 (79-87)
  source 1..27: mol_type = other RNA
aagaacgtggtccaccagctgagcgtt

SEQ ID NO: 69359 - RNA, 36 nt, synthetic construct
  misc_feature 1..36: note = Triosephosphate isomerase (156-167)
  source 1..36: mol_type = other RNA
aagcccgagttcgtggacatcattaacgccaaacag

SEQ ID NO: 69360 - RNA, 27 nt, synthetic construct
  misc_feature 1..27: note = Rho GTPase-activating protein 7 (369-377)
  source 1..27: mol_type = other RNA
aagcccggcaccttccctaaagccctg

SEQ ID NO: 69361 - RNA, 27 nt, synthetic construct
  misc_feature 1..27: note = Anion exchange protein 3 (360-368)
  source 1..27: mol_type = other RNA
aagccccacgtggccagcctgtccttc

SEQ ID NO: 69362 - RNA, 21 nt, synthetic construct
  misc_feature 1..21: note = Kelch repeat and BTB domain-containing protein 6 (284-290)
  source 1..21: mol_type = other RNA
aagcccatcgtgaaaaagtac

SEQ ID NO: 69363 - RNA, 27 nt, synthetic construct
  misc_feature 1..27: note = Protein quaking (6-14)
  source 1..27: mol_type = other RNA
aagcccaaacctaccccagactacctg

SEQ ID NO: 69364 - RNA, 27 nt, synthetic construct
  misc_feature 1..27: note = Sulfate transporter (548-556)
  source 1..27: mol_type = other RNA
aagcccaaaagctccctgctcggcctt

SEQ ID NO: 69365 - RNA, 27 nt, synthetic construct
  misc_feature 1..27: note = Adenylate cyclase type 1 (422-430)
  source 1..27: mol_type = other RNA
aagcccaacagctccctggtggtcctc

SEQ ID NO: 69366 - RNA, 21 nt, synthetic construct
  misc_feature 1..21: note = Serine/threonine-protein kinase tousled-like 1 (483-489)
  source 1..21: mol_type = other RNA
aagccccctatcattcactac

SEQ ID NO: 69367 - RNA, 54 nt, synthetic construct
  misc_feature 1..54: note = NEDD4 family-interacting protein 1 (63-80)
  source 1..54: mol_type = other RNA
aagccccctagctacaacgtggccaccacactgccatcctatgacgaggctgaa

SEQ ID NO: 69368 - RNA, 27 nt, synthetic construct
  misc_feature 1..27: note = Plexin-D1 (92-100)
  source 1..27: mol_type = other RNA
aagcccagaaacctgaatgtgagcttc

SEQ ID NO: 69369 - RNA, 33 nt, synthetic construct
  misc_feature 1..33: note = Collagen alpha-1(XV) chain (98-108)
  source 1..33: mol_type = other RNA
aagcccagctccaccagaggcggggtgctgttc

SEQ ID NO: 69370 - RNA, 63 nt, synthetic construct
  misc_feature 1..63: note = Nuclear pore complex protein Nup214 (1252-1272)
  source 1..63: mol_type = other RNA
aagcccagctacgaggccatccctgaatcctctccaccgtcaggcattaccagtgctagcaac

SEQ ID NO: 69371 - RNA, 27 nt, synthetic construct
  misc_feature 1..27: note = Phosphatidylinositol-binding clathrin assembly protein (465-473)
  source 1..27: mol_type = other RNA
aagcccaccgtggccagccagaaccaa

SEQ ID NO: 69372 - RNA, 27 nt, synthetic construct
  misc_feature 1..27: note = Lysyl oxidase homolog 3 (52-60)
  source 1..27: mol_type = other RNA
aagccctacgagggcagagtggaaatc

SEQ ID NO: 69373 - RNA, 27 nt, synthetic construct
  misc_feature 1..27: note = Nuclear factor of activated T-cells, cytoplasmic 2 (50-58)
  source 1..27: mol_type = other RNA
aagccctacagccctctggcctccctc

SEQ ID NO: 69374 - RNA, 27 nt, synthetic construct
  misc_feature 1..27: note = Procollagen galactosyltransferase 1 (274-282)
  source 1..27: mol_type = other RNA
aagcaggccgaggtgcaaatgtacgtc

SEQ ID NO: 69375 - RNA, 30 nt, synthetic construct
  misc_feature 1..30: note = Syntaxin-binding protein 6 (78-87)
  source 1..30: mol_type = other RNA
aagcagttcgagggcagcacctcctttgtg

SEQ ID NO: 69376 - RNA, 30 nt, synthetic construct
  misc_feature 1..30: note = Dystonin (5209-5218)
  source 1..30: mol_type = other RNA
aagcagaaagagaccatcaaggccttcctg

SEQ ID NO: 69377 - RNA, 27 nt, synthetic construct
  misc_feature 1..27: note = EAW49110.1 (48-56)
  source 1..27: mol_type = other RNA
aagcagctggaggacggcagaagcctc

SEQ ID NO: 69378 - RNA, 27 nt, synthetic construct
  misc_feature 1..27: note = E3 ubiquitin-protein ligase RNF130 (159-167)
  source 1..27: mol_type = other RNA
aagcagaacgacgtggtcagaatcctg

SEQ ID NO: 69379 - RNA, 27 nt, synthetic construct
  misc_feature 1..27: note = Putative signal peptidase complex catalytic subunit SEC11B (91-99)
  source 1..27: mol_type = other RNA
aagcagaacggccacatcaaattcctg

SEQ ID NO: 69380 - RNA, 27 nt, synthetic construct
  misc_feature 1..27: note = Unconventional myosin-IXa (65-73)
  source 1..27: mol_type = other RNA
aagcagcccgaggaataccactatctg

SEQ ID NO: 69381 - RNA, 27 nt, synthetic construct
  misc_feature 1..27: note = Rho guanine nucleotide exchange factor 2 (208-216)
  source 1..27: mol_type = other RNA
aagcagcaagacgtgatctacgagctg

SEQ ID NO: 69382 - RNA, 48 nt, synthetic construct
  misc_feature 1..48: note = Heat shock 70 kDa protein 4 (754-769)
  source 1..48: mol_type = other RNA
aagcagagcctgaccatggaccccgtggtcaaatccaaggagatcgaa

SEQ ID NO: 69383 - RNA, 30 nt, synthetic construct
  misc_feature 1..30: note = Serum albumin (549-558)
  source 1..30: mol_type = other RNA
aagcagaccgccctggtggagctcgtcaaa

SEQ ID NO: 69384 - RNA, 30 nt, synthetic construct
  misc_feature 1..30: note = Tyrosine-protein kinase Fer (613-622)
  source 1..30: mol_type = other RNA
aagcagtacgaccaccccaacatcgtgaaa

SEQ ID NO: 69385 - RNA, 27 nt, synthetic construct
  misc_feature 1..27: note = Transmembrane emp24 domain-containing protein 3 (83-91)
  source 1..27: mol_type = other RNA
aagcagtacgacagcttcacctataga

SEQ ID NO: 69386 - RNA, 36 nt, synthetic construct
  misc_feature 1..36: note = Protein Niban (482-493)
  source 1..36: mol_type = other RNA
aagcagtacgactatgatagctccaccatcagaaaa

SEQ ID NO: 69387 - RNA, 39 nt, synthetic construct
  misc_feature 1..39: note = Protein Niban (482-494)
  source 1..39: mol_type = other RNA
aagcagtacgactatgatagctccaccatcagaaaaaag

SEQ ID NO: 69388 - RNA, 27 nt, synthetic construct
  misc_feature 1..27: note = Phosphatidylinositol 3,4,5-trisphosphate-dependent Rac exchanger 1 protein (1094-1102)
  source 1..27: mol_type = other RNA
aagcagtacgtgacccaaatcaacaga

SEQ ID NO: 69389 - RNA, 27 nt, synthetic construct
  misc_feature 1..27: note = Unconventional myosin-Ib (37-45)
  source 1..27: mol_type = other RNA
aagagattcgaccacagcgagatctac

SEQ ID NO: 69390 - RNA, 27 nt, synthetic construct
  misc_feature 1..27: note = Serine/threonine-protein kinase 10 (596-604)
  source 1..27: mol_type = other RNA
aagagattcgagcaggaaatcaacgcc

SEQ ID NO: 69391 - RNA, 24 nt, synthetic construct
  misc_feature 1..24: note = 60S ribosomal protein L10a (47-54)
  source 1..24: mol_type = other RNA
aagagattcagcggcaccgtgagg

SEQ ID NO: 69392 - RNA, 27 nt, synthetic construct
  misc_feature 1..27: note = Copine-1 (190-198)
  source 1..27: mol_type = other RNA
aagagattcagcgtgcccgtccagcac

SEQ ID NO: 69393 - RNA, 30 nt, synthetic construct
  misc_feature 1..30: note = MAP/microtubule affinity-regulating kinase 3 (731-740)
  source 1..30: mol_type = other RNA
aagagaatcagcggcacctccattgccttc

SEQ ID NO: 69394 - RNA, 27 nt, synthetic construct
  misc_feature 1..27: note = Intraflagellar transport protein 81 homolog (264-272)
  source 1..27: mol_type = other RNA
aagagactggaggaagagatcaaattc

SEQ ID NO: 69395 - RNA, 30 nt, synthetic construct
  misc_feature 1..30: note = ATP-dependent RNA helicase A (30-39)
  source 1..30: mol_type = other RNA
aagagactgggctacatccacaggaacttc

SEQ ID NO: 69396 - RNA, 27 nt, synthetic construct
  misc_feature 1..27: note = Maltase-glucoamylase (110-118)
  source 1..27: mol_type = other RNA
aagagactgcccagcccttccctcttc

SEQ ID NO: 69397 - RNA, 27 nt, synthetic construct
  misc_feature 1..27: note = Serum albumin (468-476)
  source 1..27: mol_type = other RNA
aagagaatgccctgcgccgaggactac

SEQ ID NO: 69398 - RNA, 27 nt, synthetic construct
  misc_feature 1..27: note = Gamma-interferon-inducible protein 16 (202-210)
  source 1..27: mol_type = other RNA
aagagacccgtgatcgtcaaagttctg

SEQ ID NO: 69399 - RNA, 27 nt, synthetic construct
  misc_feature 1..27: note = Band 4.1-like protein 2 (451-459)
  source 1..27: mol_type = other RNA
aagagaagcaacttctacatcaaagtg

SEQ ID NO: 69400 - RNA, 42 nt, synthetic construct
  misc_feature 1..42: note = Glyceraldehyde-3-phosphate dehydrogenase (117-130)
  source 1..42: mol_type = other RNA
aagagagtgatcattagcgccccctccgctgacgcacctatg

SEQ ID NO: 69401 - RNA, 27 nt, synthetic construct
  misc_feature 1..27: note = Glia-derived nexin (299-307)
  source 1..27: mol_type = other RNA
aagagagtgcaggtcatcctgcccaaa

SEQ ID NO: 69402 - RNA, 27 nt, synthetic construct
  misc_feature 1..27: note = Growth/differentiation factor 15 (45-53)
  source 1..27: mol_type = other RNA
aagagatacgaggacctgctcaccagg

SEQ ID NO: 69403 - RNA, 27 nt, synthetic construct
  misc_feature 1..27: note = Insulin-like growth factor 1 receptor (927-935)
  source 1..27: mol_type = other RNA
aagagatacgagaacttcatccacctg

SEQ ID NO: 69404 - RNA, 27 nt, synthetic construct
  misc_feature 1..27: note = Protein zyg-11 homolog B (68-76)
  source 1..27: mol_type = other RNA
aagagatacagcgagagggccttcttt

SEQ ID NO: 69405 - RNA, 30 nt, synthetic construct
  misc_feature 1..30: note = Glycerol-3-phosphate acyltransferase 4 (407-416)
  source 1..30: mol_type = other RNA
aagagcgccatcgctagacagggcgggctg

SEQ ID NO: 69406 - RNA, 27 nt, synthetic construct
  misc_feature 1..27: note = Centrosomal protein C10orf90 (33-41)
  source 1..27: mol_type = other RNA
aagagcgacttcaccaaagagacactg

SEQ ID NO: 69407 - RNA, 30 nt, synthetic construct
  misc_feature 1..30: note = Transcriptional protein SWT1 (56-65)
  source 1..30: mol_type = other RNA
aagagcgaccacaccgatgtgctgtactat

SEQ ID NO: 69408 - RNA, 27 nt, synthetic construct
  misc_feature 1..27: note = 78 kDa glucose-regulated protein (335-343)
  source 1..27: mol_type = other RNA
aagagcgacatcgatgagattgtgctg

SEQ ID NO: 69409 - RNA, 27 nt, synthetic construct
  misc_feature 1..27: note = Copine-9 (167-175)
  source 1..27: mol_type = other RNA
aagagcgaccccttcctggtgttttac

SEQ ID NO: 69410 - RNA, 27 nt, synthetic construct
  misc_feature 1..27: note = Pre-mRNA-processing factor 40 homolog A (164-172)
  source 1..27: mol_type = other RNA
aagagcgactccggcaaaccctactat

SEQ ID NO: 69411 - RNA, 48 nt, synthetic construct
  misc_feature 1..48: note = Serine/threonine-protein phosphatase 2A 65 kDa regulatory subunit A alpha isoform (202-217)
  source 1..48: mol_type = other RNA
aagagcgagatcattcccatgttctccaacctggcctctgacgaacag

SEQ ID NO: 69412 - RNA, 27 nt, synthetic construct
  misc_feature 1..27: note = Minor histocompatibility antigen H13 (234-242)
  source 1..27: mol_type = other RNA
aagagcttcgaggcccccatcaaactg

SEQ ID NO: 69413 - RNA, 54 nt, synthetic construct
  misc_feature 1..54: note = Protein HEG homolog 1 (147-164)
  source 1..54: mol_type = other RNA
aagagcggcgacttccagatgtccccctacgccgagtatcctaaaaacccaaga

SEQ ID NO: 69414 - RNA, 27 nt, synthetic construct
  misc_feature 1..27: note = Protein LAP2 (860-868)
  source 1..27: mol_type = other RNA
aagagcggccccgtggggtccgtcgtt

SEQ ID NO: 69415 - RNA, 24 nt, synthetic construct
  misc_feature 1..24: note = Vacuolar protein sorting-associated protein 16 homolog (82-89)
  source 1..24: mol_type = other RNA
aagagcggccccgtggtctccctg

SEQ ID NO: 69416 - RNA, 27 nt, synthetic construct
  misc_feature 1..27: note = Alpha-catulin (373-381)
  source 1..27: mol_type = other RNA
aagagcatcgccgaggaactggagctc

SEQ ID NO: 69417 - RNA, 27 nt, synthetic construct
  misc_feature 1..27: note = 60S ribosomal protein L35 (52-60)
  source 1..27: mol_type = other RNA
aagagcatcgccagagtgctgaccgtc

SEQ ID NO: 69418 - RNA, 27 nt, synthetic construct
  misc_feature 1..27: note = Syntenin-1 (130-138)
  source 1..27: mol_type = other RNA
aagagcatcgacaacggcattttcgtg

SEQ ID NO: 69419 - RNA, 27 nt, synthetic construct
  misc_feature 1..27: note = Protein disulfide-isomerase TMX3 (71-79)
  source 1..27: mol_type = other RNA
aagagcatcggctcccccgtgaaagtc

SEQ ID NO: 69420 - RNA, 27 nt, synthetic construct
  misc_feature 1..27: note = Protein RTF2 homolog (83-91)
  source 1..27: mol_type = other RNA
aagagcatcaaaaacgtgaccgagctg

SEQ ID NO: 69421 - RNA, 27 nt, synthetic construct
  misc_feature 1..27: note = Adenylosuccinate synthetase isozyme 2 (203-211)
  source 1..27: mol_type = other RNA
aagagcatctaccccaccctggagatt

SEQ ID NO: 69422 - RNA, 27 nt, synthetic construct
  misc_feature 1..27: note = Selenoprotein N (53-61)
  source 1..27: mol_type = other RNA
aagagcaaagacggcttcctgggggtg

SEQ ID NO: 69423 - RNA, 30 nt, synthetic construct
  misc_feature 1..30: note = Nucleolar pre-ribosomal-associated protein 1 (429-438)
  source 1..30: mol_type = other RNA
aagagcctgaccaaactccttatcatgaag

SEQ ID NO: 69424 - RNA, 27 nt, synthetic construct
  misc_feature 1..27: note = Astrotactin-2 (499-507)
  source 1..27: mol_type = other RNA
aagagcatgcccttcatcacctacctg

SEQ ID NO: 69425 - RNA, 33 nt, synthetic construct
  misc_feature 1..33: note = Transmembrane protein 98 (144-154)
  source 1..33: mol_type = other RNA
aagagcatgtacccccctctggacccaaaactc

SEQ ID NO: 69426 - RNA, 27 nt, synthetic construct
  misc_feature 1..27: note = CD44 antigen (303-311)
  source 1..27: mol_type = other RNA
aagagccaggagatggtgcacctggtc

SEQ ID NO: 69427 - RNA, 27 nt, synthetic construct
  misc_feature 1..27: note = Targeting protein for Xklp2 (686-694)
  source 1..27: mol_type = other RNA
aagagctccgaccagcccctgaccgtg

SEQ ID NO: 69428 - RNA, 27 nt, synthetic construct
  misc_feature 1..27: note = Chromodomain-helicase-DNA-binding protein 1 (88-96)
  source 1..27: mol_type = other RNA
aagagctccccctctatcctggccgtg

SEQ ID NO: 69429 - RNA, 27 nt, synthetic construct
  misc_feature 1..27: note = Leucine-tRNA ligase, cytoplasmic (28-36)
  source 1..27: mol_type = other RNA
aagagcaccggcaacttcctgacactc

SEQ ID NO: 69430 - RNA, 27 nt, synthetic construct
  misc_feature 1..27: note = 116 kDa U5 small nuclear ribonucleoprotein component (182-190)
  source 1..27: mol_type = other RNA
aagagcacccccgtgacagtcgttctg

SEQ ID NO: 69431 - RNA, 27 nt, synthetic construct
  misc_feature 1..27: note = Lysosome-associated membraneoprotein 2 (402-410)
  source 1..27: mol_type = other RNA
aagagctacgccggctatcagaccctg

SEQ ID NO: 69432 - RNA, 27 nt, synthetic construct
  misc_feature 1..27: note = 2',3'-cyclic-nucleotide 3'-phosphodiesterase (256-264)
  source 1..27: mol_type = other RNA
aagagctactccaaagccttcaccctg

SEQ ID NO: 69433 - RNA, 27 nt, synthetic construct
  misc_feature 1..27: note = Zinc finger protein ZIC 2 (401-409)
  source 1..27: mol_type = other RNA
aagagctacacccacccctcctctctg

SEQ ID NO: 69434 - RNA, 24 nt, synthetic construct
  misc_feature 1..24: note = Ubiquitin carboxyl-terminal hydrolase 8 (34-41)
  source 1..24: mol_type = other RNA
aagagctacgtgcactccgccctg

SEQ ID NO: 69435 - RNA, 27 nt, synthetic construct
  misc_feature 1..27: note = Peptidyl-prolyl cis-trans isomerase A (31-39)
  source 1..27: mol_type = other RNA
aagaccgccgagaacttcagagctctg

SEQ ID NO: 69436 - RNA, 27 nt, synthetic construct
  misc_feature 1..27: note = Endothelin B receptor (359-367)
  source 1..27: mol_type = other RNA
aagaccgccaaagactggtggctgttc

SEQ ID NO: 69437 - RNA, 27 nt, synthetic construct
  misc_feature 1..27: note = V-type proton ATPase 116 kDa subunit a isoform 4 (360-368)
  source 1..27: mol_type = other RNA
aagaccgccccccctacattcaacaga

SEQ ID NO: 69438 - RNA, 27 nt, synthetic construct
  misc_feature 1..27: note = RAC-gamma serine/threonine-protein kinase (32-40)
  source 1..27: mol_type = other RNA
aagaccgacggcagcttcatcgggtac

SEQ ID NO: 69439 - RNA, 33 nt, synthetic construct
  misc_feature 1..33: note = Growth/differentiation factor 15 (274-284)
  source 1..33: mol_type = other RNA
aagaccgacacaggcgtgagcctgcagacttac

SEQ ID NO: 69440 - RNA, 51 nt, synthetic construct
  misc_feature 1..51: note = Myeloid-derived growth factor (132-148)
  source 1..51: mol_type = other RNA
aagaccgaggaattcgaggtgacaaaaactgccgtcgctcacagacccggc

SEQ ID NO: 69441 - RNA, 27 nt, synthetic construct
  misc_feature 1..27: note = Myosin-IIIb (442-450)
  source 1..27: mol_type = other RNA
aagaccgagagcgcccacctgatcgtg

SEQ ID NO: 69442 - RNA, 27 nt, synthetic construct
  misc_feature 1..27: note = Cullin-4B (327-335)
  source 1..27: mol_type = other RNA
aagaccatcgacggcattctgctcctt

SEQ ID NO: 69443 - RNA, 27 nt, synthetic construct
  misc_feature 1..27: note = UPF0769 protein C21orf59 (114-122)
  source 1..27: mol_type = other RNA
aagaccatcgaggaagccaaagctatt

SEQ ID NO: 69444 - RNA, 30 nt, synthetic construct
  misc_feature 1..30: note = Protein FAM184A (180-189)
  source 1..30: mol_type = other RNA
aagaccatcggcaaactgaagacagagctc

SEQ ID NO: 69445 - RNA, 27 nt, synthetic construct
  misc_feature 1..27: note = Probable C-mannosyltransferase DPY19L4 (129-137)
  source 1..27: mol_type = other RNA
aagaccatcaacgccgtgcagcaaatg

SEQ ID NO: 69446 - RNA, 27 nt, synthetic construct
  misc_feature 1..27: note = Transcription factor SOX-8 (16-24)
  source 1..27: mol_type = other RNA
aagaccctgggcaaactctggagactt

SEQ ID NO: 69447 - RNA, 24 nt, synthetic construct
  misc_feature 1..24: note = Transcription factor Dp-2 (49-56)
  source 1..24: mol_type = other RNA
aagaccctgggccccatcaacgtg

SEQ ID NO: 69448 - RNA, 60 nt, synthetic construct
  misc_feature 1..60: note = Uncharacterized protein KIAA1109 (4603-4622)
  source 1..60: mol_type = other RNA
aagaccatgacaagcaacctggagaaatcctctcaggaacaactccttgacgccgctcac

SEQ ID NO: 69449 - RNA, 27 nt, synthetic construct
  misc_feature 1..27: note = Catenin beta-1 (288-296)
  source 1..27: mol_type = other RNA
aagaccaacgtgaaattcctggccatc

SEQ ID NO: 69450 - RNA, 24 nt, synthetic construct
  misc_feature 1..24: note = RNA-binding protein Raly (143-150)
  source 1..24: mol_type = other RNA
aagaccaacgtgcccgtcaaactg

SEQ ID NO: 69451 - RNA, 27 nt, synthetic construct
  misc_feature 1..27: note = THO complex subunit 2 (892-900)
  source 1..27: mol_type = other RNA
aagacccccaacttcagcacactgctc

SEQ ID NO: 69452 - RNA, 27 nt, synthetic construct
  misc_feature 1..27: note = HEAT repeat-containing protein 2 (446-454)
  source 1..27: mol_type = other RNA
aagacccccagcgcctccggcctgctc

SEQ ID NO: 69453 - RNA, 27 nt, synthetic construct
  misc_feature 1..27: note = Eukaryotic translation initiation factor 4 gamma 1 (717-725)
  source 1..27: mol_type = other RNA
aagacccaggacctgttcagaagggtg

SEQ ID NO: 69454 - RNA, 27 nt, synthetic construct
  misc_feature 1..27: note = Angiomotin-like protein 1 (332-340)
  source 1..27: mol_type = other RNA
aagacccaggagcacggcctgttctac

SEQ ID NO: 69455 - RNA, 27 nt, synthetic construct
  misc_feature 1..27: note = Cohesin subunit SA-2 (965-973)
  source 1..27: mol_type = other RNA
aagaccagagaggccatcgctatgctg

SEQ ID NO: 69456 - RNA, 24 nt, synthetic construct
  misc_feature 1..24: note = Golgin subfamily B member 1 (382-389)
  source 1..24: mol_type = other RNA
aagaccagccacatcctgtccctc

SEQ ID NO: 69457 - RNA, 24 nt, synthetic construct
  misc_feature 1..24: note = ATP-binding cassette sub-family F member 3 (144-151)
  source 1..24: mol_type = other RNA
aagaccagcaaccccctggtgctc

SEQ ID NO: 69458 - RNA, 27 nt, synthetic construct
  misc_feature 1..27: note = Hemicentin-1 (971-979)
  source 1..27: mol_type = other RNA
aagaccacaagcgtggtcgttcacgtg

SEQ ID NO: 69459 - RNA, 27 nt, synthetic construct
  misc_feature 1..27: note = Vigilin (294-302)
  source 1..27: mol_type = other RNA
aagaccacaactatcgccgtggaggtc

SEQ ID NO: 69460 - RNA, 24 nt, synthetic construct
  misc_feature 1..24: note = Rab3 GTPase-activating protein non-catalytic subunit (1174-1181)
  source 1..24: mol_type = other RNA
aagaccgtgaaacccctgagcctc

SEQ ID NO: 69461 - RNA, 27 nt, synthetic construct
  misc_feature 1..27: note = 40S ribosomal protein S11 (136-144)
  source 1..27: mol_type = other RNA
aagaccgtgagattcaacgtcctgaaa

SEQ ID NO: 69462 - RNA, 30 nt, synthetic construct; identical to SEQ ID NO: 45235
  misc_feature 1..30: note = Melanocyte protein PMEL (154-163)
  source 1..30: mol_type = other RNA

SEQ ID NO: 69463 - RNA, 27 nt, synthetic construct
  misc_feature 1..27: note = Spermidine synthase (57-65)
  source 1..27: mol_type = other RNA
aagacctacggcaacgtgctggtcctc

SEQ ID NO: 69464 - RNA, 39 nt, synthetic construct
  misc_feature 1..39: note = 26S protease regulatory subunit 7 (34-46)
  source 1..39: mol_type = other RNA
aagacctacggccagagcacatattccagacaaatcaaa

SEQ ID NO: 69465 - RNA, 27 nt, synthetic construct
  misc_feature 1..27: note = Cyclin-dependent kinase 16 (470-478)
  source 1..27: mol_type = other RNA
aagacctacaactatcccaaatacaga

SEQ ID NO: 69466 - RNA, 27 nt, synthetic construct
  misc_feature 1..27: note = Non-receptor tyrosine-protein kinase TNK1 (260-268)
  source 1..27: mol_type = other RNA
aaggtggccgacttcggcctggtcaga

SEQ ID NO: 69467 - RNA, 27 nt, synthetic construct
  misc_feature 1..27: note = GMP synthase (glutamine-hydrolyzing) (292-300)
  source 1..27: mol_type = other RNA
aaggtggccgacggcttcaaagtcgtt

SEQ ID NO: 69468 - RNA, 27 nt, synthetic construct
  misc_feature 1..27: note = Dynactin subunit 3 (32-40)
  source 1..27: mol_type = other RNA
aaggtggccgacggcctggtcaaagtt

SEQ ID NO: 69469 - RNA, 27 nt, synthetic construct
  misc_feature 1..27: note = Phosphoglycerate kinase 1 (216-224)
  source 1..27: mol_type = other RNA
aaggtggccgacaaaatccagctgatt

SEQ ID NO: 69470 - RNA, 27 nt, synthetic construct
  misc_feature 1..27: note = Disks large homolog 1 (368-376)
  source 1..27: mol_type = other RNA
aaggtggccaaacccaccagcatgtac

SEQ ID NO: 69471 - RNA, 30 nt, synthetic construct
  misc_feature 1..30: note = GPI mannosyltransferase 1 (15-24)
  source 1..30: mol_type = other RNA
aaggtggcccccgctggcgtcttcggggtt

SEQ ID NO: 69472 - RNA, 36 nt, synthetic construct
  misc_feature 1..36: note = Coatomer subunit delta (123-134)
  source 1..36: mol_type = other RNA
aaggtggcccccgctcctgcaagaccaagcggcccg

SEQ ID NO: 69473 - RNA, 27 nt, synthetic construct
  misc_feature 1..27: note = Asparagine synthetase (glutamine-hydrolyzing) (112-120)
  source 1..27: mol_type = other RNA
aaggtggccagcgtcgagatggttaaa

SEQ ID NO: 69474 - RNA, 69 nt, synthetic construct
  misc_feature 1..69: note = Pyridoxal kinase (152-174)
  source 1..69: mol_type = other RNA
aaggtggacgccgtcttcgttggcaccggggatctgtttgctgcaatgctccttgcctggacacacaaa

SEQ ID NO: 69475 - RNA, 27 nt, synthetic construct
  misc_feature 1..27: note = Melanoma-associated antigen 4 (113-121)
  source 1..27: mol_type = other RNA
aaggtggacgagctggcccacttcctc

SEQ ID NO: 69476 - RNA, 27 nt, synthetic construct
  misc_feature 1..27: note = Centromere protein F (738-746)
  source 1..27: mol_type = other RNA
aaggtggacgagctgaccacagaaatc

SEQ ID NO: 69477 - RNA, 27 nt, synthetic construct
  misc_feature 1..27: note = Beta-secretase 2 (314-322)
  source 1..27: mol_type = other RNA
aaggtgttcgacgccgtcgttgaggct

SEQ ID NO: 69478 - RNA, 27 nt, synthetic construct
  misc_feature 1..27: note = Transcription factor HES-1 (214-222)
  source 1..27: mol_type = other RNA
aaggtgttcggcgggtttcaggtcgtt

SEQ ID NO: 69479 - RNA, 24 nt, synthetic construct
  misc_feature 1..24: note = Myelin expression factor 2 (123-130)
  source 1..24: mol_type = other RNA
aaggtgggcgaggtcacctacgtt

SEQ ID NO: 69480 - RNA, 24 nt, synthetic construct
  misc_feature 1..24: note = Uridine phosphorylase 1 (99-106)
  source 1..24: mol_type = other RNA
aaggtgggccccgtcctgagcgtt

SEQ ID NO: 69481 - RNA, 33 nt, synthetic construct
  misc_feature 1..33: note = Nucleosome-remodeling factor subunit BPTF (2095-2105)
  source 1..33: mol_type = other RNA
aaggtgggcagccccgccaccgtcacattccag

SEQ ID NO: 69482 - RNA, 18 nt, synthetic construct
  misc_feature 1..18: note = E3 ubiquitin/ISG15 ligase TRIM25 (596-601)
  source 1..18: mol_type = other RNA
aaggtgcacctgatgtac

SEQ ID NO: 69483 - RNA, 30 nt, synthetic construct
  misc_feature 1..30: note = Unconventional myosin-Id (255-264)
  source 1..30: mol_type = other RNA
aaggtgatcggcttcaaacccgaggaaatt

SEQ ID NO: 69484 - RNA, 39 nt, synthetic construct
  misc_feature 1..39: note = Titin (15654-15666)
  source 1..39: mol_type = other RNA
aaggtgaaagaggtcaccaagacaagcgttactctgacg

SEQ ID NO: 69485 - RNA, 27 nt, synthetic construct
  misc_feature 1..27: note = Fructose-bisphosphate aldolase A (262-270)
  source 1..27: mol_type = other RNA
aaggtgctggccgctgtctacaaagca

SEQ ID NO: 69486 - RNA, 153 nt, synthetic construct
  misc_feature 1..153: note = Titin (21056-21106)
  source 1..153: mol_type = other RNA
aaggtgctggacacccccgccgcttgccagaaactccaagtcaagcacgttagcagaggcacagtgactcttctgtgggatcctccattgatcgacgggggatccccgattataaactacgtaatcgagaaaagggatgcaacgaagcggacc

SEQ ID NO: 69487 - RNA, 33 nt, synthetic construct
  misc_feature 1..33: note = F-box only protein 32 (98-108)
  source 1..33: mol_type = other RNA
aaggtgctggaggaccagcaaaacatcagactc

SEQ ID NO: 69488 - RNA, 27 nt, synthetic construct
  misc_feature 1..27: note = Melanoma-associated antigen 4 (286-294)
  source 1..27: mol_type = other RNA
aaggtgctggagcacgtcgttagagtg

SEQ ID NO: 69489 - RNA, 27 nt, synthetic construct
  misc_feature 1..27: note = Chloride transport protein 6 (183-191)
  source 1..27: mol_type = other RNA
aaggtgctgggcgtcctcttcagcgtt

SEQ ID NO: 69490 - RNA, 27 nt, synthetic construct
  misc_feature 1..27: note = SLIT-ROBO Rho GTPase-activating protein 2 (155-163)
  source 1..27: mol_type = other RNA
aaggtgctgaacgagctctacagcgtc

SEQ ID NO: 69491 - RNA, 27 nt, synthetic construct
  misc_feature 1..27: note = Signal recognition particle receptor subunit alpha (345-353)
  source 1..27: mol_type = other RNA
aaggtgatgggcaccttcagcacagtc

SEQ ID NO: 69492 - RNA, 27 nt, synthetic construct
  misc_feature 1..27: note = 40S ribosomal protein S16 (32-40)
  source 1..27: mol_type = other RNA
aaggtgaacggcagacccctggagatg

SEQ ID NO: 69493 - RNA, 24 nt, synthetic construct
  misc_feature 1..24: note = E3 ubiquitin-protein ligase RING1 (361-368)
  source 1..24: mol_type = other RNA
aaggtgagcagacccctggagctc

SEQ ID NO: 69494 - RNA, 27 nt, synthetic construct
  misc_feature 1..27: note = Solute carrier family 41 member 2 (192-200)
  source 1..27: mol_type = other RNA
aaggtgaccgaggtcttcatcctggtt

SEQ ID NO: 69495 - RNA, 27 nt, synthetic construct
  misc_feature 1..27: note = Hom s 1 (524-532)
  source 1..27: mol_type = other RNA
aaggtggtcgagatcgttaaaaagctg

SEQ ID NO: 69496 - RNA, 18 nt, synthetic construct
  misc_feature 1..18: note = Poly (ADP-ribose) polymerase 12 (512-517)
  source 1..18: mol_type = other RNA
aaggtgtggaacctgttc

SEQ ID NO: 69497 - RNA, 30 nt, synthetic construct
  misc_feature 1..30: note = Unconventional myosin-Id (707-716)
  source 1..30: mol_type = other RNA
aaggtgtggagaggcaccctggccaggatg

SEQ ID NO: 69498 - RNA, 30 nt, synthetic construct
  misc_feature 1..30: note = Hemicentin-1 (2662-2671)
  source 1..30: mol_type = other RNA
aaggtgtacatcccccctattataaacaaa

SEQ ID NO: 69499 - RNA, 27 nt, synthetic construct
  misc_feature 1..27: note = Probable helicase with zinc finger domain (500-508)
  source 1..27: mol_type = other RNA
aagtacgcccagaacggccaactgttc

SEQ ID NO: 69500 - RNA, 27 nt, synthetic construct
  misc_feature 1..27: note = DNA cross-link repair 1A protein (370-378)
  source 1..27: mol_type = other RNA
aagtacgacgagggcctgtatagattc

SEQ ID NO: 69501 - RNA, 27 nt, synthetic construct
  misc_feature 1..27: note = EH domain-containing protein 2 (452-460)
  source 1..27: mol_type = other RNA
aagtacgacgagatcttctataacctg

SEQ ID NO: 69502 - RNA, 27 nt, synthetic construct
  misc_feature 1..27: note = E3 ubiquitin-protein ligase SIAH1 (198-206)
  source 1..27: mol_type = other RNA
aagtacgacggccaccagcaattcttt

SEQ ID NO: 69503 - RNA, 27 nt, synthetic construct
  misc_feature 1..27: note = Dedicator of cytokinesis protein 4 (92-100)
  source 1..27: mol_type = other RNA
aagtacggcgacatgagagtgaccatg

SEQ ID NO: 69504 - RNA, 24 nt, synthetic construct
  misc_feature 1..24: note = Serine/threonine-protein kinase PLK2 (513-520)
  source 1..24: mol_type = other RNA
aagtacggcttcgggtatcagctg

SEQ ID NO: 69505 - RNA, 27 nt, synthetic construct
  misc_feature 1..27: note = Protein SOGA1 (415-423)
  source 1..27: mol_type = other RNA
aagtacggcatcgtgcaggagttcttt

SEQ ID NO: 69506 - RNA, 24 nt, synthetic construct
  misc_feature 1..24: note = Glycerol-3-phosphate acyltransferase 4 (365-372)
  source 1..24: mol_type = other RNA
aagtacggcatggtgacctatctg

SEQ ID NO: 69507 - RNA, 27 nt, synthetic construct
  misc_feature 1..27: note = RNA-binding motif protein, X chromosome (30-38)
  source 1..27: mol_type = other RNA
aagtacggcagaatcgtggaggtcctg

SEQ ID NO: 69508 - RNA, 27 nt, synthetic construct
  misc_feature 1..27: note = Non-specific lipid-transfer protein (92-100)
  source 1..27: mol_type = other RNA
aagtacggcaccaaaatcgagcacttc

SEQ ID NO: 69509 - RNA, 30 nt, synthetic construct
  misc_feature 1..30: note = Paired amphipathic helix protein Sin3b (300-309)
  source 1..30: mol_type = other RNA
aagtacggcaccctgcaggagttcagcttt

SEQ ID NO: 69510 - RNA, 27 nt, synthetic construct
  misc_feature 1..27: note = Kinase D-interacting substrate of 220 kDa (126-134)
  source 1..27: mol_type = other RNA
aagtacggcaccacacccctggtgtgg

SEQ ID NO: 69511 - RNA, 27 nt, synthetic construct
  misc_feature 1..27: note = Peroxisome proliferator-activated receptor delta isoform 4 (185-193)
  source 1..27: mol_type = other RNA
aagtacggcgtgcacgaggccatcttc

SEQ ID NO: 69512 - RNA, 27 nt, synthetic construct
  misc_feature 1..27: note = Tubulin-tyrosine ligase-like protein 12 (451-459)
  source 1..27: mol_type = other RNA
aagtacatcgagagccccgtgctgttc

SEQ ID NO: 69513 - RNA, 27 nt, synthetic construct
  misc_feature 1..27: note = Protein yippee-like 3 (104-112)
  source 1..27: mol_type = other RNA
aagtacatcattgagctgaaccacatg

SEQ ID NO: 69514 - RNA, 27 nt, synthetic construct
  misc_feature 1..27: note = 3-hydroxy-3-methylglutaryl-coenzyme A reductase (89-97)
  source 1..27: mol_type = other RNA
aagtacatcctgggcattgccgggctc

SEQ ID NO: 69515 - RNA, 27 nt, synthetic construct
  misc_feature 1..27: note = Alpha-fetoprotein (403-411)
  source 1..27: mol_type = other RNA
aagtacatccaggagagccaagccctg

SEQ ID NO: 69516 - RNA, 27 nt, synthetic construct
  misc_feature 1..27: note = Membrane progestin receptor alpha (193-201)
  source 1..27: mol_type = other RNA
aagtacatccagaaacccggcctgctc

SEQ ID NO: 69517 - RNA, 27 nt, synthetic construct
  misc_feature 1..27: note = Centrosomal protein of 135 kDa (857-865)
  source 1..27: mol_type = other RNA
aagtacatcaccgaggtgagcagatgg

SEQ ID NO: 69518 - RNA, 27 nt, synthetic construct
  misc_feature 1..27: note = Transmembrane emp24 domain-containing protein 5 (84-92)
  source 1..27: mol_type = other RNA
aagtacatcaccggcacagacattctg

SEQ ID NO: 69519 - RNA, 27 nt, synthetic construct
  misc_feature 1..27: note = Kinesin light chain 1 (266-274)
  source 1..27: mol_type = other RNA
aagtacaaagacgccgctaacctgctc

SEQ ID NO: 69520 - RNA, 27 nt, synthetic construct
  misc_feature 1..27: note = Melanoma-associated antigen B1 (141-149)
  source 1..27: mol_type = other RNA
aagtacaaagaccacttcaccgagatc

SEQ ID NO: 69521 - RNA, 27 nt, synthetic construct
  misc_feature 1..27: note = Melanoma-associated antigen C2 (173-181)
  source 1..27: mol_type = other RNA
aagtacaaagactatttccccgtgatc

SEQ ID NO: 69522 - RNA, 27 nt, synthetic construct
  misc_feature 1..27: note = Kinesin light chain 4 (191-199)
  source 1..27: mol_type = other RNA
aagtacaaagaggccgctcacctgctc

SEQ ID NO: 69523 - RNA, 27 nt, synthetic construct
  misc_feature 1..27: note = Antizyme inhibitor 1 (341-349)
  source 1..27: mol_type = other RNA
aagtacaaagaggacgaacccctgttc

SEQ ID NO: 69524 - RNA, 27 nt, synthetic construct
  misc_feature 1..27: note = Protein disulfide-isomerase (91-99)
  source 1..27: mol_type = other RNA
aagtacaaacccgagagcgaagagctg

SEQ ID NO: 69525 - RNA, 27 nt, synthetic construct
  misc_feature 1..27: note = Peroxisomal acyl-coenzyme A oxidase 3 (120-128)
  source 1..27: mol_type = other RNA
aagtacctgctccacagccttgtgttc

SEQ ID NO: 69526 - RNA, 27 nt, synthetic construct
  misc_feature 1..27: note = Gem-associated protein 4 (188-196)
  source 1..27: mol_type = other RNA
aagtacctgcccgccctcgacgagttc

SEQ ID NO: 69527 - RNA, 33 nt, synthetic construct
  misc_feature 1..33: note = Phosphatidylinositol-glycan biosynthesis class W protein (189-199)
  source 1..33: mol_type = other RNA
aagtacatggagggcagcaaactgcactatttc

SEQ ID NO: 69528 - RNA, 30 nt, synthetic construct
  misc_feature 1..30: note = Histone acetyltransferase type B catalytic subunit (207-216)
  source 1..30: mol_type = other RNA
aagtacaacaaagacggcgccaccctgttc

SEQ ID NO: 69529 - RNA, 27 nt, synthetic construct
  misc_feature 1..27: note = Formin-like protein 3 (158-166)
  source 1..27: mol_type = other RNA
aagtaccccgacctggccaacttctgg

SEQ ID NO: 69530 - RNA, 27 nt, synthetic construct
  misc_feature 1..27: note = Rho guanine nucleotide exchange factor 12 (939-947)
  source 1..27: mol_type = other RNA
aagtaccccctgctccttgacaacatc

SEQ ID NO: 69531 - RNA, 27 nt, synthetic construct
  misc_feature 1..27: note = Rho guanine nucleotide exchange factor 11 (884-892)
  source 1..27: mol_type = other RNA
aagtaccccctgctccttgagagcatc

SEQ ID NO: 69532 - RNA, 27 nt, synthetic construct
  misc_feature 1..27: note = Protein lifeguard 4 (139-147)
  source 1..27: mol_type = other RNA
aagtaccccctgaacctctatcttctg

SEQ ID NO: 69533 - RNA, 27 nt, synthetic construct
  misc_feature 1..27: note = Ceramide glucosyltransferase (104-112)
  source 1..27: mol_type = other RNA
aagtaccccaacgtggacgccagactg

SEQ ID NO: 69534 - RNA, 21 nt, synthetic construct
  misc_feature 1..21: note = ATP-dependent RNA helicase A (169-175)
  source 1..21: mol_type = other RNA
aagtaccccagccctttcttt

SEQ ID NO: 69535 - RNA, 27 nt, synthetic construct
  misc_feature 1..27: note = Early endosome antigen 1 (387-395)
  source 1..27: mol_type = other RNA
aagtaccagcacctgaaagccgagttc

SEQ ID NO: 69536 - RNA, 27 nt, synthetic construct
  misc_feature 1..27: note = Tetratricopeptide repeat protein 9C (156-164)
  source 1..27: mol_type = other RNA
aagtacagagacgccgtgagcaggtat

SEQ ID NO: 69537 - RNA, 27 nt, synthetic construct
  misc_feature 1..27: note = Zinc finger protein ZFAT (350-358)
  source 1..27: mol_type = other RNA
aagtacagcgacgtgaaaaacctgatc

SEQ ID NO: 69538 - RNA, 27 nt, synthetic construct
  misc_feature 1..27: note = Host cell factor 1 (105-113)
  source 1..27: mol_type = other RNA
aagtacagcaacgacctgtatgagctc

SEQ ID NO: 69539 - RNA, 27 nt, synthetic construct
  misc_feature 1..27: note = Serine-protein kinase ATM (331-339)
  source 1..27: mol_type = other RNA
aagtacagctccggcttcagaaacatc

SEQ ID NO: 69540 - RNA, 27 nt, synthetic construct
  misc_feature 1..27: note = Zinc finger MYM-type protein 4 (1301-1309)
  source 1..27: mol_type = other RNA
aagtacagcaccaaaatgacatatctg

SEQ ID NO: 69541 - RNA, 72 nt, synthetic construct
  misc_feature 1..72: note = Actin, gamma-enteric smooth muscle (294-317)
  source 1..72: mol_type = other RNA
aagtacagcgtgtggatcggcgggtccattctggcctctctctcaaccttccagcaaatgtggataagtaaa

SEQ ID NO: 69542 - RNA, 27 nt, synthetic construct
  misc_feature 1..27: note = DNA/RNA-binding protein KIN17 (311-319)
  source 1..27: mol_type = other RNA
aagtacaccgccgtggtcaaaatgatc

SEQ ID NO: 69543 - RNA, 27 nt, synthetic construct
  misc_feature 1..27: note = Signal peptidase complex subunit 2 (73-81)
  source 1..27: mol_type = other RNA
aagtacgtggagaacttcggcctgatc

SEQ ID NO: 69544 - RNA, 27 nt, synthetic construct
  misc_feature 1..27: note = Sorting nexin-29 (103-111)
  source 1..27: mol_type = other RNA
aagtacgtgggcgccgtccagatgctg

SEQ ID NO: 69545 - RNA, 24 nt, synthetic construct
  misc_feature 1..24: note = Zinc finger protein 195 (148-155)
  source 1..24: mol_type = other RNA
aagtacgtgaaaatcttcgacaac

SEQ ID NO: 69546 - RNA, 27 nt, synthetic construct
  misc_feature 1..27: note = Zinc finger protein 92 (117-125)
  source 1..27: mol_type = other RNA
aagtacgtgaaagtcttccacaagttt

SEQ ID NO: 69547 - RNA, 27 nt, synthetic construct
  misc_feature 1..27: note = Zinc finger protein 708 (80-88)
  source 1..27: mol_type = other RNA
aagtacgtgaaagtcttccacaagtat

SEQ ID NO: 69548 - RNA, 27 nt, synthetic construct
  misc_feature 1..27: note = Tubulin beta chain (78-86)
  source 1..27: mol_type = other RNA
aagtacgtgcccagagccatcctggtc

SEQ ID NO: 69549 - RNA, 27 nt, synthetic construct
  misc_feature 1..27: note = Centromere/kinetochore protein zw10 homolog (130-138)
  source 1..27: mol_type = other RNA
aagtacgtgaccggcgcccagagactg

SEQ ID NO: 69550 - RNA, 27 nt, synthetic construct
  misc_feature 1..27: note = Ubiquitin carboxyl-terminal hydrolase 8 (65-73)
  source 1..27: mol_type = other RNA
aagtacgtgaccgtctataacctgatc

SEQ ID NO: 69551 - RNA, 27 nt, synthetic construct
  misc_feature 1..27: note = Digestive organ expansion factor homolog (526-534)
  source 1..27: mol_type = other RNA
aagtactatagacagaccctgctcttc

SEQ ID NO: 69552 - RNA, 30 nt, synthetic construct
  misc_feature 1..30: note = Probable E3 ubiquitin-protein ligase HERC1 (3206-3215)
  source 1..30: mol_type = other RNA
ctggccgctggcctcgagagccttgggctg

SEQ ID NO: 69553 - RNA, 33 nt, synthetic construct
  misc_feature 1..33: note = Glutamate receptor ionotropic, kainate 2 (827-837)
  source 1..33: mol_type = other RNA
ctggccgctggcctcgtgcttagcgtcttcgtt

SEQ ID NO: 69554 - RNA, 27 nt, synthetic construct
  misc_feature 1..27: note = Ankyrin repeat domain-containing protein 17 (848-856)
  source 1..27: mol_type = other RNA
ctggccgctggccccctccctccaggg

SEQ ID NO: 69555 - RNA, 24 nt, synthetic construct
  misc_feature 1..24: note = Spectrin beta chain, non-erythrocytic 4 (1779-1786)
  source 1..24: mol_type = other RNA
ctggccgctgtgaaccagatggtc

SEQ ID NO: 69556 - RNA, 27 nt, synthetic construct
  misc_feature 1..27: note = Vimentin (88-96)
  source 1..27: mol_type = other RNA
ctggccgacgctatcaacaccgagttc

SEQ ID NO: 69557 - RNA, 27 nt, synthetic construct
  misc_feature 1..27: note = Exonuclease 3'-5' domain-containing protein 2 (31-39)
  source 1..27: mol_type = other RNA
ctggccgacggcaccatcctcaaggtg

SEQ ID NO: 69558 - RNA, 27 nt, synthetic construct
  misc_feature 1..27: note = Kinesin-associated protein 3 (289-297)
  source 1..27: mol_type = other RNA
ctggccgaggacaccagaacagaactc

SEQ ID NO: 69559 - RNA, 24 nt, synthetic construct
  misc_feature 1..24: note = Kinectin (601-608)
  source 1..24: mol_type = other RNA
ctggccgaggaactccacaaggtg

SEQ ID NO: 69560 - RNA, 24 nt, synthetic construct
  misc_feature 1..24: note = CREB-binding protein (654-661)
  source 1..24: mol_type = other RNA
ctggccgagaagatctacaaaatt

SEQ ID NO: 69561 - RNA, 24 nt, synthetic construct
  misc_feature 1..24: note = Protein shisa-4 (79-86)
  source 1..24: mol_type = other RNA
ctggccttcagccccaagaccatc

SEQ ID NO: 69562 - RNA, 24 nt, synthetic construct
  misc_feature 1..24: note = DNA-dependent protein kinase catalytic subunit (29-36)
  source 1..24: mol_type = other RNA
ctggccggccaccagctcatcaga

SEQ ID NO: 69563 - RNA, 30 nt, synthetic construct
  misc_feature 1..30: note = Signal transducer and activator of transcription 3 (221-230)
  source 1..30: mol_type = other RNA
ctggccggcctccttagcgctatggagtac

SEQ ID NO: 69564 - RNA, 27 nt, synthetic construct
  misc_feature 1..27: note = Phosphoacetylglucosamine mutase (519-527)
  source 1..27: mol_type = other RNA
ctggcccacgaggtgagcctcgctgtc

SEQ ID NO: 69565 - RNA, 33 nt, synthetic construct
  misc_feature 1..33: note = Ancient ubiquitous protein 1 (320-330)
  source 1..33: mol_type = other RNA
ctggccaagaccggctgcgtggacctcacaatc

SEQ ID NO: 69566 - RNA, 27 nt, synthetic construct
  misc_feature 1..27: note = Splicing factor 3B subunit 3 (765-773)
  source 1..27: mol_type = other RNA
ctggccctcgagaagcttggcgctgtg

SEQ ID NO: 69567 - RNA, 24 nt, synthetic construct
  misc_feature 1..24: note = EH domain-containing protein 1 (503-510)
  source 1..24: mol_type = other RNA
ctggccaaccacctcatcaaggtg

SEQ ID NO: 69568 - RNA, 24 nt, synthetic construct
  misc_feature 1..24: note = Alpha-2-macroglobulin-like protein 1 (37-44)
  source 1..24: mol_type = other RNA
ctggcccccgaccctagcctcgtg

SEQ ID NO: 69569 - RNA, 24 nt, synthetic construct
  misc_feature 1..24: note = COP9 signalosome complex subunit 1 (358-365)
  source 1..24: mol_type = other RNA
ctggccccccacgtgagaaccctc

SEQ ID NO: 69570 - RNA, 27 nt, synthetic construct
  misc_feature 1..27: note = WAS/WASL-interacting protein family member 2 (294-302)
  source 1..27: mol_type = other RNA
ctggccccccctccaccgaccagcgct

SEQ ID NO: 69571 - RNA, 24 nt, synthetic construct
  misc_feature 1..24: note = Ancient ubiquitous protein 1 (300-307)
  source 1..24: mol_type = other RNA
ctggcccagagagtgaaggaggtc

SEQ ID NO: 69572 - RNA, 27 nt, synthetic construct
  misc_feature 1..27: note = Fatty acid synthase (899-907)
  source 1..27: mol_type = other RNA
ctggccagagctctcggccttggggtg

SEQ ID NO: 69573 - RNA, 30 nt, synthetic construct
  misc_feature 1..30: note = Molybdate-anion transporter (181-190)
  source 1..30: mol_type = other RNA
ctggccgtggtcgctggcgttgcagccgag

SEQ ID NO: 69574 - RNA, 54 nt, synthetic construct
  misc_feature 1..54: note = Epidermal growth factor receptor (5-22)
  source 1..54: mol_type = other RNA
ctggccgtggtcagcctcaacatcacctcccttggcctgagatctttgaaggag

SEQ ID NO: 69575 - RNA, 21 nt, synthetic construct
  misc_feature 1..21: note = Serum albumin (484-490)
  source 1..21: mol_type = other RNA
ctgtgcgtgctccacgagaag

SEQ ID NO: 69576 - RNA, 69 nt, synthetic construct
  misc_feature 1..69: note = Actin, cytoplasmic 2 (73-95)
  source 1..69: mol_type = other RNA
ctgtgctacgtggccctcgacttcgagcaggaaatggctaccgcagccagctcctcttcacttgagaag

SEQ ID NO: 69577 - RNA, 24 nt, synthetic construct
  misc_feature 1..24: note = Coiled-coil domain-containing protein 93 (525-532)
  source 1..24: mol_type = other RNA
ctggacgataagaaagtgtacctc

SEQ ID NO: 69578 - RNA, 30 nt, synthetic construct
  misc_feature 1..30: note = Melanoma inhibitory activity protein 3 (157-166)
  source 1..30: mol_type = other RNA
ctggacgataccgccaagaacctcagagtg

SEQ ID NO: 69579 - RNA, 24 nt, synthetic construct
  misc_feature 1..24: note = Axin-1 (509-516)
  source 1..24: mol_type = other RNA
ctggacgagcacgtgcagagagtc

SEQ ID NO: 69580 - RNA, 24 nt, synthetic construct
  misc_feature 1..24: note = Probable ATP-dependent RNA helicase DDX27 (86-93)
  source 1..24: mol_type = other RNA
ctggacgagaagatcgaaaaagtg

SEQ ID NO: 69581 - RNA, 24 nt, synthetic construct
  misc_feature 1..24: note = U6 snRNA-associated Sm-like protein LSm8 (17-24)
  source 1..24: mol_type = other RNA
ctggacgagagccacgaaagagtg

SEQ ID NO: 69582 - RNA, 111 nt, synthetic construct
  misc_feature 1..111: note = Collagen alpha-1(XX) chain (189-225)
  source 1..111: mol_type = other RNA
ctggacttcctccagcttggcgccctggctgggttgttaagcagactgatctgccaaaggctacagggaggttccccccggcagggccctgcagccgcgccagctctcgat

SEQ ID NO: 69583 - RNA, 24 nt, synthetic construct
  misc_feature 1..24: note = Prelamin-A/C (55-62)
  source 1..24: mol_type = other RNA
ctggacttccagaagaacatctac

SEQ ID NO: 69584 - RNA, 30 nt, synthetic construct
  misc_feature 1..30: note = ATP-binding cassette sub-family A member 13 (447-456)
  source 1..30: mol_type = other RNA
ctggacggcgccctcagaaacgctatcgca

SEQ ID NO: 69585 - RNA, 21 nt, synthetic construct
  misc_feature 1..21: note = Mitochondrial dicarboxylate carrier (145-151)
  source 1..21: mol_type = other RNA
ctggacggcctctacagagtg

SEQ ID NO: 69586 - RNA, 21 nt, synthetic construct
  misc_feature 1..21: note = Heat shock protein HSP 90-beta (497-503)
  source 1..21: mol_type = other RNA
ctggacaagaaagtggagaag

SEQ ID NO: 69587 - RNA, 24 nt, synthetic construct
  misc_feature 1..24: note = RHO/RAC effector protein (1024-1031)
  source 1..24: mol_type = other RNA
ctggacaagaacgatcacagcctc

SEQ ID NO: 69588 - RNA, 21 nt, synthetic construct
  misc_feature 1..21: note = Small subunit processome component 20 homolog (301-307)
  source 1..21: mol_type = other RNA
ctggacctccacaccaaggtg

SEQ ID NO: 69589 - RNA, 24 nt, synthetic construct
  misc_feature 1..24: note = Exportin-1 (715-722)
  source 1..24: mol_type = other RNA
ctggacatgctcaacgtgtacaag

SEQ ID NO: 69590 - RNA, 27 nt, synthetic construct
  misc_feature 1..27: note = Mediator of RNA polymerase II transcription subunit 12 (1430-1438)
  source 1..27: mol_type = other RNA
ctggacatgctcagcgtgcttatcaac

SEQ ID NO: 69591 - RNA, 24 nt, synthetic construct
  misc_feature 1..24: note = Serine/threonine-protein kinase N1 (459-466)
  source 1..24: mol_type = other RNA
ctggacaacgagagacacgaagtg

SEQ ID NO: 69592 - RNA, 27 nt, synthetic construct
  misc_feature 1..27: note = SWI/SNF-related matrix-associated actin-dependent regulator of chromatin subfamily A member 5 (921-929)
  source 1..27: mol_type = other RNA
ctggacaccaagatcggcagatacaaa

SEQ ID NO: 69593 - RNA, 27 nt, synthetic construct
  misc_feature 1..27: note = Serine-protein kinase ATM (1050-1058)
  source 1..27: mol_type = other RNA
ctggaggccgacccctacagcaagtgg

SEQ ID NO: 69594 - RNA, 39 nt, synthetic construct
  misc_feature 1..39: note = Erlin-2 (327-339)
  source 1..39: mol_type = other RNA
ctggaggacgaacccctcgagaccgccacaaaggaaaac

SEQ ID NO: 69595 - RNA, 30 nt, synthetic construct
  misc_feature 1..30: note = Spectrin beta chain, non-erythrocytic 1 (740-749)
  source 1..30: mol_type = other RNA
ctggaggaagccagcctccttcaccagttc

SEQ ID NO: 69596 - RNA, 27 nt, synthetic construct
  misc_feature 1..27: note = Structural maintenance of chromosomes protein 1A (367-375)
  source 1..27: mol_type = other RNA
ctggaggaaaaccaggtgaagaaatac

SEQ ID NO: 69597 - RNA, 39 nt, synthetic construct
  misc_feature 1..39: note = Moesin (16-28)
  source 1..39: mol_type = other RNA
ctggagttcgccatccagcccaacaccacaggcaagcaa

SEQ ID NO: 69598 - RNA, 42 nt, synthetic construct
  misc_feature 1..42: note = Moesin (16-29)
  source 1..42: mol_type = other RNA
ctggagttcgccatccagcccaacaccacaggcaagcaactc

SEQ ID NO: 69599 - RNA, 30 nt, synthetic construct; identical to SEQ ID NO: 45372
  misc_feature 1..30: note = Synemin (898-907)
  source 1..30: mol_type = other RNA

SEQ ID NO: 69600 - RNA, 21 nt, synthetic construct
  misc_feature 1..21: note = Melanoma-associated antigen 4 (288-294)
  source 1..21: mol_type = other RNA
ctggagcacgtggtcagagtt

SEQ ID NO: 69601 - RNA, 27 nt, synthetic construct
  misc_feature 1..27: note = Keratin, type II cytoskeletal 1 (477-485)
  source 1..27: mol_type = other RNA
ctggagatcgccacctacagaacactc

SEQ ID NO: 69602 - RNA, 27 nt, synthetic construct
  misc_feature 1..27: note = Integrator complex subunit 11 (341-349)
  source 1..27: mol_type = other RNA
ctggagatggaaggcagacaggtgctc

SEQ ID NO: 69603 - RNA, 27 nt, synthetic construct
  misc_feature 1..27: note = Voltage-dependent calcium channel subunit alpha-2/delta-1 (566-574)
  source 1..27: mol_type = other RNA
ctggagaacgacatcaaggtggaaatt

SEQ ID NO: 69604 - RNA, 27 nt, synthetic construct
  misc_feature 1..27: note = Histone acetyltransferase type B catalytic subunit (44-52)
  source 1..27: mol_type = other RNA
ctggagaacgacatcagaaccttcttt

SEQ ID NO: 69605 - RNA, 51 nt, synthetic construct
  misc_feature 1..51: note = Thioredoxin domain-containing protein 15 (185-201)
  source 1..51: mol_type = other RNA
ctggagaacttcaccctcaagatccttaatatgagccaggacctgatggat

SEQ ID NO: 69606 - RNA, 36 nt, synthetic construct
  misc_feature 1..36: note = HLA class I histocompatibility antigen, A-2 alpha chain (171-182)
  source 1..36: mol_type = other RNA
ctggagaacggcaaggaaaccctccagagaacagac

SEQ ID NO: 69607 - RNA, 27 nt, synthetic construct
  misc_feature 1..27: note = V-type proton ATPase subunit H (318-326)
  source 1..27: mol_type = other RNA
ctggagaacctcgaacagcaaaagtac

SEQ ID NO: 69608 - RNA, 45 nt, synthetic construct
  misc_feature 1..45: note = Tubulin beta-6 chain (68-82)
  source 1..45: mol_type = other RNA
ctggagcccggcaccatggacagcgtgagatccgggcctttcgga

SEQ ID NO: 69609 - RNA, 27 nt, synthetic construct
  misc_feature 1..27: note = DNA repair protein RAD51 homolog 3 (91-99)
  source 1..27: mol_type = other RNA
ctggagcaggaacacacccaaggcttc

SEQ ID NO: 69610 - RNA, 27 nt, synthetic construct
  misc_feature 1..27: note = Laminin subunit gamma-1 (1296-1304)
  source 1..27: mol_type = other RNA
ctggagcagctcatcgaccaaaagctt

SEQ ID NO: 69611 - RNA, 24 nt, synthetic construct
  misc_feature 1..24: note = Serine/arginine-rich splicing factor 3 (26-33)
  source 1..24: mol_type = other RNA
ctggagagagccttcggctactat

SEQ ID NO: 69612 - RNA, 24 nt, synthetic construct
  misc_feature 1..24: note = Melanoma-associated antigen 4 (137-144)
  source 1..24: mol_type = other RNA
ctggagagagtgatcaagaactac

SEQ ID NO: 69613 - RNA, 42 nt, synthetic construct
  misc_feature 1..42: note = Kin of IRRE-like protein 1 (338-351)
  source 1..42: mol_type = other RNA
ctggagagatacaccgtggaaaggacaaacagcggctccggg

SEQ ID NO: 69614 - RNA, 21 nt, synthetic construct
  misc_feature 1..21: note = Cyclic AMP-dependent transcription factor ATF-4 (38-44)
  source 1..21: mol_type = other RNA
ctggaggtggccaagcacttc

SEQ ID NO: 69615 - RNA, 66 nt, synthetic construct
  misc_feature 1..66: note = Calpain-2 catalytic subunit (459-480)
  source 1..66: mol_type = other RNA
ctgttcgcccagctcgctggcgaggacgcagaaatcagcgcctttgagcttcaaaccattctgaga

SEQ ID NO: 69616 - RNA, 27 nt, synthetic construct
  misc_feature 1..27: note = Vacuolar protein sorting-associated protein 8 homolog (853-861)
  source 1..27: mol_type = other RNA
ctgttcgaccaggtgctcgagtttctt

SEQ ID NO: 69617 - RNA, 30 nt, synthetic construct
  misc_feature 1..30: note = Titin (9698-9707)
  source 1..30: mol_type = other RNA
ctgttctttgtgagcgagccccagtccatc

SEQ ID NO: 69618 - RNA, 24 nt, synthetic construct
  misc_feature 1..24: note = Protein MCM10 homolog (334-341)
  source 1..24: mol_type = other RNA
ctgttcggcgaggtgcacaaggcc

SEQ ID NO: 69619 - RNA, 24 nt, synthetic construct
  misc_feature 1..24: note = Guanine nucleotide-binding protein subunit beta-5 (321-328)
  source 1..24: mol_type = other RNA
ctgttcggccacgagaacagagtg

SEQ ID NO: 69620 - RNA, 30 nt, synthetic construct
  misc_feature 1..30: note = Cullin-7 (1270-1279)
  source 1..30: mol_type = other RNA
ctgttcggccccagagccgcttttctcctt

SEQ ID NO: 69621 - RNA, 30 nt, synthetic construct
  misc_feature 1..30: note = HLA class II histocompatibility antigen, DP alpha 1 chain (167-176)
  source 1..30: mol_type = other RNA
ctgttcctccccagaaccgactacagcttt

SEQ ID NO: 69622 - RNA, 33 nt, synthetic construct
  misc_feature 1..33: note = ER membrane protein complex subunit 1 (430-440)
  source 1..33: mol_type = other RNA
ctgttcctccagcaacttgccggcaaggtggtc

SEQ ID NO: 69623 - RNA, 24 nt, synthetic construct
  misc_feature 1..24: note = Asparagine synthetase (glutamine-hydrolyzing) (155-162)
  source 1..24: mol_type = other RNA
ctgttcaacaatgccgtgaagaaa

SEQ ID NO: 69624 - RNA, 27 nt, synthetic construct
  misc_feature 1..27: note = Chloride transport protein 6 (104-112)
  source 1..27: mol_type = other RNA
ctgttcacccagctcaagtttggcgtg

SEQ ID NO: 69625 - RNA, 30 nt, synthetic construct
  misc_feature 1..30: note = Cytochrome c oxidase subunit 1 (347-356)
  source 1..30: mol_type = other RNA
ctgttcaccgtgggcgggctcacaggaatc

SEQ ID NO: 69626 - RNA, 30 nt, synthetic construct
  misc_feature 1..30: note = Protein-glutamine gamma-glutamyltransferase 5 (627-636)
  source 1..30: mol_type = other RNA
ctgggcgccgctgtggtcaaccagcccctc

SEQ ID NO: 69627 - RNA, 33 nt, synthetic construct
  misc_feature 1..33: note = Elastin (48-58)
  source 1..33: mol_type = other RNA
ctgggcgccctcgggggaggtgctcttggcccc

SEQ ID NO: 69628 - RNA, 21 nt, synthetic construct
  misc_feature 1..21: note = Proteasome subunit beta type-4 (122-128)
  source 1..21: mol_type = other RNA
ctgggcgacgggcacagctac

SEQ ID NO: 69629 - RNA, 27 nt, synthetic construct
  misc_feature 1..27: note = Mitogen-activated protein kinase 4 (26-34)
  source 1..27: mol_type = other RNA
ctgggcttcggggtgaacggactcgtc

SEQ ID NO: 69630 - RNA, 21 nt, synthetic construct
  misc_feature 1..21: note = Lipopolysaccharide-responsive and beige-like anchor protein (138-144)
  source 1..21: mol_type = other RNA
ctgggcaagatcgagaaagtg

SEQ ID NO: 69631 - RNA, 21 nt, synthetic construct
  misc_feature 1..21: note = EH domain-containing protein 4 (484-490)
  source 1..21: mol_type = other RNA
ctgggcaagatctggaaactc

SEQ ID NO: 69632 - RNA, 27 nt, synthetic construct
  misc_feature 1..27: note = Probable E3 ubiquitin-protein ligase HECTD4 (712-720)
  source 1..27: mol_type = other RNA
ctgggcaagtacgccgagagcatcctc

SEQ ID NO: 69633 - RNA, 60 nt, synthetic construct
  misc_feature 1..60: note = 14-3-3 protein beta/alpha (170-189)
  source 1..60: mol_type = other RNA
ctgggcctcgcccttaacttcagcgtgttttactatgagatcctgaattcccccgaaaag

SEQ ID NO: 69634 - RNA, 102 nt, synthetic construct
  misc_feature 1..102: note = Heat shock protein HSP 90-alpha (510-543)
  source 1..102: mol_type = other RNA
ctgggcctcgggatcgacgaggatgaccccaccgccgatgacacaagcgctgcagtgactgaagagatgcctccacttgaaggagatgacgatacgtccaga

SEQ ID NO: 69635 - RNA, 30 nt, synthetic construct
  misc_feature 1..30: note = HLA class II histocompatibility antigen, DQ alpha 1 chain (223-232)
  source 1..30: mol_type = other RNA
ctgggcctcagcgtggggcttgtcggaatc

SEQ ID NO: 69636 - RNA, 27 nt, synthetic construct
  misc_feature 1..27: note = Splicing factor 3B subunit 2 (104-112)
  source 1..27: mol_type = other RNA
ctgggcccccctccaccgctcagagtg

SEQ ID NO: 69637 - RNA, 30 nt, synthetic construct
  misc_feature 1..30: note = Ankyrin repeat domain-containing protein 17 (882-891)
  source 1..30: mol_type = other RNA
ctgggccaggggatcctcaccgagacacaa

SEQ ID NO: 69638 - RNA, 33 nt, synthetic construct
  misc_feature 1..33: note = Transketolase (38-48)
  source 1..33: mol_type = other RNA
ctgggccaggggctcggagccgcttgcggtatg

SEQ ID NO: 69639 - RNA, 24 nt, synthetic construct
  misc_feature 1..24: note = 60S ribosomal protein L13a (138-145)
  source 1..24: mol_type = other RNA
ctgggcagactcgcccacgaggtg

SEQ ID NO: 69640 - RNA, 72 nt, synthetic construct
  misc_feature 1..72: note = Filamin-B (1896-1919)
  source 1..72: mol_type = other RNA
ctgggcagcgccgctgacttcctccttgatatctccgagaccgacctgtcttcattgacagcaagtattaag

SEQ ID NO: 69641 - RNA, 21 nt, synthetic construct
  misc_feature 1..21: note = YY1-associated protein 1 (323-329)
  source 1..21: mol_type = other RNA
ctgggcagcgagaccagatac

SEQ ID NO: 69642 - RNA, 30 nt, synthetic construct
  misc_feature 1..30: note = Cadherin-2 (351-360)
  source 1..30: mol_type = other RNA
ctgcacgccggcaccatgctcacaactttc

SEQ ID NO: 69643 - RNA, 24 nt, synthetic construct
  misc_feature 1..24: note = Mortality factor 4-like protein 1 (291-298)
  source 1..24: mol_type = other RNA
ctgcacgacttcctcaagtacctt

SEQ ID NO: 69644 - RNA, 30 nt, synthetic construct
  misc_feature 1..30: note = Cyclin-G-associated kinase (18-27)
  source 1..30: mol_type = other RNA
ctgcacagcgaggtgggcgccgggcccgct

SEQ ID NO: 69645 - RNA, 96 nt, synthetic construct
  misc_feature 1..96: note = Glia-derived nexin (345-376)
  source 1..96: mol_type = other RNA
ctgcacgtgagccatatcctccagaaggccaaaattgaggtctccgaagacggcaccaaggcttctgcagccacaactgcgatacttatcgctaga

SEQ ID NO: 69646 - RNA, 102 nt, synthetic construct
  misc_feature 1..102: note = Glia-derived nexin (345-378)
  source 1..102: mol_type = other RNA
ctgcacgtgagccatatcctccagaaggccaaaattgaggtctccgaagacggcaccaaggcttctgcagccacaactgcgatacttatcgctagatcaagt

SEQ ID NO: 69647 - RNA, 30 nt, synthetic construct
  misc_feature 1..30: note = Cyclin-dependent kinase 1 (135-144)
  source 1..30: mol_type = other RNA
ctgatcgacgataagggcaccattaaactc

SEQ ID NO: 69648 - RNA, 27 nt, synthetic construct
  misc_feature 1..27: note = CCR4-NOT transcription complex subunit 3 (77-85)
  source 1..27: mol_type = other RNA
ctgatcgacaacagaaagctcattgag

SEQ ID NO: 69649 - RNA, 27 nt, synthetic construct
  misc_feature 1..27: note = Eukaryotic translation initiation factor 3 subunit L (66-74)
  source 1..27: mol_type = other RNA
ctgatcgaccagaaggtgtacgagctc

SEQ ID NO: 69650 - RNA, 24 nt, synthetic construct
  misc_feature 1..24: note = Dystonin (1766-1773)
  source 1..24: mol_type = other RNA
ctgatcgacagagagaccatgttc

SEQ ID NO: 69651 - RNA, 30 nt, synthetic construct
  misc_feature 1..30: note = Elongation factor 2 (102-111)
  source 1..30: mol_type = other RNA
ctgatcgacagccccggccacgtggatttc

SEQ ID NO: 69652 - RNA, 27 nt, synthetic construct
  misc_feature 1..27: note = Ubiquitin-like domain-containing CTD phosphatase 1 (226-234)
  source 1..27: mol_type = other RNA
ctgatcgacgtgaagcccctcggcgtc

SEQ ID NO: 69653 - RNA, 24 nt, synthetic construct
  misc_feature 1..24: note = Programmed cell death protein 5 (92-99)
  source 1..24: mol_type = other RNA
ctgatcgagattctcaagaaagtg

SEQ ID NO: 69654 - RNA, 24 nt, synthetic construct
  misc_feature 1..24: note = Nuclear pore complex protein Nup205 (249-256)
  source 1..24: mol_type = other RNA
ctgatcggccacctcgagagagtg

SEQ ID NO: 69655 - RNA, 72 nt, synthetic construct
  misc_feature 1..72: note = Vimentin (443-466)
  source 1..72: mol_type = other RNA
ctgatcaagaccgtggagacaagagacggccaggtcattaacgaaactagccaacaccatgatgacctcgag

SEQ ID NO: 69656 - RNA, 30 nt, synthetic construct; identical to SEQ ID NO: 45429
  misc_feature 1..30: note = Syndetin (107-116)
  source 1..30: mol_type = other RNA

SEQ ID NO: 69657 - RNA, 27 nt, synthetic construct
  misc_feature 1..27: note = Small subunit processome component 20 homolog (1298-1306)
  source 1..27: mol_type = other RNA
ctgatcctcccccacgtgcctgccatt

SEQ ID NO: 69658 - RNA, 27 nt, synthetic construct
  misc_feature 1..27: note = Patatin-like phospholipase domain-containing protein 2 (154-162)
  source 1..27: mol_type = other RNA
ctgatcccccctagcctccagggcgtg

SEQ ID NO: 69659 - RNA, 27 nt, synthetic construct
  misc_feature 1..27: note = Histone deacetylase 6 (119-127)
  source 1..27: mol_type = other RNA
ctgatccaggagggcctccttgacaga

SEQ ID NO: 69660 - RNA, 27 nt, synthetic construct
  misc_feature 1..27: note = Membrane-bound transcription factor site-2 protease (165-173)
  source 1..27: mol_type = other RNA
ctgatcagcggcgtggtccacgagatt

SEQ ID NO: 69661 - RNA, 24 nt, synthetic construct
  misc_feature 1..24: note = Asparagine synthetase (glutamine-hydrolyzing) (264-271)
  source 1..24: mol_type = other RNA
ctgatcagcaagtacattagaaaa

SEQ ID NO: 69662 - RNA, 33 nt, synthetic construct
  misc_feature 1..33: note = Histone H4 (19-29)
  source 1..33: mol_type = other RNA
ctgatctacgaggaaaccagaggcgtgctcaag

SEQ ID NO: 69663 - RNA, 33 nt, synthetic construct
  misc_feature 1..33: note = Endoplasmic reticulum-Golgi intermediate compartment protein 3 (328-338)
  source 1..33: mol_type = other RNA
ctgatctaccacagcgccagagctattcagaag

SEQ ID NO: 69664 - RNA, 30 nt, synthetic construct
  misc_feature 1..30: note = Zinc finger protein 638 (6-15)
  source 1..30: mol_type = other RNA
ctgaaggccctcaacagcaattccatctac

SEQ ID NO: 69665 - RNA, 24 nt, synthetic construct
  misc_feature 1..24: note = Protein FAM171B (21-28)
  source 1..24: mol_type = other RNA
ctgaaggccagactcgtgcccgct

SEQ ID NO: 69666 - RNA, 33 nt, synthetic construct
  misc_feature 1..33: note = E3 ubiquitin-protein ligase UHRF1 (701-711)
  source 1..33: mol_type = other RNA
ctgaaggacagacccgccagcggctcccctttc

SEQ ID NO: 69667 - RNA, 21 nt, synthetic construct
  misc_feature 1..21: note = Putative RNA exonuclease NEF-sp (343-349)
  source 1..21: mol_type = other RNA
ctgaagttcctcgccaaagtg

SEQ ID NO: 69668 - RNA, 39 nt, synthetic construct
  misc_feature 1..39: note = Triosephosphate isomerase (155-167)
  source 1..39: mol_type = other RNA
ctgaagcccgagttcgtggacatcattaacgccaaacag

SEQ ID NO: 69669 - RNA, 42 nt, synthetic construct
  misc_feature 1..42: note = Transmembrane protein 181 (194-207)
  source 1..42: mol_type = other RNA
ctgaagcccatccagattctcagcaaccctctttccacctac

SEQ ID NO: 69670 - RNA, 24 nt, synthetic construct
  misc_feature 1..24: note = Clathrin light chain A (223-230)
  source 1..24: mol_type = other RNA
ctgaagcaggcccccctcgtgcac

SEQ ID NO: 69671 - RNA, 24 nt, synthetic construct
  misc_feature 1..24: note = Eukaryotic translation initiation factor 4 gamma 1 (786-793)
  source 1..24: mol_type = other RNA
ctgaaggtgcccaccacagagaaa

SEQ ID NO: 69672 - RNA, 30 nt, synthetic construct
  misc_feature 1..30: note = T-complex protein 1 subunit eta (12-21)
  source 1..30: mol_type = other RNA
ctgctcgccgctgagttccttaagcaggtg

SEQ ID NO: 69673 - RNA, 33 nt, synthetic construct
  misc_feature 1..33: note = E3 ubiquitin-protein ligase UBR4 (195-205)
  source 1..33: mol_type = other RNA
ctgctcgccgctggcagccagcttgacaccgtg

SEQ ID NO: 69674 - RNA, 27 nt, synthetic construct
  misc_feature 1..27: note = Torsin-1B (16-24)
  source 1..27: mol_type = other RNA
ctgctcgccgctagagtggtcgcagcc

SEQ ID NO: 69675 - RNA, 27 nt, synthetic construct
  misc_feature 1..27: note = Vacuolar protein sorting-associated protein 18 homolog (338-346)
  source 1..27: mol_type = other RNA
ctgctcgccgacagagtggaggctgtc

SEQ ID NO: 69676 - RNA, 27 nt, synthetic construct
  misc_feature 1..27: note = Protein zyg-11 homolog B (139-147)
  source 1..27: mol_type = other RNA
ctgctcgccgacgtgacccaccttctg

SEQ ID NO: 69677 - RNA, 27 nt, synthetic construct
  misc_feature 1..27: note = Tumor suppressor candidate 3 (48-56)
  source 1..27: mol_type = other RNA
ctgctcgccgagaaggtggaacagctt

SEQ ID NO: 69678 - RNA, 36 nt, synthetic construct
  misc_feature 1..36: note = Sulfhydryl oxidase 1 (651-662)
  source 1..36: mol_type = other RNA
ctgctcgccgagagcagagctgaaaagaacaggctt

SEQ ID NO: 69679 - RNA, 33 nt, synthetic construct
  misc_feature 1..33: note = Poly (ADP-ribose) polymerase 10 (465-475)
  source 1..33: mol_type = other RNA
ctgctcgccggccttggggacgtggctctgttg

SEQ ID NO: 69680 - RNA, 27 nt, synthetic construct
  misc_feature 1..27: note = General transcription factor IIH subunit 3 (91-99)
  source 1..27: mol_type = other RNA
ctgctcgccggcagccttgctaaggca

SEQ ID NO: 69681 - RNA, 27 nt, synthetic construct
  misc_feature 1..27: note = E3 ubiquitin-protein ligase MARCH6 (678-686)
  source 1..27: mol_type = other RNA
ctgctcgccggcgtggtcccccttctg

SEQ ID NO: 69682 - RNA, 30 nt, synthetic construct
  misc_feature 1..30: note = DNA-directed RNA polymerases I, II, and III subunit RPABC5 (49-58)
  source 1..30: mol_type = other RNA
ctgctcgcccacgtggaccttatcgagaag

SEQ ID NO: 69683 - RNA, 75 nt, synthetic construct
  misc_feature 1..75: note = RWD domain-containing protein 1 (86-110)
  source 1..75: mol_type = other RNA
ctgctcgcccttcaggctgaggaaaacctgggcatggtgatgatcttcaccttggtcacagcagttcaagagaag

SEQ ID NO: 69684 - RNA, 27 nt, synthetic construct
  misc_feature 1..27: note = N-terminal kinase-like protein (58-66)
  source 1..27: mol_type = other RNA
ctgctcgcccccaagcttaacgaggct

SEQ ID NO: 69685 - RNA, 27 nt, synthetic construct
  misc_feature 1..27: note = Actin-binding protein anillin (610-618)
  source 1..27: mol_type = other RNA
ctgctcgccccccttgctcagaccgtg

SEQ ID NO: 69686 - RNA, 27 nt, synthetic construct
  misc_feature 1..27: note = Transmembrane and coiled-coil domain-containing protein 3 (411-419)
  source 1..27: mol_type = other RNA
ctgctcgcccccgtgctttggagagct

SEQ ID NO: 69687 - RNA, 24 nt, synthetic construct
  misc_feature 1..24: note = Receptor-interacting serine/threonine-protein kinase 4 (150-157)
  source 1..24: mol_type = other RNA
ctgctcgacgcccactaccatgtg

SEQ ID NO: 69688 - RNA, 27 nt, synthetic construct
  misc_feature 1..27: note = Brefeldin A-inhibited guanine nucleotide-exchange protein 1 (1477-1485)
  source 1..27: mol_type = other RNA
ctgctcgacgatatcttcgcccagctt

SEQ ID NO: 69689 - RNA, 33 nt, synthetic construct
  misc_feature 1..33: note = ETS translocation variant 1 (241-251)
  source 1..33: mol_type = other RNA
ctgctcgacgatcccagcaactcccacttcatc

SEQ ID NO: 69690 - RNA, 30 nt, synthetic construct
  misc_feature 1..30: note = Contactin-associated protein-like 4 (266-275)
  source 1..30: mol_type = other RNA
ctgctcgacgatcagcactggcatagcgtg

SEQ ID NO: 69691 - RNA, 27 nt, synthetic construct
  misc_feature 1..27: note = Protein FAM179B (402-410)
  source 1..27: mol_type = other RNA
ctgctcgacgatagcaacttcaaggtg

SEQ ID NO: 69692 - RNA, 24 nt, synthetic construct
  misc_feature 1..24: note = von Willebrand factor A domain-containing protein 8 (512-519)
  source 1..24: mol_type = other RNA
ctgctcgacggcatccacagagtg

SEQ ID NO: 69693 - RNA, 27 nt, synthetic construct
  misc_feature 1..27: note = Leucine-rich repeat-containing protein 40 (571-579)
  source 1..27: mol_type = other RNA
ctgctcgacggcaaccccttcagagtg

SEQ ID NO: 69694 - RNA, 24 nt, synthetic construct
  misc_feature 1..24: note = Uridine-cytidine kinase-like 1 (454-461)
  source 1..24: mol_type = other RNA
ctgctcgaccacgatgtgcccgag

SEQ ID NO: 69695 - RNA, 27 nt, synthetic construct
  misc_feature 1..27: note = Armadillo repeat protein deleted in velo-cardio-facial syndrome (408-416)
  source 1..27: mol_type = other RNA
ctgctcgaccaccccagagccgaggtg

SEQ ID NO: 69696 - RNA, 27 nt, synthetic construct
  misc_feature 1..27: note = Integrator complex subunit 8 (617-625)
  source 1..27: mol_type = other RNA
ctgctcgacatccacacccatgaggcc

SEQ ID NO: 69697 - RNA, 27 nt, synthetic construct
  misc_feature 1..27: note = RNA-binding protein 20 (68-76)
  source 1..27: mol_type = other RNA
ctgctcgacaagaaccccttcagcgtg

SEQ ID NO: 69698 - RNA, 24 nt, synthetic construct
  misc_feature 1..24: note = Small subunit processome component 20 homolog (300-307)
  source 1..24: mol_type = other RNA
ctgctcgaccttcacaccaaggtg

SEQ ID NO: 69699 - RNA, 27 nt, synthetic construct
  misc_feature 1..27: note = AP-1 complex subunit beta-1 (395-403)
  source 1..27: mol_type = other RNA
ctgctcgaccttatccagaccaaggtg

SEQ ID NO: 69700 - RNA, 27 nt, synthetic construct
  misc_feature 1..27: note = ERI1 exoribonuclease 3 (155-163)
  source 1..27: mol_type = other RNA
ctgctcgaccccaacgtgaagagcatc

SEQ ID NO: 69701 - RNA, 30 nt, synthetic construct
  misc_feature 1..30: note = DDB1- and CUL4-associated factor 16 (80-89)
  source 1..30: mol_type = other RNA
ctgctcgaccccagcacccctgtgcacatc

SEQ ID NO: 69702 - RNA, 24 nt, synthetic construct
  misc_feature 1..24: note = Coiled-coil domain-containing protein 180 (707-714)
  source 1..24: mol_type = other RNA
ctgctcgaccagcttagacaacag

SEQ ID NO: 69703 - RNA, 21 nt, synthetic construct
  misc_feature 1..21: note = Protein Bop (113-119)
  source 1..21: mol_type = other RNA
ctgctcgacagattccttgcc

SEQ ID NO: 69704 - RNA, 24 nt, synthetic construct
  misc_feature 1..24: note = Nuclear pore complex protein Nup205 (319-326)
  source 1..24: mol_type = other RNA
ctgctcgacagaatcgtgagcgtc

SEQ ID NO: 69705 - RNA, 30 nt, synthetic construct
  misc_feature 1..30: note = Plexin-B3 (450-459)
  source 1..30: mol_type = other RNA
ctgctcgacagctccggctctcacctttac

SEQ ID NO: 69706 - RNA, 27 nt, synthetic construct
  misc_feature 1..27: note = Protein PML (195-203)
  source 1..27: mol_type = other RNA
ctgctcgacagctcccactctgagctt

SEQ ID NO: 69707 - RNA, 33 nt, synthetic construct
  misc_feature 1..33: note = Asparagine synthetase (glutamine-hydrolyzing) (42-52)
  source 1..33: mol_type = other RNA
ctgctcgacaccgccaacaagaaagtgttcctt

SEQ ID NO: 69708 - RNA, 24 nt, synthetic construct
  misc_feature 1..24: note = Myosin-10 (265-272)
  source 1..24: mol_type = other RNA
ctgctcgagaagagcagagccgtg

SEQ ID NO: 69709 - RNA, 30 nt, synthetic construct
  misc_feature 1..30: note = Serine/threonine-protein kinase Kist (127-136)
  source 1..30: mol_type = other RNA
ctgctcgagatgttcagcggcatgaagctt

SEQ ID NO: 69710 - RNA, 30 nt, synthetic construct
  misc_feature 1..30: note = Serine/threonine-protein kinase MRCK gamma (979-988)
  source 1..30: mol_type = other RNA
ctgctcttcgacgcccccgatcttagactg

SEQ ID NO: 69711 - RNA, 27 nt, synthetic construct
  misc_feature 1..27: note = Cartilage-associated protein (322-330)
  source 1..27: mol_type = other RNA
ctgctcttcgaccagaacgataaggtg

SEQ ID NO: 69712 - RNA, 39 nt, synthetic construct
  misc_feature 1..39: note = Protein wntless homolog (297-309)
  source 1..39: mol_type = other RNA
ctgctcttcggcgacatcagacaggggattttttacgcc

SEQ ID NO: 69713 - RNA, 27 nt, synthetic construct
  misc_feature 1..27: note = Cytoplasmic dynein 2 heavy chain 1 (138-146)
  source 1..27: mol_type = other RNA
ctgctcttcggcgaccttctgagagtg

SEQ ID NO: 69714 - RNA, 30 nt, synthetic construct
  misc_feature 1..30: note = Protein YIF1B (224-233)
  source 1..30: mol_type = other RNA
ctgctcttcggcaagatcgggtactatctt

SEQ ID NO: 69715 - RNA, 27 nt, synthetic construct
  misc_feature 1..27: note = Probable palmitoyltransferase ZDHHC24 (214-222)
  source 1..27: mol_type = other RNA
ctgctcttccacggcatgcttctgttg

SEQ ID NO: 69716 - RNA, 27 nt, synthetic construct
  misc_feature 1..27: note = Kelch-like protein 5 (518-526)
  source 1..27: mol_type = other RNA
ctgctcggcgacaagctttacgccgtg

SEQ ID NO: 69717 - RNA, 27 nt, synthetic construct
  misc_feature 1..27: note = E3 ubiquitin-protein ligase RNF213 (957-965)
  source 1..27: mol_type = other RNA
ctgctcggcgacatggagtggagactt

SEQ ID NO: 69718 - RNA, 24 nt, synthetic construct
  misc_feature 1..24: note = Receptor-type tyrosine-protein phosphatase T (1084-1091)
  source 1..24: mol_type = other RNA
ctgctcggcttcgtgagacaggtc

SEQ ID NO: 69719 - RNA, 33 nt, synthetic construct
  misc_feature 1..33: note = Neurosecretory protein VGF (286-296)
  source 1..33: mol_type = other RNA
ctgctcggcgggagcgaggccggagaaagactt

SEQ ID NO: 69720 - RNA, 24 nt, synthetic construct
  misc_feature 1..24: note = MAU2 chromatid cohesion factor homolog (357-364)
  source 1..24: mol_type = other RNA
ctgctcggccacatcttctacgtg

SEQ ID NO: 69721 - RNA, 24 nt, synthetic construct
  misc_feature 1..24: note = Polypeptide N-acetylgalactosaminyltransferase 2 (186-193)
  source 1..24: mol_type = other RNA
ctgctcggcaagatcgagaaagtg

SEQ ID NO: 69722 - RNA, 24 nt, synthetic construct
  misc_feature 1..24: note = Spectrin alpha chain, non-erythrocytic 1 (418-425)
  source 1..24: mol_type = other RNA
ctgctcggcagcgcccacgaggtg

SEQ ID NO: 69723 - RNA, 30 nt, synthetic construct
  misc_feature 1..30: note = Zinc finger X-linked protein ZXDA (257-266)
  source 1..30: mol_type = other RNA
ctgctcggcagcgggcccggagtggtcctt

SEQ ID NO: 69724 - RNA, 30 nt, synthetic construct
  misc_feature 1..30: note = CUB and sushi domain-containing protein 1 (2833-2842)
  source 1..30: mol_type = other RNA
ctgctcggcagctccgcccttacctgcatg

SEQ ID NO: 69725 - RNA, 27 nt, synthetic construct
  misc_feature 1..27: note = Protein virilizer homolog (786-794)
  source 1..27: mol_type = other RNA
ctgctcggcacccttcacaacctgtac

SEQ ID NO: 69726 - RNA, 27 nt, synthetic construct
  misc_feature 1..27: note = Zinc transporter ZIP1 (215-223)
  source 1..27: mol_type = other RNA
ctgctccacaagggcatccttgccgtg

SEQ ID NO: 69727 - RNA, 33 nt, synthetic construct
  misc_feature 1..33: note = Catenin beta-1 (263-273)
  source 1..33: mol_type = other RNA
ctgctccaccaggagggcgccaagatggctgtg

SEQ ID NO: 69728 - RNA, 27 nt, synthetic construct
  misc_feature 1..27: note = Actin-binding protein anillin (773-781)
  source 1..27: mol_type = other RNA
ctgctcatcgacgagcttaacaagctg

SEQ ID NO: 69729 - RNA, 48 nt, synthetic construct
  misc_feature 1..48: note = Tastin (465-480)
  source 1..48: mol_type = other RNA
ctgctcatcggccttgccgtggggggaggtggcggggaggacagcacc

SEQ ID NO: 69730 - RNA, 27 nt, synthetic construct
  misc_feature 1..27: note = Mitochondrial dynamics protein MID49 (418-426)
  source 1..27: mol_type = other RNA
ctgctcatcggcagccttgagcaggcc

SEQ ID NO: 69731 - RNA, 75 nt, synthetic construct
  misc_feature 1..75: note = Vimentin (276-300)
  source 1..75: mol_type = other RNA
ctgctcatcaagaccgtggagacaagagacggccaggtcattaacgaaactagccaacaccatgatgaccttgag

SEQ ID NO: 69732 - RNA, 27 nt, synthetic construct
  misc_feature 1..27: note = Histone deacetylase 9 (93-101)
  source 1..27: mol_type = other RNA
ctgctcatccagcaacagcagcagatt

SEQ ID NO: 69733 - RNA, 30 nt, synthetic construct
  misc_feature 1..30: note Dolichyl-diphosphooligosaccharide-proteinosyltransferase 48 kDa subunit (180-189)
  source 1..30: mol_type = other RNA
ctgctcaaggcccccaccatcgtgggcaaa

SEQ ID NO: 69734 - RNA, 27 nt, synthetic construct
  misc_feature 1..27: note = Protein FAM171B (20-28)
  source 1..27: mol_type = other RNA
ctgctcaaggccagacttgtgcccgct

SEQ ID NO: 69735 - RNA, 24 nt, synthetic construct
  misc_feature 1..24: note = Melanoma-associated antigen 10 (311-318)
  source 1..24: mol_type = other RNA
ctgctcaagttccttgccaaagtg

SEQ ID NO: 69736 - RNA, 27 nt, synthetic construct
  misc_feature 1..27: note = Protein TANC1 (360-368)
  source 1..27: mol_type = other RNA
ctgctcaagccccttctgttcgaggtg

SEQ ID NO: 69737 - RNA, 24 nt, synthetic construct
  misc_feature 1..24: note = Asparagine synthetase (glutamine-hydrolyzing) (187-194)
  source 1..24: mol_type = other RNA
ctgctcaagcagcttaaagaggcc

SEQ ID NO: 69738 - RNA, 33 nt, synthetic construct; identical to SEQ ID NO: 45511
  misc_feature 1..33: note = Transmembrane protein 132B (372-382)
  source 1..33: mol_type = other RNA

SEQ ID NO: 69739 - RNA, 39 nt, synthetic construct
  misc_feature 1..39: note = BAH and coiled-coil domain-containing protein 1 (636-648)
  source 1..39: mol_type = other RNA
ctgctcaagtacagctcccaggcccttgtggtcggccaa

SEQ ID NO: 69740 - RNA, 30 nt, synthetic construct
  misc_feature 1..30: note = Procollagen-lysine,2-oxoglutarate 5-dioxygenase 3 (319-328)
  source 1..30: mol_type = other RNA
ctgctccttgactacccccctgatagagtg

SEQ ID NO: 69741 - RNA, 36 nt, synthetic construct
  misc_feature 1..36: note = Procollagen-lysine,2-oxoglutarate 5-dioxygenase 3 (319-330)
  source 1..36: mol_type = other RNA
ctgctccttgactacccccctgatagagtgaccctg

SEQ ID NO: 69742 - RNA, 24 nt, synthetic construct
  misc_feature 1..24: note = Mediator of RNA polymerase II transcription subunit 12 (988-995)
  source 1..24: mol_type = other RNA
ctgctccttgaggacctgatcaga

SEQ ID NO: 69743 - RNA, 27 nt, synthetic construct
  misc_feature 1..27: note = Mediator of RNA polymerase II transcription subunit 12 (988-996)
  source 1..27: mol_type = other RNA
ctgctccttgaggacctgatcagatgc

SEQ ID NO: 69744 - RNA, 27 nt, synthetic construct
  misc_feature 1..27: note = Myosin phosphatase Rho-interacting protein (997-1005)
  source 1..27: mol_type = other RNA
ctgctccttgagaagacccaggaactg

SEQ ID NO: 69745 - RNA, 63 nt, synthetic construct
  misc_feature 1..63: note = Fatty acid synthase (81-101)
  source 1..63: mol_type = other RNA
ctgctccttgaggtgacctacgaagccatcgtcgacggcgggattaaccccgatagcctgaga

SEQ ID NO: 69746 - RNA, 45 nt, synthetic construct
  misc_feature 1..45: note = Ephrin type-B receptor 3 (28-42)
  source 1..45: mol_type = other RNA
ctgctccttctgcccgccggctgcagagctttggaggaaacctta

SEQ ID NO: 69747 - RNA, 27 nt, synthetic construct
  misc_feature 1..27: note = TBC1 domain family member 9 (215-223)
  source 1..27: mol_type = other RNA
ctgctccttcccgacgtgatcaaggtc

SEQ ID NO: 69748 - RNA, 27 nt, synthetic construct
  misc_feature 1..27: note = Lysosomal thioesterase PPT2 (16-24)
  source 1..27: mol_type = other RNA
ctgctccttcccttcctgcctttgtta

SEQ ID NO: 69749 - RNA, 27 nt, synthetic construct
  misc_feature 1..27: note = Tartrate-resistant acid phosphatase type 5 (13-21)
  source 1..27: mol_type = other RNA
ctgctccttcccagcctggccgacggc

SEQ ID NO: 69750 - RNA, 27 nt, synthetic construct
  misc_feature 1..27: note = Cathepsin K (7-15)
  source 1..27: mol_type = other RNA
ctgctccttcccgtggtcagcttcgcc

SEQ ID NO: 69751 - RNA, 27 nt, synthetic construct
  misc_feature 1..27: note = 4F2 cell-surface antigen heavy chain (521-529)
  source 1..27: mol_type = other RNA
ctgctccttagattcccctacgccgct

SEQ ID NO: 69752 - RNA, 33 nt, synthetic construct
  misc_feature 1..33: note = Glypican-6 (15-25)
  source 1..33: mol_type = other RNA
ctgctccttagcctgcccgccggcgctgacgtg

SEQ ID NO: 69753 - RNA, 33 nt, synthetic construct
  misc_feature 1..33: note = Tyrosinase (514-524)
  source 1..33: mol_type = other RNA
ctgctcatggagaaggaagactaccacagcctt

SEQ ID NO: 69754 - RNA, 27 nt, synthetic construct
  misc_feature 1..27: note = Glutamine-tRNA ligase (137-145)
  source 1..27: mol_type = other RNA
ctgctcatgggcgaggccagagctgtg

SEQ ID NO: 69755 - RNA, 27 nt, synthetic construct
  misc_feature 1..27: note = Nucleolar protein 11 (405-413)
  source 1..27: mol_type = other RNA
ctgctcaacgccatccttcacagcgct

SEQ ID NO: 69756 - RNA, 33 nt, synthetic construct
  misc_feature 1..33: note = Eukaryotic translation initiation factor 4 gamma 1 (363-373)
  source 1..33: mol_type = other RNA
ctgctcaacggcgcccccagccctccagctgtg

SEQ ID NO: 69757 - RNA, 27 nt, synthetic construct
  misc_feature 1..27: note = Plexin-B3 (1376-1384)
  source 1..27: mol_type = other RNA
ctgctcaacagcaagcttttcctgttg

SEQ ID NO: 69758 - RNA, 27 nt, synthetic construct
  misc_feature 1..27: note = E3 ubiquitin-protein ligase CBL (87-95)
  source 1..27: mol_type = other RNA
ctgctccccgacacctaccagcacctt

SEQ ID NO: 69759 - RNA, 27 nt, synthetic construct
  misc_feature 1..27: note = F-box only protein 46 (301-309)
  source 1..27: mol_type = other RNA
ctgctccccgagcacgtgcttgtcaag

SEQ ID NO: 69760 - RNA, 33 nt, synthetic construct
  misc_feature 1..33: note = Fibronectin isoform 6 (1328-1338)
  source 1..33: mol_type = other RNA
ctgctccccggcaccgagtacgtggtcagcgtt

SEQ ID NO: 69761 - RNA, 27 nt, synthetic construct
  misc_feature 1..27: note = Fibronectin type III domain-containing protein 3B (282-290)
  source 1..27: mol_type = other RNA
ctgctccccggcaccgtgtacagattc

SEQ ID NO: 69762 - RNA, 27 nt, synthetic construct
  misc_feature 1..27: note = Transportin-2 (391-399)
  source 1..27: mol_type = other RNA
ctgctcccccaccttctgcctttgtta

SEQ ID NO: 69763 - RNA, 27 nt, synthetic construct
  misc_feature 1..27: note = Atlastin-3 (264-272)
  source 1..27: mol_type = other RNA
ctgctcccccaccctggccttcaggtg

SEQ ID NO: 69764 - RNA, 27 nt, synthetic construct
  misc_feature 1..27: note = Probable E3 SUMO-protein ligase RNF212 (145-153)
  source 1..27: mol_type = other RNA
ctgctcccccctcacagctccgcccca

SEQ ID NO: 69765 - RNA, 27 nt, synthetic construct
  misc_feature 1..27: note = Matrix metalloproteinase-17 (588-596)
  source 1..27: mol_type = other RNA
ctgctcccccctcttagcccaggcgcc

SEQ ID NO: 69766 - RNA, 27 nt, synthetic construct
  misc_feature 1..27: note = Astrotactin-2 (41-49)
  source 1..27: mol_type = other RNA
ctgctcccccctccaccgcttctggcc

SEQ ID NO: 69767 - RNA, 27 nt, synthetic construct
  misc_feature 1..27: note = Serine/threonine-protein kinase 32A (347-355)
  source 1..27: mol_type = other RNA
ctgctccaggagcaccttgacagcgtg

SEQ ID NO: 69768 - RNA, 42 nt, synthetic construct
  misc_feature 1..42: note = Adhesion G-protein coupled receptor F3 (210-223)
  source 1..42: mol_type = other RNA
ctgctccagcccggcacccaagtgagcgtcacatcctctcac

SEQ ID NO: 69769 - RNA, 30 nt, synthetic construct
  misc_feature 1..30: note = Interleukin-24 (91-100)
  source 1..30: mol_type = other RNA
ctgctccagcaagaggtgcttcagaacgtc

SEQ ID NO: 69770 - RNA, 27 nt, synthetic construct
  misc_feature 1..27: note = Oxysterol-binding protein-related protein 10 (231-239)
  source 1..27: mol_type = other RNA
ctgctccagcaaagcgtgcaccaggcc

SEQ ID NO: 69771 - RNA, 27 nt, synthetic construct
  misc_feature 1..27: note = Nodal modulator 3 (688-696)
  source 1..27: mol_type = other RNA
ctgctcagagacggcgagaactacgtg

SEQ ID NO: 69772 - RNA, 21 nt, synthetic construct
  misc_feature 1..21: note = Serine/threonine-protein phosphatase PP1-beta catalytic subunit (71-77)
  source 1..21: mol_type = other RNA
ctgctcagacttttcgagtac

SEQ ID NO: 69773 - RNA, 27 nt, synthetic construct
  misc_feature 1..27: note = Sorting nexin-10 (27-35)
  source 1..27: mol_type = other RNA
ctgctcagcgactcctctcttcacctg

SEQ ID NO: 69774 - RNA, 27 nt, synthetic construct
  misc_feature 1..27: note = Brefeldin A-inhibited guanine nucleotide-exchange protein 2 (1424-1432)
  source 1..27: mol_type = other RNA
ctgctcagcgacgtgttcgcccagctt

SEQ ID NO: 69775 - RNA, 27 nt, synthetic construct
  misc_feature 1..27: note = BTB/POZ domain-containing protein 1 (67-75)
  source 1..27: mol_type = other RNA
ctgctcagcgacgtgagattcgtcctt

SEQ ID NO: 69776 - RNA, 27 nt, synthetic construct
  misc_feature 1..27: note = Spermatogenesis-associated protein 20 (129-137)
  source 1..27: mol_type = other RNA
ctgctcagcgaggacttcgtgtccgtc

SEQ ID NO: 69777 - RNA, 27 nt, synthetic construct
  misc_feature 1..27: note = Mediator of RNA polymerase II transcription subunit 13 (188-196)
  source 1..27: mol_type = other RNA
ctgctcagcgaggaacacatcaccctt

SEQ ID NO: 69778 - RNA, 27 nt, synthetic construct
  misc_feature 1..27: note = Synemin (707-715)
  source 1..27: mol_type = other RNA
ctgctcagcaaggacatcaaagaggtg

SEQ ID NO: 69779 - RNA, 36 nt, synthetic construct
  misc_feature 1..36: note = Plexin-B3 (33-44)
  source 1..36: mol_type = other RNA
ctgctcagcccccctccacttccgctgaccggcgcc

SEQ ID NO: 69780 - RNA, 27 nt, synthetic construct
  misc_feature 1..27: note = Nuclear pore complex protein Nup88 (115-123)
  source 1..27: mol_type = other RNA
ctgctcagccccacccagcaccatgtg

SEQ ID NO: 69781 - RNA, 27 nt, synthetic construct
  misc_feature 1..27: note = Fanconi anemia group D2 protein (1110-1118)
  source 1..27: mol_type = other RNA
ctgctcagccagtccgtgcactacctt

SEQ ID NO: 69782 - RNA, 24 nt, synthetic construct
  misc_feature 1..24: note = Regulatory-associated protein of mTOR (224-231)
  source 1..24: mol_type = other RNA
ctgctcagccaggtgcacagactt

SEQ ID NO: 69783 - RNA, 30 nt, synthetic construct
  misc_feature 1..30: note = Muskelin (78-87)
  source 1..30: mol_type = other RNA
ctgctcagctccggccttaagaacgactac

SEQ ID NO: 69784 - RNA, 24 nt, synthetic construct
  misc_feature 1..24: note = Ras GTPase-activating-like protein IQGAP2 (416-423)
  source 1..24: mol_type = other RNA
ctgctcagcgtgaagcttgaggtc

SEQ ID NO: 69785 - RNA, 27 nt, synthetic construct
  misc_feature 1..27: note = Mediator of RNA polymerase II transcription subunit 13 (1410-1418)
  source 1..27: mol_type = other RNA
ctgctcaccgacggcatcatgagagtg

SEQ ID NO: 69786 - RNA, 27 nt, synthetic construct
  misc_feature 1..27: note = T-complex protein 1 subunit zeta-2 (471-479)
  source 1..27: mol_type = other RNA
ctgctcgtggacgagatcatgagagcc

SEQ ID NO: 69787 - RNA, 33 nt, synthetic construct
  misc_feature 1..33: note = Nuclear factor of activated T-cells, cytoplasmic 2 (115-125)
  source 1..33: mol_type = other RNA
ctgctcgtggagcagccccctcttgccggcgtc

SEQ ID NO: 69788 - RNA, 33 nt, synthetic construct
  misc_feature 1..33: note = Ankyrin repeat and KH domain-containing protein 1 (1008-1018)
  source 1..33: mol_type = other RNA
ctgctcgtgcaggagcccgacggccttatggtc

SEQ ID NO: 69789 - RNA, 27 nt, synthetic construct
  misc_feature 1..27: note = Structure-specific endonuclease subunit SLX1 (242-250)
  source 1..27: mol_type = other RNA
ctgctctggggcgaccttatctggctg

SEQ ID NO: 69790 - RNA, 27 nt, synthetic construct
  misc_feature 1..27: note = Interleukin-24 (41-49)
  source 1..27: mol_type = other RNA
ctgctctggagccaggtgtccggcgcc

SEQ ID NO: 69791 - RNA, 33 nt, synthetic construct
  misc_feature 1..33: note = Interleukin-24 (41-51)
  source 1..33: mol_type = other RNA
ctgctctggagccaggtgtccggcgcccaaggg

SEQ ID NO: 69792 - RNA, 27 nt, synthetic construct
  misc_feature 1..27: note = Glutamate receptor ionotropic, kainate 3 (325-333)
  source 1..27: mol_type = other RNA
ctgctctacgacgccgtgcacatcgtc

SEQ ID NO: 69793 - RNA, 33 nt, synthetic construct
  misc_feature 1..33: note = AT-rich interactive domain-containing protein 1A (1336-1346)
  source 1..33: mol_type = other RNA
ctgctctacgacgataacagcatcatgaccttc

SEQ ID NO: 69794 - RNA, 30 nt, synthetic construct
  misc_feature 1..30: note = Intron-binding protein aquarius (152-161)
  source 1..30: mol_type = other RNA
ctgctctacgacttccagcttatcaacgtg

SEQ ID NO: 69795 - RNA, 27 nt, synthetic construct
  misc_feature 1..27: note = Nicastrin (501-509)
  source 1..27: mol_type = other RNA
ctgctctacggcttccttatcaaggcc

SEQ ID NO: 69796 - RNA, 30 nt, synthetic construct
  misc_feature 1..30: note = Adenosine 3'-phospho 5'-phosphosulfate transporter 1 (251-260)
  source 1..30: mol_type = other RNA
ctgctctacggccacaccgtgacagtcgtt

SEQ ID NO: 69797 - RNA, 30 nt, synthetic construct
  misc_feature 1..30: note = DNA-dependent protein kinase catalytic subunit (421-430)
  source 1..30: mol_type = other RNA
ctgctctaccttgacaccgtgcccgaggtc

SEQ ID NO: 69798 - RNA, 27 nt, synthetic construct
  misc_feature 1..27: note = Unconventional myosin-Ib (533-541)
  source 1..27: mol_type = other RNA
ctgctctacagagaccttagccaggcc

SEQ ID NO: 69799 - RNA, 27 nt, synthetic construct
  misc_feature 1..27: note = Nuclear pore complex protein Nup85 (266-274)
  source 1..27: mol_type = other RNA
ctgctctacagcaaccccaccgtgaag

SEQ ID NO: 69800 - RNA, 30 nt, synthetic construct
  misc_feature 1..30: note = Microtubule-actin cross-linking factor 1, isoforms 1/2/3/5 (794-803)
  source 1..30: mol_type = other RNA
ctgatggacgagaagctccttcacaacgtg

SEQ ID NO: 69801 - RNA, 30 nt, synthetic construct
  misc_feature 1..30: note = Tyrosinase (515-524)
  source 1..30: mol_type = other RNA
ctgatggagaaggaagactaccacagcctc

SEQ ID NO: 69802 - RNA, 33 nt, synthetic construct
  misc_feature 1..33: note = Tyrosinase (515-525)
  source 1..33: mol_type = other RNA
ctgatggagaaggaagactaccacagcctctat

SEQ ID NO: 69803 - RNA, 24 nt, synthetic construct
  misc_feature 1..24: note = Leucine-tRNA ligase, cytoplasmic (211-218)
  source 1..24: mol_type = other RNA
ctgatggaggtgacccacgacctc

SEQ ID NO: 69804 - RNA, 24 nt, synthetic construct
  misc_feature 1..24: note = Dynein light chain roadblock-type 1 (52-59)
  source 1..24: mol_type = other RNA
ctgatgcacagcttcatcctcaag

SEQ ID NO: 69805 - RNA, 30 nt, synthetic construct
  misc_feature 1..30: note = T-complex protein 1 subunit beta (159-168)
  source 1..30: mol_type = other RNA
ctgatgaacatcgccggcaccacactcagc

SEQ ID NO: 69806 - RNA, 24 nt, synthetic construct
  misc_feature 1..24: note = Phosphatidylinositol 5-phosphate 4-kinase type-2 beta (66-73)
  source 1..24: mol_type = other RNA
ctgatgcccgacgatttcaaggcc

SEQ ID NO: 69807 - RNA, 27 nt, synthetic construct
  misc_feature 1..27: note = Folliculin-interacting protein 1 (804-812)
  source 1..27: mol_type = other RNA
ctgatgagcgacctctcccacgccgtg

SEQ ID NO: 69808 - RNA, 27 nt, synthetic construct
  misc_feature 1..27: note = Constitutive coactivator of PPAR-gamma-like protein 2 (619-627)
  source 1..27: mol_type = other RNA
ctgatgtacccctatatctaccacgtg

SEQ ID NO: 69809 - RNA, 27 nt, synthetic construct
  misc_feature 1..27: note = Sodium channel protein type 5 subunit alpha (1513-1521)
  source 1..27: mol_type = other RNA
ctgaacaagtaccagggcttcatcttt

SEQ ID NO: 69810 - RNA, 18 nt, synthetic construct
  misc_feature 1..18: note = Heterogeneous nuclear ribonucleoprotein K (133-138)
  source 1..18: mol_type = other RNA
ctgaactaccagcactat

SEQ ID NO: 69811 - RNA, 24 nt, synthetic construct
  misc_feature 1..24: note = Tropomodulin-2 (46-53)
  source 1..24: mol_type = other RNA
ctgcccgccggcttcagacagaag

SEQ ID NO: 69812 - RNA, 21 nt, synthetic construct
  misc_feature 1..21: note = Probable ATP-dependent RNA helicase DDX5 (150-156)
  source 1..21: mol_type = other RNA
ctgcccgccatcgtgcacatt

SEQ ID NO: 69813 - RNA, 33 nt, synthetic construct
  misc_feature 1..33: note = Basement membrane-specific heparan sulfate proteoglycan core protein (1907-1917)
  source 1..33: mol_type = other RNA
ctgcccgccaaggctcagatccacggcgggatt

SEQ ID NO: 69814 - RNA, 24 nt, synthetic construct
  misc_feature 1..24: note = UV excision repair protein RAD23 homolog B (278-285)
  source 1..24: mol_type = other RNA
ctgcccgccctccttcagcaaatc

SEQ ID NO: 69815 - RNA, 27 nt, synthetic construct
  misc_feature 1..27: note = Potassium/sodium hyperpolarization-activated cyclic nucleotide-gated channel 3 (671-679)
  source 1..27: mol_type = other RNA
ctgcccgcccctccagctagaaccctc

SEQ ID NO: 69816 - RNA, 30 nt, synthetic construct
  misc_feature 1..30: note = AT-hook-containing transcription factor (393-402)
  source 1..30: mol_type = other RNA
ctgcccgcccctagcggccaggctccaatg

SEQ ID NO: 69817 - RNA, 30 nt, synthetic construct
  misc_feature 1..30: note = Lysosome-associated membraneoprotein 1 (249-258)
  source 1..30: mol_type = other RNA
ctgcccgacgccagagatcctgctttcaag

SEQ ID NO: 69818 - RNA, 48 nt, synthetic construct
  misc_feature 1..48: note = Legumain (198-213)
  source 1..48: mol_type = other RNA
ctgcccgacaacatcaatgtgtacgccaccacagctgcaaaccctaga

SEQ ID NO: 69819 - RNA, 24 nt, synthetic construct
  misc_feature 1..24: note = Serine/threonine-protein kinase ULK3 (109-116)
  source 1..24: mol_type = other RNA
ctgcccgagaaggtggccagagtc

SEQ ID NO: 69820 - RNA, 24 nt, synthetic construct
  misc_feature 1..24: note = Solute carrier family 23 member 2 (603-610)
  source 1..24: mol_type = other RNA
ctgcccttcggcatgaacatcatt

SEQ ID NO: 69821 - RNA, 36 nt, synthetic construct
  misc_feature 1..36: note = Retinoic acid receptor RXR-beta (168-179)
  source 1..36: mol_type = other RNA
ctgcccggcgggggaagcggtcctccagaggacgtg

SEQ ID NO: 69822 - RNA, 45 nt, synthetic construct
  misc_feature 1..45: note = Mucin-19 (5182-5196)
  source 1..45: mol_type = other RNA
ctgcccggcgtgagcgccgggctcaccggaacaatcggttcccct

SEQ ID NO: 69823 - RNA, 27 nt, synthetic construct
  misc_feature 1..27: note = (Pyruvate dehydrogenase (acetyl-transferring))-phosphatase 1, mitochondrial (168-176)
  source 1..27: mol_type = other RNA
ctgccccacgagaccctccttgaaatc

SEQ ID NO: 69824 - RNA, 24 nt, synthetic construct
  misc_feature 1..24: note = Transportin-1 (395-402)
  source 1..24: mol_type = other RNA
ctgccccacatcctccctcttctg

SEQ ID NO: 69825 - RNA, 27 nt, synthetic construct
  misc_feature 1..27: note = Phosphatidylcholine translocator ABCB4 (1167-1175)
  source 1..27: mol_type = other RNA
ctgccccacaagtacgagaccagagtg

SEQ ID NO: 69826 - RNA, 27 nt, synthetic construct
  misc_feature 1..27: note = HMG domain-containing protein 3 (213-221)
  source 1..27: mol_type = other RNA
ctgccccacctccctcagagcgagatc

SEQ ID NO: 69827 - RNA, 27 nt, synthetic construct
  misc_feature 1..27: note = Low-density lipoprotein receptor-related protein 2 (704-712)
  source 1..27: mol_type = other RNA
ctgccccaccctttcgccatcaccatt

SEQ ID NO: 69828 - RNA, 24 nt, synthetic construct
  misc_feature 1..24: note = Melanophilin (392-399)
  source 1..24: mol_type = other RNA
ctgcccatcttcctccctagagtg

SEQ ID NO: 69829 - RNA, 45 nt, synthetic construct
  misc_feature 1..45: note = Collagen alpha-1(I) chain (1013-1027)
  source 1..45: mol_type = other RNA
ctgcccatcattgacgtggcccctctcgatgtcggcgctccagac

SEQ ID NO: 69830 - RNA, 27 nt, synthetic construct
  misc_feature 1..27: note = Coatomer subunit gamma-1 (712-720)
  source 1..27: mol_type = other RNA
ctgcccaaggaggaccctaccgccgtg

SEQ ID NO: 69831 - RNA, 27 nt, synthetic construct
  misc_feature 1..27: note = Tight junction protein ZO-1 (478-486)
  source 1..27: mol_type = other RNA
ctgcccaagggcgaggaagtgaccatc

SEQ ID NO: 69832 - RNA, 24 nt, synthetic construct
  misc_feature 1..24: note = 40S ribosomal protein S26 (64-71)
  source 1..24: mol_type = other RNA
ctgcccaagctctacgtgaaactt

SEQ ID NO: 69833 - RNA, 27 nt, synthetic construct
  misc_feature 1..27: note = Interferon alpha-inducible protein 27, mitochondrial (28-36)
  source 1..27: mol_type = other RNA
ctgcccctcgccagaatcgctaccgtg

SEQ ID NO: 69834 - RNA, 27 nt, synthetic construct
  misc_feature 1..27: note = Receptor tyrosine-protein kinase erbB-3 (97-105)
  source 1..27: mol_type = other RNA
ctgcccctccctaaccttagagtggtc

SEQ ID NO: 69835 - RNA, 27 nt, synthetic construct
  misc_feature 1..27: note = Ubiquitin domain-containing protein UBFD1 (251-259)
  source 1..27: mol_type = other RNA
ctgcccatgggcagcatcaagaacgtg

SEQ ID NO: 69836 - RNA, 27 nt, synthetic construct
  misc_feature 1..27: note = Ras-related protein Rab-38 (114-122)
  source 1..27: mol_type = other RNA
ctgcccaacggcaagcctgtgagcgtc

SEQ ID NO: 69837 - RNA, 27 nt, synthetic construct
  misc_feature 1..27: note = Transcriptional regulator Kaiso (298-306)
  source 1..27: mol_type = other RNA
ctgcccaaccacatgcctagctccatc

SEQ ID NO: 69838 - RNA, 27 nt, synthetic construct
  misc_feature 1..27: note = Bromodomain-containing protein 4 (958-966)
  source 1..27: mol_type = other RNA
ctgccccctccaccgcaccccagcgtg

SEQ ID NO: 69839 - RNA, 27 nt, synthetic construct
  misc_feature 1..27: note = Shootin-1 (302-310)
  source 1..27: mol_type = other RNA
ctgccccctccaccgcccaaccctatc

SEQ ID NO: 69840 - RNA, 24 nt, synthetic construct
  misc_feature 1..24: note = Nicotinamide phosphoribosyltransferase (344-351)
  source 1..24: mol_type = other RNA
ctgcccccttacctcagagtgatc

SEQ ID NO: 69841 - RNA, 27 nt, synthetic construct
  misc_feature 1..27: note = Kinase D-interacting substrate of 220 kDa (104-112)
  source 1..27: mol_type = other RNA
ctgcccagagaccagaacaatggcctc

SEQ ID NO: 69842 - RNA, 27 nt, synthetic construct
  misc_feature 1..27: note = Cap-specific mRNAucleoside-2'-O-)-methyltransferase 1 (631-639)
  source 1..27: mol_type = other RNA
ctgcccagagacaccctccttagcgtg

SEQ ID NO: 69843 - RNA, 30 nt, synthetic construct
  misc_feature 1..30: note = Serine/threonine-protein kinase 32A (171-180)
  source 1..30: mol_type = other RNA
ctgcccagagagacccagatcacaactatg

SEQ ID NO: 69844 - RNA, 30 nt, synthetic construct
  misc_feature 1..30: note = Ubiquitin-associated protein 1 (236-245)
  source 1..30: mol_type = other RNA
ctgcccagaggcgggagcggatccgtgctc

SEQ ID NO: 69845 - RNA, 27 nt, synthetic construct
  misc_feature 1..27: note = Intercellular adhesion molecule 1 (16-24)
  source 1..27: mol_type = other RNA
ctgcccagaggcgggagcgtgctcgtc

SEQ ID NO: 69846 - RNA, 27 nt, synthetic construct
  misc_feature 1..27: note = Ropporin-1B (153-161)
  source 1..27: mol_type = other RNA
ctgcccagaatccctttcagcaccttt

SEQ ID NO: 69847 - RNA, 27 nt, synthetic construct
  misc_feature 1..27: note = LIM domain and actin-binding protein 1 (161-169)
  source 1..27: mol_type = other RNA
ctgcccagactcagcgagacctccatc

SEQ ID NO: 69848 - RNA, 27 nt, synthetic construct
  misc_feature 1..27: note = Apolipoprotein L1 (85-93)
  source 1..27: mol_type = other RNA
ctgcccagaaacgaggccgacgaactc

SEQ ID NO: 69849 - RNA, 27 nt, synthetic construct
  misc_feature 1..27: note = E3 ubiquitin-protein ligase TRIP12 (518-526)
  source 1..27: mol_type = other RNA
ctgcccagaagctccgccgtggtcgtt

SEQ ID NO: 69850 - RNA, 27 nt, synthetic construct
  misc_feature 1..27: note = Periaxin (1315-1323)
  source 1..27: mol_type = other RNA
ctgcccagagtgggcctcgccgctcct

SEQ ID NO: 69851 - RNA, 24 nt, synthetic construct
  misc_feature 1..24: note = SET domain-containing protein 5 (1382-1389)
  source 1..24: mol_type = other RNA
ctgcccagcgacctcagaaccatc

SEQ ID NO: 69852 - RNA, 48 nt, synthetic construct
  misc_feature 1..48: note = Cathepsin F (337-352)
  source 1..48: mol_type = other RNA
ctgcccagcaacgcctactccgctatcaagaatctcggcgggcttgag

SEQ ID NO: 69853 - RNA, 27 nt, synthetic construct
  misc_feature 1..27: note = Ropporin-1B (99-107)
  source 1..27: mol_type = other RNA
ctgcccaccgacctcttcaacagcgtg

SEQ ID NO: 69854 - RNA, 24 nt, synthetic construct
  misc_feature 1..24: note = AP-5 complex subunit zeta-1 (154-161)
  source 1..24: mol_type = other RNA
ctgcccgtgatggccaaggtcgtt

SEQ ID NO: 69855 - RNA, 24 nt, synthetic construct
  misc_feature 1..24: note = Rho guanine nucleotide exchange factor 2 (884-891)
  source 1..24: mol_type = other RNA
ctgcccgtgaccacaagaagcgtc

SEQ ID NO: 69856 - RNA, 24 nt, synthetic construct
  misc_feature 1..24: note = Protein O-mannosyl-transferase 1 (538-545)
  source 1..24: mol_type = other RNA
ctgcccgtggtcctccagcacatc

SEQ ID NO: 69857 - RNA, 27 nt, synthetic construct
  misc_feature 1..27: note = Histone-lysine N-methyltransferase 2A (1096-1104)
  source 1..27: mol_type = other RNA
ctgccctgggaggaaagagagaagatc

SEQ ID NO: 69858 - RNA, 27 nt, synthetic construct
  misc_feature 1..27: note = Lathosterol oxidase (84-92)
  source 1..27: mol_type = other RNA
ctgccctggatcagcattctcaccgtg

SEQ ID NO: 69859 - RNA, 27 nt, synthetic construct
  misc_feature 1..27: note = Metallophosphoesterase MPPED2 (106-114)
  source 1..27: mol_type = other RNA
ctgccctacgagtataagatcgtgatt

SEQ ID NO: 69860 - RNA, 24 nt, synthetic construct
  misc_feature 1..24: note = Glia-derived nexin (256-263)
  source 1..24: mol_type = other RNA
ctgccctaccacggcgagagcatc

SEQ ID NO: 69861 - RNA, 30 nt, synthetic construct; identical to SEQ ID NO: 45634
  misc_feature 1..30: note = Glia-derived nexin (256-265)
  source 1..30: mol_type = other RNA

SEQ ID NO: 69862 - RNA, 24 nt, synthetic construct
  misc_feature 1..24: note = Neurofibromin (488-495)
  source 1..24: mol_type = other RNA
ctgccctacctcttccacgtggtc

SEQ ID NO: 69863 - RNA, 30 nt, synthetic construct
  misc_feature 1..30: note = NAD-dependent protein deacetylase sirtuin-2 (95-104)
  source 1..30: mol_type = other RNA
ctgccctaccctgaggccatcttcgaaatt

SEQ ID NO: 69864 - RNA, 30 nt, synthetic construct
  misc_feature 1..30: note = NAD-dependent protein deacetylase sirtuin-3, mitochondrial (173-182)
  source 1..30: mol_type = other RNA
ctgccctaccctgaggccatcttcgaactc

SEQ ID NO: 69865 - RNA, 27 nt, synthetic construct
  misc_feature 1..27: note = CDK5 and ABL1 enzyme substrate 1 (27-35)
  source 1..27: mol_type = other RNA
ctgccctacagagacagcacccaggtg

SEQ ID NO: 69866 - RNA, 24 nt, synthetic construct
  misc_feature 1..24: note = Serpin B6 (104-111)
  source 1..24: mol_type = other RNA
ctgccctacgtgggcaaggagctc

SEQ ID NO: 69867 - RNA, 33 nt, synthetic construct
  misc_feature 1..33: note = Guanine nucleotide exchange factor VAV3 (680-690)
  source 1..33: mol_type = other RNA
ctgcaggccgagaccgaactcatcaacagagtg

SEQ ID NO: 69868 - RNA, 27 nt, synthetic construct
  misc_feature 1..27: note = Peroxisome proliferator-activated receptor gamma coactivator-related protein 1 (1097-1105)
  source 1..27: mol_type = other RNA
ctgcaggcccccgagctcgctaacgtg

SEQ ID NO: 69869 - RNA, 36 nt, synthetic construct
  misc_feature 1..36: note = Zinc finger homeobox protein 2 (544-555)
  source 1..36: mol_type = other RNA
ctgcagggcttccaagccgggcccggaggtcagggc

SEQ ID NO: 69870 - RNA, 48 nt, synthetic construct
  misc_feature 1..48: note = Proline-rich transmembrane protein 3 (172-187)
  source 1..48: mol_type = other RNA
ctgcagcacgagggccaagaagggcagtggccccctagagacgaggga

SEQ ID NO: 69871 - RNA, 72 nt, synthetic construct
  misc_feature 1..72: note = Plectin (387-410)
  source 1..72: mol_type = other RNA
ctgcagatggaggccggcctctgcgaagagcaacttaaccaggctgacgcactgttgcagagcgatgtgaga

SEQ ID NO: 69872 - RNA, 33 nt, synthetic construct
  misc_feature 1..33: note = T-complex protein 1 subunit gamma (268-278)
  source 1..33: mol_type = other RNA
ctgcagatggaggaagagtacatccaacagctc

SEQ ID NO: 69873 - RNA, 42 nt, synthetic construct
  misc_feature 1..42: note = Glyceraldehyde-3-phosphate dehydrogenase (203-216)
  source 1..42: mol_type = other RNA
ctgcagaacatcattcccgccagcaccggcgctgcaaaggcc

SEQ ID NO: 69874 - RNA, 27 nt, synthetic construct
  misc_feature 1..27: note = Ubiquitin carboxyl-terminal hydrolase 22 (305-313)
  source 1..27: mol_type = other RNA
ctgcagagcgacgtgacctgccaagtc

SEQ ID NO: 69875 - RNA, 24 nt, synthetic construct
  misc_feature 1..24: note = Titin (123-130)
  source 1..24: mol_type = other RNA
ctgcaggtgagagtcaccggcatc

SEQ ID NO: 69876 - RNA, 54 nt, synthetic construct
  misc_feature 1..54: note = Collagen alpha-1(VI) chain (694-711)
  source 1..54: mol_type = other RNA
ctgcagtggatggccggcgggaccttcacaggagaggctctccaatacactaga

SEQ ID NO: 69877 - RNA, 24 nt, synthetic construct
  misc_feature 1..24: note = Interferon regulatory factor 2-binding protein 1 (301-308)
  source 1..24: mol_type = other RNA
ctgagagagcccggcaaggccctc

SEQ ID NO: 69878 - RNA, 33 nt, synthetic construct
  misc_feature 1..33: note = Disintegrin and metalloproteinase domain-containing protein 10 (60-70)
  source 1..33: mol_type = other RNA
ctgagactcgacttccacgcccatggcaggcac

SEQ ID NO: 69879 - RNA, 30 nt, synthetic construct
  misc_feature 1..30: note = Keratin, type I cytoskeletal 10 (294-303)
  source 1..30: mol_type = other RNA
ctgagaaacgtgagcaccggcgacgtcaat

SEQ ID NO: 69880 - RNA, 33 nt, synthetic construct
  misc_feature 1..33: note = Casein kinase II subunit alpha (305-315)
  source 1..33: mol_type = other RNA
ctgagatacgaccaccagagcaggctcaccgcc

SEQ ID NO: 69881 - RNA, 39 nt, synthetic construct
  misc_feature 1..39: note = SKI family transcriptional corepressor 2 (329-341)
  source 1..39: mol_type = other RNA
ctgagcgccgctgcagcctccctctctgtggcggctgcc

SEQ ID NO: 69882 - RNA, 27 nt, synthetic construct
  misc_feature 1..27: note = DNA-binding protein RFX7 (64-72)
  source 1..27: mol_type = other RNA
ctgagcgccgctgacttcggcaagatc

SEQ ID NO: 69883 - RNA, 57 nt, synthetic construct
  misc_feature 1..57: note = Heterogeneous nuclear ribonucleoprotein U (186-204)
  source 1..57: mol_type = other RNA
ctgagcgcctcctctctcaccatggagtcattcgcttttctttgggcaggcgggaga

SEQ ID NO: 69884 - RNA, 27 nt, synthetic construct
  misc_feature 1..27: note = Unconventional myosin-Ib (87-95)
  source 1..27: mol_type = other RNA
ctgagcgacgaggcctacagatccctc

SEQ ID NO: 69885 - RNA, 27 nt, synthetic construct
  misc_feature 1..27: note = Leucine-tRNA ligase, cytoplasmic (166-174)
  source 1..27: mol_type = other RNA
ctgagcgacgaggaaatcgtgaagttc

SEQ ID NO: 69886 - RNA, 27 nt, synthetic construct
  misc_feature 1..27: note = 1-phosphatidylinositol 4,5-bisphosphate phosphodiesterase beta-4 (725-733)
  source 1..27: mol_type = other RNA
ctgagcgacaagaaaatcggcacctac

SEQ ID NO: 69887 - RNA, 27 nt, synthetic construct
  misc_feature 1..27: note = CCAAT/enhancer-binding protein beta (118-126)
  source 1..27: mol_type = other RNA
ctgagcgacctcttctccgatgactac

SEQ ID NO: 69888 - RNA, 27 nt, synthetic construct
  misc_feature 1..27: note = Ras association domain-containing protein 3 (88-96)
  source 1..27: mol_type = other RNA
ctgagcgacagagagcaccccctctac

SEQ ID NO: 69889 - RNA, 27 nt, synthetic construct
  misc_feature 1..27: note = Plexin-D1 (920-928)
  source 1..27: mol_type = other RNA
ctgagcgacgtggcccacggcgtctgg

SEQ ID NO: 69890 - RNA, 27 nt, synthetic construct
  misc_feature 1..27: note = Melanoma antigen preferentially expressed in tumors (334-342)
  source 1..27: mol_type = other RNA
ctgagcgagggcgacgtgatgcacctc

SEQ ID NO: 69891 - RNA, 27 nt, synthetic construct
  misc_feature 1..27: note = Putative pre-mRNA-splicing factor ATP-dependent RNA helicase DHX16 (506-514)
  source 1..27: mol_type = other RNA
ctgagcgagcccgacctcgcctcctac

SEQ ID NO: 69892 - RNA, 21 nt, synthetic construct
  misc_feature 1..21: note = Hemoglobin subunit alpha (6-12)
  source 1..21: mol_type = other RNA
ctgagcttccccaccacaaag

SEQ ID NO: 69893 - RNA, 27 nt, synthetic construct
  misc_feature 1..27: note = Hemoglobin subunit alpha (6-14)
  source 1..27: mol_type = other RNA
ctgagcttccccaccacaaagacttac

SEQ ID NO: 69894 - RNA, 27 nt, synthetic construct
  misc_feature 1..27: note = Sister chromatid cohesion protein PDS5 homolog B (656-664)
  source 1..27: mol_type = other RNA
ctgagcttcacccaccccatctccttt

SEQ ID NO: 69895 - RNA, 30 nt, synthetic construct
  misc_feature 1..30: note = Zinc transporter ZIP12 (31-40)
  source 1..30: mol_type = other RNA
ctgagcggcgacgccctccttcacctgatc

SEQ ID NO: 69896 - RNA, 30 nt, synthetic construct
  misc_feature 1..30: note = Asparagine synthetase (glutamine-hydrolyzing) (174-183)
  source 1..30: mol_type = other RNA
ctgagcggcgggctcgactcctctcttgtg

SEQ ID NO: 69897 - RNA, 27 nt, synthetic construct
  misc_feature 1..27: note = Phosphorylase b kinase regulatory subunit alpha, liver isoform (46-54)
  source 1..27: mol_type = other RNA
ctgagcggccagcacggggtgaccgtc

SEQ ID NO: 69898 - RNA, 33 nt, synthetic construct
  misc_feature 1..33: note = PCNA-interacting partner (149-159)
  source 1..33: mol_type = other RNA
ctgagcatccccacctcccctacatctaagtac

SEQ ID NO: 69899 - RNA, 24 nt, synthetic construct
  misc_feature 1..24: note = Synemin (708-715)
  source 1..24: mol_type = other RNA
ctgagcaaggacatcaaagaggtg

SEQ ID NO: 69900 - RNA, 24 nt, synthetic construct
  misc_feature 1..24: note = Ryanodine receptor 1 (442-449)
  source 1..24: mol_type = other RNA
ctgagcctccaggaccttatcatt

SEQ ID NO: 69901 - RNA, 33 nt, synthetic construct
  misc_feature 1..33: note = Codanin-1 (382-392)
  source 1..33: mol_type = other RNA
ctgagcaacctcgacaagggcacccttaaactg

SEQ ID NO: 69902 - RNA, 30 nt, synthetic construct
  misc_feature 1..30: note = Caprin-2 (108-117)
  source 1..30: mol_type = other RNA
ctgagctccgccgcttctccctcacaggca

SEQ ID NO: 69903 - RNA, 57 nt, synthetic construct
  misc_feature 1..57: note = Protein unc-13 homolog D (375-393)
  source 1..57: mol_type = other RNA
ctgagctccggccagaaggaccaagggcaggccgctaacatgctctgcgtggtcgtt

SEQ ID NO: 69904 - RNA, 30 nt, synthetic construct
  misc_feature 1..30: note = Melanocyte-stimulating hormone receptor (129-138)
  source 1..30: mol_type = other RNA
ctgagctccctctgcttccttggcgccatc

SEQ ID NO: 69905 - RNA, 27 nt, synthetic construct
  misc_feature 1..27: note = Protein prune homolog 2 (1282-1290)
  source 1..27: mol_type = other RNA
ctgagctcccccgagaccggcaagtac

SEQ ID NO: 69906 - RNA, 27 nt, synthetic construct
  misc_feature 1..27: note = Kelch-like protein 12 (386-394)
  source 1..27: mol_type = other RNA
ctgagctccgtggaggcctacaacatc

SEQ ID NO: 69907 - RNA, 36 nt, synthetic construct
  misc_feature 1..36: note = AP-2 complex subunit beta (710-721)
  source 1..36: mol_type = other RNA
ctgagcaccggcatcgggatggcccccggaggttac

SEQ ID NO: 69908 - RNA, 30 nt, synthetic construct; identical to SEQ ID NO: 45681
  misc_feature 1..30: note = Peroxisome assembly protein 12 (247-256)
  source 1..30: mol_type = other RNA

SEQ ID NO: 69909 - RNA, 27 nt, synthetic construct
  misc_feature 1..27: note = Amyloid protein-binding protein 2 (472-480)
  source 1..27: mol_type = other RNA
ctgagcgtgggccacctcgcctccctt

SEQ ID NO: 69910 - RNA, 21 nt, synthetic construct
  misc_feature 1..21: note = Serine/threonine-protein kinase mTOR (1960-1966)
  source 1..21: mol_type = other RNA
ctgaccgacatcggcagatac

SEQ ID NO: 69911 - RNA, 24 nt, synthetic construct
  misc_feature 1..24: note = Tyrosine-protein kinase BAZ1B (894-901)
  source 1..24: mol_type = other RNA
ctgaccgacatgaagcaggtgttc

SEQ ID NO: 69912 - RNA, 30 nt, synthetic construct
  misc_feature 1..30: note = CDC2L5 protein kinase (1231-1240)
  source 1..30: mol_type = other RNA
ctgaccgacccccacgccggcgtgaaggct

SEQ ID NO: 69913 - RNA, 27 nt, synthetic construct
  misc_feature 1..27: note = Zinc finger with UFM1-specific peptidase domain protein (139-147)
  source 1..27: mol_type = other RNA
ctgaccgagatcaagggcagcgtgtac

SEQ ID NO: 69914 - RNA, 24 nt, synthetic construct
  misc_feature 1..24: note = Protocadherin-15 (1267-1274)
  source 1..24: mol_type = other RNA
ctgaccgagatcctcgacagatac

SEQ ID NO: 69915 - RNA, 27 nt, synthetic construct
  misc_feature 1..27: note = Beta-1-syntrophin (254-262)
  source 1..27: mol_type = other RNA
ctgaccgagaaggacctccttatctac

SEQ ID NO: 69916 - RNA, 27 nt, synthetic construct
  misc_feature 1..27: note = Alpha-1-syntrophin (122-130)
  source 1..27: mol_type = other RNA
ctgaccgagaaggaactccttctgtac

SEQ ID NO: 69917 - RNA, 27 nt, synthetic construct
  misc_feature 1..27: note = Nucleoprotein TPR (587-595)
  source 1..27: mol_type = other RNA
ctgaccgagctcgaacagcttagaaag

SEQ ID NO: 69918 - RNA, 27 nt, synthetic construct
  misc_feature 1..27: note = Zinc finger MIZ domain-containing protein 1 (470-478)
  source 1..27: mol_type = other RNA
ctgaccttccccgtgagagacggcgtc

SEQ ID NO: 69919 - RNA, 48 nt, synthetic construct
  misc_feature 1..48: note = Basement membrane-specific heparan sulfate proteoglycan core protein (350-365)
  source 1..48: mol_type = other RNA
ctgaccggcgagttcacagtggaacccgtccctgagggggcccagctc

SEQ ID NO: 69920 - RNA, 24 nt, synthetic construct
  misc_feature 1..24: note = Erythrocyte band 7 integral membrane protein (109-116)
  source 1..24: mol_type = other RNA
ctgaccaaggacagcgtgacaatc

SEQ ID NO: 69921 - RNA, 27 nt, synthetic construct
  misc_feature 1..27: note = CCR4-NOT transcription complex subunit 1 (247-255)
  source 1..27: mol_type = other RNA
ctgaccaagcccatgcagatcctctac

SEQ ID NO: 69922 - RNA, 27 nt, synthetic construct
  misc_feature 1..27: note = Phenylalanine-tRNA ligase alpha subunit (381-389)
  source 1..27: mol_type = other RNA
ctgaccctcggccaccttatgggggtg

SEQ ID NO: 69923 - RNA, 27 nt, synthetic construct
  misc_feature 1..27: note = Plectin (1055-1063)
  source 1..27: mol_type = other RNA
ctgaccctcggcaagcttgagcaggtg

SEQ ID NO: 69924 - RNA, 81 nt, synthetic construct
  misc_feature 1..81: note = POU domain, class 6, transcription factor 2 (131-157)
  source 1..81: mol_type = other RNA
ctgaccctccccacagccaaccttactaatatccagggcctggtggctgcagccgcggctgggggaattatgacgttgcct

SEQ ID NO: 69925 - RNA, 27 nt, synthetic construct
  misc_feature 1..27: note = Cytoplasmic dynein 1 heavy chain 1 (469-477)
  source 1..27: mol_type = other RNA
ctgaccatggagatcaaccccaaggtg

SEQ ID NO: 69926 - RNA, 30 nt, synthetic construct
  misc_feature 1..30: note = Plasma membrane calcium-transporting ATPase 1 (480-489)
  source 1..30: mol_type = other RNA
ctgaccatgaacagaatgacagtggtccag

SEQ ID NO: 69927 - RNA, 36 nt, synthetic construct
  misc_feature 1..36: note = Insulin-like growth factor-binding protein complex acid labile subunit (399-410)
  source 1..36: mol_type = other RNA
ctgaccaacgtggccgtcatgaatctcagcggcaac

SEQ ID NO: 69928 - RNA, 27 nt, synthetic construct
  misc_feature 1..27: note = Peroxisomal acyl-coenzyme A oxidase 1 (273-281)
  source 1..27: mol_type = other RNA
ctgacctacggcacaatggtgttcgtc

SEQ ID NO: 69929 - RNA, 36 nt, synthetic construct
  misc_feature 1..36: note = Potassium/sodium hyperpolarization-activated cyclic nucleotide-gated channel 4 (1006-1017)
  source 1..36: mol_type = other RNA
ctggtggccggcgctagcgggggagcatcccccgtc

SEQ ID NO: 69930 - RNA, 30 nt, synthetic construct
  misc_feature 1..30: note = ER membrane protein complex subunit 7 (68-77)
  source 1..30: mol_type = other RNA
ctggtggacggcgaggaacacgtcgggttc

SEQ ID NO: 69931 - RNA, 24 nt, synthetic construct
  misc_feature 1..24: note = Manganese-transporting ATPase 13A1 (282-289)
  source 1..24: mol_type = other RNA
ctggtggacatccccgtcgagttc

SEQ ID NO: 69932 - RNA, 27 nt, synthetic construct
  misc_feature 1..27: note = Supervillin (1622-1630)
  source 1..27: mol_type = other RNA
ctggtggacaaccaccatgaggtctac

SEQ ID NO: 69933 - RNA, 27 nt, synthetic construct
  misc_feature 1..27: note = Aldehyde dehydrogenase family 1 member A3 (106-114)
  source 1..27: mol_type = other RNA
ctggtggagagagacagggccaccctc

SEQ ID NO: 69934 - RNA, 27 nt, synthetic construct
  misc_feature 1..27: note = A-kinase anchor protein 11 (654-662)
  source 1..27: mol_type = other RNA
ctggtgttcgagggcatcatggaagtc

SEQ ID NO: 69935 - RNA, 30 nt, synthetic construct
  misc_feature 1..30: note = Serum albumin (66-75)
  source 1..30: mol_type = other RNA
ctggtgaacgaggtcaccgaattcgccaag

SEQ ID NO: 69936 - RNA, 24 nt, synthetic construct
  misc_feature 1..24: note = Cytochrome c oxidase subunit 5B, mitochondrial (122-129)
  source 1..24: mol_type = other RNA
ctggtgccccagcaactcgcccac

SEQ ID NO: 69937 - RNA, 30 nt, synthetic construct
  misc_feature 1..30: note = Stabilin-2 (1032-1041)
  source 1..30: mol_type = other RNA
ctggtgcccagccagcaagccaccgaggac

SEQ ID NO: 69938 - RNA, 24 nt, synthetic construct
  misc_feature 1..24: note = Adenomatous polyposis coli protein 2 (11-18)
  source 1..24: mol_type = other RNA
ctggtgagacaggtcgaggccctc

SEQ ID NO: 69939 - RNA, 48 nt, synthetic construct
  misc_feature 1..48: note = 60S ribosomal protein L9 (153-168)
  source 1..48: mol_type = other RNA
ctggtgagcaactccgccgctctcatccagcaagcaaccacagtcaag

SEQ ID NO: 69940 - RNA, 33 nt, synthetic construct
  misc_feature 1..33: note = Thioredoxin reductase 2, mitochondrial (4-14)
  source 1..33: mol_type = other RNA
ctggtggtcggcgggggaagcggtggcctcgcc

SEQ ID NO: 69941 - RNA, 27 nt, synthetic construct
  misc_feature 1..27: note = Midasin (3107-3115)
  source 1..27: mol_type = other RNA
ctggtggtcagcgacggcagagggctc

SEQ ID NO: 69942 - RNA, 30 nt, synthetic construct
  misc_feature 1..30: note = Kelch-like protein 29 (511-520)
  source 1..30: mol_type = other RNA
ctggtgtacgacggcaagatctataccctc

SEQ ID NO: 69943 - RNA, 27 nt, synthetic construct
  misc_feature 1..27: note = Pre-mRNA-processing-splicing factor 8 (405-413)
  source 1..27: mol_type = other RNA
ctgtgggcccccagacctttcaacctc

SEQ ID NO: 69944 - RNA, 27 nt, synthetic construct
  misc_feature 1..27: note = Plexin-B3 (1462-1470)
  source 1..27: mol_type = other RNA
ctgtacgccttcctcagagaggtggct

SEQ ID NO: 69945 - RNA, 30 nt, synthetic construct
  misc_feature 1..30: note = Aldehyde dehydrogenase family 1 member A3 (471-480)
  source 1..30: mol_type = other RNA
ctgtacgcccaggctcccttcggcgggttt

SEQ ID NO: 69946 - RNA, 27 nt, synthetic construct
  misc_feature 1..27: note = DNA-binding protein RFXANK (131-139)
  source 1..27: mol_type = other RNA
ctgtacgccgtgagaggcaaccacgtc

SEQ ID NO: 69947 - RNA, 27 nt, synthetic construct
  misc_feature 1..27: note = Asparagine synthetase (glutamine-hydrolyzing) (132-140)
  source 1..27: mol_type = other RNA
ctgtacgacaacgtggagaagctcttc

SEQ ID NO: 69948 - RNA, 24 nt, synthetic construct
  misc_feature 1..24: note = Mediator of RNA polymerase II transcription subunit 12 (572-579)
  source 1..24: mol_type = other RNA
ctgtacgaccagcccagacacgtg

SEQ ID NO: 69949 - RNA, 24 nt, synthetic construct
  misc_feature 1..24: note = Signal recognition particle subunit SRP68 (454-461)
  source 1..24: mol_type = other RNA
ctgtacgacagagtgctcaagtat

SEQ ID NO: 69950 - RNA, 27 nt, synthetic construct
  misc_feature 1..27: note = GPI mannosyltransferase 2 (80-88)
  source 1..27: mol_type = other RNA
ctgtacgagcacaacttcgcctttttc

SEQ ID NO: 69951 - RNA, 27 nt, synthetic construct
  misc_feature 1..27: note = Hemicentin-1 (1595-1603)
  source 1..27: mol_type = other RNA
ctgtacatcgacaagggccagtatctc

SEQ ID NO: 69952 - RNA, 27 nt, synthetic construct
  misc_feature 1..27: note = Cleavage and polyadenylation specificity factor subunit 6 (83-91)
  source 1..27: mol_type = other RNA
ctgtacatcggcaacctcacctggtgg

SEQ ID NO: 69953 - RNA, 27 nt, synthetic construct
  misc_feature 1..27: note = Myotubularin-related protein 12 (484-492)
  source 1..27: mol_type = other RNA
ctgtacatccccattttcagcaccttt

SEQ ID NO: 69954 - RNA, 27 nt, synthetic construct
  misc_feature 1..27: note = Disintegrin and metalloproteinase domain-containing protein 10 (167-175)
  source 1..27: mol_type = other RNA
ctgtacatccagaccgaccacctcttc

SEQ ID NO: 69955 - RNA, 27 nt, synthetic construct
  misc_feature 1..27: note = SUN domain-containing ossification factor (723-731)
  source 1..27: mol_type = other RNA
ctgtacatcgtggagcccctcaagttc

SEQ ID NO: 69956 - RNA, 30 nt, synthetic construct
  misc_feature 1..30: note = Solute carrier family 25 member 34 (267-276)
  source 1..30: mol_type = other RNA
ctgtacaagggcctcgggcccgcctatctt

SEQ ID NO: 69957 - RNA, 27 nt, synthetic construct
  misc_feature 1..27: note = ER membrane protein complex subunit 1 (731-739)
  source 1..27: mol_type = other RNA
ctgtacaagagcctcaaccccaatctt

SEQ ID NO: 69958 - RNA, 27 nt, synthetic construct
  misc_feature 1..27: note = NTF2-related export protein 2 (39-47)
  source 1..27: mol_type = other RNA
ctgtacctcgacaaggccacccttatc

SEQ ID NO: 69959 - RNA, 30 nt, synthetic construct
  misc_feature 1..30: note = NTF2-related export protein 2 (39-48)
  source 1..30: mol_type = other RNA
ctgtacctcgacaaggccacccttatctgg

SEQ ID NO: 69960 - RNA, 27 nt, synthetic construct
  misc_feature 1..27: note = SWI/SNF-related matrix-associated actin-dependent regulator of chromatin subfamily A containing DEAD/H box 1 (320-328)
  source 1..27: mol_type = other RNA
ctgtacctcggccttttcaacagactg

SEQ ID NO: 69961 - RNA, 27 nt, synthetic construct
  misc_feature 1..27: note = Protein CLN8 (226-234)
  source 1..27: mol_type = other RNA
ctgtacctcccccaccttaccctgttc

SEQ ID NO: 69962 - RNA, 21 nt, synthetic construct
  misc_feature 1..21: note = Mitochondrial carrier homolog 1 (63-69)
  source 1..21: mol_type = other RNA
ctgtacctccccagcttcttt

SEQ ID NO: 69963 - RNA, 27 nt, synthetic construct
  misc_feature 1..27: note = DnaJ homolog subfamily A member 2 (129-137)
  source 1..27: mol_type = other RNA
ctgtacaacggcaagaccacaaaactc

SEQ ID NO: 69964 - RNA, 33 nt, synthetic construct
  misc_feature 1..33: note = Melanocyte protein PMEL (55-65)
  source 1..33: mol_type = other RNA
ctgtaccccgagtggaccgaagcccagagactc

SEQ ID NO: 69965 - RNA, 27 nt, synthetic construct
  misc_feature 1..27: note = Protein transport protein Sec23B (560-568)
  source 1..27: mol_type = other RNA
ctgtacccccagttcatgtttcacctc

SEQ ID NO: 69966 - RNA, 27 nt, synthetic construct
  misc_feature 1..27: note = Vacuolar protein sorting-associated protein 4A (31-39)
  source 1..27: mol_type = other RNA
ctgtaccagcacgccgtggagtatttc

SEQ ID NO: 69967 - RNA, 27 nt, synthetic construct
  misc_feature 1..27: note = CCAAT/enhancer-binding protein zeta (212-220)
  source 1..27: mol_type = other RNA
ctgtaccagcacgagatcaacctcttc

SEQ ID NO: 69968 - RNA, 27 nt, synthetic construct
  misc_feature 1..27: note = Engulfment and cell motility protein 2 (207-215)
  source 1..27: mol_type = other RNA
ctgtaccagaagatcgccgaggaaatt

SEQ ID NO: 69969 - RNA, 24 nt, synthetic construct
  misc_feature 1..24: note = E3 ubiquitin-protein ligase UBR5 (1255-1262)
  source 1..24: mol_type = other RNA
ctgtacagactccttaccgccaca

SEQ ID NO: 69970 - RNA, 27 nt, synthetic construct
  misc_feature 1..27: note = Unconventional myosin-Ib (356-364)
  source 1..27: mol_type = other RNA
ctgtacagcagactcttctcctggctt

SEQ ID NO: 69971 - RNA, 27 nt, synthetic construct
  misc_feature 1..27: note = Ubiquitin-like modifier-activating enzyme 7 (14-22)
  source 1..27: mol_type = other RNA
ctgtacagcagacagctctatgtgctt

SEQ ID NO: 69972 - RNA, 24 nt, synthetic construct
  misc_feature 1..24: note = Mitochondrial ubiquitin ligase activator of NFKB 1 (25-32)
  source 1..24: mol_type = other RNA
ctgtacagcgtgtatagacagaag

SEQ ID NO: 69973 - RNA, 27 nt, synthetic construct
  misc_feature 1..27: note = Melanoma antigen preferentially expressed in tumors (301-309)
  source 1..27: mol_type = other RNA
ctgtacgtggacagcctcttctttctt

SEQ ID NO: 69974 - RNA, 27 nt, synthetic construct
  misc_feature 1..27: note = Beta-galactosidase-1-like protein (586-594)
  source 1..27: mol_type = other RNA
ctgtacgtgcccagattcctccttttt

SEQ ID NO: 69975 - RNA, 24 nt, synthetic construct
  misc_feature 1..24: note = 40S ribosomal protein S29 (6-13)
  source 1..24: mol_type = other RNA
ctgtactggagccaccccagaaag

SEQ ID NO: 69976 - RNA, 39 nt, synthetic construct
  misc_feature 1..39: note = Mitogen-activated protein kinase 1 (1-13)
  source 1..39: mol_type = other RNA
atggccgctgcagccgcggctggcgccgggcccgagatg

SEQ ID NO: 69977 - RNA, 27 nt, synthetic construct
  misc_feature 1..27: note = B-cell CLL/lymphoma 9-like protein (186-194)
  source 1..27: mol_type = other RNA
atggccgctccccagctgggccctggg

SEQ ID NO: 69978 - RNA, 30 nt, synthetic construct
  misc_feature 1..30: note = Glucosylceramidase (21-30)
  source 1..30: mol_type = other RNA
atggccggcagcctgaccgggctccttctg

SEQ ID NO: 69979 - RNA, 24 nt, synthetic construct
  misc_feature 1..24: note = Dystonin (1657-1664)
  source 1..24: mol_type = other RNA
atggccatcaaggtgctggagatt

SEQ ID NO: 69980 - RNA, 24 nt, synthetic construct
  misc_feature 1..24: note = BRAF (48-55)
  source 1..24: mol_type = other RNA
atggcccccgaggtgatcagaatg

SEQ ID NO: 69981 - RNA, 24 nt, synthetic construct
  misc_feature 1..24: note = HLA class I histocompatibility antigen, alpha chain F (1-8)
  source 1..24: mol_type = other RNA
atggcccccagaagcctgctcctt

SEQ ID NO: 69982 - RNA, 24 nt, synthetic construct
  misc_feature 1..24: note = HLA class I histocompatibility antigen, B-39 alpha chain (4-11)
  source 1..24: mol_type = other RNA
atggcccccagaaccgtgctgctc

SEQ ID NO: 69983 - RNA, 48 nt, synthetic construct
  misc_feature 1..48: note = Gamma-secretase C-terminal fragment 59 (561-576)
  source 1..48: mol_type = other RNA
atggacgccgagttcagacacgatagcggctacgaagtgcatcaccag

SEQ ID NO: 69984 - RNA, 48 nt, synthetic construct
  misc_feature 1..48: note = Dihydropyrimidinase-related protein 2 (339-354)
  source 1..48: mol_type = other RNA
atggacgagaaccagttcgtggccgtcaccagcacaaatgctgcaaag

SEQ ID NO: 69985 - RNA, 21 nt, synthetic construct
  misc_feature 1..21: note = Insulin receptor substrate 2 (545-551)
  source 1..21: mol_type = other RNA
atggacagacccctgagccac

SEQ ID NO: 69986 - RNA, 27 nt, synthetic construct
  misc_feature 1..27: note = Receptor-type tyrosine-protein phosphatase gamma (796-804)
  source 1..27: mol_type = other RNA
atggaggccatccccgtgaagcagttc

SEQ ID NO: 69987 - RNA, 30 nt, synthetic construct; identical to SEQ ID NO: 45760
  misc_feature 1..30: note = Protein wntless homolog (185-194)
  source 1..30: mol_type = other RNA

SEQ ID NO: 69988 - RNA, 27 nt, synthetic construct
  misc_feature 1..27: note = Tyrosinase (516-524)
  source 1..27: mol_type = other RNA
atggagaaggaagactaccacagcctg

SEQ ID NO: 69989 - RNA, 30 nt, synthetic construct; identical to SEQ ID NO: 45762
  misc_feature 1..30: note = PRELI domain containing protein 3B (91-100)
  source 1..30: mol_type = other RNA

SEQ ID NO: 69990 - RNA, 30 nt, synthetic construct
  misc_feature 1..30: note = Fructose-bisphosphate aldolase A (219-228)
  source 1..30: mol_type = other RNA
atggagaacgccaatgtgctggctagatac

SEQ ID NO: 69991 - RNA, 30 nt, synthetic construct; identical to SEQ ID NO: 45764
  misc_feature 1..30: note = Poly(U)-binding-splicing factor PUF60 (74-83)
  source 1..30: mol_type = other RNA

SEQ ID NO: 69992 - RNA, 30 nt, synthetic construct; identical to SEQ ID NO: 45765
  misc_feature 1..30: note = Melanoma-associated antigen 3 (167-176)
  source 1..30: mol_type = other RNA

SEQ ID NO: 69993 - RNA, 24 nt, synthetic construct
  misc_feature 1..24: note = Synemin (37-44)
  source 1..24: mol_type = other RNA
atgttcgacaagaaagtgcagctg

SEQ ID NO: 69994 - RNA, 18 nt, synthetic construct
  misc_feature 1..18: note = Proliferating cell nuclear antigen (244-249)
  source 1..18: mol_type = other RNA
atgggccacctgaagtac

SEQ ID NO: 69995 - RNA, 60 nt, synthetic construct
  misc_feature 1..60: note = Actin, aortic smooth muscle (49-68)
  source 1..60: mol_type = other RNA
atgggccagaaggacagctacgtgggggatgaggcccaatccaaaagaggaatcctgacc

SEQ ID NO: 69996 - RNA, 24 nt, synthetic construct
  misc_feature 1..24: note = Ankyrin-1 (733-740)
  source 1..24: mol_type = other RNA
atgggctacacccccctgcacgtg

SEQ ID NO: 69997 - RNA, 21 nt, synthetic construct
  misc_feature 1..21: note = Dynein light chain roadblock-type 1 (53-59)
  source 1..21: mol_type = other RNA
atgcacagcttcatcctgaag

SEQ ID NO: 69998 - RNA, 27 nt, synthetic construct
  misc_feature 1..27: note = Glycogen phosphorylase, liver form (619-627)
  source 1..27: mol_type = other RNA
atgatcattaagctgataaccagcgtg

SEQ ID NO: 69999 - RNA, 27 nt, synthetic construct
  misc_feature 1..27: note = Phenylalanine-tRNA ligase alpha subunit (465-473)
  source 1..27: mol_type = other RNA
atgatcaagtacggcattaacaatata

SEQ ID NO: 70000 - RNA, 30 nt, synthetic construct
  misc_feature 1..30: note = Malate dehydrogenase, mitochondrial (273-282)
  source 1..30: mol_type = other RNA
atgatcagcgacgccattcccgagctgaag

SEQ ID NO: 70001 - RNA, 27 nt, synthetic construct
  misc_feature 1..27: note = ER membrane protein complex subunit 1 (976-984)
  source 1..27: mol_type = other RNA
atgatcaccaagagactggcccaggtg

SEQ ID NO: 70002 - RNA, 27 nt, synthetic construct
  misc_feature 1..27: note = Huntingtin (537-545)
  source 1..27: mol_type = other RNA
atgatcaccacacaccccgccctggtg

SEQ ID NO: 70003 - RNA, 27 nt, synthetic construct
  misc_feature 1..27: note = EH domain-containing protein 3 (385-393)
  source 1..27: mol_type = other RNA
atgctggcccacgacatcgctcagctc

SEQ ID NO: 70004 - RNA, 24 nt, synthetic construct
  misc_feature 1..24: note = Chondroitin sulfate proteoglycan 4 (22-29)
  source 1..24: mol_type = other RNA
atgctggccagactcgctagcgca

SEQ ID NO: 70005 - RNA, 33 nt, synthetic construct
  misc_feature 1..33: note = COP9 signalosome complex subunit 1 (344-354)
  source 1..33: mol_type = other RNA
atgctggacgagatgaaggataacctccttctg

SEQ ID NO: 70006 - RNA, 33 nt, synthetic construct
  misc_feature 1..33: note = Baculoviral IAP repeat-containing protein 6 (1752-1762)
  source 1..33: mol_type = other RNA
atgctggaggacgaaaaggtgaccatgttcctc

SEQ ID NO: 70007 - RNA, 21 nt, synthetic construct
  misc_feature 1..21: note = Spectrin beta chain, non-erythrocytic 4 (2042-2048)
  source 1..21: mol_type = other RNA
atgctggaggtgcaccagttc

SEQ ID NO: 70008 - RNA, 27 nt, synthetic construct
  misc_feature 1..27: note = Mitotic checkpoint serine/threonine-protein kinase BUB1 (998-1006)
  source 1..27: mol_type = other RNA
atgctgttcggcacctacatgaaggtg

SEQ ID NO: 70009 - RNA, 24 nt, synthetic construct
  misc_feature 1..24: note = Collagen alpha-1(XVIII) chain (1454-1461)
  source 1..24: mol_type = other RNA
atgctgggccaggtgcacgaggtc

SEQ ID NO: 70010 - RNA, 27 nt, synthetic construct
  misc_feature 1..27: note = Tetratricopeptide repeat protein 28 (1354-1362)
  source 1..27: mol_type = other RNA
atgctgatcggcagcgacgtgaagctc

SEQ ID NO: 70011 - RNA, 27 nt, synthetic construct
  misc_feature 1..27: note = Phosphatidylinositol 5-phosphate 4-kinase type-2 beta (65-73)
  source 1..27: mol_type = other RNA
atgctgatgcccgacgatttcaaggcc

SEQ ID NO: 70012 - RNA, 66 nt, synthetic construct
  misc_feature 1..66: note = T-complex protein 1 subunit beta (445-466)
  source 1..66: mol_type = other RNA
atgctgcccaccatcattgccgacaacgctggctacgatagcgcagacctcgtggcccagcttaga

SEQ ID NO: 70013 - RNA, 27 nt, synthetic construct
  misc_feature 1..27: note = DNA-binding protein SATB2 (142-150)
  source 1..27: mol_type = other RNA
atgctgcaggacgtgtaccacgtcgtt

SEQ ID NO: 70014 - RNA, 174 nt, synthetic construct
  misc_feature 1..174: note = 6.8 kDa mitochondrial proteolipid (1-58)
  source 1..174: mol_type = other RNA
atgctgcagagcatcattaagaacatatggatccccatgaaaccttactataccaaggtgtaccaagagatttggatcggcatggggctcatgggattcattgtctataaaatcagagccgctgacaagaggtccaaagcacttaaggcctctgcgccagctccgggtcaccat

SEQ ID NO: 70015 - RNA, 30 nt, synthetic construct; identical to SEQ ID NO: 45788
  misc_feature 1..30: note = BTB/POZ domain-containing protein KCTD3 (428-437)
  source 1..30: mol_type = other RNA

SEQ ID NO: 70016 - RNA, 27 nt, synthetic construct
  misc_feature 1..27: note = Death-associated protein kinase 1 (763-771)
  source 1..27: mol_type = other RNA
atgatgttcgagcccggcctgaccaag

SEQ ID NO: 70017 - RNA, 27 nt, synthetic construct
  misc_feature 1..27: note = RB1-inducible coiled-coil protein 1 (107-115)
  source 1..27: mol_type = other RNA
atgatgcccgccgtgttccacaccgtc

SEQ ID NO: 70018 - RNA, 48 nt, synthetic construct
  misc_feature 1..48: note = Exostosin-like 1 (589-604)
  source 1..48: mol_type = other RNA
atgaacttcatcgtggccgctgtcaccaagctgccccctattaaagtt

SEQ ID NO: 70019 - RNA, 27 nt, synthetic construct
  misc_feature 1..27: note = Sodium/potassium/calcium exchanger 5 (298-306)
  source 1..27: mol_type = other RNA
atgcccgaggccgacctgaagagaatc

SEQ ID NO: 70020 - RNA, 24 nt, synthetic construct
  misc_feature 1..24: note = Filamin-B (1129-1136)
  source 1..24: mol_type = other RNA
atgcccttcgaccctagcaaggtg

SEQ ID NO: 70021 - RNA, 69 nt, synthetic construct
  misc_feature 1..69: note = Heat shock cognate 71 kDa protein (621-643)
  source 1..69: mol_type = other RNA
atgcccggcgggttccctggaggtggcgccccaccgagcgggggagcttcctctggccccaccatcgag

SEQ ID NO: 70022 - RNA, 27 nt, synthetic construct
  misc_feature 1..27: note = Protein polybromo-1 (1078-1086)
  source 1..27: mol_type = other RNA
atgcccatcagctccgtgagattcgtc

SEQ ID NO: 70023 - RNA, 27 nt, synthetic construct
  misc_feature 1..27: note = Malignant T-cell-amplified sequence 1 (45-53)
  source 1..27: mol_type = other RNA
atgcccaagaaagaccctgtgaagatc

SEQ ID NO: 70024 - RNA, 27 nt, synthetic construct
  misc_feature 1..27: note = Melanoma antigen preferentially expressed in tumors (218-226)
  source 1..27: mol_type = other RNA
atgcccatgcaggacatcaagatgatt

SEQ ID NO: 70025 - RNA, 27 nt, synthetic construct
  misc_feature 1..27: note = Nuclear factor related to kappa-B-binding protein (810-818)
  source 1..27: mol_type = other RNA
atgccccctaaggccggccagaccatc

SEQ ID NO: 70026 - RNA, 27 nt, synthetic construct
  misc_feature 1..27: note = E3 ubiquitin-protein ligase Itchy homolog (380-388)
  source 1..27: mol_type = other RNA
atgccccagcacatcaagattaccgtg

SEQ ID NO: 70027 - RNA, 39 nt, synthetic construct
  misc_feature 1..39: note = Myotubularin-related protein 5 (315-327)
  source 1..39: mol_type = other RNA
atgcccagatacgccgacgctagcggcaggaacaccctg

SEQ ID NO: 70028 - RNA, 30 nt, synthetic construct
  misc_feature 1..30: note = Splicing factor 3B subunit 2 (596-605)
  source 1..30: mol_type = other RNA
atgcccgtgggccctaacgcccacaaggtc

SEQ ID NO: 70029 - RNA, 27 nt, synthetic construct
  misc_feature 1..27: note = Zinc finger protein 512B (211-219)
  source 1..27: mol_type = other RNA
atgcccgtgaccaagcctatcacagtc

SEQ ID NO: 70030 - RNA, 27 nt, synthetic construct
  misc_feature 1..27: note = Dihydropyrimidinase-related protein 3 (192-200)
  source 1..27: mol_type = other RNA
atgccctacaagggcatgaccacagtg

SEQ ID NO: 70031 - RNA, 21 nt, synthetic construct
  misc_feature 1..21: note = Transmembraneoprotein NMB (38-44)
  source 1..21: mol_type = other RNA
atgagagagcacaaccagctg

SEQ ID NO: 70032 - RNA, 27 nt, synthetic construct
  misc_feature 1..27: note = WD repeat-containing protein 81 (60-68)
  source 1..27: mol_type = other RNA
atgagcgaggaacacaccgccgtgtac

SEQ ID NO: 70033 - RNA, 27 nt, synthetic construct
  misc_feature 1..27: note = Bombesin receptor-activated protein C6orf89 (44-52)
  source 1..27: mol_type = other RNA
atgagcgagaaggccatcgaaaaattc

SEQ ID NO: 70034 - RNA, 27 nt, synthetic construct
  misc_feature 1..27: note = Inactive ubiquitin carboxyl-terminal hydrolase 53 (1045-1053)
  source 1..27: mol_type = other RNA
atgaccgacacatacagactgaagtat

SEQ ID NO: 70035 - RNA, 18 nt, synthetic construct
  misc_feature 1..18: note = Neuronal membraneoprotein M6-a (202-207)
  source 1..18: mol_type = other RNA
atgaccttccacctgttt

SEQ ID NO: 70036 - RNA, 87 nt, synthetic construct
  misc_feature 1..87: note = POTE ankyrin domain family member I (36-64)
  source 1..87: mol_type = other RNA
atgacccagatcatgttcgagacatttaacactcccgccatgtacgtggctattcaagcagtcctgagcctctatgcctccggcaga

SEQ ID NO: 70037 - RNA, 36 nt, synthetic construct
  misc_feature 1..36: note = Protein disulfide-isomerase A3 (285-296)
  source 1..36: mol_type = other RNA
atggtggccaagaaattcctggacgctggccacaag

SEQ ID NO: 70038 - RNA, 24 nt, synthetic construct
  misc_feature 1..24: note = Unconventional myosin-Id (310-317)
  source 1..24: mol_type = other RNA
atggtggagaaggccctgctctac

SEQ ID NO: 70039 - RNA, 27 nt, synthetic construct
  misc_feature 1..27: note = Putative eukaryotic translation initiation factor 2 subunit 3-like protein (353-361)
  source 1..27: mol_type = other RNA
atggtgggccagatcctgggggccgtc

SEQ ID NO: 70040 - RNA, 42 nt, synthetic construct
  misc_feature 1..42: note = MICOS complex subunit MIC60 (88-101)
  source 1..42: mol_type = other RNA
atggtgctgggccccgccgcttacaacgtccctctcccaaag

SEQ ID NO: 70041 - RNA, 27 nt, synthetic construct
  misc_feature 1..27: note = ER membrane protein complex subunit 7 (169-177)
  source 1..27: mol_type = other RNA
atggtgctgcccctccttatcttcgtc

SEQ ID NO: 70042 - RNA, 69 nt, synthetic construct
  misc_feature 1..69: note = X-ray repair cross-complementing protein 5 (210-232)
  source 1..69: mol_type = other RNA
atggtgatgatcagcctggagggcgaagacgggctcgatgagatttactccttctctgaatcacttaga

SEQ ID NO: 70043 - RNA, 30 nt, synthetic construct
  misc_feature 1..30: note = Threonine-tRNA ligase, cytoplasmic (655-664)
  source 1..30: mol_type = other RNA
atggtggtccccgttggccctacctgcgac

SEQ ID NO: 70044 - RNA, 30 nt, synthetic construct
  misc_feature 1..30: note = NAD(P)H dehydrogenase (quinone) 1 (129-138)
  source 1..30: mol_type = other RNA
atgtacgacaagggccccttcagaagcaaa

SEQ ID NO: 70045 - RNA, 30 nt, synthetic construct
  misc_feature 1..30: note = Exportin-1 (545-554)
  source 1..30: mol_type = other RNA
atgtacatcgtgggccagtatcccagattc

SEQ ID NO: 70046 - RNA, 27 nt, synthetic construct
  misc_feature 1..27: note = MICOS complex subunit MIC25 (169-177)
  source 1..27: mol_type = other RNA
atgtacaagctgagctccgagcagttc

SEQ ID NO: 70047 - RNA, 27 nt, synthetic construct
  misc_feature 1..27: note = F-box only protein 21 (417-425)
  source 1..27: mol_type = other RNA
atgtaccccgaccaggtgcaactgctc

SEQ ID NO: 70048 - RNA, 30 nt, synthetic construct
  misc_feature 1..30: note = Sodium/potassium-transporting ATPase subunit alpha-1 (980-989)
  source 1..30: mol_type = other RNA
atgtaccccctgaagcctacctggtggttc

SEQ ID NO: 70049 - RNA, 27 nt, synthetic construct
  misc_feature 1..27: note = Sphingomyelin phosphodiesterase 4 (377-385)
  source 1..27: mol_type = other RNA
atgtacaccaagctgttcgtgggcttt

SEQ ID NO: 70050 - RNA, 33 nt, synthetic construct
  misc_feature 1..33: note = DNA-binding protein SATB1 (453-463)
  source 1..33: mol_type = other RNA
aacgccgctagcgcaatgggccccgcccctctg

SEQ ID NO: 70051 - RNA, 30 nt, synthetic construct
  misc_feature 1..30: note = Eukaryotic translation initiation factor 3 subunit L (169-178)
  source 1..30: mol_type = other RNA
aacgccgacggccccgctcctctggagctc

SEQ ID NO: 70052 - RNA, 27 nt, synthetic construct
  misc_feature 1..27: note = Far upstream element-binding protein 1 (418-426)
  source 1..27: mol_type = other RNA
aacgccgaccccaatatgaagctgttc

SEQ ID NO: 70053 - RNA, 27 nt, synthetic construct
  misc_feature 1..27: note = Erythrocyte band 7 integral membrane protein (138-146)
  source 1..27: mol_type = other RNA
aacgccgacagcgctaccagactgctc

SEQ ID NO: 70054 - RNA, 27 nt, synthetic construct
  misc_feature 1..27: note = AP-2 complex subunit beta (874-882)
  source 1..27: mol_type = other RNA
aacgccgacaccgtgagctccaagctg

SEQ ID NO: 70055 - RNA, 27 nt, synthetic construct
  misc_feature 1..27: note = CD44 antigen (137-145)
  source 1..27: mol_type = other RNA
aacgccttcgacggccccatcaccatt

SEQ ID NO: 70056 - RNA, 36 nt, synthetic construct
  misc_feature 1..36: note = Catenin alpha-1 (43-54)
  source 1..36: mol_type = other RNA
aacgccggcaatgagcaggacctggggatccaatac

SEQ ID NO: 70057 - RNA, 24 nt, synthetic construct
  misc_feature 1..24: note = Helicase-like transcription factor (96-103)
  source 1..24: mol_type = other RNA
aacgccatcaaggtgaataacgtc

SEQ ID NO: 70058 - RNA, 24 nt, synthetic construct
  misc_feature 1..24: note = Similar to 60S ribosomal protein L7 (171-178)
  source 1..24: mol_type = other RNA
aacgccctgatcgctagaagcctc

SEQ ID NO: 70059 - RNA, 33 nt, synthetic construct
  misc_feature 1..33: note = Forkhead box protein C1 (212-222)
  source 1..33: mol_type = other RNA
aacgcccccggccctcagccaccgcccgtgaga

SEQ ID NO: 70060 - RNA, 24 nt, synthetic construct
  misc_feature 1..24: note = Serine/threonine-protein phosphatase 2A regulatory subunit B'' subunit alpha (81-88)
  source 1..24: mol_type = other RNA
aacgcccccctgagcatcaatatt

SEQ ID NO: 70061 - RNA, 21 nt, synthetic construct
  misc_feature 1..21: note = Protein FAM208B (1664-1670)
  source 1..21: mol_type = other RNA
aacgccaccctgacacactac

SEQ ID NO: 70062 - RNA, 24 nt, synthetic construct
  misc_feature 1..24: note = Rho guanine nucleotide exchange factor 11 (1029-1036)
  source 1..24: mol_type = other RNA
aacgccgtgctgatcagaagcgtc

SEQ ID NO: 70063 - RNA, 30 nt, synthetic construct
  misc_feature 1..30: note = T-complex protein 1 subunit theta (48-57)
  source 1..30: mol_type = other RNA
aacgacgccgctaccatcctgagagagctc

SEQ ID NO: 70064 - RNA, 27 nt, synthetic construct
  misc_feature 1..27: note = Pumilio homolog 2 (927-935)
  source 1..27: mol_type = other RNA
aacgacggcccccacagcgccctgtac

SEQ ID NO: 70065 - RNA, 24 nt, synthetic construct
  misc_feature 1..24: note = Ribonuclease P protein subunit p21 (126-133)
  source 1..24: mol_type = other RNA
aacgaccccggccacctgctctgg

SEQ ID NO: 70066 - RNA, 30 nt, synthetic construct
  misc_feature 1..30: note = Protein TANC1 (587-596)
  source 1..30: mol_type = other RNA
aacgaggccgaattccacaagcccgactac

SEQ ID NO: 70067 - RNA, 30 nt, synthetic construct
  misc_feature 1..30: note = Hemicentin-1 (2650-2659)
  source 1..30: mol_type = other RNA
aacgaggccggcgaaatgatcaagcactac

SEQ ID NO: 70068 - RNA, 30 nt, synthetic construct
  misc_feature 1..30: note = Hemicentin-1 (3510-3519)
  source 1..30: mol_type = other RNA
aacgaggccggcgaagtgagcaagcacttc

SEQ ID NO: 70069 - RNA, 30 nt, synthetic construct
  misc_feature 1..30: note = E3 ubiquitin-protein ligase MYCBP2 (2115-2124)
  source 1..30: mol_type = other RNA
aacgaggccctgttcagcctcgaaaccgct

SEQ ID NO: 70070 - RNA, 27 nt, synthetic construct
  misc_feature 1..27: note = Insulin-like growth factor 1 receptor (1048-1056)
  source 1..27: mol_type = other RNA
aacgaggccagcgtgatgaaggaattc

SEQ ID NO: 70071 - RNA, 30 nt, synthetic construct; identical to SEQ ID NO: 45844
  misc_feature 1..30: note = Neutral amino acid transporter B(0) (61-70)
  source 1..30: mol_type = other RNA

SEQ ID NO: 70072 - RNA, 27 nt, synthetic construct
  misc_feature 1..27: note = Kinesin-like protein KIF13B (360-368)
  source 1..27: mol_type = other RNA
aacgaggaccccaatgccagaatcatt

SEQ ID NO: 70073 - RNA, 27 nt, synthetic construct
  misc_feature 1..27: note = Smith-Magenis syndrome chromosomal region candidate gene 8 protein (896-904)
  source 1..27: mol_type = other RNA
aacgaggacgtgagagtcgttcagtac

SEQ ID NO: 70074 - RNA, 27 nt, synthetic construct
  misc_feature 1..27: note = RNA-binding motif, single-stranded-interacting protein 3 (399-407)
  source 1..27: mol_type = other RNA
aacgagcacgcccccgcttacagctat

SEQ ID NO: 70075 - RNA, 30 nt, synthetic construct
  misc_feature 1..30: note = 2-hydroxyacylsphingosine 1-beta-galactosyltransferase (284-293)
  source 1..30: mol_type = other RNA
aacgagcacggcttcgtgctggtcagcttt

SEQ ID NO: 70076 - RNA, 30 nt, synthetic construct
  misc_feature 1..30: note = Protocadherin gamma-A9 (143-152)
  source 1..30: mol_type = other RNA
aacgagatcgccgtgcccggcgctagatac

SEQ ID NO: 70077 - RNA, 33 nt, synthetic construct
  misc_feature 1..33: note = Protein transport protein Sec23A (436-446)
  source 1..33: mol_type = other RNA
aacgagatcggcaccgggggaacatgccagtgg

SEQ ID NO: 70078 - RNA, 30 nt, synthetic construct
  misc_feature 1..30: note = Serine incorporator 3 (396-405)
  source 1..30: mol_type = other RNA
aacgagaaggaaggcgtgcagtacagctat

SEQ ID NO: 70079 - RNA, 27 nt, synthetic construct
  misc_feature 1..27: note = Pre-rRNA-processing protein TSR1 homolog (69-77)
  source 1..27: mol_type = other RNA
aacgagctgggcaatacccagaacttc

SEQ ID NO: 70080 - RNA, 27 nt, synthetic construct
  misc_feature 1..27: note = T-box transcription factor TBX2 (676-684)
  source 1..27: mol_type = other RNA
aacgagctgcagagcatccaaagactc

SEQ ID NO: 70081 - RNA, 27 nt, synthetic construct
  misc_feature 1..27: note = Spectrin beta chain, non-erythrocytic 1 (32-40)
  source 1..27: mol_type = other RNA
aacgagaatagctccgccagactgttc

SEQ ID NO: 70082 - RNA, 27 nt, synthetic construct
  misc_feature 1..27: note = Cytoplasmic FMR1-interacting protein 2 (99-107)
  source 1..27: mol_type = other RNA
aacgagcagcccaatagagtggaaatc

SEQ ID NO: 70083 - RNA, 30 nt, synthetic construct
  misc_feature 1..30: note = Serine incorporator 1 (377-386)
  source 1..30: mol_type = other RNA
aacgagagagacggcgtgacctacagctat

SEQ ID NO: 70084 - RNA, 27 nt, synthetic construct
  misc_feature 1..27: note = Transcription factor SOX-10 (146-154)
  source 1..27: mol_type = other RNA
aacgagagcgacaagagacccttcatc

SEQ ID NO: 70085 - RNA, 27 nt, synthetic construct
  misc_feature 1..27: note = Laminin subunit beta-1 (541-549)
  source 1..27: mol_type = other RNA
aacgaggtggaacccggctactatttc

SEQ ID NO: 70086 - RNA, 21 nt, synthetic construct
  misc_feature 1..21: note = AP-1 complex subunit sigma-1A (105-111)
  source 1..21: mol_type = other RNA
aacttcgagaaggcctacttt

SEQ ID NO: 70087 - RNA, 18 nt, synthetic construct
  misc_feature 1..18: note = Serine/threonine-protein phosphatase 2A 55 kDa regulatory subunit B alpha isoform (364-369)
  source 1..18: mol_type = other RNA
aacttctttagaatgttc

SEQ ID NO: 70088 - RNA, 27 nt, synthetic construct
  misc_feature 1..27: note = Astrotactin-2 (354-362)
  source 1..27: mol_type = other RNA
aacttcatcaaggactttccccagctg

SEQ ID NO: 70089 - RNA, 21 nt, synthetic construct
  misc_feature 1..21: note = Absent in melanoma 1 protein (1462-1468)
  source 1..21: mol_type = other RNA
aacttcaccggcaatcagtac

SEQ ID NO: 70090 - RNA, 24 nt, synthetic construct
  misc_feature 1..24: note = RNA-binding protein 12B (194-201)
  source 1..24: mol_type = other RNA
aacggcgacgccatcgtgaagttc

SEQ ID NO: 70091 - RNA, 27 nt, synthetic construct
  misc_feature 1..27: note = Receptor-interacting serine/threonine-protein kinase 4 (562-570)
  source 1..27: mol_type = other RNA
aacggcgacgagagctccaccagactg

SEQ ID NO: 70092 - RNA, 24 nt, synthetic construct
  misc_feature 1..24: note = Ankyrin-1 (403-410)
  source 1..24: mol_type = other RNA
aacggcttcacccccctgcacatc

SEQ ID NO: 70093 - RNA, 33 nt, synthetic construct
  misc_feature 1..33: note = Insulin-like growth factor-binding protein complex acid labile subunit (458-468)
  source 1..33: mol_type = other RNA
aacggcctggtggggatcgaggaacagagcctc

SEQ ID NO: 70094 - RNA, 78 nt, synthetic construct
  misc_feature 1..78: note = RNA-binding protein Nova-2 (369-394)
  source 1..78: mol_type = other RNA
aacggctacctgggggccggagctggtggcggggcaggaggcggtgggggacccctcgtggccgcggctgccgcagcc

SEQ ID NO: 70095 - RNA, 24 nt, synthetic construct
  misc_feature 1..24: note = Ankyrin-1 (634-641)
  source 1..24: mol_type = other RNA
aacggctacacccccctgcacatc

SEQ ID NO: 70096 - RNA, 30 nt, synthetic construct; identical to SEQ ID NO: 45869
  misc_feature 1..30: note = Hemicentin-1 (4034-4043)
  source 1..30: mol_type = other RNA

SEQ ID NO: 70097 - RNA, 45 nt, synthetic construct
  misc_feature 1..45: note = Tyrosine-protein phosphatase non-receptor type substrate 1 (452-466)
  source 1..45: mol_type = other RNA
aaccacaccgagtacgccagcatccagacatccccccaacctgct

SEQ ID NO: 70098 - RNA, 51 nt, synthetic construct
  misc_feature 1..51: note = Tyrosine-protein phosphatase non-receptor type substrate 1 (452-468)
  source 1..51: mol_type = other RNA
aaccacaccgagtacgccagcatccagacatccccccaacctgcttctgaa

SEQ ID NO: 70099 - RNA, 54 nt, synthetic construct
  misc_feature 1..54: note = Tyrosine-protein phosphatase non-receptor type substrate 1 (452-469)
  source 1..54: mol_type = other RNA
aaccacaccgagtacgccagcatccagacatccccccaacctgcttctgaagac

SEQ ID NO: 70100 - RNA, 60 nt, synthetic construct
  misc_feature 1..60: note = Cytochrome c oxidase subunit 6A1, mitochondrial (67-86)
  source 1..60: mol_type = other RNA
aaccacaccctgttccataatccccacgtgaaccctctcccaacaggctacgaggacgaa

SEQ ID NO: 70101 - RNA, 51 nt, synthetic construct
  misc_feature 1..51: note = Beta-2-microglobulin (82-98)
  source 1..51: mol_type = other RNA
aaccacgtgaccctgagccagcccaagatcgtcaaatgggacagagatatg

SEQ ID NO: 70102 - RNA, 18 nt, synthetic construct
  misc_feature 1..18: note = Ketosamine-3-kinase (149-154)
  source 1..18: mol_type = other RNA
aaccactggaatcatttc

SEQ ID NO: 70103 - RNA, 27 nt, synthetic construct
  misc_feature 1..27: note = Probable ATP-dependent RNA helicase YTHDC2 (689-697)
  source 1..27: mol_type = other RNA
aacatcgccgagaccagcattacagtg

SEQ ID NO: 70104 - RNA, 30 nt, synthetic construct
  misc_feature 1..30: note = Retinoic acid receptor RXR-gamma (268-277)
  source 1..30: mol_type = other RNA
aacatctgccacgccgctgacaagcagctg

SEQ ID NO: 70105 - RNA, 27 nt, synthetic construct
  misc_feature 1..27: note = ATP-dependent RNA helicase A (346-354)
  source 1..27: mol_type = other RNA
aacatcgacgagggccccctggccttc

SEQ ID NO: 70106 - RNA, 27 nt, synthetic construct
  misc_feature 1..27: note = P2X purinoceptor 7 (195-203)
  source 1..27: mol_type = other RNA
aacatcgacttccccggccacaattac

SEQ ID NO: 70107 - RNA, 45 nt, synthetic construct
  misc_feature 1..45: note = Tyrosinase (122-136)
  source 1..45: mol_type = other RNA
aacatcttcgacctgagcgcccccgagaaggataaatttttcgct

SEQ ID NO: 70108 - RNA, 36 nt, synthetic construct
  misc_feature 1..36: note = Glyceraldehyde-3-phosphate dehydrogenase, testis-specific (277-288)
  source 1..36: mol_type = other RNA
aacatcattcccgccagcaccggcgctgcaaaggcc

SEQ ID NO: 70109 - RNA, 27 nt, synthetic construct
  misc_feature 1..27: note = SLIT-ROBO Rho GTPase-activating protein 2 (123-131)
  source 1..27: mol_type = other RNA
aacatcattcccagattcgtgcaggtc

SEQ ID NO: 70110 - RNA, 27 nt, synthetic construct
  misc_feature 1..27: note = Heterogeneous nuclear ribonucleoprotein U-like protein 1 (451-459)
  source 1..27: mol_type = other RNA
aacatcctgggcaccaatgccattatg

SEQ ID NO: 70111 - RNA, 78 nt, synthetic construct
  misc_feature 1..78: note = ATP synthase-coupling factor 6, mitochondrial (33-58)
  source 1..78: mol_type = other RNA
aacaaggagctggaccccatccagaaactcttcgtggataagattagagaatacaaaagcaagaggcaaacctccggc

SEQ ID NO: 70112 - RNA, 90 nt, synthetic construct
  misc_feature 1..90: note = ATP synthase-coupling factor 6, mitochondrial (33-62)
  source 1..90: mol_type = other RNA
aacaaggagctggaccccatccagaaactcttcgtggataagattagagaatacaaaagcaagaggcaaacctccggcgggcctgtcgac

SEQ ID NO: 70113 - RNA, 33 nt, synthetic construct
  misc_feature 1..33: note = Eukaryotic translation initiation factor 3 subunit C-like protein (131-141)
  source 1..33: mol_type = other RNA
aacaagaataacgccaaagctctgagcaccctc

SEQ ID NO: 70114 - RNA, 51 nt, synthetic construct
  misc_feature 1..51: note = Heat shock 70 kDa protein 4 (753-769)
  source 1..51: mol_type = other RNA
aacaagcagagcctgaccatggaccccgtggtcaaatccaaggagatcgaa

SEQ ID NO: 70115 - RNA, 27 nt, synthetic construct
  misc_feature 1..27: note = Bifunctional glutamate/proline-tRNA ligase (1023-1031)
  source 1..27: mol_type = other RNA
aacctggccgactggtacagccaggtg

SEQ ID NO: 70116 - RNA, 24 nt, synthetic construct
  misc_feature 1..24: note = Vimentin (177-184)
  source 1..24: mol_type = other RNA
aacctggccgaggacatcatgaga

SEQ ID NO: 70117 - RNA, 33 nt, synthetic construct
  misc_feature 1..33: note = Dystonin (208-218)
  source 1..33: mol_type = other RNA
aacctggccaatctcgagcacgctttctacgtg

SEQ ID NO: 70118 - RNA, 27 nt, synthetic construct
  misc_feature 1..27: note = CMP-sialic acid transporter (111-119)
  source 1..27: mol_type = other RNA
aacctggacgccgctgtgtaccaggtc

SEQ ID NO: 70119 - RNA, 27 nt, synthetic construct
  misc_feature 1..27: note = Cysteine andine-rich protein 1 (43-51)
  source 1..27: mol_type = other RNA
aacctggacagcaccacagtggccgtc

SEQ ID NO: 70120 - RNA, 30 nt, synthetic construct; identical to SEQ ID NO: 45893
  misc_feature 1..30: note = Phospholipase A1 member A (42-51)
  source 1..30: mol_type = other RNA

SEQ ID NO: 70121 - RNA, 27 nt, synthetic construct
  misc_feature 1..27: note = Eukaryotic translation initiation factor 3 subunit L (162-170)
  source 1..27: mol_type = other RNA
aacctgttcaattacatcctcaacgcc

SEQ ID NO: 70122 - RNA, 24 nt, synthetic construct
  misc_feature 1..24: note = Eukaryotic translation initiation factor 2-alpha kinase 4 (1314-1321)
  source 1..24: mol_type = other RNA
aacctgggcctcgtgtacaaggtc

SEQ ID NO: 70123 - RNA, 27 nt, synthetic construct
  misc_feature 1..27: note = F-box/LRR-repeat protein 18 (261-269)
  source 1..27: mol_type = other RNA
aacctgcacgccttcctcatcagcgtg

SEQ ID NO: 70124 - RNA, 99 nt, synthetic construct
  misc_feature 1..99: note = Glia-derived nexin (344-376)
  source 1..99: mol_type = other RNA
aacctgcacgtgagccatatcctccagaaggccaaaattgaggtctccgaagacggcaccaaggcttctgcagccacaactgcgatacttatcgctaga

SEQ ID NO: 70125 - RNA, 102 nt, synthetic construct
  misc_feature 1..102: note = Glia-derived nexin (344-377)
  source 1..102: mol_type = other RNA
aacctgcacgtgagccatatcctccagaaggccaaaattgaggtctccgaagacggcaccaaggcttctgcagccacaactgcgatacttatcgctagatca

SEQ ID NO: 70126 - RNA, 27 nt, synthetic construct
  misc_feature 1..27: note = GPI ethanolamine phosphate transferase 3 (51-59)
  source 1..27: mol_type = other RNA
aacctgatcaagcagctcaccagcgcc

SEQ ID NO: 70127 - RNA, 27 nt, synthetic construct
  misc_feature 1..27: note = Protein EFR3 homolog B (453-461)
  source 1..27: mol_type = other RNA
aacctgatcagccagctcaccacagtg

SEQ ID NO: 70128 - RNA, 30 nt, synthetic construct
  misc_feature 1..30: note = Protein FAM179B (401-410)
  source 1..30: mol_type = other RNA
aacctgctcgacgatagcaatttcaaggtg

SEQ ID NO: 70129 - RNA, 30 nt, synthetic construct; identical to SEQ ID NO: 45902
  misc_feature 1..30: note = FERM domain-containing protein 5 (46-55)
  source 1..30: mol_type = other RNA

SEQ ID NO: 70130 - RNA, 27 nt, synthetic construct
  misc_feature 1..27: note = Plexin-B3 (1375-1383)
  source 1..27: mol_type = other RNA
aacctgctcaatagcaagcttttcctg

SEQ ID NO: 70131 - RNA, 27 nt, synthetic construct
  misc_feature 1..27: note = Vacuolar protein sorting-associated protein 53 homolog (176-184)
  source 1..27: mol_type = other RNA
aacctgctccagggcgtgatgaatgtc

SEQ ID NO: 70132 - RNA, 27 nt, synthetic construct
  misc_feature 1..27: note = Transcription factor SOX-6 (265-273)
  source 1..27: mol_type = other RNA
aacctgctccagcaacagatccaggtg

SEQ ID NO: 70133 - RNA, 33 nt, synthetic construct
  misc_feature 1..33: note = Putative segment polarity protein dishevelled homolog DVL1P1 (257-267)
  source 1..33: mol_type = other RNA
aacctgaatagcggctcctctgggacctcagac

SEQ ID NO: 70134 - RNA, 27 nt, synthetic construct
  misc_feature 1..27: note = Melanophilin (391-399)
  source 1..27: mol_type = other RNA
aacctgcccatcttcctccctagagtg

SEQ ID NO: 70135 - RNA, 24 nt, synthetic construct
  misc_feature 1..24: note = CUB and sushi domain-containing protein 3 (2038-2045)
  source 1..24: mol_type = other RNA
aacctgcccatcggcttcggggtg

SEQ ID NO: 70136 - RNA, 27 nt, synthetic construct
  misc_feature 1..27: note = Krueppel-like factor 15 (273-281)
  source 1..27: mol_type = other RNA
aacctgcccagcaagttcgtgagaatc

SEQ ID NO: 70137 - RNA, 30 nt, synthetic construct
  misc_feature 1..30: note = Clathrin heavy chain 1 (795-804)
  source 1..30: mol_type = other RNA
aacctgcagaagtacatcgagatttatgtg

SEQ ID NO: 70138 - RNA, 33 nt, synthetic construct
  misc_feature 1..33: note = Histone-lysine N-methyltransferase, H3 lysine-79 specific (241-251)
  source 1..33: mol_type = other RNA
aacctgagcgacatcggcaccattatgagagtg

SEQ ID NO: 70139 - RNA, 27 nt, synthetic construct
  misc_feature 1..27: note = Talin-1 (583-591)
  source 1..27: mol_type = other RNA
aacctgaccgagatgagcagaggcgtg

SEQ ID NO: 70140 - RNA, 27 nt, synthetic construct
  misc_feature 1..27: note = Cytoplasmic dynein 2 heavy chain 1 (271-279)
  source 1..27: mol_type = other RNA
aacctgtgggaggacccctactatctc

SEQ ID NO: 70141 - RNA, 27 nt, synthetic construct
  misc_feature 1..27: note = Receptor-type tyrosine-protein phosphatase kappa (420-428)
  source 1..27: mol_type = other RNA
aacctgtggaatagcacccaccatgtg

SEQ ID NO: 70142 - RNA, 30 nt, synthetic construct
  misc_feature 1..30: note = Contactin-associated protein-like 3B (1097-1106)
  source 1..30: mol_type = other RNA
aacatggccgacggccagctgcaccaagtg

SEQ ID NO: 70143 - RNA, 27 nt, synthetic construct
  misc_feature 1..27: note = Nucleolar pre-ribosomal-associated protein 1 (1538-1546)
  source 1..27: mol_type = other RNA
aacatggacaaggtgcccggcttctac

SEQ ID NO: 70144 - RNA, 36 nt, synthetic construct
  misc_feature 1..36: note = Unconventional myosin-Va (131-142)
  source 1..36: mol_type = other RNA
aacatgggcgacatggatccccacatcttcgccgtg

SEQ ID NO: 70145 - RNA, 27 nt, synthetic construct
  misc_feature 1..27: note = Sodium-dependent proline transporter (134-142)
  source 1..27: mol_type = other RNA
aacatgatcattgcctacgtgctgttc

SEQ ID NO: 70146 - RNA, 27 nt, synthetic construct
  misc_feature 1..27: note = Striatin-interacting protein 2 (728-736)
  source 1..27: mol_type = other RNA
aacatgaagaccatgagcgccatctac

SEQ ID NO: 70147 - RNA, 27 nt, synthetic construct
  misc_feature 1..27: note = Laminin subunit gamma-1 (71-79)
  source 1..27: mol_type = other RNA
aacatgctgaagcagctccaagaggcc

SEQ ID NO: 70148 - RNA, 27 nt, synthetic construct
  misc_feature 1..27: note = UDP-glucose:glycoprotein glucosyltransferase 2 (920-928)
  source 1..27: mol_type = other RNA
aacatgagcgacttcatcatgaaggtg

SEQ ID NO: 70149 - RNA, 27 nt, synthetic construct
  misc_feature 1..27: note = Lysine-tRNA ligase (423-431)
  source 1..27: mol_type = other RNA
aacatggtggaggaactggagaaggcc

SEQ ID NO: 70150 - RNA, 27 nt, synthetic construct
  misc_feature 1..27: note = Tetratricopeptide repeat protein 28 (1500-1508)
  source 1..27: mol_type = other RNA
aacatggtgggcatgctgcaccaggtc

SEQ ID NO: 70151 - RNA, 30 nt, synthetic construct
  misc_feature 1..30: note = Sodium/potassium-transporting ATPase subunit alpha-3 (166-175)
  source 1..30: mol_type = other RNA
aacatggtgccccagcaagccctggtcatc

SEQ ID NO: 70152 - RNA, 27 nt, synthetic construct
  misc_feature 1..27: note = Inositol 1,4,5-trisphosphate receptor type 1 (2083-2091)
  source 1..27: mol_type = other RNA
aacaatgccagcaagctgctccttgct

SEQ ID NO: 70153 - RNA, 21 nt, synthetic construct
  misc_feature 1..21: note = F-box only protein 25 (151-157)
  source 1..21: mol_type = other RNA
aacaatatcctgtacagattc

SEQ ID NO: 70154 - RNA, 24 nt, synthetic construct
  misc_feature 1..24: note = Keratin, type II cytoskeletal 1b (325-332)
  source 1..24: mol_type = other RNA
aacaatagaagcctggacctcgat

SEQ ID NO: 70155 - RNA, 48 nt, synthetic construct
  misc_feature 1..48: note = Filamin-A (2114-2129)
  source 1..48: mol_type = other RNA
aaccccgccgagttcgtggtcaataccagcaacgctggcgcaggggcc

SEQ ID NO: 70156 - RNA, 51 nt, synthetic construct
  misc_feature 1..51: note = Filamin-A (2114-2130)
  source 1..51: mol_type = other RNA
aaccccgccgagttcgtggtcaataccagcaacgctggcgcaggggccctg

SEQ ID NO: 70157 - RNA, 30 nt, synthetic construct
  misc_feature 1..30: note = Ras GTPase-activating-like protein IQGAP1 (1197-1206)
  source 1..30: mol_type = other RNA
aaccccgccatcgtggctcctgacgcattc

SEQ ID NO: 70158 - RNA, 27 nt, synthetic construct
  misc_feature 1..27: note = Leucine-rich repeat serine/threonine-protein kinase 2 (1842-1850)
  source 1..27: mol_type = other RNA
aaccccgaccagcctagactgaccatc

SEQ ID NO: 70159 - RNA, 45 nt, synthetic construct
  misc_feature 1..45: note = Calreticulin (296-310)
  source 1..45: mol_type = other RNA
aaccccgagtacagccctgacccatccatctatgcctacgataat

SEQ ID NO: 70160 - RNA, 42 nt, synthetic construct
  misc_feature 1..42: note = Cytochrome c oxidase subunit 6A1, mitochondrial (73-86)
  source 1..42: mol_type = other RNA
aacccccacgtgaatcctctgccaaccggctacgaggacgaa

SEQ ID NO: 70161 - RNA, 27 nt, synthetic construct
  misc_feature 1..27: note = Pre-mRNA-splicing factor ATP-dependent RNA helicase PRP16 (832-840)
  source 1..27: mol_type = other RNA
aaccccagaatcggcatggacgccctg

SEQ ID NO: 70162 - RNA, 54 nt, synthetic construct
  misc_feature 1..54: note = E3 ubiquitin-protein ligase UBR4 (202-219)
  source 1..54: mol_type = other RNA
aaccccagaaccgtggccagccagcctatctccacacaaactctggtcgagggc

SEQ ID NO: 70163 - RNA, 27 nt, synthetic construct
  misc_feature 1..27: note = Angiomotin (27-35)
  source 1..27: mol_type = other RNA
aaccccagcgagaatagatccctgctc

SEQ ID NO: 70164 - RNA, 30 nt, synthetic construct
  misc_feature 1..30: note = E3 ubiquitin-protein ligase HERC2 (1771-1780)
  source 1..30: mol_type = other RNA
aaccccagcggcccttccctggggaccatc

SEQ ID NO: 70165 - RNA, 27 nt, synthetic construct
  misc_feature 1..27: note = Poly (ADP-ribose) polymerase 14 (87-95)
  source 1..27: mol_type = other RNA
aacccctacaatggcgggggaagagtg

SEQ ID NO: 70166 - RNA, 24 nt, synthetic construct
  misc_feature 1..24: note = Ceramide synthase 2 (123-130)
  source 1..24: mol_type = other RNA
aaccaggacagacccagcctgctc

SEQ ID NO: 70167 - RNA, 27 nt, synthetic construct
  misc_feature 1..27: note = Exosome complex exonuclease RRP44 (115-123)
  source 1..27: mol_type = other RNA
aaccaggagaagcacttctacaccttt

SEQ ID NO: 70168 - RNA, 60 nt, synthetic construct
  misc_feature 1..60: note = Heterogeneous nuclear ribonucleoprotein A1-like 2 (148-167)
  source 1..60: mol_type = other RNA
aaccagggcgggtacggaggtagctcctcttcaagtagctatggctccgggagaaggttc

SEQ ID NO: 70169 - RNA, 21 nt, synthetic construct
  misc_feature 1..21: note = Mid1-interacting protein 1 (8-14)
  source 1..21: mol_type = other RNA
aaccagaagcacagcctgttc

SEQ ID NO: 70170 - RNA, 27 nt, synthetic construct
  misc_feature 1..27: note = Splicing factor U2AF 65 kDa subunit (348-356)
  source 1..27: mol_type = other RNA
aaccagacccccgtgacactgcaagtc

SEQ ID NO: 70171 - RNA, 21 nt, synthetic construct
  misc_feature 1..21: note = DNA polymerase epsilon catalytic subunit A (1795-1801)
  source 1..21: mol_type = other RNA
aaccaggtgatgcacttctac

SEQ ID NO: 70172 - RNA, 30 nt, synthetic construct
  misc_feature 1..30: note = Ankyrin repeat domain-containing protein 26 (77-86)
  source 1..30: mol_type = other RNA
aacagaaagctgatccccagggagaatctc

SEQ ID NO: 70173 - RNA, 24 nt, synthetic construct
  misc_feature 1..24: note = Myosin-9 (710-717)
  source 1..24: mol_type = other RNA
aacagagtggtcttccaggagttt

SEQ ID NO: 70174 - RNA, 42 nt, synthetic construct
  misc_feature 1..42: note = Hemicentin-1 (685-698)
  source 1..42: mol_type = other RNA
aacagcgccggcaccgacaagcagaattccacactgagatac

SEQ ID NO: 70175 - RNA, 24 nt, synthetic construct
  misc_feature 1..24: note = Mitochondrial import inner membrane translocase subunit TIM50 (276-283)
  source 1..24: mol_type = other RNA
aacagcgacgatagagtgctgctc

SEQ ID NO: 70176 - RNA, 36 nt, synthetic construct
  misc_feature 1..36: note = Cell adhesion molecule-related/down-regulated by oncogenes (944-955)
  source 1..36: mol_type = other RNA
aacagcctgggctccgggggaaatgtgggtcccgcc

SEQ ID NO: 70177 - RNA, 30 nt, synthetic construct; identical to SEQ ID NO: 45950
  misc_feature 1..30: note = Protein phosphatase 1 regulatory subunit 12A (714-723)
  source 1..30: mol_type = other RNA

SEQ ID NO: 70178 - RNA, 42 nt, synthetic construct
  misc_feature 1..42: note = Synaptotagmin-like protein 2 (277-290)
  source 1..42: mol_type = other RNA
aacagctcctcttcaagtaccgacagcgagacactgagatac

SEQ ID NO: 70179 - RNA, 33 nt, synthetic construct
  misc_feature 1..33: note = ATP synthase subunit epsilon-like protein, mitochondrial (41-51)
  source 1..33: mol_type = other RNA
aacagcgtgaagatcgtcaaagttaagaaagag

SEQ ID NO: 70180 - RNA, 39 nt, synthetic construct
  misc_feature 1..39: note = Ankyrin-2 (1558-1570)
  source 1..39: mol_type = other RNA
aacaccgagcccctgcaggaaagaatcagccactcctac

SEQ ID NO: 70181 - RNA, 27 nt, synthetic construct
  misc_feature 1..27: note = GRB2-associated-binding protein 1 (88-96)
  source 1..27: mol_type = other RNA
aacaccatcgacagaattttctacctg

SEQ ID NO: 70182 - RNA, 33 nt, synthetic construct
  misc_feature 1..33: note = Microphthalmia-associated transcription factor (237-247)
  source 1..33: mol_type = other RNA
aacaccctgcccgtgagcggcaatctcatcgac

SEQ ID NO: 70183 - RNA, 36 nt, synthetic construct
  misc_feature 1..36: note = Microphthalmia-associated transcription factor (90-101)
  source 1..36: mol_type = other RNA
aacaccctgcccgtgagcggcaatctcatcgacctt

SEQ ID NO: 70184 - RNA, 27 nt, synthetic construct
  misc_feature 1..27: note = Multidrug and toxin extrusion protein 1 (136-144)
  source 1..27: mol_type = other RNA
aacacccagcacatcctgctccttttc

SEQ ID NO: 70185 - RNA, 30 nt, synthetic construct
  misc_feature 1..30: note = Hemicentin-1 (2932-2941)
  source 1..30: mol_type = other RNA
aacacccagatcacagacattggcagatac

SEQ ID NO: 70186 - RNA, 33 nt, synthetic construct
  misc_feature 1..33: note = Titin (6557-6567)
  source 1..33: mol_type = other RNA
aacgtggccggcgacgatgcttgcagcgggatc

SEQ ID NO: 70187 - RNA, 27 nt, synthetic construct
  misc_feature 1..27: note = Rho guanine nucleotide exchange factor 2 (401-409)
  source 1..27: mol_type = other RNA
aacgtggacgagggcatctaccagctg

SEQ ID NO: 70188 - RNA, 27 nt, synthetic construct
  misc_feature 1..27: note = Hemicentin-1 (3845-3853)
  source 1..27: mol_type = other RNA
aacgtggaccagaatcaaaacagctac

SEQ ID NO: 70189 - RNA, 27 nt, synthetic construct
  misc_feature 1..27: note = Serine/threonine-protein phosphatase PP1-beta catalytic subunit (7-15)
  source 1..27: mol_type = other RNA
aacgtggacagcctgatcaccagactc

SEQ ID NO: 70190 - RNA, 48 nt, synthetic construct
  misc_feature 1..48: note = Alpha-enolase (36-51)
  source 1..48: mol_type = other RNA
aacgtgggcgacgaggggggattcgcccccaatatcctggaaaacaag

SEQ ID NO: 70191 - RNA, 21 nt, synthetic construct
  misc_feature 1..21: note = tRNA (adenine(58)-N(1))-methyltransferase non-catalytic subunit TRM6 (56-62)
  source 1..21: mol_type = other RNA
aacgtgatcggccacagctac

SEQ ID NO: 70192 - RNA, 81 nt, synthetic construct
  misc_feature 1..81: note = Heat shock-related 70 kDa protein 2 (197-223)
  source 1..81: mol_type = other RNA
aacgtgctgatcttcgacctcggcgggggaacctttgatgtcagcattcttacaatagaggacggtatcttcgaagttaag

SEQ ID NO: 70193 - RNA, 48 nt, synthetic construct
  misc_feature 1..48: note = Heat shock 70 kDa protein 1-like (170-185)
  source 1..48: mol_type = other RNA
aacgtgctgagaatcattaatgagcccaccgccgctgcaatagcctac

SEQ ID NO: 70194 - RNA, 51 nt, synthetic construct
  misc_feature 1..51: note = 78 kDa glucose-regulated protein (176-192)
  source 1..51: mol_type = other RNA
aacgtgatgagaatcattaatgagcccaccgccgctgcaatagcctacggc

SEQ ID NO: 70195 - RNA, 45 nt, synthetic construct
  misc_feature 1..45: note = Guanine nucleotide-binding protein G(i) subunit alpha-1 (331-345)
  source 1..45: mol_type = other RNA
aacgtgcagttcgtctttgacgccgttaccgatgtgatcattaag

SEQ ID NO: 70196 - RNA, 24 nt, synthetic construct
  misc_feature 1..24: note = Nuclease-sensitive element-binding protein 1 (67-74)
  source 1..24: mol_type = other RNA
aacgtgagaaatggctacgggttc

SEQ ID NO: 70197 - RNA, 27 nt, synthetic construct
  misc_feature 1..27: note = Receptor-type tyrosine-protein phosphatase kappa (1423-1431)
  source 1..27: mol_type = other RNA
aacgtggtcgacgttttccacgccgtg

SEQ ID NO: 70198 - RNA, 27 nt, synthetic construct
  misc_feature 1..27: note = Fidgetin-like protein 1 (81-89)
  source 1..27: mol_type = other RNA
aactacgccgagaatatcctgaccctc

SEQ ID NO: 70199 - RNA, 21 nt, synthetic construct
  misc_feature 1..21: note = DNA-directed RNA polymerases I, II, and III subunit RPABC5 (61-67)
  source 1..21: mol_type = other RNA
aactacgcccccctggagaag

SEQ ID NO: 70200 - RNA, 27 nt, synthetic construct
  misc_feature 1..27: note = Melanoma-associated antigen 10 (167-175)
  source 1..27: mol_type = other RNA
aactacgaggaccacttccccctgctc

SEQ ID NO: 70201 - RNA, 33 nt, synthetic construct; identical to SEQ ID NO: 45974
  misc_feature 1..33: note = Protein phosphatase Slingshot homolog 1 (196-206)
  source 1..33: mol_type = other RNA

SEQ ID NO: 70202 - RNA, 27 nt, synthetic construct
  misc_feature 1..27: note = Transformation/transcription domain-associated protein (1707-1715)
  source 1..27: mol_type = other RNA
aactacggcgacatcgagctgctcttc

SEQ ID NO: 70203 - RNA, 27 nt, synthetic construct
  misc_feature 1..27: note = Isocitrate dehydrogenase (NAD) subunit gamma, mitochondrial (298-306)
  source 1..27: mol_type = other RNA
aactacggccacgtgtatgccgtcttc

SEQ ID NO: 70204 - RNA, 27 nt, synthetic construct
  misc_feature 1..27: note = Lathosterol oxidase (239-247)
  source 1..27: mol_type = other RNA
aactacggccagtatttcaccctgtgg

SEQ ID NO: 70205 - RNA, 27 nt, synthetic construct
  misc_feature 1..27: note = Beta-Ala-His dipeptidase (489-497)
  source 1..27: mol_type = other RNA
aactacatcgagggcaccaagctgttc

SEQ ID NO: 70206 - RNA, 27 nt, synthetic construct
  misc_feature 1..27: note = Procollagen-lysine,2-oxoglutarate 5-dioxygenase 1 (255-263)
  source 1..27: mol_type = other RNA
aactacatccccagattctggaccttt

SEQ ID NO: 70207 - RNA, 27 nt, synthetic construct
  misc_feature 1..27: note = Probable E3 ubiquitin-protein ligase HERC3 (467-475)
  source 1..27: mol_type = other RNA
aactacatcaccgccgctctgaagctc

SEQ ID NO: 70208 - RNA, 21 nt, synthetic construct
  misc_feature 1..21: note = Heat shock protein HSP 90-beta (351-357)
  source 1..21: mol_type = other RNA
aactacaagaaattctatgag

SEQ ID NO: 70209 - RNA, 27 nt, synthetic construct
  misc_feature 1..27: note = Heat shock protein HSP 90-beta (351-359)
  source 1..27: mol_type = other RNA
aactacaagaaattctatgaggccttt

SEQ ID NO: 70210 - RNA, 33 nt, synthetic construct
  misc_feature 1..33: note = Muskelin (29-39)
  source 1..33: mol_type = other RNA
aactacccccctcagtatctgatcctcaagctt

SEQ ID NO: 70211 - RNA, 27 nt, synthetic construct
  misc_feature 1..27: note = Pleckstrin homology domain-containing family G member 2 (150-158)
  source 1..27: mol_type = other RNA
aactaccccagctccctggccctcctt

SEQ ID NO: 70212 - RNA, 33 nt, synthetic construct; identical to SEQ ID NO: 45985
  misc_feature 1..33: note = DNA polymerase zeta catalytic subunit (1024-1034)
  source 1..33: mol_type = other RNA

SEQ ID NO: 70213 - RNA, 27 nt, synthetic construct
  misc_feature 1..27: note = Transmembraneoprotein NMB (275-283)
  source 1..27: mol_type = other RNA
aactacagcaccatcaattataagtgg

SEQ ID NO: 70214 - RNA, 27 nt, synthetic construct
  misc_feature 1..27: note = 1,2-dihydroxy-3-keto-5-methylthiopentene dioxygenase (141-149)
  source 1..27: mol_type = other RNA
aactacaccaaggccatgagactgttc

SEQ ID NO: 70215 - RNA, 30 nt, synthetic construct
  misc_feature 1..30: note = HLA class II histocompatibility antigen, DR alpha chain (103-112)
  source 1..30: mol_type = other RNA
aactacacccccatcacaaatgacaagttc

SEQ ID NO: 70216 - RNA, 27 nt, synthetic construct
  misc_feature 1..27: note = DNA-dependent protein kinase catalytic subunit (289-297)
  source 1..27: mol_type = other RNA
aactacgtgagcctgttcgaggtcctc

SEQ ID NO: 70217 - RNA, 27 nt, synthetic construct
  misc_feature 1..27: note = Polycystin-1 (3-11)
  source 1..27: mol_type = other RNA
cccgccgctcctgcaagactggccctc

SEQ ID NO: 70218 - RNA, 24 nt, synthetic construct
  misc_feature 1..24: note = Exportin-T (609-616)
  source 1..24: mol_type = other RNA
cccgccgagagaaagcaggctctg

SEQ ID NO: 70219 - RNA, 36 nt, synthetic construct
  misc_feature 1..36: note = Collagen alpha-1(V) chain (1145-1156)
  source 1..36: mol_type = other RNA
cccgccggccctgtggggccaccgggagaggacggt

SEQ ID NO: 70220 - RNA, 24 nt, synthetic construct
  misc_feature 1..24: note = tRNA pseudouridine synthase-like 1 (273-280)
  source 1..24: mol_type = other RNA
cccgcccacggcctgttcctcaag

SEQ ID NO: 70221 - RNA, 24 nt, synthetic construct
  misc_feature 1..24: note = Sushi repeat-containing protein SRPX (4-11)
  source 1..24: mol_type = other RNA
cccgcccacagacctgctctgctc

SEQ ID NO: 70222 - RNA, 39 nt, synthetic construct
  misc_feature 1..39: note = Syntenin-1 (29-41)
  source 1..39: mol_type = other RNA
cccgccatcctgagcgaggcttccgcacctattccacac

SEQ ID NO: 70223 - RNA, 24 nt, synthetic construct
  misc_feature 1..24: note = Acetolactate synthase-like protein (225-232)
  source 1..24: mol_type = other RNA
cccgccaagcctccaaaaggcctg

SEQ ID NO: 70224 - RNA, 27 nt, synthetic construct
  misc_feature 1..27: note = Calmodulin-regulated spectrin-associated protein 3 (958-966)
  source 1..27: mol_type = other RNA
cccgcccctgctgcaagagccccagcg

SEQ ID NO: 70225 - RNA, 27 nt, synthetic construct
  misc_feature 1..27: note = Tissue factor pathway inhibitor 2 (3-11)
  source 1..27: mol_type = other RNA
cccgccagacctctgggcctcagcatc

SEQ ID NO: 70226 - RNA, 21 nt, synthetic construct
  misc_feature 1..21: note = Phosphoinositide 3-kinase regulatory subunit 5 (495-501)
  source 1..21: mol_type = other RNA
cccgccagcagacctcagagg

SEQ ID NO: 70227 - RNA, 27 nt, synthetic construct
  misc_feature 1..27: note = m7GpppX diphosphatase (134-142)
  source 1..27: mol_type = other RNA
cccgccaccgagaagcacctgcagaaa

SEQ ID NO: 70228 - RNA, 36 nt, synthetic construct
  misc_feature 1..36: note = Nardilysin (738-749)
  source 1..36: mol_type = other RNA
cccgcctacgaggctgacgtggcacagctggaatat

SEQ ID NO: 70229 - RNA, 27 nt, synthetic construct
  misc_feature 1..27: note = Lysosome-associated membraneoprotein 1 (250-258)
  source 1..27: mol_type = other RNA
cccgacgccagagatcctgctttcaag

SEQ ID NO: 70230 - RNA, 21 nt, synthetic construct
  misc_feature 1..21: note = Uncharacterized protein C14orf119 (123-129)
  source 1..21: mol_type = other RNA
cccgacttcgtggccaagttt

SEQ ID NO: 70231 - RNA, 24 nt, synthetic construct
  misc_feature 1..24: note = RNA-binding protein 12B (29-36)
  source 1..24: mol_type = other RNA
cccgacggcggggtgcacatcatt

SEQ ID NO: 70232 - RNA, 21 nt, synthetic construct
  misc_feature 1..21: note = Thyroid transcription factor 1-associated protein 26 (90-96)
  source 1..21: mol_type = other RNA
cccgacaacctgaagcacctc

SEQ ID NO: 70233 - RNA, 24 nt, synthetic construct
  misc_feature 1..24: note = Tubulin beta-6 chain (95-102)
  source 1..24: mol_type = other RNA
cccgacagaatcatgaacaccttc

SEQ ID NO: 70234 - RNA, 36 nt, synthetic construct
  misc_feature 1..36: note = SH3 and multiple ankyrin repeat domains protein 1 (980-991)
  source 1..36: mol_type = other RNA
cccgacacccctgccccagctacaccgctgccccct

SEQ ID NO: 70235 - RNA, 30 nt, synthetic construct
  misc_feature 1..30: note = Copper-transporting ATPase 1 (1234-1243)
  source 1..30: mol_type = other RNA
cccgaggccgaactggctatccacattctc

SEQ ID NO: 70236 - RNA, 45 nt, synthetic construct
  misc_feature 1..45: note = Putative endoplasmin-like protein (220-234)
  source 1..45: mol_type = other RNA
cccgagttcgacggcaagagatttcagaacgtggccaaagaaggg

SEQ ID NO: 70237 - RNA, 33 nt, synthetic construct
  misc_feature 1..33: note = Fatty acid synthase (753-763)
  source 1..33: mol_type = other RNA
cccgagcacgccgtggtcctggaaatcgctcct

SEQ ID NO: 70238 - RNA, 24 nt, synthetic construct
  misc_feature 1..24: note = Proteasome-associated protein ECM29 homolog (684-691)
  source 1..24: mol_type = other RNA
cccgagaagctggccaccaaattc

SEQ ID NO: 70239 - RNA, 21 nt, synthetic construct
  misc_feature 1..21: note = Serine/threonine-protein kinase ULK3 (110-116)
  source 1..21: mol_type = other RNA
cccgagaaggtggccagagtc

SEQ ID NO: 70240 - RNA, 33 nt, synthetic construct
  misc_feature 1..33: note = Alsin (1431-1441)
  source 1..33: mol_type = other RNA
cccgagctgcctgaagagggcagcaccatccca

SEQ ID NO: 70241 - RNA, 30 nt, synthetic construct
  misc_feature 1..30: note = Serine/arginine repetitive matrix protein 2 (361-370)
  source 1..30: mol_type = other RNA
cccgagcctccagccccgacccccctgctc

SEQ ID NO: 70242 - RNA, 36 nt, synthetic construct
  misc_feature 1..36: note = Homeobox protein SIX5 (88-99)
  source 1..36: mol_type = other RNA
cccgagcaggtggcctgcgtctgtgaagctctgctc

SEQ ID NO: 70243 - RNA, 30 nt, synthetic construct
  misc_feature 1..30: note = Putative exonuclease GOR (33-42)
  source 1..30: mol_type = other RNA
cccgagagacctggcggggccgtgctgttc

SEQ ID NO: 70244 - RNA, 72 nt, synthetic construct
  misc_feature 1..72: note = Neutral alpha-glucosidase AB (824-847)
  source 1..72: mol_type = other RNA
cccgagaccagcgtgctggtcctcagaaagcctggcatcaacgttgcctccgactggtctattcaccttagg

SEQ ID NO: 70245 - RNA, 21 nt, synthetic construct
  misc_feature 1..21: note = Coatomer subunit alpha (635-641)
  source 1..21: mol_type = other RNA
cccgaggtggccctgcacttc

SEQ ID NO: 70246 - RNA, 27 nt, synthetic construct
  misc_feature 1..27: note = Melanocyte protein PMEL (57-65)
  source 1..27: mol_type = other RNA
cccgagtggaccgaagcccagagactg

SEQ ID NO: 70247 - RNA, 42 nt, synthetic construct
  misc_feature 1..42: note = Calreticulin (297-310)
  source 1..42: mol_type = other RNA
cccgagtacagccctgacccatccatctatgcctacgataac

SEQ ID NO: 70248 - RNA, 24 nt, synthetic construct
  misc_feature 1..24: note = Tyrosine-protein phosphatase non-receptor type 11 (284-291)
  source 1..24: mol_type = other RNA
cccttcgaccacaccagagtggtc

SEQ ID NO: 70249 - RNA, 24 nt, synthetic construct
  misc_feature 1..24: note = Polypyrimidine tract-binding protein 2 (92-99)
  source 1..24: mol_type = other RNA
cccttcggcaaggtgaccaacatc

SEQ ID NO: 70250 - RNA, 24 nt, synthetic construct
  misc_feature 1..24: note = Polypyrimidine tract-binding protein 3 (124-131)
  source 1..24: mol_type = other RNA
cccttcggcaaggtgaccaacctg

SEQ ID NO: 70251 - RNA, 30 nt, synthetic construct
  misc_feature 1..30: note = Uncharacterized protein KIAA0556 (546-555)
  source 1..30: mol_type = other RNA
cccttccaccctccactgcagctctttttc

SEQ ID NO: 70252 - RNA, 30 nt, synthetic construct
  misc_feature 1..30: note = Transmembrane and TPR repeat-containing protein 1 (393-402)
  source 1..30: mol_type = other RNA
cccttcatccctgccagcaacctgtttttc

SEQ ID NO: 70253 - RNA, 27 nt, synthetic construct
  misc_feature 1..27: note = Glycine dehydrogenase (decarboxylating), mitochondrial (778-786)
  source 1..27: mol_type = other RNA
cccttcctgcctaaccacccagtgatc

SEQ ID NO: 70254 - RNA, 36 nt, synthetic construct
  misc_feature 1..36: note = Cytochrome c oxidase subunit 7C, mitochondrial (52-63)
  source 1..36: mol_type = other RNA
cccttcctggtggtcagacaccagctccttaagacc

SEQ ID NO: 70255 - RNA, 21 nt, synthetic construct
  misc_feature 1..21: note = Interferon-induced 35 kDa protein (53-59)
  source 1..21: mol_type = other RNA
cccttcagcgtgcctaagatc

SEQ ID NO: 70256 - RNA, 27 nt, synthetic construct
  misc_feature 1..27: note = U2 small nuclear ribonucleoprotein B'' (73-81)
  source 1..27: mol_type = other RNA
cccttctacggcaagcctatgagaatc

SEQ ID NO: 70257 - RNA, 39 nt, synthetic construct
  misc_feature 1..39: note = SH2 domain-containing protein 3A (404-416)
  source 1..39: mol_type = other RNA
cccggcgccgctggggacctgcctggactcgcagccgtg

SEQ ID NO: 70258 - RNA, 30 nt, synthetic construct
  misc_feature 1..30: note = NADH dehydrogenase (ubiquinone) 1 beta subcomplex subunit 7 (126-135)
  source 1..30: mol_type = other RNA
cccggcgaggtggaccctaaggtcgccctg

SEQ ID NO: 70259 - RNA, 48 nt, synthetic construct
  misc_feature 1..48: note = Heat shock cognate 71 kDa protein (622-637)
  source 1..48: mol_type = other RNA
cccggcgggttccctggaggtggcgccccaccgagcgggggagcttcc

SEQ ID NO: 70260 - RNA, 39 nt, synthetic construct
  misc_feature 1..39: note = Shadow of prion protein (108-120)
  source 1..39: mol_type = other RNA
cccggcgggaacggaaccggtcctggcatctacagctat

SEQ ID NO: 70261 - RNA, 24 nt, synthetic construct
  misc_feature 1..24: note = HLA class II histocompatibility antigen, DR beta 5 chain (7-14)
  source 1..24: mol_type = other RNA
cccggcgggagctacatggccaag

SEQ ID NO: 70262 - RNA, 24 nt, synthetic construct
  misc_feature 1..24: note = BAG family molecular chaperone regulator 3 (334-341)
  source 1..24: mol_type = other RNA
cccggccacatccctattcaggtg

SEQ ID NO: 70263 - RNA, 54 nt, synthetic construct
  misc_feature 1..54: note = Collagen alpha-5(IV) chain (1035-1052)
  source 1..54: mol_type = other RNA
cccggccctcagggggtggagggaccaccgggtcccagcggcgtccctgggcaa

SEQ ID NO: 70264 - RNA, 24 nt, synthetic construct
  misc_feature 1..24: note = Adenomatous polyposis coli protein 2 (1191-1198)
  source 1..24: mol_type = other RNA
cccggccctagagccaccccaagg

SEQ ID NO: 70265 - RNA, 27 nt, synthetic construct
  misc_feature 1..27: note = Mucin-5B (364-372)
  source 1..27: mol_type = other RNA
cccggcaccgcccctccaccgaaggtg

SEQ ID NO: 70266 - RNA, 60 nt, synthetic construct
  misc_feature 1..60: note = Elastin (116-135)
  source 1..60: mol_type = other RNA
cccggcgtggggggactgggtgtcagcgccggcgctgttgtgcctcagccaggggcagga

SEQ ID NO: 70267 - RNA, 21 nt, synthetic construct
  misc_feature 1..21: note = Mitochondrial import inner membrane translocase subunit TIM50 (216-222)
  source 1..21: mol_type = other RNA
ccccacggcttcatcagctac

SEQ ID NO: 70268 - RNA, 18 nt, synthetic construct
  misc_feature 1..18: note = BolA-like protein 2 (65-70)
  source 1..18: mol_type = other RNA
ccccacatccatgccttc

SEQ ID NO: 70269 - RNA, 24 nt, synthetic construct
  misc_feature 1..24: note = ATP synthase subunit d, mitochondrial (130-137)
  source 1..24: mol_type = other RNA
ccccaccagcctatcgagaacctg

SEQ ID NO: 70270 - RNA, 24 nt, synthetic construct
  misc_feature 1..24: note Dolichyl-diphosphooligosaccharide-proteinosyltransferase subunit 2 (292-299)
  source 1..24: mol_type = other RNA
ccccaccagaccttcgtgagactg

SEQ ID NO: 70271 - RNA, 60 nt, synthetic construct
  misc_feature 1..60: note = Syndecan-3 (6-25)
  source 1..60: mol_type = other RNA
ccccacagagccggcgctgcacatggggccggagcgggtgctggcgccgcagccgggcct

SEQ ID NO: 70272 - RNA, 39 nt, synthetic construct
  misc_feature 1..39: note = Cytochrome c oxidase subunit 6A1, mitochondrial (74-86)
  source 1..39: mol_type = other RNA
ccccacgtgaaccctctgccaaccggctacgaggacgaa

SEQ ID NO: 70273 - RNA, 21 nt, synthetic construct
  misc_feature 1..21: note = BAG family molecular chaperone regulator 3 (292-298)
  source 1..21: mol_type = other RNA
cccatcagagtgcacaccgtc

SEQ ID NO: 70274 - RNA, 24 nt, synthetic construct
  misc_feature 1..24: note = Major facilitator superfamily domain-containing protein 12 (309-316)
  source 1..24: mol_type = other RNA
cccaagaaattcatcgccaccatt

SEQ ID NO: 70275 - RNA, 63 nt, synthetic construct
  misc_feature 1..63: note = MICOS complex subunit MIC27 (248-268)
  source 1..63: mol_type = other RNA
cccaagctgatggaccacggccagagccatcctgaggatatcgacatgtactccaccagatct

SEQ ID NO: 70276 - RNA, 21 nt, synthetic construct
  misc_feature 1..21: note = 40S ribosomal protein S26 (65-71)
  source 1..21: mol_type = other RNA
cccaagctgtacgtgaaactc

SEQ ID NO: 70277 - RNA, 24 nt, synthetic construct
  misc_feature 1..24: note = 26S proteasome non-ATPase regulatory subunit 6 (12-19)
  source 1..24: mol_type = other RNA
cccaagaaccctgacctgagaatc

SEQ ID NO: 70278 - RNA, 24 nt, synthetic construct
  misc_feature 1..24: note = Ran-binding protein 9 (351-358)
  source 1..24: mol_type = other RNA
cccaagcagcctccactggccctc

SEQ ID NO: 70279 - RNA, 24 nt, synthetic construct
  misc_feature 1..24: note = High mobility group protein B1 (95-102)
  source 1..24: mol_type = other RNA
cccaagagacctccaagcgccttc

SEQ ID NO: 70280 - RNA, 36 nt, synthetic construct
  misc_feature 1..36: note = Ras-associated and pleckstrin homology domains-containing protein 1 (1085-1096)
  source 1..36: mol_type = other RNA
cccaaggtggccgtcgttaaccctcagccacaacag

SEQ ID NO: 70281 - RNA, 42 nt, synthetic construct
  misc_feature 1..42: note = Annexin A2 (211-224)
  source 1..42: mol_type = other RNA
cccaagtggatcagcattatgaccgagagatccgtgcctcac

SEQ ID NO: 70282 - RNA, 24 nt, synthetic construct
  misc_feature 1..24: note = Guanine nucleotide-binding protein-like 3 (296-303)
  source 1..24: mol_type = other RNA
cccctggacaagcagatcaccatt

SEQ ID NO: 70283 - RNA, 30 nt, synthetic construct
  misc_feature 1..30: note = MAX gene-associated protein (2401-2410)
  source 1..30: mol_type = other RNA
cccctgttcagcggccctgtggtcgccgtt

SEQ ID NO: 70284 - RNA, 21 nt, synthetic construct
  misc_feature 1..21: note = A-kinase anchor protein 6 (596-602)
  source 1..21: mol_type = other RNA
cccctgctcagcaagcacaaa

SEQ ID NO: 70285 - RNA, 21 nt, synthetic construct
  misc_feature 1..21: note = Ubiquitin carboxyl-terminal hydrolase 11 (444-450)
  source 1..21: mol_type = other RNA
cccctgcctatcagccacaag

SEQ ID NO: 70286 - RNA, 30 nt, synthetic construct
  misc_feature 1..30: note = Protein transport protein Sec23B (244-253)
  source 1..30: mol_type = other RNA
cccctgagaagcaccggcgtggccctctcc

SEQ ID NO: 70287 - RNA, 21 nt, synthetic construct
  misc_feature 1..21: note = Muskelin (629-635)
  source 1..21: mol_type = other RNA
cccctgagcgccctcaagtac

SEQ ID NO: 70288 - RNA, 24 nt, synthetic construct
  misc_feature 1..24: note = X-ray repair cross-complementing protein 5 (529-536)
  source 1..24: mol_type = other RNA
cccctgagcaagatcaaaaccctc

SEQ ID NO: 70289 - RNA, 27 nt, synthetic construct
  misc_feature 1..27: note = HLA class I histocompatibility antigen, B-15 alpha chain (293-301)
  source 1..27: mol_type = other RNA
cccctgaccctcagatgggagcctagc

SEQ ID NO: 70290 - RNA, 63 nt, synthetic construct
  misc_feature 1..63: note = 60 kDa heat shock protein, mitochondrial (154-174)
  source 1..63: mol_type = other RNA
cccctggtgatcattgccgaggacgtcgatggcgaagctctcagcacccttgttctgaacaga

SEQ ID NO: 70291 - RNA, 27 nt, synthetic construct
  misc_feature 1..27: note = Protein DBF4 homolog A (45-53)
  source 1..27: mol_type = other RNA
cccctgtggggcaaggtgttctacctc

SEQ ID NO: 70292 - RNA, 27 nt, synthetic construct
  misc_feature 1..27: note = Extracellular matrix protein FRAS1 (1653-1661)
  source 1..27: mol_type = other RNA
cccatggccaccggcgacacattcact

SEQ ID NO: 70293 - RNA, 24 nt, synthetic construct
  misc_feature 1..24: note = Alpha/beta hydrolase domain-containing protein 14B (204-211)
  source 1..24: mol_type = other RNA
cccaaccacagagtgctgatcatg

SEQ ID NO: 70294 - RNA, 24 nt, synthetic construct
  misc_feature 1..24: note = Ubiquitin-associated protein 2-like (269-276)
  source 1..24: mol_type = other RNA
ccccctgccccattcatgcacatc

SEQ ID NO: 70295 - RNA, 27 nt, synthetic construct
  misc_feature 1..27: note = Transforming acidic coiled-coil-containing protein 2 (1969-1977)
  source 1..27: mol_type = other RNA
ccccctgccccaccgccccctccaccc

SEQ ID NO: 70296 - RNA, 30 nt, synthetic construct
  misc_feature 1..30: note = Rho GTPase-activating protein 33 (668-677)
  source 1..30: mol_type = other RNA
ccccctgccgtgctggagctccttggcgct

SEQ ID NO: 70297 - RNA, 48 nt, synthetic construct
  misc_feature 1..48: note = Transmembrane protein 238 (14-29)
  source 1..48: mol_type = other RNA
ccccctggcgccccaagcgctccggcagccgcgcccgctcctgccgca

SEQ ID NO: 70298 - RNA, 36 nt, synthetic construct
  misc_feature 1..36: note = Homeobox protein SIX5 (441-452)
  source 1..36: mol_type = other RNA
ccccctggcccagtgccggccgtcgctgcaccccag

SEQ ID NO: 70299 - RNA, 36 nt, synthetic construct
  misc_feature 1..36: note = Collagen alpha-1(VII) chain (2384-2395)
  source 1..36: mol_type = other RNA
ccccctggcgtgaagggggacctgggactcccaggt

SEQ ID NO: 70300 - RNA, 27 nt, synthetic construct
  misc_feature 1..27: note = Mitochondrial fission regulator 1 (151-159)
  source 1..27: mol_type = other RNA
ccccctcacccaccgccccctccaccc

SEQ ID NO: 70301 - RNA, 21 nt, synthetic construct
  misc_feature 1..21: note = Sentrin-specific protease 6 (157-163)
  source 1..21: mol_type = other RNA
ccccctcacgtgcagaaggtc

SEQ ID NO: 70302 - RNA, 30 nt, synthetic construct
  misc_feature 1..30: note = CCR4-NOT transcription complex subunit 1 (574-583)
  source 1..30: mol_type = other RNA
ccccctatcaccacaactacgaccagcaca

SEQ ID NO: 70303 - RNA, 21 nt, synthetic construct
  misc_feature 1..21: note = Cyclin E variant ex7del (21-27)
  source 1..21: mol_type = other RNA
ccccctaagctgcaccagttc

SEQ ID NO: 70304 - RNA, 27 nt, synthetic construct
  misc_feature 1..27: note = Drebrin (365-373)
  source 1..27: mol_type = other RNA
ccccctctgccaccgccccctccaccc

SEQ ID NO: 70305 - RNA, 42 nt, synthetic construct
  misc_feature 1..42: note = Tuberin (1264-1277)
  source 1..42: mol_type = other RNA
ccccctctgccaagaagcaacaccgtggcctccttctcttca

SEQ ID NO: 70306 - RNA, 27 nt, synthetic construct
  misc_feature 1..27: note = Multiple epidermal growth factor-like domains protein 8 (2528-2536)
  source 1..27: mol_type = other RNA
ccccctccagccccgccccctccaccc

SEQ ID NO: 70307 - RNA, 27 nt, synthetic construct
  misc_feature 1..27: note = Shootin-1 (299-307)
  source 1..27: mol_type = other RNA
ccccctccactgccgccccctccaccc

SEQ ID NO: 70308 - RNA, 39 nt, synthetic construct
  misc_feature 1..39: note = Serine/threonine-protein kinase WNK2 (136-148)
  source 1..39: mol_type = other RNA
ccccctccaagcgacatgggcaccgtggggggacaggcc

SEQ ID NO: 70309 - RNA, 42 nt, synthetic construct
  misc_feature 1..42: note = Retinoic acid-induced protein 1 (1033-1046)
  source 1..42: mol_type = other RNA
ccccctcagggccaaatggagggggccggagctccaggtaga

SEQ ID NO: 70310 - RNA, 27 nt, synthetic construct
  misc_feature 1..27: note = Retrotransposon-derived protein PEG10 (765-773)
  source 1..27: mol_type = other RNA
ccccctcagccaccgccccctccaccc

SEQ ID NO: 70311 - RNA, 27 nt, synthetic construct
  misc_feature 1..27: note = Acrosin (110-118)
  source 1..27: mol_type = other RNA
ccccctagcccaccgccccctccaccc

SEQ ID NO: 70312 - RNA, 27 nt, synthetic construct
  misc_feature 1..27: note = Transcription factor SOX-9 (356-364)
  source 1..27: mol_type = other RNA
ccccaggcccctccacaaccgcaggct

SEQ ID NO: 70313 - RNA, 21 nt, synthetic construct
  misc_feature 1..21: note = Protein transport protein Sec23B (562-568)
  source 1..21: mol_type = other RNA
ccccagttcatgtttcacctg

SEQ ID NO: 70314 - RNA, 27 nt, synthetic construct
  misc_feature 1..27: note = Squalene monooxygenase (366-374)
  source 1..27: mol_type = other RNA
ccccagatccctgaccacctgaaggag

SEQ ID NO: 70315 - RNA, 33 nt, synthetic construct
  misc_feature 1..33: note = Histone-lysine N-methyltransferase 2C (2512-2522)
  source 1..33: mol_type = other RNA
ccccagctgagaaggagcgtgtccgtcgacatg

SEQ ID NO: 70316 - RNA, 27 nt, synthetic construct
  misc_feature 1..27: note = Disintegrin and metalloproteinase domain-containing protein 18 (67-75)
  source 1..27: mol_type = other RNA
ccccagaacttcctggtgtacacctat

SEQ ID NO: 70317 - RNA, 27 nt, synthetic construct
  misc_feature 1..27: note = Retrotransposon-derived protein PEG10 (766-774)
  source 1..27: mol_type = other RNA
ccccagcctccaccgccccctccaccc

SEQ ID NO: 70318 - RNA, 39 nt, synthetic construct
  misc_feature 1..39: note = Serum albumin (440-452)
  source 1..39: mol_type = other RNA
ccccaggtgagcacccctacactggtcgaggtttccaga

SEQ ID NO: 70319 - RNA, 24 nt, synthetic construct
  misc_feature 1..24: note = Neural Wiskott-Aldrich syndrome protein (83-90)
  source 1..24: mol_type = other RNA
cccagaggctacttccacaccttt

SEQ ID NO: 70320 - RNA, 30 nt, synthetic construct
  misc_feature 1..30: note = 60S ribosomal protein L13 (48-57)
  source 1..30: mol_type = other RNA
cccagacctgccagcggcccaatcaggccg

SEQ ID NO: 70321 - RNA, 24 nt, synthetic construct
  misc_feature 1..24: note = Histone H2A deubiquitinase MYSM1 (447-454)
  source 1..24: mol_type = other RNA
cccagacctaccaagagctccttc

SEQ ID NO: 70322 - RNA, 24 nt, synthetic construct
  misc_feature 1..24: note = ATP-dependent RNA helicase DDX24 (200-207)
  source 1..24: mol_type = other RNA
cccagacctgtgctgagggccctc

SEQ ID NO: 70323 - RNA, 24 nt, synthetic construct
  misc_feature 1..24: note = Splicing factor 3B subunit 3 (431-438)
  source 1..24: mol_type = other RNA
cccagaagctccctgagggtgctc

SEQ ID NO: 70324 - RNA, 24 nt, synthetic construct
  misc_feature 1..24: note = Ankyrin repeat and KH domain-containing protein 1 (749-756)
  source 1..24: mol_type = other RNA
cccagagtgcctacccacacactg

SEQ ID NO: 70325 - RNA, 42 nt, synthetic construct
  misc_feature 1..42: note = AT-rich interactive domain-containing protein 1A (279-292)
  source 1..42: mol_type = other RNA
cccagcgccgctggcgggggaacccctcagccaacagcaact

SEQ ID NO: 70326 - RNA, 27 nt, synthetic construct
  misc_feature 1..27: note = Large proline-rich protein BAG6 (53-61)
  source 1..27: mol_type = other RNA
cccagcgagaagcagagactgatctac

SEQ ID NO: 70327 - RNA, 33 nt, synthetic construct
  misc_feature 1..33: note = Ankyrin-2 (1035-1045)
  source 1..33: mol_type = other RNA
cccagcggcgcccagttcctggggcctgtgatc

SEQ ID NO: 70328 - RNA, 24 nt, synthetic construct
  misc_feature 1..24: note = Eukaryotic translation initiation factor 3 subunit C-like protein (204-211)
  source 1..24: mol_type = other RNA
cccagcggcgagtccagaaagttc

SEQ ID NO: 70329 - RNA, 27 nt, synthetic construct
  misc_feature 1..27: note = BAI1-associated protein 3 (124-132)
  source 1..27: mol_type = other RNA
cccagcctgggcctcagagcccttgct

SEQ ID NO: 70330 - RNA, 84 nt, synthetic construct
  misc_feature 1..84: note = Attractin (1008-1035)
  source 1..84: mol_type = other RNA
cccagcaacaccggcaaggggaaatgcatcgagggatcctacaagggtcctgtgaaaatgccatctcaggccccgacaggcaat

SEQ ID NO: 70331 - RNA, 54 nt, synthetic construct
  misc_feature 1..54: note = Zinc finger protein 469 (879-896)
  source 1..54: mol_type = other RNA
cccagctccggccaccctctgaagtctaaagccggggtgaccccagagtcaaag

SEQ ID NO: 70332 - RNA, 72 nt, synthetic construct
  misc_feature 1..72: note = Serine/threonine-protein kinase WNK1 (1547-1570)
  source 1..72: mol_type = other RNA
cccagctcctcttcaagtcctggcgccggggtgagctcctacatctctcagccaggaggtctgcacccgctc

SEQ ID NO: 70333 - RNA, 36 nt, synthetic construct
  misc_feature 1..36: note = Fibronectin isoform 6 (769-780)
  source 1..36: mol_type = other RNA
cccagcaccgccacatccgtgaacatccctgacctg

SEQ ID NO: 70334 - RNA, 21 nt, synthetic construct
  misc_feature 1..21: note = Transcription factor HES-1 (104-110)
  source 1..21: mol_type = other RNA
cccagcgtgctgggcaagtac

SEQ ID NO: 70335 - RNA, 24 nt, synthetic construct
  misc_feature 1..24: note = Basement membrane-specific heparan sulfate proteoglycan core protein (2626-2633)
  source 1..24: mol_type = other RNA
cccagcgtgtcccctccaatcaga

SEQ ID NO: 70336 - RNA, 27 nt, synthetic construct
  misc_feature 1..27: note = Serine/threonine-protein kinase ICK (273-281)
  source 1..27: mol_type = other RNA
cccaccgccagccaggctctgagatac

SEQ ID NO: 70337 - RNA, 27 nt, synthetic construct
  misc_feature 1..27: note = Myotubularin-related protein 14 (360-368)
  source 1..27: mol_type = other RNA
cccaccgagatcctgtacctcacagtg

SEQ ID NO: 70338 - RNA, 30 nt, synthetic construct
  misc_feature 1..30: note = Nicastrin (540-549)
  source 1..30: mol_type = other RNA
cccaccaacacaacttacgtggtccagtat

SEQ ID NO: 70339 - RNA, 21 nt, synthetic construct
  misc_feature 1..21: note = Sorting nexin-5 (259-265)
  source 1..21: mol_type = other RNA
cccaccgtgatcaagaaatac

SEQ ID NO: 70340 - RNA, 30 nt, synthetic construct
  misc_feature 1..30: note = Doublesex- and mab-3-related transcription factor A2 (25-34)
  source 1..30: mol_type = other RNA
cccgtggccagcgtcgcttccgttgcagcc

SEQ ID NO: 70341 - RNA, 27 nt, synthetic construct
  misc_feature 1..27: note = UPF0609 protein C4orf27 (230-238)
  source 1..27: mol_type = other RNA
cccgtggacaagaacgatgtcggctac

SEQ ID NO: 70342 - RNA, 27 nt, synthetic construct
  misc_feature 1..27: note = Hephaestin (425-433)
  source 1..27: mol_type = other RNA
cccgtggacctgctcaccggcaaggtc

SEQ ID NO: 70343 - RNA, 33 nt, synthetic construct
  misc_feature 1..33: note = Single-stranded DNA-binding protein 3 (128-138)
  source 1..33: mol_type = other RNA
cccgtgcctccaggcgggagcagatccaacttc

SEQ ID NO: 70344 - RNA, 27 nt, synthetic construct
  misc_feature 1..27: note = Enolase-like protein ENO4 (194-202)
  source 1..27: mol_type = other RNA
cccgtgcctccaccgccccctccaccc

SEQ ID NO: 70345 - RNA, 27 nt, synthetic construct
  misc_feature 1..27: note = Obscurin (6294-6302)
  source 1..27: mol_type = other RNA
cccgtggtccctaccctgtacgttaca

SEQ ID NO: 70346 - RNA, 24 nt, synthetic construct
  misc_feature 1..24: note = Matrin-3 (231-238)
  source 1..24: mol_type = other RNA
ccctacggcaagatcaaaaactat

SEQ ID NO: 70347 - RNA, 30 nt, synthetic construct
  misc_feature 1..30: note = Alpha-actinin-4 (178-187)
  source 1..30: mol_type = other RNA
ccctacaagaacgtgaatgtccagaacttc

SEQ ID NO: 70348 - RNA, 27 nt, synthetic construct
  misc_feature 1..27: note = Dedicator of cytokinesis protein 7 (627-635)
  source 1..27: mol_type = other RNA
ccctacctggacaagttctttgccctc

SEQ ID NO: 70349 - RNA, 27 nt, synthetic construct
  misc_feature 1..27: note = Dedicator of cytokinesis protein 6 (722-730)
  source 1..27: mol_type = other RNA
ccctacctggacaagttctttaccctc

SEQ ID NO: 70350 - RNA, 27 nt, synthetic construct
  misc_feature 1..27: note = Eukaryotic peptide chain release factor GTP-binding subunit ERF3A (285-293)
  source 1..27: mol_type = other RNA
ccctacctggacaacctccctaatttc

SEQ ID NO: 70351 - RNA, 27 nt, synthetic construct
  misc_feature 1..27: note = Melanoma antigen preferentially expressed in tumors (254-262)
  source 1..27: mol_type = other RNA
ccctacctgggccagatgatcaacctc

SEQ ID NO: 70352 - RNA, 27 nt, synthetic construct
  misc_feature 1..27: note = Elongation of very long chain fatty acids protein 5 (194-202)
  source 1..27: mol_type = other RNA
ccctacctgtggtggaagaaatatatc

SEQ ID NO: 70353 - RNA, 33 nt, synthetic construct; identical to SEQ ID NO: 46126
  misc_feature 1..33: note = Tubulin beta-6 chain (117-127)
  source 1..33: mol_type = other RNA

SEQ ID NO: 70354 - RNA, 24 nt, synthetic construct
  misc_feature 1..24: note = LYR motif-containing protein 1 (80-87)
  source 1..24: mol_type = other RNA
ccctaccctagaccaatccacctg

SEQ ID NO: 70355 - RNA, 27 nt, synthetic construct
  misc_feature 1..27: note = Cubilin (2661-2669)
  source 1..27: mol_type = other RNA
ccctacagccaggtgtggatccacttc

SEQ ID NO: 70356 - RNA, 36 nt, synthetic construct
  misc_feature 1..36: note = Pumilio homolog 1 (440-451)
  source 1..36: mol_type = other RNA
ccctacaccgccggcctggctgcagccgcgacactc

SEQ ID NO: 70357 - RNA, 27 nt, synthetic construct
  misc_feature 1..27: note = Serine/threonine-protein kinase Nek6 (236-244)
  source 1..27: mol_type = other RNA
ccctactatatgagccctgagagaatc

SEQ ID NO: 70358 - RNA, 24 nt, synthetic construct
  misc_feature 1..24: note = Progestin and adipoQ receptor family member 4 (113-120)
  source 1..24: mol_type = other RNA
caggccgctgcaagactgctcgtg

SEQ ID NO: 70359 - RNA, 48 nt, synthetic construct
  misc_feature 1..48: note = HLA class I histocompatibility antigen, B-15 alpha chain (346-361)
  source 1..48: mol_type = other RNA
caggccgctagctccgactctgcacaaggctcagatgtgagtctgacc

SEQ ID NO: 70360 - RNA, 60 nt, synthetic construct
  misc_feature 1..60: note = HLA class I histocompatibility antigen, A-23 alpha chain (346-365)
  source 1..60: mol_type = other RNA
caggccgctagctccgactctgcacaaggctcagatgtgagtctgaccgcctgcaaggtc

SEQ ID NO: 70361 - RNA, 27 nt, synthetic construct
  misc_feature 1..27: note = Nuclear distribution protein nudE-like 1 (66-74)
  source 1..27: mol_type = other RNA
caggccgacaaccaaagactgaagtac

SEQ ID NO: 70362 - RNA, 42 nt, synthetic construct
  misc_feature 1..42: note = Glycogenin-1 (2-15)
  source 1..42: mol_type = other RNA
caggccttcgtgaccctgacaactaacgacgcttacgcaaag

SEQ ID NO: 70363 - RNA, 39 nt, synthetic construct
  misc_feature 1..39: note = CREB-binding protein (405-417)
  source 1..39: mol_type = other RNA
caggccatcctgggcagccccgcttccgggattcaaaac

SEQ ID NO: 70364 - RNA, 30 nt, synthetic construct
  misc_feature 1..30: note = Scavenger receptor cysteine-rich type 1 protein M160 (412-421)
  source 1..30: mol_type = other RNA
caggccctggtggtctgcaagcaactcggc

SEQ ID NO: 70365 - RNA, 27 nt, synthetic construct
  misc_feature 1..27: note = Myelin basic protein (108-116)
  source 1..27: mol_type = other RNA
caggacgagaaccccgtggtccacttc

SEQ ID NO: 70366 - RNA, 21 nt, synthetic construct
  misc_feature 1..21: note = Clathrin heavy chain 1 (723-729)
  source 1..21: mol_type = other RNA
caggaccccgatgtgcacttc

SEQ ID NO: 70367 - RNA, 27 nt, synthetic construct
  misc_feature 1..27: note = Fatty acid synthase (1595-1603)
  source 1..27: mol_type = other RNA
caggacagcctgctcggcatggagttc

SEQ ID NO: 70368 - RNA, 27 nt, synthetic construct
  misc_feature 1..27: note = Stathmin-3 (88-96)
  source 1..27: mol_type = other RNA
caggaggcccaagtgctgaagcagctc

SEQ ID NO: 70369 - RNA, 33 nt, synthetic construct
  misc_feature 1..33: note = Formin-1 (1099-1109)
  source 1..33: mol_type = other RNA
caggaggacgaactggtgaagatcagaaaatac

SEQ ID NO: 70370 - RNA, 27 nt, synthetic construct
  misc_feature 1..27: note = WD repeat-containing protein 26 (508-516)
  source 1..27: mol_type = other RNA
caggaggaccaccccatcatgagcttc

SEQ ID NO: 70371 - RNA, 33 nt, synthetic construct
  misc_feature 1..33: note = Large proline-rich protein BAG6 (1111-1121)
  source 1..33: mol_type = other RNA
caggaggaccccaactacagccctcaaagattc

SEQ ID NO: 70372 - RNA, 27 nt, synthetic construct
  misc_feature 1..27: note = Vigilin (1012-1020)
  source 1..27: mol_type = other RNA
caggaggacagagccctgaggagcttc

SEQ ID NO: 70373 - RNA, 36 nt, synthetic construct
  misc_feature 1..36: note = Nestin (502-513)
  source 1..36: mol_type = other RNA
caggaggaagagggcagcgccctgaagacctcctgg

SEQ ID NO: 70374 - RNA, 27 nt, synthetic construct
  misc_feature 1..27: note = DNA (cytosine-5)-methyltransferase 3A (426-434)
  source 1..27: mol_type = other RNA
caggagttcgacccccctaaggtgtac

SEQ ID NO: 70375 - RNA, 30 nt, synthetic construct; identical to SEQ ID NO: 46148
  misc_feature 1..30: note = AT-rich interactive domain-containing protein 1B (1797-1806)
  source 1..30: mol_type = other RNA

SEQ ID NO: 70376 - RNA, 27 nt, synthetic construct
  misc_feature 1..27: note = Hemicentin-1 (1703-1711)
  source 1..27: mol_type = other RNA
caggagatcgacagaggccaatacatt

SEQ ID NO: 70377 - RNA, 21 nt, synthetic construct
  misc_feature 1..21: note = Annexin A2 (141-147)
  source 1..21: mol_type = other RNA
caggagatcaacagagtgtac

SEQ ID NO: 70378 - RNA, 30 nt, synthetic construct
  misc_feature 1..30: note = Mitogen-activated protein kinase kinase kinase kinase 5 (802-811)
  source 1..30: mol_type = other RNA
caggagatcagcgacgaaaccagagtgttc

SEQ ID NO: 70379 - RNA, 27 nt, synthetic construct
  misc_feature 1..27: note = Serine-protein kinase ATM (95-103)
  source 1..27: mol_type = other RNA
caggagatcagctccctggtgaagtac

SEQ ID NO: 70380 - RNA, 39 nt, synthetic construct
  misc_feature 1..39: note = Desmoglein-2 (903-915)
  source 1..39: mol_type = other RNA
caggagatcgtgaccgaaagaagcgtctcctctaggcaa

SEQ ID NO: 70381 - RNA, 30 nt, synthetic construct
  misc_feature 1..30: note = Synemin (16-25)
  source 1..30: mol_type = other RNA
caggagctgaacgccagactctacgactat

SEQ ID NO: 70382 - RNA, 36 nt, synthetic construct
  misc_feature 1..36: note = Nestin (337-348)
  source 1..36: mol_type = other RNA
caggagctgccccaaagcgccgacgtgcagagatgg

SEQ ID NO: 70383 - RNA, 27 nt, synthetic construct
  misc_feature 1..27: note = Receptor-interacting serine/threonine-protein kinase 4 (597-605)
  source 1..27: mol_type = other RNA
caggagaacatcgtgagaattctgctc

SEQ ID NO: 70384 - RNA, 27 nt, synthetic construct
  misc_feature 1..27: note = TSC22 domain family protein 1 (93-101)
  source 1..27: mol_type = other RNA
caggagaacaatctgctcaagaccctt

SEQ ID NO: 70385 - RNA, 30 nt, synthetic construct
  misc_feature 1..30: note = Protein flightless-1 homolog (1024-1033)
  source 1..30: mol_type = other RNA
caggagaaccccaagttcctgagccacttt

SEQ ID NO: 70386 - RNA, 30 nt, synthetic construct
  misc_feature 1..30: note = RNA-binding motif, single-stranded-interacting protein 3 (126-135)
  source 1..30: mol_type = other RNA
caggagcaagaccccaccaacctgtacatc

SEQ ID NO: 70387 - RNA, 33 nt, synthetic construct
  misc_feature 1..33: note = T-complex protein 1 subunit theta (20-30)
  source 1..33: mol_type = other RNA
caggagcaagaagtgggcgacgggaccaacttc

SEQ ID NO: 70388 - RNA, 27 nt, synthetic construct
  misc_feature 1..27: note = ETS translocation variant 1 (65-73)
  source 1..27: mol_type = other RNA
caggagcaacccttcaagtttagctac

SEQ ID NO: 70389 - RNA, 27 nt, synthetic construct
  misc_feature 1..27: note = Nucleolar complex protein 2 homolog (188-196)
  source 1..27: mol_type = other RNA
caggagagcgccgaagctaacaagttc

SEQ ID NO: 70390 - RNA, 30 nt, synthetic construct
  misc_feature 1..30: note = Protein transport protein Sec24D (86-95)
  source 1..30: mol_type = other RNA
caggagagccaatccgtgatccacaacctg

SEQ ID NO: 70391 - RNA, 30 nt, synthetic construct
  misc_feature 1..30: note = Ankycorbin (839-848)
  source 1..30: mol_type = other RNA
caggaggtgaacgaactgctccaaaagttc

SEQ ID NO: 70392 - RNA, 24 nt, synthetic construct
  misc_feature 1..24: note = Up-regulated during skeletal muscle growth protein 5 (11-18)
  source 1..24: mol_type = other RNA
cagttcaccggcatcaagaaatac

SEQ ID NO: 70393 - RNA, 30 nt, synthetic construct
  misc_feature 1..30: note = Proprotein convertase subtilisin/kexin type 7 (93-102)
  source 1..30: mol_type = other RNA
cagggccactacctgttcgtgcaacccgcc

SEQ ID NO: 70394 - RNA, 18 nt, synthetic construct
  misc_feature 1..18: note = All-trans-retinol 13,14-reductase (57-62)
  source 1..18: mol_type = other RNA
cagggcatccactacatt

SEQ ID NO: 70395 - RNA, 33 nt, synthetic construct
  misc_feature 1..33: note = Serine/threonine-protein phosphatase 1 regulatory subunit 10 (572-582)
  source 1..33: mol_type = other RNA
cagggccccgggggaggtggcatcaacgtgcaa

SEQ ID NO: 70396 - RNA, 36 nt, synthetic construct; identical to SEQ ID NO: 46169
  misc_feature 1..36: note = HLA class I histocompatibility antigen, A-23 alpha chain (354-365)
  source 1..36: mol_type = other RNA

SEQ ID NO: 70397 - RNA, 30 nt, synthetic construct
  misc_feature 1..30: note = Fibronectin isoform 6 (1715-1724)
  source 1..30: mol_type = other RNA
cagggcgtggtcaccacactggagaacgtt

SEQ ID NO: 70398 - RNA, 57 nt, synthetic construct
  misc_feature 1..57: note = Heterogeneous nuclear ribonucleoprotein L (52-70)
  source 1..57: mol_type = other RNA
cagcacggcgggggaggtggcgggggaggcggtgccggggctgcaggaggcggcggg

SEQ ID NO: 70399 - RNA, 66 nt, synthetic construct
  misc_feature 1..66: note = Splicing factor, proline- and glutamine-rich (246-267)
  source 1..66: mol_type = other RNA
cagcaccatcccccttaccaccaacagcatcaccagggcccaccgcccgggggacctggtggcaga

SEQ ID NO: 70400 - RNA, 39 nt, synthetic construct
  misc_feature 1..39: note = Dynein heavy chain 8, axonemal (2665-2677)
  source 1..39: mol_type = other RNA
cagcacaaggccgtgctgctcaccggcgagcaagggaca

SEQ ID NO: 70401 - RNA, 33 nt, synthetic construct
  misc_feature 1..33: note = Synaptic vesicle membrane protein VAT-1 homolog (26-36)
  source 1..33: mol_type = other RNA
cagcaccccgccgctagcgagggcgcagccgcg

SEQ ID NO: 70402 - RNA, 39 nt, synthetic construct
  misc_feature 1..39: note = Band 4.1-like protein 2 (54-66)
  source 1..39: mol_type = other RNA
cagatcgacggcggggccggaggtgatagcggcaccctg

SEQ ID NO: 70403 - RNA, 24 nt, synthetic construct
  misc_feature 1..24: note = 60S ribosomal protein L26 (66-73)
  source 1..24: mol_type = other RNA
cagatcggcaaggtggtccaagtt

SEQ ID NO: 70404 - RNA, 27 nt, synthetic construct
  misc_feature 1..27: note = Cytoskeleton-associated protein 5 (1667-1675)
  source 1..27: mol_type = other RNA
cagatcctggaccacctcaccatgatt

SEQ ID NO: 70405 - RNA, 27 nt, synthetic construct
  misc_feature 1..27: note = DNA-dependent protein kinase catalytic subunit (865-873)
  source 1..27: mol_type = other RNA
cagatcaacaagaatctgctcaccgtg

SEQ ID NO: 70406 - RNA, 51 nt, synthetic construct
  misc_feature 1..51: note = Transmembraneoprotein NMB (370-386)
  source 1..51: mol_type = other RNA
cagatcaacagatacggccacttccaagccaccattacaatagtggagggg

SEQ ID NO: 70407 - RNA, 27 nt, synthetic construct
  misc_feature 1..27: note = Dehydrogenase/reductase SDR family member 2, mitochondrial (127-135)
  source 1..27: mol_type = other RNA
cagatctgggacaagattctgagcgtg

SEQ ID NO: 70408 - RNA, 36 nt, synthetic construct
  misc_feature 1..36: note = Nodal modulator 2 (399-410)
  source 1..36: mol_type = other RNA
cagctggccgacatcgtggctaccggcttcagcgtc

SEQ ID NO: 70409 - RNA, 27 nt, synthetic construct
  misc_feature 1..27: note = Laminin subunit alpha-4 (470-478)
  source 1..27: mol_type = other RNA
cagctggacgattacaacgccaagctc

SEQ ID NO: 70410 - RNA, 27 nt, synthetic construct
  misc_feature 1..27: note = Myotubularin-related protein 6 (229-237)
  source 1..27: mol_type = other RNA
cagctggacggcgatcccaaggaggtg

SEQ ID NO: 70411 - RNA, 27 nt, synthetic construct
  misc_feature 1..27: note = Circadian clock protein PASD1 (383-391)
  source 1..27: mol_type = other RNA
cagctggaggaaagaacctggctcctt

SEQ ID NO: 70412 - RNA, 21 nt, synthetic construct
  misc_feature 1..21: note = ATP-dependent RNA helicase DHX8 (283-289)
  source 1..21: mol_type = other RNA
cagctggagggcctcagaaag

SEQ ID NO: 70413 - RNA, 27 nt, synthetic construct
  misc_feature 1..27: note = Erlin-2 (26-34)
  source 1..27: mol_type = other RNA
cagctgggcgccgtggtcgctgttgca

SEQ ID NO: 70414 - RNA, 27 nt, synthetic construct
  misc_feature 1..27: note = Probable histidine-tRNA ligase, mitochondrial (60-68)
  source 1..27: mol_type = other RNA
cagctgggcgacttcctcatcaaggtg

SEQ ID NO: 70415 - RNA, 27 nt, synthetic construct
  misc_feature 1..27: note = Complement factor I (347-355)
  source 1..27: mol_type = other RNA
cagctgggcgacctcccctggcaagtg

SEQ ID NO: 70416 - RNA, 27 nt, synthetic construct
  misc_feature 1..27: note = E3 ubiquitin-protein ligase TRIM63 (281-289)
  source 1..27: mol_type = other RNA
cagctgatcaagagcattgtggaggcc

SEQ ID NO: 70417 - RNA, 27 nt, synthetic construct
  misc_feature 1..27: note = Class E basic helix-loop-helix protein 41 (161-169)
  source 1..27: mol_type = other RNA
cagctgatcaaccacctccatgccgtg

SEQ ID NO: 70418 - RNA, 27 nt, synthetic construct
  misc_feature 1..27: note = E3 ubiquitin-protein ligase listerin (245-253)
  source 1..27: mol_type = other RNA
cagctgatccccttcattgacgccgtg

SEQ ID NO: 70419 - RNA, 27 nt, synthetic construct
  misc_feature 1..27: note = Intron-binding protein aquarius (224-232)
  source 1..27: mol_type = other RNA
cagctgatccaaaagttcattagcgtg

SEQ ID NO: 70420 - RNA, 33 nt, synthetic construct
  misc_feature 1..33: note = Pleckstrin homology domain-containing family H member 1 (700-710)
  source 1..33: mol_type = other RNA
cagctgatcagcgagaagaaaacctactatctc

SEQ ID NO: 70421 - RNA, 30 nt, synthetic construct
  misc_feature 1..30: note = WASH complex subunit 7 (254-263)
  source 1..30: mol_type = other RNA
cagctgctcgacggcatgatcttccaagcc

SEQ ID NO: 70422 - RNA, 33 nt, synthetic construct
  misc_feature 1..33: note = Transmembrane protein 209 (327-337)
  source 1..33: mol_type = other RNA
cagctgctcgaccacatggatagctggaccgcc

SEQ ID NO: 70423 - RNA, 27 nt, synthetic construct
  misc_feature 1..27: note = StAR-related lipid transfer protein 13 (922-930)
  source 1..27: mol_type = other RNA
cagctgctcggcggggtgagagccgtc

SEQ ID NO: 70424 - RNA, 27 nt, synthetic construct
  misc_feature 1..27: note = Small subunit processome component 20 homolog (1596-1604)
  source 1..27: mol_type = other RNA
cagctgatggagggcaaggtggtcctc

SEQ ID NO: 70425 - RNA, 27 nt, synthetic construct
  misc_feature 1..27: note = Serine/threonine-protein kinase mTOR (66-74)
  source 1..27: mol_type = other RNA
cagctgaaccaccatatcttcgagctc

SEQ ID NO: 70426 - RNA, 33 nt, synthetic construct
  misc_feature 1..33: note = Liprin-alpha-2 (76-86)
  source 1..33: mol_type = other RNA
cagctgaacagcgccctcccccaagacatcgag

SEQ ID NO: 70427 - RNA, 27 nt, synthetic construct
  misc_feature 1..27: note = Protein Shroom4 (1452-1460)
  source 1..27: mol_type = other RNA
cagctgcaagactaccagcacttcgtg

SEQ ID NO: 70428 - RNA, 39 nt, synthetic construct
  misc_feature 1..39: note = Plectin (3123-3135)
  source 1..39: mol_type = other RNA
cagctgagcaccggcgggatcgtggacccctccaagtct

SEQ ID NO: 70429 - RNA, 27 nt, synthetic construct
  misc_feature 1..27: note = Protein wntless homolog (517-525)
  source 1..27: mol_type = other RNA
cagctgaccacaactatcacgcacgtg

SEQ ID NO: 70430 - RNA, 27 nt, synthetic construct
  misc_feature 1..27: note = Chondroitin sulfate proteoglycan 4 (77-85)
  source 1..27: mol_type = other RNA
cagctgtacagcggcagactccaagtg

SEQ ID NO: 70431 - RNA, 30 nt, synthetic construct; identical to SEQ ID NO: 46204
  misc_feature 1..30: note = Solute carrier family 12 member 6 (45-54)
  source 1..30: mol_type = other RNA

SEQ ID NO: 70432 - RNA, 27 nt, synthetic construct
  misc_feature 1..27: note = Synemin (724-732)
  source 1..27: mol_type = other RNA
cagatgatcggcgacattataaacctg

SEQ ID NO: 70433 - RNA, 36 nt, synthetic construct
  misc_feature 1..36: note = DNA-dependent protein kinase catalytic subunit (947-958)
  source 1..36: mol_type = other RNA
cagatgcccgagggcgggcaaggagcccctccaatg

SEQ ID NO: 70434 - RNA, 27 nt, synthetic construct
  misc_feature 1..27: note = Actin-like protein 6A (239-247)
  source 1..27: mol_type = other RNA
cagatgcccaccgtgcactacgagttc

SEQ ID NO: 70435 - RNA, 27 nt, synthetic construct
  misc_feature 1..27: note = Talin-1 (288-296)
  source 1..27: mol_type = other RNA
cagatgagcgagatcgaagccaaggtg

SEQ ID NO: 70436 - RNA, 36 nt, synthetic construct
  misc_feature 1..36: note = L-lactate dehydrogenase A chain (20-31)
  source 1..36: mol_type = other RNA
cagaacaagatcaccgtggtcggcgttggggccgtg

SEQ ID NO: 70437 - RNA, 27 nt, synthetic construct
  misc_feature 1..27: note = POU domain, class 2, transcription factor 1 (208-216)
  source 1..27: mol_type = other RNA
cagcccgccacccctacaagaactatc

SEQ ID NO: 70438 - RNA, 27 nt, synthetic construct
  misc_feature 1..27: note = Integrin alpha-6 (55-63)
  source 1..27: mol_type = other RNA
cagcccgaggacaagagactgctcctt

SEQ ID NO: 70439 - RNA, 33 nt, synthetic construct
  misc_feature 1..33: note = Beta-2-microglobulin (88-98)
  source 1..33: mol_type = other RNA
cagcccaagatcgtgaaatgggacagagatatg

SEQ ID NO: 70440 - RNA, 24 nt, synthetic construct
  misc_feature 1..24: note = Potassium voltage-gated channel subfamily H member 2 (335-342)
  source 1..24: mol_type = other RNA
cagcccctggccgtggtcgacctc

SEQ ID NO: 70441 - RNA, 33 nt, synthetic construct
  misc_feature 1..33: note = Histone-lysine N-methyltransferase 2A (3086-3096)
  source 1..33: mol_type = other RNA
cagcccctgtacgtgctccaaacccttcctaac

SEQ ID NO: 70442 - RNA, 27 nt, synthetic construct
  misc_feature 1..27: note = Rho GTPase-activating protein 31 (988-996)
  source 1..27: mol_type = other RNA
cagccccaagcccctagaagggagatc

SEQ ID NO: 70443 - RNA, 27 nt, synthetic construct
  misc_feature 1..27: note = Tribbles homolog 1 (15-23)
  source 1..27: mol_type = other RNA
cagcccagaggccctgccctgctcttc

SEQ ID NO: 70444 - RNA, 30 nt, synthetic construct
  misc_feature 1..30: note = Transcription intermediary factor 1-alpha (611-620)
  source 1..30: mol_type = other RNA
cagcccagacctccaagcaacaggaccgtg

SEQ ID NO: 70445 - RNA, 27 nt, synthetic construct
  misc_feature 1..27: note = DNA-directed RNA polymerase II subunit RPB3 (6-14)
  source 1..27: mol_type = other RNA
cagcccaccgtgagaatcacagagctg

SEQ ID NO: 70446 - RNA, 36 nt, synthetic construct
  misc_feature 1..36: note = Guanine nucleotide exchange factor VAV3 (393-404)
  source 1..36: mol_type = other RNA
cagcccgtgctgctcttcggcagacctcaaggggac

SEQ ID NO: 70447 - RNA, 24 nt, synthetic construct
  misc_feature 1..24: note = Dual specificity protein kinase CLK3 (230-237)
  source 1..24: mol_type = other RNA
cagccctaccctctgccacacgtg

SEQ ID NO: 70448 - RNA, 60 nt, synthetic construct
  misc_feature 1..60: note = CCR4-NOT transcription complex subunit 1 (48-67)
  source 1..60: mol_type = other RNA
cagcaaggcatcctgaagaccgacgatctcattacaagattctttaggctttgcactgag

SEQ ID NO: 70449 - RNA, 27 nt, synthetic construct
  misc_feature 1..27: note = Tetratricopeptide repeat protein 37 (642-650)
  source 1..27: mol_type = other RNA
cagcaaatcctgggcaagtacaaagag

SEQ ID NO: 70450 - RNA, 24 nt, synthetic construct
  misc_feature 1..24: note = Eukaryotic initiation factor 4A-I (114-121)
  source 1..24: mol_type = other RNA
cagcaaatccagaaggtggtcatg

SEQ ID NO: 70451 - RNA, 27 nt, synthetic construct
  misc_feature 1..27: note = Pyridoxal kinase (30-38)
  source 1..27: mol_type = other RNA
cagcaaaaccccagactggtgtacgtc

SEQ ID NO: 70452 - RNA, 24 nt, synthetic construct
  misc_feature 1..24: note = Titin (12085-12092)
  source 1..24: mol_type = other RNA
cagagagccgaggtggtccccgtt

SEQ ID NO: 70453 - RNA, 27 nt, synthetic construct
  misc_feature 1..27: note = Caprin-1 (666-674)
  source 1..27: mol_type = other RNA
cagagagacggctaccaacagaacttc

SEQ ID NO: 70454 - RNA, 21 nt, synthetic construct
  misc_feature 1..21: note = Signal transducer and activator of transcription 6 (89-95)
  source 1..21: mol_type = other RNA
cagagagaccccctgaagctc

SEQ ID NO: 70455 - RNA, 27 nt, synthetic construct
  misc_feature 1..27: note = Interleukin-24 (5-13)
  source 1..27: mol_type = other RNA
cagagactgcaaagcctctggaccctt

SEQ ID NO: 70456 - RNA, 27 nt, synthetic construct
  misc_feature 1..27: note = Tight junction protein ZO-1 (750-758)
  source 1..27: mol_type = other RNA
cagagaagctccggcatcattaggctg

SEQ ID NO: 70457 - RNA, 27 nt, synthetic construct
  misc_feature 1..27: note = Mastermind-like protein 2 (349-357)
  source 1..27: mol_type = other RNA
cagagaagcacccccaggccttccctg

SEQ ID NO: 70458 - RNA, 27 nt, synthetic construct
  misc_feature 1..27: note = Polypyrimidine tract-binding protein 1 (384-392)
  source 1..27: mol_type = other RNA
cagagagtgaagatcctgttcaacaaa

SEQ ID NO: 70459 - RNA, 27 nt, synthetic construct
  misc_feature 1..27: note = KN motif and ankyrin repeat domain-containing protein 2 (79-87)
  source 1..27: mol_type = other RNA
cagagcgagatcgcctccatgctgtac

SEQ ID NO: 70460 - RNA, 30 nt, synthetic construct
  misc_feature 1..30: note = Nuclear factor erythroid 2-related factor 2 (93-102)
  source 1..30: mol_type = other RNA
cagagcgagacctccggctctgccaactac

SEQ ID NO: 70461 - RNA, 21 nt, synthetic construct
  misc_feature 1..21: note = Golgin subfamily A member 4 (541-547)
  source 1..21: mol_type = other RNA
cagagcgagtacctgaagatc

SEQ ID NO: 70462 - RNA, 30 nt, synthetic construct
  misc_feature 1..30: note = RNA-binding protein 27 (597-606)
  source 1..30: mol_type = other RNA
cagagcggcggggccggagaggactgccaa

SEQ ID NO: 70463 - RNA, 33 nt, synthetic construct
  misc_feature 1..33: note = Heterogeneous nuclear ribonucleoprotein K (153-163)
  source 1..33: mol_type = other RNA
cagagcctggccggcgggatcattggagtgaag

SEQ ID NO: 70464 - RNA, 30 nt, synthetic construct
  misc_feature 1..30: note = Interphotoreceptor matrix proteoglycan 1 (289-298)
  source 1..30: mol_type = other RNA
cagagcctggacgtgggcaccatccaattc

SEQ ID NO: 70465 - RNA, 27 nt, synthetic construct
  misc_feature 1..27: note = Hsc70-interacting protein (339-347)
  source 1..27: mol_type = other RNA
cagagcaaccccaaggtgatgaatctg

SEQ ID NO: 70466 - RNA, 27 nt, synthetic construct
  misc_feature 1..27: note = Hemicentin-1 (1877-1885)
  source 1..27: mol_type = other RNA
cagagctccggcagagtgctgcaaatc

SEQ ID NO: 70467 - RNA, 27 nt, synthetic construct
  misc_feature 1..27: note = CUB and sushi domain-containing protein 3 (16-24)
  source 1..27: mol_type = other RNA
cagaccgccagcggcttcatctacaca

SEQ ID NO: 70468 - RNA, 27 nt, synthetic construct
  misc_feature 1..27: note = Nodal modulator 1 (450-458)
  source 1..27: mol_type = other RNA
cagaccttccccctgacagtgactaac

SEQ ID NO: 70469 - RNA, 36 nt, synthetic construct
  misc_feature 1..36: note = Receptor-type tyrosine-protein phosphatase delta (33-44)
  source 1..36: mol_type = other RNA
cagaccggcgtgagcgggggagtcgcctccttcatc

SEQ ID NO: 70470 - RNA, 27 nt, synthetic construct
  misc_feature 1..27: note = Ribosome maturation protein SBDS (52-60)
  source 1..27: mol_type = other RNA
cagacccacagcgtgttcgtcaacgtt

SEQ ID NO: 70471 - RNA, 30 nt, synthetic construct
  misc_feature 1..30: note = Histone-lysine N-methyltransferase EHMT1 (170-179)
  source 1..30: mol_type = other RNA
cagacccccgccgctcctccagcaacactg

SEQ ID NO: 70472 - RNA, 21 nt, synthetic construct
  misc_feature 1..21: note = rRNA 2'-O-methyltransferase fibrillarin (239-245)
  source 1..21: mol_type = other RNA
cagaccagaatcgtggccctg

SEQ ID NO: 70473 - RNA, 33 nt, synthetic construct
  misc_feature 1..33: note = Protein FAM135A (647-657)
  source 1..33: mol_type = other RNA
cagaccacacccagcctgggcgtgagaactatc

SEQ ID NO: 70474 - RNA, 30 nt, synthetic construct
  misc_feature 1..30: note = Catenin beta-1 (78-87)
  source 1..30: mol_type = other RNA
caggtggccgacatcgatggccaatacgct

SEQ ID NO: 70475 - RNA, 123 nt, synthetic construct
  misc_feature 1..123: note = E1A-binding protein p400 (51-91)
  source 1..123: mol_type = other RNA
caggtggccagcctgagagctgagaggatcgcaaaggaaaaaaaggccctcgcggaccaacagaaagctcagcagcccgccgtcgcacaacctccaccgccccagcctcagccaccccctcca

SEQ ID NO: 70476 - RNA, 30 nt, synthetic construct
  misc_feature 1..30: note = Integrator complex subunit 1 (125-134)
  source 1..30: mol_type = other RNA
caggtggccagcagagtcctggctatgaag

SEQ ID NO: 70477 - RNA, 27 nt, synthetic construct
  misc_feature 1..27: note = ATP-binding cassette sub-family A member 2 (2330-2338)
  source 1..27: mol_type = other RNA
caggtgttcagcaagatggagcaagtc

SEQ ID NO: 70478 - RNA, 42 nt, synthetic construct
  misc_feature 1..42: note = Zinc finger protein 423 (1103-1116)
  source 1..42: mol_type = other RNA
caggtgggcgggctggccccccctgagccagctgacagaccg

SEQ ID NO: 70479 - RNA, 30 nt, synthetic construct
  misc_feature 1..30: note = Transcription factor SOX-5 (88-97)
  source 1..30: mol_type = other RNA
caggtgctggacggcaaggtcgccgttgtg

SEQ ID NO: 70480 - RNA, 45 nt, synthetic construct
  misc_feature 1..45: note = T-complex protein 1 subunit beta (502-516)
  source 1..45: mol_type = other RNA
caggtgctgctcagcgccgctgaggcagccgaagtcatccttaga

SEQ ID NO: 70481 - RNA, 21 nt, synthetic construct
  misc_feature 1..21: note = Peptidyl-prolyl cis-trans isomerase FKBP9 (200-206)
  source 1..21: mol_type = other RNA
caggtgcaaatccacacctac

SEQ ID NO: 70482 - RNA, 63 nt, synthetic construct
  misc_feature 1..63: note = Poly(rC)-binding protein 2 (304-324)
  source 1..63: mol_type = other RNA
caggtgaccatcacaggcagcgccgcttccatttctctggcacaatacctcataaacgtcaga

SEQ ID NO: 70483 - RNA, 27 nt, synthetic construct
  misc_feature 1..27: note = Transcriptional regulator ATRX (1486-1494)
  source 1..27: mol_type = other RNA
caggtggtcagcttcctgcacaccgtt

SEQ ID NO: 70484 - RNA, 27 nt, synthetic construct
  misc_feature 1..27: note = 14-3-3 protein eta (46-54)
  source 1..27: mol_type = other RNA
cagtacgagagcaaggtgttctatctg

SEQ ID NO: 70485 - RNA, 27 nt, synthetic construct
  misc_feature 1..27: note = TELO2-interacting protein 1 homolog (50-58)
  source 1..27: mol_type = other RNA
cagtacatcctgttccccctcagattt

SEQ ID NO: 70486 - RNA, 27 nt, synthetic construct
  misc_feature 1..27: note = Vam6/Vps39-like protein (296-304)
  source 1..27: mol_type = other RNA
cagtaccccaaccctctgccagtgctc

SEQ ID NO: 70487 - RNA, 45 nt, synthetic construct
  misc_feature 1..45: note = Forkhead box protein D3 (302-316)
  source 1..45: mol_type = other RNA
cagtacccctatgccctgcctccagtggctccggtcctcccccct

SEQ ID NO: 70488 - RNA, 27 nt, synthetic construct
  misc_feature 1..27: note = Spectrin beta chain, non-erythrocytic 1 (17-25)
  source 1..27: mol_type = other RNA
cagtacagcgacgtgaacaatagatgg

SEQ ID NO: 70489 - RNA, 30 nt, synthetic construct
  misc_feature 1..30: note = Ubiquitin-like modifier-activating enzyme 1 (717-726)
  source 1..30: mol_type = other RNA
cagtacagcaacaatatcagacaactgctc

SEQ ID NO: 70490 - RNA, 30 nt, synthetic construct
  misc_feature 1..30: note = Golgin subfamily A member 4 (432-441)
  source 1..30: mol_type = other RNA
agagccgctttcgaggaactggagaaggca

SEQ ID NO: 70491 - RNA, 27 nt, synthetic construct
  misc_feature 1..27: note = HDAC2 (27-35)
  source 1..27: mol_type = other RNA
agagccttccccgctcctccaccgctg

SEQ ID NO: 70492 - RNA, 27 nt, synthetic construct
  misc_feature 1..27: note = Formin-like protein 2 (15-23)
  source 1..27: mol_type = other RNA
agagcccacaacgtgcccctgaagctc

SEQ ID NO: 70493 - RNA, 27 nt, synthetic construct
  misc_feature 1..27: note = Catenin beta-1 (151-159)
  source 1..27: mol_type = other RNA
agagccatccccgagctgaccaagctc

SEQ ID NO: 70494 - RNA, 33 nt, synthetic construct
  misc_feature 1..33: note = Fatty acid synthase (2352-2362)
  source 1..33: mol_type = other RNA
agagccaagctgacccccggctgcgaggctgaa

SEQ ID NO: 70495 - RNA, 27 nt, synthetic construct
  misc_feature 1..27: note = Junction plakoglobin (142-150)
  source 1..27: mol_type = other RNA
agagccctgcccgagctcaccaagctt

SEQ ID NO: 70496 - RNA, 24 nt, synthetic construct
  misc_feature 1..24: note = Astrotactin-2 (360-367)
  source 1..24: mol_type = other RNA
agagccaacacccccatcgagatt

SEQ ID NO: 70497 - RNA, 27 nt, synthetic construct
  misc_feature 1..27: note = Microtubule-associated protein 4 (356-364)
  source 1..27: mol_type = other RNA
agagccagccccatcaagatggacctg

SEQ ID NO: 70498 - RNA, 27 nt, synthetic construct
  misc_feature 1..27: note = Protein scribble homolog (473-481)
  source 1..27: mol_type = other RNA
agagccaccccccaccctagcgagctg

SEQ ID NO: 70499 - RNA, 33 nt, synthetic construct
  misc_feature 1..33: note = Perilipin-2 (230-240)
  source 1..33: mol_type = other RNA
agagcctaccagcaagctctgagcagggtgaag

SEQ ID NO: 70500 - RNA, 27 nt, synthetic construct
  misc_feature 1..27: note = Probable E3 ubiquitin-protein ligase HERC1 (2112-2120)
  source 1..27: mol_type = other RNA
agagcctacagcggcaacctgtatcac

SEQ ID NO: 70501 - RNA, 27 nt, synthetic construct
  misc_feature 1..27: note = Fibronectin isoform 6 (1162-1170)
  source 1..27: mol_type = other RNA
agagacgcccccatcgtgaacaaggtc

SEQ ID NO: 70502 - RNA, 51 nt, synthetic construct
  misc_feature 1..51: note = Vimentin (450-466)
  source 1..51: mol_type = other RNA
agagacggccaggtgatcaacgagaccagccaacaccatgatgacctggaa

SEQ ID NO: 70503 - RNA, 45 nt, synthetic construct
  misc_feature 1..45: note = Protein NipSnap homolog 2 (40-54)
  source 1..45: mol_type = other RNA
agagaggacagctggctgaagtccctcttcgtgaggaaagtcgat

SEQ ID NO: 70504 - RNA, 33 nt, synthetic construct
  misc_feature 1..33: note = Vimentin (196-206)
  source 1..33: mol_type = other RNA
agagaggaagccgagaacaccctgcagagcttc

SEQ ID NO: 70505 - RNA, 27 nt, synthetic construct
  misc_feature 1..27: note = Transcription elongation factor SPT5 (606-614)
  source 1..27: mol_type = other RNA
agagagggcgaaatcaggcacctgttc

SEQ ID NO: 70506 - RNA, 129 nt, synthetic construct
  misc_feature 1..129: note = Vimentin (258-300)
  source 1..129: mol_type = other RNA
agagagaccaacctggacagcctcccccttgtggatacacactccaagaggactctgttgatcaaaacggtcgaaacccgggacggccaggttattaatgagacatctcaacatcacgatgacttagaa

SEQ ID NO: 70507 - RNA, 24 nt, synthetic construct
  misc_feature 1..24: note = Myosin-7 (243-250)
  source 1..24: mol_type = other RNA
agattcggcaagtttatcaggatt

SEQ ID NO: 70508 - RNA, 36 nt, synthetic construct
  misc_feature 1..36: note = Protein YIF1B (85-96)
  source 1..36: mol_type = other RNA
agattcatccccattaccaagctgaaatactatttt

SEQ ID NO: 70509 - RNA, 33 nt, synthetic construct
  misc_feature 1..33: note = Filamin-A (2059-2069)
  source 1..33: mol_type = other RNA
agattcatccccagggagaacggcgtgtacctg

SEQ ID NO: 70510 - RNA, 27 nt, synthetic construct
  misc_feature 1..27: note = Uncharacterized protein C11orf96 (157-165)
  source 1..27: mol_type = other RNA
agattcaagacccagcccgtgacattt

SEQ ID NO: 70511 - RNA, 27 nt, synthetic construct
  misc_feature 1..27: note = Serine/threonine-protein phosphatase 2A 56 kDa regulatory subunit epsilon isoform (227-235)
  source 1..27: mol_type = other RNA
agattcgtgtacgagaccgaacacttt

SEQ ID NO: 70512 - RNA, 39 nt, synthetic construct
  misc_feature 1..39: note = NADH dehydrogenase (ubiquinone) 1 beta subcomplex subunit 5, mitochondrial (61-73)
  source 1..39: mol_type = other RNA
agattctacgacaggcggtttctgaagctccttcgcttc

SEQ ID NO: 70513 - RNA, 33 nt, synthetic construct
  misc_feature 1..33: note = Collagen alpha-2(I) chain (495-505)
  source 1..33: mol_type = other RNA
agaggcgcccccggggctgtgggagcacctggt

SEQ ID NO: 70514 - RNA, 30 nt, synthetic construct
  misc_feature 1..30: note = Nuclear receptor corepressor 2 (1514-1523)
  source 1..30: mol_type = other RNA
agaggcgcccccgtgatcgtccctgagctg

SEQ ID NO: 70515 - RNA, 27 nt, synthetic construct
  misc_feature 1..27: note = Pre-mRNA-processing-splicing factor 8 (763-771)
  source 1..27: mol_type = other RNA
agaggcgccaccgtggacaagacagtc

SEQ ID NO: 70516 - RNA, 30 nt, synthetic construct
  misc_feature 1..30: note = Inositol 1,4,5-trisphosphate receptor type 2 (1365-1374)
  source 1..30: mol_type = other RNA
agaggcgacgagagcgggcccctggcctac

SEQ ID NO: 70517 - RNA, 27 nt, synthetic construct
  misc_feature 1..27: note = Collagen alpha-2(V) chain (785-793)
  source 1..27: mol_type = other RNA
agaggcttcaccgggctgcagggactc

SEQ ID NO: 70518 - RNA, 30 nt, synthetic construct
  misc_feature 1..30: note = Inactive phospholipase C-like protein 2 (6-15)
  source 1..30: mol_type = other RNA
agaggcggggccgctggaggtgcactgccc

SEQ ID NO: 70519 - RNA, 24 nt, synthetic construct
  misc_feature 1..24: note = Eukaryotic translation initiation factor 4 gamma 1 (993-1000)
  source 1..24: mol_type = other RNA
agaggcgggccccctggaccaccg

SEQ ID NO: 70520 - RNA, 33 nt, synthetic construct
  misc_feature 1..33: note = Plexin-B3 (190-200)
  source 1..33: mol_type = other RNA
agaggcctggccgggaagctcagcgctggagtg

SEQ ID NO: 70521 - RNA, 42 nt, synthetic construct
  misc_feature 1..42: note = Collagen alpha-1(III) chain (761-774)
  source 1..42: mol_type = other RNA
agaggccccaccgggcctatcggaccaccgggtcccgccggc

SEQ ID NO: 70522 - RNA, 27 nt, synthetic construct
  misc_feature 1..27: note = Heat shock protein HSP 90-beta (103-111)
  source 1..27: mol_type = other RNA
agaggcaccaaggtgatcctgcacctc

SEQ ID NO: 70523 - RNA, 27 nt, synthetic construct
  misc_feature 1..27: note = UDP-N-acetylhexosamine pyrophosphorylase-like protein 1 (111-119)
  source 1..27: mol_type = other RNA
agaggcgtggagttcgtccacgtttac

SEQ ID NO: 70524 - RNA, 18 nt, synthetic construct
  misc_feature 1..18: note = Msx2-interacting protein (535-540)
  source 1..18: mol_type = other RNA
agacacttctgcaggtac

SEQ ID NO: 70525 - RNA, 30 nt, synthetic construct
  misc_feature 1..30: note = Krueppel-like factor 15 (280-289)
  source 1..30: mol_type = other RNA
agaatcgcccccgtgcctattgctgcaaag

SEQ ID NO: 70526 - RNA, 30 nt, synthetic construct
  misc_feature 1..30: note = Phosphoglycerate kinase 1 (39-48)
  source 1..30: mol_type = other RNA
agaatcaaggccgctgtgcccagcattaaa

SEQ ID NO: 70527 - RNA, 24 nt, synthetic construct
  misc_feature 1..24: note = General transcription factor II-I (492-499)
  source 1..24: mol_type = other RNA
agaatcaagttcgtgattaaaagg

SEQ ID NO: 70528 - RNA, 33 nt, synthetic construct
  misc_feature 1..33: note = Alpha-globin transcription factor CP2 (148-158)
  source 1..33: mol_type = other RNA
agaatcctggacattgatatacccatgagcgtg

SEQ ID NO: 70529 - RNA, 27 nt, synthetic construct
  misc_feature 1..27: note = Asparagine synthetase (glutamine-hydrolyzing) (153-161)
  source 1..27: mol_type = other RNA
agaatcctgttcaacaatgccgtgaag

SEQ ID NO: 70530 - RNA, 27 nt, synthetic construct
  misc_feature 1..27: note = Nuclear factor of activated T-cells, cytoplasmic 2 (247-255)
  source 1..27: mol_type = other RNA
agaatcctgaagccccacgccttctac

SEQ ID NO: 70531 - RNA, 30 nt, synthetic construct
  misc_feature 1..30: note = cAMP-dependent protein kinase type I-beta regulatory subunit (233-242)
  source 1..30: mol_type = other RNA
agaatcctgatgggcagcaccctcaggaag

SEQ ID NO: 70532 - RNA, 33 nt, synthetic construct
  misc_feature 1..33: note = CCR4-NOT transcription complex subunit 1 (238-248)
  source 1..33: mol_type = other RNA
agaatcctgcccgacagcggcggggtggccaag

SEQ ID NO: 70533 - RNA, 27 nt, synthetic construct
  misc_feature 1..27: note = Centrin-2 (164-172)
  source 1..27: mol_type = other RNA
agaatcatgaagaaaaccagcctgtac

SEQ ID NO: 70534 - RNA, 30 nt, synthetic construct
  misc_feature 1..30: note = Transcription factor HES-1 (49-58)
  source 1..30: mol_type = other RNA
agaatcaacgagagcctgtcccagctcaag

SEQ ID NO: 70535 - RNA, 27 nt, synthetic construct
  misc_feature 1..27: note = Vigilin (291-299)
  source 1..27: mol_type = other RNA
agaatcaacattccccctccaagcgtg

SEQ ID NO: 70536 - RNA, 27 nt, synthetic construct
  misc_feature 1..27: note = Pumilio homolog 1 (920-928)
  source 1..27: mol_type = other RNA
agaatcaggggccacgtgctgagcctc

SEQ ID NO: 70537 - RNA, 27 nt, synthetic construct
  misc_feature 1..27: note = Proteasome subunit beta type-5 (76-84)
  source 1..27: mol_type = other RNA
agaatcagcggcgccaccttctccgtg

SEQ ID NO: 70538 - RNA, 33 nt, synthetic construct
  misc_feature 1..33: note = Cubilin (1911-1921)
  source 1..33: mol_type = other RNA
agaatctacgacggccccagcattcacgccagg

SEQ ID NO: 70539 - RNA, 27 nt, synthetic construct
  misc_feature 1..27: note = Centrosomal protein C10orf90 (654-662)
  source 1..27: mol_type = other RNA
agaatctacgacaacctgcccgaggtg

SEQ ID NO: 70540 - RNA, 39 nt, synthetic construct
  misc_feature 1..39: note = Probable phospholipid-transporting ATPase VB (153-165)
  source 1..39: mol_type = other RNA
agaatctacgagaggaaggaacagacctatgtgcaaaaa

SEQ ID NO: 70541 - RNA, 81 nt, synthetic construct
  misc_feature 1..81: note = HLA class I histocompatibility antigen, A-23 alpha chain (339-365)
  source 1..81: mol_type = other RNA
agaaagggcgggagctactcccaggccgcttcttcagacagtgcacaaggaagcgatgtgtccctgaccgcctgcaaagtc

SEQ ID NO: 70542 - RNA, 81 nt, synthetic construct
  misc_feature 1..81: note = HLA class I histocompatibility antigen, A-1 alpha chain (314-340)
  source 1..81: mol_type = other RNA
agaaagggcgggagctacacccaggccgcttcctctgactcagcacaaggaagtgatgtgagcctgacagcctgcaaagtc

SEQ ID NO: 70543 - RNA, 27 nt, synthetic construct
  misc_feature 1..27: note = Ellis-van Creveld syndrome protein (396-404)
  source 1..27: mol_type = other RNA
agactggccgctatcagccacggcctc

SEQ ID NO: 70544 - RNA, 27 nt, synthetic construct
  misc_feature 1..27: note = Interferon-induced protein with tetratricopeptide repeats 1 (110-118)
  source 1..27: mol_type = other RNA
agactggccgaggctcagacctacctc

SEQ ID NO: 70545 - RNA, 27 nt, synthetic construct
  misc_feature 1..27: note = EMILIN-1 (205-213)
  source 1..27: mol_type = other RNA
agactggccgaggacgtgcagagggct

SEQ ID NO: 70546 - RNA, 27 nt, synthetic construct
  misc_feature 1..27: note = Periodic tryptophan protein 2 homolog (276-284)
  source 1..27: mol_type = other RNA
agactggccaagtacttctttaacaaa

SEQ ID NO: 70547 - RNA, 27 nt, synthetic construct
  misc_feature 1..27: note = Keratin, type I cytoskeletal 24 (150-158)
  source 1..27: mol_type = other RNA
agactggccaactacctcgacaaggtg

SEQ ID NO: 70548 - RNA, 27 nt, synthetic construct
  misc_feature 1..27: note = Histone-lysine N-methyltransferase 2D (2762-2770)
  source 1..27: mol_type = other RNA
agactggcccccagcatggctatggtg

SEQ ID NO: 70549 - RNA, 27 nt, synthetic construct
  misc_feature 1..27: note = Ankyrin-2 (1004-1012)
  source 1..27: mol_type = other RNA
agactggccaccatgccccctatggtg

SEQ ID NO: 70550 - RNA, 30 nt, synthetic construct
  misc_feature 1..30: note = Coatomer subunit gamma-1 (208-217)
  source 1..30: mol_type = other RNA
agactggccgtgaacaagatgatcagcaaa

SEQ ID NO: 70551 - RNA, 27 nt, synthetic construct
  misc_feature 1..27: note = Apolipoprotein E (246-254)
  source 1..27: mol_type = other RNA
agactggacgaggtgaaggaacaggtc

SEQ ID NO: 70552 - RNA, 24 nt, synthetic construct
  misc_feature 1..24: note = Vimentin (217-224)
  source 1..24: mol_type = other RNA
agactggacctcgagaggaaggtg

SEQ ID NO: 70553 - RNA, 30 nt, synthetic construct
  misc_feature 1..30: note = Protein kinase C and casein kinase substrate in neurons protein 2 (468-477)
  source 1..30: mol_type = other RNA
agactggacaacggccaggtggggctctac

SEQ ID NO: 70554 - RNA, 27 nt, synthetic construct
  misc_feature 1..27: note = Sestrin-3 (71-79)
  source 1..27: mol_type = other RNA
agactggacaacatcacccaggtgatg

SEQ ID NO: 70555 - RNA, 27 nt, synthetic construct
  misc_feature 1..27: note = Glutamine and serine-rich protein 1 (616-624)
  source 1..27: mol_type = other RNA
agactggaggaccaggtgatcggcgtc

SEQ ID NO: 70556 - RNA, 27 nt, synthetic construct
  misc_feature 1..27: note = Myosin-10 (1407-1415)
  source 1..27: mol_type = other RNA
agactggaggaaaaggccctcgcttac

SEQ ID NO: 70557 - RNA, 33 nt, synthetic construct
  misc_feature 1..33: note = 40S ribosomal protein S9 (9-19)
  source 1..33: mol_type = other RNA
agactgttcgagggcaacgccctccttaggcgg

SEQ ID NO: 70558 - RNA, 27 nt, synthetic construct
  misc_feature 1..27: note = Spectrin beta chain, erythrocytic (38-46)
  source 1..27: mol_type = other RNA
agactgttcgagaggagccggatcaag

SEQ ID NO: 70559 - RNA, 27 nt, synthetic construct
  misc_feature 1..27: note = Unconventional myosin-XVIIIa (821-829)
  source 1..27: mol_type = other RNA
agactgttccacgagaggacctttgtg

SEQ ID NO: 70560 - RNA, 30 nt, synthetic construct
  misc_feature 1..30: note = Cytochrome P450 4V2 (390-399)
  source 1..30: mol_type = other RNA
agactgttccccagcgtgcctctctttgcc

SEQ ID NO: 70561 - RNA, 27 nt, synthetic construct
  misc_feature 1..27: note = Mitogen-activated protein kinase-binding protein 1 (328-336)
  source 1..27: mol_type = other RNA
agactgttcagcggcgtggccaacgct

SEQ ID NO: 70562 - RNA, 27 nt, synthetic construct
  misc_feature 1..27: note = Cysteine andine-rich protein 2 (87-95)
  source 1..27: mol_type = other RNA
agactgggcatcaagcccgagagcgtg

SEQ ID NO: 70563 - RNA, 24 nt, synthetic construct
  misc_feature 1..24: note = E3 ubiquitin-protein ligase HECTD1 (175-182)
  source 1..24: mol_type = other RNA
agactgggcgtgatcagcaaggtc

SEQ ID NO: 70564 - RNA, 27 nt, synthetic construct
  misc_feature 1..27: note = Protein fantom (56-64)
  source 1..27: mol_type = other RNA
agactgcacgacgagaacatcctcctt

SEQ ID NO: 70565 - RNA, 30 nt, synthetic construct
  misc_feature 1..30: note = General transcription factor 3C polypeptide 1 (377-386)
  source 1..30: mol_type = other RNA
agactgatcgagagcctcttcaccattcag

SEQ ID NO: 70566 - RNA, 27 nt, synthetic construct
  misc_feature 1..27: note = Heterogeneous nuclear ribonucleoprotein U-like protein 1 (490-498)
  source 1..27: mol_type = other RNA
agactgatccagattgccgctaggaag

SEQ ID NO: 70567 - RNA, 27 nt, synthetic construct
  misc_feature 1..27: note = Cytochrome c oxidase subunit 2 (134-142)
  source 1..27: mol_type = other RNA
agactgctcgacgtggataacagggtc

SEQ ID NO: 70568 - RNA, 33 nt, synthetic construct
  misc_feature 1..33: note = Keratin, type I cytoskeletal 18 (324-334)
  source 1..33: mol_type = other RNA
agactgctcgaggacggcgaagatttcaacctt

SEQ ID NO: 70569 - RNA, 30 nt, synthetic construct
  misc_feature 1..30: note = Cytoplasmic FMR1-interacting protein 1 (113-122)
  source 1..30: mol_type = other RNA
agactgctcggctaccaggggatcgccgtg

SEQ ID NO: 70570 - RNA, 30 nt, synthetic construct
  misc_feature 1..30: note = Histone-lysine N-methyltransferase 2D (4468-4477)
  source 1..30: mol_type = other RNA
agactgctcaaccttgacctggatttgtgg

SEQ ID NO: 70571 - RNA, 33 nt, synthetic construct
  misc_feature 1..33: note = Homeobox protein Hox-B9 (220-230)
  source 1..33: mol_type = other RNA
agactgctcaaccttagcgagaggcaggtgaag

SEQ ID NO: 70572 - RNA, 27 nt, synthetic construct
  misc_feature 1..27: note = Apolipoprotein C-II (4-12)
  source 1..27: mol_type = other RNA
agactgctccccgcccttttcctggtg

SEQ ID NO: 70573 - RNA, 30 nt, synthetic construct
  misc_feature 1..30: note = Syndecan-3 (138-147)
  source 1..30: mol_type = other RNA
agactgctcccccttcctctgaccacagtg

SEQ ID NO: 70574 - RNA, 39 nt, synthetic construct
  misc_feature 1..39: note = Long-chain fatty acid transport protein 1 (273-285)
  source 1..39: mol_type = other RNA
agactgctcccccaggtggacaccacaggcactttcaag

SEQ ID NO: 70575 - RNA, 27 nt, synthetic construct
  misc_feature 1..27: note = Muskelin (14-22)
  source 1..27: mol_type = other RNA
agactgctcccctacgcccttcacaag

SEQ ID NO: 70576 - RNA, 27 nt, synthetic construct
  misc_feature 1..27: note = Regulator of G-protein signaling 12 (718-726)
  source 1..27: mol_type = other RNA
agactgctccaggaccccgtgggcgtc

SEQ ID NO: 70577 - RNA, 33 nt, synthetic construct
  misc_feature 1..33: note = G2/mitotic-specific cyclin-B1 (217-227)
  source 1..33: mol_type = other RNA
agactgctccaggagaccatgtacatgacagtg

SEQ ID NO: 70578 - RNA, 33 nt, synthetic construct
  misc_feature 1..33: note = Interleukin-24 (90-100)
  source 1..33: mol_type = other RNA
agactgctccagcaagaggtgcttcagaacgtc

SEQ ID NO: 70579 - RNA, 27 nt, synthetic construct
  misc_feature 1..27: note = Unconventional myosin-Ic (138-146)
  source 1..27: mol_type = other RNA
agactgctccagagcaaccccgtgctt

SEQ ID NO: 70580 - RNA, 30 nt, synthetic construct
  misc_feature 1..30: note = AP-1 complex subunit beta-1 (528-537)
  source 1..30: mol_type = other RNA
agactgctcagcaccgaccccgtggccgct

SEQ ID NO: 70581 - RNA, 27 nt, synthetic construct
  misc_feature 1..27: note = Neurochondrin (561-569)
  source 1..27: mol_type = other RNA
agactgctcagcacctcccccgccctt

SEQ ID NO: 70582 - RNA, 30 nt, synthetic construct
  misc_feature 1..30: note = Bombesin receptor-activated protein C6orf89 (119-128)
  source 1..30: mol_type = other RNA
agactgatgagcctccccatcgccaagaaa

SEQ ID NO: 70583 - RNA, 27 nt, synthetic construct
  misc_feature 1..27: note = Cytochrome c oxidase subunit 2 (178-186)
  source 1..27: mol_type = other RNA
agactgaaccagaccacattcactgcc

SEQ ID NO: 70584 - RNA, 27 nt, synthetic construct
  misc_feature 1..27: note = Lysosome-associated membraneoprotein 2 (273-281)
  source 1..27: mol_type = other RNA
agactgaacagctccaccatcaagtac

SEQ ID NO: 70585 - RNA, 27 nt, synthetic construct
  misc_feature 1..27: note = Lysosomal thioesterase PPT2 (8-16)
  source 1..27: mol_type = other RNA
agactgcccgccgcttgggtgctcctt

SEQ ID NO: 70586 - RNA, 30 nt, synthetic construct
  misc_feature 1..30: note = Protein scribble homolog (257-266)
  source 1..30: mol_type = other RNA
agactgcccgacggcatcgggcagctcaag

SEQ ID NO: 70587 - RNA, 27 nt, synthetic construct
  misc_feature 1..27: note = Neuron navigator 2 (921-929)
  source 1..27: mol_type = other RNA
agactgcccgacggcatggccgtggtc

SEQ ID NO: 70588 - RNA, 30 nt, synthetic construct
  misc_feature 1..30: note = Lysine-specific demethylase 5B (1280-1289)
  source 1..30: mol_type = other RNA
agactgcccgagggcgacgccctcaggtac

SEQ ID NO: 70589 - RNA, 33 nt, synthetic construct
  misc_feature 1..33: note = Transformation/transcription domain-associated protein (696-706)
  source 1..33: mol_type = other RNA
agactgcccgagatgggcagcaacgtggaactc

SEQ ID NO: 70590 - RNA, 27 nt, synthetic construct
  misc_feature 1..27: note = Probable E3 ubiquitin-protein ligase HERC6 (578-586)
  source 1..27: mol_type = other RNA
agactgcccgagaacaccttcaatatc

SEQ ID NO: 70591 - RNA, 27 nt, synthetic construct
  misc_feature 1..27: note = WD repeat-containing protein 90 (1359-1367)
  source 1..27: mol_type = other RNA
agactgcccgagcctgtgcacggcgtc

SEQ ID NO: 70592 - RNA, 33 nt, synthetic construct
  misc_feature 1..33: note = YrdC domain-containing protein, mitochondrial (48-58)
  source 1..33: mol_type = other RNA
agactgcccggcagcggggccgtgcaggctgca

SEQ ID NO: 70593 - RNA, 33 nt, synthetic construct
  misc_feature 1..33: note = Insulin receptor substrate 2 (1043-1053)
  source 1..33: mol_type = other RNA
agactgccccctgccagcgctgtggcaaccgcc

SEQ ID NO: 70594 - RNA, 27 nt, synthetic construct
  misc_feature 1..27: note = Zinc finger BED domain-containing protein 6 (445-453)
  source 1..27: mol_type = other RNA
agactgcccagcgagacctacttcttt

SEQ ID NO: 70595 - RNA, 27 nt, synthetic construct
  misc_feature 1..27: note = DNA-dependent protein kinase catalytic subunit (2530-2538)
  source 1..27: mol_type = other RNA
agactgcccagcaacaccctcgacagg

SEQ ID NO: 70596 - RNA, 27 nt, synthetic construct
  misc_feature 1..27: note = T-cell immunomodulatory protein (6-14)
  source 1..27: mol_type = other RNA
agactgcccagctcctgggccctcttc

SEQ ID NO: 70597 - RNA, 30 nt, synthetic construct
  misc_feature 1..30: note = Peroxisome proliferator-activated receptor gamma coactivator-related protein 1 (1096-1105)
  source 1..30: mol_type = other RNA
agactgcaggcccccgagctcgctaacgtg

SEQ ID NO: 70598 - RNA, 27 nt, synthetic construct
  misc_feature 1..27: note = DNA-dependent protein kinase catalytic subunit (14-22)
  source 1..27: mol_type = other RNA
agactgcaggagaccctcagcgccgct

SEQ ID NO: 70599 - RNA, 27 nt, synthetic construct
  misc_feature 1..27: note = DNA ligase 3 (740-748)
  source 1..27: mol_type = other RNA
agactgcagaacgagctcgacatggtg

SEQ ID NO: 70600 - RNA, 33 nt, synthetic construct
  misc_feature 1..33: note = 2'-5'-oligoadenylate synthase 3 (18-28)
  source 1..33: mol_type = other RNA
agactgcagcccaggaaggagttcgtggaaaaa

SEQ ID NO: 70601 - RNA, 27 nt, synthetic construct
  misc_feature 1..27: note = Plectin (2433-2441)
  source 1..27: mol_type = other RNA
agactgagggaggccatcgctgaactc

SEQ ID NO: 70602 - RNA, 27 nt, synthetic construct
  misc_feature 1..27: note = Tripeptidyl-peptidase 1 (60-68)
  source 1..27: mol_type = other RNA
agactgagcgagctcgtgcaggccgtc

SEQ ID NO: 70603 - RNA, 27 nt, synthetic construct
  misc_feature 1..27: note = Desumoylating isopeptidase 1 (23-31)
  source 1..27: mol_type = other RNA
agactgagccccatcatgctcggcaag

SEQ ID NO: 70604 - RNA, 27 nt, synthetic construct
  misc_feature 1..27: note = GCN1 general control of amino-acid synthesis 1-like 1 (2013-2021)
  source 1..27: mol_type = other RNA
agactgaccagcgccgacgctctcagg

SEQ ID NO: 70605 - RNA, 36 nt, synthetic construct
  misc_feature 1..36: note = Melanoma antigen preferentially expressed in tumors (25-36)
  source 1..36: mol_type = other RNA
agactggtggagctcgccggccagagccttctgaag

SEQ ID NO: 70606 - RNA, 24 nt, synthetic construct
  misc_feature 1..24: note = Lysophosphatidic acid phosphatase type 6 (9-16)
  source 1..24: mol_type = other RNA
agactgtggacccccgtgggcgtc

SEQ ID NO: 70607 - RNA, 33 nt, synthetic construct
  misc_feature 1..33: note = Tubulin-specific chaperone C (217-227)
  source 1..33: mol_type = other RNA
agactgtacggcaaccccaataccctcaggctt

SEQ ID NO: 70608 - RNA, 30 nt, synthetic construct
  misc_feature 1..30: note = Tetratricopeptide repeat protein 30A (82-91)
  source 1..30: mol_type = other RNA
agactgtaccaggcccaagctctctataag

SEQ ID NO: 70609 - RNA, 27 nt, synthetic construct
  misc_feature 1..27: note = Protein asteroid homolog 1 (274-282)
  source 1..27: mol_type = other RNA
agactgtacagcggctccctcgtgcac

SEQ ID NO: 70610 - RNA, 27 nt, synthetic construct
  misc_feature 1..27: note = Filamin-A (2280-2288)
  source 1..27: mol_type = other RNA
agactgtacagcgtgtcctatctcctt

SEQ ID NO: 70611 - RNA, 30 nt, synthetic construct
  misc_feature 1..30: note = Unconventional myosin-X (1476-1485)
  source 1..30: mol_type = other RNA
agactgtacaccaagctccttaacgaggcc

SEQ ID NO: 70612 - RNA, 30 nt, synthetic construct
  misc_feature 1..30: note = Vimentin (13-22)
  source 1..30: mol_type = other RNA
agaatgttcggcgggcccggaaccgccagc

SEQ ID NO: 70613 - RNA, 45 nt, synthetic construct
  misc_feature 1..45: note = Vimentin (13-27)
  source 1..45: mol_type = other RNA
agaatgttcggcgggcccggaaccgccagcaggccttcctcttca

SEQ ID NO: 70614 - RNA, 48 nt, synthetic construct
  misc_feature 1..48: note = Vimentin (13-28)
  source 1..48: mol_type = other RNA
agaatgttcggcgggcccggaaccgccagcaggccttcctcttcacgg

SEQ ID NO: 70615 - RNA, 51 nt, synthetic construct
  misc_feature 1..51: note = Vimentin (13-29)
  source 1..51: mol_type = other RNA
agaatgttcggcgggcccggaaccgccagcaggccttcctcttcacggagt

SEQ ID NO: 70616 - RNA, 30 nt, synthetic construct
  misc_feature 1..30: note = Mitochondrial 2-oxoglutarate/malate carrier protein (240-249)
  source 1..30: mol_type = other RNA
agaatgatcgacggcaagcccgagtacaaa

SEQ ID NO: 70617 - RNA, 42 nt, synthetic construct
  misc_feature 1..42: note = Spermine synthase (79-92)
  source 1..42: mol_type = other RNA
agaatgaaggagctgagccaggactccaccggcagggtgaaa

SEQ ID NO: 70618 - RNA, 27 nt, synthetic construct
  misc_feature 1..27: note = Eukaryotic translation initiation factor 2 subunit 3 (352-360)
  source 1..27: mol_type = other RNA
agaatggtgggccaggtcctgggggcc

SEQ ID NO: 70619 - RNA, 30 nt, synthetic construct
  misc_feature 1..30: note = tRNA (adenine(58)-N(1))-methyltransferase non-catalytic subunit TRM6 (197-206)
  source 1..30: mol_type = other RNA
agaaacgccgacggcctgatcgtggctagc

SEQ ID NO: 70620 - RNA, 27 nt, synthetic construct
  misc_feature 1..27: note = Probable global transcription activator SNF2L1 (166-174)
  source 1..27: mol_type = other RNA
agaaacatccccggccctcacatggtg

SEQ ID NO: 70621 - RNA, 27 nt, synthetic construct
  misc_feature 1..27: note = Melanocyte protein PMEL (241-249)
  source 1..27: mol_type = other RNA
agaaaccagcccctgaccttcgccctc

SEQ ID NO: 70622 - RNA, 96 nt, synthetic construct
  misc_feature 1..96: note = HLA class I histocompatibility antigen, A-23 alpha chain (334-365)
  source 1..96: mol_type = other RNA
agaaacagctccgacaggaagggcgggtcttactcacaggccgctagtagcgattccgcacaaggatctgacgtgtcgctgaccgcctgcaaagtc

SEQ ID NO: 70623 - RNA, 27 nt, synthetic construct
  misc_feature 1..27: note = Heterogeneous nuclear ribonucleoprotein K (37-45)
  source 1..27: mol_type = other RNA
agaaacaccgacgagatggtggaactg

SEQ ID NO: 70624 - RNA, 27 nt, synthetic construct
  misc_feature 1..27: note = V-type proton ATPase subunit D (136-144)
  source 1..27: mol_type = other RNA
agaaactacgccaaggctgtggagctg

SEQ ID NO: 70625 - RNA, 30 nt, synthetic construct
  misc_feature 1..30: note = Fibronectin isoform 6 (1712-1721)
  source 1..30: mol_type = other RNA
agacccgcccagggcgtggtcaccacactg

SEQ ID NO: 70626 - RNA, 27 nt, synthetic construct
  misc_feature 1..27: note = Putative inactive carbonic anhydrase 5B-like protein (84-92)
  source 1..27: mol_type = other RNA
agacccgcccagaagcactgggtgctg

SEQ ID NO: 70627 - RNA, 27 nt, synthetic construct
  misc_feature 1..27: note = Glycosylated lysosomal membrane protein (121-129)
  source 1..27: mol_type = other RNA
agacccgcccagcctccaaggctgctc

SEQ ID NO: 70628 - RNA, 27 nt, synthetic construct
  misc_feature 1..27: note = Chondroitin sulfate synthase 2 (384-392)
  source 1..27: mol_type = other RNA
agacccgccagcaggttcgaggtgctg

SEQ ID NO: 70629 - RNA, 24 nt, synthetic construct
  misc_feature 1..24: note = L-dopachrome tautomerase (266-273)
  source 1..24: mol_type = other RNA
agacccgacgatcctaccctgatc

SEQ ID NO: 70630 - RNA, 27 nt, synthetic construct
  misc_feature 1..27: note = Cancer/testis antigen 2 (82-90)
  source 1..27: mol_type = other RNA
agacccgacagcaggctgctccagctt

SEQ ID NO: 70631 - RNA, 45 nt, synthetic construct
  misc_feature 1..45: note = Titin (9911-9925)
  source 1..45: mol_type = other RNA
agacccggccctccagtggggccgatcaagttcgagagcgtctcc

SEQ ID NO: 70632 - RNA, 63 nt, synthetic construct
  misc_feature 1..63: note = Glia-derived nexin (58-78)
  source 1..63: mol_type = other RNA
agaccccacgacaacatcgtgattagccctcatggcatagcctccgtcctggggatgctccag

SEQ ID NO: 70633 - RNA, 51 nt, synthetic construct
  misc_feature 1..51: note = Collagen alpha-2(I) chain (949-965)
  source 1..51: mol_type = other RNA
agacccaaggactacgaggtggatgccaccctgaaaagcctcaacaatcag

SEQ ID NO: 70634 - RNA, 27 nt, synthetic construct
  misc_feature 1..27: note = 6-phosphofructo-2-kinase/fructose-2,6-bisphosphatase 2 (486-494)
  source 1..27: mol_type = other RNA
agacccctgaagcctctcagcccactt

SEQ ID NO: 70635 - RNA, 30 nt, synthetic construct
  misc_feature 1..30: note = Protein transport protein Sec23A (259-268)
  source 1..30: mol_type = other RNA
agacccctgaggagctccggcgtggccctc

SEQ ID NO: 70636 - RNA, 27 nt, synthetic construct
  misc_feature 1..27: note = VPS10 domain-containing receptor SorCS1 (1153-1161)
  source 1..27: mol_type = other RNA
agacccaacgtgcctcagaccgagctg

SEQ ID NO: 70637 - RNA, 21 nt, synthetic construct
  misc_feature 1..21: note = 40S ribosomal protein S26 (109-115)
  source 1..21: mol_type = other RNA
agaccccctccaaagccgatg

SEQ ID NO: 70638 - RNA, 30 nt, synthetic construct
  misc_feature 1..30: note = Dystonin (1741-1750)
  source 1..30: mol_type = other RNA
agaccccaggagggcgggaggatcaccctg

SEQ ID NO: 70639 - RNA, 24 nt, synthetic construct
  misc_feature 1..24: note = Kelch-like protein 20 (247-254)
  source 1..24: mol_type = other RNA
agaccccagctgcctcaagtgctc

SEQ ID NO: 70640 - RNA, 24 nt, synthetic construct
  misc_feature 1..24: note = Renin receptor (59-66)
  source 1..24: mol_type = other RNA
agacccagggccaccgtgatggtc

SEQ ID NO: 70641 - RNA, 27 nt, synthetic construct
  misc_feature 1..27: note = UPF0524 protein C3orf70 (87-95)
  source 1..27: mol_type = other RNA
agacccagggagcctaccaacacaatc

SEQ ID NO: 70642 - RNA, 27 nt, synthetic construct
  misc_feature 1..27: note = Thiosulfate sulfurtransferase/rhodanese-like domain-containing protein 2 (485-493)
  source 1..27: mol_type = other RNA
agacccaggatccctcgggagctgctc

SEQ ID NO: 70643 - RNA, 27 nt, synthetic construct
  misc_feature 1..27: note = Homocysteine-responsive endoplasmic reticulum-resident ubiquitin-like domain member 1 protein (48-56)
  source 1..27: mol_type = other RNA
agacccaggcctgaggaccagcggctg

SEQ ID NO: 70644 - RNA, 27 nt, synthetic construct
  misc_feature 1..27: note = Transmembraneoprotein NMB (331-339)
  source 1..27: mol_type = other RNA
agacccagcaagcctaccccatccctg

SEQ ID NO: 70645 - RNA, 27 nt, synthetic construct
  misc_feature 1..27: note = Rho GTPase-activating protein 7 (565-573)
  source 1..27: mol_type = other RNA
agacccagcctgaactccgtgtctctc

SEQ ID NO: 70646 - RNA, 27 nt, synthetic construct
  misc_feature 1..27: note = Vimentin (45-53)
  source 1..27: mol_type = other RNA
agacccagcacctccaggtctctgtac

SEQ ID NO: 70647 - RNA, 30 nt, synthetic construct
  misc_feature 1..30: note = Vimentin (45-54)
  source 1..30: mol_type = other RNA
agacccagcacctccaggtctctgtacgcc

SEQ ID NO: 70648 - RNA, 24 nt, synthetic construct
  misc_feature 1..24: note = Kinase D-interacting substrate of 220 kDa (97-104)
  source 1..24: mol_type = other RNA
agacccagcgtgaagacctccctg

SEQ ID NO: 70649 - RNA, 27 nt, synthetic construct
  misc_feature 1..27: note = Integrin beta-5 (445-453)
  source 1..27: mol_type = other RNA
agacccgtgggcttcagggacagcctg

SEQ ID NO: 70650 - RNA, 27 nt, synthetic construct
  misc_feature 1..27: note = Dual specificity protein phosphatase 6 (6-14)
  source 1..27: mol_type = other RNA
agacccgtgcctttcgccagcgagatg

SEQ ID NO: 70651 - RNA, 27 nt, synthetic construct
  misc_feature 1..27: note = L-dopachrome tautomerase (69-77)
  source 1..27: mol_type = other RNA
agaccctggagcggcccttacatcctg

SEQ ID NO: 70652 - RNA, 27 nt, synthetic construct
  misc_feature 1..27: note = Mannosyl-oligosaccharide 1,2-alpha-mannosidase IB (132-140)
  source 1..27: mol_type = other RNA
agacaggccgagaagtactatatcctg

SEQ ID NO: 70653 - RNA, 27 nt, synthetic construct
  misc_feature 1..27: note = V-type proton ATPase subunit H (132-140)
  source 1..27: mol_type = other RNA
agacaggaccccttcaccgtgcacatg

SEQ ID NO: 70654 - RNA, 27 nt, synthetic construct
  misc_feature 1..27: note = Dol-P-Man:Man(5)GlcNAc(2)-PP-Dol alpha-1,3-mannosyltransferase (218-226)
  source 1..27: mol_type = other RNA
agacagttcctgtttcactggaccgtg

SEQ ID NO: 70655 - RNA, 39 nt, synthetic construct
  misc_feature 1..39: note = Cohesin subunit SA-1 (249-261)
  source 1..39: mol_type = other RNA
agacagtacgaggccgaaaggaacaagatgatcggcaaa

SEQ ID NO: 70656 - RNA, 27 nt, synthetic construct
  misc_feature 1..27: note = X-ray repair cross-complementing protein 5 (431-439)
  source 1..27: mol_type = other RNA
agacagtacatgttcagctccctgaag

SEQ ID NO: 70657 - RNA, 21 nt, synthetic construct
  misc_feature 1..21: note = HLA class II histocompatibility antigen, DQ alpha 1 chain (55-61)
  source 1..21: mol_type = other RNA
agaaggttcgacccccagttt

SEQ ID NO: 70658 - RNA, 27 nt, synthetic construct
  misc_feature 1..27: note = HLA class II histocompatibility antigen, DQ alpha 1 chain (55-63)
  source 1..27: mol_type = other RNA
agaaggttcgacccccagtttgccctg

SEQ ID NO: 70659 - RNA, 30 nt, synthetic construct
  misc_feature 1..30: note = HLA class II histocompatibility antigen, DQ alpha 1 chain (55-64)
  source 1..30: mol_type = other RNA
agaaggttcgacccccagtttgccctgacc

SEQ ID NO: 70660 - RNA, 27 nt, synthetic construct
  misc_feature 1..27: note = Inosine-5'-monophosphate dehydrogenase 2 (355-363)
  source 1..27: mol_type = other RNA
agaaggttcggcgtgcccgtcatcgcc

SEQ ID NO: 70661 - RNA, 27 nt, synthetic construct
  misc_feature 1..27: note = Basement membrane-specific heparan sulfate proteoglycan core protein (587-595)
  source 1..27: mol_type = other RNA
agaaggttcctggtgcacgacagcttt

SEQ ID NO: 70662 - RNA, 30 nt, synthetic construct
  misc_feature 1..30: note = C-1-tetrahydrofolate synthase, cytoplasmic (487-496)
  source 1..30: mol_type = other RNA
agaaggttcagcgacatccagattcggcgc

SEQ ID NO: 70663 - RNA, 21 nt, synthetic construct
  misc_feature 1..21: note = PDZ domain-containing protein 2 (308-314)
  source 1..21: mol_type = other RNA
agaaggttcagcaagggcggg

SEQ ID NO: 70664 - RNA, 27 nt, synthetic construct
  misc_feature 1..27: note = Casein kinase I isoform alpha (106-114)
  source 1..27: mol_type = other RNA
agaaggttcaccatgaagacagtgctg

SEQ ID NO: 70665 - RNA, 24 nt, synthetic construct
  misc_feature 1..24: note = Cytochrome c oxidase subunit 7C, mitochondrial (7-14)
  source 1..24: mol_type = other RNA
agaaggttcaccacaagcgtggtc

SEQ ID NO: 70666 - RNA, 24 nt, synthetic construct
  misc_feature 1..24: note = Acyl-CoA desaturase (174-181)
  source 1..24: mol_type = other RNA
agaaggggcttctttttcagccac

SEQ ID NO: 70667 - RNA, 111 nt, synthetic construct
  misc_feature 1..111: note = Growth arrest-specific protein 6 (314-350)
  source 1..111: mol_type = other RNA
agaaggggcccccggccttggcaggacatcctgccatgcgtgccgttcagcgtcgccaagtccgttaaatctctctaccttgggcgcatgttttcaggaacccccgtgatt

SEQ ID NO: 70668 - RNA, 27 nt, synthetic construct
  misc_feature 1..27: note = Homeobox protein Hox-A4 (244-252)
  source 1..27: mol_type = other RNA
agaaggatcgagattgcccacaccctg

SEQ ID NO: 70669 - RNA, 27 nt, synthetic construct
  misc_feature 1..27: note = WD repeat-containing protein 6 (233-241)
  source 1..27: mol_type = other RNA
agaaggatcagcggccacgtggggatt

SEQ ID NO: 70670 - RNA, 27 nt, synthetic construct
  misc_feature 1..27: note = Protein kinase C-binding protein 1 (354-362)
  source 1..27: mol_type = other RNA
agaaggaagttcggcgtgtttaactac

SEQ ID NO: 70671 - RNA, 27 nt, synthetic construct
  misc_feature 1..27: note = Hemicentin-1 (827-835)
  source 1..27: mol_type = other RNA
agaaggctggacaacatgcccatcttc

SEQ ID NO: 70672 - RNA, 30 nt, synthetic construct
  misc_feature 1..30: note = Hemicentin-1 (827-836)
  source 1..30: mol_type = other RNA
agaaggctggacaacatgcccatcttcagc

SEQ ID NO: 70673 - RNA, 33 nt, synthetic construct
  misc_feature 1..33: note = Hemicentin-1 (827-837)
  source 1..33: mol_type = other RNA
agaaggctggacaacatgcccatcttcagccgg

SEQ ID NO: 70674 - RNA, 27 nt, synthetic construct
  misc_feature 1..27: note = Golgi resident protein GCP60 (73-81)
  source 1..27: mol_type = other RNA
agaaggctggagcagcggtggggcttc

SEQ ID NO: 70675 - RNA, 27 nt, synthetic construct
  misc_feature 1..27: note = N-alpha-acetyltransferase 10 (82-90)
  source 1..27: mol_type = other RNA
agaaggctgggcctcgcccagaagctt

SEQ ID NO: 70676 - RNA, 27 nt, synthetic construct
  misc_feature 1..27: note = Caldesmon (347-355)
  source 1..27: mol_type = other RNA
agaaggctgaaggaggaaatcgagcgg

SEQ ID NO: 70677 - RNA, 30 nt, synthetic construct
  misc_feature 1..30: note = Glyoxylate reductase/hydroxypyruvate reductase (170-179)
  source 1..30: mol_type = other RNA
agaaggctgaagcccttcggcgtgcagcgg

SEQ ID NO: 70678 - RNA, 27 nt, synthetic construct
  misc_feature 1..27: note = Ubiquitin-conjugating enzyme E2 variant 3 (9-17)
  source 1..27: mol_type = other RNA
agaaggctgctcggcaagtacaaattc

SEQ ID NO: 70679 - RNA, 30 nt, synthetic construct
  misc_feature 1..30: note = L-dopachrome tautomerase (529-538)
  source 1..30: mol_type = other RNA
agaaggctgcggaagggctacacccccctc

SEQ ID NO: 70680 - RNA, 39 nt, synthetic construct
  misc_feature 1..39: note = Vimentin (12-24)
  source 1..39: mol_type = other RNA
agaaggatgttcggcgggcccggaaccgccagccggcct

SEQ ID NO: 70681 - RNA, 48 nt, synthetic construct
  misc_feature 1..48: note = Vimentin (12-27)
  source 1..48: mol_type = other RNA
agaaggatgttcggcgggcccggaaccgccagccggccttcctcttca

SEQ ID NO: 70682 - RNA, 54 nt, synthetic construct
  misc_feature 1..54: note = Vimentin (12-29)
  source 1..54: mol_type = other RNA
agaaggatgttcggcgggcccggaaccgccagccggccttcctcttcacgcagt

SEQ ID NO: 70683 - RNA, 27 nt, synthetic construct
  misc_feature 1..27: note = G-protein coupled receptor 143 (256-264)
  source 1..27: mol_type = other RNA
agaaggatgggcgccgtgatcaagatt

SEQ ID NO: 70684 - RNA, 27 nt, synthetic construct
  misc_feature 1..27: note = Polymerase I and transcript release factor (148-156)
  source 1..27: mol_type = other RNA
agaaggaacttcaaggtgatgatctac

SEQ ID NO: 70685 - RNA, 99 nt, synthetic construct
  misc_feature 1..99: note = HLA class I histocompatibility antigen, A-23 alpha chain (333-365)
  source 1..99: mol_type = other RNA
agaaggaacagctccgaccggaagggcgggtcttactcacaggccgctagtagcgattccgcacaaggatctgacgtgtcgctgaccgcctgcaaagtc

SEQ ID NO: 70686 - RNA, 30 nt, synthetic construct
  misc_feature 1..30: note = Sodium/potassium-transporting ATPase subunit alpha-3 (943-952)
  source 1..30: mol_type = other RNA
agaaggaacagcgtgttccagcaaggcatg

SEQ ID NO: 70687 - RNA, 27 nt, synthetic construct
  misc_feature 1..27: note = NADH dehydrogenase (ubiquinone) 1 alpha subcomplex subunit 13 (48-56)
  source 1..27: mol_type = other RNA
agaaggcggctgcagatcgaggacttc

SEQ ID NO: 70688 - RNA, 27 nt, synthetic construct
  misc_feature 1..27: note = Dual specificity protein phosphatase 4 (313-321)
  source 1..27: mol_type = other RNA
agaaggagcatcatttcccccaacttc

SEQ ID NO: 70689 - RNA, 27 nt, synthetic construct
  misc_feature 1..27: note = Hsp90 co-chaperone Cdc37 (166-174)
  source 1..27: mol_type = other RNA
agaaggtgggacgatagccagaagtac

SEQ ID NO: 70690 - RNA, 27 nt, synthetic construct
  misc_feature 1..27: note = Transmembraneoprotein NMB (169-177)
  source 1..27: mol_type = other RNA
agaaggtggaacttcatctacgtgttt

SEQ ID NO: 70691 - RNA, 30 nt, synthetic construct
  misc_feature 1..30: note = Transmembraneoprotein NMB (169-178)
  source 1..30: mol_type = other RNA
agaaggtggaacttcatctacgtgtttcac

SEQ ID NO: 70692 - RNA, 27 nt, synthetic construct
  misc_feature 1..27: note = Eukaryotic translation initiation factor 3 subunit L (537-545)
  source 1..27: mol_type = other RNA
agaaggtacggcgacttctttatccgg

SEQ ID NO: 70693 - RNA, 24 nt, synthetic construct
  misc_feature 1..24: note = Eukaryotic initiation factor 4A-I (168-175)
  source 1..24: mol_type = other RNA
agaaggtacctgagccccaagtat

SEQ ID NO: 70694 - RNA, 27 nt, synthetic construct
  misc_feature 1..27: note = Chondroitin sulfate glucuronyltransferase (416-424)
  source 1..27: mol_type = other RNA
agaaggtaccagccccggctgcgcttc

SEQ ID NO: 70695 - RNA, 36 nt, synthetic construct
  misc_feature 1..36: note = 60S ribosomal protein L6 (59-70)
  source 1..36: mol_type = other RNA
agaagcgccatgtactccaggaaggctatgtataaa

SEQ ID NO: 70696 - RNA, 27 nt, synthetic construct
  misc_feature 1..27: note = Krueppel-like factor 6 (250-258)
  source 1..27: mol_type = other RNA
agaagcgacgagctgaccaggcacttc

SEQ ID NO: 70697 - RNA, 27 nt, synthetic construct
  misc_feature 1..27: note = Synaptotagmin-like protein 2 (665-673)
  source 1..27: mol_type = other RNA
agaagcgacccctacgtgaaggcctat

SEQ ID NO: 70698 - RNA, 24 nt, synthetic construct
  misc_feature 1..24: note = Isoleucine-tRNA ligase, cytoplasmic (402-409)
  source 1..24: mol_type = other RNA
agaagcgacacccccctgatctac

SEQ ID NO: 70699 - RNA, 27 nt, synthetic construct
  misc_feature 1..27: note = ETS homologous factor (209-217)
  source 1..27: mol_type = other RNA
agaagcgagggcgtgttcaggtttctg

SEQ ID NO: 70700 - RNA, 27 nt, synthetic construct
  misc_feature 1..27: note = Phosphatidylinositide phosphatase SAC2 (349-357)
  source 1..27: mol_type = other RNA
agaagcgagaaggaaaccgtggcctac

SEQ ID NO: 70701 - RNA, 60 nt, synthetic construct
  misc_feature 1..60: note = Keratin, type I cytoskeletal 9 (13-32)
  source 1..60: mol_type = other RNA
agaagcggcgggggaggtggcgggggactgggctccggtgggtctatcaggtcaagttac

SEQ ID NO: 70702 - RNA, 30 nt, synthetic construct
  misc_feature 1..30: note = Son of sevenless homolog 2 (593-602)
  source 1..30: mol_type = other RNA
agaagcggcatccccattataaagggggga

SEQ ID NO: 70703 - RNA, 27 nt, synthetic construct
  misc_feature 1..27: note = Manganese-transporting ATPase 13A1 (667-675)
  source 1..27: mol_type = other RNA
agaagcatcgacggctccattgtgctg

SEQ ID NO: 70704 - RNA, 27 nt, synthetic construct
  misc_feature 1..27: note = Basement membrane-specific heparan sulfate proteoglycan core protein (92-100)
  source 1..27: mol_type = other RNA
agaagcatcgagtactccccccagctg

SEQ ID NO: 70705 - RNA, 27 nt, synthetic construct
  misc_feature 1..27: note = Fragile X mental retardation syndrome-related protein 1 (190-198)
  source 1..27: mol_type = other RNA
agaagcatcaggaccaagctgatgctc

SEQ ID NO: 70706 - RNA, 27 nt, synthetic construct
  misc_feature 1..27: note = LIM domain kinase 2 (381-389)
  source 1..27: mol_type = other RNA
agaagcctggaccaccccaacgtgctc

SEQ ID NO: 70707 - RNA, 48 nt, synthetic construct
  misc_feature 1..48: note = rRNA-processing protein UTP23 homolog (234-249)
  source 1..48: mol_type = other RNA
agaagcaaccccaaggtgctgtccgagaaacagaatgccgaaggcgag

SEQ ID NO: 70708 - RNA, 39 nt, synthetic construct
  misc_feature 1..39: note = Histone H2B type 2-F (32-44)
  source 1..39: mol_type = other RNA
agaagcaggaaggagtcctactctgtgtatgtctacaaa

SEQ ID NO: 70709 - RNA, 27 nt, synthetic construct
  misc_feature 1..27: note = Deoxynucleotidyltransferase terminal-interacting protein 2 (272-280)
  source 1..27: mol_type = other RNA
agaagctccgagaacatcctgaccgtg

SEQ ID NO: 70710 - RNA, 24 nt, synthetic construct
  misc_feature 1..24: note = DNA replication licensing factor MCM5 (603-610)
  source 1..24: mol_type = other RNA
agaagctccatccccattaccgtg

SEQ ID NO: 70711 - RNA, 30 nt, synthetic construct
  misc_feature 1..30: note = DBIRD complex subunit ZNF326 (80-89)
  source 1..30: mol_type = other RNA
agaagctccctgggcgggagggacctctac

SEQ ID NO: 70712 - RNA, 27 nt, synthetic construct
  misc_feature 1..27: note = HMG box-containing protein 1 (133-141)
  source 1..27: mol_type = other RNA
agaagctcccccgtgcacatcattgcc

SEQ ID NO: 70713 - RNA, 27 nt, synthetic construct
  misc_feature 1..27: note = Helicase with zinc finger domain 2 (147-155)
  source 1..27: mol_type = other RNA
agaagctcctctgaggtgctggtcctc

SEQ ID NO: 70714 - RNA, 27 nt, synthetic construct
  misc_feature 1..27: note = Cytoplasmic dynein 1 heavy chain 1 (3474-3482)
  source 1..27: mol_type = other RNA
agaagcaccgccctgctcaagtccctt

SEQ ID NO: 70715 - RNA, 27 nt, synthetic construct
  misc_feature 1..27: note = Cyclin-dependent kinase 5 activator 1 (179-187)
  source 1..27: mol_type = other RNA
agaagcgtggacaggtccctgctcctt

SEQ ID NO: 70716 - RNA, 27 nt, synthetic construct
  misc_feature 1..27: note = Annexin A2 (220-228)
  source 1..27: mol_type = other RNA
agaagcgtgccccacctgcagaaggtc

SEQ ID NO: 70717 - RNA, 27 nt, synthetic construct
  misc_feature 1..27: note = Proline and serine-rich protein 2 (7-15)
  source 1..27: mol_type = other RNA
agaagcgtgcccacccctctggtcatg

SEQ ID NO: 70718 - RNA, 27 nt, synthetic construct
  misc_feature 1..27: note = Signal peptidase complex subunit 3 (35-43)
  source 1..27: mol_type = other RNA
agaagcgtgcccgtcaggctgcacgtt

SEQ ID NO: 70719 - RNA, 33 nt, synthetic construct
  misc_feature 1..33: note = Zinc finger protein 770 (328-338)
  source 1..33: mol_type = other RNA
agaagctacaactataagaccatcgtgaaaaag

SEQ ID NO: 70720 - RNA, 39 nt, synthetic construct
  misc_feature 1..39: note = Protein Hook homolog 3 (706-718)
  source 1..39: mol_type = other RNA
agaagctaccccggccacgtgcagcctgccaccgctagg

SEQ ID NO: 70721 - RNA, 27 nt, synthetic construct
  misc_feature 1..27: note = Annexin A1 (228-236)
  source 1..27: mol_type = other RNA
agaagctacccccagctgaggcgggtg

SEQ ID NO: 70722 - RNA, 27 nt, synthetic construct
  misc_feature 1..27: note = Coatomer subunit alpha (1106-1114)
  source 1..27: mol_type = other RNA
agaaccgccctgaacctcttctttaag

SEQ ID NO: 70723 - RNA, 27 nt, synthetic construct
  misc_feature 1..27: note = Neuron navigator 2 (898-906)
  source 1..27: mol_type = other RNA
agaaccgacgatatcacaagcggctac

SEQ ID NO: 70724 - RNA, 27 nt, synthetic construct
  misc_feature 1..27: note = Glycine-tRNA ligase (606-614)
  source 1..27: mol_type = other RNA
agaaccgacgagatcggcgtggccttc

SEQ ID NO: 70725 - RNA, 27 nt, synthetic construct
  misc_feature 1..27: note = Cirhin (46-54)
  source 1..27: mol_type = other RNA
agaaccgacggcacagtggagatctac

SEQ ID NO: 70726 - RNA, 27 nt, synthetic construct
  misc_feature 1..27: note = Origin recognition complex subunit 5 (322-330)
  source 1..27: mol_type = other RNA
agaaccgacaagaggttctttctgaaa

SEQ ID NO: 70727 - RNA, 30 nt, synthetic construct
  misc_feature 1..30: note = 1-phosphatidylinositol 4,5-bisphosphate phosphodiesterase beta-1 (39-48)
  source 1..30: mol_type = other RNA
agaaccgacccccagggcttctttttctac

SEQ ID NO: 70728 - RNA, 27 nt, synthetic construct
  misc_feature 1..27: note = Dedicator of cytokinesis protein 9 (1494-1502)
  source 1..27: mol_type = other RNA
agaaccgaggccagccagctgctctac

SEQ ID NO: 70729 - RNA, 27 nt, synthetic construct
  misc_feature 1..27: note = DDB1- and CUL4-associated factor 16 (191-199)
  source 1..27: mol_type = other RNA
agaaccgagcccatcaacacaacttac

SEQ ID NO: 70730 - RNA, 27 nt, synthetic construct
  misc_feature 1..27: note = Rho guanine nucleotide exchange factor 2 (679-687)
  source 1..27: mol_type = other RNA
agaaccttcaacggcagcatcgagctg

SEQ ID NO: 70731 - RNA, 33 nt, synthetic construct
  misc_feature 1..33: note = Insulin receptor substrate 2 (718-728)
  source 1..33: mol_type = other RNA
agaaccttccccgccagcggcgggggatacaag

SEQ ID NO: 70732 - RNA, 24 nt, synthetic construct
  misc_feature 1..24: note = Vigilin (146-153)
  source 1..24: mol_type = other RNA
agaaccggcgcccacctggagctc

SEQ ID NO: 70733 - RNA, 24 nt, synthetic construct
  misc_feature 1..24: note = E3 ubiquitin-protein ligase HERC2 (17-24)
  source 1..24: mol_type = other RNA
agaaccggcagccccctgtccctc

SEQ ID NO: 70734 - RNA, 39 nt, synthetic construct
  misc_feature 1..39: note = Prelamin-A/C (16-28)
  source 1..39: mol_type = other RNA
agaaccggcacactgctcgcccagcaccccgcttggggg

SEQ ID NO: 70735 - RNA, 27 nt, synthetic construct
  misc_feature 1..27: note = TGF-beta receptor type-1 (199-207)
  source 1..27: mol_type = other RNA
agaaccatcgccaggacaattgtgctg

SEQ ID NO: 70736 - RNA, 27 nt, synthetic construct
  misc_feature 1..27: note = Nuclear pore complex protein Nup155 (332-340)
  source 1..27: mol_type = other RNA
agaaccatcgacaggagcgtgttcaag

SEQ ID NO: 70737 - RNA, 27 nt, synthetic construct
  misc_feature 1..27: note = Protein CASP (616-624)
  source 1..27: mol_type = other RNA
agaaccatcggcttcttttacacactg

SEQ ID NO: 70738 - RNA, 27 nt, synthetic construct
  misc_feature 1..27: note = Bifunctional glutamate/proline-tRNA ligase (1278-1286)
  source 1..27: mol_type = other RNA
agaaccatcggcgtgatgacaatggtc

SEQ ID NO: 70739 - RNA, 27 nt, synthetic construct
  misc_feature 1..27: note = Helicase-like transcription factor (616-624)
  source 1..27: mol_type = other RNA
agaaccatccagaggcccgtgacaatg

SEQ ID NO: 70740 - RNA, 27 nt, synthetic construct
  misc_feature 1..27: note = AF4/FMR2 family member 4 (46-54)
  source 1..27: mol_type = other RNA
agaaccatcagccagtcctcttcactg

SEQ ID NO: 70741 - RNA, 27 nt, synthetic construct
  misc_feature 1..27: note = Ankyrin repeat domain-containing protein 17 (1031-1039)
  source 1..27: mol_type = other RNA
agaaccaaggacacacccctgagcctc

SEQ ID NO: 70742 - RNA, 27 nt, synthetic construct
  misc_feature 1..27: note = Inositol 1,4,5-trisphosphate receptor type 3 (1667-1675)
  source 1..27: mol_type = other RNA
agaaccctgcagcaaatgctccttaag

SEQ ID NO: 70743 - RNA, 33 nt, synthetic construct
  misc_feature 1..33: note = Phosphatidylserine synthase 1 (8-18)
  source 1..33: mol_type = other RNA
agaaccctgagcaaggacgatgtgaactacaaa

SEQ ID NO: 70744 - RNA, 84 nt, synthetic construct
  misc_feature 1..84: note = Heat shock cognate 71 kDa protein (272-299)
  source 1..84: mol_type = other RNA
agaaccctgagctcctctacacaggcctcaatcgagattgacagtctctacgaaggcatagatttctatactagcatcacgagg

SEQ ID NO: 70745 - RNA, 27 nt, synthetic construct
  misc_feature 1..27: note = 60S ribosomal protein L18 (55-63)
  source 1..27: mol_type = other RNA
agaaccaacaggccccctctgagcctc

SEQ ID NO: 70746 - RNA, 27 nt, synthetic construct
  misc_feature 1..27: note = 60S ribosomal protein L18 (38-46)
  source 1..27: mol_type = other RNA
agaaccaacagcacattcaatcaggtg

SEQ ID NO: 70747 - RNA, 27 nt, synthetic construct
  misc_feature 1..27: note = HLA class II histocompatibility antigen, DM beta chain (111-119)
  source 1..27: mol_type = other RNA
agaaccaggccccctagcgtgcaggtc

SEQ ID NO: 70748 - RNA, 27 nt, synthetic construct
  misc_feature 1..27: note = Solute carrier family 22 member 6 (423-431)
  source 1..27: mol_type = other RNA
agaaccagcctggccgtgctcggcaag

SEQ ID NO: 70749 - RNA, 27 nt, synthetic construct
  misc_feature 1..27: note = Actin-related protein 3 (290-298)
  source 1..27: mol_type = other RNA
agaaccgtggacgccaggctgaagctc

SEQ ID NO: 70750 - RNA, 27 nt, synthetic construct
  misc_feature 1..27: note Dolichyl-diphosphooligosaccharide-proteinosyltransferase subunit 1 (38-46)
  source 1..27: mol_type = other RNA
agaaccgtggacctgagctcccacctc

SEQ ID NO: 70751 - RNA, 27 nt, synthetic construct
  misc_feature 1..27: note = Host cell factor 1 (1385-1393)
  source 1..27: mol_type = other RNA
agaaccgtggagagcggcctggaagtc

SEQ ID NO: 70752 - RNA, 39 nt, synthetic construct
  misc_feature 1..39: note = Myosin-9 (644-656)
  source 1..39: mol_type = other RNA
agaaccgtgggccagctgtacaaggagcaactcgccaaa

SEQ ID NO: 70753 - RNA, 24 nt, synthetic construct
  misc_feature 1..24: note = Probable C-mannosyltransferase DPY19L4 (518-525)
  source 1..24: mol_type = other RNA
agaaccgtgcaccccatcctgctc

SEQ ID NO: 70754 - RNA, 93 nt, synthetic construct
  misc_feature 1..93: note = Fructose-bisphosphate aldolase A (313-343)
  source 1..93: mol_type = other RNA
agaaccgtgccccctgccgtcacaggcatcactttcctgagcgggggacagtccgaggaagaggcttctattaacctcaatgcaataaacaag

SEQ ID NO: 70755 - RNA, 39 nt, synthetic construct
  misc_feature 1..39: note = Programmed cell death protein 6 (100-112)
  source 1..39: mol_type = other RNA
agaacctacgacagggataacagcggcatgatcgacaag

SEQ ID NO: 70756 - RNA, 27 nt, synthetic construct
  misc_feature 1..27: note = Chondroitin sulfate synthase 2 (347-355)
  source 1..27: mol_type = other RNA
agaacctaccaggagatccaagaactg

SEQ ID NO: 70757 - RNA, 27 nt, synthetic construct
  misc_feature 1..27: note = Vimentin (36-44)
  source 1..27: mol_type = other RNA
agaacctacagcctgggctccgccctc

SEQ ID NO: 70758 - RNA, 27 nt, synthetic construct
  misc_feature 1..27: note = Mucolipin-1 (420-428)
  source 1..27: mol_type = other RNA
agagtggccctgcccagcgtcatgagg

SEQ ID NO: 70759 - RNA, 33 nt, synthetic construct
  misc_feature 1..33: note = Multiple epidermal growth factor-like domains protein 8 (2514-2524)
  source 1..33: mol_type = other RNA
agagtggcccccgacaccggcgtccacacagtt

SEQ ID NO: 70760 - RNA, 27 nt, synthetic construct
  misc_feature 1..27: note = Rab11 family-interacting protein 5 (210-218)
  source 1..27: mol_type = other RNA
agagtggccccccctagggctctgctc

SEQ ID NO: 70761 - RNA, 39 nt, synthetic construct
  misc_feature 1..39: note = FUN14 domain-containing protein 1 (35-47)
  source 1..39: mol_type = other RNA
agagtgttcggccacagctccgggcccatggtcgagaag

SEQ ID NO: 70762 - RNA, 36 nt, synthetic construct
  misc_feature 1..36: note = Putative ATP-dependent RNA helicase DHX33 (247-258)
  source 1..36: mol_type = other RNA
agagtgttccagggcgcccccaaggggtacaggaaa

SEQ ID NO: 70763 - RNA, 33 nt, synthetic construct
  misc_feature 1..33: note = Annexin A1 (235-245)
  source 1..33: mol_type = other RNA
agagtgttccagaagtacaccaaatatagcaag

SEQ ID NO: 70764 - RNA, 27 nt, synthetic construct
  misc_feature 1..27: note = Centrosomal protein C10orf90 (146-154)
  source 1..27: mol_type = other RNA
agagtgggcccccctgccagggctctg

SEQ ID NO: 70765 - RNA, 27 nt, synthetic construct
  misc_feature 1..27: note = E3 ubiquitin-protein ligase MIB2 (385-393)
  source 1..27: mol_type = other RNA
agagtgatcggcgacctggataccgtc

SEQ ID NO: 70766 - RNA, 39 nt, synthetic construct
  misc_feature 1..39: note = Protein FAM177A1 (56-68)
  source 1..39: mol_type = other RNA
agagtgatccacttcgtcagcggcgagaccatggaagag

SEQ ID NO: 70767 - RNA, 39 nt, synthetic construct
  misc_feature 1..39: note = Glyceraldehyde-3-phosphate dehydrogenase (118-130)
  source 1..39: mol_type = other RNA
agagtgatcattagcgccccctccgctgacgcacctatg

SEQ ID NO: 70768 - RNA, 30 nt, synthetic construct
  misc_feature 1..30: note = Nuclear valosin-containing protein-like (16-25)
  source 1..30: mol_type = other RNA
agagtgatccagtacctgaccagcaacaag

SEQ ID NO: 70769 - RNA, 30 nt, synthetic construct
  misc_feature 1..30: note = Translation initiation factor eIF-2B subunit alpha (136-145)
  source 1..30: mol_type = other RNA
agagtgctggaggccgctgtcgcagccaag

SEQ ID NO: 70770 - RNA, 30 nt, synthetic construct
  misc_feature 1..30: note = Ribosomal RNA-processing protein 8 (380-389)
  source 1..30: mol_type = other RNA
agagtgctgaagcccggcgggctccttaaa

SEQ ID NO: 70771 - RNA, 27 nt, synthetic construct
  misc_feature 1..27: note = Nidogen-2 (738-746)
  source 1..27: mol_type = other RNA
agagtgctgaggttcgccgtcaccaac

SEQ ID NO: 70772 - RNA, 27 nt, synthetic construct
  misc_feature 1..27: note = HLA class I histocompatibility antigen, Cw-3 alpha chain (2-10)
  source 1..27: mol_type = other RNA
agagtgatggcccccaggaccctgatc

SEQ ID NO: 70773 - RNA, 27 nt, synthetic construct
  misc_feature 1..27: note = HLA class I histocompatibility antigen, Cw-2 alpha chain (2-10)
  source 1..27: mol_type = other RNA
agagtgatggcccccaggaccctgctc

SEQ ID NO: 70774 - RNA, 27 nt, synthetic construct
  misc_feature 1..27: note = Carbohydrate sulfotransferase 14 (126-134)
  source 1..27: mol_type = other RNA
agagtgatgaaggtcctggccggcgtt

SEQ ID NO: 70775 - RNA, 27 nt, synthetic construct
  misc_feature 1..27: note = Polycomb group RING finger protein 1 (90-98)
  source 1..27: mol_type = other RNA
agagtgatgcaggacatcgtctacaag

SEQ ID NO: 70776 - RNA, 33 nt, synthetic construct
  misc_feature 1..33: note = Spectrin alpha chain, non-erythrocytic 1 (204-214)
  source 1..33: mol_type = other RNA
agagtgaacgaggtcaatcagttcgccgctaag

SEQ ID NO: 70777 - RNA, 57 nt, synthetic construct
  misc_feature 1..57: note = Beta-2-microglobulin (80-98)
  source 1..57: mol_type = other RNA
agagtgaaccacgtcaccctgagccagcccaagatcgttaaatgggacagggatatg

SEQ ID NO: 70778 - RNA, 27 nt, synthetic construct
  misc_feature 1..27: note = Ribonuclease inhibitor (53-61)
  source 1..27: mol_type = other RNA
agagtgaaccccgccctggctgagctc

SEQ ID NO: 70779 - RNA, 27 nt, synthetic construct
  misc_feature 1..27: note = Major centromere autoantigen B (26-34)
  source 1..27: mol_type = other RNA
agagtgcagagccacatcctgcatctc

SEQ ID NO: 70780 - RNA, 27 nt, synthetic construct
  misc_feature 1..27: note = Mannose-1-phosphate guanyltransferase alpha (390-398)
  source 1..27: mol_type = other RNA
agagtgaggatccccgccgaggtcctg

SEQ ID NO: 70781 - RNA, 27 nt, synthetic construct
  misc_feature 1..27: note = Probable cation-transporting ATPase 13A2 (897-905)
  source 1..27: mol_type = other RNA
agagtgaggccccctggcgccctgctc

SEQ ID NO: 70782 - RNA, 27 nt, synthetic construct
  misc_feature 1..27: note = Transmembrane protein 121 (244-252)
  source 1..27: mol_type = other RNA
agagtgagcgccatcttcgtcggcaag

SEQ ID NO: 70783 - RNA, 27 nt, synthetic construct
  misc_feature 1..27: note = Protein kinase C and casein kinase substrate in neurons protein 2 (92-100)
  source 1..27: mol_type = other RNA
agagtgagcgagctgcacctcgaagtc

SEQ ID NO: 70784 - RNA, 27 nt, synthetic construct
  misc_feature 1..27: note = Ectonucleoside triphosphate diphosphohydrolase 6 (359-367)
  source 1..27: mol_type = other RNA
agagtgagcgaggtcctgcagaacagg

SEQ ID NO: 70785 - RNA, 27 nt, synthetic construct
  misc_feature 1..27: note = HLA class I histocompatibility antigen, B-15 alpha chain (2-10)
  source 1..27: mol_type = other RNA
agagtgaccgcccccaggacagtcctg

SEQ ID NO: 70786 - RNA, 30 nt, synthetic construct
  misc_feature 1..30: note = F-box/LRR-repeat protein 7 (354-363)
  source 1..30: mol_type = other RNA
agagtgaccgacgtcggcatcaggtacgtt

SEQ ID NO: 70787 - RNA, 33 nt, synthetic construct
  misc_feature 1..33: note = Titin (16492-16502)
  source 1..33: mol_type = other RNA
agagtgaccggcctgatcgagaaccacgactac

SEQ ID NO: 70788 - RNA, 27 nt, synthetic construct
  misc_feature 1..27: note = Phospholipid transfer protein (25-33)
  source 1..27: mol_type = other RNA
agagtgaccagcaaggccctggagctc

SEQ ID NO: 70789 - RNA, 27 nt, synthetic construct
  misc_feature 1..27: note = UPF0769 protein C21orf59 (33-41)
  source 1..27: mol_type = other RNA
agagtgtacaacggcaggctgaaggtc

SEQ ID NO: 70790 - RNA, 54 nt, synthetic construct
  misc_feature 1..54: note = HLA class I histocompatibility antigen, A-2 alpha chain (272-289)
  source 1..54: mol_type = other RNA
agatgggagcccagctcccagcctaccatcccaattgtgggcataatcgccggg

SEQ ID NO: 70791 - RNA, 51 nt, synthetic construct
  misc_feature 1..51: note = HLA class I histocompatibility antigen, Cw-17 alpha chain (297-313)
  source 1..51: mol_type = other RNA
agatggggcgggaagggaggtagctgctcccaggccgcttcttcaaacagt

SEQ ID NO: 70792 - RNA, 27 nt, synthetic construct
  misc_feature 1..27: note = Calpain-3 (104-112)
  source 1..27: mol_type = other RNA
agatacgccgacaagcacatgaacatc

SEQ ID NO: 70793 - RNA, 27 nt, synthetic construct
  misc_feature 1..27: note = Tetratricopeptide repeat protein 30A (26-34)
  source 1..27: mol_type = other RNA
agatacgccgaggctgtgcagctgctc

SEQ ID NO: 70794 - RNA, 24 nt, synthetic construct
  misc_feature 1..24: note = Sodium/potassium-transporting ATPase subunit alpha-1 (276-283)
  source 1..24: mol_type = other RNA
agatacgccaagatcgtggagatt

SEQ ID NO: 70795 - RNA, 30 nt, synthetic construct
  misc_feature 1..30: note = Sodium/potassium-transporting ATPase subunit alpha-1 (276-285)
  source 1..30: mol_type = other RNA
agatacgccaagatcgtggagattcccttc

SEQ ID NO: 70796 - RNA, 27 nt, synthetic construct
  misc_feature 1..27: note = Zinc finger and BTB domain-containing protein 11 (581-589)
  source 1..27: mol_type = other RNA
agatacgccctgatcatgcacaagctc

SEQ ID NO: 70797 - RNA, 30 nt, synthetic construct
  misc_feature 1..30: note = Bestrophin-1 (70-79)
  source 1..30: mol_type = other RNA
agatacgccaacctgggcaatgtgctcatc

SEQ ID NO: 70798 - RNA, 27 nt, synthetic construct
  misc_feature 1..27: note = Probable helicase with zinc finger domain (214-222)
  source 1..27: mol_type = other RNA
agatacgccagcaggctgatcaagctc

SEQ ID NO: 70799 - RNA, 27 nt, synthetic construct
  misc_feature 1..27: note = (Pyruvate dehydrogenase (acetyl-transferring))-phosphatase 1, mitochondrial (106-114)
  source 1..27: mol_type = other RNA
agatacgccagcaccccccagaagttc

SEQ ID NO: 70800 - RNA, 27 nt, synthetic construct
  misc_feature 1..27: note = Kelch-like protein 20 (384-392)
  source 1..27: mol_type = other RNA
agatacgaccccaagaccaaccagtgg

SEQ ID NO: 70801 - RNA, 27 nt, synthetic construct
  misc_feature 1..27: note = Kelch-like protein 20 (337-345)
  source 1..27: mol_type = other RNA
agatacgacccccagaccaacgagtgg

SEQ ID NO: 70802 - RNA, 27 nt, synthetic construct
  misc_feature 1..27: note = Protein FAM91A1 (437-445)
  source 1..27: mol_type = other RNA
agatacttcgaccacgccctgaccctc

SEQ ID NO: 70803 - RNA, 27 nt, synthetic construct
  misc_feature 1..27: note = Heterogeneous nuclear ribonucleoprotein H2 (275-283)
  source 1..27: mol_type = other RNA
agatacggcgacgggggaagctccttc

SEQ ID NO: 70804 - RNA, 27 nt, synthetic construct
  misc_feature 1..27: note = Transmembraneoprotein NMB (373-381)
  source 1..27: mol_type = other RNA
agatacggccacttccaggccaccatc

SEQ ID NO: 70805 - RNA, 24 nt, synthetic construct
  misc_feature 1..24: note = Protocadherin gamma-A11 (881-888)
  source 1..24: mol_type = other RNA
agatacggcccccagttcaccctg

SEQ ID NO: 70806 - RNA, 27 nt, synthetic construct
  misc_feature 1..27: note = Melanocyte protein PMEL (486-494)
  source 1..27: mol_type = other RNA
agatacggcagcttctccgtgaccctg

SEQ ID NO: 70807 - RNA, 27 nt, synthetic construct
  misc_feature 1..27: note = FTS and Hook-interacting protein (249-257)
  source 1..27: mol_type = other RNA
agatacatcgccgaccacagctatttc

SEQ ID NO: 70808 - RNA, 27 nt, synthetic construct
  misc_feature 1..27: note = Hemicentin-1 (697-705)
  source 1..27: mol_type = other RNA
agatacatcgaggcccccaagctgatg

SEQ ID NO: 70809 - RNA, 33 nt, synthetic construct
  misc_feature 1..33: note = Leucine-rich repeat LGI family member 3 (441-451)
  source 1..33: mol_type = other RNA
agatacatcggcgacagcaagattctgaggtgg

SEQ ID NO: 70810 - RNA, 27 nt, synthetic construct
  misc_feature 1..27: note = DNA repair protein RAD50 (184-192)
  source 1..27: mol_type = other RNA
agatacatcaaggccctggagaccctc

SEQ ID NO: 70811 - RNA, 30 nt, synthetic construct
  misc_feature 1..30: note = 1,2-dihydroxy-3-keto-5-methylthiopentene dioxygenase (96-105)
  source 1..30: mol_type = other RNA
agatacatcctggacggcagcgggtatttc

SEQ ID NO: 70812 - RNA, 27 nt, synthetic construct
  misc_feature 1..27: note = Serine/threonine-protein phosphatase 4 regulatory subunit 3B (575-583)
  source 1..27: mol_type = other RNA
agatacatcaccaagggcaacctgttc

SEQ ID NO: 70813 - RNA, 27 nt, synthetic construct
  misc_feature 1..27: note = HLA class II histocompatibility antigen, DP beta 1 chain (22-30)
  source 1..27: mol_type = other RNA
agatacatctataacagggaggaattc

SEQ ID NO: 70814 - RNA, 27 nt, synthetic construct
  misc_feature 1..27: note = Unconventional myosin-XVIIIa (834-842)
  source 1..27: mol_type = other RNA
agatacaaggaggaaaacatcgagctg

SEQ ID NO: 70815 - RNA, 27 nt, synthetic construct
  misc_feature 1..27: note = Tubulin polyglutamylase TTLL4 (750-758)
  source 1..27: mol_type = other RNA
agatacctgcacaagccctatctcatc

SEQ ID NO: 70816 - RNA, 27 nt, synthetic construct
  misc_feature 1..27: note = Zinc finger protein 45 (95-103)
  source 1..27: mol_type = other RNA
agatacctgccccacgaggaactcttc

SEQ ID NO: 70817 - RNA, 27 nt, synthetic construct
  misc_feature 1..27: note = Leucine-rich repeat flightless-interacting protein 2 (360-368)
  source 1..27: mol_type = other RNA
agatacatgcagggcctgaaggagctc

SEQ ID NO: 70818 - RNA, 24 nt, synthetic construct
  misc_feature 1..24: note = 60S ribosomal protein L28 (39-46)
  source 1..24: mol_type = other RNA
agatacaacggcctgatccacagg

SEQ ID NO: 70819 - RNA, 27 nt, synthetic construct
  misc_feature 1..27: note = Leucine-rich repeat transmembrane neuronal protein 3 (444-452)
  source 1..27: mol_type = other RNA
agataccccgccagcatgaagcagctg

SEQ ID NO: 70820 - RNA, 27 nt, synthetic construct
  misc_feature 1..27: note = Serine/threonine-protein phosphatase 2A catalytic subunit beta isoform (106-114)
  source 1..27: mol_type = other RNA
agataccccgagaggatcaccattctg

SEQ ID NO: 70821 - RNA, 27 nt, synthetic construct
  misc_feature 1..27: note = SPRY domain-containing protein 3 (41-49)
  source 1..27: mol_type = other RNA
agataccaggagaggttcaagcacatc

SEQ ID NO: 70822 - RNA, 27 nt, synthetic construct
  misc_feature 1..27: note = Cation-independent mannose-6-phosphate receptor (1386-1394)
  source 1..27: mol_type = other RNA
agatacagcgacaactgggaggccatc

SEQ ID NO: 70823 - RNA, 27 nt, synthetic construct
  misc_feature 1..27: note = Phosphatidylcholine translocator ABCB4 (47-55)
  source 1..27: mol_type = other RNA
agatacagcgactggcaggataagctg

SEQ ID NO: 70824 - RNA, 30 nt, synthetic construct
  misc_feature 1..30: note = Phosphatidylinositol 3-kinase catalytic subunit type 3 (811-820)
  source 1..30: mol_type = other RNA
agatacagcaacctgatcctcaatcttttc

SEQ ID NO: 70825 - RNA, 30 nt, synthetic construct
  misc_feature 1..30: note = E3 ubiquitin-protein ligase UBR2 (462-471)
  source 1..30: mol_type = other RNA
agatacaccgccctgcaggctttcaagttt

SEQ ID NO: 70826 - RNA, 27 nt, synthetic construct
  misc_feature 1..27: note = DnaJ homolog subfamily C member 3 (283-291)
  source 1..27: mol_type = other RNA
agatacaccgacgccacaagcaagtat

SEQ ID NO: 70827 - RNA, 36 nt, synthetic construct
  misc_feature 1..36: note = E3 ubiquitin-protein ligase HUWE1 (156-167)
  source 1..36: mol_type = other RNA
agatacaccgacatggagagcgaagattatcacttc

SEQ ID NO: 70828 - RNA, 27 nt, synthetic construct
  misc_feature 1..27: note = Ubiquitin carboxyl-terminal hydrolase 13 (490-498)
  source 1..27: mol_type = other RNA
agatacaccgagagggtggactatctg

SEQ ID NO: 70829 - RNA, 27 nt, synthetic construct
  misc_feature 1..27: note = Cullin-1 (190-198)
  source 1..27: mol_type = other RNA
agatacaccctgcaggccagcacattc

SEQ ID NO: 70830 - RNA, 27 nt, synthetic construct
  misc_feature 1..27: note = Serine/threonine-protein kinase SMG1 (1394-1402)
  source 1..27: mol_type = other RNA
agatacaccatgtatcagaaccaactg

SEQ ID NO: 70831 - RNA, 24 nt, synthetic construct
  misc_feature 1..24: note = Rho guanine nucleotide exchange factor 2 (8-15)
  source 1..24: mol_type = other RNA
agatacaccaacggccacctgttc

SEQ ID NO: 70832 - RNA, 33 nt, synthetic construct
  misc_feature 1..33: note = Rho guanine nucleotide exchange factor 2 (8-18)
  source 1..33: mol_type = other RNA
agatacaccaacggccacctgttcacaactatc

SEQ ID NO: 70833 - RNA, 27 nt, synthetic construct
  misc_feature 1..27: note = Cyclin-dependent kinase 9 (184-192)
  source 1..27: mol_type = other RNA
agatacaccaacagggtggtcacactg

SEQ ID NO: 70834 - RNA, 27 nt, synthetic construct
  misc_feature 1..27: note = Chloride channel protein 2 (25-33)
  source 1..27: mol_type = other RNA
agatacacccaggacctgggcgccttc

SEQ ID NO: 70835 - RNA, 27 nt, synthetic construct
  misc_feature 1..27: note = CDK5 regulatory subunit-associated protein 3 (428-436)
  source 1..27: mol_type = other RNA
agatacgtggacagggtcaccgagttc

SEQ ID NO: 70836 - RNA, 27 nt, synthetic construct
  misc_feature 1..27: note = Protein orai-3 (145-153)
  source 1..27: mol_type = other RNA
agatacgtggagctggcctggggcttc

SEQ ID NO: 70837 - RNA, 27 nt, synthetic construct
  misc_feature 1..27: note = Eukaryotic translation initiation factor 2 subunit 1 (234-242)
  source 1..27: mol_type = other RNA
agatacgtgatgaccacaactacgctg

SEQ ID NO: 70838 - RNA, 39 nt, synthetic construct
  misc_feature 1..39: note = HLA class I histocompatibility antigen, B-51 alpha chain (82-94)
  source 1..39: mol_type = other RNA
agatactataaccagagcgaggccggctcccacacctgg

SEQ ID NO: 70839 - RNA, 27 nt, synthetic construct
  misc_feature 1..27: note = Homeodomain-interacting protein kinase 2 (365-373)
  source 1..27: mol_type = other RNA
agatactatagggcccccgagatcatt

SEQ ID NO: 70840 - RNA, 27 nt, synthetic construct
  misc_feature 1..27: note = Glycogen synthase kinase-3 beta (220-228)
  source 1..27: mol_type = other RNA
agatactatagggcccccgagctgatc

SEQ ID NO: 70841 - RNA, 42 nt, synthetic construct
  misc_feature 1..42: note = Motor neuron and pancreas homeobox protein 1 (169-182)
  source 1..42: mol_type = other RNA
agcgccgctgcagccgcggctgccctggcaggccagcacccc

SEQ ID NO: 70842 - RNA, 33 nt, synthetic construct
  misc_feature 1..33: note = AT-rich interactive domain-containing protein 1B (270-280)
  source 1..33: mol_type = other RNA
agcgccgctgcagccggcgcgcccgggtccatg

SEQ ID NO: 70843 - RNA, 27 nt, synthetic construct
  misc_feature 1..27: note = Beta-2-syntrophin (491-499)
  source 1..27: mol_type = other RNA
agcgccgacgatggcatcagaaacctg

SEQ ID NO: 70844 - RNA, 30 nt, synthetic construct
  misc_feature 1..30: note = Eukaryotic translation initiation factor 3 subunit K (79-88)
  source 1..30: mol_type = other RNA
agcgccgacgagtccggccagatcttcatt

SEQ ID NO: 70845 - RNA, 81 nt, synthetic construct
  misc_feature 1..81: note = Filamin-B (567-593)
  source 1..81: mol_type = other RNA
agcgccgacttcgtggtcgagtccatcggctctgaagttgggtcactgggatttgctattgagggtcccagtcaggcaaag

SEQ ID NO: 70846 - RNA, 24 nt, synthetic construct
  misc_feature 1..24: note = COMM domain-containing protein 4 (177-184)
  source 1..24: mol_type = other RNA
agcgccgacaagttccaggtgctg

SEQ ID NO: 70847 - RNA, 27 nt, synthetic construct
  misc_feature 1..27: note = COMM domain-containing protein 4 (177-185)
  source 1..27: mol_type = other RNA
agcgccgacaagttccaggtgctgctc

SEQ ID NO: 70848 - RNA, 24 nt, synthetic construct
  misc_feature 1..24: note = Transcription factor MafF (16-23)
  source 1..24: mol_type = other RNA
agcgccgaggaagtgaccagactg

SEQ ID NO: 70849 - RNA, 27 nt, synthetic construct
  misc_feature 1..27: note = E3 SUMO-protein ligase RanBP2 (993-1001)
  source 1..27: mol_type = other RNA
agcgccgagtccaagaccatcgaattc

SEQ ID NO: 70850 - RNA, 27 nt, synthetic construct
  misc_feature 1..27: note = Mucin-19 (2343-2351)
  source 1..27: mol_type = other RNA
agcgccgaggtgtccggcagaatcgaa

SEQ ID NO: 70851 - RNA, 51 nt, synthetic construct
  misc_feature 1..51: note = Cytochrome c oxidase subunit 7C, mitochondrial (47-63)
  source 1..51: mol_type = other RNA
agcgccttcgctaccccctttctggtggtcagacaccagctccttaagaca

SEQ ID NO: 70852 - RNA, 27 nt, synthetic construct
  misc_feature 1..27: note = Ankyrin repeat and KH domain-containing protein 1 (2266-2274)
  source 1..27: mol_type = other RNA
agcgccttcctgggcaactccgtgctc

SEQ ID NO: 70853 - RNA, 27 nt, synthetic construct
  misc_feature 1..27: note = AP-5 complex subunit mu-1 (88-96)
  source 1..27: mol_type = other RNA
agcgccttctccggcccctacaagttt

SEQ ID NO: 70854 - RNA, 93 nt, synthetic construct
  misc_feature 1..93: note = PR domain zinc finger protein 8 (458-488)
  source 1..93: mol_type = other RNA
agcgccttcacctccgtgccccagctgggctctgctgggtcaacaagtggaggtggcgggactggagcaggcgccgcgggtggggctggaggc

SEQ ID NO: 70855 - RNA, 21 nt, synthetic construct
  misc_feature 1..21: note = Transmembrane emp24 domain-containing protein 10 (79-85)
  source 1..21: mol_type = other RNA
agcgccggccacatcctgtac

SEQ ID NO: 70856 - RNA, 48 nt, synthetic construct
  misc_feature 1..48: note = Laminin subunit gamma-1 (664-679)
  source 1..48: mol_type = other RNA
agcgccggctacctggacgatgtgaccctcgcttccgcaagacccggg

SEQ ID NO: 70857 - RNA, 51 nt, synthetic construct
  misc_feature 1..51: note = Laminin subunit gamma-1 (664-680)
  source 1..51: mol_type = other RNA
agcgccggctacctggacgatgtgaccctcgcttccgcaagacccgggcct

SEQ ID NO: 70858 - RNA, 54 nt, synthetic construct
  misc_feature 1..54: note = Laminin subunit gamma-1 (664-681)
  source 1..54: mol_type = other RNA
agcgccggctacctggacgatgtgaccctcgcttccgcaagacccgggcctgga

SEQ ID NO: 70859 - RNA, 24 nt, synthetic construct
  misc_feature 1..24: note = Nuclear factor of activated T-cells, cytoplasmic 2 (354-361)
  source 1..24: mol_type = other RNA
agcgcccacgagctgcccatggtg

SEQ ID NO: 70860 - RNA, 27 nt, synthetic construct
  misc_feature 1..27: note = Armadillo repeat-containing protein 1 (96-104)
  source 1..27: mol_type = other RNA
agcgccatcgcttccaccaaggtgatg

SEQ ID NO: 70861 - RNA, 27 nt, synthetic construct
  misc_feature 1..27: note = Tripeptidyl-peptidase 1 (315-323)
  source 1..27: mol_type = other RNA
agcgccctgccccacgtgcataccgtc

SEQ ID NO: 70862 - RNA, 42 nt, synthetic construct
  misc_feature 1..42: note = 3-hydroxy-3-methylglutaryl-coenzyme A reductase (687-700)
  source 1..42: mol_type = other RNA
agcgccatggctggctccatcgggggatacaacgcacacgcc

SEQ ID NO: 70863 - RNA, 27 nt, synthetic construct
  misc_feature 1..27: note = Phosphoglucomutase-1 (263-271)
  source 1..27: mol_type = other RNA
agcgccaacgacaaggtgtacaccgtc

SEQ ID NO: 70864 - RNA, 30 nt, synthetic construct
  misc_feature 1..30: note = WD repeat and FYVE domain-containing protein 3 (1236-1245)
  source 1..30: mol_type = other RNA
agcgccaacccccctgtggtctccaccgtt

SEQ ID NO: 70865 - RNA, 24 nt, synthetic construct
  misc_feature 1..24: note = Serine/threonine-protein phosphatase 2A regulatory subunit B'' subunit gamma (114-121)
  source 1..24: mol_type = other RNA
agcgccccctccgctctgagagtg

SEQ ID NO: 70866 - RNA, 27 nt, synthetic construct
  misc_feature 1..27: note = Microtubule-associated protein 9 (372-380)
  source 1..27: mol_type = other RNA
agcgccagactgatgacctccgagttc

SEQ ID NO: 70867 - RNA, 27 nt, synthetic construct
  misc_feature 1..27: note = Importin-5 (974-982)
  source 1..27: mol_type = other RNA
agcgccgtgggcaagatcatgaaattc

SEQ ID NO: 70868 - RNA, 30 nt, synthetic construct
  misc_feature 1..30: note = Transcription factor SOX-10 (331-340)
  source 1..30: mol_type = other RNA
agcgcctggatctccaagccccctggcgtg

SEQ ID NO: 70869 - RNA, 27 nt, synthetic construct
  misc_feature 1..27: note = Nuclear export mediator factor NEMF (468-476)
  source 1..27: mol_type = other RNA
agcgcctacgctaacgcaaagaaatat

SEQ ID NO: 70870 - RNA, 24 nt, synthetic construct
  misc_feature 1..24: note = Zinc finger MYM-type protein 4 (449-456)
  source 1..24: mol_type = other RNA
agcgcctacagagtgaagatggtc

SEQ ID NO: 70871 - RNA, 27 nt, synthetic construct
  misc_feature 1..27: note = Small subunit processome component 20 homolog (1418-1426)
  source 1..27: mol_type = other RNA
agcgacttcgagtccggcctgaagtac

SEQ ID NO: 70872 - RNA, 21 nt, synthetic construct
  misc_feature 1..21: note = Fas apoptotic inhibitory molecule 1 (47-53)
  source 1..21: mol_type = other RNA
agcgacggcgtgcacaagatc

SEQ ID NO: 70873 - RNA, 21 nt, synthetic construct
  misc_feature 1..21: note = Fructose-bisphosphate aldolase A (272-278)
  source 1..21: mol_type = other RNA
agcgaccaccatatctacctg

SEQ ID NO: 70874 - RNA, 51 nt, synthetic construct
  misc_feature 1..51: note = Galectin-3-binding protein (311-327)
  source 1..51: mol_type = other RNA
agcgacctggccgtgccctccgagctcgctcttctgaaggcagtcgatacc

SEQ ID NO: 70875 - RNA, 87 nt, synthetic construct
  misc_feature 1..87: note = HLA class I histocompatibility antigen, A-23 alpha chain (337-365)
  source 1..87: mol_type = other RNA
agcgacagaaagggcgggtcctactctcaggccgcttcaagtgatagcgcacaaggatccgacgtgtctctgaccgcctgcaaagtc

SEQ ID NO: 70876 - RNA, 48 nt, synthetic construct
  misc_feature 1..48: note = HLA class I histocompatibility antigen, A-23 alpha chain (350-365)
  source 1..48: mol_type = other RNA
agcgactccgcccagggctctgatgtgtcactgaccgcttgcaaggtc

SEQ ID NO: 70877 - RNA, 27 nt, synthetic construct
  misc_feature 1..27: note = Immunoglobulin superfamily member 3 (355-363)
  source 1..27: mol_type = other RNA
agcgactccgtgttcgtcctgaagatc

SEQ ID NO: 70878 - RNA, 30 nt, synthetic construct; identical to SEQ ID NO: 46651
  misc_feature 1..30: note = HLA class I histocompatibility antigen, A-23 alpha chain (356-365)
  source 1..30: mol_type = other RNA

SEQ ID NO: 70879 - RNA, 30 nt, synthetic construct
  misc_feature 1..30: note = Kelch repeat and BTB domain-containing protein 6 (137-146)
  source 1..30: mol_type = other RNA
agcgaggccaacgtggaaagactgtacgct

SEQ ID NO: 70880 - RNA, 27 nt, synthetic construct
  misc_feature 1..27: note = YTH domain-containing family protein 1 (301-309)
  source 1..27: mol_type = other RNA
agcgaggacgatatccacagatccatt

SEQ ID NO: 70881 - RNA, 27 nt, synthetic construct
  misc_feature 1..27: note = RNA-binding protein 28 (126-134)
  source 1..27: mol_type = other RNA
agcgaggacgatctgaagaccgtgttc

SEQ ID NO: 70882 - RNA, 27 nt, synthetic construct
  misc_feature 1..27: note = Sister chromatid cohesion protein PDS5 homolog A (59-67)
  source 1..27: mol_type = other RNA
agcgaggacgaaaagcagcaatacctg

SEQ ID NO: 70883 - RNA, 27 nt, synthetic construct
  misc_feature 1..27: note = Hermansky-Pudlak syndrome 5 protein (476-484)
  source 1..27: mol_type = other RNA
agcgaggacgaaagattcaaggagttt

SEQ ID NO: 70884 - RNA, 27 nt, synthetic construct
  misc_feature 1..27: note = Ras-specific guanine nucleotide-releasing factor RalGPS2 (420-428)
  source 1..27: mol_type = other RNA
agcgaggacctggccgtgcacctctac

SEQ ID NO: 70885 - RNA, 30 nt, synthetic construct
  misc_feature 1..30: note = Peptidyl-prolyl cis-trans isomerase FKBP9 (197-206)
  source 1..30: mol_type = other RNA
agcgaggaccaggtgcaaatccacacctac

SEQ ID NO: 70886 - RNA, 27 nt, synthetic construct
  misc_feature 1..27: note = WD repeat-containing protein 6 (258-266)
  source 1..27: mol_type = other RNA
agcgaggacagatccgtgaggatctgg

SEQ ID NO: 70887 - RNA, 27 nt, synthetic construct
  misc_feature 1..27: note = Thioredoxin-like protein 4A (20-28)
  source 1..27: mol_type = other RNA
agcgaggaagacagagtggtcgttatc

SEQ ID NO: 70888 - RNA, 27 nt, synthetic construct
  misc_feature 1..27: note = Vacuolar protein sorting-associated protein 41 homolog (24-32)
  source 1..27: mol_type = other RNA
agcgaggaagagcccaagctgaaatac

SEQ ID NO: 70889 - RNA, 30 nt, synthetic construct
  misc_feature 1..30: note = Protocadherin Fat 1 (2947-2956)
  source 1..30: mol_type = other RNA
agcgaggaaatcaacagacaggtgacctac

SEQ ID NO: 70890 - RNA, 27 nt, synthetic construct
  misc_feature 1..27: note = Thioredoxin-related transmembrane protein 2 (247-255)
  source 1..27: mol_type = other RNA
agcgaggaaaacgtgatcagagagttc

SEQ ID NO: 70891 - RNA, 21 nt, synthetic construct
  misc_feature 1..21: note = 26S proteasome non-ATPase regulatory subunit 13 (65-71)
  source 1..21: mol_type = other RNA
agcgagttcgaacacagagtg

SEQ ID NO: 70892 - RNA, 27 nt, synthetic construct
  misc_feature 1..27: note = Protein PRR14L (1206-1214)
  source 1..27: mol_type = other RNA
agcgagttcggcaaggaatccaccttt

SEQ ID NO: 70893 - RNA, 30 nt, synthetic construct
  misc_feature 1..30: note = Aldehyde dehydrogenase family 1 member A3 (328-337)
  source 1..30: mol_type = other RNA
agcgagttcgtgagaaggtccgtcgaatac

SEQ ID NO: 70894 - RNA, 27 nt, synthetic construct
  misc_feature 1..27: note = Alpha-parvin (149-157)
  source 1..27: mol_type = other RNA
agcgagatcgcccagaagcaaaaactg

SEQ ID NO: 70895 - RNA, 30 nt, synthetic construct
  misc_feature 1..30: note = Microtubule cross-linking factor 1 (653-662)
  source 1..30: mol_type = other RNA
agcgagatcgaagaccacaacagacagctg

SEQ ID NO: 70896 - RNA, 27 nt, synthetic construct
  misc_feature 1..27: note = Protein AHNAK2 (1652-1660)
  source 1..27: mol_type = other RNA
agcgagatcgaaggcaacgtgaccttc

SEQ ID NO: 70897 - RNA, 30 nt, synthetic construct
  misc_feature 1..30: note = Manganese-transporting ATPase 13A1 (95-104)
  source 1..30: mol_type = other RNA
agcgagatcagagccgctgaaaagaaattc

SEQ ID NO: 70898 - RNA, 27 nt, synthetic construct
  misc_feature 1..27: note = Vesicle transport protein USE1 (81-89)
  source 1..27: mol_type = other RNA
agcgagaaggccctggctaaccagttc

SEQ ID NO: 70899 - RNA, 30 nt, synthetic construct
  misc_feature 1..30: note = Centromere protein F (130-139)
  source 1..30: mol_type = other RNA
agcgagctggacaagctcctttcctctttc

SEQ ID NO: 70900 - RNA, 36 nt, synthetic construct
  misc_feature 1..36: note = Proline-rich protein 12 (622-633)
  source 1..36: mol_type = other RNA
agcgagctgctcgccggccccgggggacctccagct

SEQ ID NO: 70901 - RNA, 30 nt, synthetic construct
  misc_feature 1..30: note = LisH domain-containing protein ARMC9 (9-18)
  source 1..30: mol_type = other RNA
agcgagctgctcggccttgtgaaggaatac

SEQ ID NO: 70902 - RNA, 27 nt, synthetic construct
  misc_feature 1..27: note = T-box transcription factor TBX3 (698-706)
  source 1..27: mol_type = other RNA
agcgagctgcagtccatccaaagactc

SEQ ID NO: 70903 - RNA, 27 nt, synthetic construct
  misc_feature 1..27: note = Sal-like protein 1 (1206-1214)
  source 1..27: mol_type = other RNA
agcgagaacggcaccaatttcagattt

SEQ ID NO: 70904 - RNA, 105 nt, synthetic construct
  misc_feature 1..105: note = Glia-derived nexin (342-376)
  source 1..105: mol_type = other RNA
agcgagaacctgcacgtgtcccatatcctccagaaggccaaaattgaagtctctgaggacggcaccaaggcttcagcagccacaactgcgatacttatcgctaga

SEQ ID NO: 70905 - RNA, 27 nt, synthetic construct
  misc_feature 1..27: note = H/ACA ribonucleoprotein complex subunit 1 (130-138)
  source 1..27: mol_type = other RNA
agcgagaacatgaaggcctcctctttc

SEQ ID NO: 70906 - RNA, 27 nt, synthetic construct
  misc_feature 1..27: note = Plectin (3824-3832)
  source 1..27: mol_type = other RNA
agcgagccctccgaagtgagatcttac

SEQ ID NO: 70907 - RNA, 27 nt, synthetic construct
  misc_feature 1..27: note = Integrin alpha-3 (534-542)
  source 1..27: mol_type = other RNA
agcgagtccgccgtgttccacggcttt

SEQ ID NO: 70908 - RNA, 30 nt, synthetic construct
  misc_feature 1..30: note = Arfaptin-1 (44-53)
  source 1..30: mol_type = other RNA
agcgagacccagatcacatcccacggcttc

SEQ ID NO: 70909 - RNA, 27 nt, synthetic construct
  misc_feature 1..27: note = Laminin subunit gamma-1 (617-625)
  source 1..27: mol_type = other RNA
agcgagaccacagtgaagtacgtcttc

SEQ ID NO: 70910 - RNA, 27 nt, synthetic construct
  misc_feature 1..27: note = Plexin-B2 (30-38)
  source 1..27: mol_type = other RNA
agcgagaccgtggtcgaaagaatgctg

SEQ ID NO: 70911 - RNA, 30 nt, synthetic construct
  misc_feature 1..30: note = U5 small nuclear ribonucleoprotein 200 kDa helicase (1230-1239)
  source 1..30: mol_type = other RNA
agcgaggtgatcctgcaccatgaatacttc

SEQ ID NO: 70912 - RNA, 24 nt, synthetic construct
  misc_feature 1..24: note = Eukaryotic translation initiation factor 3 subunit D (444-451)
  source 1..24: mol_type = other RNA
agcgagtacctgaagctcggctat

SEQ ID NO: 70913 - RNA, 27 nt, synthetic construct
  misc_feature 1..27: note = Homeobox protein Hox-D9 (57-65)
  source 1..27: mol_type = other RNA
agcttcgcccccagatccgctgtgttt

SEQ ID NO: 70914 - RNA, 27 nt, synthetic construct
  misc_feature 1..27: note = Renin receptor (256-264)
  source 1..27: mol_type = other RNA
agcttcgacacctccctgatcagaaag

SEQ ID NO: 70915 - RNA, 24 nt, synthetic construct
  misc_feature 1..24: note = Liprin-beta-1 (507-514)
  source 1..24: mol_type = other RNA
agcttcggcagagggtttttcaag

SEQ ID NO: 70916 - RNA, 27 nt, synthetic construct
  misc_feature 1..27: note = Zinc finger protein 697 (92-100)
  source 1..27: mol_type = other RNA
agcttcatccagtcctctcacctgatt

SEQ ID NO: 70917 - RNA, 30 nt, synthetic construct
  misc_feature 1..30: note = High affinity cationic amino acid transporter 1 (57-66)
  source 1..30: mol_type = other RNA
agcttcctgatcgccgctctcgcatccgtg

SEQ ID NO: 70918 - RNA, 24 nt, synthetic construct
  misc_feature 1..24: note = Immediate early response gene 5 protein (276-283)
  source 1..24: mol_type = other RNA
agcttctccggcctgctcagaaag

SEQ ID NO: 70919 - RNA, 27 nt, synthetic construct
  misc_feature 1..27: note = Zinc finger protein 175 (287-295)
  source 1..27: mol_type = other RNA
agcttcacccagaagtcccacctgttt

SEQ ID NO: 70920 - RNA, 69 nt, synthetic construct
  misc_feature 1..69: note = Eukaryotic peptide chain release factor GTP-binding subunit ERF3A (163-185)
  source 1..69: mol_type = other RNA
agcttcgtgcccaacatgatcggcggggcctcccaggctgacctggcagtcctcgttatttctgccaga

SEQ ID NO: 70921 - RNA, 42 nt, synthetic construct
  misc_feature 1..42: note = Protein HEG homolog 1 (148-161)
  source 1..42: mol_type = other RNA
agcggcgacttccagatgtccccctacgccgagtatcctaag

SEQ ID NO: 70922 - RNA, 51 nt, synthetic construct
  misc_feature 1..51: note = Protein HEG homolog 1 (148-164)
  source 1..51: mol_type = other RNA
agcggcgacttccagatgtccccctacgccgagtatcctaagaacccaaga

SEQ ID NO: 70923 - RNA, 27 nt, synthetic construct
  misc_feature 1..27: note = Trabeculin-alpha (4239-4247)
  source 1..27: mol_type = other RNA
agcggcgaccccaaggtgatcgaggtc

SEQ ID NO: 70924 - RNA, 27 nt, synthetic construct
  misc_feature 1..27: note = Nicastrin (47-55)
  source 1..27: mol_type = other RNA
agcggcgacaccggggtgatccacgtc

SEQ ID NO: 70925 - RNA, 27 nt, synthetic construct
  misc_feature 1..27: note = Bifunctional apoptosis regulator (310-318)
  source 1..27: mol_type = other RNA
agcggcgaggacatcgtgaccaagctg

SEQ ID NO: 70926 - RNA, 66 nt, synthetic construct
  misc_feature 1..66: note = Beta-enolase (330-351)
  source 1..66: mol_type = other RNA
agcggcgagaccgaagacacattcatcgccgatctggtggtcgggctctgcactggacagattaag

SEQ ID NO: 70927 - RNA, 54 nt, synthetic construct
  misc_feature 1..54: note = Putative ATP-dependent RNA helicase DHX57 (36-53)
  source 1..54: mol_type = other RNA
agcggcgggggaggtggcgggggaggcggtgggggaggcggcaacagaaaggcc

SEQ ID NO: 70928 - RNA, 39 nt, synthetic construct
  misc_feature 1..39: note = Signal recognition particle subunit SRP68 (27-39)
  source 1..39: mol_type = other RNA
agcggcgggggaagaggtgccggcggggaggaaaacaag

SEQ ID NO: 70929 - RNA, 27 nt, synthetic construct
  misc_feature 1..27: note = Elongation factor 2 (418-426)
  source 1..27: mol_type = other RNA
agcggcctggtgtccaccgggctcaag

SEQ ID NO: 70930 - RNA, 27 nt, synthetic construct
  misc_feature 1..27: note = ATP-dependent RNA helicase DDX39A (90-98)
  source 1..27: mol_type = other RNA
agcggcatggggaagaccgccgtgttc

SEQ ID NO: 70931 - RNA, 45 nt, synthetic construct
  misc_feature 1..45: note = Collagen alpha-1(III) chain (60-74)
  source 1..45: mol_type = other RNA
agcggccccaagggggacgccggacagcctggtgagaaaggctcc

SEQ ID NO: 70932 - RNA, 48 nt, synthetic construct
  misc_feature 1..48: note = Phosphatidylethanolamine-binding protein 1 (9-24)
  source 1..48: mol_type = other RNA
agcggccccctgtccctccaggaggtggacgaacaacctcagcaccca

SEQ ID NO: 70933 - RNA, 42 nt, synthetic construct
  misc_feature 1..42: note = Laminin subunit alpha-4 (576-589)
  source 1..42: mol_type = other RNA
agccacgacctggtgcaggaggccatcgatcatgctcaagac

SEQ ID NO: 70934 - RNA, 30 nt, synthetic construct
  misc_feature 1..30: note = Protein phosphatase 1J (227-236)
  source 1..30: mol_type = other RNA
agccacgagtccctggtggtcggcgccgtt

SEQ ID NO: 70935 - RNA, 30 nt, synthetic construct; identical to SEQ ID NO: 46708
  misc_feature 1..30: note = Protein unc-93 homolog B1 (264-273)
  source 1..30: mol_type = other RNA

SEQ ID NO: 70936 - RNA, 27 nt, synthetic construct
  misc_feature 1..27: note = Plasma protease C1 inhibitor (350-358)
  source 1..27: mol_type = other RNA
agccacaacctgtccctcgtgatcctt

SEQ ID NO: 70937 - RNA, 21 nt, synthetic construct
  misc_feature 1..21: note = Protein phosphatase 1 regulatory subunit 3F (177-183)
  source 1..21: mol_type = other RNA
agccaccccctgggcatcctc

SEQ ID NO: 70938 - RNA, 54 nt, synthetic construct
  misc_feature 1..54: note = Cytochrome c oxidase subunit 7C, mitochondrial (17-34)
  source 1..54: mol_type = other RNA
agccactacgaggaaggccccgggaagaacctgcctttctccgtggagaataaa

SEQ ID NO: 70939 - RNA, 69 nt, synthetic construct
  misc_feature 1..69: note = Cytochrome c oxidase subunit 7C, mitochondrial (17-39)
  source 1..69: mol_type = other RNA
agccactacgaggaaggccccgggaagaacctgcctttctccgtggagaataaatggtctctccttgcc

SEQ ID NO: 70940 - RNA, 141 nt, synthetic construct
  misc_feature 1..141: note = Cytochrome c oxidase subunit 7C, mitochondrial (17-63)
  source 1..141: mol_type = other RNA
agccactacgaggaaggccccgggaagaacctgcctttctccgtggagaataaatggtctctccttgccaagatgtgcctgtattttggatcagctttcgcaaccccatttttggtcgttagacatcagttactgaaaaca

SEQ ID NO: 70941 - RNA, 27 nt, synthetic construct
  misc_feature 1..27: note = Clustered mitochondria protein homolog (225-233)
  source 1..27: mol_type = other RNA
agcatcgacttcggcaagaccgtggtc

SEQ ID NO: 70942 - RNA, 27 nt, synthetic construct
  misc_feature 1..27: note = Charged multivesicular body protein 5 (30-38)
  source 1..27: mol_type = other RNA
agcatcgacaagaaaatttccagactg

SEQ ID NO: 70943 - RNA, 27 nt, synthetic construct
  misc_feature 1..27: note = Nodal modulator 3 (272-280)
  source 1..27: mol_type = other RNA
agcatcgactccgagcccgccctggtg

SEQ ID NO: 70944 - RNA, 27 nt, synthetic construct
  misc_feature 1..27: note = Eukaryotic translation initiation factor 4 gamma 1 (1038-1046)
  source 1..27: mol_type = other RNA
agcatcgactccaacaatcagctgttc

SEQ ID NO: 70945 - RNA, 30 nt, synthetic construct; identical to SEQ ID NO: 46718
  misc_feature 1..30: note = Vacuolar protein sorting-associated protein 13B (1953-1962)
  source 1..30: mol_type = other RNA

SEQ ID NO: 70946 - RNA, 27 nt, synthetic construct
  misc_feature 1..27: note = Transmembrane channel-like protein 4 (391-399)
  source 1..27: mol_type = other RNA
agcatcttcattgccggcgtgaacttt

SEQ ID NO: 70947 - RNA, 27 nt, synthetic construct
  misc_feature 1..27: note = Nischarin (214-222)
  source 1..27: mol_type = other RNA
agcatcttcaagtccctgcaccaggtg

SEQ ID NO: 70948 - RNA, 27 nt, synthetic construct
  misc_feature 1..27: note = Adenylate kinase 9 (1441-1449)
  source 1..27: mol_type = other RNA
agcatcggcggggccctgagatacgtg

SEQ ID NO: 70949 - RNA, 27 nt, synthetic construct
  misc_feature 1..27: note = Protein ELYS (1701-1709)
  source 1..27: mol_type = other RNA
agcatccacgagaccattcccctggtg

SEQ ID NO: 70950 - RNA, 27 nt, synthetic construct
  misc_feature 1..27: note = Hom s 5 (332-340)
  source 1..27: mol_type = other RNA
agcatcattgccgaggtgaaggctcag

SEQ ID NO: 70951 - RNA, 30 nt, synthetic construct
  misc_feature 1..30: note = Zinc finger E-box-binding homeobox 2 (500-509)
  source 1..30: mol_type = other RNA
agcatcattgactacaccctggagaaggtg

SEQ ID NO: 70952 - RNA, 30 nt, synthetic construct
  misc_feature 1..30: note = Poly(rC)-binding protein 2 (27-36)
  source 1..30: mol_type = other RNA
agcatcattggcaagaaaggggagtccgtg

SEQ ID NO: 70953 - RNA, 165 nt, synthetic construct
  misc_feature 1..165: note = 6.8 kDa mitochondrial proteolipid (4-58)
  source 1..165: mol_type = other RNA
agcatcattaagaacatatggatccccatgaaaccttactataccaaggtgtaccaggagatttggatcggcatggggctgatgggattcattgtctataaaatcagagccgctgacaagaggtccaaagcactcaaggcctctgcgccagctccgggtcaccat

SEQ ID NO: 70954 - RNA, 27 nt, synthetic construct
  misc_feature 1..27: note = Neuron navigator 2 (1370-1378)
  source 1..27: mol_type = other RNA
agcatcattccctacctgctcgaggcc

SEQ ID NO: 70955 - RNA, 27 nt, synthetic construct
  misc_feature 1..27: note = Protein transport protein Sec23B (625-633)
  source 1..27: mol_type = other RNA
agcatcctggccgacagaattctcctt

SEQ ID NO: 70956 - RNA, 27 nt, synthetic construct
  misc_feature 1..27: note = Raftlin-2 (58-66)
  source 1..27: mol_type = other RNA
agcatcctggacattgtgaccaaggtc

SEQ ID NO: 70957 - RNA, 27 nt, synthetic construct
  misc_feature 1..27: note = Tripartite motif-containing protein 2 (120-128)
  source 1..27: mol_type = other RNA
agcatcctggagaccgtgacagccgtc

SEQ ID NO: 70958 - RNA, 27 nt, synthetic construct
  misc_feature 1..27: note = N6-adenosine-methyltransferase 70 kDa subunit (384-392)
  source 1..27: mol_type = other RNA
agcatcctgggcaagttcgccgtggtc

SEQ ID NO: 70959 - RNA, 69 nt, synthetic construct
  misc_feature 1..69: note = Heat shock cognate 71 kDa protein (362-384)
  source 1..69: mol_type = other RNA
agcatcaaccccgacgaggccgtggcttacggcgcagccgtccaggcggctattctgtccggggataag

SEQ ID NO: 70960 - RNA, 27 nt, synthetic construct
  misc_feature 1..27: note = Eukaryotic translation initiation factor 4 gamma 1 (244-252)
  source 1..27: mol_type = other RNA
agcatccccggcgacaccatgacaact

SEQ ID NO: 70961 - RNA, 27 nt, synthetic construct
  misc_feature 1..27: note = Cyclic AMP-dependent transcription factor ATF-6 alpha (178-186)
  source 1..27: mol_type = other RNA
agcatccagcccaagcctctgctcctt

SEQ ID NO: 70962 - RNA, 27 nt, synthetic construct
  misc_feature 1..27: note = E3 ubiquitin-protein ligase UBR5 (550-558)
  source 1..27: mol_type = other RNA
agcatctccgccggcattcccaaggtg

SEQ ID NO: 70963 - RNA, 27 nt, synthetic construct
  misc_feature 1..27: note = Tuberin (341-349)
  source 1..27: mol_type = other RNA
agcatcaccagactgattaagaaatac

SEQ ID NO: 70964 - RNA, 27 nt, synthetic construct
  misc_feature 1..27: note = ATP-dependent DNA helicase Q1 (13-21)
  source 1..27: mol_type = other RNA
agcatcacctccgagctgcacgccgtg

SEQ ID NO: 70965 - RNA, 30 nt, synthetic construct
  misc_feature 1..30: note = Alpha-2-macroglobulin (161-170)
  source 1..30: mol_type = other RNA
agcatctacaagcccggccagaccgtgaaa

SEQ ID NO: 70966 - RNA, 63 nt, synthetic construct
  misc_feature 1..63: note = Heat shock protein HSP 90-beta (408-428)
  source 1..63: mol_type = other RNA
agcatctactatattaccggcgagtccaaggaacaggtggccaactctgctttcgtcgagaga

SEQ ID NO: 70967 - RNA, 27 nt, synthetic construct
  misc_feature 1..27: note = Pre-mRNA-processing-splicing factor 8 (1179-1187)
  source 1..27: mol_type = other RNA
agcaaggacaaccccaatctgctcttc

SEQ ID NO: 70968 - RNA, 24 nt, synthetic construct
  misc_feature 1..24: note = Histone-lysine N-methyltransferase SETDB1 (427-434)
  source 1..24: mol_type = other RNA
agcaagggccccgtggtccagtac

SEQ ID NO: 70969 - RNA, 21 nt, synthetic construct
  misc_feature 1..21: note = Histone deacetylase 1 (88-94)
  source 1..21: mol_type = other RNA
agcaagcagatgcaaagattc

SEQ ID NO: 70970 - RNA, 27 nt, synthetic construct
  misc_feature 1..27: note = AT-rich interactive domain-containing protein 1A (1821-1829)
  source 1..27: mol_type = other RNA
agcctggccgctagagcaatcgccgtg

SEQ ID NO: 70971 - RNA, 39 nt, synthetic construct
  misc_feature 1..39: note = Tenascin (1578-1590)
  source 1..39: mol_type = other RNA
agcctggccgacctctccccctctacccactacacagct

SEQ ID NO: 70972 - RNA, 33 nt, synthetic construct
  misc_feature 1..33: note = Integrin alpha-7 (461-471)
  source 1..33: mol_type = other RNA
agcctggccgacaccgctgtgctcttcagagca

SEQ ID NO: 70973 - RNA, 33 nt, synthetic construct
  misc_feature 1..33: note = Melanocyte protein PMEL (577-587)
  source 1..33: mol_type = other RNA
agcctggccgacaccaactccctcgctgtggtc

SEQ ID NO: 70974 - RNA, 27 nt, synthetic construct
  misc_feature 1..27: note = Sestrin-2 (190-198)
  source 1..27: mol_type = other RNA
agcctggccgagctcatccaggctctt

SEQ ID NO: 70975 - RNA, 27 nt, synthetic construct
  misc_feature 1..27: note = Fatty acid synthase (2500-2508)
  source 1..27: mol_type = other RNA
agcctggccgagcccagagtgtccgtc

SEQ ID NO: 70976 - RNA, 33 nt, synthetic construct
  misc_feature 1..33: note = Ankyrin-2 (84-94)
  source 1..33: mol_type = other RNA
agcctggccggccaggctgaggtggtcaaggtt

SEQ ID NO: 70977 - RNA, 27 nt, synthetic construct
  misc_feature 1..27: note = Putative WAS protein family homolog 3 (9-17)
  source 1..27: mol_type = other RNA
agcctggccggccagacctacgctgtg

SEQ ID NO: 70978 - RNA, 27 nt, synthetic construct
  misc_feature 1..27: note = Transmembrane protein 25 isoform 5 (201-209)
  source 1..27: mol_type = other RNA
agcctggcccacaacctctccgtggtc

SEQ ID NO: 70979 - RNA, 30 nt, synthetic construct
  misc_feature 1..30: note = T-complex protein 1 subunit beta (5-14)
  source 1..30: mol_type = other RNA
agcctggcccccgtgaacatcttcaaggct

SEQ ID NO: 70980 - RNA, 30 nt, synthetic construct
  misc_feature 1..30: note = Hermansky-Pudlak syndrome 4 protein (570-579)
  source 1..30: mol_type = other RNA
agcctggcctccctcaacggccttgaggtg

SEQ ID NO: 70981 - RNA, 27 nt, synthetic construct
  misc_feature 1..27: note = Inversin (13-21)
  source 1..27: mol_type = other RNA
agcctggcctcccaggtgcacgctgca

SEQ ID NO: 70982 - RNA, 30 nt, synthetic construct
  misc_feature 1..30: note = Serine/threonine-protein kinase SMG1 (1090-1099)
  source 1..30: mol_type = other RNA
agcctggcctccgtgatcatttctgctctc

SEQ ID NO: 70983 - RNA, 27 nt, synthetic construct
  misc_feature 1..27: note = Unconventional myosin-Ic (701-709)
  source 1..27: mol_type = other RNA
agcctggccaccaagatccaggctgca

SEQ ID NO: 70984 - RNA, 27 nt, synthetic construct
  misc_feature 1..27: note = Growth factor receptor-bound protein 10 (498-506)
  source 1..27: mol_type = other RNA
agcctggacgatggcaacaccaagttc

SEQ ID NO: 70985 - RNA, 33 nt, synthetic construct
  misc_feature 1..33: note = L-dopachrome tautomerase (288-298)
  source 1..33: mol_type = other RNA
agcctggacgattacaaccacctcgtgaccctt

SEQ ID NO: 70986 - RNA, 30 nt, synthetic construct
  misc_feature 1..30: note = Proline-rich protein 12 (709-718)
  source 1..30: mol_type = other RNA
agcctggacgagggcgccaccgctgcactc

SEQ ID NO: 70987 - RNA, 27 nt, synthetic construct
  misc_feature 1..27: note = Heat shock protein 105 kDa (204-212)
  source 1..27: mol_type = other RNA
agcctggacgagaagcccagaatcgtg

SEQ ID NO: 70988 - RNA, 27 nt, synthetic construct
  misc_feature 1..27: note = Adenomatous polyposis coli protein (1410-1418)
  source 1..27: mol_type = other RNA
agcctggacgagcccttcatccagaag

SEQ ID NO: 70989 - RNA, 30 nt, synthetic construct
  misc_feature 1..30: note = Sister chromatid cohesion protein PDS5 homolog A (493-502)
  source 1..30: mol_type = other RNA
agcctggaccccaacgccgtgaaggctctc

SEQ ID NO: 70990 - RNA, 27 nt, synthetic construct
  misc_feature 1..27: note = Regulator of G-protein signaling 20 (174-182)
  source 1..27: mol_type = other RNA
agcctggactccagagtgagggaggtc

SEQ ID NO: 70991 - RNA, 27 nt, synthetic construct
  misc_feature 1..27: note = Protein AHNAK2 (497-505)
  source 1..27: mol_type = other RNA
agcctggacgtgtccgcccccaaggtc

SEQ ID NO: 70992 - RNA, 33 nt, synthetic construct
  misc_feature 1..33: note = Importin subunit alpha-4 (6-16)
  source 1..33: mol_type = other RNA
agcctggagaaccacagaatcaagtccttcaaa

SEQ ID NO: 70993 - RNA, 27 nt, synthetic construct
  misc_feature 1..27: note = mRNA cap guanine-N7 methyltransferase (14-22)
  source 1..27: mol_type = other RNA
agcctggagcaggccaaggcttccgtg

SEQ ID NO: 70994 - RNA, 30 nt, synthetic construct
  misc_feature 1..30: note = Cytokine receptor common subunit beta (667-676)
  source 1..30: mol_type = other RNA
agcctggagtccggcgggggacccgcccct

SEQ ID NO: 70995 - RNA, 27 nt, synthetic construct
  misc_feature 1..27: note = G-protein coupled receptor 56 (216-224)
  source 1..27: mol_type = other RNA
agcctggagtccaagctcacctctgtg

SEQ ID NO: 70996 - RNA, 36 nt, synthetic construct
  misc_feature 1..36: note = Tetratricopeptide repeat protein 28 (808-819)
  source 1..36: mol_type = other RNA
agcctgttcgacctccagacctcctcttaccaagcc

SEQ ID NO: 70997 - RNA, 30 nt, synthetic construct; identical to SEQ ID NO: 46770
  misc_feature 1..30: note = WD repeat-containing protein 27 (376-385)
  source 1..30: mol_type = other RNA

SEQ ID NO: 70998 - RNA, 21 nt, synthetic construct
  misc_feature 1..21: note = Four and a half LIM domains protein 2 (123-129)
  source 1..21: mol_type = other RNA
agcctgttcggcaagaaatac

SEQ ID NO: 70999 - RNA, 27 nt, synthetic construct
  misc_feature 1..27: note = Four and a half LIM domains protein 2 (123-131)
  source 1..27: mol_type = other RNA
agcctgttcggcaagaaatacatcctc

SEQ ID NO: 71000 - RNA, 27 nt, synthetic construct
  misc_feature 1..27: note = Mannosyl-oligosaccharide 1,2-alpha-mannosidase IA (231-239)
  source 1..27: mol_type = other RNA
agcctgttcggcaacatcaagggggcc

SEQ ID NO: 71001 - RNA, 27 nt, synthetic construct
  misc_feature 1..27: note = Plectin (6-14)
  source 1..27: mol_type = other RNA
agcctgttcccctccctcgtggtcgtt

SEQ ID NO: 71002 - RNA, 39 nt, synthetic construct
  misc_feature 1..39: note = GPI transamidase component PIG-T (490-502)
  source 1..39: mol_type = other RNA
agcctgttccccgtgtccgacggctctaactactttgtc

SEQ ID NO: 71003 - RNA, 27 nt, synthetic construct
  misc_feature 1..27: note = Hsp90 co-chaperone Cdc37 (27-35)
  source 1..27: mol_type = other RNA
agcctgttcagatggaggcaccaggcc

SEQ ID NO: 71004 - RNA, 27 nt, synthetic construct
  misc_feature 1..27: note = Zinc finger MYM-type protein 3 (596-604)
  source 1..27: mol_type = other RNA
agcctgttctccggcaagcccgaggtg

SEQ ID NO: 71005 - RNA, 27 nt, synthetic construct
  misc_feature 1..27: note = Uracil phosphoribosyltransferase homolog (268-276)
  source 1..27: mol_type = other RNA
agcctgttctccaccccccacggcgcc

SEQ ID NO: 71006 - RNA, 30 nt, synthetic construct
  misc_feature 1..30: note = Formin-like protein 2 (880-889)
  source 1..30: mol_type = other RNA
agcctgttctacaacgagctccactatgtg

SEQ ID NO: 71007 - RNA, 27 nt, synthetic construct
  misc_feature 1..27: note = Cation-independent mannose-6-phosphate receptor (2149-2157)
  source 1..27: mol_type = other RNA
agcctgggcgacatctacttcaagctc

SEQ ID NO: 71008 - RNA, 27 nt, synthetic construct
  misc_feature 1..27: note = Dynein heavy chain domain-containing protein 1 (1476-1484)
  source 1..27: mol_type = other RNA
agcctgggcgaggccctcaagcagctt

SEQ ID NO: 71009 - RNA, 27 nt, synthetic construct
  misc_feature 1..27: note = Neuroblast differentiation-associated protein AHNAK (969-977)
  source 1..27: mol_type = other RNA
agcctgggcgaggggcacctctccgtg

SEQ ID NO: 71010 - RNA, 24 nt, synthetic construct
  misc_feature 1..24: note = TBC1 domain family member 4 (1089-1096)
  source 1..24: mol_type = other RNA
agcctgggcttcgtggccagagtc

SEQ ID NO: 71011 - RNA, 30 nt, synthetic construct; identical to SEQ ID NO: 46784
  misc_feature 1..30: note = Caspase-4 (16-25)
  source 1..30: mol_type = other RNA

SEQ ID NO: 71012 - RNA, 24 nt, synthetic construct
  misc_feature 1..24: note = Solute carrier family 26 member 6 (325-332)
  source 1..24: mol_type = other RNA
agcctgggcaagatcttcgccctc

SEQ ID NO: 71013 - RNA, 24 nt, synthetic construct
  misc_feature 1..24: note = Circadian clock protein PASD1 (699-706)
  source 1..24: mol_type = other RNA
agcctgggccccgtggtccaggtt

SEQ ID NO: 71014 - RNA, 24 nt, synthetic construct
  misc_feature 1..24: note = Vesicular glutamate transporter 2 (23-30)
  source 1..24: mol_type = other RNA
agcctgggccagatctacagagtg

SEQ ID NO: 71015 - RNA, 27 nt, synthetic construct
  misc_feature 1..27: note = Cathepsin K (65-73)
  source 1..27: mol_type = other RNA
agcctgggcgtgcacacctacgagctc

SEQ ID NO: 71016 - RNA, 27 nt, synthetic construct
  misc_feature 1..27: note = Vacuolar protein sorting-associated protein 16 homolog (139-147)
  source 1..27: mol_type = other RNA
agcctgcacgacaccgtgacaactctc

SEQ ID NO: 71017 - RNA, 27 nt, synthetic construct
  misc_feature 1..27: note = Probable phospholipid-transporting ATPase IH (690-698)
  source 1..27: mol_type = other RNA
agcctgcacgacgtgctcttcgagctt

SEQ ID NO: 71018 - RNA, 27 nt, synthetic construct
  misc_feature 1..27: note = Sarcoplasmic/endoplasmic reticulum calcium ATPase 1 (817-825)
  source 1..27: mol_type = other RNA
agcctgcacttcctcatcctttacgtg

SEQ ID NO: 71019 - RNA, 27 nt, synthetic construct
  misc_feature 1..27: note = Coatomer subunit alpha (27-35)
  source 1..27: mol_type = other RNA
agcctgcacaacggcgtgatccagctc

SEQ ID NO: 71020 - RNA, 27 nt, synthetic construct
  misc_feature 1..27: note = Forkhead box protein O1 (252-260)
  source 1..27: mol_type = other RNA
agcctgcactccaagttcatcagagtg

SEQ ID NO: 71021 - RNA, 36 nt, synthetic construct
  misc_feature 1..36: note = Serum albumin (89-100)
  source 1..36: mol_type = other RNA
agcctgcacaccctcttcggcgacaagctttgcaca

SEQ ID NO: 71022 - RNA, 27 nt, synthetic construct
  misc_feature 1..27: note = Adenosylhomocysteinase (198-206)
  source 1..27: mol_type = other RNA
agcctgatcgacggcattaagagagcc

SEQ ID NO: 71023 - RNA, 27 nt, synthetic construct
  misc_feature 1..27: note = AP-1 complex subunit beta-1 (665-673)
  source 1..27: mol_type = other RNA
agcctgatcggcgggaccaacttcgtg

SEQ ID NO: 71024 - RNA, 21 nt, synthetic construct
  misc_feature 1..21: note = Myoferlin (1042-1048)
  source 1..21: mol_type = other RNA
agcctgatcggctggaagttc

SEQ ID NO: 71025 - RNA, 27 nt, synthetic construct
  misc_feature 1..27: note = Protein LMBR1L (107-115)
  source 1..27: mol_type = other RNA
agcctgatccacggcctctggaacctt

SEQ ID NO: 71026 - RNA, 27 nt, synthetic construct
  misc_feature 1..27: note = Abelson tyrosine-protein kinase 2 (153-161)
  source 1..27: mol_type = other RNA
agcctgatcaacggctccttcctcgtg

SEQ ID NO: 71027 - RNA, 33 nt, synthetic construct; identical to SEQ ID NO: 46800
  misc_feature 1..33: note = RNA-binding protein 34 (218-228)
  source 1..33: mol_type = other RNA

SEQ ID NO: 71028 - RNA, 27 nt, synthetic construct
  misc_feature 1..27: note = DENN domain-containing protein 5B (1249-1257)
  source 1..27: mol_type = other RNA
agcctgatcagaattctccagaccata

SEQ ID NO: 71029 - RNA, 27 nt, synthetic construct
  misc_feature 1..27: note = Putative bifunctional UDP-N-acetylglucosamine transferase and deubiquitinase ALG13 (66-74)
  source 1..27: mol_type = other RNA
agcctgaaggaggacatccagaaagcc

SEQ ID NO: 71030 - RNA, 27 nt, synthetic construct
  misc_feature 1..27: note = Manganese-transporting ATPase 13A1 (594-602)
  source 1..27: mol_type = other RNA
agcctgaagttcgtgggctttatcgtc

SEQ ID NO: 71031 - RNA, 27 nt, synthetic construct
  misc_feature 1..27: note = Protocadherin gamma-C3 (402-410)
  source 1..27: mol_type = other RNA
agcctgaagaactacttcaccctcaaa

SEQ ID NO: 71032 - RNA, 27 nt, synthetic construct
  misc_feature 1..27: note = AP-3 complex delta subunit (882-890)
  source 1..27: mol_type = other RNA
agcctgctcgccgagaactcctacgtg

SEQ ID NO: 71033 - RNA, 30 nt, synthetic construct; identical to SEQ ID NO: 46806
  misc_feature 1..30: note = Exocyst complex component 1 (476-485)
  source 1..30: mol_type = other RNA

SEQ ID NO: 71034 - RNA, 27 nt, synthetic construct
  misc_feature 1..27: note = Rotatin (1619-1627)
  source 1..27: mol_type = other RNA
agcctgctcgacaaccttctgaccatc

SEQ ID NO: 71035 - RNA, 36 nt, synthetic construct
  misc_feature 1..36: note = Eukaryotic translation initiation factor 3 subunit L (282-293)
  source 1..36: mol_type = other RNA
agcctgctcggcgactactatcaggccatcaaggtg

SEQ ID NO: 71036 - RNA, 27 nt, synthetic construct
  misc_feature 1..27: note = Long-chain-fatty-acid-CoA ligase 3 (439-447)
  source 1..27: mol_type = other RNA
agcctgctcggcgggaacatcagactt

SEQ ID NO: 71037 - RNA, 30 nt, synthetic construct
  misc_feature 1..30: note = Solute carrier family 22 member 18 (168-177)
  source 1..30: mol_type = other RNA
agcctgctcggcgggacccttgtgtccgcc

SEQ ID NO: 71038 - RNA, 27 nt, synthetic construct
  misc_feature 1..27: note = Neurochondrin (337-345)
  source 1..27: mol_type = other RNA
agcctgctcaaggagccccagaaagtg

SEQ ID NO: 71039 - RNA, 24 nt, synthetic construct
  misc_feature 1..24: note = Melanoma-associated antigen 10 (310-317)
  source 1..24: mol_type = other RNA
agcctgctcaagttccttgccaaa

SEQ ID NO: 71040 - RNA, 27 nt, synthetic construct
  misc_feature 1..27: note = Melanoma-associated antigen 10 (310-318)
  source 1..27: mol_type = other RNA
agcctgctcaagttccttgccaaagtg

SEQ ID NO: 71041 - RNA, 27 nt, synthetic construct
  misc_feature 1..27: note = Zinc finger protein 644 (1297-1305)
  source 1..27: mol_type = other RNA
agcctgctcaagaaacccgcctccatc

SEQ ID NO: 71042 - RNA, 27 nt, synthetic construct
  misc_feature 1..27: note = Metallophosphoesterase 1 (21-29)
  source 1..27: mol_type = other RNA
agcctgctccttaagctgatcgccgtg

SEQ ID NO: 71043 - RNA, 27 nt, synthetic construct
  misc_feature 1..27: note = Chromodomain-helicase-DNA-binding protein 4 (1004-1012)
  source 1..27: mol_type = other RNA
agcctgctcaacgtggtcatggacctt

SEQ ID NO: 71044 - RNA, 27 nt, synthetic construct
  misc_feature 1..27: note = Importin-4 (220-228)
  source 1..27: mol_type = other RNA
agcctgctcccctacttccctgccatc

SEQ ID NO: 71045 - RNA, 27 nt, synthetic construct
  misc_feature 1..27: note = G-protein coupled receptor 56 (5-13)
  source 1..27: mol_type = other RNA
agcctgctccagaccacacttttcctg

SEQ ID NO: 71046 - RNA, 27 nt, synthetic construct
  misc_feature 1..27: note = Pericentrin (2516-2524)
  source 1..27: mol_type = other RNA
agcctgctctccgagatccaggccctt

SEQ ID NO: 71047 - RNA, 27 nt, synthetic construct
  misc_feature 1..27: note = Bromodomain adjacent to zinc finger domain protein 2A (217-225)
  source 1..27: mol_type = other RNA
agcctgctctcctcttcagtgcttacc

SEQ ID NO: 71048 - RNA, 27 nt, synthetic construct
  misc_feature 1..27: note = Zinc finger ZZ-type and EF-hand domain-containing protein 1 (401-409)
  source 1..27: mol_type = other RNA
agcctgctcacctcccttgtgacagcc

SEQ ID NO: 71049 - RNA, 36 nt, synthetic construct
  misc_feature 1..36: note = Delphilin (264-275)
  source 1..36: mol_type = other RNA
agcctgctcgtgggcgggcttgccggacccggtggc

SEQ ID NO: 71050 - RNA, 27 nt, synthetic construct
  misc_feature 1..27: note = Band 4.1-like protein 2 (562-570)
  source 1..27: mol_type = other RNA
agcctgatgaaggacttccccggcgcc

SEQ ID NO: 71051 - RNA, 24 nt, synthetic construct
  misc_feature 1..24: note = Oxysterol-binding protein-related protein 5 (301-308)
  source 1..24: mol_type = other RNA
agcctgatgtggaccctccttaag

SEQ ID NO: 71052 - RNA, 27 nt, synthetic construct
  misc_feature 1..27: note = EMILIN-1 (224-232)
  source 1..27: mol_type = other RNA
agcctgaacgagctccagaccacagtg

SEQ ID NO: 71053 - RNA, 27 nt, synthetic construct
  misc_feature 1..27: note = Glutamine and serine-rich protein 1 (920-928)
  source 1..27: mol_type = other RNA
agcctgaacggcaatcaggtgaccgtc

SEQ ID NO: 71054 - RNA, 27 nt, synthetic construct
  misc_feature 1..27: note = Neurofibromin (545-553)
  source 1..27: mol_type = other RNA
agcctgcccaagttctacctccttttt

SEQ ID NO: 71055 - RNA, 30 nt, synthetic construct
  misc_feature 1..30: note = Ras-related protein Rab-38 (113-122)
  source 1..30: mol_type = other RNA
agcctgcccaacggcaagcctgtgtccgtc

SEQ ID NO: 71056 - RNA, 72 nt, synthetic construct
  misc_feature 1..72: note = Talin-1 (1227-1250)
  source 1..72: mol_type = other RNA
agcctgcccccttccaccggcacattccaggaggcccaatctagactcaacgaagctgcagccgggcttaat

SEQ ID NO: 71057 - RNA, 27 nt, synthetic construct
  misc_feature 1..27: note = Disabled homolog 2 (264-272)
  source 1..27: mol_type = other RNA
agcctgcccagacctaccccacaggcc

SEQ ID NO: 71058 - RNA, 30 nt, synthetic construct
  misc_feature 1..30: note = P2X purinoceptor 7 (420-429)
  source 1..30: mol_type = other RNA
agcctgcaggacgtgaagggccaagaggtc

SEQ ID NO: 71059 - RNA, 27 nt, synthetic construct
  misc_feature 1..27: note = Unconventional myosin-Va (987-995)
  source 1..27: mol_type = other RNA
agcctgcaggaggaaatcgccaagctc

SEQ ID NO: 71060 - RNA, 30 nt, synthetic construct
  misc_feature 1..30: note = Hyccin (485-494)
  source 1..30: mol_type = other RNA
agcctgcaggaggaaaagctcatctacgtg

SEQ ID NO: 71061 - RNA, 27 nt, synthetic construct
  misc_feature 1..27: note = A-kinase anchor protein 9 (576-584)
  source 1..27: mol_type = other RNA
agcctgcagaaggacctctcccaagtg

SEQ ID NO: 71062 - RNA, 27 nt, synthetic construct
  misc_feature 1..27: note = Sulfate transporter (477-485)
  source 1..27: mol_type = other RNA
agcctgcagaagtccgtgctcggcgtc

SEQ ID NO: 71063 - RNA, 33 nt, synthetic construct
  misc_feature 1..33: note = Matrix metalloproteinase-14 (60-70)
  source 1..33: mol_type = other RNA
agcctgtccgccgctatcgcagccatgcagaag

SEQ ID NO: 71064 - RNA, 27 nt, synthetic construct
  misc_feature 1..27: note = Ethanolamine kinase 2 (36-44)
  source 1..27: mol_type = other RNA
agcctgtccgccgacgtgcccaaggtc

SEQ ID NO: 71065 - RNA, 27 nt, synthetic construct
  misc_feature 1..27: note = Unconventional myosin-Ic (936-944)
  source 1..27: mol_type = other RNA
agcctgtccgactctctcttcgtgctt

SEQ ID NO: 71066 - RNA, 39 nt, synthetic construct
  misc_feature 1..39: note = Mucin-16 (10281-10293)
  source 1..39: mol_type = other RNA
agcctgtccgaggccatgacctctttcgctacaactggc

SEQ ID NO: 71067 - RNA, 27 nt, synthetic construct
  misc_feature 1..27: note = CD109 antigen (1332-1340)
  source 1..27: mol_type = other RNA
agcctgtccgagaccgtgaagaaagtc

SEQ ID NO: 71068 - RNA, 30 nt, synthetic construct; identical to SEQ ID NO: 46841
  misc_feature 1..30: note = Melanoma antigen preferentially expressed in tumors (355-364)
  source 1..30: mol_type = other RNA

SEQ ID NO: 71069 - RNA, 27 nt, synthetic construct
  misc_feature 1..27: note = WD repeat-containing protein 1 (156-164)
  source 1..27: mol_type = other RNA
agcctgtccggctacatcaactatctc

SEQ ID NO: 71070 - RNA, 27 nt, synthetic construct
  misc_feature 1..27: note = Protein phosphatase 1 regulatory subunit 21 (218-226)
  source 1..27: mol_type = other RNA
agcctgtccatcattaacgagaaggtg

SEQ ID NO: 71071 - RNA, 30 nt, synthetic construct
  misc_feature 1..30: note = DNA dC-dU-editing enzyme APOBEC-3B (446-455)
  source 1..30: mol_type = other RNA
agcctgtcccccggccacctccctgtgcca

SEQ ID NO: 71072 - RNA, 30 nt, synthetic construct
  misc_feature 1..30: note = Alpha-ketoglutarate-dependent dioxygenase alkB homolog 3 (81-90)
  source 1..30: mol_type = other RNA
agcctgtcccccaccggcgtgtctagagtc

SEQ ID NO: 71073 - RNA, 27 nt, synthetic construct
  misc_feature 1..27: note = E3 ubiquitin-protein ligase TRIM56 (586-594)
  source 1..27: mol_type = other RNA
agcctgtcccaggcctctcacgctgtg

SEQ ID NO: 71074 - RNA, 27 nt, synthetic construct
  misc_feature 1..27: note = Coiled-coil domain-containing protein 91 (414-422)
  source 1..27: mol_type = other RNA
agcctgtcctctctcgagcttttcctg

SEQ ID NO: 71075 - RNA, 27 nt, synthetic construct
  misc_feature 1..27: note = Centrosomal protein of 290 kDa (11-19)
  source 1..27: mol_type = other RNA
agcctgtcctctctccttgtgaagctg

SEQ ID NO: 71076 - RNA, 33 nt, synthetic construct
  misc_feature 1..33: note = Transcription factor HIVEP3 (1019-1029)
  source 1..33: mol_type = other RNA
agcctgaccggcccctccgcccctgctccagtg

SEQ ID NO: 71077 - RNA, 27 nt, synthetic construct
  misc_feature 1..27: note = CDK5 regulatory subunit-associated protein 2 (1447-1455)
  source 1..27: mol_type = other RNA
agcctgacctccgagatccacttcctc

SEQ ID NO: 71078 - RNA, 27 nt, synthetic construct
  misc_feature 1..27: note = Epsilon-sarcoglycan (250-258)
  source 1..27: mol_type = other RNA
agcctggtggacaagaccaaacaggtc

SEQ ID NO: 71079 - RNA, 33 nt, synthetic construct
  misc_feature 1..33: note = Transcription factor AP-2-epsilon (290-300)
  source 1..33: mol_type = other RNA
agcctggtggagggcgaagccgtccacctcgct

SEQ ID NO: 71080 - RNA, 27 nt, synthetic construct
  misc_feature 1..27: note = Tumor suppressor candidate 3 (209-217)
  source 1..27: mol_type = other RNA
agcctggtgggcgggctcctttacctg

SEQ ID NO: 71081 - RNA, 27 nt, synthetic construct
  misc_feature 1..27: note = U5 small nuclear ribonucleoprotein 200 kDa helicase (42-50)
  source 1..27: mol_type = other RNA
agcctggtgggcaagctcgaggggacc

SEQ ID NO: 71082 - RNA, 27 nt, synthetic construct
  misc_feature 1..27: note = Niban-like protein 1 (77-85)
  source 1..27: mol_type = other RNA
agcctggtgccccacaactacggcctc

SEQ ID NO: 71083 - RNA, 21 nt, synthetic construct
  misc_feature 1..21: note = DNA mismatch repair protein Msh6 (342-348)
  source 1..21: mol_type = other RNA
agcctggtgcagaagggctac

SEQ ID NO: 71084 - RNA, 27 nt, synthetic construct
  misc_feature 1..27: note = Piezo-type mechanosensitive ion channel component 1 (1709-1717)
  source 1..27: mol_type = other RNA
agcctggtgagatccgtcgttggcgtg

SEQ ID NO: 71085 - RNA, 30 nt, synthetic construct
  misc_feature 1..30: note = Arylsulfatase B (320-329)
  source 1..30: mol_type = other RNA
agcctgtgggagggcggggtgagaggagtc

SEQ ID NO: 71086 - RNA, 33 nt, synthetic construct
  misc_feature 1..33: note = Cohesin subunit SA-1 (487-497)
  source 1..33: mol_type = other RNA
agcctgtgggagtcctctcaggaactccttaag

SEQ ID NO: 71087 - RNA, 27 nt, synthetic construct
  misc_feature 1..27: note = Membrane magnesium transporter 1 (4-12)
  source 1..27: mol_type = other RNA
agcctgtggaagggcctcgtggggatc

SEQ ID NO: 71088 - RNA, 27 nt, synthetic construct
  misc_feature 1..27: note = Rho guanine nucleotide exchange factor 5 (1151-1159)
  source 1..27: mol_type = other RNA
agcctgtggcaggagatccccgtggtc

SEQ ID NO: 71089 - RNA, 27 nt, synthetic construct
  misc_feature 1..27: note = Lysosomal-trafficking regulator (2437-2445)
  source 1..27: mol_type = other RNA
agcctgtacgacaacatcctccttcac

SEQ ID NO: 71090 - RNA, 33 nt, synthetic construct
  misc_feature 1..33: note = Lysosomal-trafficking regulator (2437-2447)
  source 1..33: mol_type = other RNA
agcctgtacgacaacatcctccttcacaatgcc

SEQ ID NO: 71091 - RNA, 27 nt, synthetic construct
  misc_feature 1..27: note = Chloride channel protein 2 (551-559)
  source 1..27: mol_type = other RNA
agcctgtacgactccatcattagaata

SEQ ID NO: 71092 - RNA, 30 nt, synthetic construct; identical to SEQ ID NO: 46865
  misc_feature 1..30: note = WD repeat-containing protein 3 (586-595)
  source 1..30: mol_type = other RNA

SEQ ID NO: 71093 - RNA, 27 nt, synthetic construct
  misc_feature 1..27: note = Protein YIPF4 (129-137)
  source 1..27: mol_type = other RNA
agcctgtacggccagttcagagtggtc

SEQ ID NO: 71094 - RNA, 33 nt, synthetic construct
  misc_feature 1..33: note = Glutaminyl-peptide cyclotransferase (212-222)
  source 1..33: mol_type = other RNA
agcctgtacggctccagacacctcgccgctaag

SEQ ID NO: 71095 - RNA, 30 nt, synthetic construct
  misc_feature 1..30: note = Clathrin heavy chain 1 (1532-1541)
  source 1..30: mol_type = other RNA
agcctgtacaaggacgccatgcagtatgct

SEQ ID NO: 71096 - RNA, 27 nt, synthetic construct
  misc_feature 1..27: note = Laminin subunit alpha-4 (855-863)
  source 1..27: mol_type = other RNA
agcctgtacatgaagccccctgtgaaa

SEQ ID NO: 71097 - RNA, 27 nt, synthetic construct
  misc_feature 1..27: note = Membrane-associated transporter protein (382-390)
  source 1..27: mol_type = other RNA
agcctgtactcctatttccagaaggtg

SEQ ID NO: 71098 - RNA, 27 nt, synthetic construct
  misc_feature 1..27: note = Cytoplasmic dynein 1 heavy chain 1 (3309-3317)
  source 1..27: mol_type = other RNA
agcatggccaacccccctgctgcagtg

SEQ ID NO: 71099 - RNA, 27 nt, synthetic construct
  misc_feature 1..27: note = Charged multivesicular body protein 2a (98-106)
  source 1..27: mol_type = other RNA
agcatggcccaggctatgaagggcgtg

SEQ ID NO: 71100 - RNA, 27 nt, synthetic construct
  misc_feature 1..27: note = Probable ATP-dependent RNA helicase DDX59 (525-533)
  source 1..27: mol_type = other RNA
agcatggacgagtacgtgcaccagctg

SEQ ID NO: 71101 - RNA, 36 nt, synthetic construct
  misc_feature 1..36: note = Zinc finger protein 160 (58-69)
  source 1..36: mol_type = other RNA
agcatgctggaggaaggcaaggagccctggaccgtg

SEQ ID NO: 71102 - RNA, 30 nt, synthetic construct; identical to SEQ ID NO: 46875
  misc_feature 1..30: note = Serine palmitoyltransferase 3 (235-244)
  source 1..30: mol_type = other RNA

SEQ ID NO: 71103 - RNA, 27 nt, synthetic construct
  misc_feature 1..27: note = Neuroblast differentiation-associated protein AHNAK (3672-3680)
  source 1..27: mol_type = other RNA
agcatgcccgacttcgatctgaacctc

SEQ ID NO: 71104 - RNA, 27 nt, synthetic construct
  misc_feature 1..27: note = Eukaryotic translation initiation factor 3 subunit L (303-311)
  source 1..27: mol_type = other RNA
agcatgtactccagagtgcccgagtgc

SEQ ID NO: 71105 - RNA, 36 nt, synthetic construct
  misc_feature 1..36: note = Histone-lysine N-methyltransferase 2C (3371-3382)
  source 1..36: mol_type = other RNA
agcaacgccaatccccagtccggccctccaccgaga

SEQ ID NO: 71106 - RNA, 36 nt, synthetic construct
  misc_feature 1..36: note = ATP-dependent RNA helicase A (233-244)
  source 1..36: mol_type = other RNA
agcaacaagaaactggccgctcagtcctgcgcactc

SEQ ID NO: 71107 - RNA, 24 nt, synthetic construct
  misc_feature 1..24: note = Voltage-dependent L-type calcium channel subunit alpha-1C (157-164)
  source 1..24: mol_type = other RNA
agcaacctggagagagtggaatac

SEQ ID NO: 71108 - RNA, 24 nt, synthetic construct
  misc_feature 1..24: note = Aldehyde dehydrogenase, mitochondrial (130-137)
  source 1..24: mol_type = other RNA
agcaacctgaagagagtgaccctc

SEQ ID NO: 71109 - RNA, 27 nt, synthetic construct
  misc_feature 1..27: note = Protocadherin gamma-A12 (544-552)
  source 1..27: mol_type = other RNA
agcaacgtgtccctgtctctcttcgtc

SEQ ID NO: 71110 - RNA, 27 nt, synthetic construct
  misc_feature 1..27: note = Neuropilin-2 (579-587)
  source 1..27: mol_type = other RNA
agccccgccggcatcgggatgagactg

SEQ ID NO: 71111 - RNA, 27 nt, synthetic construct
  misc_feature 1..27: note = Sushi repeat-containing protein SRPX (3-11)
  source 1..27: mol_type = other RNA
agccccgcccacagacctgctctgctc

SEQ ID NO: 71112 - RNA, 30 nt, synthetic construct
  misc_feature 1..30: note = Sushi repeat-containing protein SRPX (3-12)
  source 1..30: mol_type = other RNA
agccccgcccacagacctgctctgctcctt

SEQ ID NO: 71113 - RNA, 24 nt, synthetic construct
  misc_feature 1..24: note = Staphylococcal nuclease domain-containing protein 1 (730-737)
  source 1..24: mol_type = other RNA
agccccgccaagatccacgtgttc

SEQ ID NO: 71114 - RNA, 27 nt, synthetic construct
  misc_feature 1..27: note = Plectin (1284-1292)
  source 1..27: mol_type = other RNA
agccccgccaagaaacctaaggtgcag

SEQ ID NO: 71115 - RNA, 27 nt, synthetic construct
  misc_feature 1..27: note = Integrin beta-5 (81-89)
  source 1..27: mol_type = other RNA
agccccgcctcctctttccacgtgctg

SEQ ID NO: 71116 - RNA, 27 nt, synthetic construct
  misc_feature 1..27: note = Nesprin-1 (72-80)
  source 1..27: mol_type = other RNA
agccccgaggtgggcagactgtccctc

SEQ ID NO: 71117 - RNA, 27 nt, synthetic construct
  misc_feature 1..27: note = Tetratricopeptide repeat protein 28 (1765-1773)
  source 1..27: mol_type = other RNA
agccccttccagaaggtgggcaaactg

SEQ ID NO: 71118 - RNA, 36 nt, synthetic construct
  misc_feature 1..36: note = Carcinoembryonic antigen-related cell adhesion molecule 1 isoform 3 (361-372)
  source 1..36: mol_type = other RNA
agccccggcgccatcgctgggattgtgataggagtc

SEQ ID NO: 71119 - RNA, 36 nt, synthetic construct
  misc_feature 1..36: note = Transport and Golgi organization protein 6 homolog (29-40)
  source 1..36: mol_type = other RNA
agccccggcgggtccggatcttcaagtctgcaggtg

SEQ ID NO: 71120 - RNA, 36 nt, synthetic construct
  misc_feature 1..36: note = Vimentin (56-67)
  source 1..36: mol_type = other RNA
agccccggcggggtgtacgccaccagatcctctgct

SEQ ID NO: 71121 - RNA, 27 nt, synthetic construct
  misc_feature 1..27: note = HEAT repeat-containing protein 5B (63-71)
  source 1..27: mol_type = other RNA
agccccggccctccaaccagaaagctg

SEQ ID NO: 71122 - RNA, 27 nt, synthetic construct
  misc_feature 1..27: note = Rho guanine nucleotide exchange factor 26 (304-312)
  source 1..27: mol_type = other RNA
agccccggctccctgagaagggggctc

SEQ ID NO: 71123 - RNA, 27 nt, synthetic construct
  misc_feature 1..27: note = Glia-derived nexin (66-74)
  source 1..27: mol_type = other RNA
agcccccacggcatcgcctccgtgctg

SEQ ID NO: 71124 - RNA, 30 nt, synthetic construct
  misc_feature 1..30: note = Tensin-3 (1123-1132)
  source 1..30: mol_type = other RNA
agcccccactccggctctaccatctcaatt

SEQ ID NO: 71125 - RNA, 27 nt, synthetic construct
  misc_feature 1..27: note = Ankyrin repeat and BTB/POZ domain-containing protein 2 (632-640)
  source 1..27: mol_type = other RNA
agccccatcccttccattccagagata

SEQ ID NO: 71126 - RNA, 27 nt, synthetic construct
  misc_feature 1..27: note = F-box only protein 7 (406-414)
  source 1..27: mol_type = other RNA
agccccaagggcagattcgtgatgctg

SEQ ID NO: 71127 - RNA, 27 nt, synthetic construct
  misc_feature 1..27: note = Synaptic vesicle membrane protein VAT-1 homolog (249-257)
  source 1..27: mol_type = other RNA
agccccaagggcgtggacatcgtcatg

SEQ ID NO: 71128 - RNA, 27 nt, synthetic construct
  misc_feature 1..27: note = Sodium-dependent neutral amino acid transporter B(0)AT2 (30-38)
  source 1..27: mol_type = other RNA
agccccaagctgggcgggatcggattc

SEQ ID NO: 71129 - RNA, 30 nt, synthetic construct; identical to SEQ ID NO: 46902
  misc_feature 1..30: note = Collagen alpha-1(XV) chain (314-323)
  source 1..30: mol_type = other RNA

SEQ ID NO: 71130 - RNA, 27 nt, synthetic construct
  misc_feature 1..27: note = E3 ubiquitin-protein ligase RLIM (89-97)
  source 1..27: mol_type = other RNA
agccccctgcaccctatgtccgagatc

SEQ ID NO: 71131 - RNA, 30 nt, synthetic construct
  misc_feature 1..30: note = Cleavage stimulation factor subunit 2 (154-163)
  source 1..30: mol_type = other RNA
agcccccaggaggccagaaacatgctgctc

SEQ ID NO: 71132 - RNA, 27 nt, synthetic construct
  misc_feature 1..27: note = L-dopachrome tautomerase (134-142)
  source 1..27: mol_type = other RNA
agcccccaggagagagaacaattcctg

SEQ ID NO: 71133 - RNA, 27 nt, synthetic construct
  misc_feature 1..27: note = Immunoglobulin superfamily member 11 (234-242)
  source 1..27: mol_type = other RNA
agcccccagcctagaaacatcggcctg

SEQ ID NO: 71134 - RNA, 27 nt, synthetic construct
  misc_feature 1..27: note = Collagen triple helix repeat-containing protein 1 (9-17)
  source 1..27: mol_type = other RNA
agcccccagagactgaggggcctcctt

SEQ ID NO: 71135 - RNA, 27 nt, synthetic construct
  misc_feature 1..27: note = Ropporin-1A (153-161)
  source 1..27: mol_type = other RNA
agccccagaatccctttctccaccttt

SEQ ID NO: 71136 - RNA, 24 nt, synthetic construct
  misc_feature 1..24: note = Procollagen-lysine,2-oxoglutarate 5-dioxygenase 3 (702-709)
  source 1..24: mol_type = other RNA
agccccagaaagggctgggccctg

SEQ ID NO: 71137 - RNA, 24 nt, synthetic construct
  misc_feature 1..24: note = Procollagen-lysine,2-oxoglutarate 5-dioxygenase 2 (174-181)
  source 1..24: mol_type = other RNA
agccccagaaagggctggtccttc

SEQ ID NO: 71138 - RNA, 24 nt, synthetic construct
  misc_feature 1..24: note = Delta-like protein 3 (3-10)
  source 1..24: mol_type = other RNA
agccccagaatgtccggcctgctc

SEQ ID NO: 71139 - RNA, 33 nt, synthetic construct
  misc_feature 1..33: note = Delta-like protein 3 (3-13)
  source 1..33: mol_type = other RNA
agccccagaatgtccggcctgctctctcagacc

SEQ ID NO: 71140 - RNA, 27 nt, synthetic construct
  misc_feature 1..27: note = Integrin alpha-7 (803-811)
  source 1..27: mol_type = other RNA
agccccagacctaacatcctgcacctc

SEQ ID NO: 71141 - RNA, 27 nt, synthetic construct
  misc_feature 1..27: note = Protocadherin gamma-C3 (65-73)
  source 1..27: mol_type = other RNA
agccccagacagaccctgacagtgctc

SEQ ID NO: 71142 - RNA, 27 nt, synthetic construct
  misc_feature 1..27: note = RPA-interacting protein (7-15)
  source 1..27: mol_type = other RNA
agccccagaaggtccctgtacaagctc

SEQ ID NO: 71143 - RNA, 27 nt, synthetic construct
  misc_feature 1..27: note = E3 ubiquitin-protein ligase RING1 (9-17)
  source 1..27: mol_type = other RNA
agccccagatccctgcactctgagctc

SEQ ID NO: 71144 - RNA, 27 nt, synthetic construct
  misc_feature 1..27: note = AP-1 complex subunit sigma-1A (146-154)
  source 1..27: mol_type = other RNA
agccccagatccgtgctggaggaaatg

SEQ ID NO: 71145 - RNA, 54 nt, synthetic construct
  misc_feature 1..54: note = Fatty acid synthase (856-873)
  source 1..54: mol_type = other RNA
agcccctccgccgctatctacaacattgacacctcttcagagagtcctgatcac

SEQ ID NO: 71146 - RNA, 27 nt, synthetic construct
  misc_feature 1..27: note = Rho GTPase-activating protein 32 (243-251)
  source 1..27: mol_type = other RNA
agcccctccaccaagctgctcacactt

SEQ ID NO: 71147 - RNA, 30 nt, synthetic construct
  misc_feature 1..30: note = Melanoma antigen preferentially expressed in tumors (345-354)
  source 1..30: mol_type = other RNA
agcccctccgtgtctcagctgtcagtcctc

SEQ ID NO: 71148 - RNA, 27 nt, synthetic construct
  misc_feature 1..27: note = SAM and SH3 domain-containing protein 1 (442-450)
  source 1..27: mol_type = other RNA
agccccaccgcctccagaatctctctg

SEQ ID NO: 71149 - RNA, 27 nt, synthetic construct
  misc_feature 1..27: note = Transcription factor Dp-2 (24-32)
  source 1..27: mol_type = other RNA
agccccaccaagggcaacatctccttc

SEQ ID NO: 71150 - RNA, 27 nt, synthetic construct
  misc_feature 1..27: note = Bestrophin-1 (499-507)
  source 1..27: mol_type = other RNA
agccccaccaacatccacacaactctg

SEQ ID NO: 71151 - RNA, 27 nt, synthetic construct
  misc_feature 1..27: note = Nuclear factor 1 X-type (373-381)
  source 1..27: mol_type = other RNA
agcccctacttcacccaccctacaatc

SEQ ID NO: 71152 - RNA, 27 nt, synthetic construct
  misc_feature 1..27: note = Zinc finger CCHC domain-containing protein 24 (93-101)
  source 1..27: mol_type = other RNA
agcccctacggctccctgaacaatatc

SEQ ID NO: 71153 - RNA, 27 nt, synthetic construct
  misc_feature 1..27: note = Zinc finger protein 503 (341-349)
  source 1..27: mol_type = other RNA
agcccctacaagcctggccagaccgtg

SEQ ID NO: 71154 - RNA, 30 nt, synthetic construct
  misc_feature 1..30: note = Retinoic acid receptor RXR-gamma (68-77)
  source 1..30: mol_type = other RNA
agcccctacagagtgatcacctccgccatg

SEQ ID NO: 71155 - RNA, 24 nt, synthetic construct
  misc_feature 1..24: note = Filamin-A (1603-1610)
  source 1..24: mol_type = other RNA
agcccctacagagtgagggccgtc

SEQ ID NO: 71156 - RNA, 63 nt, synthetic construct
  misc_feature 1..63: note = HLA class I histocompatibility antigen, A-23 alpha chain (345-365)
  source 1..63: mol_type = other RNA
agccaggccgcttcctctgactcagcacaaggcagtgatgtgagcctgaccgcctgcaaggtc

SEQ ID NO: 71157 - RNA, 72 nt, synthetic construct
  misc_feature 1..72: note = AT-rich interactive domain-containing protein 1A (334-357)
  source 1..72: mol_type = other RNA
agccagtgctggggcgccgctgcagccgcggctgccgcagccgctgcatccgggggagcccaacagagatct

SEQ ID NO: 71158 - RNA, 24 nt, synthetic construct
  misc_feature 1..24: note = Hemicentin-1 (1082-1089)
  source 1..24: mol_type = other RNA
agccaggacaagcccgtggagatc

SEQ ID NO: 71159 - RNA, 27 nt, synthetic construct
  misc_feature 1..27: note = Very large A-kinase anchor protein (777-785)
  source 1..27: mol_type = other RNA
agccaggaccccaacagagtggagctg

SEQ ID NO: 71160 - RNA, 27 nt, synthetic construct
  misc_feature 1..27: note = Transmembrane protein 131 (324-332)
  source 1..27: mol_type = other RNA
agccagttctccggcaagatcaccgtg

SEQ ID NO: 71161 - RNA, 63 nt, synthetic construct
  misc_feature 1..63: note = Hsp70-binding protein 1 (65-85)
  source 1..63: mol_type = other RNA
agccagggctgctcctctgggggaggtggcgggggatcaagtgccggcggtagcgggaactcc

SEQ ID NO: 71162 - RNA, 30 nt, synthetic construct
  misc_feature 1..30: note = Histone acetyltransferase p300 (1897-1906)
  source 1..30: mol_type = other RNA
agccagggcaaggccgctgggcaagtgacc

SEQ ID NO: 71163 - RNA, 36 nt, synthetic construct
  misc_feature 1..36: note = Beta-2-microglobulin (87-98)
  source 1..36: mol_type = other RNA
agccagcccaagatcgtgaaatgggacagagatatg

SEQ ID NO: 71164 - RNA, 39 nt, synthetic construct
  misc_feature 1..39: note = Ras-associating and dilute domain-containing protein (258-270)
  source 1..39: mol_type = other RNA
agccagcaacacgactccctggtgtacgtcctcaacaga

SEQ ID NO: 71165 - RNA, 30 nt, synthetic construct
  misc_feature 1..30: note = Oxysterol-binding protein-related protein 10 (232-241)
  source 1..30: mol_type = other RNA
agccagtactccggccaactgcacgaggtg

SEQ ID NO: 71166 - RNA, 27 nt, synthetic construct
  misc_feature 1..27: note = Transmembrane and TPR repeat-containing protein 2 (541-549)
  source 1..27: mol_type = other RNA
agcagattcgccgaggctctgcactac

SEQ ID NO: 71167 - RNA, 27 nt, synthetic construct
  misc_feature 1..27: note = Pre-mRNA-processing-splicing factor 8 (979-987)
  source 1..27: mol_type = other RNA
agcagattcgagaagatgtacgaaaaa

SEQ ID NO: 71168 - RNA, 27 nt, synthetic construct
  misc_feature 1..27: note = Glia-derived nexin (207-215)
  source 1..27: mol_type = other RNA
agcagattccagcccgagaacaccaag

SEQ ID NO: 71169 - RNA, 18 nt, synthetic construct
  misc_feature 1..18: note = ER membrane protein complex subunit 1 (7-12)
  source 1..18: mol_type = other RNA
agcagattctggctgtgg

SEQ ID NO: 71170 - RNA, 24 nt, synthetic construct
  misc_feature 1..24: note = Splicing factor 3B subunit 3 (33-40)
  source 1..24: mol_type = other RNA
agcagaggcaagatcctggagctc

SEQ ID NO: 71171 - RNA, 27 nt, synthetic construct
  misc_feature 1..27: note = Maltase-glucoamylase (658-666)
  source 1..27: mol_type = other RNA
agcagacactacctgaacatcaggtat

SEQ ID NO: 71172 - RNA, 27 nt, synthetic construct
  misc_feature 1..27: note = B-cell lymphoma 6 protein (444-452)
  source 1..27: mol_type = other RNA
agcagactgaacaatatcgtgaacagg

SEQ ID NO: 71173 - RNA, 27 nt, synthetic construct
  misc_feature 1..27: note = Centrosomal protein C10orf90 (199-207)
  source 1..27: mol_type = other RNA
agcagaaactcctctgtggtcaggctg

SEQ ID NO: 71174 - RNA, 27 nt, synthetic construct
  misc_feature 1..27: note = Maltase-glucoamylase, intestinal (1482-1490)
  source 1..27: mol_type = other RNA
agcagaaacgtgctgcagaccaggtac

SEQ ID NO: 71175 - RNA, 66 nt, synthetic construct
  misc_feature 1..66: note = Glia-derived nexin (57-78)
  source 1..66: mol_type = other RNA
agcagaccccacgacaacatcgtgatttcccctcatggcatagcctctgtcctggggatgctccag

SEQ ID NO: 71176 - RNA, 24 nt, synthetic construct
  misc_feature 1..24: note = Arylsulfatase B (42-49)
  source 1..24: mol_type = other RNA
agcagaccccctcacctggtgttc

SEQ ID NO: 71177 - RNA, 27 nt, synthetic construct
  misc_feature 1..27: note = Fatty acid synthase (1916-1924)
  source 1..27: mol_type = other RNA
agcagatccggcatcaggaccgggtac

SEQ ID NO: 71178 - RNA, 27 nt, synthetic construct
  misc_feature 1..27: note = Vasorin (3-11)
  source 1..27: mol_type = other RNA
agcagagtgcccctgctccttcctctg

SEQ ID NO: 71179 - RNA, 24 nt, synthetic construct
  misc_feature 1..24: note = Semaphorin-3A (543-550)
  source 1..24: mol_type = other RNA
agcagatacttccccaccgccaag

SEQ ID NO: 71180 - RNA, 48 nt, synthetic construct
  misc_feature 1..48: note = Alpha-1D adrenergic receptor (23-38)
  source 1..48: mol_type = other RNA
agctccgccggcgggggaggtggctctgctgggggagcagccccctca

SEQ ID NO: 71181 - RNA, 27 nt, synthetic construct
  misc_feature 1..27: note = Insulin receptor substrate 2 (311-319)
  source 1..27: mol_type = other RNA
agctccgccacccaccccatctctgtg

SEQ ID NO: 71182 - RNA, 27 nt, synthetic construct
  misc_feature 1..27: note = Protein CMSS1 (145-153)
  source 1..27: mol_type = other RNA
agctccgccgtgagagctctggagctc

SEQ ID NO: 71183 - RNA, 27 nt, synthetic construct
  misc_feature 1..27: note = Protein FAM127A (59-67)
  source 1..27: mol_type = other RNA
agctccgacgccctgaaggtgaccttc

SEQ ID NO: 71184 - RNA, 30 nt, synthetic construct
  misc_feature 1..30: note = Beta-1-syntrophin (489-498)
  source 1..30: mol_type = other RNA
agctccgacgatggcatcagaatgctgtac

SEQ ID NO: 71185 - RNA, 27 nt, synthetic construct
  misc_feature 1..27: note = Transcription elongation factor B polypeptide 1 (7-15)
  source 1..27: mol_type = other RNA
agctccgacggccacgagttcatcgtg

SEQ ID NO: 71186 - RNA, 27 nt, synthetic construct
  misc_feature 1..27: note = Cyclin-dependent kinase-like 3 (88-96)
  source 1..27: mol_type = other RNA
agctccgacctgctccaccatgagtac

SEQ ID NO: 71187 - RNA, 27 nt, synthetic construct
  misc_feature 1..27: note = Neutrophil collagenase (228-236)
  source 1..27: mol_type = other RNA
agctccgaccccggcgccctgatgtac

SEQ ID NO: 71188 - RNA, 51 nt, synthetic construct
  misc_feature 1..51: note = HLA class I histocompatibility antigen, A-23 alpha chain (349-365)
  source 1..51: mol_type = other RNA
agctccgactctgcccagggctcagatgtgagtctgaccgcttgcaaggtc

SEQ ID NO: 71189 - RNA, 84 nt, synthetic construct
  misc_feature 1..84: note = NADH dehydrogenase (ubiquinone) 1 beta subcomplex subunit 11, mitochondrial (31-58)
  source 1..84: mol_type = other RNA
agctccttctctagaaccgtggtcgccccctcagctgttgcaggcaagaggcctccagagccgacaactccctggcaggaagac

SEQ ID NO: 71190 - RNA, 39 nt, synthetic construct
  misc_feature 1..39: note = Keratin, type I cytoskeletal 10 (570-582)
  source 1..39: mol_type = other RNA
agctccggctctgtgggggagtcaagtagcaagggaccc

SEQ ID NO: 71191 - RNA, 21 nt, synthetic construct
  misc_feature 1..21: note = Zinc finger protein 697 (329-335)
  source 1..21: mol_type = other RNA
agctcccacctgctctctcat

SEQ ID NO: 71192 - RNA, 21 nt, synthetic construct
  misc_feature 1..21: note = BTB/POZ domain-containing protein KCTD20 (144-150)
  source 1..21: mol_type = other RNA
agctccaagctgtacagattc

SEQ ID NO: 71193 - RNA, 39 nt, synthetic construct
  misc_feature 1..39: note = Voltage-dependent anion-selective channel protein 1 (240-252)
  source 1..39: mol_type = other RNA
agctccctgatcggcctcgggtacacccagacacttaag

SEQ ID NO: 71194 - RNA, 27 nt, synthetic construct
  misc_feature 1..27: note = Phosphatidylinositol 4-phosphate 3-kinase C2 domain-containing subunit alpha (1113-1121)
  source 1..27: mol_type = other RNA
agctccaacgccgtgcccctgaaggtc

SEQ ID NO: 71195 - RNA, 27 nt, synthetic construct
  misc_feature 1..27: note = Niemann-Pick C1 protein (167-175)
  source 1..27: mol_type = other RNA
agctccaacgacaaggccctgggcctc

SEQ ID NO: 71196 - RNA, 27 nt, synthetic construct
  misc_feature 1..27: note = Ligand of Numb protein X 2 (382-390)
  source 1..27: mol_type = other RNA
agctccaacgacagagtgctggccatc

SEQ ID NO: 71197 - RNA, 42 nt, synthetic construct
  misc_feature 1..42: note = Beta-secretase 2 (113-126)
  source 1..42: mol_type = other RNA
agctccaacttcgccgtggctggcaccccccactcttacatc

SEQ ID NO: 71198 - RNA, 45 nt, synthetic construct
  misc_feature 1..45: note = Beta-secretase 2 (113-127)
  source 1..45: mol_type = other RNA
agctccaacttcgccgtggctggcaccccccactcttacatcgac

SEQ ID NO: 71199 - RNA, 48 nt, synthetic construct
  misc_feature 1..48: note = Beta-secretase 2 (113-128)
  source 1..48: mol_type = other RNA
agctccaacttcgccgtggctggcaccccccactcttacatcgacaca

SEQ ID NO: 71200 - RNA, 27 nt, synthetic construct
  misc_feature 1..27: note = Alpha-taxilin (438-446)
  source 1..27: mol_type = other RNA
agctccaacaaggccctgctcgagatg

SEQ ID NO: 71201 - RNA, 27 nt, synthetic construct
  misc_feature 1..27: note = Plakophilin-4 (457-465)
  source 1..27: mol_type = other RNA
agctcccagagatctaccctgacatac

SEQ ID NO: 71202 - RNA, 27 nt, synthetic construct
  misc_feature 1..27: note = Golgin subfamily B member 1 (3000-3008)
  source 1..27: mol_type = other RNA
agctcccagacccaacccctgaaggtg

SEQ ID NO: 71203 - RNA, 33 nt, synthetic construct
  misc_feature 1..33: note = Transducin-like enhancer protein 3 (167-177)
  source 1..33: mol_type = other RNA
agctcctctggcctgctcgcccttggggctctg

SEQ ID NO: 71204 - RNA, 42 nt, synthetic construct
  misc_feature 1..42: note = Keratin, type I cytoskeletal 10 (37-50)
  source 1..42: mol_type = other RNA
agctcctctaagggctcactggggggaggtttcagtagcggc

SEQ ID NO: 71205 - RNA, 45 nt, synthetic construct
  misc_feature 1..45: note = Keratin, type I cytoskeletal 10 (37-51)
  source 1..45: mol_type = other RNA
agctcctctaagggctcactggggggaggtttcagtagcggcggg

SEQ ID NO: 71206 - RNA, 48 nt, synthetic construct
  misc_feature 1..48: note = Keratin, type I cytoskeletal 10 (37-52)
  source 1..48: mol_type = other RNA
agctcctctaagggctcactggggggaggtttcagtagcggcgggttt

SEQ ID NO: 71207 - RNA, 54 nt, synthetic construct
  misc_feature 1..54: note = Keratin, type I cytoskeletal 10 (37-54)
  source 1..54: mol_type = other RNA
agctcctctaagggctcactggggggaggtttcagtagcggcgggttttccgga

SEQ ID NO: 71208 - RNA, 57 nt, synthetic construct
  misc_feature 1..57: note = Keratin, type I cytoskeletal 10 (37-55)
  source 1..57: mol_type = other RNA
agctcctctaagggctcactggggggaggtttcagtagcggcgggttttccggaggc

SEQ ID NO: 71209 - RNA, 27 nt, synthetic construct
  misc_feature 1..27: note = Actin, gamma-enteric smooth muscle (190-198)
  source 1..27: mol_type = other RNA
agctcctcttcactggagaagagttac

SEQ ID NO: 71210 - RNA, 39 nt, synthetic construct
  misc_feature 1..39: note = Synaptotagmin-like protein 2 (277-289)
  source 1..39: mol_type = other RNA
agctcctcttcaagtaccgacagcgagacactgagatac

SEQ ID NO: 71211 - RNA, 36 nt, synthetic construct
  misc_feature 1..36: note = Synaptotagmin-like protein 2 (279-290)
  source 1..36: mol_type = other RNA
agctcctcttcaaccgacagtgagacactgagatac

SEQ ID NO: 71212 - RNA, 30 nt, synthetic construct
  misc_feature 1..30: note = Synaptotagmin-like protein 2 (281-290)
  source 1..30: mol_type = other RNA
agctccaccgactctgagacactgagatac

SEQ ID NO: 71213 - RNA, 27 nt, synthetic construct
  misc_feature 1..27: note = F-actin-capping protein subunit beta (41-49)
  source 1..27: mol_type = other RNA
agctccgtggaccagcccctgaagatc

SEQ ID NO: 71214 - RNA, 21 nt, synthetic construct
  misc_feature 1..21: note = TATA-binding protein-associated factor 2N (44-50)
  source 1..21: mol_type = other RNA
agctcctacggccagaactat

SEQ ID NO: 71215 - RNA, 27 nt, synthetic construct
  misc_feature 1..27: note = Poly(rC)-binding protein 4 (68-76)
  source 1..27: mol_type = other RNA
agcaccgccgctgtgttccacgcagtc

SEQ ID NO: 71216 - RNA, 24 nt, synthetic construct
  misc_feature 1..24: note = 40S ribosomal protein S19 (59-66)
  source 1..24: mol_type = other RNA
agcaccgccagacacctgtacctc

SEQ ID NO: 71217 - RNA, 33 nt, synthetic construct
  misc_feature 1..33: note = Regulator of G-protein signaling 12 (284-294)
  source 1..33: mol_type = other RNA
agcaccgacaaggccggcgtggtcgctgagtac

SEQ ID NO: 71218 - RNA, 30 nt, synthetic construct
  misc_feature 1..30: note = Neuropilin-2 (829-838)
  source 1..30: mol_type = other RNA
agcaccgacaaggagaaatcctggctgtac

SEQ ID NO: 71219 - RNA, 30 nt, synthetic construct
  misc_feature 1..30: note = Protein LZIC (168-177)
  source 1..30: mol_type = other RNA
agcaccgacctgggcagacccccttcctac

SEQ ID NO: 71220 - RNA, 27 nt, synthetic construct
  misc_feature 1..27: note = Transcription factor HES-1 (101-109)
  source 1..27: mol_type = other RNA
agcaccgacccctccgtgctgggcaag

SEQ ID NO: 71221 - RNA, 24 nt, synthetic construct
  misc_feature 1..24: note = Heterogeneous nuclear ribonucleoprotein K (188-195)
  source 1..24: mol_type = other RNA
agcaccgacagagtggtcctgatc

SEQ ID NO: 71222 - RNA, 30 nt, synthetic construct
  misc_feature 1..30: note = CUB and sushi domain-containing protein 1 (1359-1368)
  source 1..30: mol_type = other RNA
agcaccttcaactccctgacactccagttt

SEQ ID NO: 71223 - RNA, 24 nt, synthetic construct
  misc_feature 1..24: note = Transcription termination factor 2 (827-834)
  source 1..24: mol_type = other RNA
agcaccggcagacccctggtgatc

SEQ ID NO: 71224 - RNA, 24 nt, synthetic construct
  misc_feature 1..24: note = Basic leucine zipper and W2 domain-containing protein 2 (54-61)
  source 1..24: mol_type = other RNA
agcaccggctccagactggactac

SEQ ID NO: 71225 - RNA, 21 nt, synthetic construct
  misc_feature 1..21: note = Synemin (859-865)
  source 1..21: mol_type = other RNA
agcaccatcagatactcctgg

SEQ ID NO: 71226 - RNA, 54 nt, synthetic construct
  misc_feature 1..54: note = Transformation/transcription domain-associated protein (377-394)
  source 1..54: mol_type = other RNA
agcaccctggccgacctcgtgcaccatgtcagacagcaccttcccctgtccgat

SEQ ID NO: 71227 - RNA, 21 nt, synthetic construct
  misc_feature 1..21: note = Nicalin (264-270)
  source 1..21: mol_type = other RNA
agcaccctggagcaccatctc

SEQ ID NO: 71228 - RNA, 93 nt, synthetic construct
  misc_feature 1..93: note = CXXC-type zinc finger protein 5 (18-48)
  source 1..93: mol_type = other RNA
agcaccaacggctccgggggatctggttcaagtggccccaaggccggggctgcagacaaaagcgccgtggtcgcggctgccgcacctgcctcc

SEQ ID NO: 71229 - RNA, 30 nt, synthetic construct
  misc_feature 1..30: note = Transmembraneoprotein NMB (294-303)
  source 1..30: mol_type = other RNA
agcaccaaccacacagtgaatcatacttac

SEQ ID NO: 71230 - RNA, 27 nt, synthetic construct
  misc_feature 1..27: note = Patatin-like phospholipase domain-containing protein 2 (199-207)
  source 1..27: mol_type = other RNA
agcaccaacatccacgagctgagagtg

SEQ ID NO: 71231 - RNA, 27 nt, synthetic construct
  misc_feature 1..27: note = Sodium/potassium-transporting ATPase subunit alpha-3 (487-495)
  source 1..27: mol_type = other RNA
agcaccaacaagtaccagctgtccatc

SEQ ID NO: 71232 - RNA, 27 nt, synthetic construct
  misc_feature 1..27: note = Transmembrane emp24 domain-containing protein 10 (181-189)
  source 1..27: mol_type = other RNA
agcaccaacacaagagtgctgtacttc

SEQ ID NO: 71233 - RNA, 27 nt, synthetic construct
  misc_feature 1..27: note = DNA-directed RNA polymerase I subunit RPA2 (156-164)
  source 1..27: mol_type = other RNA
agcacccagaagcaagtgctgaactac

SEQ ID NO: 71234 - RNA, 24 nt, synthetic construct
  misc_feature 1..24: note = Protein-methionine sulfoxide oxidase MICAL3 (646-653)
  source 1..24: mol_type = other RNA
agcaccagatcccccatctctttc

SEQ ID NO: 71235 - RNA, 45 nt, synthetic construct
  misc_feature 1..45: note = Vimentin (2-16)
  source 1..45: mol_type = other RNA
agcaccagatccgtgtcttcaagtagctacaggcggatgttcggc

SEQ ID NO: 71236 - RNA, 45 nt, synthetic construct
  misc_feature 1..45: note = Vimentin (47-61)
  source 1..45: mol_type = other RNA
agcacctccagatctctgtacgcctcaagtcccggcggggtgtat

SEQ ID NO: 71237 - RNA, 21 nt, synthetic construct
  misc_feature 1..21: note = WD repeat-containing protein 36 (352-358)
  source 1..21: mol_type = other RNA
agcaccgtgcacgagaagttc

SEQ ID NO: 71238 - RNA, 27 nt, synthetic construct
  misc_feature 1..27: note = Zinc finger CCHC domain-containing protein 3 (228-236)
  source 1..27: mol_type = other RNA
agcgtggccgctcagctgaccggcgtc

SEQ ID NO: 71239 - RNA, 27 nt, synthetic construct
  misc_feature 1..27: note = Zinc finger protein 518B (424-432)
  source 1..27: mol_type = other RNA
agcgtggccctgaagggccactccctc

SEQ ID NO: 71240 - RNA, 33 nt, synthetic construct
  misc_feature 1..33: note = Latent-transforming growth factor beta-binding protein 3 (178-188)
  source 1..33: mol_type = other RNA
agcgtggcctccaagcacgctatctacgcagtc

SEQ ID NO: 71241 - RNA, 27 nt, synthetic construct
  misc_feature 1..27: note = 3-hydroxybutyrate dehydrogenase type 2 (133-141)
  source 1..27: mol_type = other RNA
agcgtggcctcctctgtcaagggcgtt

SEQ ID NO: 71242 - RNA, 60 nt, synthetic construct
  misc_feature 1..60: note = Chondroitin sulfate proteoglycan 4 (124-143)
  source 1..60: mol_type = other RNA
agcgtggacggcttcctgaacgcctcctctgctgtccccggggcacctctcgaggttcca

SEQ ID NO: 71243 - RNA, 27 nt, synthetic construct
  misc_feature 1..27: note = GDNF-inducible zinc finger protein 1 (69-77)
  source 1..27: mol_type = other RNA
agcgtggacggcaccagaacaaacgtc

SEQ ID NO: 71244 - RNA, 27 nt, synthetic construct
  misc_feature 1..27: note = Protein AHNAK2 (2175-2183)
  source 1..27: mol_type = other RNA
agcgtggacgtctccccccctaaggtt

SEQ ID NO: 71245 - RNA, 27 nt, synthetic construct
  misc_feature 1..27: note = Phospholipase B-like 1 (304-312)
  source 1..27: mol_type = other RNA
agcgtgttcaacaagaccctgctcaaa

SEQ ID NO: 71246 - RNA, 21 nt, synthetic construct
  misc_feature 1..21: note = Clathrin interactor 1 (166-172)
  source 1..21: mol_type = other RNA
agcgtgggcgggttcagatac

SEQ ID NO: 71247 - RNA, 57 nt, synthetic construct
  misc_feature 1..57: note = Prelamin-A/C (479-497)
  source 1..57: mol_type = other RNA
agcgtgggcgggtccggaggtggctctttcggggacaacctggtcaccagatcatac

SEQ ID NO: 71248 - RNA, 27 nt, synthetic construct
  misc_feature 1..27: note = Heterogeneous nuclear ribonucleoprotein C-like 1 (47-55)
  source 1..27: mol_type = other RNA
agcgtgcacaagggcttcgcctttgtc

SEQ ID NO: 71249 - RNA, 27 nt, synthetic construct
  misc_feature 1..27: note = COUP transcription factor 2 (223-231)
  source 1..27: mol_type = other RNA
agcgtgatcgagcagctgttctttgtc

SEQ ID NO: 71250 - RNA, 27 nt, synthetic construct
  misc_feature 1..27: note = Serine/threonine-protein kinase ICK (533-541)
  source 1..27: mol_type = other RNA
agcgtgatctccaaggtcaactctgtt

SEQ ID NO: 71251 - RNA, 69 nt, synthetic construct
  misc_feature 1..69: note = Glutathione reductase, mitochondrial (234-256)
  source 1..69: mol_type = other RNA
agcgtgatcgtcggcgccgggtacattgctgttgagatggcaggaatactgtccgccctcggttctaag

SEQ ID NO: 71252 - RNA, 27 nt, synthetic construct
  misc_feature 1..27: note = Kelch-like protein 21 (378-386)
  source 1..27: mol_type = other RNA
agcgtgctggacggcctcctttacgtc

SEQ ID NO: 71253 - RNA, 30 nt, synthetic construct
  misc_feature 1..30: note = Protein transport protein Sec61 subunit alpha isoform 1 (353-362)
  source 1..30: mol_type = other RNA
agcgtgctggaggaccccgtccacgccgtt

SEQ ID NO: 71254 - RNA, 21 nt, synthetic construct
  misc_feature 1..21: note = Tetratricopeptide repeat protein 27 (74-80)
  source 1..21: mol_type = other RNA
agcgtgctgttccagcaattt

SEQ ID NO: 71255 - RNA, 27 nt, synthetic construct
  misc_feature 1..27: note = Histone-lysine N-methyltransferase SETD1B (168-176)
  source 1..27: mol_type = other RNA
agcgtgatgggcaacatcattcacgtc

SEQ ID NO: 71256 - RNA, 27 nt, synthetic construct
  misc_feature 1..27: note = E3 ubiquitin-protein ligase UBR4 (884-892)
  source 1..27: mol_type = other RNA
agcgtgaacagatacatcctgcagctc

SEQ ID NO: 71257 - RNA, 36 nt, synthetic construct
  misc_feature 1..36: note = Integral membrane protein GPR137C (4-15)
  source 1..36: mol_type = other RNA
agcgtgcccggccctgccgctgcagccgcgccagct

SEQ ID NO: 71258 - RNA, 78 nt, synthetic construct
  misc_feature 1..78: note = CCR4-NOT transcription complex subunit 3 (392-417)
  source 1..78: mol_type = other RNA
agcgtgcagccctccggcgggggaggtggcgggtctggaggcggtgggtcaagtagctcctctaactcgtcagccgga

SEQ ID NO: 71259 - RNA, 30 nt, synthetic construct
  misc_feature 1..30: note = Transmembrane protein 98 (124-133)
  source 1..30: mol_type = other RNA
agcgtgtccgacatcattgtcgttgccaag

SEQ ID NO: 71260 - RNA, 27 nt, synthetic construct
  misc_feature 1..27: note = Adipocyte enhancer-binding protein 1 (926-934)
  source 1..27: mol_type = other RNA
agcgtgtccggcatcaaccacggggtc

SEQ ID NO: 71261 - RNA, 27 nt, synthetic construct
  misc_feature 1..27: note = Dimethyladenosine transferase 1, mitochondrial (145-153)
  source 1..27: mol_type = other RNA
agcgtgtccacccccctgatcattaag

SEQ ID NO: 71262 - RNA, 27 nt, synthetic construct
  misc_feature 1..27: note Dolichyl-diphosphooligosaccharide-proteinosyltransferase subunit 2 (121-129)
  source 1..27: mol_type = other RNA
agcgtgacccagatctaccacgccgtc

SEQ ID NO: 71263 - RNA, 27 nt, synthetic construct
  misc_feature 1..27: note = Lysine-specific demethylase 4B (1000-1008)
  source 1..27: mol_type = other RNA
agcgtgacctcccacatctaccaggtc

SEQ ID NO: 71264 - RNA, 27 nt, synthetic construct
  misc_feature 1..27: note = PR domain zinc finger protein 2 (684-692)
  source 1..27: mol_type = other RNA
agcgtgtacctgtcctctaagctcaaa

SEQ ID NO: 71265 - RNA, 24 nt, synthetic construct
  misc_feature 1..24: note = Suppressor of tumorigenicity 7 protein (439-446)
  source 1..24: mol_type = other RNA
agcgtgtaccccaagaaagagctg

SEQ ID NO: 71266 - RNA, 36 nt, synthetic construct
  misc_feature 1..36: note = Semaphorin-3D (430-441)
  source 1..36: mol_type = other RNA
agcgtgtaccccgtcgccggcgggcctaccttcaag

SEQ ID NO: 71267 - RNA, 30 nt, synthetic construct
  misc_feature 1..30: note = Melanophilin (449-458)
  source 1..30: mol_type = other RNA
agcgtgtacagaggctccctgacccagagg

SEQ ID NO: 71268 - RNA, 30 nt, synthetic construct
  misc_feature 1..30: note = Cathepsin B (254-263)
  source 1..30: mol_type = other RNA
agcgtgtactccgacttcctgctctataag

SEQ ID NO: 71269 - RNA, 36 nt, synthetic construct; identical to SEQ ID NO: 47042
  misc_feature 1..36: note = Synaptotagmin-like protein 2 (618-629)
  source 1..36: mol_type = other RNA

SEQ ID NO: 71270 - RNA, 27 nt, synthetic construct
  misc_feature 1..27: note = Retrotransposon gag domain-containing protein 4 (253-261)
  source 1..27: mol_type = other RNA
agctacgccgacgctttccagtttctg

SEQ ID NO: 71271 - RNA, 27 nt, synthetic construct
  misc_feature 1..27: note = WD repeat-containing protein 11 (156-164)
  source 1..27: mol_type = other RNA
agctacgccgacaacatcctgtccttc

SEQ ID NO: 71272 - RNA, 27 nt, synthetic construct
  misc_feature 1..27: note = SH3 domain-binding protein 1 (158-166)
  source 1..27: mol_type = other RNA
agctacgccaactatttcatcagactg

SEQ ID NO: 71273 - RNA, 60 nt, synthetic construct
  misc_feature 1..60: note = Thioredoxin reductase 1, cytoplasmic (10-29)
  source 1..60: mol_type = other RNA
agctacgactatgatctgatcattataggcgggggatccggtggcctcgccgctgcaaag

SEQ ID NO: 71274 - RNA, 27 nt, synthetic construct
  misc_feature 1..27: note = Dedicator of cytokinesis protein 7 (739-747)
  source 1..27: mol_type = other RNA
agctacatccactatgtgttcagactg

SEQ ID NO: 71275 - RNA, 27 nt, synthetic construct
  misc_feature 1..27: note = Transportin-2 (516-524)
  source 1..27: mol_type = other RNA
agctacatcctggacaccctcgtgttc

SEQ ID NO: 71276 - RNA, 27 nt, synthetic construct
  misc_feature 1..27: note = E3 ubiquitin-protein ligase TRIM58 (431-439)
  source 1..27: mol_type = other RNA
agctacatctataccttcaaccagctg

SEQ ID NO: 71277 - RNA, 27 nt, synthetic construct
  misc_feature 1..27: note = SMC5-SMC6 complex localization factor protein 2 (901-909)
  source 1..27: mol_type = other RNA
agctacaagcccatcttctccaccctg

SEQ ID NO: 71278 - RNA, 21 nt, synthetic construct
  misc_feature 1..21: note = Nicotinamide phosphoribosyltransferase (17-23)
  source 1..21: mol_type = other RNA
agctacaaggtgacccactat

SEQ ID NO: 71279 - RNA, 27 nt, synthetic construct
  misc_feature 1..27: note = Zinc finger CCHC domain-containing protein 24 (70-78)
  source 1..27: mol_type = other RNA
agctacctgaactccttctttcagctc

SEQ ID NO: 71280 - RNA, 27 nt, synthetic construct
  misc_feature 1..27: note = Glycogenin-1 (194-202)
  source 1..27: mol_type = other RNA
agctacctgcccgccttcaaggtgttt

SEQ ID NO: 71281 - RNA, 27 nt, synthetic construct
  misc_feature 1..27: note = DNA-directed RNA polymerase III subunit RPC2 (532-540)
  source 1..27: mol_type = other RNA
agctaccccaacgtgttcctggtcttt

SEQ ID NO: 71282 - RNA, 27 nt, synthetic construct
  misc_feature 1..27: note = Helicase-like transcription factor (29-37)
  source 1..27: mol_type = other RNA
agctaccccaccttctttcctagattc

SEQ ID NO: 71283 - RNA, 27 nt, synthetic construct
  misc_feature 1..27: note = Nesprin-1 (3393-3401)
  source 1..27: mol_type = other RNA
agctaccaggacggcgtgagacaattc

SEQ ID NO: 71284 - RNA, 27 nt, synthetic construct
  misc_feature 1..27: note = RB1-inducible coiled-coil protein 1 (163-171)
  source 1..27: mol_type = other RNA
agctaccagaagctgctcttcaaattt

SEQ ID NO: 71285 - RNA, 27 nt, synthetic construct
  misc_feature 1..27: note = Farnesyl pyrophosphate synthase (314-322)
  source 1..27: mol_type = other RNA
agctactcccacatcatggccctgatt

SEQ ID NO: 71286 - RNA, 24 nt, synthetic construct
  misc_feature 1..24: note = 2',3'-cyclic-nucleotide 3'-phosphodiesterase (257-264)
  source 1..24: mol_type = other RNA
agctactccaaggccttcaccctg

SEQ ID NO: 71287 - RNA, 69 nt, synthetic construct
  misc_feature 1..69: note = HLA class I histocompatibility antigen, A-23 alpha chain (343-365)
  source 1..69: mol_type = other RNA
agctactcccaggccgcttcttcagacagtgcacaaggcagcgatgtgtccctgaccgcctgcaaggtc

SEQ ID NO: 71288 - RNA, 69 nt, synthetic construct
  misc_feature 1..69: note = HLA class I histocompatibility antigen, A-1 alpha chain (318-340)
  source 1..69: mol_type = other RNA
agctacacccaggccgcttcctctgactcagcacaaggcagtgatgtgagcctgacagcctgcaaggtc

SEQ ID NO: 71289 - RNA, 27 nt, synthetic construct
  misc_feature 1..27: note = Mediator of RNA polymerase II transcription subunit 13-like (933-941)
  source 1..27: mol_type = other RNA
agctacgtgcacaaggtcccctccttc

SEQ ID NO: 71290 - RNA, 18 nt, synthetic construct
  misc_feature 1..18: note = Amyloid protein-binding protein 2 (340-345)
  source 1..18: mol_type = other RNA
agctacgtgcaccagtat

SEQ ID NO: 71291 - RNA, 27 nt, synthetic construct
  misc_feature 1..27: note = Melanoma-associated antigen 12 (282-290)
  source 1..27: mol_type = other RNA
agctacgtgaaggtcctgcaccatctc

SEQ ID NO: 71292 - RNA, 27 nt, synthetic construct
  misc_feature 1..27: note Dolichyl-diphosphooligosaccharide-proteinosyltransferase 48 kDa subunit (22-30)
  source 1..27: mol_type = other RNA
accgccgctagagcatgggccctgttc

SEQ ID NO: 71293 - RNA, 27 nt, synthetic construct
  misc_feature 1..27: note = Protein AATF (30-38)
  source 1..27: mol_type = other RNA
accgccgctagagtgatcgacaggttc

SEQ ID NO: 71294 - RNA, 30 nt, synthetic construct
  misc_feature 1..30: note Dolichyl-diphosphooligosaccharide-proteinosyltransferase 48 kDa subunit (78-87)
  source 1..30: mol_type = other RNA
accgccgacgatcccagcctgtccctcatc

SEQ ID NO: 71295 - RNA, 24 nt, synthetic construct
  misc_feature 1..24: note = Triokinase/FMN cyclase (233-240)
  source 1..24: mol_type = other RNA
accgccgacgagatcgtgaagctg

SEQ ID NO: 71296 - RNA, 27 nt, synthetic construct
  misc_feature 1..27: note = Calcium homeostasis endoplasmic reticulum protein (170-178)
  source 1..27: mol_type = other RNA
accgccgacggcgctcacttcgagctg

SEQ ID NO: 71297 - RNA, 27 nt, synthetic construct
  misc_feature 1..27: note = Transducin beta-like protein 3 (197-205)
  source 1..27: mol_type = other RNA
accgccgaccacaacctgctcctttac

SEQ ID NO: 71298 - RNA, 27 nt, synthetic construct
  misc_feature 1..27: note = Late secretory pathway protein AVL9 homolog (340-348)
  source 1..27: mol_type = other RNA
accgccgacgtgagccacacaaacctg

SEQ ID NO: 71299 - RNA, 30 nt, synthetic construct; identical to SEQ ID NO: 47072
  misc_feature 1..30: note = Histone acetyltransferase type B catalytic subunit (274-283)
  source 1..30: mol_type = other RNA

SEQ ID NO: 71300 - RNA, 63 nt, synthetic construct
  misc_feature 1..63: note = 3-hydroxyacyl-CoA dehydrogenase type-2 (26-46)
  source 1..63: mol_type = other RNA
accgccgagagactggtgggccagggggctagcgcagtcctccttgacctgcccaactccgga

SEQ ID NO: 71301 - RNA, 24 nt, synthetic construct
  misc_feature 1..24: note = H(+)/Cl(-) exchange transporter 7 (101-108)
  source 1..24: mol_type = other RNA
accgccttcagaacagtggagatc

SEQ ID NO: 71302 - RNA, 84 nt, synthetic construct
  misc_feature 1..84: note = Alpha-1,6-mannosylglycoprotein 6-beta-N-acetylglucosaminyltransferase A (288-315)
  source 1..84: mol_type = other RNA
accgccttcagcggcgggcccctgggagagctcgtgcagtggtccgaccttatcacatctctgtacttgttaggtcacgatatt

SEQ ID NO: 71303 - RNA, 24 nt, synthetic construct
  misc_feature 1..24: note = Cleavage and polyadenylation specificity factor subunit 2 (239-246)
  source 1..24: mol_type = other RNA
accgccggcagagtgctggagctc

SEQ ID NO: 71304 - RNA, 27 nt, synthetic construct
  misc_feature 1..27: note = Biorientation of chromosomes in cell division protein 1-like 1 (1268-1276)
  source 1..27: mol_type = other RNA
accgccaaggaccccagcgtgtccatc

SEQ ID NO: 71305 - RNA, 24 nt, synthetic construct
  misc_feature 1..24: note = Guanine nucleotide exchange factor for Rab-3A (87-94)
  source 1..24: mol_type = other RNA
accgccctgaagacactcgtgatc

SEQ ID NO: 71306 - RNA, 75 nt, synthetic construct
  misc_feature 1..75: note = 60 kDa heat shock protein, mitochondrial (527-551)
  source 1..75: mol_type = other RNA
accgccctgctcgacgctgcaggcgtggccagccttctgacaactgcggaggtcgttgtgacggaaatccccaag

SEQ ID NO: 71307 - RNA, 84 nt, synthetic construct
  misc_feature 1..84: note = 60 kDa heat shock protein, mitochondrial (527-554)
  source 1..84: mol_type = other RNA
accgccctgctcgacgctgcaggcgtggccagccttctgacaactgcggaggtcgttgtgacggaaatccccaaggaggaaaaa

SEQ ID NO: 71308 - RNA, 42 nt, synthetic construct
  misc_feature 1..42: note = Plexin-B2 (1522-1535)
  source 1..42: mol_type = other RNA
accgcccagatcctgagcgacctcgatcttacatcccaaaga

SEQ ID NO: 71309 - RNA, 21 nt, synthetic construct
  misc_feature 1..21: note = 40S ribosomal protein S19 (60-66)
  source 1..21: mol_type = other RNA
accgccagacacctgtacctc

SEQ ID NO: 71310 - RNA, 48 nt, synthetic construct
  misc_feature 1..48: note = Zinc finger SWIM domain-containing protein 8 (1087-1102)
  source 1..48: mol_type = other RNA
accgccagccagagatccccctctaagcacggcgggccttcagctcca

SEQ ID NO: 71311 - RNA, 51 nt, synthetic construct
  misc_feature 1..51: note = Eukaryotic initiation factor 4A-I (83-99)
  source 1..51: mol_type = other RNA
accgccacattcgctatcagcattctgcagcaaatagagctcgaccttaag

SEQ ID NO: 71312 - RNA, 42 nt, synthetic construct
  misc_feature 1..42: note = Tubulin alpha-1C chain (249-262)
  source 1..42: mol_type = other RNA
accgccgtggtcgagccctacaacagcatcctgacaactcac

SEQ ID NO: 71313 - RNA, 30 nt, synthetic construct
  misc_feature 1..30: note = Endoplasmin (419-428)
  source 1..30: mol_type = other RNA
accgacgatttccacgacatgatgcccaag

SEQ ID NO: 71314 - RNA, 24 nt, synthetic construct
  misc_feature 1..24: note = GPI transamidase component PIG-T (162-169)
  source 1..24: mol_type = other RNA
accgaccactacttcctgagatat

SEQ ID NO: 71315 - RNA, 42 nt, synthetic construct
  misc_feature 1..42: note = Alpha-enolase (67-80)
  source 1..42: mol_type = other RNA
accgacaaggtggtcatcggcatggatgttgccgctagcgag

SEQ ID NO: 71316 - RNA, 48 nt, synthetic construct
  misc_feature 1..48: note = Alpha-enolase (67-82)
  source 1..48: mol_type = other RNA
accgacaaggtggtcatcggcatggatgttgccgctagcgagttcttt

SEQ ID NO: 71317 - RNA, 42 nt, synthetic construct
  misc_feature 1..42: note = 4F2 cell-surface antigen heavy chain (174-187)
  source 1..42: mol_type = other RNA
accgacctgctccagatcgatcccaacttcggcagcaaggag

SEQ ID NO: 71318 - RNA, 45 nt, synthetic construct
  misc_feature 1..45: note = 4F2 cell-surface antigen heavy chain (174-188)
  source 1..45: mol_type = other RNA
accgacctgctccagatcgatcccaacttcggcagcaaggaggac

SEQ ID NO: 71319 - RNA, 24 nt, synthetic construct
  misc_feature 1..24: note = Synaptotagmin-like protein 2 (283-290)
  source 1..24: mol_type = other RNA
accgacagcgagacactgagatac

SEQ ID NO: 71320 - RNA, 21 nt, synthetic construct
  misc_feature 1..21: note = 40S ribosomal protein SA (150-156)
  source 1..21: mol_type = other RNA
accgacagccccctgagatac

SEQ ID NO: 71321 - RNA, 48 nt, synthetic construct
  misc_feature 1..48: note = Carbonic anhydrase 14 (52-67)
  source 1..48: mol_type = other RNA
accgacagcgtgacattcgatcccgacctgcctgccctccagccacac

SEQ ID NO: 71322 - RNA, 30 nt, synthetic construct
  misc_feature 1..30: note = CD44 antigen (47-56)
  source 1..30: mol_type = other RNA
accgaggccgctgacctgtgcaaggcattc

SEQ ID NO: 71323 - RNA, 27 nt, synthetic construct
  misc_feature 1..27: note = Rho GTPase-activating protein 5 (467-475)
  source 1..27: mol_type = other RNA
accgaggccgacagcaaggaagtgtac

SEQ ID NO: 71324 - RNA, 30 nt, synthetic construct
  misc_feature 1..30: note = Protein kinase C-binding protein 1 (210-219)
  source 1..30: mol_type = other RNA
accgaggccttcctggctgacgcaaagtgg

SEQ ID NO: 71325 - RNA, 27 nt, synthetic construct
  misc_feature 1..27: note = Inosine-5'-monophosphate dehydrogenase 1 isoform f (446-454)
  source 1..27: mol_type = other RNA
accgaggcccccggcgaatacttcttt

SEQ ID NO: 71326 - RNA, 33 nt, synthetic construct
  misc_feature 1..33: note = Glycogen phosphorylase, muscle form (672-682)
  source 1..33: mol_type = other RNA
accgaggccagcggcacagggaacatgaagttc

SEQ ID NO: 71327 - RNA, 30 nt, synthetic construct; identical to SEQ ID NO: 47100
  misc_feature 1..30: note = Zinc finger BED domain-containing protein 4 (394-403)
  source 1..30: mol_type = other RNA

SEQ ID NO: 71328 - RNA, 42 nt, synthetic construct
  misc_feature 1..42: note = Large neutral amino acids transporter small subunit 1 (264-277)
  source 1..42: mol_type = other RNA
accgaggaaatgatcaacccctacagaaatctgcctctcgcc

SEQ ID NO: 71329 - RNA, 21 nt, synthetic construct
  misc_feature 1..21: note = Nuclear factor erythroid 2-related factor 1 (9-15)
  source 1..21: mol_type = other RNA
accgagggcctgctccagttc

SEQ ID NO: 71330 - RNA, 27 nt, synthetic construct
  misc_feature 1..27: note = G-protein coupled receptor 98 (3712-3720)
  source 1..27: mol_type = other RNA
accgagggccaggtgctgagcacaatc

SEQ ID NO: 71331 - RNA, 30 nt, synthetic construct
  misc_feature 1..30: note = Fibronectin isoform 7 (376-385)
  source 1..30: mol_type = other RNA
accgagggcagacaggacgggcacctgtgg

SEQ ID NO: 71332 - RNA, 33 nt, synthetic construct
  misc_feature 1..33: note = Tribbles homolog 2 (117-127)
  source 1..33: mol_type = other RNA
accgagatcattctgggcgaaacaaaggcctac

SEQ ID NO: 71333 - RNA, 24 nt, synthetic construct
  misc_feature 1..24: note = Flotillin-2 (60-67)
  source 1..24: mol_type = other RNA
accgagaaggaactgctcgccgtg

SEQ ID NO: 71334 - RNA, 33 nt, synthetic construct
  misc_feature 1..33: note = Centrosomal protein of 41 kDa (40-50)
  source 1..33: mol_type = other RNA
accgagaagctggaagagatcaaaaagaactac

SEQ ID NO: 71335 - RNA, 33 nt, synthetic construct
  misc_feature 1..33: note = Integrin alpha-6 (905-915)
  source 1..33: mol_type = other RNA
accgagaagcagatcgacgataacagaaaattc

SEQ ID NO: 71336 - RNA, 27 nt, synthetic construct
  misc_feature 1..27: note = Programmed cell death protein 5 (103-111)
  source 1..27: mol_type = other RNA
accgagaagacaactacggtgaaattc

SEQ ID NO: 71337 - RNA, 30 nt, synthetic construct
  misc_feature 1..30: note = SH3 domain-binding protein 5 (34-43)
  source 1..30: mol_type = other RNA
accgagctggaagacgccagacagaagttc

SEQ ID NO: 71338 - RNA, 27 nt, synthetic construct
  misc_feature 1..27: note = Vesicle-trafficking protein SEC22b (140-148)
  source 1..27: mol_type = other RNA
accgagctgcaggacgtgcaaagaatc

SEQ ID NO: 71339 - RNA, 27 nt, synthetic construct
  misc_feature 1..27: note = NHL repeat-containing protein 2 (296-304)
  source 1..27: mol_type = other RNA
accgagaaccacctgatcagaaagatt

SEQ ID NO: 71340 - RNA, 21 nt, synthetic construct
  misc_feature 1..21: note = Zinc finger CCCH domain-containing protein 18 (68-74)
  source 1..21: mol_type = other RNA
accgagccctaccacaactat

SEQ ID NO: 71341 - RNA, 30 nt, synthetic construct
  misc_feature 1..30: note = Baculoviral IAP repeat-containing protein 6 (1992-2001)
  source 1..30: mol_type = other RNA
accgagcagctgagaacaatcattaggtac

SEQ ID NO: 71342 - RNA, 27 nt, synthetic construct
  misc_feature 1..27: note = Vacuolar protein sorting-associated protein 13C (969-977)
  source 1..27: mol_type = other RNA
accgagcagacagtgaaggtcgccttc

SEQ ID NO: 71343 - RNA, 27 nt, synthetic construct
  misc_feature 1..27: note = Centrosomal protein C10orf90 isoform X1 (20-28)
  source 1..27: mol_type = other RNA
accgagacagccgtgcacagaactttc

SEQ ID NO: 71344 - RNA, 27 nt, synthetic construct
  misc_feature 1..27: note = Lysosomal-trafficking regulator (2635-2643)
  source 1..27: mol_type = other RNA
accgagacagaactggcccagagactc

SEQ ID NO: 71345 - RNA, 33 nt, synthetic construct
  misc_feature 1..33: note = Receptor-type protein tyrosine phosphatase beta (1331-1341)
  source 1..33: mol_type = other RNA
accgaggtgctggacagccacatccatgcctac

SEQ ID NO: 71346 - RNA, 27 nt, synthetic construct
  misc_feature 1..27: note = Apolipoprotein E (36-44)
  source 1..27: mol_type = other RNA
accgagtggcagagcggccaaagatgg

SEQ ID NO: 71347 - RNA, 27 nt, synthetic construct
  misc_feature 1..27: note = Calmodulin-regulated spectrin-associated protein 2 (1318-1326)
  source 1..27: mol_type = other RNA
accgagtacacaggccccaagctgtat

SEQ ID NO: 71348 - RNA, 27 nt, synthetic construct
  misc_feature 1..27: note = Telomeric repeat-binding factor 1 (223-231)
  source 1..27: mol_type = other RNA
accttccacagctttttccagcatttt

SEQ ID NO: 71349 - RNA, 30 nt, synthetic construct
  misc_feature 1..30: note Dolichyl-diphosphooligosaccharide-proteinosyltransferase subunit 2 (266-275)
  source 1..30: mol_type = other RNA
accttcatcgccgacagccaccagaacttt

SEQ ID NO: 71350 - RNA, 27 nt, synthetic construct
  misc_feature 1..27: note = Phospholipid transfer protein (118-126)
  source 1..27: mol_type = other RNA
accttcatcacaagcggcatgagattt

SEQ ID NO: 71351 - RNA, 18 nt, synthetic construct
  misc_feature 1..18: note = Ras GTPase-activating-like protein IQGAP1 (1614-1619)
  source 1..18: mol_type = other RNA
accttcatgctgcactac

SEQ ID NO: 71352 - RNA, 60 nt, synthetic construct
  misc_feature 1..60: note = ATP synthase-coupling factor 6, mitochondrial (89-108)
  source 1..60: mol_type = other RNA
accttccccacatttaagttcgaggaccctaaatttgaagtgatcgagaagccacaggcc

SEQ ID NO: 71353 - RNA, 27 nt, synthetic construct
  misc_feature 1..27: note = Zinc finger protein 480 (28-36)
  source 1..27: mol_type = other RNA
accttcagagacgtggccatcgagttt

SEQ ID NO: 71354 - RNA, 27 nt, synthetic construct
  misc_feature 1..27: note = Zinc finger protein 98 (14-22)
  source 1..27: mol_type = other RNA
accttcagagacgtggccctggagttt

SEQ ID NO: 71355 - RNA, 27 nt, synthetic construct
  misc_feature 1..27: note = Zinc finger protein 697 (8-16)
  source 1..27: mol_type = other RNA
accttcagcgtgtcctctcacctgttt

SEQ ID NO: 71356 - RNA, 24 nt, synthetic construct
  misc_feature 1..24: note = Bestrophin-1 (574-581)
  source 1..24: mol_type = other RNA
accttcacaggcatcctggggaag

SEQ ID NO: 71357 - RNA, 30 nt, synthetic construct
  misc_feature 1..30: note = Glyceraldehyde-3-phosphate dehydrogenase (211-220)
  source 1..30: mol_type = other RNA
accggcgccgctaaggcagtggggaaagtc

SEQ ID NO: 71358 - RNA, 45 nt, synthetic construct
  misc_feature 1..45: note = 4F2 cell-surface antigen heavy chain (120-134)
  source 1..45: mol_type = other RNA
accggcgccctgtacagaatcggggacctccaggctttccaagga

SEQ ID NO: 71359 - RNA, 21 nt, synthetic construct
  misc_feature 1..21: note = Glia-derived nexin (397-403)
  source 1..21: mol_type = other RNA
accggcgccgtgctgttcatg

SEQ ID NO: 71360 - RNA, 27 nt, synthetic construct
  misc_feature 1..27: note = DNA-dependent protein kinase catalytic subunit (402-410)
  source 1..27: mol_type = other RNA
accggcgacgatagagtgtaccagatg

SEQ ID NO: 71361 - RNA, 27 nt, synthetic construct
  misc_feature 1..27: note = Hsp90 co-chaperone Cdc37 (370-378)
  source 1..27: mol_type = other RNA
accggcgacgagaaggatgtgagcgtc

SEQ ID NO: 71362 - RNA, 27 nt, synthetic construct
  misc_feature 1..27: note = Ubiquitin carboxyl-terminal hydrolase 8 (508-516)
  source 1..27: mol_type = other RNA
accggcgacgtgccccacacaagcgtc

SEQ ID NO: 71363 - RNA, 42 nt, synthetic construct
  misc_feature 1..42: note = Basement membrane-specific heparan sulfate proteoglycan core protein (351-364)
  source 1..42: mol_type = other RNA
accggcgagttcacagtggaacccgtccctgagggggcccag

SEQ ID NO: 71364 - RNA, 33 nt, synthetic construct
  misc_feature 1..33: note = Titin (7053-7063)
  source 1..33: mol_type = other RNA
accggcggggtgctgggagccagctgcatcctc

SEQ ID NO: 71365 - RNA, 42 nt, synthetic construct
  misc_feature 1..42: note = Transferrin receptor protein 1 (518-531)
  source 1..42: mol_type = other RNA
accggccagttcctgtaccaagacagcaactgggcctccaag

SEQ ID NO: 71366 - RNA, 54 nt, synthetic construct
  misc_feature 1..54: note = Beta-secretase 2 (111-128)
  source 1..54: mol_type = other RNA
accggcagctccaacttcgccgtggctgggacaccccactcttacatcgacact

SEQ ID NO: 71367 - RNA, 99 nt, synthetic construct
  misc_feature 1..99: note = Histone-lysine N-methyltransferase, H3 lysine-36 and H4 lysine-20 specific (2131-2163)
  source 1..99: mol_type = other RNA
acccacctggccgagcagagcacaggcatggctgcacaagcccccaagatgtccgacaaacctccagcggatactaaccagatgctctctctttcaaag

SEQ ID NO: 71368 - RNA, 27 nt, synthetic construct
  misc_feature 1..27: note = Ras GTPase-activating-like protein IQGAP1 (446-454)
  source 1..27: mol_type = other RNA
acccaccccgagctgagcgtggccgtc

SEQ ID NO: 71369 - RNA, 27 nt, synthetic construct
  misc_feature 1..27: note = Phosphatidylinositol 4-kinase alpha (399-407)
  source 1..27: mol_type = other RNA
accatcgacgccgatgctcccgagctg

SEQ ID NO: 71370 - RNA, 24 nt, synthetic construct
  misc_feature 1..24: note = Protein prune homolog 2 (1960-1967)
  source 1..24: mol_type = other RNA
accatcgacgatatgagcaagctg

SEQ ID NO: 71371 - RNA, 24 nt, synthetic construct
  misc_feature 1..24: note = DNA damage-binding protein 1 (703-710)
  source 1..24: mol_type = other RNA
accatcgacgagattcagaagctg

SEQ ID NO: 71372 - RNA, 24 nt, synthetic construct
  misc_feature 1..24: note = Calmodulin (66-73)
  source 1..24: mol_type = other RNA
accatcgacttccccgagtttctg

SEQ ID NO: 71373 - RNA, 24 nt, synthetic construct
  misc_feature 1..24: note = Filamin-A (2133-2140)
  source 1..24: mol_type = other RNA
accatcgacggccccagcaaggtg

SEQ ID NO: 71374 - RNA, 27 nt, synthetic construct
  misc_feature 1..27: note = Coatomer subunit alpha (591-599)
  source 1..27: mol_type = other RNA
accatcgaccccacagagttcaagttt

SEQ ID NO: 71375 - RNA, 27 nt, synthetic construct
  misc_feature 1..27: note = Alpha-actinin-1 (506-514)
  source 1..27: mol_type = other RNA
accatcgaccagctgtacctcgagtat

SEQ ID NO: 71376 - RNA, 24 nt, synthetic construct
  misc_feature 1..24: note = HEAT repeat-containing protein 1 (38-45)
  source 1..24: mol_type = other RNA
accatcgacagagatacagccttc

SEQ ID NO: 71377 - RNA, 33 nt, synthetic construct
  misc_feature 1..33: note = Melanoma-associated antigen C2 (347-357)
  source 1..33: mol_type = other RNA
accatcgacacagccgatgacgctactgtgatg

SEQ ID NO: 71378 - RNA, 27 nt, synthetic construct
  misc_feature 1..27: note = Vascular endothelial growth factor receptor 2 (1076-1084)
  source 1..27: mol_type = other RNA
accatcttcgacagagtgtacacaatt

SEQ ID NO: 71379 - RNA, 27 nt, synthetic construct
  misc_feature 1..27: note = Tripartite motif-containing protein 2 (338-346)
  source 1..27: mol_type = other RNA
accatcattggccagcccatgagcgtg

SEQ ID NO: 71380 - RNA, 27 nt, synthetic construct
  misc_feature 1..27: note = Obscurin-like protein 1 (641-649)
  source 1..27: mol_type = other RNA
accatcattcagggcacatggttcctg

SEQ ID NO: 71381 - RNA, 36 nt, synthetic construct
  misc_feature 1..36: note = Lysosome-associated membraneoprotein 1 (247-258)
  source 1..36: mol_type = other RNA
accatcctgcccgacgccagagatcctgctttcaag

SEQ ID NO: 71382 - RNA, 27 nt, synthetic construct
  misc_feature 1..27: note = Eukaryotic translation initiation factor 3 subunit A (435-443)
  source 1..27: mol_type = other RNA
accatcctgagactccttcagcaagtg

SEQ ID NO: 71383 - RNA, 27 nt, synthetic construct
  misc_feature 1..27: note = Putative ATP-dependent RNA helicase DHX30 (700-708)
  source 1..27: mol_type = other RNA
accatcaacgacattgtgcacgtcgtt

SEQ ID NO: 71384 - RNA, 27 nt, synthetic construct
  misc_feature 1..27: note = Chloride intracellular channel protein 1 (198-206)
  source 1..27: mol_type = other RNA
accatccccgaggccttcagaggcgtg

SEQ ID NO: 71385 - RNA, 27 nt, synthetic construct
  misc_feature 1..27: note = Lysosomal-trafficking regulator (1800-1808)
  source 1..27: mol_type = other RNA
accatccagggcattctgcacgagata

SEQ ID NO: 71386 - RNA, 27 nt, synthetic construct
  misc_feature 1..27: note = Plexin-B3 (1547-1555)
  source 1..27: mol_type = other RNA
accatcacacaggtgaaggagaaagtc

SEQ ID NO: 71387 - RNA, 30 nt, synthetic construct
  misc_feature 1..30: note = Serine/threonine-protein kinase DCLK1 (231-240)
  source 1..30: mol_type = other RNA
accatcgtggacggccccctgtacacagtc

SEQ ID NO: 71388 - RNA, 27 nt, synthetic construct
  misc_feature 1..27: note = Phosphopantothenoylcysteine decarboxylase (109-117)
  source 1..27: mol_type = other RNA
accatcgtggacaaggtcaaagaggtt

SEQ ID NO: 71389 - RNA, 33 nt, synthetic construct
  misc_feature 1..33: note = Heat shock protein HSP 90-alpha (90-100)
  source 1..33: mol_type = other RNA
accatcgtggacacaggcattgggatgactaag

SEQ ID NO: 71390 - RNA, 27 nt, synthetic construct
  misc_feature 1..27: note = Mitotic checkpoint serine/threonine-protein kinase BUB1 beta (868-876)
  source 1..27: mol_type = other RNA
accatcgtggagatgctgcacaaggcc

SEQ ID NO: 71391 - RNA, 33 nt, synthetic construct
  misc_feature 1..33: note = Heat shock 70 kDa protein 13 (95-105)
  source 1..33: mol_type = other RNA
accatctacgacgccaagagattcattggcaaa

SEQ ID NO: 71392 - RNA, 27 nt, synthetic construct
  misc_feature 1..27: note = Probable dolichyl pyrophosphate Glc1Man9GlcNAc2 alpha-1,3-glucosyltransferase (438-446)
  source 1..27: mol_type = other RNA
accatctacagcatttcctctctgaag

SEQ ID NO: 71393 - RNA, 81 nt, synthetic construct
  misc_feature 1..81: note = Activating signal cointegrator 1 complex subunit 3 (112-138)
  source 1..81: mol_type = other RNA
accaaggccatcaaacagatgttcggcccctttcctagctcctctgctacagcagcctgcaacgcgactaatagaattata

SEQ ID NO: 71394 - RNA, 81 nt, synthetic construct
  misc_feature 1..81: note = Transmembrane protease serine 9 (436-462)
  source 1..81: mol_type = other RNA
accaaggccagcatgcccctggctcctacaatggcaccagccccggcggctccctccactgcctggcctacgtctccagag

SEQ ID NO: 71395 - RNA, 27 nt, synthetic construct
  misc_feature 1..27: note = Protein kinase C delta type (402-410)
  source 1..27: mol_type = other RNA
accctggccgctgagaaccccttcctc

SEQ ID NO: 71396 - RNA, 27 nt, synthetic construct
  misc_feature 1..27: note = Hexokinase-2 (389-397)
  source 1..27: mol_type = other RNA
accctggccgctgtgctccagagaatc

SEQ ID NO: 71397 - RNA, 27 nt, synthetic construct
  misc_feature 1..27: note = Protein SOGA1 (670-678)
  source 1..27: mol_type = other RNA
accctggccgacatgaaggtgacactc

SEQ ID NO: 71398 - RNA, 27 nt, synthetic construct
  misc_feature 1..27: note = Ethanolaminephosphotransferase 1 (355-363)
  source 1..27: mol_type = other RNA
accctggcccacatccattacggcgtg

SEQ ID NO: 71399 - RNA, 30 nt, synthetic construct
  misc_feature 1..30: note = WD repeat-containing protein 73 (144-153)
  source 1..30: mol_type = other RNA
accctggcccccggcgtgctccacggggct

SEQ ID NO: 71400 - RNA, 27 nt, synthetic construct
  misc_feature 1..27: note = Protein kinase C delta-binding protein (77-85)
  source 1..27: mol_type = other RNA
accctggcccagctccttgctaaggca

SEQ ID NO: 71401 - RNA, 33 nt, synthetic construct
  misc_feature 1..33: note = E3 ubiquitin-protein ligase UBR4 (345-355)
  source 1..33: mol_type = other RNA
accctggacgccgctatcagcaaggtgcaggtc

SEQ ID NO: 71402 - RNA, 27 nt, synthetic construct
  misc_feature 1..27: note = Melanoma-associated antigen C2 (140-148)
  source 1..27: mol_type = other RNA
accctggacgagaaggtggccgaactc

SEQ ID NO: 71403 - RNA, 27 nt, synthetic construct
  misc_feature 1..27: note = Lysine-specific demethylase 5C (1342-1350)
  source 1..27: mol_type = other RNA
accctggacgagaaccacagcatcccc

SEQ ID NO: 71404 - RNA, 30 nt, synthetic construct
  misc_feature 1..30: note = Calcium-dependent secretion activator 2 (651-660)
  source 1..30: mol_type = other RNA
accctggaccacagactcaacgatagctac

SEQ ID NO: 71405 - RNA, 24 nt, synthetic construct
  misc_feature 1..24: note = Rho guanine nucleotide exchange factor 2 (487-494)
  source 1..24: mol_type = other RNA
accctggacaagcccagcgtggtc

SEQ ID NO: 71406 - RNA, 27 nt, synthetic construct
  misc_feature 1..27: note = Alpha-mannosidase 2C1 (688-696)
  source 1..27: mol_type = other RNA
accctggacaacggcatcattagagtg

SEQ ID NO: 71407 - RNA, 27 nt, synthetic construct
  misc_feature 1..27: note = RING finger protein 150 (368-376)
  source 1..27: mol_type = other RNA
accctggaccccgccgtgagaacagtc

SEQ ID NO: 71408 - RNA, 27 nt, synthetic construct
  misc_feature 1..27: note = Proteinase-activated receptor 1 (37-45)
  source 1..27: mol_type = other RNA
accctggaccccagaagcttcctcctt

SEQ ID NO: 71409 - RNA, 24 nt, synthetic construct
  misc_feature 1..24: note = Eukaryotic initiation factor 4A-I (242-249)
  source 1..24: mol_type = other RNA
accctggagggcatcagacagttc

SEQ ID NO: 71410 - RNA, 45 nt, synthetic construct
  misc_feature 1..45: note = Kin of IRRE-like protein 1 (337-351)
  source 1..45: mol_type = other RNA
accctggagagatacacagtggaaaggactaacagcggctccggg

SEQ ID NO: 71411 - RNA, 27 nt, synthetic construct
  misc_feature 1..27: note = TBC1 domain family member 4 (1082-1090)
  source 1..27: mol_type = other RNA
accctgttcgccagccagttttccctc

SEQ ID NO: 71412 - RNA, 27 nt, synthetic construct
  misc_feature 1..27: note = Centrosomal protein C10orf90 (172-180)
  source 1..27: mol_type = other RNA
accctgttccaggccccccctgctctc

SEQ ID NO: 71413 - RNA, 33 nt, synthetic construct
  misc_feature 1..33: note = Ubiquitin carboxyl-terminal hydrolase 11 (92-102)
  source 1..33: mol_type = other RNA
accctgttccaggacgagatcaactggagactc

SEQ ID NO: 71414 - RNA, 27 nt, synthetic construct
  misc_feature 1..27: note = Transmembraneoprotein NMB (202-210)
  source 1..27: mol_type = other RNA
accctgggcccccagctcatggaggtg

SEQ ID NO: 71415 - RNA, 30 nt, synthetic construct
  misc_feature 1..30: note = Transmembrane channel-like protein 4 (331-340)
  source 1..30: mol_type = other RNA
accctgggccagcaagccagagtgtggctc

SEQ ID NO: 71416 - RNA, 24 nt, synthetic construct
  misc_feature 1..24: note = E3 ubiquitin-protein ligase TRIP12 (804-811)
  source 1..24: mol_type = other RNA
accctgggcagagtgtacacaatc

SEQ ID NO: 71417 - RNA, 24 nt, synthetic construct
  misc_feature 1..24: note = Ubiquitin-60S ribosomal protein L40 (71-78)
  source 1..24: mol_type = other RNA
accctgcacctcgtgcttagactg

SEQ ID NO: 71418 - RNA, 27 nt, synthetic construct
  misc_feature 1..27: note = Alpha-adducin (222-230)
  source 1..27: mol_type = other RNA
accctgcacagcgccatctacgctgca

SEQ ID NO: 71419 - RNA, 27 nt, synthetic construct
  misc_feature 1..27: note = Peptidyl-tRNA hydrolase 2, mitochondrial (125-133)
  source 1..27: mol_type = other RNA
accctgatcgccctccttgctcacgca

SEQ ID NO: 71420 - RNA, 27 nt, synthetic construct
  misc_feature 1..27: note = Nebulin (5609-5617)
  source 1..27: mol_type = other RNA
accctgatcgagagcgacctcaagtac

SEQ ID NO: 71421 - RNA, 33 nt, synthetic construct
  misc_feature 1..33: note = Ethanolamine-phosphate phospho-lyase (355-365)
  source 1..33: mol_type = other RNA
accctgatcggcgacattagagggataggactc

SEQ ID NO: 71422 - RNA, 27 nt, synthetic construct
  misc_feature 1..27: note = COP9 signalosome complex subunit 7a (29-37)
  source 1..27: mol_type = other RNA
accctgatccaccaggtgctcgaggcc

SEQ ID NO: 71423 - RNA, 27 nt, synthetic construct
  misc_feature 1..27: note = Translocating chain-associated membrane protein 1 (264-272)
  source 1..27: mol_type = other RNA
accctgatcctcagcgtgcttacagtc

SEQ ID NO: 71424 - RNA, 27 nt, synthetic construct
  misc_feature 1..27: note = Essential MCU regulator, mitochondrial (82-90)
  source 1..27: mol_type = other RNA
accctgatcagcaagaacttcgccgct

SEQ ID NO: 71425 - RNA, 42 nt, synthetic construct
  misc_feature 1..42: note = Ryanodine receptor 1 (3790-3803)
  source 1..42: mol_type = other RNA
accctgaagctcggcatcagcattcttaacgggggaaatgcc

SEQ ID NO: 71426 - RNA, 30 nt, synthetic construct
  misc_feature 1..30: note = General transcription factor IIH subunit 3 (90-99)
  source 1..30: mol_type = other RNA
accctgctcgccggcagccttgctaaggca

SEQ ID NO: 71427 - RNA, 36 nt, synthetic construct
  misc_feature 1..36: note = ETS translocation variant 5 (376-387)
  source 1..36: mol_type = other RNA
accctgctcgacgatcccgccaacgctcacttcatc

SEQ ID NO: 71428 - RNA, 27 nt, synthetic construct
  misc_feature 1..27: note = Protein kinase C delta-binding protein (27-35)
  source 1..27: mol_type = other RNA
accctgctcgagaagcttgccagcatg

SEQ ID NO: 71429 - RNA, 27 nt, synthetic construct
  misc_feature 1..27: note = Spermatogenesis-associated protein 20 (211-219)
  source 1..27: mol_type = other RNA
accctgctcgagaacagccagagagtg

SEQ ID NO: 71430 - RNA, 27 nt, synthetic construct
  misc_feature 1..27: note = E3 ubiquitin-protein ligase HERC2 (204-212)
  source 1..27: mol_type = other RNA
accctgctcgagagcatccagcacgtg

SEQ ID NO: 71431 - RNA, 27 nt, synthetic construct
  misc_feature 1..27: note = Putative WAS protein family homolog 3 (362-370)
  source 1..27: mol_type = other RNA
accctgctcgagagcatcagacaggcc

SEQ ID NO: 71432 - RNA, 27 nt, synthetic construct
  misc_feature 1..27: note = WD repeat-containing protein 26 (56-64)
  source 1..27: mol_type = other RNA
accctgctcggcatcattgtgagaatg

SEQ ID NO: 71433 - RNA, 78 nt, synthetic construct
  misc_feature 1..78: note = Vimentin (275-300)
  source 1..78: mol_type = other RNA
accctgctcatcaagacagtggagactagagacggccaggtcattaacgaaacgagccaacaccatgatgaccttgag

SEQ ID NO: 71434 - RNA, 27 nt, synthetic construct
  misc_feature 1..27: note = Maltase-glucoamylase (871-879)
  source 1..27: mol_type = other RNA
accctgctcccctacctttatacactg

SEQ ID NO: 71435 - RNA, 27 nt, synthetic construct
  misc_feature 1..27: note = Vacuolar protein-sorting-associated protein 25 (148-156)
  source 1..27: mol_type = other RNA
accctgctcagagcccttcaggctctg

SEQ ID NO: 71436 - RNA, 27 nt, synthetic construct
  misc_feature 1..27: note = Histone acetyltransferase KAT2B (310-318)
  source 1..27: mol_type = other RNA
accctgctcagaagcgtgttcacagtc

SEQ ID NO: 71437 - RNA, 33 nt, synthetic construct
  misc_feature 1..33: note = Importin-7 (679-689)
  source 1..33: mol_type = other RNA
accctgctcagcgacacaaagtaccttgagatg

SEQ ID NO: 71438 - RNA, 27 nt, synthetic construct
  misc_feature 1..27: note = Integrator complex subunit 2 (1086-1094)
  source 1..27: mol_type = other RNA
accctgctcacagtgcttactcaggcc

SEQ ID NO: 71439 - RNA, 33 nt, synthetic construct
  misc_feature 1..33: note = Rho GTPase-activating protein 7 (136-146)
  source 1..33: mol_type = other RNA
accctgatggacctcagcgagagacaggaagtg

SEQ ID NO: 71440 - RNA, 21 nt, synthetic construct
  misc_feature 1..21: note = Glutamine-fructose-6-phosphate aminotransferase (isomerizing) 1 (429-435)
  source 1..21: mol_type = other RNA
accctgatgggcctcagatac

SEQ ID NO: 71441 - RNA, 27 nt, synthetic construct
  misc_feature 1..27: note = Ubiquitin conjugation factor E4 B (1239-1247)
  source 1..27: mol_type = other RNA
accctgatgacagaccccgtgagactc

SEQ ID NO: 71442 - RNA, 27 nt, synthetic construct
  misc_feature 1..27: note = Nuclear factor related to kappa-B-binding protein (308-316)
  source 1..27: mol_type = other RNA
accctgaacgacatcatgacaagagtg

SEQ ID NO: 71443 - RNA, 27 nt, synthetic construct
  misc_feature 1..27: note = EMILIN-1 (236-244)
  source 1..27: mol_type = other RNA
accctgaacgagatccagcaccaactc

SEQ ID NO: 71444 - RNA, 27 nt, synthetic construct
  misc_feature 1..27: note = Kelch-like protein 21 (467-475)
  source 1..27: mol_type = other RNA
accctgaacggcctcatgtacttcgtg

SEQ ID NO: 71445 - RNA, 33 nt, synthetic construct
  misc_feature 1..33: note = Nuclear pore complex protein Nup214 (188-198)
  source 1..33: mol_type = other RNA
accctgcccagcacagtggccgtcacttccgtt

SEQ ID NO: 71446 - RNA, 27 nt, synthetic construct
  misc_feature 1..27: note = Nuclear mitotic apparatus protein 1 (151-159)
  source 1..27: mol_type = other RNA
accctgcaggaggccctcgctcacgca

SEQ ID NO: 71447 - RNA, 27 nt, synthetic construct
  misc_feature 1..27: note = DENN domain-containing protein 5A (930-938)
  source 1..27: mol_type = other RNA
accctgcaggagttcaacatcacactc

SEQ ID NO: 71448 - RNA, 27 nt, synthetic construct
  misc_feature 1..27: note = Uveal autoantigen with coiled-coil domains and ankyrin repeats (714-722)
  source 1..27: mol_type = other RNA
accctgcagaaggagatcgaaaaagtg

SEQ ID NO: 71449 - RNA, 27 nt, synthetic construct
  misc_feature 1..27: note = Glycogen phosphorylase, liver form (95-103)
  source 1..27: mol_type = other RNA
accctgcagaacacaatgatcaatctc

SEQ ID NO: 71450 - RNA, 30 nt, synthetic construct
  misc_feature 1..30: note = Hemicentin-1 (4435-4444)
  source 1..30: mol_type = other RNA
accctgcagagcccccctatcattacactc

SEQ ID NO: 71451 - RNA, 27 nt, synthetic construct
  misc_feature 1..27: note = Interleukin-6 receptor subunit beta (3-11)
  source 1..27: mol_type = other RNA
accctgcagacatggctcgtgcaagcc

SEQ ID NO: 71452 - RNA, 27 nt, synthetic construct
  misc_feature 1..27: note = Alpha-actinin-4 (226-234)
  source 1..27: mol_type = other RNA
accctgagcgacatcaaggccctcatt

SEQ ID NO: 71453 - RNA, 27 nt, synthetic construct
  misc_feature 1..27: note = Nucleolar pre-ribosomal-associated protein 1 (546-554)
  source 1..27: mol_type = other RNA
accctgagcgaggacatgatcctcctt

SEQ ID NO: 71454 - RNA, 27 nt, synthetic construct
  misc_feature 1..27: note = Serine/threonine-protein kinase ULK2 (102-110)
  source 1..27: mol_type = other RNA
accctgagcgaggacacaatcagagtg

SEQ ID NO: 71455 - RNA, 27 nt, synthetic construct
  misc_feature 1..27: note = Alpha-actinin-1 (426-434)
  source 1..27: mol_type = other RNA
accctgagcgagatcaaggccctcctt

SEQ ID NO: 71456 - RNA, 33 nt, synthetic construct; identical to SEQ ID NO: 47229
  misc_feature 1..33: note = Ribosomal protein S6 kinase beta-1 (376-386)
  source 1..33: mol_type = other RNA

SEQ ID NO: 71457 - RNA, 33 nt, synthetic construct
  misc_feature 1..33: note = TRPM8 channel-associated factor 1 (309-319)
  source 1..33: mol_type = other RNA
accctgagcggcctccttgccgtggggggaatc

SEQ ID NO: 71458 - RNA, 27 nt, synthetic construct
  misc_feature 1..27: note = RRP12-like protein (274-282)
  source 1..27: mol_type = other RNA
accctgagccacgtgctcgtcacagcc

SEQ ID NO: 71459 - RNA, 27 nt, synthetic construct
  misc_feature 1..27: note = CLIP-associating protein 1 (164-172)
  source 1..27: mol_type = other RNA
accctgagcaagatcgtgccccacatt

SEQ ID NO: 71460 - RNA, 30 nt, synthetic construct
  misc_feature 1..30: note = Biorientation of chromosomes in cell division protein 1-like 1 (282-291)
  source 1..30: mol_type = other RNA
accctgagccccgtgaaggccggccctgct

SEQ ID NO: 71461 - RNA, 42 nt, synthetic construct
  misc_feature 1..42: note = Beta-2-microglobulin (85-98)
  source 1..42: mol_type = other RNA
accctgagccagcccaagatcgtgaaatgggacagagatatg

SEQ ID NO: 71462 - RNA, 27 nt, synthetic construct
  misc_feature 1..27: note = Laminin subunit gamma-1 (1109-1117)
  source 1..27: mol_type = other RNA
accctgagctcccagatctctagactc

SEQ ID NO: 71463 - RNA, 81 nt, synthetic construct
  misc_feature 1..81: note = Heat shock cognate 71 kDa protein (273-299)
  source 1..81: mol_type = other RNA
accctgagctcctctacacaggcctcaatcgagattgacagtctctacgaaggcatagatttctatactagcatcacgaga

SEQ ID NO: 71464 - RNA, 81 nt, synthetic construct
  misc_feature 1..81: note = Heat shock 70 kDa protein 1B (273-299)
  source 1..81: mol_type = other RNA
accctgagctcctctacacaggcctcactcgagatcgacagtcttttcgaaggcattgatttttacactagcataacgaga

SEQ ID NO: 71465 - RNA, 27 nt, synthetic construct
  misc_feature 1..27: note = MAX gene-associated protein (1410-1418)
  source 1..27: mol_type = other RNA
accctgagcacagtgatctccaaggtc

SEQ ID NO: 71466 - RNA, 33 nt, synthetic construct
  misc_feature 1..33: note = Semaphorin-4C (57-67)
  source 1..33: mol_type = other RNA
accctgacagagcccactggcctcctttacgtg

SEQ ID NO: 71467 - RNA, 27 nt, synthetic construct
  misc_feature 1..27: note = Ras GTPase-activating protein 3 (509-517)
  source 1..27: mol_type = other RNA
accctgacactcatcagcaagactgtg

SEQ ID NO: 71468 - RNA, 30 nt, synthetic construct
  misc_feature 1..30: note = 26S proteasome non-ATPase regulatory subunit 12 (319-328)
  source 1..30: mol_type = other RNA
accctggtggaggactacggcatggaactc

SEQ ID NO: 71469 - RNA, 27 nt, synthetic construct
  misc_feature 1..27: note = Aggrecan core protein (1921-1929)
  source 1..27: mol_type = other RNA
accctggtggagagcgtcacacaggcc

SEQ ID NO: 71470 - RNA, 27 nt, synthetic construct
  misc_feature 1..27: note = WD repeat-containing protein 5B (36-44)
  source 1..27: mol_type = other RNA
accctggtgggccacacagaggccgtc

SEQ ID NO: 71471 - RNA, 27 nt, synthetic construct
  misc_feature 1..27: note = Transcription factor SOX-9 (87-95)
  source 1..27: mol_type = other RNA
accctggtgcccatgcctgtcagagtt

SEQ ID NO: 71472 - RNA, 27 nt, synthetic construct
  misc_feature 1..27: note = Eukaryotic translation initiation factor 4 gamma 1 (1438-1446)
  source 1..27: mol_type = other RNA
accctggtgagagccctcatgacagct

SEQ ID NO: 71473 - RNA, 27 nt, synthetic construct
  misc_feature 1..27: note = Cyclin-dependent kinase 3 (165-173)
  source 1..27: mol_type = other RNA
accctgtggtacagagcccccgagatc

SEQ ID NO: 71474 - RNA, 27 nt, synthetic construct
  misc_feature 1..27: note = Cyclin-dependent kinase 11B (347-355)
  source 1..27: mol_type = other RNA
accctgtggtacagagcccccgagctc

SEQ ID NO: 71475 - RNA, 27 nt, synthetic construct
  misc_feature 1..27: note = Cyclin-dependent kinase 4 (103-111)
  source 1..27: mol_type = other RNA
accctgtggtacagagcccccgaggtg

SEQ ID NO: 71476 - RNA, 33 nt, synthetic construct
  misc_feature 1..33: note = Cyclin-dependent kinase 4 (103-113)
  source 1..33: mol_type = other RNA
accctgtggtacagagcccccgaggtgctcctt

SEQ ID NO: 71477 - RNA, 27 nt, synthetic construct
  misc_feature 1..27: note = Cyclin-dependent kinase 9 (191-199)
  source 1..27: mol_type = other RNA
accctgtggtacagaccccctgagctc

SEQ ID NO: 71478 - RNA, 27 nt, synthetic construct
  misc_feature 1..27: note = Bifunctional lysine-specific demethylase and histidyl-hydroxylase NO66 (625-633)
  source 1..27: mol_type = other RNA
accctgtacgacaagggcctccttctg

SEQ ID NO: 71479 - RNA, 27 nt, synthetic construct
  misc_feature 1..27: note = Ubiquitin-conjugating enzyme E2 G1 (48-56)
  source 1..27: mol_type = other RNA
accctgtacgagggcggggtgttcaag

SEQ ID NO: 71480 - RNA, 27 nt, synthetic construct
  misc_feature 1..27: note = Vacuolar protein sorting-associated protein 13B (1255-1263)
  source 1..27: mol_type = other RNA
accatggccggccccgtgcctacaagc

SEQ ID NO: 71481 - RNA, 24 nt, synthetic construct
  misc_feature 1..24: note = Insulin receptor substrate 2 (544-551)
  source 1..24: mol_type = other RNA
accatggacagacccctgagccac

SEQ ID NO: 71482 - RNA, 27 nt, synthetic construct
  misc_feature 1..27: note = Polyadenylate-binding protein 1 (489-497)
  source 1..27: mol_type = other RNA
accatgggccccagacctgccgctgca

SEQ ID NO: 71483 - RNA, 30 nt, synthetic construct
  misc_feature 1..30: note = ER membrane protein complex subunit 1 (975-984)
  source 1..30: mol_type = other RNA
accatgatcacaaagagactggcccaggtg

SEQ ID NO: 71484 - RNA, 24 nt, synthetic construct
  misc_feature 1..24: note = Chondroitin sulfate proteoglycan 4 (21-28)
  source 1..24: mol_type = other RNA
accatgctggccagactcgctagc

SEQ ID NO: 71485 - RNA, 27 nt, synthetic construct
  misc_feature 1..27: note = Protein wntless homolog (257-265)
  source 1..27: mol_type = other RNA
accatgatgagcagaccccctgtgctg

SEQ ID NO: 71486 - RNA, 48 nt, synthetic construct
  misc_feature 1..48: note = Cytoplasmic polyadenylation element-binding protein 2 (92-107)
  source 1..48: mol_type = other RNA
accatgcaggacgagctgctccttggcctgacacaacagcccgccaga

SEQ ID NO: 71487 - RNA, 27 nt, synthetic construct
  misc_feature 1..27: note = Gamma-aminobutyric acid receptor subunit beta-2 (6-14)
  source 1..27: mol_type = other RNA
accatgacaactatcaacacgcacctg

SEQ ID NO: 71488 - RNA, 27 nt, synthetic construct
  misc_feature 1..27: note = Eukaryotic translation initiation factor 4 gamma 1 (249-257)
  source 1..27: mol_type = other RNA
accatgacaactatccagatgagcgtg

SEQ ID NO: 71489 - RNA, 21 nt, synthetic construct
  misc_feature 1..21: note = Cyclin-dependent kinase 13 (257-263)
  source 1..21: mol_type = other RNA
accaacaaggtgatcacactg

SEQ ID NO: 71490 - RNA, 33 nt, synthetic construct
  misc_feature 1..33: note = Ankyrin-3 (871-881)
  source 1..33: mol_type = other RNA
accaacgtgagcgccagattctggctggctgac

SEQ ID NO: 71491 - RNA, 27 nt, synthetic construct
  misc_feature 1..27: note = Guanine nucleotide exchange factor for Rab-3A (97-105)
  source 1..27: mol_type = other RNA
acccccgccagccctaacagagagctg

SEQ ID NO: 71492 - RNA, 39 nt, synthetic construct
  misc_feature 1..39: note = Sterol regulatory element-binding protein 1 (959-971)
  source 1..39: mol_type = other RNA
acccccgccagctcctctatcgacaaggctgtgcagctg

SEQ ID NO: 71493 - RNA, 48 nt, synthetic construct
  misc_feature 1..48: note = Clathrin heavy chain 1 (394-409)
  source 1..48: mol_type = other RNA
acccccgacacaatcagaaggttccagagcgtgcctgcccaaccaggc

SEQ ID NO: 71494 - RNA, 21 nt, synthetic construct
  misc_feature 1..21: note = TRAF2 and NCK-interacting protein kinase (190-196)
  source 1..21: mol_type = other RNA
acccccgagatcagaaagtac

SEQ ID NO: 71495 - RNA, 24 nt, synthetic construct
  misc_feature 1..24: note = Importin-7 (508-515)
  source 1..24: mol_type = other RNA
acccccttcatcagacctgtgatg

SEQ ID NO: 71496 - RNA, 27 nt, synthetic construct
  misc_feature 1..27: note = (Pyruvate dehydrogenase (acetyl-transferring))-phosphatase 1, mitochondrial (83-91)
  source 1..27: mol_type = other RNA
accccccaccctgcctacgctacattc

SEQ ID NO: 71497 - RNA, 39 nt, synthetic construct
  misc_feature 1..39: note = Zinc finger protein 354B (90-102)
  source 1..39: mol_type = other RNA
acccccaagatgacaaaaagcactcagacgcaagactcc

SEQ ID NO: 71498 - RNA, 24 nt, synthetic construct
  misc_feature 1..24: note = ATP-dependent RNA helicase DDX51 (308-315)
  source 1..24: mol_type = other RNA
acccccctgagagtgagcctcgtc

SEQ ID NO: 71499 - RNA, 30 nt, synthetic construct
  misc_feature 1..30: note = Homeobox protein TGIF1 (249-258)
  source 1..30: mol_type = other RNA
accccccctccaacaccgcccgacctgaac

SEQ ID NO: 71500 - RNA, 63 nt, synthetic construct
  misc_feature 1..63: note = Annexin A2 (19-39)
  source 1..63: mol_type = other RNA
accccccctagcgcctacggctccgtgaaggcttatacaaacttcgacgcagagagagatgcc

SEQ ID NO: 71501 - RNA, 33 nt, synthetic construct
  misc_feature 1..33: note = Nodal modulator 1 (365-375)
  source 1..33: mol_type = other RNA
accccccagctggccgacatcattgctacaggc

SEQ ID NO: 71502 - RNA, 27 nt, synthetic construct
  misc_feature 1..27: note = Glycogen phosphorylase, brain form (48-56)
  source 1..27: mol_type = other RNA
acccccagagactacttctttgccctg

SEQ ID NO: 71503 - RNA, 27 nt, synthetic construct
  misc_feature 1..27: note = Sialidase-1 (85-93)
  source 1..27: mol_type = other RNA
acccccagaggcacactgctcgccttc

SEQ ID NO: 71504 - RNA, 27 nt, synthetic construct
  misc_feature 1..27: note = DNA-directed RNA polymerase III subunit RPC1 (167-175)
  source 1..27: mol_type = other RNA
acccccagaaacggcgagcctctgatc

SEQ ID NO: 71505 - RNA, 27 nt, synthetic construct
  misc_feature 1..27: note = E3 ubiquitin-protein ligase RNF169 (410-418)
  source 1..27: mol_type = other RNA
acccccagaaacctgaataggagcctc

SEQ ID NO: 71506 - RNA, 27 nt, synthetic construct
  misc_feature 1..27: note = Galactose-3-O-sulfotransferase 4 (2-10)
  source 1..27: mol_type = other RNA
acccccagaagccctacatccgccttc

SEQ ID NO: 71507 - RNA, 30 nt, synthetic construct
  misc_feature 1..30: note = Rho GTPase-activating protein 7 (170-179)
  source 1..30: mol_type = other RNA
acccccagaacaaacagcgtgatctccgtc

SEQ ID NO: 71508 - RNA, 87 nt, synthetic construct
  misc_feature 1..87: note = Beta-2-microglobulin (70-98)
  source 1..87: mol_type = other RNA
acccccacagagaaggacgaatacgcctgcagagtgaaccacgtcactctgagccagcctaaaatcgttaagtgggatagggacatg

SEQ ID NO: 71509 - RNA, 63 nt, synthetic construct
  misc_feature 1..63: note = HLA class I histocompatibility antigen, A-1 alpha chain (320-340)
  source 1..63: mol_type = other RNA
acccaggccgctagctccgactctgcacaaggctcagatgtgagtctgacagcctgcaaggtc

SEQ ID NO: 71510 - RNA, 33 nt, synthetic construct
  misc_feature 1..33: note = NADH dehydrogenase (ubiquinone) iron-sulfur protein 2, mitochondrial (453-463)
  source 1..33: mol_type = other RNA
acccaggacatcgtgttcggcgaggtcgataga

SEQ ID NO: 71511 - RNA, 30 nt, synthetic construct; identical to SEQ ID NO: 47284
  misc_feature 1..30: note = Myosin-IIIa (288-297)
  source 1..30: mol_type = other RNA

SEQ ID NO: 71512 - RNA, 42 nt, synthetic construct
  misc_feature 1..42: note = Basement membrane-specific heparan sulfate proteoglycan core protein (2340-2353)
  source 1..42: mol_type = other RNA
acccagcccatcagaattgagcctagctcctctcaagtggcc

SEQ ID NO: 71513 - RNA, 45 nt, synthetic construct
  misc_feature 1..45: note = Basement membrane-specific heparan sulfate proteoglycan core protein (2340-2354)
  source 1..45: mol_type = other RNA
acccagcccatcagaattgagcctagctcctctcaagtggccgaa

SEQ ID NO: 71514 - RNA, 33 nt, synthetic construct
  misc_feature 1..33: note = Regulator of nonsense transcripts 1 (44-54)
  source 1..33: mol_type = other RNA
acccagacaccccctggcgggccaggaggtccg

SEQ ID NO: 71515 - RNA, 27 nt, synthetic construct
  misc_feature 1..27: note = Cytoplasmic FMR1-interacting protein 1 (680-688)
  source 1..27: mol_type = other RNA
accagattcaacaagcagtttctgtac

SEQ ID NO: 71516 - RNA, 30 nt, synthetic construct
  misc_feature 1..30: note = Alpha-1-syntrophin (178-187)
  source 1..30: mol_type = other RNA
accagacacggcgtggacacacatctgttc

SEQ ID NO: 71517 - RNA, 30 nt, synthetic construct
  misc_feature 1..30: note = Peroxisomal membrane protein PMP34 (90-99)
  source 1..30: mol_type = other RNA
accagactgaagctccagggcgccaaattc

SEQ ID NO: 71518 - RNA, 27 nt, synthetic construct
  misc_feature 1..27: note = Maltase-glucoamylase (1080-1088)
  source 1..27: mol_type = other RNA
accagactgcccagccagtacatctat

SEQ ID NO: 71519 - RNA, 27 nt, synthetic construct
  misc_feature 1..27: note = Protein disulfide-isomerase A5 (45-53)
  source 1..27: mol_type = other RNA
accagaaacaatgtgctggtcctctac

SEQ ID NO: 71520 - RNA, 30 nt, synthetic construct
  misc_feature 1..30: note = HLA class I histocompatibility antigen, Cw-7 alpha chain (257-266)
  source 1..30: mol_type = other RNA
accagacccgccggcgacgggacattccag

SEQ ID NO: 71521 - RNA, 30 nt, synthetic construct
  misc_feature 1..30: note = L-dopachrome tautomerase (68-77)
  source 1..30: mol_type = other RNA
accagaccctggagcggcccttacatcctg

SEQ ID NO: 71522 - RNA, 27 nt, synthetic construct
  misc_feature 1..27: note = Glycerol-3-phosphate acyltransferase 3 (128-136)
  source 1..27: mol_type = other RNA
accagaacaaacgtgaatttccagtac

SEQ ID NO: 71523 - RNA, 27 nt, synthetic construct
  misc_feature 1..27: note = Multiple PDZ domain protein (66-74)
  source 1..27: mol_type = other RNA
accagcgccacatccaacatcgagtac

SEQ ID NO: 71524 - RNA, 30 nt, synthetic construct
  misc_feature 1..30: note = Protein prune homolog 2 (1091-1100)
  source 1..30: mol_type = other RNA
accagcgacggcatgaacttcacaaagtac

SEQ ID NO: 71525 - RNA, 27 nt, synthetic construct
  misc_feature 1..27: note = Bifunctional glutamate/proline-tRNA ligase (269-277)
  source 1..27: mol_type = other RNA
accagcgaccacttcgagacaatcatg

SEQ ID NO: 71526 - RNA, 27 nt, synthetic construct
  misc_feature 1..27: note = ATP-dependent RNA helicase DDX50 (268-276)
  source 1..27: mol_type = other RNA
accagcgacaagggcttcgtgacaatg

SEQ ID NO: 71527 - RNA, 24 nt, synthetic construct
  misc_feature 1..24: note = Ubinuclein-2 (527-534)
  source 1..24: mol_type = other RNA
accagcgacaagcccctgatgtac

SEQ ID NO: 71528 - RNA, 30 nt, synthetic construct
  misc_feature 1..30: note = Beta-1-syntrophin (132-141)
  source 1..30: mol_type = other RNA
accagcgaccccccttcctctcagtcattc

SEQ ID NO: 71529 - RNA, 24 nt, synthetic construct
  misc_feature 1..24: note = Polymerase delta-interacting protein 3 (356-363)
  source 1..24: mol_type = other RNA
accagcgaccagcccatcctgctc

SEQ ID NO: 71530 - RNA, 27 nt, synthetic construct
  misc_feature 1..27: note = HEAT repeat-containing protein 5A (1033-1041)
  source 1..27: mol_type = other RNA
accagcgagaacgccaagctgcactac

SEQ ID NO: 71531 - RNA, 30 nt, synthetic construct
  misc_feature 1..30: note = HEAT repeat-containing protein 5A (1033-1042)
  source 1..30: mol_type = other RNA
accagcgagaacgccaagctgcactactat

SEQ ID NO: 71532 - RNA, 24 nt, synthetic construct
  misc_feature 1..24: note = Nuclear pore complex protein Nup205 (1076-1083)
  source 1..24: mol_type = other RNA
accagcggccccacaatgagatac

SEQ ID NO: 71533 - RNA, 30 nt, synthetic construct; identical to SEQ ID NO: 47306
  misc_feature 1..30: note = GREB1-like protein (1129-1138)
  source 1..30: mol_type = other RNA

SEQ ID NO: 71534 - RNA, 27 nt, synthetic construct
  misc_feature 1..27: note = E3 ubiquitin-protein ligase UBR4 (516-524)
  source 1..27: mol_type = other RNA
accagcatccagagaattcaaaggctg

SEQ ID NO: 71535 - RNA, 27 nt, synthetic construct
  misc_feature 1..27: note Dolichyl-diphosphooligosaccharide-proteinosyltransferase subunit 1 (228-236)
  source 1..27: mol_type = other RNA
accagcatgacaagagtgatcgaggtc

SEQ ID NO: 71536 - RNA, 39 nt, synthetic construct
  misc_feature 1..39: note = Treacle protein (596-608)
  source 1..39: mol_type = other RNA
accagccccgccggctcctctcctgctgtggcaggggga

SEQ ID NO: 71537 - RNA, 24 nt, synthetic construct
  misc_feature 1..24: note = Chromodomain Y-like protein (94-101)
  source 1..24: mol_type = other RNA
accagccccaaggccctggtgatc

SEQ ID NO: 71538 - RNA, 27 nt, synthetic construct
  misc_feature 1..27: note = Mitogen-activated protein kinase kinase kinase 14 (448-456)
  source 1..27: mol_type = other RNA
accagccccagaatcgtgcctctgtac

SEQ ID NO: 71539 - RNA, 27 nt, synthetic construct
  misc_feature 1..27: note = Interferon alpha-inducible protein 27, mitochondrial (12-20)
  source 1..27: mol_type = other RNA
accagcgtggccaaggtcgttagagtg

SEQ ID NO: 71540 - RNA, 33 nt, synthetic construct
  misc_feature 1..33: note = RNA binding protein fox-1 homolog 2 (243-253)
  source 1..33: mol_type = other RNA
accacagccgctgcattcagaggcgcccacctg

SEQ ID NO: 71541 - RNA, 30 nt, synthetic construct
  misc_feature 1..30: note = Transcriptional regulator ATRX (461-470)
  source 1..30: mol_type = other RNA
accacagccaaggtgactaaagagctgtac

SEQ ID NO: 71542 - RNA, 48 nt, synthetic construct
  misc_feature 1..48: note = ATP-citrate synthase (677-692)
  source 1..48: mol_type = other RNA
accacagacggcgtgtacgagggggtcgccatcggaggtgatagatat

SEQ ID NO: 71543 - RNA, 27 nt, synthetic construct
  misc_feature 1..27: note = Hemicentin-1 (97-105)
  source 1..27: mol_type = other RNA
accacagaccccaagaaattccagtac

SEQ ID NO: 71544 - RNA, 21 nt, synthetic construct
  misc_feature 1..21: note = Elongation factor 1-alpha 1 (23-29)
  source 1..21: mol_type = other RNA
accacaggccacctgatctac

SEQ ID NO: 71545 - RNA, 27 nt, synthetic construct
  misc_feature 1..27: note = Signal-induced proliferation-associated 1-like protein 3 (1102-1110)
  source 1..27: mol_type = other RNA
accacacccggccacgcccagagcctg

SEQ ID NO: 71546 - RNA, 27 nt, synthetic construct
  misc_feature 1..27: note = Disabled homolog 2-interacting protein (945-953)
  source 1..27: mol_type = other RNA
accacacagaagctggtgctcgagtac

SEQ ID NO: 71547 - RNA, 27 nt, synthetic construct
  misc_feature 1..27: note = Basement membrane-specific heparan sulfate proteoglycan core protein (3563-3571)
  source 1..27: mol_type = other RNA
accacacagagccacgtgctgctcctt

SEQ ID NO: 71548 - RNA, 27 nt, synthetic construct
  misc_feature 1..27: note = Importin-4 (577-585)
  source 1..27: mol_type = other RNA
accgtggccgagaagagcttcgctgtc

SEQ ID NO: 71549 - RNA, 27 nt, synthetic construct
  misc_feature 1..27: note = Nicotinamide phosphoribosyltransferase (220-228)
  source 1..27: mol_type = other RNA
accgtggccggcctggctctcatcaag

SEQ ID NO: 71550 - RNA, 27 nt, synthetic construct
  misc_feature 1..27: note = Keratin, type I cytoskeletal 18 (86-94)
  source 1..27: mol_type = other RNA
accgtggacaacgccagaatcgtcctg

SEQ ID NO: 71551 - RNA, 24 nt, synthetic construct
  misc_feature 1..24: note = Signal-induced proliferation-associated 1-like protein 2 (821-828)
  source 1..24: mol_type = other RNA
accgtggacacaagcgtcaagttc

SEQ ID NO: 71552 - RNA, 63 nt, synthetic construct
  misc_feature 1..63: note = Vimentin (446-466)
  source 1..63: mol_type = other RNA
accgtggagacaagagacggccaggtcatcaacgaaactagccaacaccatgatgacctggag

SEQ ID NO: 71553 - RNA, 27 nt, synthetic construct
  misc_feature 1..27: note = Runt-related transcription factor 1 (36-44)
  source 1..27: mol_type = other RNA
accgtgttcacaaacccccctcaggtc

SEQ ID NO: 71554 - RNA, 27 nt, synthetic construct
  misc_feature 1..27: note = Proto-oncogene tyrosine-protein kinase receptor Ret (350-358)
  source 1..27: mol_type = other RNA
accgtgcacgactacagactggtcctc

SEQ ID NO: 71555 - RNA, 48 nt, synthetic construct
  misc_feature 1..48: note = Endoplasmin (688-703)
  source 1..48: mol_type = other RNA
accgtgctggacctcgccgtcgttcttttcgagacagctactctgaga

SEQ ID NO: 71556 - RNA, 27 nt, synthetic construct
  misc_feature 1..27: note = Transmembrane protein 9 (177-185)
  source 1..27: mol_type = other RNA
accgtgctggagagagtcgaaggcgcc

SEQ ID NO: 71557 - RNA, 30 nt, synthetic construct
  misc_feature 1..30: note = Cytoskeleton-associated protein 5 (947-956)
  source 1..30: mol_type = other RNA
accgtgctgggcgacagcaagaacaatgtc

SEQ ID NO: 71558 - RNA, 30 nt, synthetic construct
  misc_feature 1..30: note = DNA annealing helicase and endonuclease ZRANB3 (73-82)
  source 1..30: mol_type = other RNA
accgtgctgggctacgggctccttacagcc

SEQ ID NO: 71559 - RNA, 27 nt, synthetic construct
  misc_feature 1..27: note = HEAT repeat-containing protein 1 (1553-1561)
  source 1..27: mol_type = other RNA
accgtgctgggctacatcagcgccgtc

SEQ ID NO: 71560 - RNA, 45 nt, synthetic construct
  misc_feature 1..45: note = Actin, cytoplasmic 2 (36-50)
  source 1..45: mol_type = other RNA
accgtgctgagcggcgggacaactatgtaccccggaatcgccgac

SEQ ID NO: 71561 - RNA, 27 nt, synthetic construct
  misc_feature 1..27: note = Neuron navigator 2 (1903-1911)
  source 1..27: mol_type = other RNA
accgtgatgcagctgagaaacgagctc

SEQ ID NO: 71562 - RNA, 27 nt, synthetic construct
  misc_feature 1..27: note = Ryanodine receptor 2 (3867-3875)
  source 1..27: mol_type = other RNA
accgtgaacatcattataagcacagtc

SEQ ID NO: 71563 - RNA, 90 nt, synthetic construct
  misc_feature 1..90: note = Fructose-bisphosphate aldolase A (314-343)
  source 1..90: mol_type = other RNA
accgtgccccctgccgtcacaggcatcactttcctgagcgggggacagtccgaggaagaggcttctattaacctcaatgcaataaacaag

SEQ ID NO: 71564 - RNA, 27 nt, synthetic construct
  misc_feature 1..27: note = Mucin-16 (11203-11211)
  source 1..27: mol_type = other RNA
accgtgcagggcctggtcacaagcctc

SEQ ID NO: 71565 - RNA, 84 nt, synthetic construct
  misc_feature 1..84: note = Nucleophosmin (46-73)
  source 1..84: mol_type = other RNA
accgtgagcctgggcgccggggctaaggacgagctccacatcgtcgaagcagaggccatgaactacgaaggatcccccattaaa

SEQ ID NO: 71566 - RNA, 33 nt, synthetic construct
  misc_feature 1..33: note = Complement C4-A (408-418)
  source 1..33: mol_type = other RNA
accgtgagctcccccggctctgtccctgaggtt

SEQ ID NO: 71567 - RNA, 27 nt, synthetic construct
  misc_feature 1..27: note = Exportin-6 (585-593)
  source 1..27: mol_type = other RNA
accgtggtcgagagactggttaaggtg

SEQ ID NO: 71568 - RNA, 33 nt, synthetic construct
  misc_feature 1..33: note = U4/U6 small nuclear ribonucleoprotein Prp3 (29-39)
  source 1..33: mol_type = other RNA
accgtggtcacagccgctctgaactgcgttggc

SEQ ID NO: 71569 - RNA, 30 nt, synthetic construct
  misc_feature 1..30: note = Multidrug resistance-associated protein 7 (941-950)
  source 1..30: mol_type = other RNA
accgtgtacgccacaatcgctggcgtcaac

SEQ ID NO: 71570 - RNA, 30 nt, synthetic construct
  misc_feature 1..30: note = MMS19 nucleotide excision repair protein homolog (150-159)
  source 1..30: mol_type = other RNA
accgtgtacaacatcattacaaatttcatg

SEQ ID NO: 71571 - RNA, 27 nt, synthetic construct
  misc_feature 1..27: note = RNA-binding protein 26 (673-681)
  source 1..27: mol_type = other RNA
accgtgtacaaccccgccgctctgaag

SEQ ID NO: 71572 - RNA, 42 nt, synthetic construct
  misc_feature 1..42: note = Protein SZT2 (605-618)
  source 1..42: mol_type = other RNA
acctggggcctgccccacgcccctccaagcccggggcccctc

SEQ ID NO: 71573 - RNA, 30 nt, synthetic construct
  misc_feature 1..30: note = Tyrosine-protein phosphatase non-receptor type substrate 1 (472-481)
  source 1..30: mol_type = other RNA
acctacgccgacctggatatggtgcacctc

SEQ ID NO: 71574 - RNA, 33 nt, synthetic construct
  misc_feature 1..33: note = Serine/threonine-protein kinase SMG1 (743-753)
  source 1..33: mol_type = other RNA
acctacgcccccctgttcagcctcccttccttt

SEQ ID NO: 71575 - RNA, 27 nt, synthetic construct
  misc_feature 1..27: note = Muskelin (680-688)
  source 1..27: mol_type = other RNA
acctacgcccagagaacacaactgttc

SEQ ID NO: 71576 - RNA, 24 nt, synthetic construct
  misc_feature 1..24: note = Low-density lipoprotein receptor-related protein 2 (585-592)
  source 1..24: mol_type = other RNA
acctacgacggcatccagagaaag

SEQ ID NO: 71577 - RNA, 27 nt, synthetic construct
  misc_feature 1..27: note = Diamine acetyltransferase 1 (80-88)
  source 1..27: mol_type = other RNA
acctacgacccctggatcggcaagctg

SEQ ID NO: 71578 - RNA, 24 nt, synthetic construct
  misc_feature 1..24: note = L-dopachrome tautomerase (302-309)
  source 1..24: mol_type = other RNA
acctacgagggcctgctcagaagg

SEQ ID NO: 71579 - RNA, 27 nt, synthetic construct
  misc_feature 1..27: note = GPI-anchor transamidase (386-394)
  source 1..27: mol_type = other RNA
acctacggcatcaagcacatgaaattc

SEQ ID NO: 71580 - RNA, 27 nt, synthetic construct
  misc_feature 1..27: note = Ral GTPase-activating protein subunit beta (252-260)
  source 1..27: mol_type = other RNA
acctacggccccagcttccctgccttt

SEQ ID NO: 71581 - RNA, 27 nt, synthetic construct
  misc_feature 1..27: note = Talin-1 (307-315)
  source 1..27: mol_type = other RNA
acctacggcgtgagcttctttctggtc

SEQ ID NO: 71582 - RNA, 24 nt, synthetic construct
  misc_feature 1..24: note = Parafibromin (314-321)
  source 1..24: mol_type = other RNA
acctaccacggcatgacactgaag

SEQ ID NO: 71583 - RNA, 27 nt, synthetic construct
  misc_feature 1..27: note = Down syndrome critical region protein 3 (108-116)
  source 1..27: mol_type = other RNA
acctaccacggcgtgttcgtcaacatc

SEQ ID NO: 71584 - RNA, 27 nt, synthetic construct
  misc_feature 1..27: note = AP-2 complex subunit alpha-1 (544-552)
  source 1..27: mol_type = other RNA
acctacatcaagttcattaacctgttt

SEQ ID NO: 71585 - RNA, 30 nt, synthetic construct
  misc_feature 1..30: note = Transmembrane protein 231 (34-43)
  source 1..30: mol_type = other RNA
acctacatcccccctctgctcgtggccttc

SEQ ID NO: 71586 - RNA, 27 nt, synthetic construct
  misc_feature 1..27: note = Phosphatidylinositol 4-phosphate 3-kinase C2 domain-containing subunit alpha (731-739)
  source 1..27: mol_type = other RNA
acctacaagaacttcttttatctgatc

SEQ ID NO: 71587 - RNA, 27 nt, synthetic construct
  misc_feature 1..27: note = Serine-protein kinase ATM (2359-2367)
  source 1..27: mol_type = other RNA
acctacctggagaaggccgtggaagtc

SEQ ID NO: 71588 - RNA, 27 nt, synthetic construct
  misc_feature 1..27: note = T-complex protein 1 subunit theta (427-435)
  source 1..27: mol_type = other RNA
acctacctgggcaagtattgggccatc

SEQ ID NO: 71589 - RNA, 27 nt, synthetic construct
  misc_feature 1..27: note = G1/S-specific cyclin-E1 (111-119)
  source 1..27: mol_type = other RNA
acctacctgagagaccagcacttcctc

SEQ ID NO: 71590 - RNA, 27 nt, synthetic construct
  misc_feature 1..27: note = Digestive organ expansion factor homolog (692-700)
  source 1..27: mol_type = other RNA
acctacccccacttctatagcgagatc

SEQ ID NO: 71591 - RNA, 27 nt, synthetic construct
  misc_feature 1..27: note = Sorbin and SH3 domain-containing protein 2 (215-223)
  source 1..27: mol_type = other RNA
acctacccccagcacgcccaaagcctg

SEQ ID NO: 71592 - RNA, 27 nt, synthetic construct
  misc_feature 1..27: note = Exportin-T (46-54)
  source 1..27: mol_type = other RNA
acctacagcgacgatcacgtgaagttc

SEQ ID NO: 71593 - RNA, 27 nt, synthetic construct
  misc_feature 1..27: note = Nuclear receptor subfamily 2 group C member 2 (532-540)
  source 1..27: mol_type = other RNA
acctacagcgaggacacatatagactg

SEQ ID NO: 71594 - RNA, 27 nt, synthetic construct
  misc_feature 1..27: note = SRSF protein kinase 2 (426-434)
  source 1..27: mol_type = other RNA
acctacagctcctcttatgagcagttc

SEQ ID NO: 71595 - RNA, 27 nt, synthetic construct
  misc_feature 1..27: note = Cartilage acidic protein 1 (144-152)
  source 1..27: mol_type = other RNA
acctacacagacaagctgttcaaattt

SEQ ID NO: 71596 - RNA, 27 nt, synthetic construct
  misc_feature 1..27: note = Cation-independent mannose-6-phosphate receptor (884-892)
  source 1..27: mol_type = other RNA
acctacacaactagaatccacctggtg

SEQ ID NO: 71597 - RNA, 27 nt, synthetic construct
  misc_feature 1..27: note = Cathepsin D (130-138)
  source 1..27: mol_type = other RNA
acctacgtgaagaacggcacaagcttc

SEQ ID NO: 71598 - RNA, 36 nt, synthetic construct
  misc_feature 1..36: note = Protein YIF1B (149-160)
  source 1..36: mol_type = other RNA
acctacgtgctggtcgccggcctcgctcttgggaca

SEQ ID NO: 71599 - RNA, 27 nt, synthetic construct
  misc_feature 1..27: note = Histone-binding protein RBBP4 (186-194)
  source 1..27: mol_type = other RNA
gtggccgacgatcagaagctgatgatc

SEQ ID NO: 71600 - RNA, 27 nt, synthetic construct
  misc_feature 1..27: note = E3 ubiquitin-protein ligase TRIM56 (523-531)
  source 1..27: mol_type = other RNA
gtggccgacgagcagaacagagctctg

SEQ ID NO: 71601 - RNA, 24 nt, synthetic construct
  misc_feature 1..24: note = Coatomer subunit gamma-1 (760-767)
  source 1..24: mol_type = other RNA
gtggccgaccacatccagaaggtc

SEQ ID NO: 71602 - RNA, 27 nt, synthetic construct
  misc_feature 1..27: note = HMG domain-containing protein 4 (317-325)
  source 1..27: mol_type = other RNA
gtggccgaccaccccggcatcgatttc

SEQ ID NO: 71603 - RNA, 24 nt, synthetic construct
  misc_feature 1..24: note = Laminin subunit gamma-1 (1042-1049)
  source 1..24: mol_type = other RNA
gtggccgaccacagagtcaagctg

SEQ ID NO: 71604 - RNA, 30 nt, synthetic construct
  misc_feature 1..30: note = Catenin beta-1 (79-88)
  source 1..30: mol_type = other RNA
gtggccgacatcgatggccagtacgctatg

SEQ ID NO: 71605 - RNA, 24 nt, synthetic construct
  misc_feature 1..24: note = Dual specificity protein phosphatase 14 (93-100)
  source 1..24: mol_type = other RNA
gtggccgacaagatccacagcgtc

SEQ ID NO: 71606 - RNA, 27 nt, synthetic construct
  misc_feature 1..27: note = Translin-associated protein X (191-199)
  source 1..27: mol_type = other RNA
gtggccgacctgaccggcgagctcatg

SEQ ID NO: 71607 - RNA, 27 nt, synthetic construct
  misc_feature 1..27: note = Neutral alpha-glucosidase AB (23-31)
  source 1..27: mol_type = other RNA
gtggccgacccccctatcgctagactg

SEQ ID NO: 71608 - RNA, 27 nt, synthetic construct
  misc_feature 1..27: note = Polypeptide N-acetylgalactosaminyltransferase 2 (241-249)
  source 1..27: mol_type = other RNA
gtggccgaggacagaaccagggtcgtt

SEQ ID NO: 71609 - RNA, 27 nt, synthetic construct
  misc_feature 1..27: note = Protein PRR14L (111-119)
  source 1..27: mol_type = other RNA
gtggccgagagcgctgtctccaagctg

SEQ ID NO: 71610 - RNA, 27 nt, synthetic construct
  misc_feature 1..27: note = UPF0415 protein C7orf25 (292-300)
  source 1..27: mol_type = other RNA
gtggccttccccaccgagatcaaggtc

SEQ ID NO: 71611 - RNA, 30 nt, synthetic construct
  misc_feature 1..30: note = Cytoskeleton-associated protein 5 (883-892)
  source 1..30: mol_type = other RNA
gtggccggcatcattaacgacgctaagttc

SEQ ID NO: 71612 - RNA, 33 nt, synthetic construct
  misc_feature 1..33: note = HLA class I histocompatibility antigen, alpha chain F (305-315)
  source 1..33: mol_type = other RNA
gtggccggcctggtcgttctcggggctgtggta

SEQ ID NO: 71613 - RNA, 24 nt, synthetic construct
  misc_feature 1..24: note = Phosphofurin acidic cluster sorting protein 1 (109-116)
  source 1..24: mol_type = other RNA
gtggccggcagagtcatgcagtac

SEQ ID NO: 71614 - RNA, 39 nt, synthetic construct
  misc_feature 1..39: note = CLIP-associating protein 2 (347-359)
  source 1..39: mol_type = other RNA
gtggccggcagagtcagcgctgggtcctctaaggcatca

SEQ ID NO: 71615 - RNA, 30 nt, synthetic construct
  misc_feature 1..30: note = CAD protein (1548-1557)
  source 1..30: mol_type = other RNA
gtggccggcagcgctgcagggctgaagctc

SEQ ID NO: 71616 - RNA, 27 nt, synthetic construct
  misc_feature 1..27: note = CLOCK-interacting pacemaker (251-259)
  source 1..27: mol_type = other RNA
gtggccaaggctcccagcctgaccttc

SEQ ID NO: 71617 - RNA, 45 nt, synthetic construct
  misc_feature 1..45: note = Glucose-6-phosphate isomerase (250-264)
  source 1..45: mol_type = other RNA
gtggccaagcacttcgtcgctctgagcaccaacacaactaaagtt

SEQ ID NO: 71618 - RNA, 48 nt, synthetic construct
  misc_feature 1..48: note = Glucose-6-phosphate isomerase (250-265)
  source 1..48: mol_type = other RNA
gtggccaagcacttcgtcgctctgagcaccaacacaactaaagttaag

SEQ ID NO: 71619 - RNA, 27 nt, synthetic construct
  misc_feature 1..27: note = Proline and serine-rich protein 1 (85-93)
  source 1..27: mol_type = other RNA
gtggccctggagctccttgctagcaac

SEQ ID NO: 71620 - RNA, 33 nt, synthetic construct
  misc_feature 1..33: note = Phosphatidylcholine translocator ABCB4 (985-995)
  source 1..33: mol_type = other RNA
gtggccctgggccacgctagctccttcgcaccc

SEQ ID NO: 71621 - RNA, 30 nt, synthetic construct
  misc_feature 1..30: note = ATP-binding cassette sub-family A member 13 (1236-1245)
  source 1..30: mol_type = other RNA
gtggccctgggcaacgctctcgtcagcgtt

SEQ ID NO: 71622 - RNA, 27 nt, synthetic construct
  misc_feature 1..27: note = Neural cell adhesion molecule L1 (3-11)
  source 1..27: mol_type = other RNA
gtggccctgagatacgtctggcccctc

SEQ ID NO: 71623 - RNA, 24 nt, synthetic construct
  misc_feature 1..24: note = Constitutive coactivator of PPAR-gamma-like protein 1 (551-558)
  source 1..24: mol_type = other RNA
gtggcccccgaggtcctgagagtt

SEQ ID NO: 71624 - RNA, 27 nt, synthetic construct
  misc_feature 1..27: note = Glutamate receptor ionotropic, kainate 3 (516-524)
  source 1..27: mol_type = other RNA
gtggcccccctgaccatcacacacgtc

SEQ ID NO: 71625 - RNA, 27 nt, synthetic construct
  misc_feature 1..27: note = Transcription factor p65 (404-412)
  source 1..27: mol_type = other RNA
gtggccccccctgctccaaagccgacc

SEQ ID NO: 71626 - RNA, 33 nt, synthetic construct
  misc_feature 1..33: note = Protein NLRC3 (955-965)
  source 1..33: mol_type = other RNA
gtggccagcatcggcgcttccggggcacaggtc

SEQ ID NO: 71627 - RNA, 24 nt, synthetic construct
  misc_feature 1..24: note = Endothelin B receptor (292-299)
  source 1..24: mol_type = other RNA
gtggccagctggtccagaatcaag

SEQ ID NO: 71628 - RNA, 27 nt, synthetic construct
  misc_feature 1..27: note = Zinc finger MYM-type protein 4 (1069-1077)
  source 1..27: mol_type = other RNA
gtggccgtcgagcccagaagcctgatc

SEQ ID NO: 71629 - RNA, 27 nt, synthetic construct
  misc_feature 1..27: note = Transient receptor potential cation channel subfamily V member 2 (408-416)
  source 1..27: mol_type = other RNA
gtggcctaccaccagcccaccctgaag

SEQ ID NO: 71630 - RNA, 150 nt, synthetic construct
  misc_feature 1..150: note = ATP synthase subunit epsilon, mitochondrial (2-51)
  source 1..150: mol_type = other RNA
gtggcctactggagacaggctggcctgagctatatcaggtactcccaaatttgcgcaaaggccgtccgggacgcgctcaaaaccgagttcaaggctaacgccgaaaaaacatctgggtcaaatgttaagatagtgaaagtaaagaaggag

SEQ ID NO: 71631 - RNA, 66 nt, synthetic construct
  misc_feature 1..66: note = Pyridoxal kinase (153-174)
  source 1..66: mol_type = other RNA
gtggacgccgtcttcgttggcaccggggatctgtttgctgcaatgctccttgcctggacacacaag

SEQ ID NO: 71632 - RNA, 30 nt, synthetic construct
  misc_feature 1..30: note = Titin (5174-5183)
  source 1..30: mol_type = other RNA
gtggacgatctgatcgccctcggcgggcag

SEQ ID NO: 71633 - RNA, 54 nt, synthetic construct
  misc_feature 1..54: note = HLA class I histocompatibility antigen, B-51 alpha chain (27-44)
  source 1..54: mol_type = other RNA
gtggacgatacccagttcgtcagatttgacagcgatgccgcttcccccaggaca

SEQ ID NO: 71634 - RNA, 60 nt, synthetic construct
  misc_feature 1..60: note = HLA class I histocompatibility antigen, B-51 alpha chain (27-46)
  source 1..60: mol_type = other RNA
gtggacgatacccagttcgtcagatttgacagcgatgccgcttcccccaggacagagcct

SEQ ID NO: 71635 - RNA, 66 nt, synthetic construct
  misc_feature 1..66: note = Transducin-like enhancer protein 2 (117-138)
  source 1..66: mol_type = other RNA
gtggacgaggatcagcccagcgaacctccatccccggccaccacaccctgcggcaaggtccctatc

SEQ ID NO: 71636 - RNA, 45 nt, synthetic construct
  misc_feature 1..45: note = Annexin A2 (51-65)
  source 1..45: mol_type = other RNA
gtggacgaggtcaccatcgttaacattctgacaaatagaagcaac

SEQ ID NO: 71637 - RNA, 51 nt, synthetic construct
  misc_feature 1..51: note = Annexin A2 (51-67)
  source 1..51: mol_type = other RNA
gtggacgaggtcaccatcgttaacattctgacaaatagaagcaacgcccag

SEQ ID NO: 71638 - RNA, 36 nt, synthetic construct
  misc_feature 1..36: note = Glyceraldehyde-3-phosphate dehydrogenase (28-39)
  source 1..36: mol_type = other RNA
gtggacatcgtcgccattaacgatcccttcatagac

SEQ ID NO: 71639 - RNA, 27 nt, synthetic construct
  misc_feature 1..27: note = Eukaryotic translation initiation factor 2A (267-275)
  source 1..27: mol_type = other RNA
gtggacaagaccggcgccagctactat

SEQ ID NO: 71640 - RNA, 24 nt, synthetic construct
  misc_feature 1..24: note = 40S ribosomal protein S21 (39-46)
  source 1..24: mol_type = other RNA
gtggacaaggtcaccggcagattc

SEQ ID NO: 71641 - RNA, 60 nt, synthetic construct
  misc_feature 1..60: note = Collagen alpha-4(IV) chain (1284-1303)
  source 1..60: mol_type = other RNA
gtggacctgctcagaggcgagcccggggattgcggacttcctggtccaccgggcccccct

SEQ ID NO: 71642 - RNA, 33 nt, synthetic construct
  misc_feature 1..33: note = Immunoglobulin superfamily DCC subclass member 4 (828-838)
  source 1..33: mol_type = other RNA
gtggacatggatggccccttcgggagcgtcgtt

SEQ ID NO: 71643 - RNA, 45 nt, synthetic construct
  misc_feature 1..45: note = Multidrug resistance-associated protein 6 (610-624)
  source 1..45: mol_type = other RNA
gtggaccccggcgtcgttgatagctcctcttcagggagtgccgct

SEQ ID NO: 71644 - RNA, 24 nt, synthetic construct
  misc_feature 1..24: note = Histone deacetylase 9 (79-86)
  source 1..24: mol_type = other RNA
gtggaccccgtcgttagagagaag

SEQ ID NO: 71645 - RNA, 51 nt, synthetic construct
  misc_feature 1..51: note = Neuron navigator 1 (1420-1436)
  source 1..51: mol_type = other RNA
gtggacagcctggtcttcgagaccctcatccccaagcctatgatgcagcac

SEQ ID NO: 71646 - RNA, 24 nt, synthetic construct
  misc_feature 1..24: note = Microtubule-actin cross-linking factor 1, isoforms 1/2/3/5 (329-336)
  source 1..24: mol_type = other RNA
gtggacagcagatggcaggagtac

SEQ ID NO: 71647 - RNA, 60 nt, synthetic construct
  misc_feature 1..60: note = Beta-secretase 2 (109-128)
  source 1..60: mol_type = other RNA
gtggacaccggcagctccaacttcgccgtcgctgggacaccccactcttacatcgatact

SEQ ID NO: 71648 - RNA, 33 nt, synthetic construct; identical to SEQ ID NO: 47421
  misc_feature 1..33: note = Probable C-mannosyltransferase DPY19L1 (75-85)
  source 1..33: mol_type = other RNA

SEQ ID NO: 71649 - RNA, 36 nt, synthetic construct
  misc_feature 1..36: note = Dynein heavy chain 17, axonemal (1541-1552)
  source 1..36: mol_type = other RNA
gtggaggccaccagcaagcccggcctgtacaacaaa

SEQ ID NO: 71650 - RNA, 27 nt, synthetic construct
  misc_feature 1..27: note = Putative RNA-binding protein 15 (166-174)
  source 1..27: mol_type = other RNA
gtggaggacggcctgttccacgaattt

SEQ ID NO: 71651 - RNA, 27 nt, synthetic construct
  misc_feature 1..27: note = Protein phosphatase 1 regulatory subunit 12B (100-108)
  source 1..27: mol_type = other RNA
gtggaggaagacagcaacagagattac

SEQ ID NO: 71652 - RNA, 30 nt, synthetic construct
  misc_feature 1..30: note = Protrudin (99-108)
  source 1..30: mol_type = other RNA
gtggagttctttagagtcgttagcgaatac

SEQ ID NO: 71653 - RNA, 30 nt, synthetic construct; identical to SEQ ID NO: 47426
  misc_feature 1..30: note = Glycogen phosphorylase, brain form (207-216)
  source 1..30: mol_type = other RNA

SEQ ID NO: 71654 - RNA, 21 nt, synthetic construct
  misc_feature 1..21: note = CDK5 regulatory subunit-associated protein 1 (383-389)
  source 1..21: mol_type = other RNA
gtggagctggtccaccatatc

SEQ ID NO: 71655 - RNA, 27 nt, synthetic construct
  misc_feature 1..27: note = Chondroitin sulfate glucuronyltransferase (720-728)
  source 1..27: mol_type = other RNA
gtggagcccggcctggtccagaagttc

SEQ ID NO: 71656 - RNA, 39 nt, synthetic construct
  misc_feature 1..39: note = Beta-hexosaminidase subunit alpha (437-449)
  source 1..39: mol_type = other RNA
gtggagcccctggccttcgaaggcacccctgagcagaag

SEQ ID NO: 71657 - RNA, 42 nt, synthetic construct
  misc_feature 1..42: note = 40S ribosomal protein S18 (64-77)
  source 1..42: mol_type = other RNA
gtggagagagtcatcaccattatgcagaaccccaggcaatac

SEQ ID NO: 71658 - RNA, 45 nt, synthetic construct
  misc_feature 1..45: note = 40S ribosomal protein S18 (64-78)
  source 1..45: mol_type = other RNA
gtggagagagtcatcaccattatgcagaaccccaggcaatacaag

SEQ ID NO: 71659 - RNA, 27 nt, synthetic construct
  misc_feature 1..27: note = Myoferlin (1325-1333)
  source 1..27: mol_type = other RNA
gtggagagcgtcgttatcaagaacctg

SEQ ID NO: 71660 - RNA, 60 nt, synthetic construct
  misc_feature 1..60: note = Vimentin (447-466)
  source 1..60: mol_type = other RNA
gtggagaccagagacggccaggtcatcaacgaaacaagccaacaccatgatgacctggag

SEQ ID NO: 71661 - RNA, 48 nt, synthetic construct
  misc_feature 1..48: note = HLA class I histocompatibility antigen, Cw-7 alpha chain (255-270)
  source 1..48: mol_type = other RNA
gtggagaccagacccgccggcgacgggacattccagaagtgggctgca

SEQ ID NO: 71662 - RNA, 27 nt, synthetic construct
  misc_feature 1..27: note = Integrin beta-5 (441-449)
  source 1..27: mol_type = other RNA
gtgttcgccctgagacccgtcggcttt

SEQ ID NO: 71663 - RNA, 27 nt, synthetic construct
  misc_feature 1..27: note = Ribosomal protein S6 kinase alpha-5 (487-495)
  source 1..27: mol_type = other RNA
gtgttccacgaccagctgcataccttt

SEQ ID NO: 71664 - RNA, 27 nt, synthetic construct
  misc_feature 1..27: note = Nuclear factor erythroid 2-related factor 3 (266-274)
  source 1..27: mol_type = other RNA
gtgttccacaaccatacctaccacctg

SEQ ID NO: 71665 - RNA, 27 nt, synthetic construct
  misc_feature 1..27: note = Integrin alpha-7 (708-716)
  source 1..27: mol_type = other RNA
gtgttcatcgagctgcccctcagcatt

SEQ ID NO: 71666 - RNA, 27 nt, synthetic construct
  misc_feature 1..27: note = Leucine-rich repeat serine/threonine-protein kinase 2 (619-627)
  source 1..27: mol_type = other RNA
gtgttcatcggcaccgggcacctgctc

SEQ ID NO: 71667 - RNA, 30 nt, synthetic construct
  misc_feature 1..30: note = Putative pre-mRNA-splicing factor ATP-dependent RNA helicase DHX16 (968-977)
  source 1..30: mol_type = other RNA
gtgttcatccaccccaacagctccctgttt

SEQ ID NO: 71668 - RNA, 27 nt, synthetic construct
  misc_feature 1..27: note = E3 ubiquitin-protein ligase RNF213 (400-408)
  source 1..27: mol_type = other RNA
gtgttcatcagaggcggggaggaattt

SEQ ID NO: 71669 - RNA, 27 nt, synthetic construct
  misc_feature 1..27: note = Receptor-type tyrosine-protein phosphatase zeta (120-128)
  source 1..27: mol_type = other RNA
gtgttcaaggccagcaaaatcaccttt

SEQ ID NO: 71670 - RNA, 27 nt, synthetic construct
  misc_feature 1..27: note = Baculoviral IAP repeat-containing protein 6 (448-456)
  source 1..27: mol_type = other RNA
gtgttcaagcccatcagctccacctgg

SEQ ID NO: 71671 - RNA, 24 nt, synthetic construct
  misc_feature 1..24: note = Farnesyl pyrophosphate synthase (333-340)
  source 1..24: mol_type = other RNA
gtgttcctgggcctcgccagaaag

SEQ ID NO: 71672 - RNA, 33 nt, synthetic construct
  misc_feature 1..33: note = Transmembraneoprotein NMB (543-553)
  source 1..33: mol_type = other RNA
gtgttcctgaacagagccaaggctgtctttttc

SEQ ID NO: 71673 - RNA, 30 nt, synthetic construct
  misc_feature 1..30: note = HLA class II histocompatibility antigen, DQ alpha 1 chain (162-171)
  source 1..30: mol_type = other RNA
gtgttcctgcccagagaggaccacctcttt

SEQ ID NO: 71674 - RNA, 33 nt, synthetic construct
  misc_feature 1..33: note = Extracellular matrix protein FRAS1 (2887-2897)
  source 1..33: mol_type = other RNA
gtgttcctgagctccgcccagggcgctgagctc

SEQ ID NO: 71675 - RNA, 27 nt, synthetic construct
  misc_feature 1..27: note = Beta-hexosaminidase subunit alpha (311-319)
  source 1..27: mol_type = other RNA
gtgttccccgacttttacctgcacctc

SEQ ID NO: 71676 - RNA, 27 nt, synthetic construct
  misc_feature 1..27: note = Sal-like protein 1 (304-312)
  source 1..27: mol_type = other RNA
gtgttccccagccctctgccaaacatc

SEQ ID NO: 71677 - RNA, 27 nt, synthetic construct
  misc_feature 1..27: note = Lysosomal-trafficking regulator (976-984)
  source 1..27: mol_type = other RNA
gtgttccagaagcaattttacagactg

SEQ ID NO: 71678 - RNA, 27 nt, synthetic construct
  misc_feature 1..27: note = Filamin-A (1243-1251)
  source 1..27: mol_type = other RNA
gtgttcagagaggccaccacagaattt

SEQ ID NO: 71679 - RNA, 27 nt, synthetic construct
  misc_feature 1..27: note = Tubulin beta chain (336-344)
  source 1..27: mol_type = other RNA
gtgttcagaggcaggatgagcatgaag

SEQ ID NO: 71680 - RNA, 30 nt, synthetic construct
  misc_feature 1..30: note = Transformation/transcription domain-associated protein (638-647)
  source 1..30: mol_type = other RNA
gtgttcaccatgatgaaccccctgacattt

SEQ ID NO: 71681 - RNA, 27 nt, synthetic construct
  misc_feature 1..27: note = Cell division cycle protein 23 homolog (185-193)
  source 1..27: mol_type = other RNA
gtgttcgtcgaggccacccacgttctg

SEQ ID NO: 71682 - RNA, 33 nt, synthetic construct
  misc_feature 1..33: note = Delphilin (267-277)
  source 1..33: mol_type = other RNA
gtgggcgggctggccggacccggtggcgctaga

SEQ ID NO: 71683 - RNA, 21 nt, synthetic construct
  misc_feature 1..21: note = Peroxisomal membrane protein 2 (69-75)
  source 1..21: mol_type = other RNA
gtgggcgggcccctgagatac

SEQ ID NO: 71684 - RNA, 27 nt, synthetic construct
  misc_feature 1..27: note = Eukaryotic translation initiation factor 6 (64-72)
  source 1..27: mol_type = other RNA
gtgggcaacagacacgggctgctcgtc

SEQ ID NO: 71685 - RNA, 27 nt, synthetic construct
  misc_feature 1..27: note = Nuclear factor of activated T-cells, cytoplasmic 2 (274-282)
  source 1..27: mol_type = other RNA
gtgggcaacaccaaggtcctggagatc

SEQ ID NO: 71686 - RNA, 45 nt, synthetic construct
  misc_feature 1..45: note = Filamin-A (1151-1165)
  source 1..45: mol_type = other RNA
gtgggccagttccaagtcgactgcagctccgccgggtctgctgag

SEQ ID NO: 71687 - RNA, 33 nt, synthetic construct
  misc_feature 1..33: note = Cullin-4A (15-25)
  source 1..33: mol_type = other RNA
gtgggcagaaccaacgggctgacaaagcccgcc

SEQ ID NO: 71688 - RNA, 24 nt, synthetic construct
  misc_feature 1..24: note = F-box only protein 3 (82-89)
  source 1..24: mol_type = other RNA
gtgggcagatacatcgaccactat

SEQ ID NO: 71689 - RNA, 39 nt, synthetic construct
  misc_feature 1..39: note = HLA class I histocompatibility antigen, B-13 alpha chain (24-36)
  source 1..39: mol_type = other RNA
gtgggctacgtcgacgatacccagttcgttagatttgac

SEQ ID NO: 71690 - RNA, 27 nt, synthetic construct
  misc_feature 1..27: note = Lysosomal-trafficking regulator (893-901)
  source 1..27: mol_type = other RNA
gtgcacatcaacaccattaatctgttc

SEQ ID NO: 71691 - RNA, 21 nt, synthetic construct
  misc_feature 1..21: note = Bax inhibitor 1 (93-99)
  source 1..21: mol_type = other RNA
gtgcacatggtcacccatttc

SEQ ID NO: 71692 - RNA, 27 nt, synthetic construct
  misc_feature 1..27: note = Sterol 26-hydroxylase, mitochondrial (181-189)
  source 1..27: mol_type = other RNA
gtgatcgacgatttcatgaccagactg

SEQ ID NO: 71693 - RNA, 30 nt, synthetic construct
  misc_feature 1..30: note = Keratin, type I cytoskeletal 18 (130-139)
  source 1..30: mol_type = other RNA
gtgatcgacgataccaacattacaagactg

SEQ ID NO: 71694 - RNA, 27 nt, synthetic construct
  misc_feature 1..27: note = Laminin subunit alpha-4 (1790-1798)
  source 1..27: mol_type = other RNA
gtgatcgacggccaccccgtcagcttc

SEQ ID NO: 71695 - RNA, 24 nt, synthetic construct
  misc_feature 1..24: note = Prefoldin subunit 1 (20-27)
  source 1..24: mol_type = other RNA
gtgatcgacacccagcaaaaggtc

SEQ ID NO: 71696 - RNA, 27 nt, synthetic construct
  misc_feature 1..27: note = Protein PRRC2C (1668-1676)
  source 1..27: mol_type = other RNA
gtgatcgaggacccccagagcaacctg

SEQ ID NO: 71697 - RNA, 27 nt, synthetic construct
  misc_feature 1..27: note = Helicase SKI2W (419-427)
  source 1..27: mol_type = other RNA
gtgatcttcgacgaggtccactacatt

SEQ ID NO: 71698 - RNA, 63 nt, synthetic construct
  misc_feature 1..63: note Dolichyl-diphosphooligosaccharide-proteinosyltransferase 48 kDa subunit (255-275)
  source 1..63: mol_type = other RNA
gtgatcttcagcggctccctggactttttctctgattcatttttcaacagtgccgtccagaag

SEQ ID NO: 71699 - RNA, 27 nt, synthetic construct
  misc_feature 1..27: note = CLIP-associating protein 1 (218-226)
  source 1..27: mol_type = other RNA
gtgatcttcaccaagtttgacgaggtc

SEQ ID NO: 71700 - RNA, 24 nt, synthetic construct
  misc_feature 1..24: note = Tyrosine-protein phosphatase non-receptor type 13 (1869-1876)
  source 1..24: mol_type = other RNA
gtgatcggcagagtcctggagctc

SEQ ID NO: 71701 - RNA, 72 nt, synthetic construct
  misc_feature 1..72: note = Glyceraldehyde-3-phosphate dehydrogenase (163-186)
  source 1..72: mol_type = other RNA
gtgatccacgacaacttcggcattgtcgaggggctgatgaccacagttcatgccataactgctacgcagaag

SEQ ID NO: 71702 - RNA, 24 nt, synthetic construct
  misc_feature 1..24: note = ELAV-like protein 1 (102-109)
  source 1..24: mol_type = other RNA
gtgatcaaggacgccaacctgtac

SEQ ID NO: 71703 - RNA, 21 nt, synthetic construct
  misc_feature 1..21: note = U5 small nuclear ribonucleoprotein 200 kDa helicase (1232-1238)
  source 1..21: mol_type = other RNA
gtgatcctgcaccatgagtac

SEQ ID NO: 71704 - RNA, 48 nt, synthetic construct
  misc_feature 1..48: note = Heat shock protein HSP 90-beta (107-122)
  source 1..48: mol_type = other RNA
gtgatcctgcacctcaaggaggaccagaccgaataccttgaggaaaga

SEQ ID NO: 71705 - RNA, 27 nt, synthetic construct
  misc_feature 1..27: note = Zinc finger BED domain-containing protein 1 (183-191)
  source 1..27: mol_type = other RNA
gtgatcctgaaggagctcgccgaagct

SEQ ID NO: 71706 - RNA, 27 nt, synthetic construct
  misc_feature 1..27: note = Natural resistance-associated macrophage protein 2 (259-267)
  source 1..27: mol_type = other RNA
gtgatcatgccccacaacatgtacctg

SEQ ID NO: 71707 - RNA, 39 nt, synthetic construct
  misc_feature 1..39: note = Vimentin (454-466)
  source 1..39: mol_type = other RNA
gtgatcaacgagaccagccagcaccatgacgatctggaa

SEQ ID NO: 71708 - RNA, 27 nt, synthetic construct
  misc_feature 1..27: note = NEDD8 ultimate buster 1 (130-138)
  source 1..27: mol_type = other RNA
gtgatcaacaagaaacagctgcaactc

SEQ ID NO: 71709 - RNA, 27 nt, synthetic construct
  misc_feature 1..27: note = Spectrin beta chain, non-erythrocytic 1 (2228-2236)
  source 1..27: mol_type = other RNA
gtgatcaacaatcaggagatgggcttc

SEQ ID NO: 71710 - RNA, 30 nt, synthetic construct
  misc_feature 1..30: note = Glia-derived nexin (64-73)
  source 1..30: mol_type = other RNA
gtgatcagcccccacggcattgcctccgtc

SEQ ID NO: 71711 - RNA, 27 nt, synthetic construct
  misc_feature 1..27: note = Serine-protein kinase ATM (120-128)
  source 1..27: mol_type = other RNA
gtgatctacaccctgattcactatata

SEQ ID NO: 71712 - RNA, 27 nt, synthetic construct
  misc_feature 1..27: note = Protein-L-isoaspartate(D-aspartate) O-methyltransferase (92-100)
  source 1..27: mol_type = other RNA
gtgatctacgtccccctgaccgacaag

SEQ ID NO: 71713 - RNA, 30 nt, synthetic construct
  misc_feature 1..30: note = Collagen alpha-1(XII) chain (423-432)
  source 1..30: mol_type = other RNA
gtgaagggcgcccccagaaacctgaaagtc

SEQ ID NO: 71714 - RNA, 27 nt, synthetic construct
  misc_feature 1..27: note = Transferrin receptor protein 1 (188-196)
  source 1..27: mol_type = other RNA
gtgaagatccaggtcaaagacagcgcc

SEQ ID NO: 71715 - RNA, 51 nt, synthetic construct
  misc_feature 1..51: note = Protocadherin Fat 3 (438-454)
  source 1..51: mol_type = other RNA
gtgaagaaagaggtctacaagctggaagttaccaacaaagagggcgacctc

SEQ ID NO: 71716 - RNA, 48 nt, synthetic construct
  misc_feature 1..48: note = Gamma-secretase C-terminal fragment 59 (559-574)
  source 1..48: mol_type = other RNA
gtgaagatggacgccgagttcagacacgatagcggctacgaagtccat

SEQ ID NO: 71717 - RNA, 51 nt, synthetic construct
  misc_feature 1..51: note = Gamma-secretase C-terminal fragment 59 (559-575)
  source 1..51: mol_type = other RNA
gtgaagatggacgccgagttcagacacgatagcggctacgaagtccatcac

SEQ ID NO: 71718 - RNA, 54 nt, synthetic construct
  misc_feature 1..54: note = Gamma-secretase C-terminal fragment 59 (559-576)
  source 1..54: mol_type = other RNA
gtgaagatggacgccgagttcagacacgatagcggctacgaagtccatcaccag

SEQ ID NO: 71719 - RNA, 30 nt, synthetic construct
  misc_feature 1..30: note = Small conductance calcium-activated potassium channel protein 2 (419-428)
  source 1..30: mol_type = other RNA
gtgaagaacgccgctgcaaatgtcctgaga

SEQ ID NO: 71720 - RNA, 33 nt, synthetic construct; identical to SEQ ID NO: 47493
  misc_feature 1..33: note = Intraflagellar transport protein 81 homolog (41-51)
  source 1..33: mol_type = other RNA

SEQ ID NO: 71721 - RNA, 27 nt, synthetic construct
  misc_feature 1..27: note = Rootletin (677-685)
  source 1..27: mol_type = other RNA
gtgctggccaaggagctcgtcgaagtt

SEQ ID NO: 71722 - RNA, 27 nt, synthetic construct
  misc_feature 1..27: note = Protein FAM13B (15-23)
  source 1..27: mol_type = other RNA
gtgctggccaacaagatcttcggcatt

SEQ ID NO: 71723 - RNA, 27 nt, synthetic construct
  misc_feature 1..27: note = A-kinase anchor protein 1, mitochondrial (363-371)
  source 1..27: mol_type = other RNA
gtgctggccaccacagtcggcaaggtt

SEQ ID NO: 71724 - RNA, 33 nt, synthetic construct
  misc_feature 1..33: note = Laminin subunit gamma-1 (20-30)
  source 1..33: mol_type = other RNA
gtgctggccgtcctcgctgcagccgcggctgcc

SEQ ID NO: 71725 - RNA, 30 nt, synthetic construct
  misc_feature 1..30: note = U5 small nuclear ribonucleoprotein 200 kDa helicase (139-148)
  source 1..30: mol_type = other RNA
gtgctggccgtcctcaagaacgagaaactt

SEQ ID NO: 71726 - RNA, 27 nt, synthetic construct
  misc_feature 1..27: note = Microtubule-actin cross-linking factor 1 (1174-1182)
  source 1..27: mol_type = other RNA
gtgctggacgaggaaatcgccaaggct

SEQ ID NO: 71727 - RNA, 27 nt, synthetic construct
  misc_feature 1..27: note = E3 ubiquitin-protein ligase RNF123 (218-226)
  source 1..27: mol_type = other RNA
gtgctggacggcgccgtcatgatgtac

SEQ ID NO: 71728 - RNA, 27 nt, synthetic construct
  misc_feature 1..27: note = Homologous-pairing protein 2 homolog (88-97)
  source 1..27: mol_type = other RNA
gtgctggacggcaagatcgtcgccctc

SEQ ID NO: 71729 - RNA, 27 nt, synthetic construct
  misc_feature 1..27: note = Transcription factor SOX-5 (89-97)
  source 1..27: mol_type = other RNA
gtgctggacggcaaggtcgccgttgtg

SEQ ID NO: 71730 - RNA, 27 nt, synthetic construct
  misc_feature 1..27: note = Serine/arginine-rich splicing factor 2 (79-87)
  source 1..27: mol_type = other RNA
gtgctggacggcagagagctcagggtc

SEQ ID NO: 71731 - RNA, 27 nt, synthetic construct
  misc_feature 1..27: note = 60S ribosomal protein L13a (8-16)
  source 1..27: mol_type = other RNA
gtgctggacggcagagggcacctcctt

SEQ ID NO: 71732 - RNA, 24 nt, synthetic construct
  misc_feature 1..24: note = Clustered mitochondria protein homolog (97-104)
  source 1..24: mol_type = other RNA
gtgctggaccacttcagcgagctc

SEQ ID NO: 71733 - RNA, 27 nt, synthetic construct
  misc_feature 1..27: note = Microtubule-associated proteins 1A/1B light chain 3B (46-54)
  source 1..27: mol_type = other RNA
gtgctggacaagaccaaattcctcgtc

SEQ ID NO: 71734 - RNA, 27 nt, synthetic construct
  misc_feature 1..27: note = Coilin (145-153)
  source 1..27: mol_type = other RNA
gtgctggacctcgagcccaaggccgtc

SEQ ID NO: 71735 - RNA, 27 nt, synthetic construct
  misc_feature 1..27: note = Protein flightless-1 homolog (107-115)
  source 1..27: mol_type = other RNA
gtgctggacctcagccacaaccagctt

SEQ ID NO: 71736 - RNA, 27 nt, synthetic construct
  misc_feature 1..27: note = Cadherin-2 (399-407)
  source 1..27: mol_type = other RNA
gtgctggacagagagagccccaacgtc

SEQ ID NO: 71737 - RNA, 27 nt, synthetic construct
  misc_feature 1..27: note = Receptor-type protein tyrosine phosphatase beta (1333-1341)
  source 1..27: mol_type = other RNA
gtgctggacagccacatccatgcctac

SEQ ID NO: 71738 - RNA, 27 nt, synthetic construct
  misc_feature 1..27: note = Ubiquitin carboxyl-terminal hydrolase 19 (713-721)
  source 1..27: mol_type = other RNA
gtgctggacagcctctcccagtctgtc

SEQ ID NO: 71739 - RNA, 27 nt, synthetic construct
  misc_feature 1..27: note = Biorientation of chromosomes in cell division protein 1-like 1 (1543-1551)
  source 1..27: mol_type = other RNA
gtgctggacagcagaatcgagaccgcc

SEQ ID NO: 71740 - RNA, 30 nt, synthetic construct
  misc_feature 1..30: note = Probable tRNA methyltransferase 9-like protein (350-359)
  source 1..30: mol_type = other RNA
gtgctggacagcaccgccttcatgagatac

SEQ ID NO: 71741 - RNA, 27 nt, synthetic construct
  misc_feature 1..27: note = Tubulin-specific chaperone A (71-79)
  source 1..27: mol_type = other RNA
gtgctggacagcgtcaagctcgaggcc

SEQ ID NO: 71742 - RNA, 27 nt, synthetic construct
  misc_feature 1..27: note = COP9 signalosome complex subunit 7b (34-42)
  source 1..27: mol_type = other RNA
gtgctggaggcccccggcgtctacgtt

SEQ ID NO: 71743 - RNA, 27 nt, synthetic construct
  misc_feature 1..27: note = Ras GTPase-activating-like protein IQGAP3 (1063-1071)
  source 1..27: mol_type = other RNA
gtgctggaggacaaggtcctcagcgtt

SEQ ID NO: 71744 - RNA, 24 nt, synthetic construct
  misc_feature 1..24: note = Melanoma-associated antigen 4 (287-294)
  source 1..24: mol_type = other RNA
gtgctggagcacgtcgttagagtg

SEQ ID NO: 71745 - RNA, 27 nt, synthetic construct
  misc_feature 1..27: note = Leucine-tRNA ligase, cytoplasmic (271-279)
  source 1..27: mol_type = other RNA
gtgctggagccctaccctagcaagctc

SEQ ID NO: 71746 - RNA, 27 nt, synthetic construct
  misc_feature 1..27: note = E3 ubiquitin-protein ligase RNF123 (425-433)
  source 1..27: mol_type = other RNA
gtgctgttcgacgtcctcagaagcgtt

SEQ ID NO: 71747 - RNA, 30 nt, synthetic construct
  misc_feature 1..30: note = Nucleolar protein 56 (6-15)
  source 1..30: mol_type = other RNA
gtgctgttcgagcacgccgtcggctacgct

SEQ ID NO: 71748 - RNA, 27 nt, synthetic construct
  misc_feature 1..27: note = NADH dehydrogenase (ubiquinone) iron-sulfur protein 2, mitochondrial (172-180)
  source 1..27: mol_type = other RNA
gtgctgttcggcgagatcaccagactc

SEQ ID NO: 71749 - RNA, 36 nt, synthetic construct
  misc_feature 1..36: note = Heat shock 70 kDa protein 12A (519-530)
  source 1..36: mol_type = other RNA
gtgctgttcggcctcgaccccgccgtcatcaaggtt

SEQ ID NO: 71750 - RNA, 18 nt, synthetic construct
  misc_feature 1..18: note = Maestro heat-like repeat-containing protein family member 1 (158-163)
  source 1..18: mol_type = other RNA
gtgctgttccaccagtgg

SEQ ID NO: 71751 - RNA, 27 nt, synthetic construct
  misc_feature 1..27: note = Exostosin-like 1 (657-665)
  source 1..27: mol_type = other RNA
gtgctgttcaaggaccccgtcagcgtt

SEQ ID NO: 71752 - RNA, 30 nt, synthetic construct
  misc_feature 1..30: note = Histone-lysine N-methyltransferase 2D (4817-4826)
  source 1..30: mol_type = other RNA
gtgctgttccccgagagccctgccagagct

SEQ ID NO: 71753 - RNA, 27 nt, synthetic construct
  misc_feature 1..27: note = Ribosomal protein S6 kinase alpha-3 (517-525)
  source 1..27: mol_type = other RNA
gtgctgttcaccatcacaaagactgtc

SEQ ID NO: 71754 - RNA, 30 nt, synthetic construct
  misc_feature 1..30: note = TAF6-like RNA polymerase II p300/CBP-associated factor-associated factor 65 kDa subunit 6L (168-177)
  source 1..30: mol_type = other RNA
gtgctgggcgacgatccccagctcatgaag

SEQ ID NO: 71755 - RNA, 33 nt, synthetic construct
  misc_feature 1..33: note = TAF6-like RNA polymerase II p300/CBP-associated factor-associated factor 65 kDa subunit 6L (168-178)
  source 1..33: mol_type = other RNA
gtgctgggcgacgatccccagctcatgaaggtc

SEQ ID NO: 71756 - RNA, 24 nt, synthetic construct
  misc_feature 1..24: note = Kelch-like protein 21 (509-516)
  source 1..24: mol_type = other RNA
gtgctgggcgggaagctctacgtc

SEQ ID NO: 71757 - RNA, 24 nt, synthetic construct
  misc_feature 1..24: note = Lipopolysaccharide-responsive and beige-like anchor protein (137-144)
  source 1..24: mol_type = other RNA
gtgctgggcaagatcgagaaagtc

SEQ ID NO: 71758 - RNA, 24 nt, synthetic construct
  misc_feature 1..24: note = EH domain-containing protein 4 (483-490)
  source 1..24: mol_type = other RNA
gtgctgggcaagatctggaaactc

SEQ ID NO: 71759 - RNA, 24 nt, synthetic construct
  misc_feature 1..24: note = Dynactin subunit 2 (288-295)
  source 1..24: mol_type = other RNA
gtgctgggcaaggtcaacgagatc

SEQ ID NO: 71760 - RNA, 27 nt, synthetic construct
  misc_feature 1..27: note = Nuclear autoantigenic sperm protein (105-113)
  source 1..27: mol_type = other RNA
gtgctgggcaacgccctcgagggggtc

SEQ ID NO: 71761 - RNA, 27 nt, synthetic construct
  misc_feature 1..27: note = Hepatoma-derived growth factor-related protein 2 (550-558)
  source 1..27: mol_type = other RNA
gtgctgggccccaagatcgaggccgtc

SEQ ID NO: 71762 - RNA, 27 nt, synthetic construct
  misc_feature 1..27: note = Zinc finger protein 518A (419-427)
  source 1..27: mol_type = other RNA
gtgctgggccccaccctcaagaacgtc

SEQ ID NO: 71763 - RNA, 27 nt, synthetic construct
  misc_feature 1..27: note = EAW51983.1 (1173-1181)
  source 1..27: mol_type = other RNA
gtgctgggccccacccctgagctcgtc

SEQ ID NO: 71764 - RNA, 27 nt, synthetic construct
  misc_feature 1..27: note = Transferrin receptor protein 1 (488-496)
  source 1..27: mol_type = other RNA
gtgctgggcaccagcaacttcaaggtc

SEQ ID NO: 71765 - RNA, 24 nt, synthetic construct
  misc_feature 1..24: note = HEAT repeat-containing protein 1 (1554-1561)
  source 1..24: mol_type = other RNA
gtgctgggctacatcagcgccgtc

SEQ ID NO: 71766 - RNA, 30 nt, synthetic construct
  misc_feature 1..30: note = Integrin-linked protein kinase (219-228)
  source 1..30: mol_type = other RNA
gtgctgcacgagggcaccaacttcgtcgtt

SEQ ID NO: 71767 - RNA, 27 nt, synthetic construct
  misc_feature 1..27: note Dolichyl-diphosphooligosaccharide-proteinosyltransferase subunit 1 (138-146)
  source 1..27: mol_type = other RNA
gtgctgcacccctaccctacccagatc

SEQ ID NO: 71768 - RNA, 27 nt, synthetic construct
  misc_feature 1..27: note = Ral GTPase-activating protein subunit beta (21-29)
  source 1..27: mol_type = other RNA
gtgctgcacagctaccccgagtccgtc

SEQ ID NO: 71769 - RNA, 27 nt, synthetic construct
  misc_feature 1..27: note = Alpha-parvin (100-108)
  source 1..27: mol_type = other RNA
gtgctgatcgactggattaacgatgtc

SEQ ID NO: 71770 - RNA, 27 nt, synthetic construct
  misc_feature 1..27: note = Leucine-tRNA ligase, cytoplasmic (203-211)
  source 1..27: mol_type = other RNA
gtgctgatccacagctcccagtacctc

SEQ ID NO: 71771 - RNA, 27 nt, synthetic construct
  misc_feature 1..27: note = Hemicentin-1 (1559-1567)
  source 1..27: mol_type = other RNA
gtgctgatcaacagcctcattaagctt

SEQ ID NO: 71772 - RNA, 27 nt, synthetic construct
  misc_feature 1..27: note = Neuron navigator 2 (119-127)
  source 1..27: mol_type = other RNA
gtgctgctcgcccagatcattcaagtc

SEQ ID NO: 71773 - RNA, 27 nt, synthetic construct
  misc_feature 1..27: note = Protein MON2 homolog (1145-1153)
  source 1..27: mol_type = other RNA
gtgctgctcgaccacatccagagcgcc

SEQ ID NO: 71774 - RNA, 33 nt, synthetic construct
  misc_feature 1..33: note = Ankyrin-2 (527-537)
  source 1..33: mol_type = other RNA
gtgctgctcgaggccggcgctgcacacagcctt

SEQ ID NO: 71775 - RNA, 27 nt, synthetic construct
  misc_feature 1..27: note = Protein wntless homolog (264-272)
  source 1..27: mol_type = other RNA
gtgctgctcgagaaggtcatcttcgcc

SEQ ID NO: 71776 - RNA, 36 nt, synthetic construct
  misc_feature 1..36: note = Tumor necrosis factor receptor superfamily member 19 (5-16)
  source 1..36: mol_type = other RNA
gtgctgctcgagcaggaaaagaccttctttacactt

SEQ ID NO: 71777 - RNA, 27 nt, synthetic construct
  misc_feature 1..27: note = Hemicentin-1 (3258-3266)
  source 1..27: mol_type = other RNA
gtgctgctcggcgagaacgtcgaactt

SEQ ID NO: 71778 - RNA, 30 nt, synthetic construct; identical to SEQ ID NO: 47551
  misc_feature 1..30: note = Nucleolar protein 56 (91-100)
  source 1..30: mol_type = other RNA

SEQ ID NO: 71779 - RNA, 27 nt, synthetic construct
  misc_feature 1..27: note = Receptor tyrosine-protein kinase erbB-3 (840-848)
  source 1..27: mol_type = other RNA
gtgctgctcaagagcccctcccaggtc

SEQ ID NO: 71780 - RNA, 33 nt, synthetic construct
  misc_feature 1..33: note = A-kinase anchor protein 6 (1028-1038)
  source 1..33: mol_type = other RNA
gtgctgctccccaacgaccttctggagaaggtc

SEQ ID NO: 71781 - RNA, 27 nt, synthetic construct
  misc_feature 1..27: note = Lysosomal-trafficking regulator (260-268)
  source 1..27: mol_type = other RNA
gtgctgctcagccttctggagaaggtc

SEQ ID NO: 71782 - RNA, 27 nt, synthetic construct
  misc_feature 1..27: note = Cyclic AMP-dependent transcription factor ATF-6 alpha (233-241)
  source 1..27: mol_type = other RNA
gtgctgctcagccagcccaccgtcgtt

SEQ ID NO: 71783 - RNA, 27 nt, synthetic construct
  misc_feature 1..27: note = Regulatory-associated protein of mTOR (223-231)
  source 1..27: mol_type = other RNA
gtgctgctcagccaggtccacagactt

SEQ ID NO: 71784 - RNA, 33 nt, synthetic construct
  misc_feature 1..33: note = Synaptic vesicle membrane protein VAT-1 homolog (379-389)
  source 1..33: mol_type = other RNA
gtgctgctcgtccccggccctgagaaggaaaac

SEQ ID NO: 71785 - RNA, 33 nt, synthetic construct
  misc_feature 1..33: note = Serine/threonine-protein phosphatase 6 regulatory ankyrin repeat subunit A (378-388)
  source 1..33: mol_type = other RNA
gtgctgatggagaccagcggcacagacatgctc

SEQ ID NO: 71786 - RNA, 27 nt, synthetic construct
  misc_feature 1..27: note = HEAT repeat-containing protein 1 (847-855)
  source 1..27: mol_type = other RNA
gtgctgatgaagctcttcatcaaagtc

SEQ ID NO: 71787 - RNA, 27 nt, synthetic construct
  misc_feature 1..27: note = Urocortin-2 (11-19)
  source 1..27: mol_type = other RNA
gtgctgatgctcggcagagtccttgtt

SEQ ID NO: 71788 - RNA, 27 nt, synthetic construct
  misc_feature 1..27: note = Structural maintenance of chromosomes protein 2 (153-161)
  source 1..27: mol_type = other RNA
gtgctgaacatgaagccccctgagatc

SEQ ID NO: 71789 - RNA, 27 nt, synthetic construct
  misc_feature 1..27: note = Bifunctional 3'-phosphoadenosine 5'-phosphosulfate synthase 1 (479-487)
  source 1..27: mol_type = other RNA
gtgctgaaccccgagaccacagtcgtt

SEQ ID NO: 71790 - RNA, 27 nt, synthetic construct
  misc_feature 1..27: note = Receptor activity-modifying protein 2 (34-42)
  source 1..27: mol_type = other RNA
gtgctgaacccccacgaggccctcgct

SEQ ID NO: 71791 - RNA, 27 nt, synthetic construct
  misc_feature 1..27: note = Probable cytosolic iron-sulfur protein assembly protein CIAO1 (145-153)
  source 1..27: mol_type = other RNA
gtgctgaacagccacacccaggacgtc

SEQ ID NO: 71792 - RNA, 27 nt, synthetic construct
  misc_feature 1..27: note = Nucleosome-remodeling factor subunit BPTF (2314-2322)
  source 1..27: mol_type = other RNA
gtgctgcccggccctgggcagcaactc

SEQ ID NO: 71793 - RNA, 27 nt, synthetic construct
  misc_feature 1..27: note = Transmembrane protein 94 (322-330)
  source 1..27: mol_type = other RNA
gtgctgcccatcctccctcttctgttc

SEQ ID NO: 71794 - RNA, 21 nt, synthetic construct
  misc_feature 1..21: note = 40S ribosomal protein S26 (63-69)
  source 1..21: mol_type = other RNA
gtgctgcccaagctctacgtc

SEQ ID NO: 71795 - RNA, 33 nt, synthetic construct
  misc_feature 1..33: note = Protocadherin Fat 3 (2698-2708)
  source 1..33: mol_type = other RNA
gtgctgccccctgagaccttcctcccaagcttt

SEQ ID NO: 71796 - RNA, 27 nt, synthetic construct
  misc_feature 1..27: note = Oxysterol-binding protein-related protein 10 (353-361)
  source 1..27: mol_type = other RNA
gtgctgcccaccttcatcctcgagaag

SEQ ID NO: 71797 - RNA, 27 nt, synthetic construct
  misc_feature 1..27: note = Oxysterol-binding protein-related protein 9 (402-410)
  source 1..27: mol_type = other RNA
gtgctgcccaccttcatcctcgagaga

SEQ ID NO: 71798 - RNA, 30 nt, synthetic construct; identical to SEQ ID NO: 47571
  misc_feature 1..30: note = Protein-associating with the carboxyl-terminal domain of ezrin (30-39)
  source 1..30: mol_type = other RNA

SEQ ID NO: 71799 - RNA, 27 nt, synthetic construct
  misc_feature 1..27: note = Zinc finger MYM-type protein 4 (793-801)
  source 1..27: mol_type = other RNA
gtgctgcagggcgccgtccccaccgtt

SEQ ID NO: 71800 - RNA, 30 nt, synthetic construct
  misc_feature 1..30: note = Serum paraoxonase/arylesterase 2 (326-335)
  source 1..30: mol_type = other RNA
gtgctgcagggcagctccgtcgcctctgtt

SEQ ID NO: 71801 - RNA, 30 nt, synthetic construct
  misc_feature 1..30: note = Microspherule protein 1 (219-228)
  source 1..30: mol_type = other RNA
gtgctgcagaccaacgacctcacaagcgtc

SEQ ID NO: 71802 - RNA, 42 nt, synthetic construct
  misc_feature 1..42: note = Heat shock 70 kDa protein 1-like (171-184)
  source 1..42: mol_type = other RNA
gtgctgagaatcattaacgagcccaccgccgctgcaatagcc

SEQ ID NO: 71803 - RNA, 27 nt, synthetic construct
  misc_feature 1..27: note = Probable helicase with zinc finger domain (252-260)
  source 1..27: mol_type = other RNA
gtgctgagcgagtgcatcgaaggcgtc

SEQ ID NO: 71804 - RNA, 27 nt, synthetic construct
  misc_feature 1..27: note = Magnesium transporter protein 1 (68-76)
  source 1..27: mol_type = other RNA
gtgctgagcgagaaggtctcccagctc

SEQ ID NO: 71805 - RNA, 30 nt, synthetic construct
  misc_feature 1..30: note = Protein misato homolog 1 (109-118)
  source 1..30: mol_type = other RNA
gtgctgagctccgacggcgtctggagagtt

SEQ ID NO: 71806 - RNA, 24 nt, synthetic construct
  misc_feature 1..24: note = Small integral membrane protein 15 (39-46)
  source 1..24: mol_type = other RNA
gtgctgagctggaagctcgccaaa

SEQ ID NO: 71807 - RNA, 27 nt, synthetic construct
  misc_feature 1..27: note = Autophagy-related protein 16-1 (517-525)
  source 1..27: mol_type = other RNA
gtgctgaccggcaaggtcgagaaagtt

SEQ ID NO: 71808 - RNA, 27 nt, synthetic construct
  misc_feature 1..27: note = Transmembraneoprotein NMB (81-89)
  source 1..27: mol_type = other RNA
gtgctgaccagcgactcccccgccctc

SEQ ID NO: 71809 - RNA, 27 nt, synthetic construct
  misc_feature 1..27: note = E3 ubiquitin-protein ligase XIAP (409-417)
  source 1..27: mol_type = other RNA
gtgctggtcgccgacctcgttaacgct

SEQ ID NO: 71810 - RNA, 27 nt, synthetic construct
  misc_feature 1..27: note = Eukaryotic translation initiation factor 3 subunit E (318-326)
  source 1..27: mol_type = other RNA
gtgctggtcaacgacttctttctcgtt

SEQ ID NO: 71811 - RNA, 27 nt, synthetic construct
  misc_feature 1..27: note = Hemicentin-1 (2884-2892)
  source 1..27: mol_type = other RNA
gtgctggtcaacaagagcgccctcatc

SEQ ID NO: 71812 - RNA, 30 nt, synthetic construct
  misc_feature 1..30: note = Cadherin EGF LAG seven-pass G-type receptor 2 (1100-1109)
  source 1..30: mol_type = other RNA
gtgctggtcagcgacggcgttcactccgtg

SEQ ID NO: 71813 - RNA, 30 nt, synthetic construct
  misc_feature 1..30: note = Protocadherin beta-8 (440-449)
  source 1..30: mol_type = other RNA
gtgctggtcagcgacgttaacgataatgcc

SEQ ID NO: 71814 - RNA, 27 nt, synthetic construct
  misc_feature 1..27: note = Elongator complex protein 2 (41-49)
  source 1..27: mol_type = other RNA
gtgctgtacgaccccctcaagagagtc

SEQ ID NO: 71815 - RNA, 33 nt, synthetic construct
  misc_feature 1..33: note = Maltase-glucoamylase (708-718)
  source 1..33: mol_type = other RNA
gtgctgtacgagggcgtcgacgaagttaaggcc

SEQ ID NO: 71816 - RNA, 30 nt, synthetic construct
  misc_feature 1..30: note = Slit homolog 3 protein (361-370)
  source 1..30: mol_type = other RNA
gtgctgtacggcaacaagatcaccgagatt

SEQ ID NO: 71817 - RNA, 30 nt, synthetic construct; identical to SEQ ID NO: 47590
  misc_feature 1..30: note = Slit homolog 2 protein (354-363)
  source 1..30: mol_type = other RNA

SEQ ID NO: 71818 - RNA, 27 nt, synthetic construct
  misc_feature 1..27: note = Protein nepro homolog (10-18)
  source 1..27: mol_type = other RNA
gtgctgtacaagggcgtcctcaaaaga

SEQ ID NO: 71819 - RNA, 36 nt, synthetic construct
  misc_feature 1..36: note = Melanocyte protein PMEL (483-494)
  source 1..36: mol_type = other RNA
gtgctgtacagatatggcagcttctccgtcaccctc

SEQ ID NO: 71820 - RNA, 27 nt, synthetic construct
  misc_feature 1..27: note = Putative eukaryotic translation initiation factor 2 subunit 3-like protein (151-159)
  source 1..27: mol_type = other RNA
gtgatggacgccgctctgctccttatc

SEQ ID NO: 71821 - RNA, 30 nt, synthetic construct
  misc_feature 1..30: note = Putative eukaryotic translation initiation factor 2 subunit 3-like protein (151-160)
  source 1..30: mol_type = other RNA
gtgatggacgccgctctgctccttatcgca

SEQ ID NO: 71822 - RNA, 27 nt, synthetic construct
  misc_feature 1..27: note = Carboxypeptidase Q (442-450)
  source 1..27: mol_type = other RNA
gtgatggaccccaagcagatgaacgtc

SEQ ID NO: 71823 - RNA, 33 nt, synthetic construct
  misc_feature 1..33: note = Lipopolysaccharide-responsive and beige-like anchor protein (1389-1399)
  source 1..33: mol_type = other RNA
gtgatgttcaactttcccgaccctgccaccgtc

SEQ ID NO: 71824 - RNA, 54 nt, synthetic construct
  misc_feature 1..54: note = Cytochrome c oxidase subunit 6C (58-75)
  source 1..54: mol_type = other RNA
gtgatgaaggacttcgaggaaatgagaaaagccggcatctttcagagcgtcaag

SEQ ID NO: 71825 - RNA, 30 nt, synthetic construct; identical to SEQ ID NO: 47598
  misc_feature 1..30: note = Scavenger receptor class B member 1 (146-155)
  source 1..30: mol_type = other RNA

SEQ ID NO: 71826 - RNA, 27 nt, synthetic construct
  misc_feature 1..27: note = Xylosyltransferase 1 (587-595)
  source 1..27: mol_type = other RNA
gtgatgcccaagaaagtcttcaagatc

SEQ ID NO: 71827 - RNA, 42 nt, synthetic construct
  misc_feature 1..42: note = 78 kDa glucose-regulated protein (177-190)
  source 1..42: mol_type = other RNA
gtgatgagaatcattaacgagcccaccgccgctgcaatagcc

SEQ ID NO: 71828 - RNA, 45 nt, synthetic construct
  misc_feature 1..45: note = 78 kDa glucose-regulated protein (177-191)
  source 1..45: mol_type = other RNA
gtgatgagaatcattaacgagcccaccgccgctgcaatagcctac

SEQ ID NO: 71829 - RNA, 27 nt, synthetic construct
  misc_feature 1..27: note = Non-structural maintenance of chromosomes element 1 homolog (4-12)
  source 1..27: mol_type = other RNA
gtgatgaccgacgtccacagaaggttc

SEQ ID NO: 71830 - RNA, 33 nt, synthetic construct
  misc_feature 1..33: note = DNA (cytosine-5)-methyltransferase 3A (139-149)
  source 1..33: mol_type = other RNA
gtgatgtggttcggcgacgggaagtttagcgtc

SEQ ID NO: 71831 - RNA, 21 nt, synthetic construct
  misc_feature 1..21: note = Interferon-induced protein with tetratricopeptide repeats 1 (396-402)
  source 1..21: mol_type = other RNA
gtgaacgccatcattcactac

SEQ ID NO: 71832 - RNA, 54 nt, synthetic construct
  misc_feature 1..54: note = Beta-2-microglobulin (81-98)
  source 1..54: mol_type = other RNA
gtgaaccacgtcaccctgagccagcccaagatcgttaaatgggacagagatatg

SEQ ID NO: 71833 - RNA, 42 nt, synthetic construct
  misc_feature 1..42: note = Protocadherin gamma-C3 (553-566)
  source 1..42: mol_type = other RNA
gtgaacatcttcgtcaccgacagaaatgataacgccccccag

SEQ ID NO: 71834 - RNA, 27 nt, synthetic construct
  misc_feature 1..27: note = T-complex protein 1 subunit eta (46-54)
  source 1..27: mol_type = other RNA
gtgaacaagatcaaagagattgccgtc

SEQ ID NO: 71835 - RNA, 33 nt, synthetic construct
  misc_feature 1..33: note = Cytochrome c oxidase subunit 6A1, mitochondrial (76-86)
  source 1..33: mol_type = other RNA
gtgaaccccctgcctaccggctacgaggacgaa

SEQ ID NO: 71836 - RNA, 33 nt, synthetic construct
  misc_feature 1..33: note = Pumilio homolog 1 (533-543)
  source 1..33: mol_type = other RNA
gtgaacagcgccctggctttcggccaggggctc

SEQ ID NO: 71837 - RNA, 21 nt, synthetic construct
  misc_feature 1..21: note = T-complex protein 1 subunit zeta-2 (199-205)
  source 1..21: mol_type = other RNA
gtgaacagcggcttcttttac

SEQ ID NO: 71838 - RNA, 21 nt, synthetic construct
  misc_feature 1..21: note = Bifunctional glutamate/proline-tRNA ligase (51-57)
  source 1..21: mol_type = other RNA
gtgaacagcatcctgagatac

SEQ ID NO: 71839 - RNA, 72 nt, synthetic construct
  misc_feature 1..72: note = Ras GTPase-activating-like protein IQGAP1 (303-326)
  source 1..72: mol_type = other RNA
gtgaacaccttcagcgccctggctaatatcgacctcgcacttgagcagggcgatgccctggcgttgtttaga

SEQ ID NO: 71840 - RNA, 27 nt, synthetic construct
  misc_feature 1..27: note = 40S ribosomal protein S30 (117-125)
  source 1..27: mol_type = other RNA
gtgaacgtcgttcccaccttcggcaag

SEQ ID NO: 71841 - RNA, 30 nt, synthetic construct
  misc_feature 1..30: note = Transmembraneoprotein NMB (485-494)
  source 1..30: mol_type = other RNA
gtgcccgacagagatcctgccagcccactg

SEQ ID NO: 71842 - RNA, 27 nt, synthetic construct
  misc_feature 1..27: note = Endothelin B receptor (266-274)
  source 1..27: mol_type = other RNA
gtgcccttcatccagaaggccagcgtc

SEQ ID NO: 71843 - RNA, 27 nt, synthetic construct
  misc_feature 1..27: note = Nectin-3 (335-343)
  source 1..27: mol_type = other RNA
gtgcccttcaagcagaccagctccatc

SEQ ID NO: 71844 - RNA, 24 nt, synthetic construct
  misc_feature 1..24: note = Heat shock protein 105 kDa (412-419)
  source 1..24: mol_type = other RNA
gtgcccttccctatcagcctgatt

SEQ ID NO: 71845 - RNA, 33 nt, synthetic construct
  misc_feature 1..33: note = Elastin (436-446)
  source 1..33: mol_type = other RNA
gtgcccggcgcccctggggctgtcccaggagtt

SEQ ID NO: 71846 - RNA, 51 nt, synthetic construct
  misc_feature 1..51: note = Carboxypeptidase D (836-852)
  source 1..51: mol_type = other RNA
gtgcccggcacctacaagatcacagccagcgctagagggtataaccctgtc

SEQ ID NO: 71847 - RNA, 45 nt, synthetic construct
  misc_feature 1..45: note = Transmembraneoprotein NMB (221-235)
  source 1..45: mol_type = other RNA
gtgcccatcgcccaggtcaaggacgtttacgtggtaaccgatcaa

SEQ ID NO: 71848 - RNA, 78 nt, synthetic construct
  misc_feature 1..78: note = Transmembraneoprotein NMB (221-246)
  source 1..78: mol_type = other RNA
gtgcccatcgcccaggtcaaggacgtttacgtggtaaccgatcaaattcctgtgttcgtcacaatgtttcagaaaaac

SEQ ID NO: 71849 - RNA, 36 nt, synthetic construct
  misc_feature 1..36: note = Neuronal cell adhesion molecule (399-410)
  source 1..36: mol_type = other RNA
gtgcccatcgagattgcccctgacgatccaagcaga

SEQ ID NO: 71850 - RNA, 39 nt, synthetic construct
  misc_feature 1..39: note = Neuronal cell adhesion molecule (399-411)
  source 1..39: mol_type = other RNA
gtgcccatcgagattgcccctgacgatccaagcagaaag

SEQ ID NO: 71851 - RNA, 48 nt, synthetic construct
  misc_feature 1..48: note = Neuronal cell adhesion molecule (399-414)
  source 1..48: mol_type = other RNA
gtgcccatcgagattgcccctgacgatccaagcagaaagatagacggc

SEQ ID NO: 71852 - RNA, 27 nt, synthetic construct
  misc_feature 1..27: note = pre-rRNA processing protein FTSJ3 (78-86)
  source 1..27: mol_type = other RNA
gtgcccatcaagcctctgccaaacgtc

SEQ ID NO: 71853 - RNA, 42 nt, synthetic construct
  misc_feature 1..42: note = Thioredoxin reductase 1, cytoplasmic (252-265)
  source 1..42: mol_type = other RNA
gtgcccatcaaggtcgagcagattgaagccggcacccctggg

SEQ ID NO: 71854 - RNA, 27 nt, synthetic construct
  misc_feature 1..27: note = Endoglin (526-534)
  source 1..27: mol_type = other RNA
gtgcccatccctaagaccggcacactg

SEQ ID NO: 71855 - RNA, 27 nt, synthetic construct
  misc_feature 1..27: note = Interferon-induced 35 kDa protein (73-81)
  source 1..27: mol_type = other RNA
gtgcccaagagcctggtctccaacctc

SEQ ID NO: 71856 - RNA, 42 nt, synthetic construct
  misc_feature 1..42: note = Solute carrier family 2, facilitated glucose transporter member 14 (177-190)
  source 1..42: mol_type = other RNA
gtgcccatgtacatcggcgagattagccctaccgccctgaga

SEQ ID NO: 71857 - RNA, 45 nt, synthetic construct
  misc_feature 1..45: note = Solute carrier family 2, facilitated glucose transporter member 1 (140-154)
  source 1..45: mol_type = other RNA
gtgcccatgtacgtcggcgaggttagccctaccgccctgagaggg

SEQ ID NO: 71858 - RNA, 27 nt, synthetic construct
  misc_feature 1..27: note = Nucleosome-remodeling factor subunit BPTF (238-246)
  source 1..27: mol_type = other RNA
gtgcccaacgagcacatcatgaatgtc

SEQ ID NO: 71859 - RNA, 30 nt, synthetic construct
  misc_feature 1..30: note = COMM domain-containing protein 7 (78-87)
  source 1..30: mol_type = other RNA
gtgcccaacggcgccctgaagaaaagcctc

SEQ ID NO: 71860 - RNA, 27 nt, synthetic construct
  misc_feature 1..27: note = Diacylglycerol O-acyltransferase 1 (328-336)
  source 1..27: mol_type = other RNA
gtgcccaaccacctgatctggctcatt

SEQ ID NO: 71861 - RNA, 27 nt, synthetic construct
  misc_feature 1..27: note = Selenoprotein N (214-222)
  source 1..27: mol_type = other RNA
gtgcccaaccacagaagcctgaatgtc

SEQ ID NO: 71862 - RNA, 24 nt, synthetic construct
  misc_feature 1..24: note = Polymerase I and transcript release factor (228-235)
  source 1..24: mol_type = other RNA
gtgccccctttcacctttcacgtc

SEQ ID NO: 71863 - RNA, 24 nt, synthetic construct
  misc_feature 1..24: note = Sodium/potassium-transporting ATPase subunit alpha-3 (168-175)
  source 1..24: mol_type = other RNA
gtgccccagcaagccctggtcatc

SEQ ID NO: 71864 - RNA, 27 nt, synthetic construct
  misc_feature 1..27: note = Neurofibromin (199-207)
  source 1..27: mol_type = other RNA
gtgccccagagccacatgcctgagatc

SEQ ID NO: 71865 - RNA, 27 nt, synthetic construct
  misc_feature 1..27: note = Krueppel-like factor 15 (133-141)
  source 1..27: mol_type = other RNA
gtgcccagacctttccagccaaccctg

SEQ ID NO: 71866 - RNA, 24 nt, synthetic construct
  misc_feature 1..24: note = Transmembrane emp24 domain-containing protein 7 (5-12)
  source 1..24: mol_type = other RNA
gtgcccagaagcgcctccgtcctg

SEQ ID NO: 71867 - RNA, 27 nt, synthetic construct
  misc_feature 1..27: note = Transmembrane emp24 domain-containing protein 7 (5-13)
  source 1..27: mol_type = other RNA
gtgcccagaagcgcctccgtcctgctc

SEQ ID NO: 71868 - RNA, 30 nt, synthetic construct
  misc_feature 1..30: note = Transmembrane emp24 domain-containing protein 7 (5-14)
  source 1..30: mol_type = other RNA
gtgcccagaagcgcctccgtcctgctcctt

SEQ ID NO: 71869 - RNA, 27 nt, synthetic construct
  misc_feature 1..27: note = F-box/WD repeat-containing protein 9 (435-443)
  source 1..27: mol_type = other RNA
gtgcccaccgaccctccaagaacaatc

SEQ ID NO: 71870 - RNA, 24 nt, synthetic construct
  misc_feature 1..24: note = Protein Smaug homolog 1 (103-110)
  source 1..24: mol_type = other RNA
gtgcccaccacaatcaacactatt

SEQ ID NO: 71871 - RNA, 27 nt, synthetic construct
  misc_feature 1..27: note = Major facilitator superfamily domain-containing protein 12 (214-222)
  source 1..27: mol_type = other RNA
gtgcccgtcttcagaaacctgagcctc

SEQ ID NO: 71872 - RNA, 27 nt, synthetic construct
  misc_feature 1..27: note = Mitogen-activated protein kinase 7 (125-133)
  source 1..27: mol_type = other RNA
gtgccctacggcgagttcaagagcgtc

SEQ ID NO: 71873 - RNA, 24 nt, synthetic construct
  misc_feature 1..24: note = Solute carrier family 22 member 18 (47-54)
  source 1..24: mol_type = other RNA
gtgccctacctgagcagaaagctc

SEQ ID NO: 71874 - RNA, 24 nt, synthetic construct
  misc_feature 1..24: note = Glycogen debranching enzyme (1050-1057)
  source 1..24: mol_type = other RNA
gtgccctacagactgaacgagatc

SEQ ID NO: 71875 - RNA, 27 nt, synthetic construct
  misc_feature 1..27: note = Phosphatidylinositol 3-kinase catalytic subunit type 3 (400-408)
  source 1..27: mol_type = other RNA
gtgcaggccctgaagtacgagaacttc

SEQ ID NO: 71876 - RNA, 27 nt, synthetic construct
  misc_feature 1..27: note = Adipocyte enhancer-binding protein 1 (657-665)
  source 1..27: mol_type = other RNA
gtgcaggacaccagaatccacctggtc

SEQ ID NO: 71877 - RNA, 27 nt, synthetic construct
  misc_feature 1..27: note = Spectrin beta chain, non-erythrocytic 5 (994-1002)
  source 1..27: mol_type = other RNA
gtgcagctggcccacagcgtcgaggtt

SEQ ID NO: 71878 - RNA, 27 nt, synthetic construct
  misc_feature 1..27: note = Mitochondrial pyruvate carrier 1 (19-27)
  source 1..27: mol_type = other RNA
gtgcagcccagaaactggctgctcttc

SEQ ID NO: 71879 - RNA, 27 nt, synthetic construct
  misc_feature 1..27: note = Mitogen-activated protein kinase kinase kinase 6 (125-133)
  source 1..27: mol_type = other RNA
gtgcagcccagcctgttctaccacctc

SEQ ID NO: 71880 - RNA, 24 nt, synthetic construct
  misc_feature 1..24: note = CD99 antigen (178-185)
  source 1..24: mol_type = other RNA
gtgcagagaaccctgctcgagaag

SEQ ID NO: 71881 - RNA, 27 nt, synthetic construct
  misc_feature 1..27: note = eIF-2-alpha kinase activator GCN1 (1752-1760)
  source 1..27: mol_type = other RNA
gtgagagacggctacatcatgatgttc

SEQ ID NO: 71882 - RNA, 27 nt, synthetic construct
  misc_feature 1..27: note = Lysosomal-trafficking regulator (3248-3256)
  source 1..27: mol_type = other RNA
gtgagaatgccccctttcaccaagatg

SEQ ID NO: 71883 - RNA, 27 nt, synthetic construct
  misc_feature 1..27: note = Tripeptidyl-peptidase 1 (151-159)
  source 1..27: mol_type = other RNA
gtgagaagcccccacccttaccagctg

SEQ ID NO: 71884 - RNA, 24 nt, synthetic construct
  misc_feature 1..24: note = Anion exchange protein (986-993)
  source 1..24: mol_type = other RNA
gtgagcgccgctgcagtcgttttc

SEQ ID NO: 71885 - RNA, 24 nt, synthetic construct
  misc_feature 1..24: note = V-type proton ATPase subunit H (400-407)
  source 1..24: mol_type = other RNA
gtgagcgacgatccccaggtcctg

SEQ ID NO: 71886 - RNA, 24 nt, synthetic construct
  misc_feature 1..24: note = Cofilin-1 (7-14)
  source 1..24: mol_type = other RNA
gtgagcgacggcgtcatcaaggtt

SEQ ID NO: 71887 - RNA, 27 nt, synthetic construct
  misc_feature 1..27: note = Cofilin-1 (7-15)
  source 1..27: mol_type = other RNA
gtgagcgacggcgtcatcaaggttttc

SEQ ID NO: 71888 - RNA, 24 nt, synthetic construct
  misc_feature 1..24: note = HLA class I histocompatibility antigen, Cw-3 alpha chain (218-225)
  source 1..24: mol_type = other RNA
gtgagcgaccacgaggccaccctg

SEQ ID NO: 71889 - RNA, 24 nt, synthetic construct
  misc_feature 1..24: note = Proteasome subunit beta type-8 (264-271)
  source 1..24: mol_type = other RNA
gtgagcgacctgctccaccagtac

SEQ ID NO: 71890 - RNA, 27 nt, synthetic construct
  misc_feature 1..27: note = Baculoviral IAP repeat-containing protein 6 (689-697)
  source 1..27: mol_type = other RNA
gtgagcgaccccaacctgatccacgtc

SEQ ID NO: 71891 - RNA, 39 nt, synthetic construct
  misc_feature 1..39: note = Microtubule-associated protein (1369-1381)
  source 1..39: mol_type = other RNA
gtgagcgaggaaaacaagaccgacgccgctaatagatac

SEQ ID NO: 71892 - RNA, 24 nt, synthetic construct
  misc_feature 1..24: note = Neuroblast differentiation-associated protein AHNAK (3336-3343)
  source 1..24: mol_type = other RNA
gtgagcggccccaagctgaacatc

SEQ ID NO: 71893 - RNA, 42 nt, synthetic construct
  misc_feature 1..42: note = PR domain zinc finger protein 10 (909-922)
  source 1..42: mol_type = other RNA
gtgagcggccagcccctgtccccttctgcccaacaggctcag

SEQ ID NO: 71894 - RNA, 30 nt, synthetic construct
  misc_feature 1..30: note = Melanocyte protein PMEL (412-421)
  source 1..30: mol_type = other RNA
gtgagcatcgtcgttctgtccggcaccaca

SEQ ID NO: 71895 - RNA, 27 nt, synthetic construct
  misc_feature 1..27: note = Kinesin-like protein KIF27 (522-530)
  source 1..27: mol_type = other RNA
gtgagcctgaaggaggcccagaaagtc

SEQ ID NO: 71896 - RNA, 24 nt, synthetic construct
  misc_feature 1..24: note = HLA class I histocompatibility antigen, A-23 alpha chain (358-365)
  source 1..24: mol_type = other RNA
gtgagcctgaccgcctgcaaggtc

SEQ ID NO: 71897 - RNA, 27 nt, synthetic construct
  misc_feature 1..27: note = Potassium-transporting ATPase alpha chain 1 (600-608)
  source 1..27: mol_type = other RNA
gtgagcatgatcgacccccctagagcc

SEQ ID NO: 71898 - RNA, 27 nt, synthetic construct
  misc_feature 1..27: note = Cyclic AMP-dependent transcription factor ATF-6 alpha (445-453)
  source 1..27: mol_type = other RNA
gtgagcaacgacaaggccctgatggtc

SEQ ID NO: 71899 - RNA, 27 nt, synthetic construct
  misc_feature 1..27: note = Vacuolar protein sorting-associated protein 13D (2458-2466)
  source 1..27: mol_type = other RNA
gtgagcaacgagagacacctggaagtc

SEQ ID NO: 71900 - RNA, 27 nt, synthetic construct
  misc_feature 1..27: note = Transcription initiation factor TFIID subunit 1 (307-315)
  source 1..27: mol_type = other RNA
gtgagccagaagtccctgtggaactac

SEQ ID NO: 71901 - RNA, 27 nt, synthetic construct
  misc_feature 1..27: note = Neuron navigator 3 (198-206)
  source 1..27: mol_type = other RNA
gtgagctccaagaccacactgcagtac

SEQ ID NO: 71902 - RNA, 27 nt, synthetic construct
  misc_feature 1..27: note Dolichyl-diphosphooligosaccharide-proteinosyltransferase subunit 1 (300-308)
  source 1..27: mol_type = other RNA
gtgagcacctcccacctgctcatcctt

SEQ ID NO: 71903 - RNA, 27 nt, synthetic construct
  misc_feature 1..27: note = DNA damage-binding protein 1 (7-15)
  source 1..27: mol_type = other RNA
gtgaccgcccagaagcccacagctgtc

SEQ ID NO: 71904 - RNA, 27 nt, synthetic construct
  misc_feature 1..27: note = General transcription factor II-I (201-209)
  source 1..27: mol_type = other RNA
gtgaccgacgccgatagaagcatcctg

SEQ ID NO: 71905 - RNA, 69 nt, synthetic construct
  misc_feature 1..69: note = Nebulin (5596-5618)
  source 1..69: mol_type = other RNA
gtgaccgacgataagaacacagtcctggccctcagaaatactcttatcgagagcgacctgaaatacaag

SEQ ID NO: 71906 - RNA, 27 nt, synthetic construct
  misc_feature 1..27: note = HLA class II histocompatibility antigen, DQ beta 1 chain (114-122)
  source 1..27: mol_type = other RNA
gtgaccgacttctaccccgcccagatc

SEQ ID NO: 71907 - RNA, 27 nt, synthetic construct
  misc_feature 1..27: note = Protein dopey-2 (2274-2282)
  source 1..27: mol_type = other RNA
gtgaccgacagccccagaatcctgaag

SEQ ID NO: 71908 - RNA, 27 nt, synthetic construct
  misc_feature 1..27: note = Williams-Beuren syndrome chromosomal region 16 protein (318-326)
  source 1..27: mol_type = other RNA
gtgaccgacagcacacaggtcaacgtt

SEQ ID NO: 71909 - RNA, 30 nt, synthetic construct
  misc_feature 1..30: note = Nebulin (5327-5336)
  source 1..30: mol_type = other RNA
gtgaccgacacagtcagcgatgttaagtac

SEQ ID NO: 71910 - RNA, 51 nt, synthetic construct
  misc_feature 1..51: note = Cytochrome c oxidase subunit 6B1 (1-17)
  source 1..51: mol_type = other RNA
gtgaccgactgggatgagcagagagccgaaggcacattccccgggaagatc

SEQ ID NO: 71911 - RNA, 27 nt, synthetic construct
  misc_feature 1..27: note = Insulin-like growth factor 1 receptor (683-691)
  source 1..27: mol_type = other RNA
gtgaccgagaaccccaagacagaagtc

SEQ ID NO: 71912 - RNA, 27 nt, synthetic construct
  misc_feature 1..27: note = Ras association domain-containing protein 3 (64-72)
  source 1..27: mol_type = other RNA
gtgaccgagagccccgccaagttcgct

SEQ ID NO: 71913 - RNA, 30 nt, synthetic construct; identical to SEQ ID NO: 47686
  misc_feature 1..30: note = Large neutral amino acids transporter small subunit 2 (80-89)
  source 1..30: mol_type = other RNA

SEQ ID NO: 71914 - RNA, 27 nt, synthetic construct
  misc_feature 1..27: note = Cadherin EGF LAG seven-pass G-type receptor 1 (634-642)
  source 1..27: mol_type = other RNA
gtgaccttcagcgccctgctccccggc

SEQ ID NO: 71915 - RNA, 63 nt, synthetic construct
  misc_feature 1..63: note = Heterogeneous nuclear ribonucleoprotein F (327-347)
  source 1..63: mol_type = other RNA
gtgaccggcgaggccgacgtcgaattcgctacacacgaggaagcagttgccgcgatgagcaag

SEQ ID NO: 71916 - RNA, 36 nt, synthetic construct
  misc_feature 1..36: note = Mucin-19 (3971-3982)
  source 1..36: mol_type = other RNA
gtgaccggcatcacagggcccagcgccggaattact

SEQ ID NO: 71917 - RNA, 72 nt, synthetic construct
  misc_feature 1..72: note = Splicing factor 3B subunit 4 (49-72)
  source 1..72: mol_type = other RNA
gtgaccggccagcaccaagggtacggattcgtcgagtttctgagcgaagaggacgccgattatgctatcaag

SEQ ID NO: 71918 - RNA, 27 nt, synthetic construct
  misc_feature 1..27: note = Melanotransferrin (119-127)
  source 1..27: mol_type = other RNA
gtgaccatcgacacactgaagggcgtc

SEQ ID NO: 71919 - RNA, 30 nt, synthetic construct
  misc_feature 1..30: note = Adhesion G protein-coupled receptor F5 (269-278)
  source 1..30: mol_type = other RNA
gtgaccatcaacgagagcaatttctttgtc

SEQ ID NO: 71920 - RNA, 27 nt, synthetic construct
  misc_feature 1..27: note = Maltase-glucoamylase (886-894)
  source 1..27: mol_type = other RNA
gtgaccatcacagacctgcagggcctc

SEQ ID NO: 71921 - RNA, 36 nt, synthetic construct
  misc_feature 1..36: note = Annexin A2 (54-65)
  source 1..36: mol_type = other RNA
gtgaccatcgtcaacattctgacaaatagaagcaac

SEQ ID NO: 71922 - RNA, 42 nt, synthetic construct
  misc_feature 1..42: note = Annexin A2 (54-67)
  source 1..42: mol_type = other RNA
gtgaccatcgtcaacattctgacaaatagaagcaacgcccag

SEQ ID NO: 71923 - RNA, 57 nt, synthetic construct
  misc_feature 1..57: note = Prelamin-A/C (346-364)
  source 1..57: mol_type = other RNA
gtgaccatctgggccgctggcgcaggggccacacacagcccccctactgacctggtc

SEQ ID NO: 71924 - RNA, 39 nt, synthetic construct
  misc_feature 1..39: note = Laminin subunit gamma-1 (671-683)
  source 1..39: mol_type = other RNA
gtgaccctggccagcgctagacccggccctggggtccca

SEQ ID NO: 71925 - RNA, 33 nt, synthetic construct
  misc_feature 1..33: note = Heat shock transcription factor, X-linked (369-379)
  source 1..33: mol_type = other RNA
gtgaccctggtcgccgctggcgcagcccagccc

SEQ ID NO: 71926 - RNA, 27 nt, synthetic construct
  misc_feature 1..27: note = Trafficking protein particle complex subunit 2-like protein (73-81)
  source 1..27: mol_type = other RNA
gtgaccaacagcaaggtcaaattcgtt

SEQ ID NO: 71927 - RNA, 27 nt, synthetic construct
  misc_feature 1..27: note = Solute carrier family 26 member 10 (164-172)
  source 1..27: mol_type = other RNA
gtgacccccgaccagctgttcgtcagc

SEQ ID NO: 71928 - RNA, 30 nt, synthetic construct; identical to SEQ ID NO: 47701
  misc_feature 1..30: note = Treacle protein (248-257)
  source 1..30: mol_type = other RNA

SEQ ID NO: 71929 - RNA, 45 nt, synthetic construct
  misc_feature 1..45: note = Desmoglein-2 (901-915)
  source 1..45: mol_type = other RNA
gtgacccaggagatcgtcacagaaagaagcgtttcctctaggcaa

SEQ ID NO: 71930 - RNA, 48 nt, synthetic construct
  misc_feature 1..48: note = Desmoglein-2 (901-916)
  source 1..48: mol_type = other RNA
gtgacccaggagatcgtcacagaaagaagcgtttcctctaggcaagcc

SEQ ID NO: 71931 - RNA, 48 nt, synthetic construct
  misc_feature 1..48: note = Voltage-dependent anion-selective channel protein 1 (164-179)
  source 1..48: mol_type = other RNA
gtgacccagagcaacttcgccgtcggctacaagacagacgagtttcaa

SEQ ID NO: 71932 - RNA, 27 nt, synthetic construct
  misc_feature 1..27: note = Bifunctional glutamate/proline-tRNA ligase (1104-1112)
  source 1..27: mol_type = other RNA
gtgaccagaagcggcaagacagagctg

SEQ ID NO: 71933 - RNA, 33 nt, synthetic construct
  misc_feature 1..33: note = HMG domain-containing protein 4 (358-368)
  source 1..33: mol_type = other RNA
gtgaccagcggcccccctccatccatcccgtac

SEQ ID NO: 71934 - RNA, 39 nt, synthetic construct
  misc_feature 1..39: note = Vimentin (31-43)
  source 1..39: mol_type = other RNA
gtgaccacaagcactagaacgtactccctgggctctgcc

SEQ ID NO: 71935 - RNA, 27 nt, synthetic construct
  misc_feature 1..27: note = Low-density lipoprotein receptor-related protein 2 (584-592)
  source 1..27: mol_type = other RNA
gtgacctacgacggcatccagagaaag

SEQ ID NO: 71936 - RNA, 27 nt, synthetic construct
  misc_feature 1..27: note = Unconventional myosin-Ic (1036-1044)
  source 1..27: mol_type = other RNA
gtggtcgcccccagactgaacagcagg

SEQ ID NO: 71937 - RNA, 30 nt, synthetic construct
  misc_feature 1..30: note = Echinoderm microtubule-associated protein-like 3 (378-387)
  source 1..30: mol_type = other RNA
gtggtcgacgatagcaacgagcacatgctg

SEQ ID NO: 71938 - RNA, 27 nt, synthetic construct
  misc_feature 1..27: note = Helicase with zinc finger domain 2 (2588-2596)
  source 1..27: mol_type = other RNA
gtggtcgaccccaaccaggttaatgtg

SEQ ID NO: 71939 - RNA, 27 nt, synthetic construct
  misc_feature 1..27: note = Catenin alpha-1 (33-41)
  source 1..27: mol_type = other RNA
gtggtcgaggacggcatcctgaagctc

SEQ ID NO: 71940 - RNA, 42 nt, synthetic construct
  misc_feature 1..42: note = Beta-hexosaminidase subunit alpha (397-410)
  source 1..42: mol_type = other RNA
gtggtcgagcccctggccttcgaaggcacccctgagcagaag

SEQ ID NO: 71941 - RNA, 39 nt, synthetic construct
  misc_feature 1..39: note = Glyceraldehyde-3-phosphate dehydrogenase (95-107)
  source 1..39: mol_type = other RNA
gtggtcgagagcaccggcgttttcacaactatggaaaag

SEQ ID NO: 71942 - RNA, 45 nt, synthetic construct
  misc_feature 1..45: note = Glyceraldehyde-3-phosphate dehydrogenase (95-109)
  source 1..45: mol_type = other RNA
gtggtcgagagcaccggcgttttcacaactatggaaaaggccggg

SEQ ID NO: 71943 - RNA, 48 nt, synthetic construct
  misc_feature 1..48: note = Glyceraldehyde-3-phosphate dehydrogenase (95-110)
  source 1..48: mol_type = other RNA
gtggtcgagagcaccggcgttttcacaactatggaaaaggccggggct

SEQ ID NO: 71944 - RNA, 27 nt, synthetic construct
  misc_feature 1..27: note = Thioredoxin-interacting protein (12-20)
  source 1..27: mol_type = other RNA
gtggtcttcaacgaccccgagaaggtt

SEQ ID NO: 71945 - RNA, 27 nt, synthetic construct
  misc_feature 1..27: note = Ribosomal RNA-processing protein 7 homolog A (119-127)
  source 1..27: mol_type = other RNA
gtggtcttccagaagcccagcggcgtt

SEQ ID NO: 71946 - RNA, 27 nt, synthetic construct
  misc_feature 1..27: note = F-box only protein 7 (293-301)
  source 1..27: mol_type = other RNA
gtggtcctgcccctcgagcttaagctg

SEQ ID NO: 71947 - RNA, 27 nt, synthetic construct
  misc_feature 1..27: note = ABCB9 protein (422-430)
  source 1..27: mol_type = other RNA
gtggtccaggttagcatcctgtactat

SEQ ID NO: 71948 - RNA, 24 nt, synthetic construct
  misc_feature 1..24: note = Unconventional myosin-Ic (251-258)
  source 1..24: mol_type = other RNA
gtggtcagaaaggccctgaccgtt

SEQ ID NO: 71949 - RNA, 27 nt, synthetic construct
  misc_feature 1..27: note = Cancer/testis antigen 55 (63-71)
  source 1..27: mol_type = other RNA
gtggtcaccggcaacgttcccctgaag

SEQ ID NO: 71950 - RNA, 24 nt, synthetic construct
  misc_feature 1..24: note = Protein FAM65B (860-867)
  source 1..24: mol_type = other RNA
gtggtcaccgttttccagtactat

SEQ ID NO: 71951 - RNA, 27 nt, synthetic construct
  misc_feature 1..27: note = Leucine-rich repeat LGI family member 4 (16-24)
  source 1..27: mol_type = other RNA
gtggtcgttgcctggagaccccctaag

SEQ ID NO: 71952 - RNA, 36 nt, synthetic construct
  misc_feature 1..36: note = Glutamate receptor ionotropic, kainate 2 (174-185)
  source 1..36: mol_type = other RNA
gtggtctacgacgatagcaccggcctgatcagactc

SEQ ID NO: 71953 - RNA, 45 nt, synthetic construct
  misc_feature 1..45: note = Calcium-binding mitochondrial carrier protein SCaMC-1 (444-458)
  source 1..45: mol_type = other RNA
gtggtctacgagaacatgaagcagaccctgggcgttacacaaaaa

SEQ ID NO: 71954 - RNA, 33 nt, synthetic construct
  misc_feature 1..33: note = N-acetyllactosaminide beta-1,6-N-acetylglucosaminyl-transferase, isoform A (159-169)
  source 1..33: mol_type = other RNA
gtggtctacggcgggatcagcagactgcaggcc

SEQ ID NO: 71955 - RNA, 36 nt, synthetic construct
  misc_feature 1..36: note = m7GpppX diphosphatase (131-142)
  source 1..36: mol_type = other RNA
gtggtctaccccgccaccgagaagcacctgcagaaa

SEQ ID NO: 71956 - RNA, 27 nt, synthetic construct
  misc_feature 1..27: note = Melanoma-derived growth regulatory protein (69-77)
  source 1..27: mol_type = other RNA
gtggtctacgttttcagcaagctgaaa

SEQ ID NO: 71957 - RNA, 30 nt, synthetic construct
  misc_feature 1..30: note = 2-hydroxyacylsphingosine 1-beta-galactosyltransferase (258-267)
  source 1..30: mol_type = other RNA
gtggtctacgttggcgggatcctgaccaag

SEQ ID NO: 71958 - RNA, 27 nt, synthetic construct
  misc_feature 1..27: note = N-acylglucosamine 2-epimerase (48-56)
  source 1..27: mol_type = other RNA
gtgtacgacgatctgaagtatgtctgg

SEQ ID NO: 71959 - RNA, 30 nt, synthetic construct
  misc_feature 1..30: note = Cleft lip and palate transmembrane protein 1 (470-479)
  source 1..30: mol_type = other RNA
gtgtacgacgatatggccttcagatatctg

SEQ ID NO: 71960 - RNA, 36 nt, synthetic construct
  misc_feature 1..36: note = Protein phosphatase 1A (58-69)
  source 1..36: mol_type = other RNA
gtgtacgacggccacgccgggagccaggtcgctaag

SEQ ID NO: 71961 - RNA, 27 nt, synthetic construct
  misc_feature 1..27: note = Melanoma-associated antigen 4 (231-239)
  source 1..27: mol_type = other RNA
gtgtacgacggcagagagcacaccgtc

SEQ ID NO: 71962 - RNA, 30 nt, synthetic construct
  misc_feature 1..30: note = Nuclear pore complex protein Nup160 (1114-1123)
  source 1..30: mol_type = other RNA
gtgtacgacagacccggcgccagccctaag

SEQ ID NO: 71963 - RNA, 24 nt, synthetic construct
  misc_feature 1..24: note = Retinoic acid receptor alpha (49-56)
  source 1..24: mol_type = other RNA
gtgtacgagaccgacgtcttcgtt

SEQ ID NO: 71964 - RNA, 27 nt, synthetic construct
  misc_feature 1..27: note = Origin recognition complex subunit 3 (436-444)
  source 1..27: mol_type = other RNA
gtgtacttcagcgccgctcacgcactg

SEQ ID NO: 71965 - RNA, 27 nt, synthetic construct
  misc_feature 1..27: note = Melanoma-associated antigen C2 (266-274)
  source 1..27: mol_type = other RNA
gtgtacggcgagcccagagaactgctc

SEQ ID NO: 71966 - RNA, 27 nt, synthetic construct
  misc_feature 1..27: note = UBX domain-containing protein 6 (214-222)
  source 1..27: mol_type = other RNA
gtgtacggcttcgtcagagaggccctg

SEQ ID NO: 71967 - RNA, 27 nt, synthetic construct
  misc_feature 1..27: note = Tripartite motif-containing protein 55 (92-100)
  source 1..27: mol_type = other RNA
gtgtacggcctgcagagaaacctcctt

SEQ ID NO: 71968 - RNA, 27 nt, synthetic construct
  misc_feature 1..27: note = Sulfate transporter (138-146)
  source 1..27: mol_type = other RNA
gtgtacggcctgtataccagcttcttt

SEQ ID NO: 71969 - RNA, 24 nt, synthetic construct
  misc_feature 1..24: note = Filamin-A (747-754)
  source 1..24: mol_type = other RNA
gtgtacggccccggggtcgccaag

SEQ ID NO: 71970 - RNA, 24 nt, synthetic construct
  misc_feature 1..24: note = Serine palmitoyltransferase 2 (238-245)
  source 1..24: mol_type = other RNA
gtgtacggccagcccagaaccagg

SEQ ID NO: 71971 - RNA, 27 nt, synthetic construct
  misc_feature 1..27: note = Rho-related BTB domain-containing protein 3 (463-471)
  source 1..27: mol_type = other RNA
gtgtacggcgtcagcaaggagaccttc

SEQ ID NO: 71972 - RNA, 27 nt, synthetic construct
  misc_feature 1..27: note = Beta-galactoside alpha-2,6-sialyltransferase 1 (260-268)
  source 1..27: mol_type = other RNA
gtgtaccacagcgacatccccaagtgg

SEQ ID NO: 71973 - RNA, 27 nt, synthetic construct
  misc_feature 1..27: note = Heterogeneous nuclear ribonucleoprotein L-like (131-139)
  source 1..27: mol_type = other RNA
gtgtacatcgccggccagcaagctttc

SEQ ID NO: 71974 - RNA, 27 nt, synthetic construct
  misc_feature 1..27: note = Kinesin-like protein KIF3C (175-183)
  source 1..27: mol_type = other RNA
gtgtacatcaaggacctgagctccttc

SEQ ID NO: 71975 - RNA, 27 nt, synthetic construct
  misc_feature 1..27: note = Ubiquitin carboxyl-terminal hydrolase 40 (308-316)
  source 1..27: mol_type = other RNA
gtgtacatcaaggacgtcgatcacctg

SEQ ID NO: 71976 - RNA, 24 nt, synthetic construct
  misc_feature 1..24: note = 26S proteasome non-ATPase regulatory subunit 8 (131-138)
  source 1..24: mol_type = other RNA
gtgtacatcaagcaccccgtcagc

SEQ ID NO: 71977 - RNA, 30 nt, synthetic construct; identical to SEQ ID NO: 47750
  misc_feature 1..30: note = Protocadherin gamma-A11 (898-907)
  source 1..30: mol_type = other RNA

SEQ ID NO: 71978 - RNA, 30 nt, synthetic construct
  misc_feature 1..30: note = Myotubularin (63-72)
  source 1..30: mol_type = other RNA
gtgtacatcaccaactatagactgtacctc

SEQ ID NO: 71979 - RNA, 27 nt, synthetic construct
  misc_feature 1..27: note = Polycystic kidney disease 2-like 1 protein (265-273)
  source 1..27: mol_type = other RNA
gtgtacaacgccaatatcaacctgttc

SEQ ID NO: 71980 - RNA, 27 nt, synthetic construct
  misc_feature 1..27: note = Intron-binding protein aquarius (344-352)
  source 1..27: mol_type = other RNA
gtgtacaacatgtatatgcacctgatc

SEQ ID NO: 71981 - RNA, 27 nt, synthetic construct
  misc_feature 1..27: note = Unconventional myosin-X (213-221)
  source 1..27: mol_type = other RNA
gtgtacaacaataacagctccagattc

SEQ ID NO: 71982 - RNA, 27 nt, synthetic construct
  misc_feature 1..27: note = Exocyst complex component 6B (535-543)
  source 1..27: mol_type = other RNA
gtgtacaaccagatcaaggagttcatt

SEQ ID NO: 71983 - RNA, 27 nt, synthetic construct
  misc_feature 1..27: note = HLA class II histocompatibility antigen, DR beta 5 chain (96-104)
  source 1..27: mol_type = other RNA
gtgtaccccgccagaacccagacactg

SEQ ID NO: 71984 - RNA, 27 nt, synthetic construct
  misc_feature 1..27: note = HLA class II histocompatibility antigen, DO beta chain (127-135)
  source 1..27: mol_type = other RNA
gtgtaccccgagagaacccctctgctc

SEQ ID NO: 71985 - RNA, 27 nt, synthetic construct
  misc_feature 1..27: note = tRNA-splicing endonuclease subunit Sen34 (246-254)
  source 1..27: mol_type = other RNA
gtgtaccccggcgaccctctgagattc

SEQ ID NO: 71986 - RNA, 27 nt, synthetic construct
  misc_feature 1..27: note = Cullin-associated NEDD8-dissociated protein 1 (651-659)
  source 1..27: mol_type = other RNA
gtgtaccccagctccctgtctaagatc

SEQ ID NO: 71987 - RNA, 30 nt, synthetic construct
  misc_feature 1..30: note = Zinc finger protein 529 (226-235)
  source 1..30: mol_type = other RNA
gtgtaccagaagatccacaacgagaaattc

SEQ ID NO: 71988 - RNA, 27 nt, synthetic construct
  misc_feature 1..27: note = DNA-directed RNA polymerase I subunit RPA1 (1314-1322)
  source 1..27: mol_type = other RNA
gtgtaccagctgagattccaatttctc

SEQ ID NO: 71989 - RNA, 27 nt, synthetic construct
  misc_feature 1..27: note = Protein CDV3 homolog (66-74)
  source 1..27: mol_type = other RNA
gtgtacagaccccctggcgccaggctg

SEQ ID NO: 71990 - RNA, 27 nt, synthetic construct
  misc_feature 1..27: note = Polynucleotide 5'-hydroxyl-kinase NOL9 (499-507)
  source 1..27: mol_type = other RNA
gtgtacaccgacttcgcctttagaatc

SEQ ID NO: 71991 - RNA, 27 nt, synthetic construct
  misc_feature 1..27: note = HEAT repeat-containing protein 5A (1098-1106)
  source 1..27: mol_type = other RNA
gtgtacaccgacagattccacctgatc

SEQ ID NO: 71992 - RNA, 27 nt, synthetic construct
  misc_feature 1..27: note = Ral GTPase-activating protein subunit beta (89-97)
  source 1..27: mol_type = other RNA
gtgtacaccgactggatcatggccctg

SEQ ID NO: 71993 - RNA, 27 nt, synthetic construct
  misc_feature 1..27: note = Kidney mitochondrial carrier protein 1 (125-133)
  source 1..27: mol_type = other RNA
gtgtacacccacttcctgagctccttt

SEQ ID NO: 71994 - RNA, 27 nt, synthetic construct
  misc_feature 1..27: note = Uncharacterized protein C18orf8 (400-408)
  source 1..27: mol_type = other RNA
gtgtacacccacgtcctgagcgccttc

SEQ ID NO: 71995 - RNA, 27 nt, synthetic construct
  misc_feature 1..27: note = Sprouty-related, EVH1 domain-containing protein 2 (80-88)
  source 1..27: mol_type = other RNA
gtgtacaccaaggccaaccccacattc

SEQ ID NO: 71996 - RNA, 27 nt, synthetic construct
  misc_feature 1..27: note = 2'-5'-oligoadenylate synthase 3 (909-917)
  source 1..27: mol_type = other RNA
gtgtacgtcgacctgatccacagctat

SEQ ID NO: 71997 - RNA, 24 nt, synthetic construct
  misc_feature 1..24: note = Melanoma-derived growth regulatory protein (70-77)
  source 1..24: mol_type = other RNA
gtgtacgtcttcagcaagctgaaa

SEQ ID NO: 71998 - RNA, 30 nt, synthetic construct
  misc_feature 1..30: note = Long-chain fatty acid transport protein 1 (34-43)
  source 1..30: mol_type = other RNA
gtgtacgtcggcagcgggggatggagattc

SEQ ID NO: 71999 - RNA, 27 nt, synthetic construct
  misc_feature 1..27: note = Hemicentin-1 (4343-4351)
  source 1..27: mol_type = other RNA
gtgtacgtcaaggagccccctgttttc

SEQ ID NO: 72000 - RNA, 27 nt, synthetic construct
  misc_feature 1..27: note = AP-3 complex subunit mu-2 (274-282)
  source 1..27: mol_type = other RNA
gtgtacgtcaagcacaacatcagcttc

SEQ ID NO: 72001 - RNA, 30 nt, synthetic construct
  misc_feature 1..30: note = Large neutral amino acids transporter small subunit 1 (22-31)
  source 1..30: mol_type = other RNA
gtgtacgtcctgaccaacctcgcctatttc

SEQ ID NO: 72002 - RNA, 24 nt, synthetic construct
  misc_feature 1..24: note = Histone H2B type 2-F (40-47)
  source 1..24: mol_type = other RNA
gtgtacgtctataaggttctgaaa

SEQ ID NO: 72003 - RNA, 27 nt, synthetic construct
  misc_feature 1..27: note = Leptin receptor gene-related protein (27-35)
  source 1..27: mol_type = other RNA
gtgtactggcccctgttcgtcctcatc

SEQ ID NO: 72004 - RNA, 27 nt, synthetic construct
  misc_feature 1..27: note = GDP-fucose protein O-fucosyltransferase 1 (6-14)
  source 1..27: mol_type = other RNA
tgggccagacccctgagcgtgtccttc

SEQ ID NO: 72005 - RNA, 66 nt, synthetic construct
  misc_feature 1..66: note = Modulator of apoptosis 1 (9-30)
  source 1..66: mol_type = other RNA
tggtgcagaggcatggacatgaaccccaggaaggccctgctcatcgctgggattagccagtcctgt

SEQ ID NO: 72006 - RNA, 36 nt, synthetic construct
  misc_feature 1..36: note = Puromycin-sensitive aminopeptidase (479-490)
  source 1..36: mol_type = other RNA
tgggagagcctggaaaacgcctccggcaagcccatc

SEQ ID NO: 72007 - RNA, 42 nt, synthetic construct
  misc_feature 1..42: note = Protein CREG1 (68-81)
  source 1..42: mol_type = other RNA
tggggcgccctggctaccatcagcacactcgaggcagtgaga

SEQ ID NO: 72008 - RNA, 45 nt, synthetic construct
  misc_feature 1..45: note = Protein CREG1 (68-82)
  source 1..45: mol_type = other RNA
tggggcgccctggctaccatcagcacactcgaggcagtgagaggg

SEQ ID NO: 72009 - RNA, 18 nt, synthetic construct
  misc_feature 1..18: note = Dedicator of cytokinesis protein 9 (121-126)
  source 1..18: mol_type = other RNA
tggcacctggtgaactac

SEQ ID NO: 72010 - RNA, 18 nt, synthetic construct
  misc_feature 1..18: note = Dedicator of cytokinesis protein 10 (114-119)
  source 1..18: mol_type = other RNA
tggcacgtggtcaactac

SEQ ID NO: 72011 - RNA, 18 nt, synthetic construct
  misc_feature 1..18: note = Forkhead box protein N2 (51-56)
  source 1..18: mol_type = other RNA
tggatcctggaccacttc

SEQ ID NO: 72012 - RNA, 27 nt, synthetic construct
  misc_feature 1..27: note = Neutral amino acid transporter A (155-163)
  source 1..27: mol_type = other RNA
tggatcgtggacagaaccacaactgtc

SEQ ID NO: 72013 - RNA, 27 nt, synthetic construct
  misc_feature 1..27: note = Bifunctional glutamate/proline-tRNA ligase (616-624)
  source 1..27: mol_type = other RNA
tggctggccgagaccacacacgctctc

SEQ ID NO: 72014 - RNA, 30 nt, synthetic construct
  misc_feature 1..30: note = 60S ribosomal protein L19 (4-13)
  source 1..30: mol_type = other RNA
tggctggaccccaacgagaccaatgaaatc

SEQ ID NO: 72015 - RNA, 30 nt, synthetic construct
  misc_feature 1..30: note = Solute carrier family 12 member 2 (1012-1021)
  source 1..30: mol_type = other RNA
tggctgttcgacgatggcgggctcaccctt

SEQ ID NO: 72016 - RNA, 18 nt, synthetic construct
  misc_feature 1..18: note = Serine/arginine-rich splicing factor 6 (107-112)
  source 1..18: mol_type = other RNA
tggctgttccacaccctc

SEQ ID NO: 72017 - RNA, 27 nt, synthetic construct
  misc_feature 1..27: note = Nuclear migration protein nudC (184-192)
  source 1..27: mol_type = other RNA
tggctgatcgaggacggcaaggtggtc

SEQ ID NO: 72018 - RNA, 18 nt, synthetic construct
  misc_feature 1..18: note = ATP-dependent RNA helicase DHX36 (885-890)
  source 1..18: mol_type = other RNA
tggctgatctaccacctc

SEQ ID NO: 72019 - RNA, 33 nt, synthetic construct
  misc_feature 1..33: note = Liprin-beta-1 (649-659)
  source 1..33: mol_type = other RNA
tggctgatggagcagggcctcgggagctacctt

SEQ ID NO: 72020 - RNA, 30 nt, synthetic construct
  misc_feature 1..30: note = Tuberin (56-65)
  source 1..30: mol_type = other RNA
tggctggtgggcaacaagctcgtcaccgtt

SEQ ID NO: 72021 - RNA, 27 nt, synthetic construct
  misc_feature 1..27: note = Vacuole membrane protein 1 (366-374)
  source 1..27: mol_type = other RNA
tggatgttcgagaagctggtggtcgtt

SEQ ID NO: 72022 - RNA, 27 nt, synthetic construct
  misc_feature 1..27: note = Hemicentin-1 (236-244)
  source 1..27: mol_type = other RNA
tggagaatccccttcgaccctagcctg

SEQ ID NO: 72023 - RNA, 27 nt, synthetic construct
  misc_feature 1..27: note = Hemicentin-2 (233-241)
  source 1..27: mol_type = other RNA
tggagactgcccttcgaccctagcctc

SEQ ID NO: 72024 - RNA, 141 nt, synthetic construct
  misc_feature 1..141: note = ATP synthase subunit epsilon, mitochondrial (5-51)
  source 1..141: mol_type = other RNA
tggagacaggccggcctgagctacatcaggtattcccaaatttgcgctaaggcagtgcgggacgccctcaaaaccgagttcaaggcgaacgctgaaaaaacatctgggtcaaatgtcaagatagttaaagtgaagaaggag

SEQ ID NO: 72025 - RNA, 27 nt, synthetic construct
  misc_feature 1..27: note = Pleckstrin homology domain-containing family B member 2 (27-35)
  source 1..27: mol_type = other RNA
tggagcgacggccacctgatctactat

SEQ ID NO: 72026 - RNA, 24 nt, synthetic construct
  misc_feature 1..24: note = Low-density lipoprotein receptor-related protein 2 (440-447)
  source 1..24: mol_type = other RNA
tggaccgacacagtgcagaacaag

SEQ ID NO: 72027 - RNA, 18 nt, synthetic construct
  misc_feature 1..18: note = Importin-7 (450-455)
  source 1..18: mol_type = other RNA
tgggtgctgcactacttc

SEQ ID NO: 72028 - RNA, 27 nt, synthetic construct
  misc_feature 1..27: note = Vimentin (290-298)
  source 1..27: mol_type = other RNA
tggtacaagagcaaattcgccgacctg

SEQ ID NO: 72029 - RNA, 24 nt, synthetic construct
  misc_feature 1..24: note = Suppressor of SWI4 1 homolog (25-32)
  source 1..24: mol_type = other RNA
tacgccgctaacccccacagcttc

SEQ ID NO: 72030 - RNA, 30 nt, synthetic construct
  misc_feature 1..30: note = Putative eukaryotic translation initiation factor 2 subunit 3-like protein (330-339)
  source 1..30: mol_type = other RNA
tacgccgctcccggcgggctgatcggagtg

SEQ ID NO: 72031 - RNA, 24 nt, synthetic construct
  misc_feature 1..24: note = A-kinase anchor protein 9 (284-291)
  source 1..24: mol_type = other RNA
tacgccgacgagaagaccctgttc

SEQ ID NO: 72032 - RNA, 24 nt, synthetic construct
  misc_feature 1..24: note = E3 SUMO-protein ligase RanBP2 (3010-3017)
  source 1..24: mol_type = other RNA
tacgccgacggcgaggctaaggtg

SEQ ID NO: 72033 - RNA, 24 nt, synthetic construct
  misc_feature 1..24: note = Proteasome subunit beta type-4 (160-167)
  source 1..24: mol_type = other RNA
tacgccgacggcgagagcttcctg

SEQ ID NO: 72034 - RNA, 27 nt, synthetic construct
  misc_feature 1..27: note = ATP-binding cassette sub-family A member 2 (14-22)
  source 1..27: mol_type = other RNA
tacgccgacaagcccgctggcacctat

SEQ ID NO: 72035 - RNA, 27 nt, synthetic construct
  misc_feature 1..27: note = Ankyrin repeat domain-containing protein 17 (1180-1188)
  source 1..27: mol_type = other RNA
tacgccgaggtgggcagagtcctgctc

SEQ ID NO: 72036 - RNA, 27 nt, synthetic construct
  misc_feature 1..27: note = Protein FAM208B (753-761)
  source 1..27: mol_type = other RNA
tacgccttcagcctggactccaagtat

SEQ ID NO: 72037 - RNA, 30 nt, synthetic construct
  misc_feature 1..30: note = Heterogeneous nuclear ribonucleoprotein L (250-259)
  source 1..30: mol_type = other RNA
tacgccaagcccaccagactgaacgtgttc

SEQ ID NO: 72038 - RNA, 30 nt, synthetic construct
  misc_feature 1..30: note = Rho GTPase-activating protein 5 (623-632)
  source 1..30: mol_type = other RNA
tacgccctggacggcaagatctatgagctc

SEQ ID NO: 72039 - RNA, 69 nt, synthetic construct
  misc_feature 1..69: note = Keratin, type I cytoskeletal 18 (273-295)
  source 1..69: mol_type = other RNA
tacgccctgcagatggagcaactcaacggcatccttctgcacttggaaagcgagttagctcagaccaga

SEQ ID NO: 72040 - RNA, 33 nt, synthetic construct
  misc_feature 1..33: note = NAD(P)H dehydrogenase (quinone) 1 (43-53)
  source 1..33: mol_type = other RNA
tacgccatgaacttcaatcccatcattagcaga

SEQ ID NO: 72041 - RNA, 30 nt, synthetic construct
  misc_feature 1..30: note = Protein FAM73A (152-161)
  source 1..30: mol_type = other RNA
tacgccaacggcgggctgttcagcaagtat

SEQ ID NO: 72042 - RNA, 27 nt, synthetic construct
  misc_feature 1..27: note = Coiled-coil domain-containing protein 34 (296-304)
  source 1..27: mol_type = other RNA
tacgccaacggcaagctgaccgggttc

SEQ ID NO: 72043 - RNA, 24 nt, synthetic construct
  misc_feature 1..24: note = Tubulin alpha-1C chain (173-180)
  source 1..24: mol_type = other RNA
tacgccagaggccactataccatc

SEQ ID NO: 72044 - RNA, 33 nt, synthetic construct
  misc_feature 1..33: note = Synaptojanin-2 (4-14)
  source 1..33: mol_type = other RNA
tacgccagcggccccgctcctccagcagggacc

SEQ ID NO: 72045 - RNA, 30 nt, synthetic construct
  misc_feature 1..30: note = Destrin (117-126)
  source 1..30: mol_type = other RNA
tacgccagctccaaggacgctatcaaaaag

SEQ ID NO: 72046 - RNA, 27 nt, synthetic construct
  misc_feature 1..27: note = Tetratricopeptide repeat protein 14 (351-359)
  source 1..27: mol_type = other RNA
tacgccaccaagggcagcctgaacaaa

SEQ ID NO: 72047 - RNA, 21 nt, synthetic construct
  misc_feature 1..21: note = Serine/threonine-protein kinase LATS1 (731-737)
  source 1..21: mol_type = other RNA
tacgccaccaagacactgaga

SEQ ID NO: 72048 - RNA, 24 nt, synthetic construct
  misc_feature 1..24: note = MAGUK p55 subfamily member 5 (117-124)
  source 1..24: mol_type = other RNA
tacgccgtgaagatcctggagatt

SEQ ID NO: 72049 - RNA, 27 nt, synthetic construct
  misc_feature 1..27: note = 60S ribosomal protein L4 (52-60)
  source 1..27: mol_type = other RNA
tacgccgtgagcgagctggctggccac

SEQ ID NO: 72050 - RNA, 24 nt, synthetic construct
  misc_feature 1..24: note = Melanoma-associated antigen 4 (232-239)
  source 1..24: mol_type = other RNA
tacgacggcagagagcacaccgtg

SEQ ID NO: 72051 - RNA, 27 nt, synthetic construct
  misc_feature 1..27: note = Neurobeachin-like protein 1 (2364-2372)
  source 1..27: mol_type = other RNA
tacgacagaaacatcagcaattatttc

SEQ ID NO: 72052 - RNA, 21 nt, synthetic construct
  misc_feature 1..21: note = Signal recognition particle subunit SRP68 (455-461)
  source 1..21: mol_type = other RNA
tacgacagagtgctgaagtat

SEQ ID NO: 72053 - RNA, 27 nt, synthetic construct
  misc_feature 1..27: note = DNA topoisomerase 2-alpha (1082-1090)
  source 1..27: mol_type = other RNA
tacgacagcgatcccgtgaaggcctgg

SEQ ID NO: 72054 - RNA, 27 nt, synthetic construct
  misc_feature 1..27: note = Seizure 6-like protein 2 (844-852)
  source 1..27: mol_type = other RNA
tacgaggccggcgacaccagagaatat

SEQ ID NO: 72055 - RNA, 27 nt, synthetic construct
  misc_feature 1..27: note = Protein SSX5 (55-63)
  source 1..27: mol_type = other RNA
tacgaggccatgaccaagctgggcttc

SEQ ID NO: 72056 - RNA, 27 nt, synthetic construct
  misc_feature 1..27: note = ATP-binding cassette sub-family C member 8 (1326-1334)
  source 1..27: mol_type = other RNA
tacgagggcctgctcgcccccagcctt

SEQ ID NO: 72057 - RNA, 21 nt, synthetic construct
  misc_feature 1..21: note = L-dopachrome tautomerase (303-309)
  source 1..21: mol_type = other RNA
tacgagggcctgctcagaagg

SEQ ID NO: 72058 - RNA, 24 nt, synthetic construct
  misc_feature 1..24: note = Melanophilin (122-129)
  source 1..24: mol_type = other RNA
tacgagcacgtgaaggccagattc

SEQ ID NO: 72059 - RNA, 21 nt, synthetic construct
  misc_feature 1..21: note = Annexin A5 (94-100)
  source 1..21: mol_type = other RNA
tacgagctgaagcacgccctc

SEQ ID NO: 72060 - RNA, 27 nt, synthetic construct
  misc_feature 1..27: note = Gamma-secretase C-terminal fragment 59 (647-655)
  source 1..27: mol_type = other RNA
tacgagaaccccacctataagttcttt

SEQ ID NO: 72061 - RNA, 21 nt, synthetic construct
  misc_feature 1..21: note = 39S ribosomal protein L20, mitochondrial (108-114)
  source 1..21: mol_type = other RNA
tacgagcccaagaccttcaaa

SEQ ID NO: 72062 - RNA, 27 nt, synthetic construct
  misc_feature 1..27: note = Migration stimulation factor FN70 (392-400)
  source 1..27: mol_type = other RNA
tacgagcaggaccaaaagtatagcttc

SEQ ID NO: 72063 - RNA, 36 nt, synthetic construct
  misc_feature 1..36: note = Spectrin beta chain, non-erythrocytic 5 (750-761)
  source 1..36: mol_type = other RNA
tacttcgccgacgctgcagaggccgcgagctggctg

SEQ ID NO: 72064 - RNA, 21 nt, synthetic construct
  misc_feature 1..21: note = Glia-derived nexin (200-206)
  source 1..21: mol_type = other RNA
tacttcaagggcctgtggaaa

SEQ ID NO: 72065 - RNA, 27 nt, synthetic construct
  misc_feature 1..27: note = Serine-tRNA ligase, cytoplasmic (194-202)
  source 1..27: mol_type = other RNA
tacttcctgaagggcgtgctcgtcttt

SEQ ID NO: 72066 - RNA, 30 nt, synthetic construct
  misc_feature 1..30: note = Tyrosine-protein kinase receptor (124-133)
  source 1..30: mol_type = other RNA
tacggcgccgctgggggaaagggtgcaaaa

SEQ ID NO: 72067 - RNA, 30 nt, synthetic construct
  misc_feature 1..30: note = Hemoglobin subunit alpha (25-34)
  source 1..30: mol_type = other RNA
tacggcgccgaggctctggaaagaatgttc

SEQ ID NO: 72068 - RNA, 51 nt, synthetic construct
  misc_feature 1..51: note = Hemoglobin subunit alpha (25-41)
  source 1..51: mol_type = other RNA
tacggcgccgaggctctggaaagaatgttcctcagctttcccaccacaaag

SEQ ID NO: 72069 - RNA, 24 nt, synthetic construct
  misc_feature 1..24: note = Tubulin beta-6 chain (157-164)
  source 1..24: mol_type = other RNA
tacggcgacctgaaccacctcgtg

SEQ ID NO: 72070 - RNA, 24 nt, synthetic construct
  misc_feature 1..24: note = WD repeat-containing protein 3 (588-595)
  source 1..24: mol_type = other RNA
tacggccacaagctgcccgtgatc

SEQ ID NO: 72071 - RNA, 27 nt, synthetic construct
  misc_feature 1..27: note = Translocating chain-associated membrane protein 1 (75-83)
  source 1..27: mol_type = other RNA
tacggcatcaaggacctggccaccgtg

SEQ ID NO: 72072 - RNA, 21 nt, synthetic construct
  misc_feature 1..21: note = U2 small nuclear ribonucleoprotein B'' (75-81)
  source 1..21: mol_type = other RNA
tacggcaagcccatgagaatc

SEQ ID NO: 72073 - RNA, 21 nt, synthetic construct
  misc_feature 1..21: note = Nucleoporin NUP53 (179-185)
  source 1..21: mol_type = other RNA
tacggcaacatcctgaagcac

SEQ ID NO: 72074 - RNA, 27 nt, synthetic construct
  misc_feature 1..27: note = Filamin-A (1844-1852)
  source 1..27: mol_type = other RNA
tacggccccgggctgacccacggagtg

SEQ ID NO: 72075 - RNA, 21 nt, synthetic construct
  misc_feature 1..21: note = Vacuolar protein sorting-associated protein 51 homolog (123-129)
  source 1..21: mol_type = other RNA
tacggccaggccgtgagatat

SEQ ID NO: 72076 - RNA, 21 nt, synthetic construct
  misc_feature 1..21: note = Serine palmitoyltransferase 3 (290-296)
  source 1..21: mol_type = other RNA
tacggccagcccagaaccagg

SEQ ID NO: 72077 - RNA, 21 nt, synthetic construct
  misc_feature 1..21: note = Tyrosine-protein kinase Fyn (385-391)
  source 1..21: mol_type = other RNA
tacggcagattcaccatcaag

SEQ ID NO: 72078 - RNA, 48 nt, synthetic construct
  misc_feature 1..48: note = Annexin A2 (24-39)
  source 1..48: mol_type = other RNA
tacggcagcgtgaaggcctataccaacttcgacgctgagagagatgca

SEQ ID NO: 72079 - RNA, 24 nt, synthetic construct
  misc_feature 1..24: note = Band 4.1-like protein 3 (187-194)
  source 1..24: mol_type = other RNA
tacggcgtggacctgcaccatgcc

SEQ ID NO: 72080 - RNA, 21 nt, synthetic construct
  misc_feature 1..21: note = Parafibromin (315-321)
  source 1..21: mol_type = other RNA
taccacggcatgaccctgaag

SEQ ID NO: 72081 - RNA, 18 nt, synthetic construct
  misc_feature 1..18: note = Fibronectin type III domain-containing protein 3B (351-356)
  source 1..18: mol_type = other RNA
taccacgtgagagtctat

SEQ ID NO: 72082 - RNA, 33 nt, synthetic construct
  misc_feature 1..33: note = cAMP-responsive element modulator (185-195)
  source 1..33: mol_type = other RNA
tacatcgccattgctcagggcgggaccatacaa

SEQ ID NO: 72083 - RNA, 27 nt, synthetic construct
  misc_feature 1..27: note = HEAT repeat-containing protein 1 (1013-1021)
  source 1..27: mol_type = other RNA
tacatcgccaaggacctgatgaaagtg

SEQ ID NO: 72084 - RNA, 27 nt, synthetic construct
  misc_feature 1..27: note = Gamma-tubulin complex component 6 (1683-1691)
  source 1..27: mol_type = other RNA
tacatcgccaaccagattctgcacgtg

SEQ ID NO: 72085 - RNA, 27 nt, synthetic construct
  misc_feature 1..27: note = CAAX prenyl protease 1 homolog (218-226)
  source 1..27: mol_type = other RNA
tacatcgcccccctgttcgacaagttt

SEQ ID NO: 72086 - RNA, 36 nt, synthetic construct
  misc_feature 1..36: note = Serum albumin (287-298)
  source 1..36: mol_type = other RNA
tacatctgcgagaaccaggacagcatttcctctaag

SEQ ID NO: 72087 - RNA, 27 nt, synthetic construct
  misc_feature 1..27: note = Ankyrin-2 (1793-1801)
  source 1..27: mol_type = other RNA
tacatcgacgagcacggccataccgtg

SEQ ID NO: 72088 - RNA, 18 nt, synthetic construct
  misc_feature 1..18: note = E3 ubiquitin-protein ligase RNF216 (59-64)
  source 1..18: mol_type = other RNA
tacatcgacttcaagttt

SEQ ID NO: 72089 - RNA, 27 nt, synthetic construct
  misc_feature 1..27: note = Ribonuclease 3 (577-585)
  source 1..27: mol_type = other RNA
tacatcgacaaggatctggagtatgtg

SEQ ID NO: 72090 - RNA, 27 nt, synthetic construct
  misc_feature 1..27: note = Eukaryotic translation initiation factor 3 subunit L (522-530)
  source 1..27: mol_type = other RNA
tacatcgacaaggatatgattcacata

SEQ ID NO: 72091 - RNA, 24 nt, synthetic construct
  misc_feature 1..24: note = Receptor tyrosine-protein kinase erbB-3 (148-155)
  source 1..24: mol_type = other RNA
tacatcgagaagaacgacaaactg

SEQ ID NO: 72092 - RNA, 27 nt, synthetic construct
  misc_feature 1..27: note = Laminin subunit beta-1 (396-404)
  source 1..27: mol_type = other RNA
tacatcgagaaggtggtctataccgtt

SEQ ID NO: 72093 - RNA, 24 nt, synthetic construct
  misc_feature 1..24: note = 26S proteasome non-ATPase regulatory subunit 8 (132-139)
  source 1..24: mol_type = other RNA
tacatcaagcaccccgtgagcctg

SEQ ID NO: 72094 - RNA, 24 nt, synthetic construct
  misc_feature 1..24: note = Retinoblastoma-like protein 2 (1013-1020)
  source 1..24: mol_type = other RNA
tacatcaagcagattaaaaccttc

SEQ ID NO: 72095 - RNA, 27 nt, synthetic construct
  misc_feature 1..27: note = Exostosin-2 (348-356)
  source 1..27: mol_type = other RNA
tacatcctgcccttcagcgaggtgctc

SEQ ID NO: 72096 - RNA, 30 nt, synthetic construct
  misc_feature 1..30: note = E3 ubiquitin-protein ligase RNF114 (116-125)
  source 1..30: mol_type = other RNA
tacatcatggagggcgtgaaggccaccatt

SEQ ID NO: 72097 - RNA, 27 nt, synthetic construct
  misc_feature 1..27: note = Cytoplasmic dynein 1 heavy chain 1 (2489-2497)
  source 1..27: mol_type = other RNA
tacatccagagatatctggtgtacgcc

SEQ ID NO: 72098 - RNA, 27 nt, synthetic construct
  misc_feature 1..27: note = Ceramide synthase 2 (78-86)
  source 1..27: mol_type = other RNA
tacatcagagccggcaccctgattatg

SEQ ID NO: 72099 - RNA, 27 nt, synthetic construct
  misc_feature 1..27: note = Kinesin-like protein KIF11 (399-407)
  source 1..27: mol_type = other RNA
tacatcagcgaggaaaacttcagagtg

SEQ ID NO: 72100 - RNA, 24 nt, synthetic construct
  misc_feature 1..24: note = Cleft lip and palate transmembrane protein 1 (108-115)
  source 1..24: mol_type = other RNA
tacatcagcgagcacgaacatttc

SEQ ID NO: 72101 - RNA, 27 nt, synthetic construct
  misc_feature 1..27: note = V-type proton ATPase subunit B, brain isoform (266-274)
  source 1..27: mol_type = other RNA
tacatcaccgagggccagatttatgtg

SEQ ID NO: 72102 - RNA, 30 nt, synthetic construct; identical to SEQ ID NO: 47875
  misc_feature 1..30: note = E3 ubiquitin-protein ligase HERC2 (1123-1132)
  source 1..30: mol_type = other RNA

SEQ ID NO: 72103 - RNA, 30 nt, synthetic construct
  misc_feature 1..30: note = Dedicator of cytokinesis protein 7 (457-466)
  source 1..30: mol_type = other RNA
tacatctatccccagagcctgaacttcgcc

SEQ ID NO: 72104 - RNA, 21 nt, synthetic construct
  misc_feature 1..21: note = Eukaryotic peptide chain release factor GTP-binding subunit ERF3A (309-315)
  source 1..21: mol_type = other RNA
tacaaggacatgggcaccgtg

SEQ ID NO: 72105 - RNA, 21 nt, synthetic construct
  misc_feature 1..21: note = Store-operated calcium entry-associated regulatory factor (105-111)
  source 1..21: mol_type = other RNA
tacaagttcggcaaaaccgtg

SEQ ID NO: 72106 - RNA, 21 nt, synthetic construct
  misc_feature 1..21: note = Ras-related protein Rab-20 (158-164)
  source 1..21: mol_type = other RNA
tacaagaaaatcctgaagtat

SEQ ID NO: 72107 - RNA, 30 nt, synthetic construct
  misc_feature 1..30: note = Cytochrome c oxidase subunit 5B, mitochondrial (120-129)
  source 1..30: mol_type = other RNA
tacaagctggtgccccagcaactcgcccac

SEQ ID NO: 72108 - RNA, 24 nt, synthetic construct
  misc_feature 1..24: note = Alpha-2-macroglobulin (163-170)
  source 1..24: mol_type = other RNA
tacaagcccggccagaccgtgaaa

SEQ ID NO: 72109 - RNA, 24 nt, synthetic construct
  misc_feature 1..24: note = Fanconi anemia group I protein (1039-1046)
  source 1..24: mol_type = other RNA
tacaagagccccgtgatcctgctc

SEQ ID NO: 72110 - RNA, 27 nt, synthetic construct
  misc_feature 1..27: note = Thioredoxin-interacting protein (221-229)
  source 1..27: mol_type = other RNA
tacctggccaacggccagaccaaggtg

SEQ ID NO: 72111 - RNA, 30 nt, synthetic construct
  misc_feature 1..30: note = Laminin subunit gamma-1 (667-676)
  source 1..30: mol_type = other RNA
tacctggacgatgtgaccctcgccagcgct

SEQ ID NO: 72112 - RNA, 27 nt, synthetic construct
  misc_feature 1..27: note = Dedicator of cytokinesis protein 7 (628-636)
  source 1..27: mol_type = other RNA
tacctggacaagttctttgccctcgtg

SEQ ID NO: 72113 - RNA, 27 nt, synthetic construct
  misc_feature 1..27: note = Dedicator of cytokinesis protein 6 (723-731)
  source 1..27: mol_type = other RNA
tacctggacaagttctttaccctcgtg

SEQ ID NO: 72114 - RNA, 27 nt, synthetic construct
  misc_feature 1..27: note = Zinc finger protein 573 (42-50)
  source 1..27: mol_type = other RNA
tacctggaccccaaccagagagatctc

SEQ ID NO: 72115 - RNA, 27 nt, synthetic construct
  misc_feature 1..27: note = Kinesin-like protein KIF13B (1105-1113)
  source 1..27: mol_type = other RNA
tacctggaccagcaactccagaagctt

SEQ ID NO: 72116 - RNA, 24 nt, synthetic construct
  misc_feature 1..24: note = ATP-binding cassette sub-family E member 1 (491-498)
  source 1..24: mol_type = other RNA
tacctggacagcgagcagagactc

SEQ ID NO: 72117 - RNA, 27 nt, synthetic construct
  misc_feature 1..27: note = Laminin subunit beta-1 (1753-1761)
  source 1..27: mol_type = other RNA
tacctggaggacaaggcccaggaactc

SEQ ID NO: 72118 - RNA, 27 nt, synthetic construct
  misc_feature 1..27: note = Enhancer of mRNA-decapping protein 4 (906-914)
  source 1..27: mol_type = other RNA
tacctggaggaagccgtgatgcacctc

SEQ ID NO: 72119 - RNA, 27 nt, synthetic construct
  misc_feature 1..27: note = Inositol-trisphosphate 3-kinase A (270-278)
  source 1..27: mol_type = other RNA
tacctggaggaagagctcaccaaggcc

SEQ ID NO: 72120 - RNA, 24 nt, synthetic construct
  misc_feature 1..24: note = Ubiquitin carboxyl-terminal hydrolase 7 (1093-1100)
  source 1..24: mol_type = other RNA
tacctggagaaggccatcaaaatt

SEQ ID NO: 72121 - RNA, 24 nt, synthetic construct
  misc_feature 1..24: note = Plectin (1070-1077)
  source 1..24: mol_type = other RNA
tacctggagaagctcaaaaccatc

SEQ ID NO: 72122 - RNA, 27 nt, synthetic construct
  misc_feature 1..27: note = Heparan-sulfate 6-O-sulfotransferase 2 (442-450)
  source 1..27: mol_type = other RNA
tacctgttcgagaagacctttaacatg

SEQ ID NO: 72123 - RNA, 27 nt, synthetic construct
  misc_feature 1..27: note = Thioredoxin domain-containing protein 16 (103-111)
  source 1..27: mol_type = other RNA
tacctgttcaagggcaacatcctcctt

SEQ ID NO: 72124 - RNA, 27 nt, synthetic construct
  misc_feature 1..27: note = Bax inhibitor 1 (186-194)
  source 1..27: mol_type = other RNA
tacctgttcctcggcgggatccttatg

SEQ ID NO: 72125 - RNA, 27 nt, synthetic construct
  misc_feature 1..27: note = T-box transcription factor TBX3 (251-259)
  source 1..27: mol_type = other RNA
tacctgttccccgagaccgaatttatc

SEQ ID NO: 72126 - RNA, 27 nt, synthetic construct
  misc_feature 1..27: note = Cyclin-dependent kinase 2 (107-115)
  source 1..27: mol_type = other RNA
tacctgttccagctccttcaaggcctg

SEQ ID NO: 72127 - RNA, 27 nt, synthetic construct
  misc_feature 1..27: note = Electroneutral sodium bicarbonate exchanger 1 (1036-1044)
  source 1..27: mol_type = other RNA
tacctgggcgccagcaactatagaacc

SEQ ID NO: 72128 - RNA, 27 nt, synthetic construct
  misc_feature 1..27: note = Hexokinase-1 (749-757)
  source 1..27: mol_type = other RNA
tacctgggcgagatcgtgagaaacatt

SEQ ID NO: 72129 - RNA, 24 nt, synthetic construct
  misc_feature 1..24: note = Clustered mitochondria protein homolog (510-517)
  source 1..24: mol_type = other RNA
tacctgggcaaggtgctcgagctt

SEQ ID NO: 72130 - RNA, 27 nt, synthetic construct
  misc_feature 1..27: note = Putative ATP-dependent RNA helicase DHX33 (179-187)
  source 1..27: mol_type = other RNA
tacctgcacgccgctctcgtgagcgtc

SEQ ID NO: 72131 - RNA, 21 nt, synthetic construct
  misc_feature 1..21: note = Rho-related BTB domain-containing protein 3 (560-566)
  source 1..21: mol_type = other RNA
tacctgatcttcagccagaag

SEQ ID NO: 72132 - RNA, 27 nt, synthetic construct
  misc_feature 1..27: note = E3 ubiquitin-protein ligase TRIM36 (266-274)
  source 1..27: mol_type = other RNA
tacctgatcggcaaggagagccaggtg

SEQ ID NO: 72133 - RNA, 27 nt, synthetic construct
  misc_feature 1..27: note = ER membrane protein complex subunit 4 (136-144)
  source 1..27: mol_type = other RNA
tacctgatcggcaacctcatggggctt

SEQ ID NO: 72134 - RNA, 27 nt, synthetic construct
  misc_feature 1..27: note = F-box only protein 21 (364-372)
  source 1..27: mol_type = other RNA
tacctgatcggccagcacgtgaccgcc

SEQ ID NO: 72135 - RNA, 27 nt, synthetic construct
  misc_feature 1..27: note Dolichyl-diphosphooligosaccharide-proteinosyltransferase subunit 2 (343-351)
  source 1..27: mol_type = other RNA
tacctgatcattggcgacgccaccctc

SEQ ID NO: 72136 - RNA, 30 nt, synthetic construct
  misc_feature 1..30: note = Nuclear export mediator factor NEMF (539-548)
  source 1..30: mol_type = other RNA
tacctgatcattggcgggagagaccagcaa

SEQ ID NO: 72137 - RNA, 27 nt, synthetic construct
  misc_feature 1..27: note = 60S ribosomal protein L3 (286-294)
  source 1..27: mol_type = other RNA
tacctgatcaaggacggcaaactcatt

SEQ ID NO: 72138 - RNA, 27 nt, synthetic construct
  misc_feature 1..27: note = WD repeat-containing protein 6 (703-711)
  source 1..27: mol_type = other RNA
tacctgaaggacggcgatgtgatgctc

SEQ ID NO: 72139 - RNA, 21 nt, synthetic construct
  misc_feature 1..21: note = SFRS17A protein (23-29)
  source 1..21: mol_type = other RNA
tacctgaagcccatcaccaaa

SEQ ID NO: 72140 - RNA, 30 nt, synthetic construct
  misc_feature 1..30: note = TRPM8 channel-associated factor 2 (446-455)
  source 1..30: mol_type = other RNA
tacctgctcgagggccagaacgccgaagtg

SEQ ID NO: 72141 - RNA, 27 nt, synthetic construct
  misc_feature 1..27: note = Maestro heat-like repeat-containing protein family member 7 (965-973)
  source 1..27: mol_type = other RNA
tacctgctcatcccccttctggagaga

SEQ ID NO: 72142 - RNA, 30 nt, synthetic construct
  misc_feature 1..30: note = Translocating chain-associated membrane protein 1 (211-220)
  source 1..30: mol_type = other RNA
tacctgctcaaccttaatcacctgggcttg

SEQ ID NO: 72143 - RNA, 30 nt, synthetic construct
  misc_feature 1..30: note = Synemin (706-715)
  source 1..30: mol_type = other RNA
tacctgctcagcaaggacatcaaagaggtg

SEQ ID NO: 72144 - RNA, 33 nt, synthetic construct; identical to SEQ ID NO: 47917
  misc_feature 1..33: note = E3 ubiquitin-protein ligase RNF213 (2078-2088)
  source 1..33: mol_type = other RNA

SEQ ID NO: 72145 - RNA, 27 nt, synthetic construct
  misc_feature 1..27: note = Nesprin-1 (1560-1568)
  source 1..27: mol_type = other RNA
tacctgatggaggccagatatagcctc

SEQ ID NO: 72146 - RNA, 27 nt, synthetic construct
  misc_feature 1..27: note = Leucine-rich repeat and calponin homology domain-containing protein 1 (147-155)
  source 1..27: mol_type = other RNA
tacctgaacctcagcagaaatcagctt

SEQ ID NO: 72147 - RNA, 27 nt, synthetic construct
  misc_feature 1..27: note = Kinesin-like protein KIF13B (1450-1458)
  source 1..27: mol_type = other RNA
tacctgaaccccgtgaagagcttcgtc

SEQ ID NO: 72148 - RNA, 27 nt, synthetic construct
  misc_feature 1..27: note = Inactive ubiquitin carboxyl-terminal hydrolase 53 (271-279)
  source 1..27: mol_type = other RNA
tacctgcccggcctcttctatagagtg

SEQ ID NO: 72149 - RNA, 27 nt, synthetic construct
  misc_feature 1..27: note = Sterol regulatory element-binding protein 1 (1096-1104)
  source 1..27: mol_type = other RNA
tacctgccccctggcttcctcagcgcc

SEQ ID NO: 72150 - RNA, 27 nt, synthetic construct
  misc_feature 1..27: note = La-related protein 4 (424-432)
  source 1..27: mol_type = other RNA
tacctgcagaaggagaccagcacactc

SEQ ID NO: 72151 - RNA, 30 nt, synthetic construct
  misc_feature 1..30: note = Calcium/calmodulin-dependent 3',5'-cyclic nucleotide phosphodiesterase 1C (18-27)
  source 1..30: mol_type = other RNA
tacctgcagcccgagcaaatcgaaaagatt

SEQ ID NO: 72152 - RNA, 18 nt, synthetic construct
  misc_feature 1..18: note = Tyrosine-protein phosphatase non-receptor type 23 (30-35)
  source 1..18: mol_type = other RNA
tacctgagagagcacttc

SEQ ID NO: 72153 - RNA, 30 nt, synthetic construct
  misc_feature 1..30: note = Ubiquitin-like modifier-activating enzyme 7 (247-256)
  source 1..30: mol_type = other RNA
tacctgagaggcggggccatcaccgaggtg

SEQ ID NO: 72154 - RNA, 33 nt, synthetic construct
  misc_feature 1..33: note = Protein dopey-1 (743-753)
  source 1..33: mol_type = other RNA
tacctgagcgccttcctcgctgcatgccagctt

SEQ ID NO: 72155 - RNA, 30 nt, synthetic construct; identical to SEQ ID NO: 47928
  misc_feature 1..30: note = 2-hydroxyacylsphingosine 1-beta-galactosyltransferase (299-308)
  source 1..30: mol_type = other RNA

SEQ ID NO: 72156 - RNA, 27 nt, synthetic construct
  misc_feature 1..27: note = Trafficking kinesin-binding protein 2 (496-504)
  source 1..27: mol_type = other RNA
tacctgagcgagaagcagttctttgcc

SEQ ID NO: 72157 - RNA, 27 nt, synthetic construct
  misc_feature 1..27: note = Coatomer subunit beta' (490-498)
  source 1..27: mol_type = other RNA
tacctgagcgagaaggtgctcgccgct

SEQ ID NO: 72158 - RNA, 27 nt, synthetic construct
  misc_feature 1..27: note = Rho GTPase-activating protein 1 (214-222)
  source 1..27: mol_type = other RNA
tacctgagcgagctctccgaacacgtg

SEQ ID NO: 72159 - RNA, 24 nt, synthetic construct
  misc_feature 1..24: note = Polyadenylate-binding protein-interacting protein 1 (112-119)
  source 1..24: mol_type = other RNA
tacctgagccaccatctcaccatc

SEQ ID NO: 72160 - RNA, 27 nt, synthetic construct
  misc_feature 1..27: note = Alpha-N-acetylglucosaminidase (583-591)
  source 1..27: mol_type = other RNA
tacctgagcaaggagctcgcctccctt

SEQ ID NO: 72161 - RNA, 27 nt, synthetic construct
  misc_feature 1..27: note = Cytoplasmic dynein 1 heavy chain 1 (3552-3560)
  source 1..27: mol_type = other RNA
tacctgagcaacgccgacgagagactc

SEQ ID NO: 72162 - RNA, 27 nt, synthetic construct
  misc_feature 1..27: note = Serine/threonine-protein kinase A-Raf (529-537)
  source 1..27: mol_type = other RNA
tacctgagccccgacctctccaagatc

SEQ ID NO: 72163 - RNA, 27 nt, synthetic construct
  misc_feature 1..27: note = UDP-glucose:glycoprotein glucosyltransferase 2 (1269-1277)
  source 1..27: mol_type = other RNA
tacctgagccccaccttcaaggaggtg

SEQ ID NO: 72164 - RNA, 27 nt, synthetic construct
  misc_feature 1..27: note = Cathepsin D (150-158)
  source 1..27: mol_type = other RNA
tacctgagccaggacaccgtgtccgtc

SEQ ID NO: 72165 - RNA, 27 nt, synthetic construct
  misc_feature 1..27: note = Plexin-B3 (1418-1426)
  source 1..27: mol_type = other RNA
tacctgaccgacatcatgagaacactc

SEQ ID NO: 72166 - RNA, 42 nt, synthetic construct
  misc_feature 1..42: note = Plexin-B3 (1418-1431)
  source 1..42: mol_type = other RNA
tacctgaccgacatcatgagaacactccttggcgatctggcc

SEQ ID NO: 72167 - RNA, 27 nt, synthetic construct
  misc_feature 1..27: note = Alpha-1,3-mannosyl-glycoprotein 4-beta-N-acetylglucosaminyltransferase B (56-64)
  source 1..27: mol_type = other RNA
tacctgaccgacacactccacagcctt

SEQ ID NO: 72168 - RNA, 27 nt, synthetic construct
  misc_feature 1..27: note = Apoptosis-associated speck-like protein containing a CARD (184-192)
  source 1..27: mol_type = other RNA
tacctggtggaggacctcgaaagaagc

SEQ ID NO: 72169 - RNA, 27 nt, synthetic construct
  misc_feature 1..27: note = Probable ATP-dependent RNA helicase DDX47 (248-256)
  source 1..27: mol_type = other RNA
tacctggtgtatatcctcaacgagctt

SEQ ID NO: 72170 - RNA, 21 nt, synthetic construct
  misc_feature 1..21: note = Serum albumin (162-168)
  source 1..21: mol_type = other RNA
tacctgtatgagatcgccaga

SEQ ID NO: 72171 - RNA, 27 nt, synthetic construct
  misc_feature 1..27: note = Protein sel-1 homolog 1 (457-465)
  source 1..27: mol_type = other RNA
tacctgtatggcagaggggtgcaggtc

SEQ ID NO: 72172 - RNA, 30 nt, synthetic construct
  misc_feature 1..30: note = Probable G-protein coupled receptor 158 (82-91)
  source 1..30: mol_type = other RNA
tacctgtataccggcgacagccaccagctc

SEQ ID NO: 72173 - RNA, 27 nt, synthetic construct
  misc_feature 1..27: note = Cytochrome c oxidase subunit 7A-related protein, mitochondrial (106-114)
  source 1..27: mol_type = other RNA
tacatggccagccagcccaagaacaaa

SEQ ID NO: 72174 - RNA, 27 nt, synthetic construct
  misc_feature 1..27: note = Hemicentin-2 (2923-2931)
  source 1..27: mol_type = other RNA
tacatgtgcgtggccgagaaccaggct

SEQ ID NO: 72175 - RNA, 27 nt, synthetic construct
  misc_feature 1..27: note = Protein shisa-5 (129-137)
  source 1..27: mol_type = other RNA
tacatggacgcccccaaggctgcactg

SEQ ID NO: 72176 - RNA, 30 nt, synthetic construct
  misc_feature 1..30: note = Lysosomal-trafficking regulator (1891-1900)
  source 1..30: mol_type = other RNA
tacatgaacgagaatggcgaattcaagctg

SEQ ID NO: 72177 - RNA, 27 nt, synthetic construct
  misc_feature 1..27: note = Phosphatidylinositol N-acetylglucosaminyltransferase subunit H (129-137)
  source 1..27: mol_type = other RNA
tacatgcagaaggtgatctattacctg

SEQ ID NO: 72178 - RNA, 24 nt, synthetic construct
  misc_feature 1..24: note = Transmembraneoprotein NMB (37-44)
  source 1..24: mol_type = other RNA
tacatgagagagcacaaccagctg

SEQ ID NO: 72179 - RNA, 18 nt, synthetic construct
  misc_feature 1..18: note = Histone-lysine N-methyltransferase ASH1L (2260-2265)
  source 1..18: mol_type = other RNA
tacaacttccacagcttt

SEQ ID NO: 72180 - RNA, 27 nt, synthetic construct
  misc_feature 1..27: note = Actin-related protein 2 (225-233)
  source 1..27: mol_type = other RNA
tacaacatcgagcaggaacaaaagctg

SEQ ID NO: 72181 - RNA, 24 nt, synthetic construct
  misc_feature 1..24: note = 26S proteasome non-ATPase regulatory subunit 8 (148-155)
  source 1..24: mol_type = other RNA
tacaacaaggtgttcctggccaaa

SEQ ID NO: 72182 - RNA, 24 nt, synthetic construct
  misc_feature 1..24: note = Serine-protein kinase ATM (1148-1155)
  source 1..24: mol_type = other RNA
tacaacagaaagagcgtgctgctc

SEQ ID NO: 72183 - RNA, 72 nt, synthetic construct
  misc_feature 1..72: note = Alanine-tRNA ligase, cytoplasmic (487-510)
  source 1..72: mol_type = other RNA
tacaactatcacctggacagctccggctcttacgtgttcgagaataccgtcgccacagttatggctctcaga

SEQ ID NO: 72184 - RNA, 24 nt, synthetic construct
  misc_feature 1..24: note = PHD finger protein 20 (103-110)
  source 1..24: mol_type = other RNA
taccccgccaaggtgaccgctgtc

SEQ ID NO: 72185 - RNA, 27 nt, synthetic construct
  misc_feature 1..27: note = Supervillin (1594-1602)
  source 1..27: mol_type = other RNA
taccccgccagagctcctagcgtggtc

SEQ ID NO: 72186 - RNA, 30 nt, synthetic construct
  misc_feature 1..30: note = Ras GTPase-activating protein nGAP (628-637)
  source 1..30: mol_type = other RNA
taccccgacgatagaaccagcaggacactg

SEQ ID NO: 72187 - RNA, 24 nt, synthetic construct
  misc_feature 1..24: note = Splicing factor 3B subunit 3 (520-527)
  source 1..24: mol_type = other RNA
taccccgacggcatcagacacatt

SEQ ID NO: 72188 - RNA, 27 nt, synthetic construct
  misc_feature 1..27: note = Vacuolar protein sorting-associated protein 13B (2316-2324)
  source 1..27: mol_type = other RNA
taccccgagcctagagtgctgaccctc

SEQ ID NO: 72189 - RNA, 24 nt, synthetic construct
  misc_feature 1..24: note = Constitutive coactivator of peroxisome proliferator-activated receptor gamma (665-672)
  source 1..24: mol_type = other RNA
taccccggcaaccctctgagacac

SEQ ID NO: 72190 - RNA, 21 nt, synthetic construct
  misc_feature 1..21: note = Heterogeneous nuclear ribonucleoprotein U-like protein 1 (369-375)
  source 1..21: mol_type = other RNA
tacccccacgtgctggtcaag

SEQ ID NO: 72191 - RNA, 27 nt, synthetic construct
  misc_feature 1..27: note = Actin, cytoplasmic 2 (69-77)
  source 1..27: mol_type = other RNA
taccccatcgagcacggcattgtgacc

SEQ ID NO: 72192 - RNA, 27 nt, synthetic construct
  misc_feature 1..27: note = Isoleucine-tRNA ligase, cytoplasmic (845-853)
  source 1..27: mol_type = other RNA
taccccctgaaggagatcgtggtcatt

SEQ ID NO: 72193 - RNA, 27 nt, synthetic construct
  misc_feature 1..27: note = Transmembrane protein 98 (147-155)
  source 1..27: mol_type = other RNA
tacccccctctggacccaaagctcctt

SEQ ID NO: 72194 - RNA, 27 nt, synthetic construct
  misc_feature 1..27: note = Fatty aldehyde dehydrogenase (440-448)
  source 1..27: mol_type = other RNA
tacccccctaacagccagtccaaggtg

SEQ ID NO: 72195 - RNA, 33 nt, synthetic construct
  misc_feature 1..33: note = All-trans-retinol 13,14-reductase (15-25)
  source 1..33: mol_type = other RNA
taccccagaggcgggagctccgagatcgccttc

SEQ ID NO: 72196 - RNA, 24 nt, synthetic construct
  misc_feature 1..24: note = Syntenin-1 (46-53)
  source 1..24: mol_type = other RNA
taccccagactgtatcctgagctc

SEQ ID NO: 72197 - RNA, 27 nt, synthetic construct
  misc_feature 1..27: note = Protocadherin gamma-C3 (569-577)
  source 1..27: mol_type = other RNA
taccccagacctggcgggagctccgtg

SEQ ID NO: 72198 - RNA, 30 nt, synthetic construct
  misc_feature 1..30: note = Phosphatidylcholine translocator ABCB4 (403-412)
  source 1..30: mol_type = other RNA
taccccagcagagccaacgtgaagatcctg

SEQ ID NO: 72199 - RNA, 30 nt, synthetic construct
  misc_feature 1..30: note = AT-rich interactive domain-containing protein 1A (921-930)
  source 1..30: mol_type = other RNA
tacccctatggcgggccttacgacagagtg

SEQ ID NO: 72200 - RNA, 27 nt, synthetic construct
  misc_feature 1..27: note = Ataxin-2-like protein (1021-1029)
  source 1..27: mol_type = other RNA
tacccctatatcggccaccctcaggtg

SEQ ID NO: 72201 - RNA, 27 nt, synthetic construct
  misc_feature 1..27: note = Desmin (387-395)
  source 1..27: mol_type = other RNA
taccaggacctgctcaacgtgaagatg

SEQ ID NO: 72202 - RNA, 27 nt, synthetic construct
  misc_feature 1..27: note = Laminin subunit beta-1 (934-942)
  source 1..27: mol_type = other RNA
taccaggaccccgtgaccctgcaactc

SEQ ID NO: 72203 - RNA, 24 nt, synthetic construct
  misc_feature 1..24: note = Vimentin (358-365)
  source 1..24: mol_type = other RNA
taccaggacaccatcggcagactg

SEQ ID NO: 72204 - RNA, 36 nt, synthetic construct
  misc_feature 1..36: note = Regulator of nonsense transcripts 1 (154-165)
  source 1..36: mol_type = other RNA
taccagcacggcggggtgaccggactgagccaatat

SEQ ID NO: 72205 - RNA, 24 nt, synthetic construct
  misc_feature 1..24: note = AP-5 complex subunit zeta-1 (389-396)
  source 1..24: mol_type = other RNA
taccagcacctgttcaccagaatc

SEQ ID NO: 72206 - RNA, 21 nt, synthetic construct
  misc_feature 1..21: note = Cytoplasmic dynein 1 heavy chain 1 (2959-2965)
  source 1..21: mol_type = other RNA
taccagatcaaggtgcacaga

SEQ ID NO: 72207 - RNA, 24 nt, synthetic construct
  misc_feature 1..24: note = Bardet-Biedl syndrome 4 protein (46-53)
  source 1..24: mol_type = other RNA
taccagaaggccttcgagcacctg

SEQ ID NO: 72208 - RNA, 27 nt, synthetic construct
  misc_feature 1..27: note = Remodeling and spacing factor 1 (52-60)
  source 1..27: mol_type = other RNA
taccagctggaccaagatcacaacgtg

SEQ ID NO: 72209 - RNA, 27 nt, synthetic construct
  misc_feature 1..27: note = Exportin-7 (341-349)
  source 1..27: mol_type = other RNA
taccagctgggcgagctcgtgaaggtc

SEQ ID NO: 72210 - RNA, 27 nt, synthetic construct
  misc_feature 1..27: note = T-box transcription factor TBX3 (264-272)
  source 1..27: mol_type = other RNA
taccagaacgacaagatcacccaactg

SEQ ID NO: 72211 - RNA, 24 nt, synthetic construct
  misc_feature 1..24: note = Rho GTPase-activating protein 5 (414-421)
  source 1..24: mol_type = other RNA
taccagaaccacgtgcaacatctg

SEQ ID NO: 72212 - RNA, 24 nt, synthetic construct
  misc_feature 1..24: note = Zinc finger MYM-type protein 4 (345-352)
  source 1..24: mol_type = other RNA
taccagaacgtggtccacaagctg

SEQ ID NO: 72213 - RNA, 24 nt, synthetic construct
  misc_feature 1..24: note = Signal transducer and activator of transcription 6 (88-95)
  source 1..24: mol_type = other RNA
taccagagagaccccctgaagctc

SEQ ID NO: 72214 - RNA, 27 nt, synthetic construct
  misc_feature 1..27: note = TBC1 domain family member 16 (260-268)
  source 1..27: mol_type = other RNA
taccagaccgactatttccacctgttt

SEQ ID NO: 72215 - RNA, 30 nt, synthetic construct
  misc_feature 1..30: note = Fatty acid synthase (959-968)
  source 1..30: mol_type = other RNA
taccagtgggacgatcccgaccctagactg

SEQ ID NO: 72216 - RNA, 24 nt, synthetic construct
  misc_feature 1..24: note = Homeodomain-interacting protein kinase 4 (181-188)
  source 1..24: mol_type = other RNA
tacagagcccccgagatcctgctc

SEQ ID NO: 72217 - RNA, 24 nt, synthetic construct
  misc_feature 1..24: note = Glycogen synthase kinase-3 beta (222-229)
  source 1..24: mol_type = other RNA
tacagagcccccgagctgatcttc

SEQ ID NO: 72218 - RNA, 27 nt, synthetic construct
  misc_feature 1..27: note = Protocadherin gamma-C3 (727-735)
  source 1..27: mol_type = other RNA
tacagagcccccgtgagctccctgtat

SEQ ID NO: 72219 - RNA, 27 nt, synthetic construct
  misc_feature 1..27: note = Proteasome subunit beta type-4 (223-231)
  source 1..27: mol_type = other RNA
tacagagacgccaggagctataaccgg

SEQ ID NO: 72220 - RNA, 24 nt, synthetic construct
  misc_feature 1..24: note = Pyruvate kinase PKM (392-399)
  source 1..24: mol_type = other RNA
tacagaggcatcttccccgtgctg

SEQ ID NO: 72221 - RNA, 36 nt, synthetic construct
  misc_feature 1..36: note = Alpha-enolase (33-44)
  source 1..36: mol_type = other RNA
tacagacacatcgccgacctggctggcaacagcgag

SEQ ID NO: 72222 - RNA, 33 nt, synthetic construct
  misc_feature 1..33: note = Chondroitin sulfate proteoglycan 4 (1979-1989)
  source 1..33: mol_type = other RNA
tacagactgatccagggcccccaatatgggcac

SEQ ID NO: 72223 - RNA, 27 nt, synthetic construct
  misc_feature 1..27: note = SLIT and NTRK-like protein 2 (712-720)
  source 1..27: mol_type = other RNA
tacagaaacctgcaggagttcagctat

SEQ ID NO: 72224 - RNA, 24 nt, synthetic construct
  misc_feature 1..24: note = HIG1 domain family member 2A, mitochondrial (29-36)
  source 1..24: mol_type = other RNA
tacagaaaccccgagagcttcaag

SEQ ID NO: 72225 - RNA, 27 nt, synthetic construct
  misc_feature 1..27: note = Glycogen phosphorylase, brain form (792-800)
  source 1..27: mol_type = other RNA
tacagaaaccccaaggagtggaccaaa

SEQ ID NO: 72226 - RNA, 24 nt, synthetic construct
  misc_feature 1..24: note = Dual specificity protein kinase CLK3 (317-324)
  source 1..24: mol_type = other RNA
tacagaccccctgaggtgatcctg

SEQ ID NO: 72227 - RNA, 21 nt, synthetic construct
  misc_feature 1..21: note = Chromodomain-helicase-DNA-binding protein 4 (169-175)
  source 1..21: mol_type = other RNA
tacagaaccctgacaaactat

SEQ ID NO: 72228 - RNA, 27 nt, synthetic construct
  misc_feature 1..27: note = ATP-dependent RNA helicase DDX3X (243-251)
  source 1..27: mol_type = other RNA
tacagcgacggccccggggaggccctg

SEQ ID NO: 72229 - RNA, 30 nt, synthetic construct
  misc_feature 1..30: note = Transcription factor SOX-10 (402-411)
  source 1..30: mol_type = other RNA
tacagcgaccaccagccctccggcccttat

SEQ ID NO: 72230 - RNA, 33 nt, synthetic construct
  misc_feature 1..33: note = Transcription factor SOX-10 (402-412)
  source 1..33: mol_type = other RNA
tacagcgaccaccagccctccggcccttattac

SEQ ID NO: 72231 - RNA, 27 nt, synthetic construct
  misc_feature 1..27: note = Rab3 effector-like (158-166)
  source 1..27: mol_type = other RNA
tacagcgaccccttcgtgaaggtctat

SEQ ID NO: 72232 - RNA, 36 nt, synthetic construct
  misc_feature 1..36: note = Lysosomal-trafficking regulator (864-875)
  source 1..36: mol_type = other RNA
tacagcgactccccccagtctctgtcaaagttctat

SEQ ID NO: 72233 - RNA, 27 nt, synthetic construct
  misc_feature 1..27: note = Unconventional myosin-XVIIIa (454-462)
  source 1..27: mol_type = other RNA
tacagcgagaaggtgatgcacatgttc

SEQ ID NO: 72234 - RNA, 27 nt, synthetic construct
  misc_feature 1..27: note = DNA polymerase alpha catalytic subunit (732-740)
  source 1..27: mol_type = other RNA
tacagcgagtcctctcagctgctctat

SEQ ID NO: 72235 - RNA, 30 nt, synthetic construct
  misc_feature 1..30: note = AF4/FMR2 family member 4 (970-979)
  source 1..30: mol_type = other RNA
tacagcgagaccgtggacctgatcaagtat

SEQ ID NO: 72236 - RNA, 24 nt, synthetic construct
  misc_feature 1..24: note = CDK5 regulatory subunit-associated protein 3 (494-501)
  source 1..24: mol_type = other RNA
tacagcggcagacccgtgaacctg

SEQ ID NO: 72237 - RNA, 21 nt, synthetic construct
  misc_feature 1..21: note = SAM and SH3 domain-containing protein 1 (307-313)
  source 1..21: mol_type = other RNA
tacagcggcgtgcacaagaaa

SEQ ID NO: 72238 - RNA, 27 nt, synthetic construct
  misc_feature 1..27: note = Nucleolar pre-ribosomal-associated protein 1 (1469-1477)
  source 1..27: mol_type = other RNA
tacagccacctggagggcgccagattc

SEQ ID NO: 72239 - RNA, 24 nt, synthetic construct
  misc_feature 1..24: note = Inositol 1,4,5-trisphosphate receptor type 3 (2259-2266)
  source 1..24: mol_type = other RNA
tacagcatcagacccctgattgtg

SEQ ID NO: 72240 - RNA, 21 nt, synthetic construct
  misc_feature 1..21: note = Rho-associated protein kinase 1 (287-293)
  source 1..21: mol_type = other RNA
tacagcaagatcatgaaccac

SEQ ID NO: 72241 - RNA, 21 nt, synthetic construct
  misc_feature 1..21: note = Proteasome activator complex subunit 4 (40-46)
  source 1..21: mol_type = other RNA
tacagcaagaccgagcacctg

SEQ ID NO: 72242 - RNA, 27 nt, synthetic construct
  misc_feature 1..27: note = Melanoma-associated antigen D2 (326-334)
  source 1..27: mol_type = other RNA
tacagcctggagaaggtgttcggcatc

SEQ ID NO: 72243 - RNA, 48 nt, synthetic construct
  misc_feature 1..48: note = PERQ amino acid-rich with GYF domain-containing protein 1 (739-754)
  source 1..48: mol_type = other RNA
tacagcctgcacggctcctctggggagatcgaatcagtggacgattat

SEQ ID NO: 72244 - RNA, 24 nt, synthetic construct
  misc_feature 1..24: note = 60S ribosomal protein L6 (63-70)
  source 1..24: mol_type = other RNA
tacagcagaaaggccatgtataaa

SEQ ID NO: 72245 - RNA, 24 nt, synthetic construct
  misc_feature 1..24: note = BTB/POZ domain-containing protein KCTD20 (143-150)
  source 1..24: mol_type = other RNA
tacagctccaagctgtatagattc

SEQ ID NO: 72246 - RNA, 42 nt, synthetic construct
  misc_feature 1..42: note = Eukaryotic translation initiation factor 3 subunit D (59-72)
  source 1..42: mol_type = other RNA
tacagctcccagttcggcgggggatctcaatatgcctacttt

SEQ ID NO: 72247 - RNA, 27 nt, synthetic construct
  misc_feature 1..27: note = Bromo adjacent homology domain-containing 1 protein (744-752)
  source 1..27: mol_type = other RNA
tacagcaccccccctcacagaacagtg

SEQ ID NO: 72248 - RNA, 69 nt, synthetic construct
  misc_feature 1..69: note = Actin, gamma-enteric smooth muscle (295-317)
  source 1..69: mol_type = other RNA
tacagcgtgtggatcggcgggtccattctggcctctctctcaaccttccagcaaatgtggataagtaag

SEQ ID NO: 72249 - RNA, 108 nt, synthetic construct
  misc_feature 1..108: note = Actin, cytoplasmic 2 (337-372)
  source 1..108: mol_type = other RNA
tacagcgtgtggatcggcgggtccattctggcctctctctcaaccttccagcaaatgtggataagtaagcaggagtatgacgaaagcggaccctccatcgtccacaga

SEQ ID NO: 72250 - RNA, 27 nt, synthetic construct
  misc_feature 1..27: note = Uncharacterized protein C5orf34 (326-334)
  source 1..27: mol_type = other RNA
tacagctatcccgagctggtgaagatg

SEQ ID NO: 72251 - RNA, 27 nt, synthetic construct
  misc_feature 1..27: note = Citrate synthase, mitochondrial (189-197)
  source 1..27: mol_type = other RNA
tacaccgaccaccagttcacagagctg

SEQ ID NO: 72252 - RNA, 24 nt, synthetic construct
  misc_feature 1..24: note = Guanine nucleotide-binding protein subunit beta-2-like 1 (302-309)
  source 1..24: mol_type = other RNA
tacaccgacaacctggtgagagtc

SEQ ID NO: 72253 - RNA, 30 nt, synthetic construct
  misc_feature 1..30: note = Transcription factor SOX-10 (369-378)
  source 1..30: mol_type = other RNA
tacaccgaccagcccagcacatcccaaatc

SEQ ID NO: 72254 - RNA, 24 nt, synthetic construct
  misc_feature 1..24: note = WD repeat-containing protein 1 (54-61)
  source 1..24: mol_type = other RNA
tacaccgagcacgcccatcaggtg

SEQ ID NO: 72255 - RNA, 21 nt, synthetic construct
  misc_feature 1..21: note = Protocadherin Fat 2 (2518-2524)
  source 1..21: mol_type = other RNA
tacaccatcattaacaagctg

SEQ ID NO: 72256 - RNA, 24 nt, synthetic construct
  misc_feature 1..24: note = 1,2-dihydroxy-3-keto-5-methylthiopentene dioxygenase (142-149)
  source 1..24: mol_type = other RNA
tacaccaaggccatgagactgttc

SEQ ID NO: 72257 - RNA, 39 nt, synthetic construct
  misc_feature 1..39: note = Syndecan-3 (419-431)
  source 1..39: mol_type = other RNA
tacaccctggaggaacccaagcaggccagcgtgacatat

SEQ ID NO: 72258 - RNA, 27 nt, synthetic construct
  misc_feature 1..27: note = Trophinin (94-102)
  source 1..27: mol_type = other RNA
tacaccctggagaagatgttcagagtg

SEQ ID NO: 72259 - RNA, 27 nt, synthetic construct
  misc_feature 1..27: note = Zinc finger E-box-binding homeobox 2 (504-512)
  source 1..27: mol_type = other RNA
tacaccctggagaaggtgaacgaagcc

SEQ ID NO: 72260 - RNA, 30 nt, synthetic construct
  misc_feature 1..30: note = Probable ATP-dependent RNA helicase DDX5 (540-549)
  source 1..30: mol_type = other RNA
tacaccaacggcagcttcgggtccaatttt

SEQ ID NO: 72261 - RNA, 66 nt, synthetic construct
  misc_feature 1..66: note = Fructose-bisphosphate aldolase A (397-418)
  source 1..66: mol_type = other RNA
tacacccccagcggccaggccggggctgcagcctccgagtctctgttcgtgtcaaaccacgcgtat

SEQ ID NO: 72262 - RNA, 27 nt, synthetic construct
  misc_feature 1..27: note = DNA replication licensing factor MCM3 (251-259)
  source 1..27: mol_type = other RNA
tacaccagcggcacattcagaactgtg

SEQ ID NO: 72263 - RNA, 42 nt, synthetic construct
  misc_feature 1..42: note = Melanocyte protein PMEL (265-278)
  source 1..42: mol_type = other RNA
tacacctgggacttcggcgatagctccgggacactgatctct

SEQ ID NO: 72264 - RNA, 51 nt, synthetic construct
  misc_feature 1..51: note = Melanocyte protein PMEL (265-281)
  source 1..51: mol_type = other RNA
tacacctgggacttcggcgatagctccgggacactgatctctagagccctc

SEQ ID NO: 72265 - RNA, 30 nt, synthetic construct
  misc_feature 1..30: note = Adenylate cyclase type 6 (111-120)
  source 1..30: mol_type = other RNA
tacgtggcctgcgctctgctcgtcttctgt

SEQ ID NO: 72266 - RNA, 30 nt, synthetic construct
  misc_feature 1..30: note = Lysine-specific histone demethylase 1A (121-130)
  source 1..30: mol_type = other RNA
tacgtggccgacctgggcgctatggtcgtt

SEQ ID NO: 72267 - RNA, 24 nt, synthetic construct
  misc_feature 1..24: note = HLA class I histocompatibility antigen, B-49 alpha chain (51-58)
  source 1..24: mol_type = other RNA
tacgtggacgataccctgttcgtc

SEQ ID NO: 72268 - RNA, 24 nt, synthetic construct
  misc_feature 1..24: note = HLA class I histocompatibility antigen, B-13 alpha chain (26-33)
  source 1..24: mol_type = other RNA
tacgtggacgatacccagttcgtc

SEQ ID NO: 72269 - RNA, 30 nt, synthetic construct
  misc_feature 1..30: note = HLA class I histocompatibility antigen, Cw-5 alpha chain (51-60)
  source 1..30: mol_type = other RNA
tacgtggacgatacccagttcgtccaattt

SEQ ID NO: 72270 - RNA, 33 nt, synthetic construct
  misc_feature 1..33: note = HLA class I histocompatibility antigen, B-13 alpha chain (26-36)
  source 1..33: mol_type = other RNA
tacgtggacgatacccagttcgtcagatttgac

SEQ ID NO: 72271 - RNA, 36 nt, synthetic construct
  misc_feature 1..36: note = HLA class I histocompatibility antigen, B-13 alpha chain (26-37)
  source 1..36: mol_type = other RNA
tacgtggacgatacccagttcgtcagatttgacagc

SEQ ID NO: 72272 - RNA, 30 nt, synthetic construct; identical to SEQ ID NO: 48045
  misc_feature 1..30: note = Helicase SKI2W (1066-1075)
  source 1..30: mol_type = other RNA

SEQ ID NO: 72273 - RNA, 30 nt, synthetic construct
  misc_feature 1..30: note = 40S ribosomal protein S16 (98-107)
  source 1..30: mol_type = other RNA
tacgtggacgaggccagcaagaaagaaatc

SEQ ID NO: 72274 - RNA, 24 nt, synthetic construct
  misc_feature 1..24: note = Angiomotin-like protein 1 (605-612)
  source 1..24: mol_type = other RNA
tacgtggagaaggtcgaaaaactg

SEQ ID NO: 72275 - RNA, 24 nt, synthetic construct
  misc_feature 1..24: note = Angiomotin-like protein 2 (482-489)
  source 1..24: mol_type = other RNA
tacgtggagaaggtcgaaagactg

SEQ ID NO: 72276 - RNA, 21 nt, synthetic construct
  misc_feature 1..21: note = Melanoma-derived growth regulatory protein (71-77)
  source 1..21: mol_type = other RNA
tacgtgttcagcaagctgaaa

SEQ ID NO: 72277 - RNA, 27 nt, synthetic construct
  misc_feature 1..27: note = Glutamine-tRNA ligase (632-640)
  source 1..27: mol_type = other RNA
tacgtgatcgagctgcagcacgtcgtt

SEQ ID NO: 72278 - RNA, 30 nt, synthetic construct
  misc_feature 1..30: note = E3 ubiquitin-protein ligase Arkadia (683-692)
  source 1..30: mol_type = other RNA
tacgtgatcccccaccctgtccatgccttc

SEQ ID NO: 72279 - RNA, 27 nt, synthetic construct
  misc_feature 1..27: note = Apoptosis-resistant E3 ubiquitin protein ligase 1 (356-364)
  source 1..27: mol_type = other RNA
tacgtgagccccaagcagttctccgtc

SEQ ID NO: 72280 - RNA, 24 nt, synthetic construct
  misc_feature 1..24: note = Signal transducer and activator of transcription 2 (829-836)
  source 1..24: mol_type = other RNA
tacgtgagcagaccctcccacttc

SEQ ID NO: 72281 - RNA, 27 nt, synthetic construct
  misc_feature 1..27: note = Serine/threonine-protein kinase SMG1 (424-432)
  source 1..27: mol_type = other RNA
tacgtgaccgacgtcctgtatagagtt

SEQ ID NO: 72282 - RNA, 36 nt, synthetic construct
  misc_feature 1..36: note = Filamin-A (2047-2058)
  source 1..36: mol_type = other RNA
tacgtgaccgagatcgaccaggataagtatgccgtc

SEQ ID NO: 72283 - RNA, 27 nt, synthetic construct
  misc_feature 1..27: note = Fructose-bisphosphate aldolase A (258-266)
  source 1..27: mol_type = other RNA
tacgtgaccgagaaggtcctggccgct

SEQ ID NO: 72284 - RNA, 27 nt, synthetic construct
  misc_feature 1..27: note = Tensin-1 (17-25)
  source 1..27: mol_type = other RNA
tacgtgaccgagagaatcattgccgtc

SEQ ID NO: 72285 - RNA, 27 nt, synthetic construct
  misc_feature 1..27: note = Membrane-associated transporter protein (55-63)
  source 1..27: mol_type = other RNA
tacgtgacccccgtcctgctcagcgtt

SEQ ID NO: 72286 - RNA, 30 nt, synthetic construct
  misc_feature 1..30: note = Attractin (187-196)
  source 1..30: mol_type = other RNA
tacgtgtatgacggcgatagcatctacgcc

SEQ ID NO: 72287 - RNA, 21 nt, synthetic construct
  misc_feature 1..21: note = Histone H2B type 2-F (41-47)
  source 1..21: mol_type = other RNA
tacgtgtataaggtcctgaaa

SEQ ID NO: 72288 - RNA, 21 nt, synthetic construct
  misc_feature 1..21: note = 40S ribosomal protein S29 (7-13)
  source 1..21: mol_type = other RNA
tactggagccaccccagaaag

SEQ ID NO: 72289 - RNA, 96 nt, synthetic construct
  misc_feature 1..96: note = Keratin, type I cytoskeletal 18 (212-243)
  source 1..96: mol_type = other RNA
tactggagccagcaaatcgaggaatccaccacagtggtcactacgcagtctgccgaggttggcgctgcagaaaccacactgactgagctcagaagg

SEQ ID NO: 72290 - RNA, 27 nt, synthetic construct
  misc_feature 1..27: note = Dual specificity tyrosine-phosphorylation-regulated kinase 1A (471-479)
  source 1..27: mol_type = other RNA
tactatgccctgcagcacagcttcttt

SEQ ID NO: 72291 - RNA, 27 nt, synthetic construct
  misc_feature 1..27: note = Cap-specific mRNAucleoside-2'-O-)-methyltransferase 1 (795-803)
  source 1..27: mol_type = other RNA
tactatggcagactgttctgggagtgg

SEQ ID NO: 72292 - RNA, 27 nt, synthetic construct
  misc_feature 1..27: note = Motile sperm domain-containing protein 2 (174-182)
  source 1..27: mol_type = other RNA
tactatcccaagtacctgagcaaaatc

SEQ ID NO: 72293 - RNA, 27 nt, synthetic construct
  misc_feature 1..27: note = Procollagen-lysine,2-oxoglutarate 5-dioxygenase 2 (114-122)
  source 1..27: mol_type = other RNA
tactataccaagggcttcgccctgctc

SEQ ID NO: 72294 - RNA, 27 nt, synthetic construct
  misc_feature 1..27: note = Receptor-type protein tyrosine phosphatase beta (1197-1205)
  source 1..27: mol_type = other RNA
tactataccgtgagaaacttcacactg

SEQ ID NO: 72295 - RNA, 27 nt, synthetic construct
  misc_feature 1..27: note = CASP8 and FADD-like apoptosis regulator (367-375)
  source 1..27: mol_type = other RNA
tactatgtgtggctgcagcacaccctc

SEQ ID NO: 72296 - RNA, 27 nt, synthetic construct
  misc_feature 1..27: note = Tyrosine-protein kinase JAK1 (67-75)
  source 1..27: mol_type = other RNA
gccctgtacgacgagaacaccaagctc

SEQ ID NO: 72297 - RNA, 27 nt, synthetic construct
  misc_feature 1..27: note = RNA-binding protein 4 (259-267)
  source 1..27: mol_type = other RNA
gccatggctagccacctgacctccaca

SEQ ID NO: 72298 - RNA, 27 nt, synthetic construct
  misc_feature 1..27: note = Neuroligin-3 (389-397)
  source 1..27: mol_type = other RNA
gagggcctgaagttcgtggaaggggtc

SEQ ID NO: 72299 - RNA, 27 nt, synthetic construct
  misc_feature 1..27: note = StAR-related lipid transfer protein 7, mitochondrial (235-243)
  source 1..27: mol_type = other RNA
ggcatgcccgacttcctggagaagctc

SEQ ID NO: 72300 - RNA, 27 nt, synthetic construct
  misc_feature 1..27: note = Katanin p60 ATPase-containing subunit A1 (77-85)
  source 1..27: mol_type = other RNA
aagctggacagcacccccctcaaagcc

SEQ ID NO: 72301 - RNA, 27 nt, synthetic construct
  misc_feature 1..27: note = YrdC domain-containing protein, mitochondrial (184-192)
  source 1..27: mol_type = other RNA
cagatgttcgagggccccctggccctc

SEQ ID NO: 72302 - RNA, 27 nt, synthetic construct
  misc_feature 1..27: note = Protein FAM72C (114-122)
  source 1..27: mol_type = other RNA
agactggacagcaccggcgtgaacgtc

SEQ ID NO: 72303 - RNA, 33 nt, synthetic construct
  misc_feature 1..33: note = ATP-dependent RNA helicase DHX36 (643-653)
  source 1..33: mol_type = other RNA
agactgatggacccccctagcaacgaggccgtg

SEQ ID NO: 72304 - RNA, 27 nt, synthetic construct
  misc_feature 1..27: note = Serine/arginine repetitive matrix protein 2 (2370-2378)
  source 1..27: mol_type = other RNA
agaatggcccccgctctgagcggcgca

SEQ ID NO: 72305 - RNA, 27 nt, synthetic construct
  misc_feature 1..27: note = Nuclear receptor coactivator 1 (835-843)
  source 1..27: mol_type = other RNA
agaatggacggcgccgtgaccagcgtc

SEQ ID NO: 72306 - RNA, 27 nt, synthetic construct
  misc_feature 1..27: note = Ethanolamine kinase 1 (232-240)
  source 1..27: mol_type = other RNA
agacagctggccaagatccacgctatt

SEQ ID NO: 72307 - RNA, 27 nt, synthetic construct
  misc_feature 1..27: note = Clathrin heavy chain 1 (1039-1047)
  source 1..27: mol_type = other RNA
agagtgatggagtacatcaacaggctg

SEQ ID NO: 72308 - RNA, 27 nt, synthetic construct
  misc_feature 1..27: note = Large proline-rich protein BAG6 (530-538)
  source 1..27: mol_type = other RNA
agcctggcccagatggtgtccggcctc

SEQ ID NO: 72309 - RNA, 27 nt, synthetic construct
  misc_feature 1..27: note = Mediator of RNA polymerase II transcription subunit 8 (11-19)
  source 1..27: mol_type = other RNA
agcctggacgccctcctttcccaggtg

SEQ ID NO: 72310 - RNA, 33 nt, synthetic construct
  misc_feature 1..33: note = Cathepsin L1 (247-257)
  source 1..33: mol_type = other RNA
gtggccatcgacgctggccacgagagcttcctg

SEQ ID NO: 72311 - RNA, 27 nt, synthetic construct
  misc_feature 1..27: note = UDP-glucose:glycoprotein glucosyltransferase 2 (187-195)
  source 1..27: mol_type = other RNA
tacgccgagatgggcaccagaacattc

SEQ ID NO: 72312 - RNA, 30 nt, synthetic construct
  misc_feature 1..30: note = Alkyldihydroxyacetonephosphate synthase, peroxisomal (308-317)
  source 1..30: mol_type = other RNA
agcaccgtgggcgggtgggtctccacaaga

SEQ ID NO: 72313 - RNA, 54 nt, synthetic construct
  misc_feature 1..54: note = Paired box protein Pax-2 (160-177)
  source 1..54: mol_type = other RNA
gcccccggccacaccatcgtgcctagcacagcttccccaccggtctcttcagca

SEQ ID NO: 72314 - RNA, 45 nt, synthetic construct
  misc_feature 1..45: note = Glutamyl aminopeptidase (290-304)
  source 1..45: mol_type = other RNA
gccgtgcaccagttcgacagcgtcaagagaatctccaactctggc

SEQ ID NO: 72315 - RNA, 24 nt, synthetic construct
  misc_feature 1..24: note = Inositol 1,4,5-trisphosphate receptor type 3 (333-340)
  source 1..24: mol_type = other RNA
gacatcctgattagaaccgagctc

SEQ ID NO: 72316 - RNA, 27 nt, synthetic construct
  misc_feature 1..27: note = Fatty acid synthase (1644-1652)
  source 1..27: mol_type = other RNA
gaggccgctagcgtgcccgtcgtttac

SEQ ID NO: 72317 - RNA, 36 nt, synthetic construct
  misc_feature 1..36: note = POTE ankyrin domain family member E (1064-1075)
  source 1..36: mol_type = other RNA
gagagcggcccctccatcgtgcacagaaagtgcttc

SEQ ID NO: 72318 - RNA, 27 nt, synthetic construct
  misc_feature 1..27: note = Beta-1-syntrophin (163-171)
  source 1..27: mol_type = other RNA
ctggccgaccccgagaacagacagctc

SEQ ID NO: 72319 - RNA, 27 nt, synthetic construct
  misc_feature 1..27: note = Egl nine homolog 3 (194-202)
  source 1..27: mol_type = other RNA
aacccccacgaggtgcagcctagctac

SEQ ID NO: 72320 - RNA, 24 nt, synthetic construct
  misc_feature 1..24: note = GRB2-related adapter protein (34-41)
  source 1..24: mol_type = other RNA
cagaactggtacaaggccgagctg

SEQ ID NO: 72321 - RNA, 27 nt, synthetic construct
  misc_feature 1..27: note = Protein-lysine 6-oxidase (86-94)
  source 1..27: mol_type = other RNA
cagcccagaacccctatcctgctcatt

SEQ ID NO: 72322 - RNA, 24 nt, synthetic construct
  misc_feature 1..24: note = Adenomatous polyposis coli protein (222-229)
  source 1..24: mol_type = other RNA
cagcaaatcgagaaggacattctg

SEQ ID NO: 72323 - RNA, 27 nt, synthetic construct
  misc_feature 1..27: note = Insulin-like growth factor-binding protein 3 (5-13)
  source 1..27: mol_type = other RNA
agacccaccctgtgggccgctgcactc

SEQ ID NO: 72324 - RNA, 42 nt, synthetic construct
  misc_feature 1..42: note = Thrombospondin-1 (56-69)
  source 1..42: mol_type = other RNA
agccccgccttcagaatcgaggacgctaacctgattcctcca

SEQ ID NO: 72325 - RNA, 30 nt, synthetic construct
  misc_feature 1..30: note = Epidermal growth factor receptor (1026-1035)
  source 1..30: mol_type = other RNA
agcccctccacctctagaacacctctgctc

SEQ ID NO: 72326 - RNA, 48 nt, synthetic construct
  misc_feature 1..48: note = Thrombospondin-2 (96-111)
  source 1..48: mol_type = other RNA
agcagaggcaccctgctcgcccttgaggggcccggactgtcccagagg

SEQ ID NO: 72327 - RNA, 27 nt, synthetic construct
  misc_feature 1..27: note = Transforming growth factor beta-1 (263-271)
  source 1..27: mol_type = other RNA
acccccctggagagagcccagcacctc

SEQ ID NO: 72328 - RNA, 51 nt, synthetic construct
  misc_feature 1..51: note = Transforming growth factor-beta-induced protein ig-h3 (579-595)
  source 1..51: mol_type = other RNA
gtgagcggcgggatcggagccctggtcagactcaagtcccttcagggtgac

SEQ ID NO: 72329 - RNA, 30 nt, synthetic construct
  misc_feature 1..30: note = Matrilysin (167-176)
  source 1..30: mol_type = other RNA
taccccttcgacggccctgggaacaccctg

SEQ ID NO: 72330 - RNA, 30 nt, synthetic construct
  misc_feature 1..30: note = Cytochrome b-c1 complex subunit Rieske, mitochondrial (82-91)
  source 1..30: mol_type = other RNA
gacatcaaggtgcccgatttcagcgagtac

SEQ ID NO: 72331 - RNA, 36 nt, synthetic construct
  misc_feature 1..36: note = Thioredoxin-related transmembrane protein 4 (92-103)
  source 1..36: mol_type = other RNA
gacgtgatccaggagcccggcctgagcgggagattc

SEQ ID NO: 72332 - RNA, 36 nt, synthetic construct
  misc_feature 1..36: note = Keratin, type I cytoskeletal 9 (29-40)
  source 1..36: mol_type = other RNA
gaggaagccaacaatgacctggagaacaagatccag

SEQ ID NO: 72333 - RNA, 42 nt, synthetic construct
  misc_feature 1..42: note = POTE ankyrin domain family member E (805-818)
  source 1..42: mol_type = other RNA
ctgaccgaggcccccctcaaccctaaggctaatagagaaaaa

SEQ ID NO: 72334 - RNA, 51 nt, synthetic construct
  misc_feature 1..51: note = POTE ankyrin domain family member E (805-821)
  source 1..51: mol_type = other RNA
ctgaccgaggcccccctcaaccctaaggctaatagagaaaaaatgacacag

SEQ ID NO: 72335 - RNA, 36 nt, synthetic construct
  misc_feature 1..36: note = 40S ribosomal protein S21 (35-46)
  source 1..36: mol_type = other RNA
aacgtggccgaggtcgacaaggttaccggcagattc

SEQ ID NO: 72336 - RNA, 27 nt, synthetic construct
  misc_feature 1..27: note = Keratin, type II cytoskeletal 2 epidermal (170-178)
  source 1..27: mol_type = other RNA
aacgtgaaggtcgaccccgagatccag

SEQ ID NO: 72337 - RNA, 54 nt, synthetic construct
  misc_feature 1..54: note = Heat shock protein beta-1 (188-205)
  source 1..54: mol_type = other RNA
agagcccagctgggcgggcccgaggctgcaaagagcgacgaaaccgccgcgaaa

SEQ ID NO: 72338 - RNA, 33 nt, synthetic construct
  misc_feature 1..33: note = Actin, alpha skeletal muscle (2-12)
  source 1..33: mol_type = other RNA
agagagatcgtgagggacattaaggaaaaactg

SEQ ID NO: 72339 - RNA, 42 nt, synthetic construct
  misc_feature 1..42: note = ATP synthase subunit gamma, mitochondrial (176-189)
  source 1..42: mol_type = other RNA
agcggctacgagttcgacgaagggtccatcatttttaacaag

SEQ ID NO: 72340 - RNA, 36 nt, synthetic construct
  misc_feature 1..36: note = Fibronectin (1340-1351)
  source 1..36: mol_type = other RNA
agcgtgtacgagcagcacgaatccacccccctgaga

SEQ ID NO: 72341 - RNA, 48 nt, synthetic construct
  misc_feature 1..48: note = Vimentin (38-53)
  source 1..48: mol_type = other RNA
tacagcctgggctccgccctcagaccctctacctcaaggagtctttat

SEQ ID NO: 72342 - RNA, 27 nt, synthetic construct
  misc_feature 1..27: note = Guanylate kinase (10-18)
  source 1..27: mol_type = other RNA
gccgctgcagccctgggcagagcgccc

SEQ ID NO: 72343 - RNA, 27 nt, synthetic construct
  misc_feature 1..27: note = T-box transcription factor TBX2 (59-67)
  source 1..27: mol_type = other RNA
gccgctgcagaggccggcctgcacgtg

SEQ ID NO: 72344 - RNA, 36 nt, synthetic construct
  misc_feature 1..36: note = Heterogeneous nuclear ribonucleoprotein L (36-47)
  source 1..36: mol_type = other RNA
gccgctgcaggcgggggaggtggcgggggaagatac

SEQ ID NO: 72345 - RNA, 39 nt, synthetic construct
  misc_feature 1..39: note = Heterogeneous nuclear ribonucleoprotein L (36-48)
  source 1..39: mol_type = other RNA
gccgctgcaggcgggggaggtggcgggggaagatactat

SEQ ID NO: 72346 - RNA, 24 nt, synthetic construct
  misc_feature 1..24: note = Exocyst complex component 4 (16-23)
  source 1..24: mol_type = other RNA
gccgctgcacacagcgtggtcctg

SEQ ID NO: 72347 - RNA, 27 nt, synthetic construct
  misc_feature 1..27: note = Fumarate hydratase, mitochondrial (155-163)
  source 1..27: mol_type = other RNA
gccgctgcaatcgaggtgcacgaagtc

SEQ ID NO: 72348 - RNA, 27 nt, synthetic construct
  misc_feature 1..27: note = Calcium-binding mitochondrial carrier protein Aralar2 (2-10)
  source 1..27: mol_type = other RNA
gccgctgcaaaggtggccctgaccaaa

SEQ ID NO: 72349 - RNA, 27 nt, synthetic construct
  misc_feature 1..27: note = ATP-binding cassette sub-family B member 10, mitochondrial (226-234)
  source 1..27: mol_type = other RNA
gccgctgcaaacgccatcagagtgtac

SEQ ID NO: 72350 - RNA, 33 nt, synthetic construct
  misc_feature 1..33: note = Iroquois-class homeodomain protein IRX-2 (414-424)
  source 1..33: mol_type = other RNA
gccgctgcacccggcgaggccctgcacaccgcg

SEQ ID NO: 72351 - RNA, 24 nt, synthetic construct
  misc_feature 1..24: note = Bcl-2-binding component 3 (195-202)
  source 1..24: mol_type = other RNA
gccgctgcaccccctctgaccctc

SEQ ID NO: 72352 - RNA, 27 nt, synthetic construct
  misc_feature 1..27: note = Polyadenylate-binding protein 4 (547-555)
  source 1..27: mol_type = other RNA
gccgctgcaccccctcaggagcaaaag

SEQ ID NO: 72353 - RNA, 27 nt, synthetic construct
  misc_feature 1..27: note = Protein Shroom2 (289-297)
  source 1..27: mol_type = other RNA
gccgctgcacagcacttcaccgccctg

SEQ ID NO: 72354 - RNA, 27 nt, synthetic construct
  misc_feature 1..27: note = LRRN4 C-terminal-like protein (230-238)
  source 1..27: mol_type = other RNA
gccgctgcaagagccgcgggcgctctg

SEQ ID NO: 72355 - RNA, 30 nt, synthetic construct
  misc_feature 1..30: note = Pyridoxal-dependent decarboxylase domain-containing protein 1 (179-188)
  source 1..30: mol_type = other RNA
gccgctgcaagacccggcctggggcagtac

SEQ ID NO: 72356 - RNA, 27 nt, synthetic construct
  misc_feature 1..27: note = T-complex protein 1 subunit alpha (24-32)
  source 1..27: mol_type = other RNA
gccgctgcaagcatcgccaacattgtg

SEQ ID NO: 72357 - RNA, 27 nt, synthetic construct
  misc_feature 1..27: note = Neuronal pentraxin receptor (38-46)
  source 1..27: mol_type = other RNA
gccgctgcaagccccggccctcagaga

SEQ ID NO: 72358 - RNA, 27 nt, synthetic construct
  misc_feature 1..27: note = Disco-interacting protein 2 homolog C (25-33)
  source 1..27: mol_type = other RNA
gccgctgcagtggacgtcagaacctgg

SEQ ID NO: 72359 - RNA, 33 nt, synthetic construct
  misc_feature 1..33: note = Tubulin beta-4B chain (10-20)
  source 1..33: mol_type = other RNA
gccgcttgcgaccccagacacggcaggtacctg

SEQ ID NO: 72360 - RNA, 27 nt, synthetic construct
  misc_feature 1..27: note = Cartilage-associated protein (245-253)
  source 1..27: mol_type = other RNA
gccgcttgcgagggcagcagagaaatc

SEQ ID NO: 72361 - RNA, 27 nt, synthetic construct
  misc_feature 1..27: note = Phenylalanine-tRNA ligase alpha subunit (118-126)
  source 1..27: mol_type = other RNA
gccgctgacggccccagagtgttcagg

SEQ ID NO: 72362 - RNA, 27 nt, synthetic construct
  misc_feature 1..27: note = Importin-4 (48-56)
  source 1..27: mol_type = other RNA
gccgctgacccccagatcagacaattc

SEQ ID NO: 72363 - RNA, 24 nt, synthetic construct
  misc_feature 1..24: note = UBA-like domain-containing protein 1 (24-31)
  source 1..24: mol_type = other RNA
gccgctgaccaggcaaagcaactg

SEQ ID NO: 72364 - RNA, 33 nt, synthetic construct
  misc_feature 1..33: note = Melanoma antigen preferentially expressed in tumors (59-69)
  source 1..33: mol_type = other RNA
gccgctttcgacggcagacacagccagaccctg

SEQ ID NO: 72365 - RNA, 27 nt, synthetic construct
  misc_feature 1..27: note = Cleavage and polyadenylation specificity factor subunit 2 (121-129)
  source 1..27: mol_type = other RNA
gccgctttcgacaagatccagcaactg

SEQ ID NO: 72366 - RNA, 27 nt, synthetic construct
  misc_feature 1..27: note = Splicing factor 3B subunit 1 (744-752)
  source 1..27: mol_type = other RNA
gccgctttcctgaaggcaatcggctac

SEQ ID NO: 72367 - RNA, 27 nt, synthetic construct
  misc_feature 1..27: note = V-type proton ATPase subunit H (287-295)
  source 1..27: mol_type = other RNA
gccgctttcagaaactttctggagaag

SEQ ID NO: 72368 - RNA, 27 nt, synthetic construct
  misc_feature 1..27: note = Macrophage-capping protein (134-142)
  source 1..27: mol_type = other RNA
gccgctatcaagaaactgtaccaggtg

SEQ ID NO: 72369 - RNA, 27 nt, synthetic construct
  misc_feature 1..27: note = Ferritin heavy chain (81-89)
  source 1..27: mol_type = other RNA
gccgctatcaacagacagattaatctg

SEQ ID NO: 72370 - RNA, 27 nt, synthetic construct
  misc_feature 1..27: note = Growth arrest-specific protein 8 (268-276)
  source 1..27: mol_type = other RNA
gccgctatccaggaggtgcaacagaag

SEQ ID NO: 72371 - RNA, 27 nt, synthetic construct
  misc_feature 1..27: note = Malate dehydrogenase, cytoplasmic (114-122)
  source 1..27: mol_type = other RNA
gccgctctggacaagtacgcaaaaaag

SEQ ID NO: 72372 - RNA, 33 nt, synthetic construct
  misc_feature 1..33: note = Numb-like protein (541-551)
  source 1..33: mol_type = other RNA
gccgctctggagggcaaggcaaccgtggaaaaa

SEQ ID NO: 72373 - RNA, 27 nt, synthetic construct
  misc_feature 1..27: note = Leucine-rich repeat-containing protein 41 (525-533)
  source 1..27: mol_type = other RNA
gccgctatgaagggcaacagcaccctg

SEQ ID NO: 72374 - RNA, 30 nt, synthetic construct
  misc_feature 1..30: note = Alkyldihydroxyacetonephosphate synthase, peroxisomal (76-85)
  source 1..30: mol_type = other RNA
gccgctcaggagagcggcaccatccccaag

SEQ ID NO: 72375 - RNA, 27 nt, synthetic construct
  misc_feature 1..27: note = HEAT repeat-containing protein 5B (541-549)
  source 1..27: mol_type = other RNA
gccgctcagaacagcagactgtccctc

SEQ ID NO: 72376 - RNA, 27 nt, synthetic construct
  misc_feature 1..27: note = cAMP-dependent protein kinase type I-alpha regulatory subunit (7-15)
  source 1..27: mol_type = other RNA
gccgctagcgaggaagcaagatccctg

SEQ ID NO: 72377 - RNA, 27 nt, synthetic construct
  misc_feature 1..27: note = WD repeat-containing protein 54 (75-83)
  source 1..27: mol_type = other RNA
gccgctagcggccacttcatctgcgtg

SEQ ID NO: 72378 - RNA, 27 nt, synthetic construct
  misc_feature 1..27: note = Sterol regulatory element-binding protein 2 (104-112)
  source 1..27: mol_type = other RNA
gccgctagcccccaggcacctaccctg

SEQ ID NO: 72379 - RNA, 27 nt, synthetic construct
  misc_feature 1..27: note = Vesicle transport through interaction with t-SNAREs homolog 1B (5-13)
  source 1..27: mol_type = other RNA
gccgctagctccgagcacttcgaaaag

SEQ ID NO: 72380 - RNA, 27 nt, synthetic construct
  misc_feature 1..27: note = Actin, cytoplasmic 2 (21-29)
  source 1..27: mol_type = other RNA
gccgctagctcctcttcactggagaag

SEQ ID NO: 72381 - RNA, 27 nt, synthetic construct
  misc_feature 1..27: note = Talin-1 (770-778)
  source 1..27: mol_type = other RNA
gccgctaccgcagtgacacaggccctg

SEQ ID NO: 72382 - RNA, 27 nt, synthetic construct
  misc_feature 1..27: note = Serine/threonine-protein phosphatase 4 regulatory subunit 3B (382-390)
  source 1..27: mol_type = other RNA
gccgctaccgacatcttcagctacctg

SEQ ID NO: 72383 - RNA, 27 nt, synthetic construct
  misc_feature 1..27: note = Long-chain fatty acid transport protein 1 (241-249)
  source 1..27: mol_type = other RNA
gccgctgtggcagacccccacagcctg

SEQ ID NO: 72384 - RNA, 27 nt, synthetic construct
  misc_feature 1..27: note = Bifunctional apoptosis regulator (156-164)
  source 1..27: mol_type = other RNA
gccgctgtgaaccccggcagaagcctg

SEQ ID NO: 72385 - RNA, 33 nt, synthetic construct
  misc_feature 1..33: note = Ligand-dependent nuclear receptor-interacting factor 1 (176-186)
  source 1..33: mol_type = other RNA
gccgcttacgagcagagccacttctttaacaag

SEQ ID NO: 72386 - RNA, 27 nt, synthetic construct
  misc_feature 1..27: note = Drebrin (97-105)
  source 1..27: mol_type = other RNA
gcctgcgctagccacgtggcaaaggtc

SEQ ID NO: 72387 - RNA, 27 nt, synthetic construct
  misc_feature 1..27: note = WASH complex subunit strumpellin (384-392)
  source 1..27: mol_type = other RNA
gcctgcgaccccaacaataagagactg

SEQ ID NO: 72388 - RNA, 27 nt, synthetic construct
  misc_feature 1..27: note = Zinc finger protein 106 (941-949)
  source 1..27: mol_type = other RNA
gcctgcctggacaagttcgtgagagtc

SEQ ID NO: 72389 - RNA, 33 nt, synthetic construct
  misc_feature 1..33: note = Fructose-bisphosphate aldolase A (33-43)
  source 1..33: mol_type = other RNA
gccgacgagagcaccggctccatcgctaagaga

SEQ ID NO: 72390 - RNA, 33 nt, synthetic construct
  misc_feature 1..33: note = Selenoprotein N (53-63)
  source 1..33: mol_type = other RNA
gccgaggctcaggcagccgcgagacaagaactg

SEQ ID NO: 72391 - RNA, 33 nt, synthetic construct
  misc_feature 1..33: note = Myosin-11 (2-12)
  source 1..33: mol_type = other RNA
gccgaggctagagaaaaggagaccaaagcactg

SEQ ID NO: 72392 - RNA, 27 nt, synthetic construct
  misc_feature 1..27: note = Tetratricopeptide repeat protein 37 (1248-1256)
  source 1..27: mol_type = other RNA
gccgaggacgaaaagaacaccgctctg

SEQ ID NO: 72393 - RNA, 27 nt, synthetic construct
  misc_feature 1..27: note = Heat shock factor protein 1 (137-145)
  source 1..27: mol_type = other RNA
gccgaggaccccaccatcagcctgctc

SEQ ID NO: 72394 - RNA, 30 nt, synthetic construct
  misc_feature 1..30: note = Melanoma antigen recognized by T-cells 1 (24-33)
  source 1..30: mol_type = other RNA
gccgaggaagctgcaggcatcgggattctg

SEQ ID NO: 72395 - RNA, 27 nt, synthetic construct
  misc_feature 1..27: note = Protein SFI1 homolog (356-364)
  source 1..27: mol_type = other RNA
gccgaggaaccccacgctctggagctc

SEQ ID NO: 72396 - RNA, 33 nt, synthetic construct; identical to SEQ ID NO: 48169
  misc_feature 1..33: note = Metalloproteinase inhibitor 2 (114-124)
  source 1..33: mol_type = other RNA

SEQ ID NO: 72397 - RNA, 27 nt, synthetic construct
  misc_feature 1..27: note = T-complex protein 1 subunit zeta (326-334)
  source 1..27: mol_type = other RNA
gccgagcacagcgaatccggccagctg

SEQ ID NO: 72398 - RNA, 33 nt, synthetic construct
  misc_feature 1..33: note = ALK tyrosine kinase receptor (403-413)
  source 1..33: mol_type = other RNA
gccgagatcaagaccacaaacgaagtggtcctg

SEQ ID NO: 72399 - RNA, 33 nt, synthetic construct
  misc_feature 1..33: note = Junction plakoglobin (137-147)
  source 1..33: mol_type = other RNA
gccgagctggctaccagagcactccccgaactt

SEQ ID NO: 72400 - RNA, 27 nt, synthetic construct
  misc_feature 1..27: note = E3 ubiquitin-protein ligase BRE1A (672-680)
  source 1..27: mol_type = other RNA
gccgagctggaagacctcagacagagg

SEQ ID NO: 72401 - RNA, 30 nt, synthetic construct
  misc_feature 1..30: note = Disheveled-associated activator of morphogenesis 2 (875-884)
  source 1..30: mol_type = other RNA
gccgagctggaaaaggaggtgggcaacctc

SEQ ID NO: 72402 - RNA, 30 nt, synthetic construct
  misc_feature 1..30: note = MAD2L1-binding protein (129-138)
  source 1..30: mol_type = other RNA
gccgagctggaaagcgtgctctcccacctt

SEQ ID NO: 72403 - RNA, 30 nt, synthetic construct
  misc_feature 1..30: note = Inactive ubiquitin carboxyl-terminal hydrolase 54 (1171-1180)
  source 1..30: mol_type = other RNA
gccgagcccgacatctaccaggaaaagctg

SEQ ID NO: 72404 - RNA, 33 nt, synthetic construct
  misc_feature 1..33: note = Stathmin-3 (108-118)
  source 1..33: mol_type = other RNA
gccgagagaagggaacacgagcgggaagtgctg

SEQ ID NO: 72405 - RNA, 24 nt, synthetic construct
  misc_feature 1..24: note = Cytoplasmic dynein 1 light intermediate chain 2 (86-93)
  source 1..24: mol_type = other RNA
gccgagagcctgcccgaaaccctc

SEQ ID NO: 72406 - RNA, 30 nt, synthetic construct
  misc_feature 1..30: note = Neurosecretory protein VGF (183-192)
  source 1..30: mol_type = other RNA
gccgagaccgaaacaagaactcacacgctg

SEQ ID NO: 72407 - RNA, 27 nt, synthetic construct
  misc_feature 1..27: note = Gamma-interferon-inducible protein 16 (79-87)
  source 1..27: mol_type = other RNA
gccgagaccctgaagaaagaaaagctc

SEQ ID NO: 72408 - RNA, 30 nt, synthetic construct
  misc_feature 1..30: note = Formin-binding protein 1-like (452-461)
  source 1..30: mol_type = other RNA
gccgagaccatgaacaatatcgacagactg

SEQ ID NO: 72409 - RNA, 30 nt, synthetic construct
  misc_feature 1..30: note = Tumor susceptibility gene 101 protein (282-291)
  source 1..30: mol_type = other RNA
gccgaggtggacaagaacatcgaactgctc

SEQ ID NO: 72410 - RNA, 27 nt, synthetic construct
  misc_feature 1..27: note = Consortin (611-619)
  source 1..27: mol_type = other RNA
gccgaggtggtccccaccgaaggcctg

SEQ ID NO: 72411 - RNA, 27 nt, synthetic construct
  misc_feature 1..27: note = Nuclear mitotic apparatus protein 1 (857-865)
  source 1..27: mol_type = other RNA
gccggcatcgagagccactccgaactg

SEQ ID NO: 72412 - RNA, 27 nt, synthetic construct
  misc_feature 1..27: note = Nuclear receptor corepressor 2 (1168-1176)
  source 1..27: mol_type = other RNA
gccggcccccctgagagcctgggggtg

SEQ ID NO: 72413 - RNA, 33 nt, synthetic construct
  misc_feature 1..33: note = Hermansky-Pudlak syndrome 5 protein (284-294)
  source 1..33: mol_type = other RNA
gccggcagctcccagtctctgtcattccccaag

SEQ ID NO: 72414 - RNA, 27 nt, synthetic construct
  misc_feature 1..27: note = Actin-related protein 2/3 complex subunit 1B (24-32)
  source 1..27: mol_type = other RNA
gccatctgccccaacaatcacgaggtg

SEQ ID NO: 72415 - RNA, 42 nt, synthetic construct
  misc_feature 1..42: note = Syndecan-3 (292-305)
  source 1..42: mol_type = other RNA
gccatcgacagcggctcctctgctgcacagctgccccaaaag

SEQ ID NO: 72416 - RNA, 27 nt, synthetic construct
  misc_feature 1..27: note = Ewing's tumor-associated antigen 1 (284-292)
  source 1..27: mol_type = other RNA
gccatcttcgacggcagcacccagaag

SEQ ID NO: 72417 - RNA, 33 nt, synthetic construct
  misc_feature 1..33: note = Tectonic-3 (478-488)
  source 1..33: mol_type = other RNA
gccatcttcggcaacgctgaccccgcacagaag

SEQ ID NO: 72418 - RNA, 27 nt, synthetic construct
  misc_feature 1..27: note = Kinesin-like protein KIF20B (640-648)
  source 1..27: mol_type = other RNA
gccatcttcaaggacctggtgggcaaa

SEQ ID NO: 72419 - RNA, 27 nt, synthetic construct
  misc_feature 1..27: note = Rho-related GTP-binding protein RhoQ (186-194)
  source 1..27: mol_type = other RNA
gccatcattgctatactgacccccaag

SEQ ID NO: 72420 - RNA, 27 nt, synthetic construct
  misc_feature 1..27: note = Protein wntless homolog (4-12)
  source 1..27: mol_type = other RNA
gccatcattgagaacatgagcaccaag

SEQ ID NO: 72421 - RNA, 27 nt, synthetic construct
  misc_feature 1..27: note = Eukaryotic translation initiation factor 3 subunit C-like protein (482-490)
  source 1..27: mol_type = other RNA
gccatcattgagagagtgcagaggtac

SEQ ID NO: 72422 - RNA, 33 nt, synthetic construct
  misc_feature 1..33: note = 40S ribosomal protein S17 (39-49)
  source 1..33: mol_type = other RNA
gccatcattcccagcaagaaactgagaaacaag

SEQ ID NO: 72423 - RNA, 30 nt, synthetic construct; identical to SEQ ID NO: 48196
  misc_feature 1..30: note = Ribulose-phosphate 3-epimerase (118-127)
  source 1..30: mol_type = other RNA

SEQ ID NO: 72424 - RNA, 33 nt, synthetic construct
  misc_feature 1..33: note = Serine/threonine-protein kinase Sgk1 (47-57)
  source 1..33: mol_type = other RNA
gccatcaagccccctctgaaagctttcatgaag

SEQ ID NO: 72425 - RNA, 27 nt, synthetic construct
  misc_feature 1..27: note = NF-kappa-B inhibitor beta (102-110)
  source 1..27: mol_type = other RNA
gccatcctgggcgagaccagcacagtg

SEQ ID NO: 72426 - RNA, 30 nt, synthetic construct
  misc_feature 1..30: note = GTP-binding protein Rheb (10-19)
  source 1..30: mol_type = other RNA
gccatcctgggctacagaagcgtggggaag

SEQ ID NO: 72427 - RNA, 33 nt, synthetic construct
  misc_feature 1..33: note = Fibroblast growth factor 14 isoform 6 (201-211)
  source 1..33: mol_type = other RNA
gccatcatgaacggcgggaagcccgtgaataaa

SEQ ID NO: 72428 - RNA, 27 nt, synthetic construct
  misc_feature 1..27: note = Puratrophin-1 (1020-1028)
  source 1..27: mol_type = other RNA
gccatcaacgacagaaccgtgaattac

SEQ ID NO: 72429 - RNA, 27 nt, synthetic construct
  misc_feature 1..27: note = Mitotic spindle assembly checkpoint protein MAD2A (123-131)
  source 1..27: mol_type = other RNA
gccatccaggacgagattagaagcgtg

SEQ ID NO: 72430 - RNA, 27 nt, synthetic construct
  misc_feature 1..27: note = Radixin (19-27)
  source 1..27: mol_type = other RNA
gccatccagcccaacaccacaggcaag

SEQ ID NO: 72431 - RNA, 33 nt, synthetic construct
  misc_feature 1..33: note = ATP-dependent 6-phosphofructokinase, platelet type (229-239)
  source 1..33: mol_type = other RNA
gccatctacgacggcttcgatgggtttgctaag

SEQ ID NO: 72432 - RNA, 39 nt, synthetic construct
  misc_feature 1..39: note = Cytochrome b-c1 complex subunit 9 (42-54)
  source 1..39: mol_type = other RNA
gccatctacgaccacattaacgagggcaagctgtggaaa

SEQ ID NO: 72433 - RNA, 36 nt, synthetic construct
  misc_feature 1..36: note = Transcription initiation factor IIB (257-268)
  source 1..36: mol_type = other RNA
gccatctacatggctagccaggcatccgccgagaag

SEQ ID NO: 72434 - RNA, 27 nt, synthetic construct
  misc_feature 1..27: note = Serine dehydratase-like (282-290)
  source 1..27: mol_type = other RNA
gccatctacagcggcctgctcagaagg

SEQ ID NO: 72435 - RNA, 39 nt, synthetic construct
  misc_feature 1..39: note = Keratin, type II cytoskeletal 1 (303-315)
  source 1..39: mol_type = other RNA
gccaagctggacaacctccagcaagagatcgatttcctt

SEQ ID NO: 72436 - RNA, 24 nt, synthetic construct
  misc_feature 1..24: note = Kv channel-interacting protein 2 (72-79)
  source 1..24: mol_type = other RNA
gccctggctgcacccgccagcctc

SEQ ID NO: 72437 - RNA, 27 nt, synthetic construct
  misc_feature 1..27: note = GPI ethanolamine phosphate transferase 3 (917-925)
  source 1..27: mol_type = other RNA
gccctggctgcaagcatcctcagaagg

SEQ ID NO: 72438 - RNA, 33 nt, synthetic construct
  misc_feature 1..33: note = Core histone macro-H2A.1 (296-306)
  source 1..33: mol_type = other RNA
gccctggctgacgataagaaactcaagagcatc

SEQ ID NO: 72439 - RNA, 33 nt, synthetic construct
  misc_feature 1..33: note = Phosphatidylinositol 3-kinase regulatory subunit beta (169-179)
  source 1..33: mol_type = other RNA
gccctggctgacggcatcaagagcttcctcctt

SEQ ID NO: 72440 - RNA, 33 nt, synthetic construct
  misc_feature 1..33: note = Basement membrane-specific heparan sulfate proteoglycan core protein (1484-1494)
  source 1..33: mol_type = other RNA
gccctggctgacctcgatgagcttctgatcaga

SEQ ID NO: 72441 - RNA, 33 nt, synthetic construct
  misc_feature 1..33: note = Protein SHQ1 homolog (400-410)
  source 1..33: mol_type = other RNA
gccctggctgaggcactcaaggaagtgagcctt

SEQ ID NO: 72442 - RNA, 33 nt, synthetic construct
  misc_feature 1..33: note = Tropomodulin-1 (243-253)
  source 1..33: mol_type = other RNA
gccctggctgagatgctcaaggaaaacaaagtg

SEQ ID NO: 72443 - RNA, 30 nt, synthetic construct
  misc_feature 1..30: note = Beta-1,4-glucuronyltransferase 1 (66-75)
  source 1..30: mol_type = other RNA
gccctggctagcggcggggtgctcgacgca

SEQ ID NO: 72444 - RNA, 27 nt, synthetic construct
  misc_feature 1..27: note = Zinc finger FYVE domain-containing protein 16 (1461-1469)
  source 1..27: mol_type = other RNA
gccctgtgcccccacctcaagaccctt

SEQ ID NO: 72445 - RNA, 27 nt, synthetic construct
  misc_feature 1..27: note = V-type proton ATPase subunit F (77-85)
  source 1..27: mol_type = other RNA
gccctggacgctcaccagcaaagcatc

SEQ ID NO: 72446 - RNA, 27 nt, synthetic construct
  misc_feature 1..27: note = 17-beta-hydroxysteroid dehydrogenase 14 (169-177)
  source 1..27: mol_type = other RNA
gccctggacgagagcccctacggcgtg

SEQ ID NO: 72447 - RNA, 33 nt, synthetic construct
  misc_feature 1..33: note = 17-beta-hydroxysteroid dehydrogenase 14 (169-179)
  source 1..33: mol_type = other RNA
gccctggacgagagcccctacggcgtgagagtc

SEQ ID NO: 72448 - RNA, 27 nt, synthetic construct
  misc_feature 1..27: note = Arf-GAP with SH3 domain, ANK repeat and PH domain-containing protein 1 (493-501)
  source 1..27: mol_type = other RNA
gccctggacatcgctaagagactcaaa

SEQ ID NO: 72449 - RNA, 27 nt, synthetic construct
  misc_feature 1..27: note = TATA box-binding protein-like protein 1 (8-16)
  source 1..27: mol_type = other RNA
gccctggacatcctcattaccaacgtg

SEQ ID NO: 72450 - RNA, 27 nt, synthetic construct
  misc_feature 1..27: note = Glutaminyl-peptide cyclotransferase (173-181)
  source 1..27: mol_type = other RNA
gccctggacaagaaactccttagcctg

SEQ ID NO: 72451 - RNA, 33 nt, synthetic construct
  misc_feature 1..33: note = Pre-mRNA-processing factor 17 (138-148)
  source 1..33: mol_type = other RNA
gccctggaccccagcctcgataaccaccaggtg

SEQ ID NO: 72452 - RNA, 33 nt, synthetic construct
  misc_feature 1..33: note = 60S ribosomal protein L7a (86-96)
  source 1..33: mol_type = other RNA
gccctggacagacagaccgctacacaactcctt

SEQ ID NO: 72453 - RNA, 33 nt, synthetic construct
  misc_feature 1..33: note = Chromodomain-helicase-DNA-binding protein 1-like (822-832)
  source 1..33: mol_type = other RNA
gccctggaggaaggcctcaagaaaatcttcctt

SEQ ID NO: 72454 - RNA, 30 nt, synthetic construct
  misc_feature 1..30: note = Keratin, type I cytoskeletal 10 (217-226)
  source 1..30: mol_type = other RNA
gccctggaggaacagctccaacagatcaga

SEQ ID NO: 72455 - RNA, 27 nt, synthetic construct
  misc_feature 1..27: note = Ribonuclease pancreatic (2-10)
  source 1..27: mol_type = other RNA
gccctggagaagagcctcgtgagactt

SEQ ID NO: 72456 - RNA, 33 nt, synthetic construct
  misc_feature 1..33: note = Ribonuclease pancreatic (2-12)
  source 1..33: mol_type = other RNA
gccctggagaagagcctcgtgagacttctgttg

SEQ ID NO: 72457 - RNA, 39 nt, synthetic construct
  misc_feature 1..39: note = NADPH oxidase 5 (49-61)
  source 1..39: mol_type = other RNA
gccctgttcgacagcgatagatccggcaccatcacactc

SEQ ID NO: 72458 - RNA, 33 nt, synthetic construct; identical to SEQ ID NO: 48231
  misc_feature 1..33: note = Ankyrin repeat and SAM domain-containing protein 1A (255-265)
  source 1..33: mol_type = other RNA

SEQ ID NO: 72459 - RNA, 36 nt, synthetic construct
  misc_feature 1..36: note = Alpha-1,6-mannosylglycoprotein 6-beta-N-acetylglucosaminyltransferase A (2-13)
  source 1..36: mol_type = other RNA
gccctgttcaccccctggaagctcagctcccagaaa

SEQ ID NO: 72460 - RNA, 33 nt, synthetic construct
  misc_feature 1..33: note = Cell division cycle protein 16 homolog (22-32)
  source 1..33: mol_type = other RNA
gccctgttctgggctgacaaggtggcaagcctc

SEQ ID NO: 72461 - RNA, 27 nt, synthetic construct
  misc_feature 1..27: note = Cleft lip and palate transmembrane protein 1 (123-131)
  source 1..27: mol_type = other RNA
gccctgttctgggagcagcacgacctc

SEQ ID NO: 72462 - RNA, 36 nt, synthetic construct
  misc_feature 1..36: note = Ras-related protein Rab-27A (14-25)
  source 1..36: mol_type = other RNA
gccctgggcgacagcggggtgggaaagacctccgtc

SEQ ID NO: 72463 - RNA, 27 nt, synthetic construct
  misc_feature 1..27: note = Membrane-associated transporter protein (129-137)
  source 1..27: mol_type = other RNA
gccctgatcgctaaccccagaaggaag

SEQ ID NO: 72464 - RNA, 36 nt, synthetic construct
  misc_feature 1..36: note = E3 ubiquitin-protein ligase CBL-B (341-352)
  source 1..36: mol_type = other RNA
gccctgatcgacggcagcagagaggggttctacctc

SEQ ID NO: 72465 - RNA, 30 nt, synthetic construct
  misc_feature 1..30: note = Polypyrimidine tract-binding protein 1 (173-182)
  source 1..30: mol_type = other RNA
gccctgatcgacctccacaaccatgatctt

SEQ ID NO: 72466 - RNA, 27 nt, synthetic construct
  misc_feature 1..27: note = Protein S100-B (10-18)
  source 1..27: mol_type = other RNA
gccctgatcgacgtgttccaccagtac

SEQ ID NO: 72467 - RNA, 33 nt, synthetic construct; identical to SEQ ID NO: 48240
  misc_feature 1..33: note = Melanoma-associated antigen C2 (196-206)
  source 1..33: mol_type = other RNA

SEQ ID NO: 72468 - RNA, 30 nt, synthetic construct
  misc_feature 1..30: note = Coatomer subunit zeta-1 (3-12)
  source 1..30: mol_type = other RNA
gccctgatcctcgagcccagcctttacacc

SEQ ID NO: 72469 - RNA, 27 nt, synthetic construct
  misc_feature 1..27: note = S-adenosylmethionine synthase isoform type-2 (221-229)
  source 1..27: mol_type = other RNA
gccctgaaggagaaagtgatcaaggct

SEQ ID NO: 72470 - RNA, 30 nt, synthetic construct; identical to SEQ ID NO: 48243
  misc_feature 1..30: note = Zinc finger protein 318 (262-271)
  source 1..30: mol_type = other RNA

SEQ ID NO: 72471 - RNA, 27 nt, synthetic construct
  misc_feature 1..27: note = Spliceosome-associated protein CWC15 homolog (128-136)
  source 1..27: mol_type = other RNA
gccctgctcgctgagcttgaaaagatc

SEQ ID NO: 72472 - RNA, 21 nt, synthetic construct
  misc_feature 1..21: note = Protein DGCR6L (54-60)
  source 1..21: mol_type = other RNA
gccctgctcgacggcaccgtg

SEQ ID NO: 72473 - RNA, 36 nt, synthetic construct
  misc_feature 1..36: note = Eukaryotic translation initiation factor 3 subunit C-like protein (633-644)
  source 1..36: mol_type = other RNA
gccctgctcgacatccagagctccggcagagctaag

SEQ ID NO: 72474 - RNA, 36 nt, synthetic construct
  misc_feature 1..36: note = Neural Wiskott-Aldrich syndrome protein (408-419)
  source 1..36: mol_type = other RNA
gccctgctcgaccagatcagagagggcgctcaactt

SEQ ID NO: 72475 - RNA, 36 nt, synthetic construct
  misc_feature 1..36: note = Wiskott-Aldrich syndrome protein (433-444)
  source 1..36: mol_type = other RNA
gccctgctcgaccagatcagacaaggcattcagctt

SEQ ID NO: 72476 - RNA, 33 nt, synthetic construct
  misc_feature 1..33: note = Serine/threonine-protein kinase PRP4 homolog (104-114)
  source 1..33: mol_type = other RNA
gccctgctcgaggaccttgaaaagcagagagct

SEQ ID NO: 72477 - RNA, 30 nt, synthetic construct
  misc_feature 1..30: note = Melanoma antigen preferentially expressed in tumors (371-380)
  source 1..30: mol_type = other RNA
gccctgctcgagagagctagcgcaaccctt

SEQ ID NO: 72478 - RNA, 30 nt, synthetic construct
  misc_feature 1..30: note = Cleft lip and palate transmembrane protein 1 (348-357)
  source 1..30: mol_type = other RNA
gccctgctcgagaccaacccctaccttctg

SEQ ID NO: 72479 - RNA, 45 nt, synthetic construct
  misc_feature 1..45: note = Proteasome subunit alpha type-7 (194-208)
  source 1..45: mol_type = other RNA
gccctgctcgaggtggtccagagcggcgggaagaacatcgaactt

SEQ ID NO: 72480 - RNA, 30 nt, synthetic construct
  misc_feature 1..30: note = Ankyrin repeat domain-containing protein 17 (368-377)
  source 1..30: mol_type = other RNA
gccctgctcatcgagagaggcgctagcctt

SEQ ID NO: 72481 - RNA, 27 nt, synthetic construct
  misc_feature 1..27: note = Down syndrome critical region protein 3 (171-179)
  source 1..27: mol_type = other RNA
gccctgctccccaagttccttctgaga

SEQ ID NO: 72482 - RNA, 27 nt, synthetic construct
  misc_feature 1..27: note = Melanoma antigen preferentially expressed in tumors (397-405)
  source 1..27: mol_type = other RNA
gccctgctccccagcctttcccactgc

SEQ ID NO: 72483 - RNA, 27 nt, synthetic construct
  misc_feature 1..27: note = Neuronal membraneoprotein M6-b (96-104)
  source 1..27: mol_type = other RNA
gccctgctcagcgaggtgatccagctt

SEQ ID NO: 72484 - RNA, 27 nt, synthetic construct
  misc_feature 1..27: note = Ragulator complex protein LAMTOR1 (52-60)
  source 1..27: mol_type = other RNA
gccctgctcagctccatccttgctaag

SEQ ID NO: 72485 - RNA, 27 nt, synthetic construct
  misc_feature 1..27: note = Sulfate transporter (523-531)
  source 1..27: mol_type = other RNA
gccctgctcagcaccgagatcggcctt

SEQ ID NO: 72486 - RNA, 30 nt, synthetic construct
  misc_feature 1..30: note = Activator of 90 kDa heat shock protein ATPase homolog 1 (58-67)
  source 1..30: mol_type = other RNA
gccctgatgaaggaggaaggcgtgaaactc

SEQ ID NO: 72487 - RNA, 27 nt, synthetic construct
  misc_feature 1..27: note = rRNA 2'-O-methyltransferase fibrillarin (244-252)
  source 1..27: mol_type = other RNA
gccctgaacgctcacaccttcctcaga

SEQ ID NO: 72488 - RNA, 33 nt, synthetic construct
  misc_feature 1..33: note = Catenin alpha-1 (363-373)
  source 1..33: mol_type = other RNA
gccctgaacagcgctatcgacaagatgaccaaa

SEQ ID NO: 72489 - RNA, 27 nt, synthetic construct
  misc_feature 1..27: note = Cytoglobin (88-96)
  source 1..27: mol_type = other RNA
gccctgaacaccgtggtcgagaatctc

SEQ ID NO: 72490 - RNA, 27 nt, synthetic construct
  misc_feature 1..27: note = Growth/differentiation factor 15 (96-104)
  source 1..27: mol_type = other RNA
gccctgcccgagggcctccctgaagct

SEQ ID NO: 72491 - RNA, 27 nt, synthetic construct
  misc_feature 1..27: note = Homer protein homolog 3 (191-199)
  source 1..27: mol_type = other RNA
gccctgcaggacagcaacaataagctc

SEQ ID NO: 72492 - RNA, 33 nt, synthetic construct
  misc_feature 1..33: note = Metastasis suppressor protein 1 (165-175)
  source 1..33: mol_type = other RNA
gccctgcaggacgtgaacgataagtacctcctt

SEQ ID NO: 72493 - RNA, 27 nt, synthetic construct
  misc_feature 1..27: note = 1-acyl-sn-glycerol-3-phosphate acyltransferase gamma (283-291)
  source 1..27: mol_type = other RNA
gccctgcaggagatctacaaccaaaag

SEQ ID NO: 72494 - RNA, 30 nt, synthetic construct
  misc_feature 1..30: note = Neuralized-like protein 4 (559-568)
  source 1..30: mol_type = other RNA
gccctgagagacggcgaggtgttccaggtc

SEQ ID NO: 72495 - RNA, 27 nt, synthetic construct
  misc_feature 1..27: note = Neurosecretory protein VGF (3-11)
  source 1..27: mol_type = other RNA
gccctgagactcagcgcttccgcactt

SEQ ID NO: 72496 - RNA, 27 nt, synthetic construct
  misc_feature 1..27: note = Dystonin (375-383)
  source 1..27: mol_type = other RNA
gccctgagacccgaggtggaaaggctc

SEQ ID NO: 72497 - RNA, 36 nt, synthetic construct
  misc_feature 1..36: note = Vimentin (308-319)
  source 1..36: mol_type = other RNA
gccctgagacaggctaagcaagagagcaccgaatac

SEQ ID NO: 72498 - RNA, 27 nt, synthetic construct
  misc_feature 1..27: note = Coiled-coil domain-containing protein 154 (502-510)
  source 1..27: mol_type = other RNA
gccctgagacaggagctcgctaccctt

SEQ ID NO: 72499 - RNA, 45 nt, synthetic construct
  misc_feature 1..45: note = 60S ribosomal protein L36 (2-16)
  source 1..45: mol_type = other RNA
gccctgagataccccatggctgtgggcctcaacaaggggcacaaa

SEQ ID NO: 72500 - RNA, 30 nt, synthetic construct; identical to SEQ ID NO: 48273
  misc_feature 1..30: note = Integrin alpha-V (893-902)
  source 1..30: mol_type = other RNA

SEQ ID NO: 72501 - RNA, 27 nt, synthetic construct
  misc_feature 1..27: note = Kinesin-like protein KIF20B (1148-1156)
  source 1..27: mol_type = other RNA
gccctgagcgagctcacccagggcgtg

SEQ ID NO: 72502 - RNA, 27 nt, synthetic construct
  misc_feature 1..27: note = Ankycorbin (690-698)
  source 1..27: mol_type = other RNA
gccctgagcgagatgaagtcccagtac

SEQ ID NO: 72503 - RNA, 27 nt, synthetic construct
  misc_feature 1..27: note = Lysine-specific demethylase 5A (119-127)
  source 1..27: mol_type = other RNA
gccctgagcaagatcgtggcttccaaa

SEQ ID NO: 72504 - RNA, 27 nt, synthetic construct
  misc_feature 1..27: note = Probable phospholipid-transporting ATPase IIA (685-693)
  source 1..27: mol_type = other RNA
gccctgagccagttcgtgatccacaga

SEQ ID NO: 72505 - RNA, 27 nt, synthetic construct
  misc_feature 1..27: note = Chondroitin sulfate proteoglycan 4 (45-53)
  source 1..27: mol_type = other RNA
gccctgaccgacatcgatctccagctt

SEQ ID NO: 72506 - RNA, 27 nt, synthetic construct
  misc_feature 1..27: note = HRAS-like suppressor 3 (84-92)
  source 1..27: mol_type = other RNA
gccctgaccgacaaggctatcgtgaaa

SEQ ID NO: 72507 - RNA, 27 nt, synthetic construct
  misc_feature 1..27: note = Neuroblastoma breakpoint family member 6 (396-404)
  source 1..27: mol_type = other RNA
gccctggtggacaagatcaaaaaggat

SEQ ID NO: 72508 - RNA, 30 nt, synthetic construct
  misc_feature 1..30: note = Glycosylphosphatidylinositol anchor attachment 1 protein (38-47)
  source 1..30: mol_type = other RNA
gccctggtgttcccccctctcacccagaga

SEQ ID NO: 72509 - RNA, 36 nt, synthetic construct
  misc_feature 1..36: note = Nuclear nucleic acid-binding protein C1D (121-132)
  source 1..36: mol_type = other RNA
gccctgtgggagcccaagagcaaaaacgcttccaag

SEQ ID NO: 72510 - RNA, 27 nt, synthetic construct
  misc_feature 1..27: note = Separin (752-760)
  source 1..27: mol_type = other RNA
gccctgtggaaggagctccttaccaaa

SEQ ID NO: 72511 - RNA, 27 nt, synthetic construct
  misc_feature 1..27: note = Fucose mutarotase (91-99)
  source 1..27: mol_type = other RNA
gccctgtacggcaacctcatccttaga

SEQ ID NO: 72512 - RNA, 27 nt, synthetic construct
  misc_feature 1..27: note = Proteasome subunit beta type-4 (6-14)
  source 1..27: mol_type = other RNA
gccctgtacagaggccccatcaccagg

SEQ ID NO: 72513 - RNA, 27 nt, synthetic construct
  misc_feature 1..27: note = Mitofusin-2 (433-441)
  source 1..27: mol_type = other RNA
gccatggctgaggaaatcagaaggctg

SEQ ID NO: 72514 - RNA, 33 nt, synthetic construct
  misc_feature 1..33: note = Methionine synthase (1208-1218)
  source 1..33: mol_type = other RNA
gccatggctcccgcaagcgccgtgtccggcctg

SEQ ID NO: 72515 - RNA, 27 nt, synthetic construct
  misc_feature 1..27: note = Basement membrane-specific heparan sulfate proteoglycan core protein (3206-3214)
  source 1..27: mol_type = other RNA
gccatggctcccggcgcacctcaggtg

SEQ ID NO: 72516 - RNA, 30 nt, synthetic construct
  misc_feature 1..30: note = Unconventional myosin-IXa (1913-1922)
  source 1..30: mol_type = other RNA
gccatggacgatggcaagagcatcagatac

SEQ ID NO: 72517 - RNA, 33 nt, synthetic construct
  misc_feature 1..33: note = Ubiquitin carboxyl-terminal hydrolase 4 (692-702)
  source 1..33: mol_type = other RNA
gccatggactgggatagcgagaccagaaggctg

SEQ ID NO: 72518 - RNA, 30 nt, synthetic construct
  misc_feature 1..30: note = Myosin regulatory light polypeptide 9 (24-33)
  source 1..30: mol_type = other RNA
gccatgttcgaccagagccaaatccaggag

SEQ ID NO: 72519 - RNA, 36 nt, synthetic construct
  misc_feature 1..36: note = Eukaryotic translation initiation factor 3 subunit K (2-13)
  source 1..36: mol_type = other RNA
gccatgttcgagcagatgagagctaacgtgggcaag

SEQ ID NO: 72520 - RNA, 36 nt, synthetic construct; identical to SEQ ID NO: 48293
  misc_feature 1..36: note = Exportin-4 (248-259)
  source 1..36: mol_type = other RNA

SEQ ID NO: 72521 - RNA, 27 nt, synthetic construct
  misc_feature 1..27: note = Ankyrin repeat domain-containing protein SOWAHC (349-357)
  source 1..27: mol_type = other RNA
gccatgcacggccatgtggaggtcgtt

SEQ ID NO: 72522 - RNA, 27 nt, synthetic construct
  misc_feature 1..27: note = Calpain-7 (409-417)
  source 1..27: mol_type = other RNA
gccatgcacagcgactcccagaccttc

SEQ ID NO: 72523 - RNA, 27 nt, synthetic construct
  misc_feature 1..27: note = Cytoplasmic FMR1-interacting protein 1 (490-498)
  source 1..27: mol_type = other RNA
gccatgatcaagggcctgcaggtgctc

SEQ ID NO: 72524 - RNA, 27 nt, synthetic construct
  misc_feature 1..27: note = DNA repair protein RAD50 (657-665)
  source 1..27: mol_type = other RNA
gccatgctggctggcgcaaccgccgtg

SEQ ID NO: 72525 - RNA, 36 nt, synthetic construct
  misc_feature 1..36: note = Melanocyte protein PMEL (184-195)
  source 1..36: mol_type = other RNA
gccatgctgggcacccacacaatggaggtgactgtc

SEQ ID NO: 72526 - RNA, 24 nt, synthetic construct
  misc_feature 1..24: note = Protein AAR2 homolog (287-294)
  source 1..24: mol_type = other RNA
gccatgatgaagcaccataccctg

SEQ ID NO: 72527 - RNA, 33 nt, synthetic construct
  misc_feature 1..33: note = Atherin (156-166)
  source 1..33: mol_type = other RNA
gccatgaacaaggagggcgggaccgctagcgtg

SEQ ID NO: 72528 - RNA, 30 nt, synthetic construct
  misc_feature 1..30: note = Guanine nucleotide-binding protein G(s) subunit alpha isoforms short (95-104)
  source 1..30: mol_type = other RNA
gccatgagcaacctggtgccccctgtcgag

SEQ ID NO: 72529 - RNA, 30 nt, synthetic construct
  misc_feature 1..30: note = Ubiquitin-conjugating enzyme E2 H (97-106)
  source 1..30: mol_type = other RNA
gccatgtacctgcacagacccgaggaatat

SEQ ID NO: 72530 - RNA, 36 nt, synthetic construct
  misc_feature 1..36: note = Copine-1 (72-83)
  source 1..36: mol_type = other RNA
gcccaggctgcacaccaaggcaccgccagccagtac

SEQ ID NO: 72531 - RNA, 33 nt, synthetic construct
  misc_feature 1..33: note = Copine-1 (403-413)
  source 1..33: mol_type = other RNA
gcccaggctgcacaccaaggcaccgccagctac

SEQ ID NO: 72532 - RNA, 30 nt, synthetic construct
  misc_feature 1..30: note = Fatty acid synthase (1283-1292)
  source 1..30: mol_type = other RNA
gcccaggctgagctgcaacagcacgacgtg

SEQ ID NO: 72533 - RNA, 27 nt, synthetic construct
  misc_feature 1..27: note = Catenin beta-1 (702-710)
  source 1..27: mol_type = other RNA
gcccagggcgagcccctggggtacaga

SEQ ID NO: 72534 - RNA, 27 nt, synthetic construct
  misc_feature 1..27: note = Protein tyrosine phosphatase type IVA 1 (36-44)
  source 1..27: mol_type = other RNA
gcccagcacgacctgtacgctgataag

SEQ ID NO: 72535 - RNA, 24 nt, synthetic construct
  misc_feature 1..24: note = Glutathione S-transferase A4 (32-39)
  source 1..24: mol_type = other RNA
gcccagaaggctatcattagatac

SEQ ID NO: 72536 - RNA, 27 nt, synthetic construct
  misc_feature 1..27: note = Patatin-like phospholipase domain-containing protein 7 (872-880)
  source 1..27: mol_type = other RNA
gcccagaagcaactgatcctccttcac

SEQ ID NO: 72537 - RNA, 27 nt, synthetic construct
  misc_feature 1..27: note = Vigilin (548-556)
  source 1..27: mol_type = other RNA
gcccagaagagcgacatcgtgcaactg

SEQ ID NO: 72538 - RNA, 24 nt, synthetic construct
  misc_feature 1..24: note = CD276 antigen (61-68)
  source 1..24: mol_type = other RNA
gcccagctgaacctcatctggcaa

SEQ ID NO: 72539 - RNA, 30 nt, synthetic construct
  misc_feature 1..30: note = Zinc finger protein 507 (116-125)
  source 1..30: mol_type = other RNA
gcccagaacgagggcaaggctatgagctac

SEQ ID NO: 72540 - RNA, 27 nt, synthetic construct
  misc_feature 1..27: note = Hemicentin-1 (4060-4068)
  source 1..27: mol_type = other RNA
gcccagaaccccgctggcaccgcactg

SEQ ID NO: 72541 - RNA, 27 nt, synthetic construct
  misc_feature 1..27: note = NAD(P) transhydrogenase, mitochondrial (158-166)
  source 1..27: mol_type = other RNA
gcccagaaccccgagctgctcaataag

SEQ ID NO: 72542 - RNA, 27 nt, synthetic construct
  misc_feature 1..27: note = Elongator complex protein 2 (42-50)
  source 1..27: mol_type = other RNA
gcccagcaaaacgaccagttccagaag

SEQ ID NO: 72543 - RNA, 27 nt, synthetic construct
  misc_feature 1..27: note = Microphthalmia-associated transcription factor (118-126)
  source 1..27: mol_type = other RNA
gcccagagacaacaggtgaagcagtac

SEQ ID NO: 72544 - RNA, 27 nt, synthetic construct
  misc_feature 1..27: note = Cytoplasmic polyadenylation element-binding protein 1 (45-53)
  source 1..27: mol_type = other RNA
gcccagagctccacccactctgtgctg

SEQ ID NO: 72545 - RNA, 27 nt, synthetic construct
  misc_feature 1..27: note = GMP synthase (glutamine-hydrolyzing) (130-138)
  source 1..27: mol_type = other RNA
gcccagtacggcaaggtgatcgacaga

SEQ ID NO: 72546 - RNA, 27 nt, synthetic construct
  misc_feature 1..27: note = 1,2-dihydroxy-3-keto-5-methylthiopentene dioxygenase (181-189)
  source 1..27: mol_type = other RNA
gccagaggccagtacgtgaagttcctg

SEQ ID NO: 72547 - RNA, 27 nt, synthetic construct
  misc_feature 1..27: note = Ankyrin repeat and LEM domain-containing protein 2 (211-219)
  source 1..27: mol_type = other RNA
gccagaaacgagaggatctacgtgtat

SEQ ID NO: 72548 - RNA, 27 nt, synthetic construct
  misc_feature 1..27: note Dolichyl-diphosphooligosaccharide-proteinosyltransferase subunit 2 (256-264)
  source 1..27: mol_type = other RNA
gccagcgctgcagccgtgctgtcccac

SEQ ID NO: 72549 - RNA, 30 nt, synthetic construct
  misc_feature 1..30: note = Probable RNA-binding protein 19 (488-497)
  source 1..30: mol_type = other RNA
gccagcgctctgggctcctcttcatacaag

SEQ ID NO: 72550 - RNA, 27 nt, synthetic construct
  misc_feature 1..27: note = E3 ubiquitin-protein ligase MSL2 (294-302)
  source 1..27: mol_type = other RNA
gccagcgctcccgtgaccgtcaagaga

SEQ ID NO: 72551 - RNA, 27 nt, synthetic construct
  misc_feature 1..27: note = Gelsolin (362-370)
  source 1..27: mol_type = other RNA
gccagcgacttcatcaccaagatggat

SEQ ID NO: 72552 - RNA, 33 nt, synthetic construct
  misc_feature 1..33: note = Transient receptor potential cation channel subfamily M member 1 (215-225)
  source 1..33: mol_type = other RNA
gccagcgacatcctgtccttcgctcacaagtac

SEQ ID NO: 72553 - RNA, 30 nt, synthetic construct
  misc_feature 1..30: note = Suppressor of IKBKE 1 (58-67)
  source 1..30: mol_type = other RNA
gccagcgacatgaaggatatgtccaaatac

SEQ ID NO: 72554 - RNA, 30 nt, synthetic construct
  misc_feature 1..30: note = FERM domain-containing protein 4A (516-525)
  source 1..30: mol_type = other RNA
gccagcgaccccaacgtgtccaagaaactg

SEQ ID NO: 72555 - RNA, 33 nt, synthetic construct
  misc_feature 1..33: note = FERM domain-containing protein 4A (483-493)
  source 1..33: mol_type = other RNA
gccagcgaccccaacgtgtccaagaaactgaag

SEQ ID NO: 72556 - RNA, 30 nt, synthetic construct
  misc_feature 1..30: note = Centrosomal protein of 68 kDa (12-21)
  source 1..30: mol_type = other RNA
gccagcgaggacaccaaggctcagtcctac

SEQ ID NO: 72557 - RNA, 30 nt, synthetic construct
  misc_feature 1..30: note = Nucleoside diphosphate kinase (158-167)
  source 1..30: mol_type = other RNA
gccagcgaggaacacctgaagcagcattac

SEQ ID NO: 72558 - RNA, 36 nt, synthetic construct
  misc_feature 1..36: note = Unconventional myosin-Ic (842-853)
  source 1..36: mol_type = other RNA
gccagcgagatcttcaagggcaaaaaggacaactac

SEQ ID NO: 72559 - RNA, 33 nt, synthetic construct
  misc_feature 1..33: note = Amino-terminal enhancer of split (51-61)
  source 1..33: mol_type = other RNA
gccagcgagaagtccgaaatgcagagacactac

SEQ ID NO: 72560 - RNA, 27 nt, synthetic construct
  misc_feature 1..27: note = Retinal dehydrogenase 1 (82-90)
  source 1..27: mol_type = other RNA
gccagcgagagaggcaggctgctctac

SEQ ID NO: 72561 - RNA, 30 nt, synthetic construct
  misc_feature 1..30: note = Macrophage metalloelastase (13-22)
  source 1..30: mol_type = other RNA
gccagcggcgctctgcccctcaactcctct

SEQ ID NO: 72562 - RNA, 33 nt, synthetic construct
  misc_feature 1..33: note = Nuclear factor interleukin-3-regulated protein (14-24)
  source 1..33: mol_type = other RNA
gccagcctggacgcttcctctaacgtggataag

SEQ ID NO: 72563 - RNA, 33 nt, synthetic construct
  misc_feature 1..33: note = Melanocyte protein PMEL (619-629)
  source 1..33: mol_type = other RNA
gccagcctgatctacagaaggcggctcatgaag

SEQ ID NO: 72564 - RNA, 33 nt, synthetic construct
  misc_feature 1..33: note = SH2B adapter protein 3 (209-219)
  source 1..33: mol_type = other RNA
gccagcatggactccggcgctagatggcagagg

SEQ ID NO: 72565 - RNA, 30 nt, synthetic construct
  misc_feature 1..30: note = Protein argonaute-1 (168-177)
  source 1..30: mol_type = other RNA
gccagcatgagatacacccccgtgggcagg

SEQ ID NO: 72566 - RNA, 27 nt, synthetic construct
  misc_feature 1..27: note = 5'-3' exoribonuclease 2 (454-462)
  source 1..27: mol_type = other RNA
gccagcaaccccagacaggctgcatac

SEQ ID NO: 72567 - RNA, 45 nt, synthetic construct
  misc_feature 1..45: note = PERQ amino acid-rich with GYF domain-containing protein 2 (1277-1291)
  source 1..45: mol_type = other RNA
gccagctccgagagactgaacatgggcgaaatcgagaccctcgac

SEQ ID NO: 72568 - RNA, 48 nt, synthetic construct
  misc_feature 1..48: note = PERQ amino acid-rich with GYF domain-containing protein 2 (1277-1292)
  source 1..48: mol_type = other RNA
gccagctccgagagactgaacatgggcgaaatcgagaccctcgacgat

SEQ ID NO: 72569 - RNA, 51 nt, synthetic construct
  misc_feature 1..51: note = PERQ amino acid-rich with GYF domain-containing protein 2 (1277-1293)
  source 1..51: mol_type = other RNA
gccagctccgagagactgaacatgggcgaaatcgagaccctcgacgattac

SEQ ID NO: 72570 - RNA, 54 nt, synthetic construct
  misc_feature 1..54: note = Vimentin (54-71)
  source 1..54: mol_type = other RNA
gccagctcccccggcggggtgtacgctaccagatcttcagcagtcaggctgcgg

SEQ ID NO: 72571 - RNA, 42 nt, synthetic construct
  misc_feature 1..42: note = Chondroitin sulfate proteoglycan 4 (1607-1620)
  source 1..42: mol_type = other RNA
gccagctcctctgctggcaccgacccccagctgctcctttac

SEQ ID NO: 72572 - RNA, 27 nt, synthetic construct
  misc_feature 1..27: note = Contactin-associated protein-like 3B (2-10)
  source 1..27: mol_type = other RNA
gccagcgtggcttgggcagtcctgaag

SEQ ID NO: 72573 - RNA, 27 nt, synthetic construct
  misc_feature 1..27: note = Sister chromatid cohesion protein PDS5 homolog B (520-528)
  source 1..27: mol_type = other RNA
gccagcgtgaaggctatcttctccaaa

SEQ ID NO: 72574 - RNA, 45 nt, synthetic construct
  misc_feature 1..45: note = RNA-binding protein 14 (526-540)
  source 1..45: mol_type = other RNA
gccagctacgctgcacagcaacacccccaggccgcggcttcctat

SEQ ID NO: 72575 - RNA, 33 nt, synthetic construct
  misc_feature 1..33: note = N6-adenosine-methyltransferase subunit METTL14 (53-63)
  source 1..33: mol_type = other RNA
gccagctacgacacctccgctcccaacgcaaag

SEQ ID NO: 72576 - RNA, 30 nt, synthetic construct
  misc_feature 1..30: note = Origin recognition complex subunit 5 (316-325)
  source 1..30: mol_type = other RNA
gccagctacaaccccgctagaaccgacaag

SEQ ID NO: 72577 - RNA, 36 nt, synthetic construct
  misc_feature 1..36: note = SPRY domain-containing SOCS box protein 1 (216-227)
  source 1..36: mol_type = other RNA
gccaccgctgacgcacccctgcacagcgtgggctac

SEQ ID NO: 72578 - RNA, 27 nt, synthetic construct
  misc_feature 1..27: note = Laminin subunit beta-2 (265-273)
  source 1..27: mol_type = other RNA
gccaccgctgacctggcactcggcaga

SEQ ID NO: 72579 - RNA, 30 nt, synthetic construct
  misc_feature 1..30: note = Oxidative stress-induced growth inhibitor 1 (253-262)
  source 1..30: mol_type = other RNA
gccaccgctggcgacatcgcacactactat

SEQ ID NO: 72580 - RNA, 27 nt, synthetic construct
  misc_feature 1..27: note = Uncharacterized protein KIAA0355 (675-683)
  source 1..27: mol_type = other RNA
gccaccgctatggtgacagagcagaag

SEQ ID NO: 72581 - RNA, 27 nt, synthetic construct
  misc_feature 1..27: note = E1A-binding protein p400 (1093-1101)
  source 1..27: mol_type = other RNA
gccaccgctcaggtggtccaacagaag

SEQ ID NO: 72582 - RNA, 33 nt, synthetic construct
  misc_feature 1..33: note = Huntingtin-interacting protein 1 (499-509)
  source 1..33: mol_type = other RNA
gccaccgctagaatcgaggaaatgctgagcaag

SEQ ID NO: 72583 - RNA, 36 nt, synthetic construct
  misc_feature 1..36: note = Coatomer subunit beta' (703-714)
  source 1..36: mol_type = other RNA
gccaccgctagcggcaacgcaaatatggtgaacaag

SEQ ID NO: 72584 - RNA, 30 nt, synthetic construct
  misc_feature 1..30: note = Vacuolar protein sorting-associated protein 18 homolog (854-863)
  source 1..30: mol_type = other RNA
gccacctgcgacttccccctgctcaacaga

SEQ ID NO: 72585 - RNA, 24 nt, synthetic construct
  misc_feature 1..24: note = PH domain leucine-rich repeat-containing protein phosphatase 1 (536-543)
  source 1..24: mol_type = other RNA
gccaccgacgctcccctgagaaag

SEQ ID NO: 72586 - RNA, 27 nt, synthetic construct
  misc_feature 1..27: note = Myomegalin (2167-2175)
  source 1..27: mol_type = other RNA
gccaccgacggcagcttcgctaacaag

SEQ ID NO: 72587 - RNA, 33 nt, synthetic construct
  misc_feature 1..33: note = Slit homolog 3 protein (1187-1197)
  source 1..33: mol_type = other RNA
gccaccgacaaggataacggcatcctgctctac

SEQ ID NO: 72588 - RNA, 33 nt, synthetic construct
  misc_feature 1..33: note = Protocadherin Fat 2 (739-749)
  source 1..33: mol_type = other RNA
gccaccgaccccgatgctggcttcaacgggaag

SEQ ID NO: 72589 - RNA, 33 nt, synthetic construct
  misc_feature 1..33: note = DNA-dependent protein kinase catalytic subunit (4080-4090)
  source 1..33: mol_type = other RNA
gccaccgaccccaacatcctgggcagaacatgg

SEQ ID NO: 72590 - RNA, 30 nt, synthetic construct
  misc_feature 1..30: note = Apolipoprotein D (122-131)
  source 1..30: mol_type = other RNA
gccaccgactacgagaactatgctctggtg

SEQ ID NO: 72591 - RNA, 33 nt, synthetic construct
  misc_feature 1..33: note = Apolipoprotein D (122-132)
  source 1..33: mol_type = other RNA
gccaccgactacgagaactatgctctggtgtac

SEQ ID NO: 72592 - RNA, 27 nt, synthetic construct
  misc_feature 1..27: note = Semaphorin-5A (423-431)
  source 1..27: mol_type = other RNA
gccaccgactacggcacaatcaagaaa

SEQ ID NO: 72593 - RNA, 21 nt, synthetic construct
  misc_feature 1..21: note = Fibronectin type III domain-containing protein 3B (348-354)
  source 1..21: mol_type = other RNA
gccaccgactaccacgtgaga

SEQ ID NO: 72594 - RNA, 33 nt, synthetic construct
  misc_feature 1..33: note = Zinc finger MYM-type protein 3 (76-86)
  source 1..33: mol_type = other RNA
gccaccgagctgctcggccttgggggactgttg

SEQ ID NO: 72595 - RNA, 27 nt, synthetic construct
  misc_feature 1..27: note = B-cell CLL/lymphoma 9 protein (163-171)
  source 1..27: mol_type = other RNA
gccaccgagcccacacctgctcagaag

SEQ ID NO: 72596 - RNA, 33 nt, synthetic construct
  misc_feature 1..33: note = Ribosome-binding protein 1 (277-287)
  source 1..33: mol_type = other RNA
gccaccgagcaggaagacgctgcagtggccaag

SEQ ID NO: 72597 - RNA, 39 nt, synthetic construct
  misc_feature 1..39: note = Centrosome-associated protein 350 (621-633)
  source 1..39: mol_type = other RNA
gccaccgagcagaagaacaaaagactgcaagaactctac

SEQ ID NO: 72598 - RNA, 33 nt, synthetic construct
  misc_feature 1..33: note = Uncharacterized aarF domain-containing protein kinase 2 (137-147)
  source 1..33: mol_type = other RNA
gccaccgagacaagcggccccacttacatcaag

SEQ ID NO: 72599 - RNA, 36 nt, synthetic construct
  misc_feature 1..36: note = Protein Tob1 (180-191)
  source 1..36: mol_type = other RNA
gccaccttcgctgcaacaaagtttggcagcactaaa

SEQ ID NO: 72600 - RNA, 30 nt, synthetic construct
  misc_feature 1..30: note = FAST kinase domain-containing protein 2 (426-435)
  source 1..30: mol_type = other RNA
gccaccttcgacatctggaagtttagaaaa

SEQ ID NO: 72601 - RNA, 33 nt, synthetic construct
  misc_feature 1..33: note = Nephrocystin-3 (43-53)
  source 1..33: mol_type = other RNA
gccaccttcgagcacgacagagataaggtgaaa

SEQ ID NO: 72602 - RNA, 30 nt, synthetic construct
  misc_feature 1..30: note = Calcium-binding protein 39 (186-195)
  source 1..30: mol_type = other RNA
gccaccttcaaggacctgctcacaagacac

SEQ ID NO: 72603 - RNA, 27 nt, synthetic construct
  misc_feature 1..27: note = cAMP-specific 3',5'-cyclic phosphodiesterase 4B (107-115)
  source 1..27: mol_type = other RNA
gccaccttccccggccacagccagaga

SEQ ID NO: 72604 - RNA, 27 nt, synthetic construct
  misc_feature 1..27: note = Kynurenine-oxoglutarate transaminase 3 (99-107)
  source 1..27: mol_type = other RNA
gccaccttccccggcatgtgggagaga

SEQ ID NO: 72605 - RNA, 27 nt, synthetic construct
  misc_feature 1..27: note = Pleckstrin homology domain-containing family H member 1 (733-741)
  source 1..27: mol_type = other RNA
gccaccggcccccctgctctgctcaga

SEQ ID NO: 72606 - RNA, 33 nt, synthetic construct
  misc_feature 1..33: note = von Willebrand factor A domain-containing protein 5A (184-194)
  source 1..33: mol_type = other RNA
gccaccatcgacagccagcacggcattgagaag

SEQ ID NO: 72607 - RNA, 33 nt, synthetic construct
  misc_feature 1..33: note = General transcription factor IIH subunit 2 (32-42)
  source 1..33: mol_type = other RNA
gccaccatcgaggacattctgttcaaggctaaa

SEQ ID NO: 72608 - RNA, 27 nt, synthetic construct
  misc_feature 1..27: note = F-BAR domain only protein 2 (41-49)
  source 1..27: mol_type = other RNA
gccaccatcgaggaagcttacagcaga

SEQ ID NO: 72609 - RNA, 39 nt, synthetic construct
  misc_feature 1..39: note = DNA-binding protein RFX7 (683-695)
  source 1..39: mol_type = other RNA
gccaccatcgagggccagaagcaagggagcgtgaaaaag

SEQ ID NO: 72610 - RNA, 27 nt, synthetic construct
  misc_feature 1..27: note = Mitochondrial Rho GTPase 2 (88-96)
  source 1..27: mol_type = other RNA
gccaccatcgagaagattagaacaaaa

SEQ ID NO: 72611 - RNA, 33 nt, synthetic construct
  misc_feature 1..33: note = Transformation/transcription domain-associated protein (1416-1426)
  source 1..33: mol_type = other RNA
gccaccatcgaggtggaccagattcacacacat

SEQ ID NO: 72612 - RNA, 36 nt, synthetic construct
  misc_feature 1..36: note = Vacuolar-sorting protein SNF8 (73-84)
  source 1..36: mol_type = other RNA
gccaccatcggcgtggaccccctggctagcgggaag

SEQ ID NO: 72613 - RNA, 27 nt, synthetic construct
  misc_feature 1..27: note = Inhibitor of Bruton tyrosine kinase (45-53)
  source 1..27: mol_type = other RNA
gccaccatcaaggacgtgttcggcaga

SEQ ID NO: 72614 - RNA, 33 nt, synthetic construct
  misc_feature 1..33: note = Probable ATP-dependent RNA helicase DDX60-like (899-909)
  source 1..33: mol_type = other RNA
gccaccatcaacaatcccaacctgctcacaaag

SEQ ID NO: 72615 - RNA, 30 nt, synthetic construct
  misc_feature 1..30: note = Ankyrin repeat domain-containing protein 17 (1306-1315)
  source 1..30: mol_type = other RNA
gccaccatcacagacaaggagatgctgaaa

SEQ ID NO: 72616 - RNA, 27 nt, synthetic construct
  misc_feature 1..27: note = Signal recognition particle 54 kDa protein (152-160)
  source 1..27: mol_type = other RNA
gccaccaaggctagaatccccttctac

SEQ ID NO: 72617 - RNA, 27 nt, synthetic construct
  misc_feature 1..27: note = Fanconi anemia group I protein (138-146)
  source 1..27: mol_type = other RNA
gccaccaagaaagagaacctggcttac

SEQ ID NO: 72618 - RNA, 30 nt, synthetic construct
  misc_feature 1..30: note = Gephyrin (610-619)
  source 1..30: mol_type = other RNA
gccaccctggacatcgatggcgtgagaaag

SEQ ID NO: 72619 - RNA, 27 nt, synthetic construct
  misc_feature 1..27: note = Histone deacetylase 10 (469-477)
  source 1..27: mol_type = other RNA
gccaccctggacgtggctgtcagaagg

SEQ ID NO: 72620 - RNA, 30 nt, synthetic construct
  misc_feature 1..30: note = MOB kinase activator 1A (76-85)
  source 1..30: mol_type = other RNA
gccaccctgggcagcgggaacctcagacag

SEQ ID NO: 72621 - RNA, 27 nt, synthetic construct
  misc_feature 1..27: note = ADP-ribosylation factor-like protein 2 (118-126)
  source 1..27: mol_type = other RNA
gccaccctgctcatcttcgctaacaag

SEQ ID NO: 72622 - RNA, 33 nt, synthetic construct
  misc_feature 1..33: note = Telomerase protein component 1 (53-63)
  source 1..33: mol_type = other RNA
gccaccctgcccgacctcaagacaatggagaaa

SEQ ID NO: 72623 - RNA, 27 nt, synthetic construct
  misc_feature 1..27: note = Septin-4 (109-117)
  source 1..27: mol_type = other RNA
gccaccctgcccaaccaggtgcacaga

SEQ ID NO: 72624 - RNA, 30 nt, synthetic construct
  misc_feature 1..30: note = Glycogen phosphorylase, muscle form (303-312)
  source 1..30: mol_type = other RNA
gccaccctgcaggacatcattagaaggttc

SEQ ID NO: 72625 - RNA, 33 nt, synthetic construct
  misc_feature 1..33: note = PH domain leucine-rich repeat-containing protein phosphatase 1 (228-238)
  source 1..33: mol_type = other RNA
gccaccctgagcgaggaaacaaactccatcctc

SEQ ID NO: 72626 - RNA, 27 nt, synthetic construct
  misc_feature 1..27: note = Kazrin (140-148)
  source 1..27: mol_type = other RNA
gccaccctgacaaaggacgtgcccaaa

SEQ ID NO: 72627 - RNA, 33 nt, synthetic construct
  misc_feature 1..33: note = BUB3-interacting and GLEBS motif-containing protein ZNF207 (352-362)
  source 1..33: mol_type = other RNA
gccaccctgacaactacgagcgctacctccaag

SEQ ID NO: 72628 - RNA, 30 nt, synthetic construct
  misc_feature 1..30: note = Eukaryotic initiation factor 4A-III (5-14)
  source 1..30: mol_type = other RNA
gccaccatggctacaagcggctccgcaaga

SEQ ID NO: 72629 - RNA, 39 nt, synthetic construct
  misc_feature 1..39: note = Eukaryotic translation initiation factor 3 subunit J (234-246)
  source 1..39: mol_type = other RNA
gccaccatgaaggacgatctggctgactacggcgggtat

SEQ ID NO: 72630 - RNA, 48 nt, synthetic construct
  misc_feature 1..48: note = Eukaryotic translation initiation factor 3 subunit J (234-249)
  source 1..48: mol_type = other RNA
gccaccatgaaggacgatctggctgactacggcgggtatgatggaggt

SEQ ID NO: 72631 - RNA, 30 nt, synthetic construct
  misc_feature 1..30: note = Growth hormone-inducible transmembrane protein (334-343)
  source 1..30: mol_type = other RNA
gccaccatgctggctacaggcgggaacaga

SEQ ID NO: 72632 - RNA, 36 nt, synthetic construct
  misc_feature 1..36: note = Growth hormone-inducible transmembrane protein (334-345)
  source 1..36: mol_type = other RNA
gccaccatgctggctacaggcgggaacagaaagaaa

SEQ ID NO: 72633 - RNA, 33 nt, synthetic construct
  misc_feature 1..33: note = Signal recognition particle subunit SRP68 (260-270)
  source 1..33: mol_type = other RNA
gccaccatgagcgaggtggaatggagaggcagg

SEQ ID NO: 72634 - RNA, 33 nt, synthetic construct
  misc_feature 1..33: note = Protein phosphatase 1G (149-159)
  source 1..33: mol_type = other RNA
gccaccatgacaatcgaggaactgctcactaga

SEQ ID NO: 72635 - RNA, 27 nt, synthetic construct
  misc_feature 1..27: note = E3 ubiquitin-protein ligase HECTD1 (175-183)
  source 1..27: mol_type = other RNA
gccaccaacaatatgaacctgagcaga

SEQ ID NO: 72636 - RNA, 30 nt, synthetic construct
  misc_feature 1..30: note = X-ray repair cross-complementing protein 6 (454-463)
  source 1..30: mol_type = other RNA
gccacccccgagcaggtgggcaagatgaaa

SEQ ID NO: 72637 - RNA, 30 nt, synthetic construct
  misc_feature 1..30: note = Cytoplasmic dynein 1 heavy chain 1 (3980-3989)
  source 1..30: mol_type = other RNA
gccacccccatcggccaggctattcacaga

SEQ ID NO: 72638 - RNA, 27 nt, synthetic construct
  misc_feature 1..27: note = Estradiol 17-beta-dehydrogenase 11 (131-139)
  source 1..27: mol_type = other RNA
gccacccaggacccccaaatcgagaag

SEQ ID NO: 72639 - RNA, 45 nt, synthetic construct
  misc_feature 1..45: note = Calsyntenin-1 (947-961)
  source 1..45: mol_type = other RNA
gccaccagacagcaacagctggagtgggacgatagcacactctcc

SEQ ID NO: 72640 - RNA, 48 nt, synthetic construct
  misc_feature 1..48: note = Calsyntenin-1 (947-962)
  source 1..48: mol_type = other RNA
gccaccagacagcaacagctggagtgggacgatagcacactctcctac

SEQ ID NO: 72641 - RNA, 27 nt, synthetic construct
  misc_feature 1..27: note = Intron-binding protein aquarius (1477-1485)
  source 1..27: mol_type = other RNA
gccaccagcgctcccgaggaaacaaag

SEQ ID NO: 72642 - RNA, 27 nt, synthetic construct
  misc_feature 1..27: note = Kelch repeat and BTB domain-containing protein 4 (535-543)
  source 1..27: mol_type = other RNA
gccaccagcgctgtgacagtcactaga

SEQ ID NO: 72643 - RNA, 33 nt, synthetic construct
  misc_feature 1..33: note = Basement membrane-specific heparan sulfate proteoglycan core protein (2027-2037)
  source 1..33: mol_type = other RNA
gccaccagccccgctggcacagcacaggccaga

SEQ ID NO: 72644 - RNA, 27 nt, synthetic construct
  misc_feature 1..27: note = Neural cell adhesion molecule L1 (1237-1245)
  source 1..27: mol_type = other RNA
gccaccagccccatcaaccctgctgtg

SEQ ID NO: 72645 - RNA, 27 nt, synthetic construct
  misc_feature 1..27: note = G-protein coupled receptor 143 (61-69)
  source 1..27: mol_type = other RNA
gccaccagcccccctgcttccgtgaga

SEQ ID NO: 72646 - RNA, 30 nt, synthetic construct
  misc_feature 1..30: note = Melanoma-associated antigen D1 (132-141)
  source 1..30: mol_type = other RNA
gccaccacaggcgagctggctgcaaacaag

SEQ ID NO: 72647 - RNA, 33 nt, synthetic construct
  misc_feature 1..33: note = Sterol regulatory element-binding protein 1 (957-967)
  source 1..33: mol_type = other RNA
gccaccacacccgctagctcctctatcgacaag

SEQ ID NO: 72648 - RNA, 27 nt, synthetic construct
  misc_feature 1..27: note = Helicase SKI2W (127-135)
  source 1..27: mol_type = other RNA
gccaccacaagcctgtccctcagaagg

SEQ ID NO: 72649 - RNA, 27 nt, synthetic construct
  misc_feature 1..27: note = E3 ubiquitin-protein ligase RING1 (290-298)
  source 1..27: mol_type = other RNA
gccaccgtggaccacctgagcaagtac

SEQ ID NO: 72650 - RNA, 33 nt, synthetic construct
  misc_feature 1..33: note = ATP-dependent RNA helicase DHX29 (735-745)
  source 1..33: mol_type = other RNA
gccaccgtggacagcgagaagttctccacatac

SEQ ID NO: 72651 - RNA, 27 nt, synthetic construct
  misc_feature 1..27: note = Multidrug resistance-associated protein 4 (364-372)
  source 1..27: mol_type = other RNA
gccaccgtgctgttcggcatcgctaga

SEQ ID NO: 72652 - RNA, 27 nt, synthetic construct
  misc_feature 1..27: note = FACT complex subunit SPT16 (415-423)
  source 1..27: mol_type = other RNA
gccaccgtgctgacaagcgtcaagaaa

SEQ ID NO: 72653 - RNA, 30 nt, synthetic construct
  misc_feature 1..30: note = Putative phospholipase B-like 2 (360-369)
  source 1..30: mol_type = other RNA
gccacctgggctgacatcttcaagagattt

SEQ ID NO: 72654 - RNA, 27 nt, synthetic construct
  misc_feature 1..27: note = Arf-GAP with GTPase, ANK repeat and PH domain-containing protein 3 (232-240)
  source 1..27: mol_type = other RNA
gccacctacggcctgaacgtggagaga

SEQ ID NO: 72655 - RNA, 27 nt, synthetic construct
  misc_feature 1..27: note = Histone acetyltransferase p300 (1189-1197)
  source 1..27: mol_type = other RNA
gccacctactatagctaccagaacaga

SEQ ID NO: 72656 - RNA, 27 nt, synthetic construct
  misc_feature 1..27: note = Girdin (155-163)
  source 1..27: mol_type = other RNA
gccgtggctgcacacatccaggaggtc

SEQ ID NO: 72657 - RNA, 39 nt, synthetic construct
  misc_feature 1..39: note = Sodium/potassium-transporting ATPase subunit alpha-1 (249-261)
  source 1..39: mol_type = other RNA
gccgtggctggcgacgcaagcgagtccgccctgctcaag

SEQ ID NO: 72658 - RNA, 36 nt, synthetic construct
  misc_feature 1..36: note = RanBP-type and C3HC4-type zinc finger-containing protein 1 (18-29)
  source 1..36: mol_type = other RNA
gccgtggctggcggggacgagcaggtcgcaatgaag

SEQ ID NO: 72659 - RNA, 33 nt, synthetic construct
  misc_feature 1..33: note = Mitochondrial import inner membrane translocase subunit Tim13 (31-41)
  source 1..33: mol_type = other RNA
gccgtggctaacgcacaggagctgctccaaaga

SEQ ID NO: 72660 - RNA, 33 nt, synthetic construct
  misc_feature 1..33: note = cDNA FLJ78342 (66-76)
  source 1..33: mol_type = other RNA
gccgtggctcagatggacttcatcaagctgtac

SEQ ID NO: 72661 - RNA, 30 nt, synthetic construct
  misc_feature 1..30: note = Serine/threonine-protein kinase ATR (1642-1651)
  source 1..30: mol_type = other RNA
gccgtggctagcttcagatccaaggcatac

SEQ ID NO: 72662 - RNA, 27 nt, synthetic construct
  misc_feature 1..27: note = G-protein coupled receptor 143 (219-227)
  source 1..27: mol_type = other RNA
gccgtggctagcctgctcaagggcaga

SEQ ID NO: 72663 - RNA, 27 nt, synthetic construct
  misc_feature 1..27: note = Cadherin EGF LAG seven-pass G-type receptor 2 (2176-2184)
  source 1..27: mol_type = other RNA
gccgtggctagcgtcatcatttacaga

SEQ ID NO: 72664 - RNA, 27 nt, synthetic construct
  misc_feature 1..27: note = Signal peptidase complex catalytic subunit SEC11A (119-127)
  source 1..27: mol_type = other RNA
gccgtggacgatagaggcctgtacaag

SEQ ID NO: 72665 - RNA, 33 nt, synthetic construct
  misc_feature 1..33: note = MICOS complex subunit MIC60 (276-286)
  source 1..33: mol_type = other RNA
gccgtggacgaggctgcagatgccctgctcaag

SEQ ID NO: 72666 - RNA, 30 nt, synthetic construct
  misc_feature 1..30: note = Multivesicular body subunit 12A (118-127)
  source 1..30: mol_type = other RNA
gccgtgttcgacgtcagactgagcggcaag

SEQ ID NO: 72667 - RNA, 27 nt, synthetic construct
  misc_feature 1..27: note = Peroxisomal multifunctional enzyme type 2 (271-279)
  source 1..27: mol_type = other RNA
gccgtgttcgagtggcacatcaccaag

SEQ ID NO: 72668 - RNA, 48 nt, synthetic construct
  misc_feature 1..48: note = Peroxisomal multifunctional enzyme type 2 (648-663)
  source 1..48: mol_type = other RNA
gccgtgttcgagtggcacatcaccaagggcgggaacattggagctaaa

SEQ ID NO: 72669 - RNA, 30 nt, synthetic construct
  misc_feature 1..30: note = Transmembraneoprotein NMB (550-559)
  source 1..30: mol_type = other RNA
gccgtgttctttcccggcaaccaggagaag

SEQ ID NO: 72670 - RNA, 27 nt, synthetic construct
  misc_feature 1..27: note = Transmembrane protein 50A (132-140)
  source 1..27: mol_type = other RNA
gccgtgttctttcagaacgctttcatc

SEQ ID NO: 72671 - RNA, 27 nt, synthetic construct
  misc_feature 1..27: note = tRNA-splicing endonuclease subunit Sen2 (4-12)
  source 1..27: mol_type = other RNA
gccgtgttccacgctcccaagagaaaa

SEQ ID NO: 72672 - RNA, 27 nt, synthetic construct
  misc_feature 1..27: note = Kinesin-like protein KIF13B (224-232)
  source 1..27: mol_type = other RNA
gccgtgttcaagatcaccctgacacac

SEQ ID NO: 72673 - RNA, 30 nt, synthetic construct
  misc_feature 1..30: note = Kinesin-like protein KIF1B (252-261)
  source 1..30: mol_type = other RNA
gccgtgttcaccatcgtctttacacagaag

SEQ ID NO: 72674 - RNA, 33 nt, synthetic construct
  misc_feature 1..33: note = GMP synthase (glutamine-hydrolyzing) (400-410)
  source 1..33: mol_type = other RNA
gccgtgcacatcgacaacggcttcatgagaaag

SEQ ID NO: 72675 - RNA, 27 nt, synthetic construct
  misc_feature 1..27: note = Lysosomal-trafficking regulator (2018-2026)
  source 1..27: mol_type = other RNA
gccgtgcacccccctaccaacacatac

SEQ ID NO: 72676 - RNA, 27 nt, synthetic construct
  misc_feature 1..27: note = Disintegrin and metalloproteinase domain-containing protein 10 (184-192)
  source 1..27: mol_type = other RNA
gccgtgatcgctcagattagctcccac

SEQ ID NO: 72677 - RNA, 36 nt, synthetic construct
  misc_feature 1..36: note = UDP-N-acetylglucosamine-peptide N-acetylglucosaminyltransferase 110 kDa subunit (593-604)
  source 1..36: mol_type = other RNA
gccgtgatcgacttcaagagcaacggccacatttac

SEQ ID NO: 72678 - RNA, 30 nt, synthetic construct
  misc_feature 1..30: note = Armadillo repeat-containing X-linked protein 5 (128-137)
  source 1..30: mol_type = other RNA
gccgtgatcgaggctaacattagaagctac

SEQ ID NO: 72679 - RNA, 30 nt, synthetic construct
  misc_feature 1..30: note = Cytoplasmic dynein 1 heavy chain 1 (3288-3297)
  source 1..30: mol_type = other RNA
gccgtgatcgaggctcagaacgcagtcaag

SEQ ID NO: 72680 - RNA, 30 nt, synthetic construct
  misc_feature 1..30: note = Tyrosine-protein phosphatase non-receptor type 1 (109-118)
  source 1..30: mol_type = other RNA
gccgtgatcgagggcgctaagttcattatg

SEQ ID NO: 72681 - RNA, 27 nt, synthetic construct
  misc_feature 1..27: note = Adenosine 3'-phospho 5'-phosphosulfate transporter 2 (240-248)
  source 1..27: mol_type = other RNA
gccgtgatcggcaacgtccaggagaag

SEQ ID NO: 72682 - RNA, 30 nt, synthetic construct
  misc_feature 1..30: note = Protocadherin Fat 4 (1541-1550)
  source 1..30: mol_type = other RNA
gccgtgatcggcagcgtcctgaccacaatt

SEQ ID NO: 72683 - RNA, 30 nt, synthetic construct
  misc_feature 1..30: note = Kinesin-like protein KIF1B (391-400)
  source 1..30: mol_type = other RNA
gccgtgatcaacgaggaccccaatgctaag

SEQ ID NO: 72684 - RNA, 39 nt, synthetic construct
  misc_feature 1..39: note = RING finger protein 37 (351-363)
  source 1..39: mol_type = other RNA
gccgtgatccccagctccattgtcctgccttctcagaag

SEQ ID NO: 72685 - RNA, 27 nt, synthetic construct
  misc_feature 1..27: note = DNA repair protein SWI5 homolog isoform 2 (175-183)
  source 1..27: mol_type = other RNA
gccgtgatcagaggcgtcaccacaaag

SEQ ID NO: 72686 - RNA, 30 nt, synthetic construct
  misc_feature 1..30: note = Zinc finger protein 28 homolog (116-125)
  source 1..30: mol_type = other RNA
gccgtgatcaccgagagactgacaagctac

SEQ ID NO: 72687 - RNA, 30 nt, synthetic construct
  misc_feature 1..30: note = Eukaryotic translation initiation factor 3 subunit E (260-269)
  source 1..30: mol_type = other RNA
gccgtgatcaccaacaaggacgtcagaaaa

SEQ ID NO: 72688 - RNA, 30 nt, synthetic construct
  misc_feature 1..30: note = Proline-rich protein 13 (52-61)
  source 1..30: mol_type = other RNA
gccgtgatcgtcgacaagaaaatgcagaag

SEQ ID NO: 72689 - RNA, 27 nt, synthetic construct
  misc_feature 1..27: note = Heat shock 70 kDa protein 4 (349-357)
  source 1..27: mol_type = other RNA
gccgtgaaggagaaaatcagcaagttc

SEQ ID NO: 72690 - RNA, 27 nt, synthetic construct
  misc_feature 1..27: note = Very long-chain specific acyl-CoA dehydrogenase, mitochondrial (252-260)
  source 1..27: mol_type = other RNA
gccgtgaaggagaaaatcaccgctttc

SEQ ID NO: 72691 - RNA, 27 nt, synthetic construct
  misc_feature 1..27: note = Heat shock protein 105 kDa (349-357)
  source 1..27: mol_type = other RNA
gccgtgaaggagagaatcgctaaattc

SEQ ID NO: 72692 - RNA, 27 nt, synthetic construct
  misc_feature 1..27: note = Hermansky-Pudlak syndrome 5 protein (25-33)
  source 1..27: mol_type = other RNA
gccgtgaaggagagcgtctcctctttc

SEQ ID NO: 72693 - RNA, 33 nt, synthetic construct
  misc_feature 1..33: note = Interleukin-1 receptor accessory protein (505-515)
  source 1..33: mol_type = other RNA
gccgtgaaggagaccaaagtcaaggaactgaaa

SEQ ID NO: 72694 - RNA, 30 nt, synthetic construct
  misc_feature 1..30: note = Actin-related protein 2/3 complex subunit 4 (75-84)
  source 1..30: mol_type = other RNA
gccgtgaagcaggctgacgagatcgaaaaa

SEQ ID NO: 72695 - RNA, 27 nt, synthetic construct
  misc_feature 1..27: note = Phosphatidylinositol 4,5-bisphosphate 3-kinase catalytic subunit beta isoform (406-414)
  source 1..27: mol_type = other RNA
gccgtgctggacaaggtcaaaaccaag

SEQ ID NO: 72696 - RNA, 27 nt, synthetic construct
  misc_feature 1..27: note = Periodic tryptophan protein 1 homolog (46-54)
  source 1..27: mol_type = other RNA
gccgtgctggacctcagctggaacaag

SEQ ID NO: 72697 - RNA, 27 nt, synthetic construct
  misc_feature 1..27: note = Glutamate receptor ionotropic, NMDA 2A (236-244)
  source 1..27: mol_type = other RNA
gccgtgctgatcctcagcgaggctaga

SEQ ID NO: 72698 - RNA, 27 nt, synthetic construct
  misc_feature 1..27: note = ADP-ribosylation factor 5 (119-127)
  source 1..27: mol_type = other RNA
gccgtgctgctcgtcttcgctaacaag

SEQ ID NO: 72699 - RNA, 33 nt, synthetic construct
  misc_feature 1..33: note = Casein kinase II subunit alpha' (340-350)
  source 1..33: mol_type = other RNA
gccgtgctgagctccggcctcaccgctgcaaga

SEQ ID NO: 72700 - RNA, 36 nt, synthetic construct
  misc_feature 1..36: note = COP9 signalosome complex subunit 8 (4-15)
  source 1..36: mol_type = other RNA
gccgtgatggctgagagcgcattctcctttaagaaa

SEQ ID NO: 72701 - RNA, 30 nt, synthetic construct
  misc_feature 1..30: note = FACT complex subunit SPT16 (328-337)
  source 1..30: mol_type = other RNA
gccgtgatggacgtcgttaagaaacagaag

SEQ ID NO: 72702 - RNA, 27 nt, synthetic construct
  misc_feature 1..27: note = Prefoldin subunit 5 (143-151)
  source 1..27: mol_type = other RNA
gccgtgatggagatgatgagccagaag

SEQ ID NO: 72703 - RNA, 33 nt, synthetic construct
  misc_feature 1..33: note = DNA-directed RNA polymerase I subunit RPA1 (330-340)
  source 1..33: mol_type = other RNA
gccgtgatgaaggacgtcgttctgatcagaaaa

SEQ ID NO: 72704 - RNA, 27 nt, synthetic construct
  misc_feature 1..27: note = Pleckstrin homology domain-containing family A member 1 (203-211)
  source 1..27: mol_type = other RNA
gccgtgatgaagaactggaaaagaagg

SEQ ID NO: 72705 - RNA, 27 nt, synthetic construct
  misc_feature 1..27: note = Catenin beta-1 (172-180)
  source 1..27: mol_type = other RNA
gccgtgatggtccaccagctgagcaag

SEQ ID NO: 72706 - RNA, 30 nt, synthetic construct
  misc_feature 1..30: note = Galectin-3 (212-221)
  source 1..30: mol_type = other RNA
gccgtgaacgacgctcacctgctccagtac

SEQ ID NO: 72707 - RNA, 27 nt, synthetic construct
  misc_feature 1..27: note = CDC42 small effector protein 1 (56-64)
  source 1..27: mol_type = other RNA
gccgtgcaggagcaaatgagaagcaag

SEQ ID NO: 72708 - RNA, 30 nt, synthetic construct
  misc_feature 1..30: note = Transforming growth factor-beta-induced protein ig-h3 (50-59)
  source 1..30: mol_type = other RNA
gccgtgcagaaggtcatcggcaccaacaga

SEQ ID NO: 72709 - RNA, 30 nt, synthetic construct
  misc_feature 1..30: note = 26S proteasome non-ATPase regulatory subunit 6 (44-53)
  source 1..30: mol_type = other RNA
gccgtgagagacaacaatatggctccctac

SEQ ID NO: 72710 - RNA, 27 nt, synthetic construct
  misc_feature 1..27: note = Amidophosphoribosyltransferase (196-204)
  source 1..27: mol_type = other RNA
gccgtgagagacccctacggcaacagg

SEQ ID NO: 72711 - RNA, 30 nt, synthetic construct
  misc_feature 1..30: note = WD repeat-containing protein 63 (83-92)
  source 1..30: mol_type = other RNA
gccgtgagcgacttccaccccgtcaagaaa

SEQ ID NO: 72712 - RNA, 27 nt, synthetic construct
  misc_feature 1..27: note = GRAM domain-containing protein 4 (475-483)
  source 1..27: mol_type = other RNA
gccgtgagcaccccctccacacagaag

SEQ ID NO: 72713 - RNA, 27 nt, synthetic construct
  misc_feature 1..27: note = Hyaluronidase-2 (16-24)
  source 1..27: mol_type = other RNA
gccgtgagctgggctatggagctgaag

SEQ ID NO: 72714 - RNA, 36 nt, synthetic construct
  misc_feature 1..36: note = 72 kDa type IV collagenase (603-614)
  source 1..36: mol_type = other RNA
gccgtggtcgacctgcagggcgggggacacagctac

SEQ ID NO: 72715 - RNA, 27 nt, synthetic construct
  misc_feature 1..27: note = Folliculin-interacting protein 1 (548-556)
  source 1..27: mol_type = other RNA
gccgtggtcgaccagatcaccagacac

SEQ ID NO: 72716 - RNA, 30 nt, synthetic construct; identical to SEQ ID NO: 48489
  misc_feature 1..30: note = Calcineurin subunit B type 1 (155-164)
  source 1..30: mol_type = other RNA

SEQ ID NO: 72717 - RNA, 33 nt, synthetic construct
  misc_feature 1..33: note = Calcineurin subunit B type 1 (155-165)
  source 1..33: mol_type = other RNA
gccgtggtcggcgggctggacatccacaagaaa

SEQ ID NO: 72718 - RNA, 27 nt, synthetic construct
  misc_feature 1..27: note Dolichyl-diphosphooligosaccharide-proteinosyltransferase subunit STT3A (152-160)
  source 1..27: mol_type = other RNA
gccgtggtccccggctacatcagcaga

SEQ ID NO: 72719 - RNA, 33 nt, synthetic construct; identical to SEQ ID NO: 48492
  misc_feature 1..33: note = Nodal modulator 3 (366-376)
  source 1..33: mol_type = other RNA

SEQ ID NO: 72720 - RNA, 30 nt, synthetic construct
  misc_feature 1..30: note = Protein phosphatase 1B (57-66)
  source 1..30: mol_type = other RNA
gccgtgtacgacggccacgctgggagcaga

SEQ ID NO: 72721 - RNA, 33 nt, synthetic construct; identical to SEQ ID NO: 48494
  misc_feature 1..33: note = Biotinidase (61-71)
  source 1..33: mol_type = other RNA

SEQ ID NO: 72722 - RNA, 30 nt, synthetic construct
  misc_feature 1..30: note = Protein-lysine N-methyltransferase METTL10 (40-49)
  source 1..30: mol_type = other RNA
gccgtgtacgagagagaactgcagaccttc

SEQ ID NO: 72723 - RNA, 33 nt, synthetic construct
  misc_feature 1..33: note = Carbonic anhydrase 14 (307-317)
  source 1..33: mol_type = other RNA
gccgtgtacttcatcgctagaaagattaggaaa

SEQ ID NO: 72724 - RNA, 27 nt, synthetic construct
  misc_feature 1..27: note = TBC1 domain family member 16 (146-154)
  source 1..27: mol_type = other RNA
gccgtgtacaaccccgctgtcggctat

SEQ ID NO: 72725 - RNA, 27 nt, synthetic construct
  misc_feature 1..27: note = Tetraspanin-4 (42-50)
  source 1..27: mol_type = other RNA
gcctacaccgacaagatcgatagatat

SEQ ID NO: 72726 - RNA, 33 nt, synthetic construct
  misc_feature 1..33: note = Protein HIRA (749-759)
  source 1..33: mol_type = other RNA
tgcgtggcctgtgagaagagaatgctgagcgtc

SEQ ID NO: 72727 - RNA, 33 nt, synthetic construct
  misc_feature 1..33: note = Heterogeneous nuclear ribonucleoprotein A0 (150-160)
  source 1..33: mol_type = other RNA
gacgccgctgataaggcagccgtggtcaaattc

SEQ ID NO: 72728 - RNA, 33 nt, synthetic construct
  misc_feature 1..33: note = Gelsolin (291-301)
  source 1..33: mol_type = other RNA
gacgccgctaacagaaagctggcaaaactctac

SEQ ID NO: 72729 - RNA, 33 nt, synthetic construct
  misc_feature 1..33: note = Thimet oligopeptidase (401-411)
  source 1..33: mol_type = other RNA
gacgccgctagcggcgaggtggtcgggaagttc

SEQ ID NO: 72730 - RNA, 27 nt, synthetic construct
  misc_feature 1..27: note = WD repeat-containing protein 61 (85-93)
  source 1..27: mol_type = other RNA
gacgcccacatcagactgtgggatctc

SEQ ID NO: 72731 - RNA, 27 nt, synthetic construct
  misc_feature 1..27: note = Delta-1-pyrroline-5-carboxylate synthase (648-656)
  source 1..27: mol_type = other RNA
gacgccatcgatcacattcataagtac

SEQ ID NO: 72732 - RNA, 27 nt, synthetic construct
  misc_feature 1..27: note = Serine/arginine-rich splicing factor 9 (67-75)
  source 1..27: mol_type = other RNA
gacgccatctacggcagaaacgggtat

SEQ ID NO: 72733 - RNA, 33 nt, synthetic construct
  misc_feature 1..33: note = DNA-directed RNA polymerases I, II, and III subunit RPABC5 (33-43)
  source 1..33: mol_type = other RNA
gacgccctggatgctctcggccttaagagatac

SEQ ID NO: 72734 - RNA, 33 nt, synthetic construct
  misc_feature 1..33: note = Cell division cycle protein 16 homolog (140-150)
  source 1..33: mol_type = other RNA
gacgccctggataacagaaccctcgctacatac

SEQ ID NO: 72735 - RNA, 27 nt, synthetic construct
  misc_feature 1..27: note = Mitogen-activated protein kinase kinase kinase 1 (693-701)
  source 1..27: mol_type = other RNA
gacgccaacagcagaacctcccagctg

SEQ ID NO: 72736 - RNA, 27 nt, synthetic construct
  misc_feature 1..27: note = 28S ribosomal protein S22, mitochondrial (296-304)
  source 1..27: mol_type = other RNA
gacgccaccaacctggtgcagctctac

SEQ ID NO: 72737 - RNA, 30 nt, synthetic construct
  misc_feature 1..30: note = Kinase D-interacting substrate of 220 kDa (264-273)
  source 1..30: mol_type = other RNA
gacgcctacagagagtatatcgctcagatg

SEQ ID NO: 72738 - RNA, 33 nt, synthetic construct
  misc_feature 1..33: note = Actin, aortic smooth muscle (58-68)
  source 1..33: mol_type = other RNA
gacgaggcccagagcaagagaggcatcctgacc

SEQ ID NO: 72739 - RNA, 27 nt, synthetic construct
  misc_feature 1..27: note = Remodeling and spacing factor 1 (1413-1421)
  source 1..27: mol_type = other RNA
gacgagctgctcagagtgaccgatctt

SEQ ID NO: 72740 - RNA, 27 nt, synthetic construct
  misc_feature 1..27: note = 28S ribosomal protein S14, mitochondrial (49-57)
  source 1..27: mol_type = other RNA
gacgagagactgaggatcaacagcctc

SEQ ID NO: 72741 - RNA, 27 nt, synthetic construct
  misc_feature 1..27: note = Kinesin-like protein KIF15 (1289-1297)
  source 1..27: mol_type = other RNA
gacgaggtggaaagaacccagacactg

SEQ ID NO: 72742 - RNA, 27 nt, synthetic construct
  misc_feature 1..27: note = CAP-Gly domain-containing linker protein 1 (519-527)
  source 1..27: mol_type = other RNA
gaccaccagagagagatcaccagcctg

SEQ ID NO: 72743 - RNA, 27 nt, synthetic construct
  misc_feature 1..27: note = Peroxisome proliferator-activated receptor gamma coactivator-related protein 1 (1261-1269)
  source 1..27: mol_type = other RNA
gaccactaccagagacaaagggtgctg

SEQ ID NO: 72744 - RNA, 27 nt, synthetic construct
  misc_feature 1..27: note = Poly (ADP-ribose) polymerase 1 (993-1001)
  source 1..27: mol_type = other RNA
gacatcgcccaggtgaacctgaagtac

SEQ ID NO: 72745 - RNA, 30 nt, synthetic construct; identical to SEQ ID NO: 48518
  misc_feature 1..30: note = RILP-like protein 1 (29-38)
  source 1..30: mol_type = other RNA

SEQ ID NO: 72746 - RNA, 30 nt, synthetic construct
  misc_feature 1..30: note = Probable ATP-dependent RNA helicase DDX58 (896-905)
  source 1..30: mol_type = other RNA
gacatcgccaccggcgtgcagacactgtac

SEQ ID NO: 72747 - RNA, 27 nt, synthetic construct
  misc_feature 1..27: note = RNA-binding protein 8A (72-80)
  source 1..27: mol_type = other RNA
gacatccacgataagttcgccgagtac

SEQ ID NO: 72748 - RNA, 30 nt, synthetic construct
  misc_feature 1..30: note = Filamin-A (897-906)
  source 1..30: mol_type = other RNA
gacatcattgatcaccatgacaacacctac

SEQ ID NO: 72749 - RNA, 36 nt, synthetic construct
  misc_feature 1..36: note = SURP and G-patch domain-containing protein 2 (265-276)
  source 1..36: mol_type = other RNA
gacatcattgataagagcgacgtgttctccagattt

SEQ ID NO: 72750 - RNA, 27 nt, synthetic construct
  misc_feature 1..27: note = Lymphocyte cytosolic protein 2 (500-508)
  source 1..27: mol_type = other RNA
gacatcattgattacttcagaaagatg

SEQ ID NO: 72751 - RNA, 30 nt, synthetic construct
  misc_feature 1..30: note = Cytoplasmic dynein 2 heavy chain 1 (253-262)
  source 1..30: mol_type = other RNA
gacatcattggcgggagcttcggaagattt

SEQ ID NO: 72752 - RNA, 33 nt, synthetic construct
  misc_feature 1..33: note = Protein farnesyltransferase subunit beta (120-130)
  source 1..33: mol_type = other RNA
gacatcattaacagagagaagctgctccagtac

SEQ ID NO: 72753 - RNA, 39 nt, synthetic construct
  misc_feature 1..39: note = Delta(24)-sterol reductase (252-264)
  source 1..39: mol_type = other RNA
gacatcattcccttcggcaacaatcctatatttagatac

SEQ ID NO: 72754 - RNA, 39 nt, synthetic construct
  misc_feature 1..39: note = Putative annexin A2-like protein (158-170)
  source 1..39: mol_type = other RNA
gacatcattagcgatacctccggcgacttcagaaagctg

SEQ ID NO: 72755 - RNA, 27 nt, synthetic construct
  misc_feature 1..27: note = Nucleophosmin (246-254)
  source 1..27: mol_type = other RNA
gacatcaaggccaaaatgcaggctagc

SEQ ID NO: 72756 - RNA, 27 nt, synthetic construct
  misc_feature 1..27: note = Actin, alpha skeletal muscle (7-15)
  source 1..27: mol_type = other RNA
gacatcaaggagaaactgtgctacgtg

SEQ ID NO: 72757 - RNA, 27 nt, synthetic construct
  misc_feature 1..27: note = Ubiquitin fusion degradation protein 1 homolog (289-297)
  source 1..27: mol_type = other RNA
gacatcaagagaggcattcccaactac

SEQ ID NO: 72758 - RNA, 30 nt, synthetic construct
  misc_feature 1..30: note = POZ-, AT hook-, and zinc finger-containing protein 1 (116-125)
  source 1..30: mol_type = other RNA
gacatcctggatttcgcctacaccagcaga

SEQ ID NO: 72759 - RNA, 27 nt, synthetic construct
  misc_feature 1..27: note = Pre-mRNA-processing-splicing factor 8 (298-306)
  source 1..27: mol_type = other RNA
gacatcaacaagattataatcagacag

SEQ ID NO: 72760 - RNA, 27 nt, synthetic construct
  misc_feature 1..27: note = Trimethyllysine dioxygenase, mitochondrial (352-360)
  source 1..27: mol_type = other RNA
gacatccccgagagaattctgacctac

SEQ ID NO: 72761 - RNA, 30 nt, synthetic construct
  misc_feature 1..30: note = 5'-nucleotidase domain-containing protein 1 (161-170)
  source 1..30: mol_type = other RNA
gacatcgtggccgctattcagcacaactac

SEQ ID NO: 72762 - RNA, 27 nt, synthetic construct
  misc_feature 1..27: note = Integrin-linked protein kinase (81-89)
  source 1..27: mol_type = other RNA
gacatcgtgcagaagctgctccaatac

SEQ ID NO: 72763 - RNA, 30 nt, synthetic construct
  misc_feature 1..30: note = Calcium/calmodulin-dependent protein kinase type 1 (83-92)
  source 1..30: mol_type = other RNA
gacatctacgagagcggcgggcacctgtat

SEQ ID NO: 72764 - RNA, 30 nt, synthetic construct
  misc_feature 1..30: note = Pantothenate kinase 2, mitochondrial (45-54)
  source 1..30: mol_type = other RNA
gacatctacggcggggattatgagagattc

SEQ ID NO: 72765 - RNA, 30 nt, synthetic construct
  misc_feature 1..30: note = F-box only protein 11 (39-48)
  source 1..30: mol_type = other RNA
gacatctacaaccacatgtatagcggcgtg

SEQ ID NO: 72766 - RNA, 27 nt, synthetic construct
  misc_feature 1..27: note = Translin-associated protein X (51-59)
  source 1..27: mol_type = other RNA
gacaagtacgagagactggtgaaactc

SEQ ID NO: 72767 - RNA, 27 nt, synthetic construct
  misc_feature 1..27: note = R3H and coiled-coil domain-containing protein 1 (315-323)
  source 1..27: mol_type = other RNA
gacctggcccacgtggtcgagatctac

SEQ ID NO: 72768 - RNA, 27 nt, synthetic construct
  misc_feature 1..27: note = CUGBP Elav-like family member 5 (41-49)
  source 1..27: mol_type = other RNA
gacctggatgccatcaagctcttcgtg

SEQ ID NO: 72769 - RNA, 36 nt, synthetic construct
  misc_feature 1..36: note = Lanosterol 14-alpha demethylase (473-484)
  source 1..36: mol_type = other RNA
gacctgatcgatggctacttccccaccgtgaactat

SEQ ID NO: 72770 - RNA, 27 nt, synthetic construct
  misc_feature 1..27: note = Heterogeneous nuclear ribonucleoprotein A0 (113-121)
  source 1..27: mol_type = other RNA
gacctgatcgagcacttcagccagttt

SEQ ID NO: 72771 - RNA, 27 nt, synthetic construct
  misc_feature 1..27: note = DNA polymerase zeta catalytic subunit (2457-2465)
  source 1..27: mol_type = other RNA
gacctgatcggcaagaccagcgagatg

SEQ ID NO: 72772 - RNA, 33 nt, synthetic construct
  misc_feature 1..33: note = Probable fibrosin-1 (455-465)
  source 1..33: mol_type = other RNA
gacctgatcggccaggatctcaacagcagatac

SEQ ID NO: 72773 - RNA, 36 nt, synthetic construct
  misc_feature 1..36: note = DNA repair endonuclease XPF (720-731)
  source 1..36: mol_type = other RNA
gacctgatcggcagcctcaacaatgggagactttac

SEQ ID NO: 72774 - RNA, 27 nt, synthetic construct
  misc_feature 1..27: note = Alpha-catulin (622-630)
  source 1..27: mol_type = other RNA
gacctgatccaccagctcgaggtgttc

SEQ ID NO: 72775 - RNA, 27 nt, synthetic construct
  misc_feature 1..27: note = Spermidine synthase (215-223)
  source 1..27: mol_type = other RNA
gacctgatcaaggagatgagacagttc

SEQ ID NO: 72776 - RNA, 27 nt, synthetic construct
  misc_feature 1..27: note = Reticulon-4 (494-502)
  source 1..27: mol_type = other RNA
gacctgatcaaggagaccaaactcagc

SEQ ID NO: 72777 - RNA, 33 nt, synthetic construct
  misc_feature 1..33: note = Rho guanine nucleotide exchange factor 1 (77-87)
  source 1..33: mol_type = other RNA
gacctgatcagcgaggatgtgcagagaaggttc

SEQ ID NO: 72778 - RNA, 30 nt, synthetic construct
  misc_feature 1..30: note = Microtubule-associated serine/threonine-protein kinase 4 (1003-1012)
  source 1..30: mol_type = other RNA
gacctgatcacccacattaacggcgagccc

SEQ ID NO: 72779 - RNA, 27 nt, synthetic construct
  misc_feature 1..27: note = Calcium/calmodulin-dependent protein kinase kinase 2 (186-194)
  source 1..27: mol_type = other RNA
gacctgaaggatctcatcaccagaatg

SEQ ID NO: 72780 - RNA, 27 nt, synthetic construct
  misc_feature 1..27: note = Heterogeneous nuclear ribonucleoprotein A/B (85-93)
  source 1..27: mol_type = other RNA
gacctgaaggattacttcaccaaattt

SEQ ID NO: 72781 - RNA, 27 nt, synthetic construct
  misc_feature 1..27: note = Mediator of RNA polymerase II transcription subunit 8 (21-29)
  source 1..27: mol_type = other RNA
gacctgaagaacagcctcggctccttc

SEQ ID NO: 72782 - RNA, 27 nt, synthetic construct
  misc_feature 1..27: note = CASP8 and FADD-like apoptosis regulator (163-171)
  source 1..27: mol_type = other RNA
gacctgaagaccaaaatccagaagtac

SEQ ID NO: 72783 - RNA, 33 nt, synthetic construct
  misc_feature 1..33: note = Glycogen (starch) synthase, muscle (593-603)
  source 1..33: mol_type = other RNA
gacctgctcgattggaagtaccttggcagatat

SEQ ID NO: 72784 - RNA, 30 nt, synthetic construct
  misc_feature 1..30: note = Fez family zinc finger protein 1 isoform 2 (119-128)
  source 1..30: mol_type = other RNA
gacctgctcaactgcgcccttagcctgaag

SEQ ID NO: 72785 - RNA, 27 nt, synthetic construct
  misc_feature 1..27: note = EPM2A-interacting protein 1 (205-213)
  source 1..27: mol_type = other RNA
gacctgctcaccatcattaaccttaca

SEQ ID NO: 72786 - RNA, 30 nt, synthetic construct
  misc_feature 1..30: note = Sorting nexin-17 (151-160)
  source 1..30: mol_type = other RNA
gacctgcccgatgacctcatcggctacttc

SEQ ID NO: 72787 - RNA, 27 nt, synthetic construct
  misc_feature 1..27: note = UBAP1-MVB12-associated (UMA)-domain containing protein 1 isoform b (71-79)
  source 1..27: mol_type = other RNA
gacctgcccgatcacctccttagctac

SEQ ID NO: 72788 - RNA, 30 nt, synthetic construct
  misc_feature 1..30: note = Rap guanine nucleotide exchange factor 2 (604-613)
  source 1..30: mol_type = other RNA
gacctgcccgatcaggtgctcagagtcttc

SEQ ID NO: 72789 - RNA, 33 nt, synthetic construct
  misc_feature 1..33: note = Class E basic helix-loop-helix protein 40 (21-31)
  source 1..33: mol_type = other RNA
gacctgcccggcatgtaccctgcccacatgtat

SEQ ID NO: 72790 - RNA, 27 nt, synthetic construct
  misc_feature 1..27: note = Coiled-coil domain-containing protein 22 (96-104)
  source 1..27: mol_type = other RNA
gacctgagagatctccttctgttcttg

SEQ ID NO: 72791 - RNA, 33 nt, synthetic construct
  misc_feature 1..33: note = Transient receptor potential cation channel subfamily M member 1 (109-119)
  source 1..33: mol_type = other RNA
gacctggtgggcaaggatgtcaccagagtttac

SEQ ID NO: 72792 - RNA, 30 nt, synthetic construct
  misc_feature 1..30: note = Regulatory-associated protein of mTOR (292-301)
  source 1..30: mol_type = other RNA
gacctggtgaaggataacggccacaaatac

SEQ ID NO: 72793 - RNA, 30 nt, synthetic construct; identical to SEQ ID NO: 48566
  misc_feature 1..30: note = Holliday junction recognition protein (177-186)
  source 1..30: mol_type = other RNA

SEQ ID NO: 72794 - RNA, 27 nt, synthetic construct
  misc_feature 1..27: note = Zinc finger protein 1 homolog (74-82)
  source 1..27: mol_type = other RNA
gacctgtacgagaagaccctcaaatat

SEQ ID NO: 72795 - RNA, 27 nt, synthetic construct
  misc_feature 1..27: note = Cytoplasmic FMR1-interacting protein 1 (703-711)
  source 1..27: mol_type = other RNA
gacctgtacaacgatagcgcccactat

SEQ ID NO: 72796 - RNA, 30 nt, synthetic construct
  misc_feature 1..30: note = DNA (cytosine-5)-methyltransferase 1 (862-871)
  source 1..30: mol_type = other RNA
gacctgtaccccgagcactatagaaagtac

SEQ ID NO: 72797 - RNA, 27 nt, synthetic construct
  misc_feature 1..27: note = Phosphoglycerate kinase 1 (52-60)
  source 1..27: mol_type = other RNA
gacaacggcgccaagagcgtggtcctg

SEQ ID NO: 72798 - RNA, 27 nt, synthetic construct
  misc_feature 1..27: note = 60S ribosomal protein L23 (30-38)
  source 1..27: mol_type = other RNA
gacaacaccggcgccaagaatctgtac

SEQ ID NO: 72799 - RNA, 27 nt, synthetic construct
  misc_feature 1..27: note = Nuclear pore complex protein Nup88 (194-202)
  source 1..27: mol_type = other RNA
gacaacgtgatcagaatttacagcctg

SEQ ID NO: 72800 - RNA, 36 nt, synthetic construct
  misc_feature 1..36: note = KAT8 regulatory NSL complex subunit 2 (176-187)
  source 1..36: mol_type = other RNA
gaccaggaggatcccctgaagcacgccggcgtgtac

SEQ ID NO: 72801 - RNA, 36 nt, synthetic construct
  misc_feature 1..36: note = EH domain-containing protein 1 (222-233)
  source 1..36: mol_type = other RNA
gaccagatcgagacccaacagctgatgagagtgtac

SEQ ID NO: 72802 - RNA, 39 nt, synthetic construct
  misc_feature 1..39: note = Eukaryotic translation initiation factor 3 subunit C-like protein (888-900)
  source 1..39: mol_type = other RNA
gaccagaaggatggctacagaaaaaacgaggggtatatg

SEQ ID NO: 72803 - RNA, 27 nt, synthetic construct
  misc_feature 1..27: note = Isoleucine-tRNA ligase, cytoplasmic (424-432)
  source 1..27: mol_type = other RNA
gaccagctgctcagaaacaatgatctt

SEQ ID NO: 72804 - RNA, 27 nt, synthetic construct
  misc_feature 1..27: note = V-type proton ATPase subunit H (445-453)
  source 1..27: mol_type = other RNA
gaccagcaagtgagatacaacgccctg

SEQ ID NO: 72805 - RNA, 27 nt, synthetic construct
  misc_feature 1..27: note = Neuroblastoma-amplified sequence (1664-1672)
  source 1..27: mol_type = other RNA
gaccagtacaagagagagaccatcctg

SEQ ID NO: 72806 - RNA, 30 nt, synthetic construct
  misc_feature 1..30: note = GTPase KRas (69-78)
  source 1..30: mol_type = other RNA
gaccagtacatgagaaccggcgaggggttc

SEQ ID NO: 72807 - RNA, 27 nt, synthetic construct
  misc_feature 1..27: note = Vigilin (368-376)
  source 1..27: mol_type = other RNA
gacagagccctgaggagcttcaagctc

SEQ ID NO: 72808 - RNA, 27 nt, synthetic construct
  misc_feature 1..27: note = Tyrosine-protein kinase BAZ1B (189-197)
  source 1..27: mol_type = other RNA
gacagagaggataagaggagcgccctg

SEQ ID NO: 72809 - RNA, 27 nt, synthetic construct
  misc_feature 1..27: note = Clathrin heavy chain 1 (779-787)
  source 1..27: mol_type = other RNA
gacagattcgattttgtgcacgacctg

SEQ ID NO: 72810 - RNA, 27 nt, synthetic construct
  misc_feature 1..27: note = KxDL motif-containing protein 1 (43-51)
  source 1..27: mol_type = other RNA
gacagattcgagaagaccaacgaaatg

SEQ ID NO: 72811 - RNA, 27 nt, synthetic construct
  misc_feature 1..27: note = PAB-dependent poly(A)-specific ribonuclease subunit PAN2 (264-272)
  source 1..27: mol_type = other RNA
gacagattcctgaaggtgtacgatctc

SEQ ID NO: 72812 - RNA, 27 nt, synthetic construct
  misc_feature 1..27: note = Monofunctional C1-tetrahydrofolate synthase, mitochondrial (503-511)
  source 1..27: mol_type = other RNA
gacagattcctgaggaagatcaccatt

SEQ ID NO: 72813 - RNA, 27 nt, synthetic construct
  misc_feature 1..27: note = Cyclin-G1 (81-89)
  source 1..27: mol_type = other RNA
gacagattcctgagcaagatgaaagtg

SEQ ID NO: 72814 - RNA, 27 nt, synthetic construct
  misc_feature 1..27: note = Lanosterol synthase (287-295)
  source 1..27: mol_type = other RNA
gacagattcaccaagagcatctccatt

SEQ ID NO: 72815 - RNA, 27 nt, synthetic construct
  misc_feature 1..27: note = Vacuolar protein sorting-associated protein 51 homolog (86-94)
  source 1..27: mol_type = other RNA
gacagacacgagaggatcaccaagctg

SEQ ID NO: 72816 - RNA, 27 nt, synthetic construct
  misc_feature 1..27: note = Endoplasmin (716-724)
  source 1..27: mol_type = other RNA
gacagaatcgagaggatgctgcggctc

SEQ ID NO: 72817 - RNA, 27 nt, synthetic construct
  misc_feature 1..27: note = Transcription elongation factor SPT5 (314-322)
  source 1..27: mol_type = other RNA
gacagaatcaaggccaggatgagcctg

SEQ ID NO: 72818 - RNA, 27 nt, synthetic construct
  misc_feature 1..27: note = Regulator of nonsense transcripts 3B (254-262)
  source 1..27: mol_type = other RNA
gacagaatccccgagagggataagctg

SEQ ID NO: 72819 - RNA, 30 nt, synthetic construct
  misc_feature 1..30: note = Coatomer subunit epsilon (160-169)
  source 1..30: mol_type = other RNA
gacagactggatctcgccaggaaggagctt

SEQ ID NO: 72820 - RNA, 27 nt, synthetic construct
  misc_feature 1..27: note = DNA-dependent protein kinase catalytic subunit (2537-2545)
  source 1..27: mol_type = other RNA
gacagactgctcgcccttaacagcctg

SEQ ID NO: 72821 - RNA, 27 nt, synthetic construct
  misc_feature 1..27: note = DNA replication complex GINS protein PSF1 (82-90)
  source 1..27: mol_type = other RNA
gacagactgctcaggatccgggccctt

SEQ ID NO: 72822 - RNA, 27 nt, synthetic construct
  misc_feature 1..27: note = Telomerase-binding protein EST1A (484-492)
  source 1..27: mol_type = other RNA
gacagaaacctgagggtgaaggccctc

SEQ ID NO: 72823 - RNA, 27 nt, synthetic construct
  misc_feature 1..27: note = SUMO-activating enzyme subunit 1 (20-28)
  source 1..27: mol_type = other RNA
gacagacagatcaggctgtggggcctc

SEQ ID NO: 72824 - RNA, 27 nt, synthetic construct
  misc_feature 1..27: note = Phenylalanine-tRNA ligase alpha subunit (353-361)
  source 1..27: mol_type = other RNA
gacagagtgttcaggaacgagaccctg

SEQ ID NO: 72825 - RNA, 27 nt, synthetic construct
  misc_feature 1..27: note = T-complex protein 1 subunit zeta (127-135)
  source 1..27: mol_type = other RNA
gacagagtgaagaaaatcattgagctg

SEQ ID NO: 72826 - RNA, 27 nt, synthetic construct
  misc_feature 1..27: note = 39S ribosomal protein L20, mitochondrial (16-24)
  source 1..27: mol_type = other RNA
gacagatacttcaggatccaggaggtg

SEQ ID NO: 72827 - RNA, 27 nt, synthetic construct
  misc_feature 1..27: note = Spectrin alpha chain, non-erythrocytic 1 (24-32)
  source 1..27: mol_type = other RNA
gacagataccacaggttcaaggagctg

SEQ ID NO: 72828 - RNA, 27 nt, synthetic construct
  misc_feature 1..27: note = Small nuclear ribonucleoprotein Sm D2 (93-101)
  source 1..27: mol_type = other RNA
gacagatacatcagcaagatgttcctg

SEQ ID NO: 72829 - RNA, 27 nt, synthetic construct
  misc_feature 1..27: note = Nuclear factor of activated T-cells, cytoplasmic 3 (487-495)
  source 1..27: mol_type = other RNA
gacagatacctgaggccccacgccttc

SEQ ID NO: 72830 - RNA, 27 nt, synthetic construct
  misc_feature 1..27: note = 60S ribosomal protein L27 (47-55)
  source 1..27: mol_type = other RNA
gacagataccccaggaaggtgaccgcc

SEQ ID NO: 72831 - RNA, 27 nt, synthetic construct
  misc_feature 1..27: note = Ubiquitin carboxyl-terminal hydrolase 45 (410-418)
  source 1..27: mol_type = other RNA
gacagatacagcggcaacgtgaccatc

SEQ ID NO: 72832 - RNA, 27 nt, synthetic construct
  misc_feature 1..27: note = Major prion protein (147-155)
  source 1..27: mol_type = other RNA
gacagatactatagggagaacatgcac

SEQ ID NO: 72833 - RNA, 30 nt, synthetic construct
  misc_feature 1..30: note = Nucleolar protein 4-like (309-318)
  source 1..30: mol_type = other RNA
gacagcgccgctatcacccactccacatac

SEQ ID NO: 72834 - RNA, 30 nt, synthetic construct; identical to SEQ ID NO: 48607
  misc_feature 1..30: note = Splicing factor U2AF 65 kDa subunit (293-302)
  source 1..30: mol_type = other RNA

SEQ ID NO: 72835 - RNA, 30 nt, synthetic construct
  misc_feature 1..30: note = Eukaryotic translation initiation factor 4 gamma 3 (1501-1510)
  source 1..30: mol_type = other RNA
gacagcgataccgagaaggaactgcaggcc

SEQ ID NO: 72836 - RNA, 30 nt, synthetic construct
  misc_feature 1..30: note = Gamma-glutamylaminecyclotransferase (138-147)
  source 1..30: mol_type = other RNA
gacagcgagggcccccacgggctgagatac

SEQ ID NO: 72837 - RNA, 36 nt, synthetic construct
  misc_feature 1..36: note = Bromodomain and WD repeat-containing protein 1 (1792-1803)
  source 1..36: mol_type = other RNA
gacagcgagcccggcagatccgggggaaggaagtac

SEQ ID NO: 72838 - RNA, 30 nt, synthetic construct
  misc_feature 1..30: note = RNA-binding protein 39 (262-271)
  source 1..30: mol_type = other RNA
gacagcgagaccggcagatccaaggggtac

SEQ ID NO: 72839 - RNA, 27 nt, synthetic construct
  misc_feature 1..27: note = Bcl-2-like protein 12 (183-191)
  source 1..27: mol_type = other RNA
gacagcttcgccagactggtggagctc

SEQ ID NO: 72840 - RNA, 27 nt, synthetic construct
  misc_feature 1..27: note = Melanophilin (443-451)
  source 1..27: mol_type = other RNA
gacagcttcgatagaaagtccgtgtac

SEQ ID NO: 72841 - RNA, 27 nt, synthetic construct
  misc_feature 1..27: note = TBC1 domain family member 4 (590-598)
  source 1..27: mol_type = other RNA
gacagcttcgagagatccaactctctg

SEQ ID NO: 72842 - RNA, 30 nt, synthetic construct
  misc_feature 1..30: note = Signal transducer and activator of transcription 1-alpha/beta (24-33)
  source 1..30: mol_type = other RNA
gacagcttccccatggagatcagacagtac

SEQ ID NO: 72843 - RNA, 33 nt, synthetic construct
  misc_feature 1..33: note = Signal transducer and activator of transcription 1-alpha/beta (24-34)
  source 1..33: mol_type = other RNA
gacagcttccccatggagatcagacagtacctg

SEQ ID NO: 72844 - RNA, 30 nt, synthetic construct
  misc_feature 1..30: note = Signal transducer and activator of transcription 3 (24-33)
  source 1..30: mol_type = other RNA
gacagcttccccatggagctgagacagttt

SEQ ID NO: 72845 - RNA, 36 nt, synthetic construct
  misc_feature 1..36: note = Syndecan-3 (294-305)
  source 1..36: mol_type = other RNA
gacagcggctcctctgccgctcagctgccccaaaag

SEQ ID NO: 72846 - RNA, 30 nt, synthetic construct
  misc_feature 1..30: note = Protein MON2 homolog (1214-1223)
  source 1..30: mol_type = other RNA
gacagcatcggcgagaagctggggagatac

SEQ ID NO: 72847 - RNA, 27 nt, synthetic construct
  misc_feature 1..27: note = Disco-interacting protein 2 homolog A (882-890)
  source 1..27: mol_type = other RNA
gacagcatccaccaggtgggcgtctac

SEQ ID NO: 72848 - RNA, 27 nt, synthetic construct
  misc_feature 1..27: note = ATP-dependent RNA helicase DDX54 (547-555)
  source 1..27: mol_type = other RNA
gacagcatcaagaactacagatccagg

SEQ ID NO: 72849 - RNA, 27 nt, synthetic construct
  misc_feature 1..27: note = Peptidyl-prolyl cis-trans isomerase FKBP9 (369-377)
  source 1..27: mol_type = other RNA
gacagcatctccattacctctcactac

SEQ ID NO: 72850 - RNA, 27 nt, synthetic construct
  misc_feature 1..27: note = Methyltransferase-like protein 13 (209-217)
  source 1..27: mol_type = other RNA
gacagcaaggatcccaccctgggcatg

SEQ ID NO: 72851 - RNA, 27 nt, synthetic construct
  misc_feature 1..27: note = Protein AHNAK2 (672-680)
  source 1..27: mol_type = other RNA
gacagcaagttcaaaatgcccaagttt

SEQ ID NO: 72852 - RNA, 30 nt, synthetic construct
  misc_feature 1..30: note = Arf-GAP with SH3 domain, ANK repeat and PH domain-containing protein 2 (284-293)
  source 1..30: mol_type = other RNA
gacagccagatcagacaatccaccgcctac

SEQ ID NO: 72853 - RNA, 27 nt, synthetic construct
  misc_feature 1..27: note = RNA-binding protein 3 (119-127)
  source 1..27: mol_type = other RNA
gacagcagacccggcgggtacggatat

SEQ ID NO: 72854 - RNA, 27 nt, synthetic construct
  misc_feature 1..27: note = T-complex protein 1 subunit alpha (459-467)
  source 1..27: mol_type = other RNA
gacagcaccgatctggtggccaagctc

SEQ ID NO: 72855 - RNA, 27 nt, synthetic construct
  misc_feature 1..27: note = Signal-induced proliferation-associated 1-like protein 2 (438-446)
  source 1..27: mol_type = other RNA
gacagcaccggcacacactccctgtac

SEQ ID NO: 72856 - RNA, 33 nt, synthetic construct
  misc_feature 1..33: note = Heterogeneous nuclear ribonucleoprotein A1-like 2 (4-14)
  source 1..33: mol_type = other RNA
gacagcgtggataagatcgtcattcagaaatac

SEQ ID NO: 72857 - RNA, 33 nt, synthetic construct
  misc_feature 1..33: note = Mitochondrial import inner membrane translocase subunit TIM50 (212-222)
  source 1..33: mol_type = other RNA
gacagcgtggatccccacggcttcatctcctac

SEQ ID NO: 72858 - RNA, 27 nt, synthetic construct
  misc_feature 1..27: note = Basement membrane-specific heparan sulfate proteoglycan core protein (608-616)
  source 1..27: mol_type = other RNA
gacagctacggcgggtccctgagatat

SEQ ID NO: 72859 - RNA, 27 nt, synthetic construct
  misc_feature 1..27: note = Transmembrane and TPR repeat-containing protein 1 (529-537)
  source 1..27: mol_type = other RNA
gacaccgccgaggctaagatgtactat

SEQ ID NO: 72860 - RNA, 27 nt, synthetic construct
  misc_feature 1..27: note = Methylthioribose-1-phosphate isomerase (208-216)
  source 1..27: mol_type = other RNA
gacaccgccaacaaggtgggcacatac

SEQ ID NO: 72861 - RNA, 30 nt, synthetic construct
  misc_feature 1..30: note = Apoptogenic protein 1, mitochondrial (36-45)
  source 1..30: mol_type = other RNA
gacaccgcccccagcggcgtgtccagattc

SEQ ID NO: 72862 - RNA, 39 nt, synthetic construct
  misc_feature 1..39: note = Solute carrier family 35 member B1 (75-87)
  source 1..39: mol_type = other RNA
gacaccgccagagtggataggacacggagctggctgtac

SEQ ID NO: 72863 - RNA, 42 nt, synthetic construct
  misc_feature 1..42: note = Heterogeneous nuclear ribonucleoproteins A2/B1 (110-123)
  source 1..42: mol_type = other RNA
gacaccgaggaacaccatctgagagattacttcgaggaatat

SEQ ID NO: 72864 - RNA, 42 nt, synthetic construct
  misc_feature 1..42: note = Heat shock 70 kDa protein 1-like (48-61)
  source 1..42: mol_type = other RNA
gacaccgagagactgatcggcgatgccgctaagaaccaggtg

SEQ ID NO: 72865 - RNA, 27 nt, synthetic construct
  misc_feature 1..27: note = N-acetylglucosamine-1-phosphotransferase subunits alpha/beta (929-937)
  source 1..27: mol_type = other RNA
gacaccttcgccgatagcctgagatac

SEQ ID NO: 72866 - RNA, 27 nt, synthetic construct
  misc_feature 1..27: note = AT-rich interactive domain-containing protein 5B (227-235)
  source 1..27: mol_type = other RNA
gacaccttcgatcaccccacactgatc

SEQ ID NO: 72867 - RNA, 33 nt, synthetic construct
  misc_feature 1..33: note = Transcription factor SOX-6 (351-361)
  source 1..33: mol_type = other RNA
gacaccttcgagcacggcgggggacatagctac

SEQ ID NO: 72868 - RNA, 27 nt, synthetic construct
  misc_feature 1..27: note = Triple functional domain protein (2621-2629)
  source 1..27: mol_type = other RNA
gacaccttcgagacacccactagctac

SEQ ID NO: 72869 - RNA, 33 nt, synthetic construct
  misc_feature 1..33: note Dolichyl-diphosphooligosaccharide-proteinosyltransferase subunit 1 (402-412)
  source 1..33: mol_type = other RNA
gacaccttcggcagacccgtgatcgtcgcctac

SEQ ID NO: 72870 - RNA, 33 nt, synthetic construct
  misc_feature 1..33: note = CTTNBP2 N-terminal-like protein (57-67)
  source 1..33: mol_type = other RNA
gacaccttcatcgaggaaagatacggcaagtat

SEQ ID NO: 72871 - RNA, 30 nt, synthetic construct
  misc_feature 1..30: note = UTP-glucose-1-phosphate uridylyltransferase (237-246)
  source 1..30: mol_type = other RNA
gacaccttcatcggcgaggggaaggaatac

SEQ ID NO: 72872 - RNA, 39 nt, synthetic construct; identical to SEQ ID NO: 48645
  misc_feature 1..39: note = Interferon-related developmental regulator 1 (375-387)
  source 1..39: mol_type = other RNA

SEQ ID NO: 72873 - RNA, 30 nt, synthetic construct
  misc_feature 1..30: note = H2.0-like homeobox protein (254-263)
  source 1..30: mol_type = other RNA
gacaccttccccggcccttacgccgtgctg

SEQ ID NO: 72874 - RNA, 27 nt, synthetic construct
  misc_feature 1..27: note = G-protein coupled receptor 126 (533-541)
  source 1..27: mol_type = other RNA
gacaccttcagccactccacaaagttt

SEQ ID NO: 72875 - RNA, 27 nt, synthetic construct
  misc_feature 1..27: note = Rhophilin-2 (261-269)
  source 1..27: mol_type = other RNA
gacaccttcacacacactcccagctac

SEQ ID NO: 72876 - RNA, 27 nt, synthetic construct
  misc_feature 1..27: note = 40S ribosomal protein S14 (39-47)
  source 1..27: mol_type = other RNA
gacaccttcgtgcacgtcacagatctg

SEQ ID NO: 72877 - RNA, 30 nt, synthetic construct
  misc_feature 1..30: note = Lysosomal glucocerebrosidase precursor (428-437)
  source 1..30: mol_type = other RNA
gacaccttctacaagcagcccatgttttat

SEQ ID NO: 72878 - RNA, 27 nt, synthetic construct
  misc_feature 1..27: note = Zinc finger CCCH-type with G patch domain-containing protein (515-523)
  source 1..27: mol_type = other RNA
gacacccacaagaaaatgacagagttc

SEQ ID NO: 72879 - RNA, 27 nt, synthetic construct
  misc_feature 1..27: note = Utrophin (3189-3197)
  source 1..27: mol_type = other RNA
gacacccacagcagaatcgagcagtac

SEQ ID NO: 72880 - RNA, 30 nt, synthetic construct
  misc_feature 1..30: note = C2 domain-containing protein 5 (611-620)
  source 1..30: mol_type = other RNA
gacaccatcgccaagaacaaagagctgtac

SEQ ID NO: 72881 - RNA, 36 nt, synthetic construct
  misc_feature 1..36: note = Polyadenylate-binding protein 4 (303-314)
  source 1..36: mol_type = other RNA
gacaccatcgatgacgagaagctgagaaaagaattc

SEQ ID NO: 72882 - RNA, 33 nt, synthetic construct
  misc_feature 1..33: note = Plastin-3 (116-126)
  source 1..33: mol_type = other RNA
gacaccatcgatgagagagccattaacaagaaa

SEQ ID NO: 72883 - RNA, 27 nt, synthetic construct
  misc_feature 1..27: note = Kin of IRRE-like protein 1 (277-285)
  source 1..27: mol_type = other RNA
gacaccatcgatacaagagaggaatac

SEQ ID NO: 72884 - RNA, 42 nt, synthetic construct
  misc_feature 1..42: note = Small ubiquitin-related modifier 2 isoform b precursor (58-71)
  source 1..42: mol_type = other RNA
gacaccatcgatgtgttccagcaacagacaggcggggtctac

SEQ ID NO: 72885 - RNA, 36 nt, synthetic construct
  misc_feature 1..36: note = SUMO-activating enzyme subunit 2 (50-61)
  source 1..36: mol_type = other RNA
gacaccatcgatgtgagcaacctgaatagacagttc

SEQ ID NO: 72886 - RNA, 27 nt, synthetic construct
  misc_feature 1..27: note = Tryptophan-tRNA ligase, cytoplasmic (382-390)
  source 1..27: mol_type = other RNA
gacaccatcgaggaacacagacagttc

SEQ ID NO: 72887 - RNA, 39 nt, synthetic construct
  misc_feature 1..39: note = Heterogeneous nuclear ribonucleoproteins A2/B1 (127-139)
  source 1..39: mol_type = other RNA
gacaccatcgagattataacagatagacagagcggcaag

SEQ ID NO: 72888 - RNA, 27 nt, synthetic construct
  misc_feature 1..27: note = Unconventional myosin-Id (61-69)
  source 1..27: mol_type = other RNA
gacaccatcgagcagtacaagggcaga

SEQ ID NO: 72889 - RNA, 36 nt, synthetic construct
  misc_feature 1..36: note = Ubiquitin-like protein 5 (22-33)
  source 1..36: mol_type = other RNA
gacaccatcggcgatctgaagaaactcattgccgct

SEQ ID NO: 72890 - RNA, 30 nt, synthetic construct
  misc_feature 1..30: note = Trifunctional purine biosynthetic protein adenosine-3 (45-54)
  source 1..30: mol_type = other RNA
gacaccatcggccaggatctggtggccatg

SEQ ID NO: 72891 - RNA, 27 nt, synthetic construct
  misc_feature 1..27: note = Cytoplasmic polyadenylation element-binding protein 4 (17-25)
  source 1..27: mol_type = other RNA
gacaccatcaagggcagactgaactac

SEQ ID NO: 72892 - RNA, 27 nt, synthetic construct
  misc_feature 1..27: note = Mitochondrial dynamics protein MID51 (222-230)
  source 1..27: mol_type = other RNA
gacaccatcatgaacgtgcccggcttc

SEQ ID NO: 72893 - RNA, 33 nt, synthetic construct; identical to SEQ ID NO: 48666
  misc_feature 1..33: note = UPF0489 protein C5orf22 (148-158)
  source 1..33: mol_type = other RNA

SEQ ID NO: 72894 - RNA, 30 nt, synthetic construct
  misc_feature 1..30: note = Coiled-coil and C2 domain-containing protein 2A (426-435)
  source 1..30: mol_type = other RNA
gacaccatccagaagacaattaacgagtac

SEQ ID NO: 72895 - RNA, 27 nt, synthetic construct
  misc_feature 1..27: note = Interferon-induced helicase C domain-containing protein 1 (615-623)
  source 1..27: mol_type = other RNA
gacaccatcagaatgattgatgcctac

SEQ ID NO: 72896 - RNA, 27 nt, synthetic construct
  misc_feature 1..27: note = Zinc finger protein 143 (92-100)
  source 1..27: mol_type = other RNA
gacaccatcagcgccctggagcagtac

SEQ ID NO: 72897 - RNA, 30 nt, synthetic construct
  misc_feature 1..30: note = Gamma-interferon-inducible protein 16 (447-456)
  source 1..30: mol_type = other RNA
gacaccatcagcaagatgaacgatttcatg

SEQ ID NO: 72898 - RNA, 36 nt, synthetic construct
  misc_feature 1..36: note = Gamma-interferon-inducible protein 16 (447-458)
  source 1..36: mol_type = other RNA
gacaccatcagcaagatgaacgatttcatgagaatg

SEQ ID NO: 72899 - RNA, 27 nt, synthetic construct
  misc_feature 1..27: note = Sphingolipid delta(4)-desaturase DES1 (268-276)
  source 1..27: mol_type = other RNA
gacaccatcagcccctactccagaatg

SEQ ID NO: 72900 - RNA, 33 nt, synthetic construct
  misc_feature 1..33: note = Pre-mRNA-splicing factor RBM22 (241-251)
  source 1..33: mol_type = other RNA
gacaccatcacagagactgatctgagaaaccac

SEQ ID NO: 72901 - RNA, 36 nt, synthetic construct
  misc_feature 1..36: note = Pre-mRNA-splicing factor RBM22 (241-252)
  source 1..36: mol_type = other RNA
gacaccatcacagagactgatctgagaaaccacttc

SEQ ID NO: 72902 - RNA, 39 nt, synthetic construct
  misc_feature 1..39: note = Pre-mRNA-splicing factor RBM22 (241-253)
  source 1..39: mol_type = other RNA
gacaccatcacagagactgatctgagaaaccacttctac

SEQ ID NO: 72903 - RNA, 33 nt, synthetic construct
  misc_feature 1..33: note = Intermediate filament family orphan 1 (232-242)
  source 1..33: mol_type = other RNA
gacaccatcacacccgagattagagccctgtac

SEQ ID NO: 72904 - RNA, 30 nt, synthetic construct
  misc_feature 1..30: note = Condensin complex subunit 1 (61-70)
  source 1..30: mol_type = other RNA
gacaccatctacagcattctgcaccatttc

SEQ ID NO: 72905 - RNA, 27 nt, synthetic construct
  misc_feature 1..27: note = Protein SCO1 homolog, mitochondrial (97-105)
  source 1..27: mol_type = other RNA
gacaccaaggaggccatcgctaactac

SEQ ID NO: 72906 - RNA, 27 nt, synthetic construct
  misc_feature 1..27: note = Amyloid beta A4 protein (64-72)
  source 1..27: mol_type = other RNA
gacaccaaggagggcatcctgcagtac

SEQ ID NO: 72907 - RNA, 27 nt, synthetic construct
  misc_feature 1..27: note = Intraflagellar transport protein 74 homolog (328-336)
  source 1..27: mol_type = other RNA
gacaccaaggagaaaatcaaccagttc

SEQ ID NO: 72908 - RNA, 27 nt, synthetic construct
  misc_feature 1..27: note = Charged multivesicular body protein 5 (21-29)
  source 1..27: mol_type = other RNA
gacaccaagacaactgtggatgccatg

SEQ ID NO: 72909 - RNA, 27 nt, synthetic construct
  misc_feature 1..27: note = DNA-directed RNA polymerase II subunit RPB2 (738-746)
  source 1..27: mol_type = other RNA
gacaccctggcccacgtgctctactat

SEQ ID NO: 72910 - RNA, 27 nt, synthetic construct
  misc_feature 1..27: note = Presenilin-2 (439-447)
  source 1..27: mol_type = other RNA
gacaccctggccagccaccagctctac

SEQ ID NO: 72911 - RNA, 27 nt, synthetic construct
  misc_feature 1..27: note = Acidic fibroblast growth factor intracellular-binding protein (55-63)
  source 1..27: mol_type = other RNA
gacaccatggatcactacagaacattc

SEQ ID NO: 72912 - RNA, 27 nt, synthetic construct
  misc_feature 1..27: note = Parafibromin (134-142)
  source 1..27: mol_type = other RNA
gacaccatgggcacataccacgggatg

SEQ ID NO: 72913 - RNA, 30 nt, synthetic construct
  misc_feature 1..30: note = Dual specificity protein phosphatase 10 (341-350)
  source 1..30: mol_type = other RNA
gacaccatgcagagactgaacatcggctac

SEQ ID NO: 72914 - RNA, 27 nt, synthetic construct
  misc_feature 1..27: note = FRAS1-related extracellular matrix protein 2 (1562-1570)
  source 1..27: mol_type = other RNA
gacacccccgataagctgctcaaattc

SEQ ID NO: 72915 - RNA, 27 nt, synthetic construct
  misc_feature 1..27: note = Translin-associated protein X (212-220)
  source 1..27: mol_type = other RNA
gacacccccttcgaggtgagccagttt

SEQ ID NO: 72916 - RNA, 30 nt, synthetic construct
  misc_feature 1..30: note = Translation factor GUF1, mitochondrial (140-149)
  source 1..30: mol_type = other RNA
gacacccccggccacgtggatttcagctac

SEQ ID NO: 72917 - RNA, 27 nt, synthetic construct
  misc_feature 1..27: note = Protein KIAA0100 (293-301)
  source 1..27: mol_type = other RNA
gacaccccccctttcgccctgggcttt

SEQ ID NO: 72918 - RNA, 27 nt, synthetic construct
  misc_feature 1..27: note = Nuclear receptor subfamily 4 group A member 2 (395-403)
  source 1..27: mol_type = other RNA
gacacccagcacatccaacagttctac

SEQ ID NO: 72919 - RNA, 27 nt, synthetic construct
  misc_feature 1..27: note = Nuclear protein localization protein 4 homolog (319-327)
  source 1..27: mol_type = other RNA
gacaccagaaagggcacagtgaggtac

SEQ ID NO: 72920 - RNA, 27 nt, synthetic construct
  misc_feature 1..27: note = Nuclear pore complex protein Nup205 (1075-1083)
  source 1..27: mol_type = other RNA
gacaccagcggccccacaatgagatac

SEQ ID NO: 72921 - RNA, 27 nt, synthetic construct
  misc_feature 1..27: note = Disintegrin and metalloproteinase domain-containing protein 10 (98-106)
  source 1..27: mol_type = other RNA
gacaccagccacatctacacaggccat

SEQ ID NO: 72922 - RNA, 30 nt, synthetic construct
  misc_feature 1..30: note = Protein YIF1B (38-47)
  source 1..30: mol_type = other RNA
gacaccagctccgcccagtctagaggctac

SEQ ID NO: 72923 - RNA, 27 nt, synthetic construct
  misc_feature 1..27: note = NHS-like protein 1 (768-776)
  source 1..27: mol_type = other RNA
gacaccagctccgtgaagtctgagtac

SEQ ID NO: 72924 - RNA, 27 nt, synthetic construct
  misc_feature 1..27: note = Peptidyl-glycine alpha-amidating monooxygenase (99-107)
  source 1..27: mol_type = other RNA
gacaccgtgcaccatatgctgctcttc

SEQ ID NO: 72925 - RNA, 27 nt, synthetic construct
  misc_feature 1..27: note = E3 SUMO-protein ligase RanBP2 (3197-3205)
  source 1..27: mol_type = other RNA
gacaccgtgaagaaaatcgagagcttc

SEQ ID NO: 72926 - RNA, 27 nt, synthetic construct
  misc_feature 1..27: note = Nodal modulator 3 (6-14)
  source 1..27: mol_type = other RNA
gacaccgtgaagcagatgaacaaatac

SEQ ID NO: 72927 - RNA, 27 nt, synthetic construct
  misc_feature 1..27: note = Rho GTPase-activating protein 31 (892-900)
  source 1..27: mol_type = other RNA
gacaccgtgacagatatcgcccagcac

SEQ ID NO: 72928 - RNA, 33 nt, synthetic construct
  misc_feature 1..33: note = E3 ubiquitin-protein ligase MYLIP (278-288)
  source 1..33: mol_type = other RNA
gacaccgtgacaagcgccgtcatgatgcagtac

SEQ ID NO: 72929 - RNA, 33 nt, synthetic construct
  misc_feature 1..33: note = Eukaryotic translation initiation factor 4H (5-15)
  source 1..33: mol_type = other RNA
gacacctacgatgacagagcctatagctccttc

SEQ ID NO: 72930 - RNA, 33 nt, synthetic construct
  misc_feature 1..33: note = Vacuolar fusion protein CCZ1 homolog (308-318)
  source 1..33: mol_type = other RNA
gacacctacgaggaactgcacctcatcgtgtat

SEQ ID NO: 72931 - RNA, 36 nt, synthetic construct
  misc_feature 1..36: note = Ethanolamine-phosphate cytidylyltransferase (124-135)
  source 1..36: mol_type = other RNA
gacacctacgaggaagtgaagcaggccggcagatat

SEQ ID NO: 72932 - RNA, 36 nt, synthetic construct
  misc_feature 1..36: note = Beta-secretase 2 (127-138)
  source 1..36: mol_type = other RNA
gacacctacttcgatacagagagaagctccacttat

SEQ ID NO: 72933 - RNA, 30 nt, synthetic construct
  misc_feature 1..30: note = Glycoprotein endo-alpha-1,2-mannosidase-like protein (245-254)
  source 1..30: mol_type = other RNA
gacacctacggcagccacggggccttctat

SEQ ID NO: 72934 - RNA, 30 nt, synthetic construct; identical to SEQ ID NO: 48707
  misc_feature 1..30: note = Mid1-interacting protein 1 (5-14)
  source 1..30: mol_type = other RNA

SEQ ID NO: 72935 - RNA, 30 nt, synthetic construct
  misc_feature 1..30: note = Tetratricopeptide repeat protein 37 (1017-1026)
  source 1..30: mol_type = other RNA
gacacctacaacgtggccatcagaaattat

SEQ ID NO: 72936 - RNA, 30 nt, synthetic construct
  misc_feature 1..30: note = Zinc finger CCCH domain-containing protein 13 (520-529)
  source 1..30: mol_type = other RNA
gacacctaccccgaggaaagcagatcctat

SEQ ID NO: 72937 - RNA, 33 nt, synthetic construct
  misc_feature 1..33: note = Cartilage acidic protein 1 (17-27)
  source 1..33: mol_type = other RNA
gacgtggccgctgaggcaggcgtcagcaagtac

SEQ ID NO: 72938 - RNA, 33 nt, synthetic construct
  misc_feature 1..33: note = Putative GTP-binding protein 6 (258-268)
  source 1..33: mol_type = other RNA
gacgtggcccacagcgatctgatcctccatgtc

SEQ ID NO: 72939 - RNA, 27 nt, synthetic construct
  misc_feature 1..27: note = Polynucleotide 5'-hydroxyl-kinase NOL9 (563-571)
  source 1..27: mol_type = other RNA
gacgtggcccccacccacatcctgtac

SEQ ID NO: 72940 - RNA, 36 nt, synthetic construct
  misc_feature 1..36: note = Hsc70-interacting protein (337-348)
  source 1..36: mol_type = other RNA
gacgtggcccagaaccccgctaatatgagcaagtac

SEQ ID NO: 72941 - RNA, 33 nt, synthetic construct
  misc_feature 1..33: note = WD repeat domain-containing protein 83 (95-105)
  source 1..33: mol_type = other RNA
gacgtggccagcggccaggtcgttagaaagttc

SEQ ID NO: 72942 - RNA, 27 nt, synthetic construct
  misc_feature 1..27: note = Protein S100-B (13-21)
  source 1..27: mol_type = other RNA
gacgtgttccaccagtacagcggcaga

SEQ ID NO: 72943 - RNA, 30 nt, synthetic construct
  misc_feature 1..30: note = Sentrin-specific protease 5 (531-540)
  source 1..30: mol_type = other RNA
gacgtgttcaacgaggattttagcaataga

SEQ ID NO: 72944 - RNA, 30 nt, synthetic construct
  misc_feature 1..30: note = Nicotinamide phosphoribosyltransferase (94-103)
  source 1..30: mol_type = other RNA
gacgtgttcaacgagaagggctggaattac

SEQ ID NO: 72945 - RNA, 30 nt, synthetic construct
  misc_feature 1..30: note = DNA excision repair protein ERCC-8 (78-87)
  source 1..30: mol_type = other RNA
gacgtgttcaactttgaggaaaccgtctac

SEQ ID NO: 72946 - RNA, 33 nt, synthetic construct
  misc_feature 1..33: note = Phosphomannomutase 1 (190-200)
  source 1..33: mol_type = other RNA
gacgtgttccccgagggctgggataagagatac

SEQ ID NO: 72947 - RNA, 30 nt, synthetic construct
  misc_feature 1..30: note = Serine/threonine-protein kinase N3 (654-663)
  source 1..30: mol_type = other RNA
gacgtgttccccgagcctcaggccagattt

SEQ ID NO: 72948 - RNA, 30 nt, synthetic construct
  misc_feature 1..30: note = Solute carrier family 23 member 2 (334-343)
  source 1..30: mol_type = other RNA
gacgtgttcccccctgatagcaccaagtac

SEQ ID NO: 72949 - RNA, 39 nt, synthetic construct
  misc_feature 1..39: note = Solute carrier family 23 member 2 (334-346)
  source 1..39: mol_type = other RNA
gacgtgttcccccctgatagcaccaagtacggcttttat

SEQ ID NO: 72950 - RNA, 33 nt, synthetic construct
  misc_feature 1..33: note = MOB kinase activator 2 (126-136)
  source 1..33: mol_type = other RNA
gacgtgttccccaccaagtacggcagagagttt

SEQ ID NO: 72951 - RNA, 30 nt, synthetic construct
  misc_feature 1..30: note = U4/U6.U5 tri-snRNP-associated protein 2 (186-195)
  source 1..30: mol_type = other RNA
gacgtgttccagggcagcatgagaatcttt

SEQ ID NO: 72952 - RNA, 27 nt, synthetic construct
  misc_feature 1..27: note = Ankyrin repeat and BTB/POZ domain-containing protein 1 (59-67)
  source 1..27: mol_type = other RNA
gacgtgttcacccacgtcctgtactat

SEQ ID NO: 72953 - RNA, 39 nt, synthetic construct
  misc_feature 1..39: note = General transcription factor II-I (53-65)
  source 1..39: mol_type = other RNA
gacgtgttcgtcgttggcaccgagagagggagggccttt

SEQ ID NO: 72954 - RNA, 36 nt, synthetic construct
  misc_feature 1..36: note = HLA class I histocompatibility antigen, A-1 alpha chain (101-112)
  source 1..36: mol_type = other RNA
gacgtgggccccgatgggagattcctgaggggatac

SEQ ID NO: 72955 - RNA, 30 nt, synthetic construct
  misc_feature 1..30: note = Histone deacetylase 6 (104-113)
  source 1..30: mol_type = other RNA
gacgtgcaccatggccaggggacccaattc

SEQ ID NO: 72956 - RNA, 30 nt, synthetic construct
  misc_feature 1..30: note = Kaptin (205-214)
  source 1..30: mol_type = other RNA
gacgtgcacaacttccccggcaccagcaga

SEQ ID NO: 72957 - RNA, 30 nt, synthetic construct
  misc_feature 1..30: note = Neutral alpha-glucosidase AB (329-338)
  source 1..30: mol_type = other RNA
gacgtgcacaacatctacggcctgtatgtc

SEQ ID NO: 72958 - RNA, 27 nt, synthetic construct
  misc_feature 1..27: note = Speriolin-like protein (115-123)
  source 1..27: mol_type = other RNA
gacgtgcaccccgccttcagcgagttt

SEQ ID NO: 72959 - RNA, 36 nt, synthetic construct
  misc_feature 1..36: note = Caveolin-1 (5-16)
  source 1..36: mol_type = other RNA
gacgtgatcgccgagcccgaaggcacccacagcttc

SEQ ID NO: 72960 - RNA, 33 nt, synthetic construct
  misc_feature 1..33: note = Death effector domain-containing protein (51-61)
  source 1..33: mol_type = other RNA
gacgtgatcgatgaccacgagagaggcctgatt

SEQ ID NO: 72961 - RNA, 27 nt, synthetic construct
  misc_feature 1..27: note = Protein LDOC1L (24-32)
  source 1..27: mol_type = other RNA
gacgtgatcgataccctgacaagcctc

SEQ ID NO: 72962 - RNA, 27 nt, synthetic construct
  misc_feature 1..27: note = Uncharacterized protein C20orf194 (832-840)
  source 1..27: mol_type = other RNA
gacgtgatcgatgtcgttcaggccctg

SEQ ID NO: 72963 - RNA, 27 nt, synthetic construct
  misc_feature 1..27: note = ATP-dependent RNA helicase DHX36 (400-408)
  source 1..27: mol_type = other RNA
gacgtgatcgagaagattagatacgtc

SEQ ID NO: 72964 - RNA, 33 nt, synthetic construct
  misc_feature 1..33: note = E3 ubiquitin-protein ligase RNF213 (1304-1314)
  source 1..33: mol_type = other RNA
gacgtgatcttcaaggattttgtcaacaaatac

SEQ ID NO: 72965 - RNA, 27 nt, synthetic construct
  misc_feature 1..27: note = 60S ribosomal protein L3 (213-221)
  source 1..27: mol_type = other RNA
gacgtgatcggcgtcaccaaggggaaa

SEQ ID NO: 72966 - RNA, 33 nt, synthetic construct
  misc_feature 1..33: note = 60S ribosomal protein L3 (213-223)
  source 1..33: mol_type = other RNA
gacgtgatcggcgtcaccaaggggaaaggatac

SEQ ID NO: 72967 - RNA, 36 nt, synthetic construct
  misc_feature 1..36: note = Triple functional domain protein (785-796)
  source 1..36: mol_type = other RNA
gacgtgatccaccagggccaagatctgctccagtac

SEQ ID NO: 72968 - RNA, 27 nt, synthetic construct
  misc_feature 1..27: note = Ran GTPase-activating protein 1 (40-48)
  source 1..27: mol_type = other RNA
gacgtgatcaaggagattgaagatttc

SEQ ID NO: 72969 - RNA, 27 nt, synthetic construct
  misc_feature 1..27: note = Spindle and kinetochore-associated protein 1 (163-171)
  source 1..27: mol_type = other RNA
gacgtgatcaaggagattaacaaagcc

SEQ ID NO: 72970 - RNA, 30 nt, synthetic construct
  misc_feature 1..30: note = Cytoplasmic dynein 2 heavy chain 1 (2609-2618)
  source 1..30: mol_type = other RNA
gacgtgatcaagaaaggcctgattcactac

SEQ ID NO: 72971 - RNA, 27 nt, synthetic construct
  misc_feature 1..27: note = Fanconi anemia group D2 protein (348-356)
  source 1..27: mol_type = other RNA
gacgtgatcaagagcgccattagatac

SEQ ID NO: 72972 - RNA, 27 nt, synthetic construct
  misc_feature 1..27: note = Elongation factor G, mitochondrial (730-738)
  source 1..27: mol_type = other RNA
gacgtgatcaacaagtacctggaggcc

SEQ ID NO: 72973 - RNA, 39 nt, synthetic construct
  misc_feature 1..39: note = Thioredoxin-related transmembrane protein 4 (92-104)
  source 1..39: mol_type = other RNA
gacgtgatccaggagcccggcctgagcgggagattcttt

SEQ ID NO: 72974 - RNA, 27 nt, synthetic construct
  misc_feature 1..27: note = WD repeat-containing protein 26 (126-134)
  source 1..27: mol_type = other RNA
gacgtgatcagactgattggccagcac

SEQ ID NO: 72975 - RNA, 27 nt, synthetic construct
  misc_feature 1..27: note = Coenzyme Q-binding protein COQ10 homolog B, mitochondrial (62-70)
  source 1..27: mol_type = other RNA
gacgtgatcagcaagagatccggctac

SEQ ID NO: 72976 - RNA, 27 nt, synthetic construct
  misc_feature 1..27: note = Mediator of RNA polymerase II transcription subunit 27 (126-134)
  source 1..27: mol_type = other RNA
gacgtgatcagcagaattgataggatg

SEQ ID NO: 72977 - RNA, 30 nt, synthetic construct
  misc_feature 1..30: note = Antigen KI-67 (86-95)
  source 1..30: mol_type = other RNA
gacgtgatcaccattatagatagaagcttc

SEQ ID NO: 72978 - RNA, 36 nt, synthetic construct
  misc_feature 1..36: note = Antigen KI-67 (86-97)
  source 1..36: mol_type = other RNA
gacgtgatcaccattatagatagaagcttcaggtac

SEQ ID NO: 72979 - RNA, 36 nt, synthetic construct
  misc_feature 1..36: note = ER membrane protein complex subunit 1 (96-107)
  source 1..36: mol_type = other RNA
gacgtgatcaccgtcagcaacggcgggagaattatg

SEQ ID NO: 72980 - RNA, 30 nt, synthetic construct
  misc_feature 1..30: note = 40S ribosomal protein S18 (89-98)
  source 1..30: mol_type = other RNA
gacgtgaaggatggcaaatacagccaggtc

SEQ ID NO: 72981 - RNA, 27 nt, synthetic construct
  misc_feature 1..27: note = Cell cycle progression protein 1 (703-711)
  source 1..27: mol_type = other RNA
gacgtgaaggattacctgagaaacatg

SEQ ID NO: 72982 - RNA, 27 nt, synthetic construct
  misc_feature 1..27: note = Transmembrane protein 168 (117-125)
  source 1..27: mol_type = other RNA
gacgtgaaggaggaaagcaccaaatac

SEQ ID NO: 72983 - RNA, 27 nt, synthetic construct
  misc_feature 1..27: note = Nuclear pore complex protein Nup107 (812-820)
  source 1..27: mol_type = other RNA
gacgtgaaggagaaaatgtacaacgtc

SEQ ID NO: 72984 - RNA, 30 nt, synthetic construct
  misc_feature 1..30: note = UTP-glucose-1-phosphate uridylyltransferase (289-298)
  source 1..30: mol_type = other RNA
gacgtgaagggcgggaccctgacacagtac

SEQ ID NO: 72985 - RNA, 27 nt, synthetic construct
  misc_feature 1..27: note = Lon protease homolog, mitochondrial (277-285)
  source 1..27: mol_type = other RNA
gacgtgaagaaaagaatcctggagttc

SEQ ID NO: 72986 - RNA, 27 nt, synthetic construct
  misc_feature 1..27: note = DDB1- and CUL4-associated factor 4 (130-138)
  source 1..27: mol_type = other RNA
gacgtgaaggtcggcgggagcaaatac

SEQ ID NO: 72987 - RNA, 39 nt, synthetic construct
  misc_feature 1..39: note = Lon protease homolog, mitochondrial (129-141)
  source 1..39: mol_type = other RNA
gacgtgctggaggaaaccaacatccccaagagactctac

SEQ ID NO: 72988 - RNA, 27 nt, synthetic construct
  misc_feature 1..27: note = AP-2 complex subunit mu (176-184)
  source 1..27: mol_type = other RNA
gacgtgctggagagcgtcaacctcctt

SEQ ID NO: 72989 - RNA, 51 nt, synthetic construct
  misc_feature 1..51: note = PRKR-interacting protein 1 (66-82)
  source 1..51: mol_type = other RNA
gacgtgatgggcagctccgccggggctggatctggtgagttccacgtctac

SEQ ID NO: 72990 - RNA, 27 nt, synthetic construct
  misc_feature 1..27: note = Rho-associated protein kinase 2 (99-107)
  source 1..27: mol_type = other RNA
gacgtgcccgagaagtgggccaaattc

SEQ ID NO: 72991 - RNA, 27 nt, synthetic construct
  misc_feature 1..27: note = Rho-associated protein kinase 1 (169-177)
  source 1..27: mol_type = other RNA
gacgtgcccgagaagtgggccagattc

SEQ ID NO: 72992 - RNA, 27 nt, synthetic construct
  misc_feature 1..27: note = Protein diaphanous homolog 2 (54-62)
  source 1..27: mol_type = other RNA
gacgtgagagataggatcaccagcttc

SEQ ID NO: 72993 - RNA, 27 nt, synthetic construct
  misc_feature 1..27: note = RIB43A-like with coiled-coils protein 2 (62-70)
  source 1..27: mol_type = other RNA
gacgtgagaaacaccatcagcggcatg

SEQ ID NO: 72994 - RNA, 27 nt, synthetic construct
  misc_feature 1..27: note = Dipeptidyl peptidase 1 (107-115)
  source 1..27: mol_type = other RNA
gacgtgaccgatttcatcagccacctg

SEQ ID NO: 72995 - RNA, 27 nt, synthetic construct
  misc_feature 1..27: note = RANBP2-like and GRIP domain-containing protein 2 (107-115)
  source 1..27: mol_type = other RNA
gacgtgaccgatggcagagccaagtac

SEQ ID NO: 72996 - RNA, 27 nt, synthetic construct
  misc_feature 1..27: note = TATA box-binding protein-associated factor RNA polymerase I subunit C (102-110)
  source 1..27: mol_type = other RNA
gacgtgaccgagcagatcagcagattc

SEQ ID NO: 72997 - RNA, 30 nt, synthetic construct
  misc_feature 1..30: note = Zinc finger protein 552 (41-50)
  source 1..30: mol_type = other RNA
gacgtgaccctggagaacctcgcccttatg

SEQ ID NO: 72998 - RNA, 27 nt, synthetic construct
  misc_feature 1..27: note = Bromodomain adjacent to zinc finger domain protein 1A (531-539)
  source 1..27: mol_type = other RNA
gacgtgaccagcgccaacgctaagtac

SEQ ID NO: 72999 - RNA, 30 nt, synthetic construct
  misc_feature 1..30: note = Trafficking protein particle complex subunit 2-like protein (7-16)
  source 1..30: mol_type = other RNA
gacgtggtcgatgagaagatcagcgccatg

SEQ ID NO: 73000 - RNA, 27 nt, synthetic construct
  misc_feature 1..27: note = Sorting nexin-8 (312-320)
  source 1..27: mol_type = other RNA
gacgtggtcgagaagctgaacctcttc

SEQ ID NO: 73001 - RNA, 33 nt, synthetic construct
  misc_feature 1..33: note = DCN1-like protein 4 (58-68)
  source 1..33: mol_type = other RNA
gacgtggtcggccccgaggggatggaaaagttc

SEQ ID NO: 73002 - RNA, 27 nt, synthetic construct
  misc_feature 1..27: note = Inositol-trisphosphate 3-kinase B (718-726)
  source 1..27: mol_type = other RNA
gacgtggtcaaggatggcgagagatac

SEQ ID NO: 73003 - RNA, 27 nt, synthetic construct
  misc_feature 1..27: note = Cold shock domain-containing protein E1 (173-181)
  source 1..27: mol_type = other RNA
gacgtggtcaaggagatcttctttcac

SEQ ID NO: 73004 - RNA, 30 nt, synthetic construct
  misc_feature 1..30: note = Cold shock domain-containing protein E1 (173-182)
  source 1..30: mol_type = other RNA
gacgtggtcaaggagatcttctttcactac

SEQ ID NO: 73005 - RNA, 39 nt, synthetic construct
  misc_feature 1..39: note = Peptidyl-prolyl cis-trans isomerase H (34-46)
  source 1..39: mol_type = other RNA
gacgtggtccccaagaccgccgagaacttcagacagttt

SEQ ID NO: 73006 - RNA, 27 nt, synthetic construct
  misc_feature 1..27: note = Glypican-1 (232-240)
  source 1..27: mol_type = other RNA
gacgtggtcagaaaggttgcccaggtg

SEQ ID NO: 73007 - RNA, 30 nt, synthetic construct
  misc_feature 1..30: note = F-box only protein 31 (25-34)
  source 1..30: mol_type = other RNA
gacgtgtacgccaagctgctccacagatat

SEQ ID NO: 73008 - RNA, 33 nt, synthetic construct
  misc_feature 1..33: note = 26S proteasome non-ATPase regulatory subunit 1 (492-502)
  source 1..33: mol_type = other RNA
gacgtgtacgatctgctcaagaccaacctttat

SEQ ID NO: 73009 - RNA, 33 nt, synthetic construct
  misc_feature 1..33: note = RNA polymerase II-associated factor 1 homolog (252-262)
  source 1..33: mol_type = other RNA
gacgtgtacgattataagatcgccagagagtac

SEQ ID NO: 73010 - RNA, 33 nt, synthetic construct
  misc_feature 1..33: note = Cat eye syndrome critical region protein 5 (318-328)
  source 1..33: mol_type = other RNA
gacgtgtacggcgccaacctgttccaccagtat

SEQ ID NO: 73011 - RNA, 27 nt, synthetic construct
  misc_feature 1..27: note = Cystathionine gamma-lyase (112-120)
  source 1..27: mol_type = other RNA
gacgtgtacggcgggaccaacagatat

SEQ ID NO: 73012 - RNA, 30 nt, synthetic construct
  misc_feature 1..30: note = Cystathionine gamma-lyase (112-121)
  source 1..30: mol_type = other RNA
gacgtgtacggcgggaccaacagatatttc

SEQ ID NO: 73013 - RNA, 30 nt, synthetic construct
  misc_feature 1..30: note = Transcription elongation factor SPT6 (339-348)
  source 1..30: mol_type = other RNA
gacgtgtacaaccacttcctgctctattac

SEQ ID NO: 73014 - RNA, 30 nt, synthetic construct
  misc_feature 1..30: note = Inactive tyrosine-protein kinase 7 (954-963)
  source 1..30: mol_type = other RNA
gacgtgtacaacagcgagtattaccacttc

SEQ ID NO: 73015 - RNA, 30 nt, synthetic construct
  misc_feature 1..30: note = Melanoma-associated antigen D1 (507-516)
  source 1..30: mol_type = other RNA
gacgtgtaccccgagatcattgaaagagcc

SEQ ID NO: 73016 - RNA, 36 nt, synthetic construct
  misc_feature 1..36: note = Melanoma-associated antigen D2 (315-326)
  source 1..36: mol_type = other RNA
gacgtgtaccccgagatcattgaaagagccggctat

SEQ ID NO: 73017 - RNA, 33 nt, synthetic construct
  misc_feature 1..33: note = ATP synthase mitochondrial F1 complex assembly factor 1 (232-242)
  source 1..33: mol_type = other RNA
gaggccgctgcaagccagctgatcctctaccac

SEQ ID NO: 73018 - RNA, 33 nt, synthetic construct
  misc_feature 1..33: note = Uncharacterized protein C20orf194 (141-151)
  source 1..33: mol_type = other RNA
gaggccgctgaagagttcaagatcaccagcttt

SEQ ID NO: 73019 - RNA, 36 nt, synthetic construct
  misc_feature 1..36: note = Calpain small subunit 1 (199-210)
  source 1..36: mol_type = other RNA
gaggccgctggcttccacctgaacgaacatctctac

SEQ ID NO: 73020 - RNA, 27 nt, synthetic construct
  misc_feature 1..27: note = Protein GREB1 (686-694)
  source 1..27: mol_type = other RNA
gaggccgctcccgacatcatgcactac

SEQ ID NO: 73021 - RNA, 33 nt, synthetic construct
  misc_feature 1..33: note = ATP-dependent DNA helicase Q4 (32-42)
  source 1..33: mol_type = other RNA
gaggccgctcccgaagagaccagagcactgtac

SEQ ID NO: 73022 - RNA, 33 nt, synthetic construct
  misc_feature 1..33: note = Metal transporter CNNM3 (26-36)
  source 1..33: mol_type = other RNA
gaggccgctcccggccctagagtgctggggttc

SEQ ID NO: 73023 - RNA, 33 nt, synthetic construct
  misc_feature 1..33: note = Nucleoside diphosphate kinase, mitochondrial (131-141)
  source 1..33: mol_type = other RNA
gaggccgctcccggcaccatcagaggggacttc

SEQ ID NO: 73024 - RNA, 27 nt, synthetic construct
  misc_feature 1..27: note = 3-hydroxy-3-methylglutaryl-coenzyme A reductase (567-575)
  source 1..27: mol_type = other RNA
gaggccttcgacagcacctccagattt

SEQ ID NO: 73025 - RNA, 30 nt, synthetic construct
  misc_feature 1..30: note = Isovaleryl-CoA dehydrogenase, mitochondrial (310-319)
  source 1..30: mol_type = other RNA
gaggccttcggccagaagatcgggcacttt

SEQ ID NO: 73026 - RNA, 33 nt, synthetic construct
  misc_feature 1..33: note = Proteasome activator complex subunit 3 (94-104)
  source 1..33: mol_type = other RNA
gaggccttccagggcaccaaggtgtttgtcatg

SEQ ID NO: 73027 - RNA, 30 nt, synthetic construct
  misc_feature 1..30: note = Proteasome activator complex subunit 2 (158-167)
  source 1..30: mol_type = other RNA
gaggccttccagaccacaatcagcaagtac

SEQ ID NO: 73028 - RNA, 27 nt, synthetic construct
  misc_feature 1..27: note = Chloride intracellular channel protein 1 (201-209)
  source 1..27: mol_type = other RNA
gaggccttcagaggcgtgcacaggtac

SEQ ID NO: 73029 - RNA, 30 nt, synthetic construct
  misc_feature 1..30: note = Growth arrest-specific protein 8 (145-154)
  source 1..30: mol_type = other RNA
gaggccttcaccgacatcaagaactactat

SEQ ID NO: 73030 - RNA, 27 nt, synthetic construct
  misc_feature 1..27: note = Ras-related protein Rab-27A (147-155)
  source 1..27: mol_type = other RNA
gaggccatcgctctggcagaaaagtac

SEQ ID NO: 73031 - RNA, 30 nt, synthetic construct
  misc_feature 1..30: note = Alpha-actinin-4 (524-533)
  source 1..30: mol_type = other RNA
gaggccatcgaccagctgcacctcgaatac

SEQ ID NO: 73032 - RNA, 30 nt, synthetic construct
  misc_feature 1..30: note = Small integral membrane protein 8 (79-88)
  source 1..30: mol_type = other RNA
gaggccatcgacagcgaaggccactcctac

SEQ ID NO: 73033 - RNA, 33 nt, synthetic construct
  misc_feature 1..33: note = Small integral membrane protein 8 (79-89)
  source 1..33: mol_type = other RNA
gaggccatcgacagcgaaggccactcctacatg

SEQ ID NO: 73034 - RNA, 33 nt, synthetic construct
  misc_feature 1..33: note = Condensin complex subunit 1 (636-646)
  source 1..33: mol_type = other RNA
gaggccatcggcattataagcaagatgatgtac

SEQ ID NO: 73035 - RNA, 33 nt, synthetic construct
  misc_feature 1..33: note = Nuclear pore complex protein Nup133 (332-342)
  source 1..33: mol_type = other RNA
gaggccatcaaggaaggcgtgaacattagatac

SEQ ID NO: 73036 - RNA, 30 nt, synthetic construct; identical to SEQ ID NO: 48809
  misc_feature 1..30: note = Synergin gamma (170-179)
  source 1..30: mol_type = other RNA

SEQ ID NO: 73037 - RNA, 27 nt, synthetic construct
  misc_feature 1..27: note = N-lysine methyltransferase SMYD2 (289-297)
  source 1..27: mol_type = other RNA
gaggccatcagagacatggtgaggtac

SEQ ID NO: 73038 - RNA, 33 nt, synthetic construct
  misc_feature 1..33: note = Trabeculin-alpha (3748-3758)
  source 1..33: mol_type = other RNA
gaggccatcagcctgctcaactccgaaagatac

SEQ ID NO: 73039 - RNA, 30 nt, synthetic construct
  misc_feature 1..30: note = KN motif and ankyrin repeat domain-containing protein 1 (1144-1153)
  source 1..30: mol_type = other RNA
gaggccatcagccccgacgtgctgagatac

SEQ ID NO: 73040 - RNA, 39 nt, synthetic construct
  misc_feature 1..39: note = E3 ubiquitin-protein ligase Praja-1 (266-278)
  source 1..39: mol_type = other RNA
gaggccatcagctacgtggacccccagttcctgacctat

SEQ ID NO: 73041 - RNA, 27 nt, synthetic construct
  misc_feature 1..27: note = DNA replication licensing factor MCM5 (614-622)
  source 1..27: mol_type = other RNA
gaggccatcgtgagaattgctgaagca

SEQ ID NO: 73042 - RNA, 30 nt, synthetic construct
  misc_feature 1..30: note = Nucleoporin Nup43 (370-379)
  source 1..30: mol_type = other RNA
gaggccatctacgtgaccagacacctgttc

SEQ ID NO: 73043 - RNA, 33 nt, synthetic construct
  misc_feature 1..33: note = UDP-glucose 6-dehydrogenase (76-86)
  source 1..33: mol_type = other RNA
gaggccctgaacctccccgaagtggctagatac

SEQ ID NO: 73044 - RNA, 27 nt, synthetic construct
  misc_feature 1..27: note = Centromere protein F (1214-1222)
  source 1..27: mol_type = other RNA
gaggccatgctgagaaacaaggaactc

SEQ ID NO: 73045 - RNA, 27 nt, synthetic construct
  misc_feature 1..27: note = Heme-binding protein 1 (57-65)
  source 1..27: mol_type = other RNA
gaggccatgcccaaggtggctaaatac

SEQ ID NO: 73046 - RNA, 30 nt, synthetic construct; identical to SEQ ID NO: 48819
  misc_feature 1..30: note = Cytoskeleton-associated protein 5 (1575-1584)
  source 1..30: mol_type = other RNA

SEQ ID NO: 73047 - RNA, 27 nt, synthetic construct
  misc_feature 1..27: note = Pre-mRNA-processing-splicing factor 8 (1105-1113)
  source 1..27: mol_type = other RNA
gaggccagagacctgatccagaggtac

SEQ ID NO: 73048 - RNA, 39 nt, synthetic construct
  misc_feature 1..39: note = Syntenin-1 (34-46)
  source 1..39: mol_type = other RNA
gaggccagcgctcccatccctcacgacggcaacctgtac

SEQ ID NO: 73049 - RNA, 27 nt, synthetic construct
  misc_feature 1..27: note = Lysine-specific demethylase 7A (449-457)
  source 1..27: mol_type = other RNA
gaggccaccagcccctaccactccaga

SEQ ID NO: 73050 - RNA, 33 nt, synthetic construct; identical to SEQ ID NO: 48823
  misc_feature 1..33: note = TNF receptor-associated factor 5 (400-410)
  source 1..33: mol_type = other RNA

SEQ ID NO: 73051 - RNA, 36 nt, synthetic construct
  misc_feature 1..36: note = Mitochondrial-processing peptidase subunit alpha (283-294)
  source 1..36: mol_type = other RNA
gaggccgtggacatcgatagaagcgtcgctcagtac

SEQ ID NO: 73052 - RNA, 27 nt, synthetic construct
  misc_feature 1..27: note = Transcriptional enhancer factor TEF-3 (263-271)
  source 1..27: mol_type = other RNA
gaggccgtggacatcagacagatttac

SEQ ID NO: 73053 - RNA, 30 nt, synthetic construct
  misc_feature 1..30: note = LIX1-like protein (28-37)
  source 1..30: mol_type = other RNA
gaggccgtggaagctgtcgttagaagcttc

SEQ ID NO: 73054 - RNA, 30 nt, synthetic construct; identical to SEQ ID NO: 48827
  misc_feature 1..30: note = Integrin alpha-7 (432-441)
  source 1..30: mol_type = other RNA

SEQ ID NO: 73055 - RNA, 30 nt, synthetic construct
  misc_feature 1..30: note = Phosphatidylinositol 3-kinase regulatory subunit alpha (173-182)
  source 1..30: mol_type = other RNA
gaggccgtgggcaagaaactgcacgaatac

SEQ ID NO: 73056 - RNA, 30 nt, synthetic construct
  misc_feature 1..30: note = 26S protease regulatory subunit 7 (411-420)
  source 1..30: mol_type = other RNA
gaggccgtgaacaaggtcatcaaaagctac

SEQ ID NO: 73057 - RNA, 27 nt, synthetic construct
  misc_feature 1..27: note = Methyltransferase-like protein 13 (244-252)
  source 1..27: mol_type = other RNA
gaggccgtgcaggaaagacaacagtac

SEQ ID NO: 73058 - RNA, 27 nt, synthetic construct
  misc_feature 1..27: note = Renalase (186-194)
  source 1..27: mol_type = other RNA
gaggccgtgagctactcctctagatat

SEQ ID NO: 73059 - RNA, 30 nt, synthetic construct
  misc_feature 1..30: note = Poly (ADP-ribose) polymerase 4 (695-704)
  source 1..30: mol_type = other RNA
gaggccgtgacccagggccacggggcttac

SEQ ID NO: 73060 - RNA, 27 nt, synthetic construct
  misc_feature 1..27: note = Importin subunit alpha-1 (396-404)
  source 1..27: mol_type = other RNA
gaggccgtgtgggctgtcaccaactac

SEQ ID NO: 73061 - RNA, 30 nt, synthetic construct
  misc_feature 1..30: note = DNA replication licensing factor MCM4 (656-665)
  source 1..30: mol_type = other RNA
gaggcctacgacagaaggctggctcaccat

SEQ ID NO: 73062 - RNA, 27 nt, synthetic construct
  misc_feature 1..27: note = Trafficking protein particle complex subunit 12 (300-308)
  source 1..27: mol_type = other RNA
gaggcctaccacagcgtgatcaagtat

SEQ ID NO: 73063 - RNA, 30 nt, synthetic construct
  misc_feature 1..30: note = Leucine-rich PPR motif-containing protein, mitochondrial (1198-1207)
  source 1..30: mol_type = other RNA
gaggcctacaacagcctgatgaagtcctat

SEQ ID NO: 73064 - RNA, 27 nt, synthetic construct
  misc_feature 1..27: note = Protein mago nashi homolog 2 (5-13)
  source 1..27: mol_type = other RNA
gaggcctacgtgcacaagagcgtcatg

SEQ ID NO: 73065 - RNA, 27 nt, synthetic construct
  misc_feature 1..27: note = Coatomer subunit beta (79-87)
  source 1..27: mol_type = other RNA
gaggcctacgtgcacgtcaaccagtat

SEQ ID NO: 73066 - RNA, 33 nt, synthetic construct
  misc_feature 1..33: note = Sorting and assembly machinery component 50 homolog (365-375)
  source 1..33: mol_type = other RNA
gaggcctactgggctggcgggctgcacctctat

SEQ ID NO: 73067 - RNA, 27 nt, synthetic construct
  misc_feature 1..27: note = Superkiller viralicidic activity 2-like 2 (938-946)
  source 1..27: mol_type = other RNA
gagtgcgccaagagaatcgctaaagtg

SEQ ID NO: 73068 - RNA, 30 nt, synthetic construct
  misc_feature 1..30: note = Vimentin (180-189)
  source 1..30: mol_type = other RNA
gaggacatcatgagactgagggaaaagctc

SEQ ID NO: 73069 - RNA, 27 nt, synthetic construct
  misc_feature 1..27: note = U3 small nucleolar ribonucleoprotein protein IMP3 (43-51)
  source 1..27: mol_type = other RNA
gaggactacaccagatataaccagctg

SEQ ID NO: 73070 - RNA, 27 nt, synthetic construct
  misc_feature 1..27: note = Ataxin-10 (298-306)
  source 1..27: mol_type = other RNA
gaggaagccctggctaccatcagactc

SEQ ID NO: 73071 - RNA, 30 nt, synthetic construct
  misc_feature 1..30: note = Transmembrane protein 150C (126-135)
  source 1..30: mol_type = other RNA
gaggaaatccacaacgtgggcaccagcctg

SEQ ID NO: 73072 - RNA, 27 nt, synthetic construct
  misc_feature 1..27: note = Zinc finger FYVE domain-containing protein 16 (415-423)
  source 1..27: mol_type = other RNA
gaggaaatccagaacagcgtggtcctg

SEQ ID NO: 73073 - RNA, 27 nt, synthetic construct
  misc_feature 1..27: note = Cofilin-1 (141-149)
  source 1..27: mol_type = other RNA
gaggaagtgaaggacagatgcaccctg

SEQ ID NO: 73074 - RNA, 42 nt, synthetic construct; identical to SEQ ID NO: 48847
  misc_feature 1..42: note = Phosphoglycerate kinase 1 (404-417)
  source 1..42: mol_type = other RNA

SEQ ID NO: 73075 - RNA, 27 nt, synthetic construct
  misc_feature 1..27: note = NADH dehydrogenase (ubiquinone) 1 alpha subcomplex subunit 11 (51-59)
  source 1..27: mol_type = other RNA
gagggcgtggccaaggtcgggcagtac

SEQ ID NO: 73076 - RNA, 27 nt, synthetic construct
  misc_feature 1..27: note = (Pyruvate dehydrogenase (acetyl-transferring)) kinase isozyme 4, mitochondrial (229-237)
  source 1..27: mol_type = other RNA
gagcaccaggaaaaccaacccagcctg

SEQ ID NO: 73077 - RNA, 30 nt, synthetic construct
  misc_feature 1..30: note = Intraflagellar transport protein 172 homolog (6-15)
  source 1..30: mol_type = other RNA
gagatcgccgaccaggtgagcagagaatac

SEQ ID NO: 73078 - RNA, 27 nt, synthetic construct
  misc_feature 1..27: note = Alpha- and gamma-adaptin-binding protein p34 (72-80)
  source 1..27: mol_type = other RNA
gagatcgccgaaagcgtgcaggctttc

SEQ ID NO: 73079 - RNA, 27 nt, synthetic construct
  misc_feature 1..27: note = Cleavage and polyadenylation specificity factor subunit 3 (29-37)
  source 1..27: mol_type = other RNA
gagatcgccggcgtgaagctgctctac

SEQ ID NO: 73080 - RNA, 30 nt, synthetic construct
  misc_feature 1..30: note = Carbohydrate sulfotransferase 10 (216-225)
  source 1..30: mol_type = other RNA
gagatcgcccccggcattataagaaagtac

SEQ ID NO: 73081 - RNA, 30 nt, synthetic construct
  misc_feature 1..30: note = Fatty acid synthase (760-769)
  source 1..30: mol_type = other RNA
gagatcgccccccacgctctgctccaggca

SEQ ID NO: 73082 - RNA, 30 nt, synthetic construct
  misc_feature 1..30: note = Cullin-7 (1259-1268)
  source 1..30: mol_type = other RNA
gagatcgccaccacattcgaacactactat

SEQ ID NO: 73083 - RNA, 30 nt, synthetic construct
  misc_feature 1..30: note = Exportin-2 (752-761)
  source 1..30: mol_type = other RNA
gagatcttcgacggcattcagcccaagatg

SEQ ID NO: 73084 - RNA, 33 nt, synthetic construct
  misc_feature 1..33: note = Exportin-2 (752-762)
  source 1..33: mol_type = other RNA
gagatcttcgacggcattcagcccaagatgttt

SEQ ID NO: 73085 - RNA, 27 nt, synthetic construct
  misc_feature 1..27: note = Utrophin (1655-1663)
  source 1..27: mol_type = other RNA
gagatcttcgacggcaacgtggcccac

SEQ ID NO: 73086 - RNA, 27 nt, synthetic construct
  misc_feature 1..27: note = Cold shock domain-containing protein E1 (177-185)
  source 1..27: mol_type = other RNA
gagatcttctttcactacagcgaattc

SEQ ID NO: 73087 - RNA, 33 nt, synthetic construct
  misc_feature 1..33: note = Neuron navigator 2 (2237-2247)
  source 1..33: mol_type = other RNA
gagatcttcaacggcctgctcaattgcaagtac

SEQ ID NO: 73088 - RNA, 30 nt, synthetic construct
  misc_feature 1..30: note = F-box only protein 25 (53-62)
  source 1..30: mol_type = other RNA
gagatcttcaacaatgaagagcacgaatac

SEQ ID NO: 73089 - RNA, 30 nt, synthetic construct
  misc_feature 1..30: note = Ubiquitin-protein ligase E3A (558-567)
  source 1..30: mol_type = other RNA
gagatcttcaaccccgacattggcatgttt

SEQ ID NO: 73090 - RNA, 30 nt, synthetic construct
  misc_feature 1..30: note = Exportin-4 (988-997)
  source 1..30: mol_type = other RNA
gagatcttccccgaaaagattcctcagctg

SEQ ID NO: 73091 - RNA, 27 nt, synthetic construct
  misc_feature 1..27: note = Interferon-induced GTP-binding protein Mx1 (576-584)
  source 1..27: mol_type = other RNA
gagatcttccagcacctgatggcctac

SEQ ID NO: 73092 - RNA, 27 nt, synthetic construct
  misc_feature 1..27: note = Zinc finger CCCH-type antiviral protein 1 (57-65)
  source 1..27: mol_type = other RNA
gagatccaccatctgcaccccgaatac

SEQ ID NO: 73093 - RNA, 39 nt, synthetic construct
  misc_feature 1..39: note = Nuclear pore complex protein Nup205 (794-806)
  source 1..39: mol_type = other RNA
gagatcattgcctacaagccccctggcttcagcctgatg

SEQ ID NO: 73094 - RNA, 30 nt, synthetic construct
  misc_feature 1..30: note = Caseinolytic peptidase B protein homolog (651-660)
  source 1..30: mol_type = other RNA
gagatcattgacaaggatagcaaaaccaga

SEQ ID NO: 73095 - RNA, 30 nt, synthetic construct
  misc_feature 1..30: note = Mitogen-activated protein kinase kinase kinase 6 (286-295)
  source 1..30: mol_type = other RNA
gagatcattgaccagggccccagagggtac

SEQ ID NO: 73096 - RNA, 27 nt, synthetic construct
  misc_feature 1..27: note = Leucine-rich repeat and coiled-coil domain-containing protein 1 (237-245)
  source 1..27: mol_type = other RNA
gagatcattgacagaatgcccgtgata

SEQ ID NO: 73097 - RNA, 30 nt, synthetic construct
  misc_feature 1..30: note = Brefeldin A-inhibited guanine nucleotide-exchange protein 2 (645-654)
  source 1..30: mol_type = other RNA
gagatcattgaacacggcatagagctgttc

SEQ ID NO: 73098 - RNA, 27 nt, synthetic construct
  misc_feature 1..27: note = Nuclear envelope integral membrane protein 1 (143-151)
  source 1..27: mol_type = other RNA
gagatcattgaaaaggacaccaaatac

SEQ ID NO: 73099 - RNA, 27 nt, synthetic construct
  misc_feature 1..27: note = Complex I assembly factor TMEM126B, mitochondrial (25-33)
  source 1..27: mol_type = other RNA
gagatcattgaaaagaacttcgactac

SEQ ID NO: 73100 - RNA, 27 nt, synthetic construct
  misc_feature 1..27: note = MAGUK p55 subfamily member 5 (623-631)
  source 1..27: mol_type = other RNA
gagatcattgaaaagaccagagagatg

SEQ ID NO: 73101 - RNA, 30 nt, synthetic construct
  misc_feature 1..30: note = Nucleolar pre-ribosomal-associated protein 1 (606-615)
  source 1..30: mol_type = other RNA
gagatcattggcggggaaagaagcgtgttc

SEQ ID NO: 73102 - RNA, 33 nt, synthetic construct
  misc_feature 1..33: note = Ribosome-releasing factor 2, mitochondrial (541-551)
  source 1..33: mol_type = other RNA
gagatcattcacgacagaataaagagggaatac

SEQ ID NO: 73103 - RNA, 36 nt, synthetic construct
  misc_feature 1..36: note = ATP-dependent RNA helicase DDX3X (189-200)
  source 1..36: mol_type = other RNA
gagatcattatgggcaacatagaactgaccagatac

SEQ ID NO: 73104 - RNA, 30 nt, synthetic construct
  misc_feature 1..30: note = Bifunctional 3'-phosphoadenosine 5'-phosphosulfate synthase 2 (546-555)
  source 1..30: mol_type = other RNA
gagatcattcccttcagagtggccgcttac

SEQ ID NO: 73105 - RNA, 30 nt, synthetic construct
  misc_feature 1..30: note = Zinc finger protein 322 (34-43)
  source 1..30: mol_type = other RNA
gagatcattcagatagacggccacatctac

SEQ ID NO: 73106 - RNA, 33 nt, synthetic construct
  misc_feature 1..33: note = Tuftelin-interacting protein 11 (334-344)
  source 1..33: mol_type = other RNA
gagatcattcagaacgacagacaactgcagtac

SEQ ID NO: 73107 - RNA, 27 nt, synthetic construct
  misc_feature 1..27: note = Polyadenylate-binding protein-interacting protein 1 (232-240)
  source 1..27: mol_type = other RNA
gagatcattcagagaatagaaaacgtg

SEQ ID NO: 73108 - RNA, 27 nt, synthetic construct
  misc_feature 1..27: note = AF4/FMR2 family member 3 (304-312)
  source 1..27: mol_type = other RNA
gagatcattagagaaatgacctggctg

SEQ ID NO: 73109 - RNA, 36 nt, synthetic construct
  misc_feature 1..36: note = Centrosomal protein of 95 kDa (16-27)
  source 1..36: mol_type = other RNA
gagatcattagactgggcgacaccgcccacacattc

SEQ ID NO: 73110 - RNA, 33 nt, synthetic construct
  misc_feature 1..33: note = Plectin (3616-3626)
  source 1..33: mol_type = other RNA
gagatcattagacagcaaggcctggccagctac

SEQ ID NO: 73111 - RNA, 30 nt, synthetic construct
  misc_feature 1..30: note = Shugoshin-like 2 (621-630)
  source 1..30: mol_type = other RNA
gagatcattagcggcatgaaccacatgtac

SEQ ID NO: 73112 - RNA, 27 nt, synthetic construct
  misc_feature 1..27: note = Serine/threonine-protein phosphatase 2A 55 kDa regulatory subunit B alpha isoform (283-291)
  source 1..27: mol_type = other RNA
gagatcattagctccatatctgacgtg

SEQ ID NO: 73113 - RNA, 30 nt, synthetic construct
  misc_feature 1..30: note = Mitochondrial-processing peptidase subunit alpha (407-416)
  source 1..30: mol_type = other RNA
gagatcattaccaaggaattcatactgatg

SEQ ID NO: 73114 - RNA, 30 nt, synthetic construct
  misc_feature 1..30: note = NEDD4-binding protein 1 (737-746)
  source 1..30: mol_type = other RNA
gagatcattaccaagagactgctccagtac

SEQ ID NO: 73115 - RNA, 27 nt, synthetic construct
  misc_feature 1..27: note = Arf-GAP with Rho-GAP domain, ANK repeat and PH domain-containing protein 2 (579-587)
  source 1..27: mol_type = other RNA
gagatcattaccccctacagaagcttc

SEQ ID NO: 73116 - RNA, 27 nt, synthetic construct
  misc_feature 1..27: note = 40S ribosomal protein S16 (106-114)
  source 1..27: mol_type = other RNA
gagatcaaggacattctgatacagtac

SEQ ID NO: 73117 - RNA, 27 nt, synthetic construct
  misc_feature 1..27: note = Peroxisomal NADH pyrophosphatase NUDT12 (204-212)
  source 1..27: mol_type = other RNA
gagatcaaggacaaactgctcaactac

SEQ ID NO: 73118 - RNA, 27 nt, synthetic construct
  misc_feature 1..27: note = Double-stranded RNA-specific adenosine deaminase (298-306)
  source 1..27: mol_type = other RNA
gagatcaaggaaaaaatttgcgactac

SEQ ID NO: 73119 - RNA, 27 nt, synthetic construct
  misc_feature 1..27: note = Ras association domain-containing protein 3 (53-61)
  source 1..27: mol_type = other RNA
gagatcaaggaaaaagtgcacaagtac

SEQ ID NO: 73120 - RNA, 27 nt, synthetic construct
  misc_feature 1..27: note = Hsc70-interacting protein (246-254)
  source 1..27: mol_type = other RNA
gagatcaaggaaagaattgagagggtg

SEQ ID NO: 73121 - RNA, 27 nt, synthetic construct
  misc_feature 1..27: note = Mixed lineage kinase domain-like protein (171-179)
  source 1..27: mol_type = other RNA
gagatcaaggaaaccctgagacagtac

SEQ ID NO: 73122 - RNA, 30 nt, synthetic construct
  misc_feature 1..30: note = Radixin (207-216)
  source 1..30: mol_type = other RNA
gagatcaagaacaaaaagggcaccgaactg

SEQ ID NO: 73123 - RNA, 30 nt, synthetic construct
  misc_feature 1..30: note = 40S ribosomal protein S15 (106-115)
  source 1..30: mol_type = other RNA
gagatcaagcccgaaatgattggccactac

SEQ ID NO: 73124 - RNA, 27 nt, synthetic construct
  misc_feature 1..27: note = G1/S-specific cyclin-D3 (51-59)
  source 1..27: mol_type = other RNA
gagatcaagccccacatgagaaaaatg

SEQ ID NO: 73125 - RNA, 27 nt, synthetic construct
  misc_feature 1..27: note = Coiled-coil domain-containing protein 93 (285-293)
  source 1..27: mol_type = other RNA
gagatcaagcagattgtgagcgaatac

SEQ ID NO: 73126 - RNA, 27 nt, synthetic construct
  misc_feature 1..27: note = Ras association domain-containing protein 5 (16-24)
  source 1..27: mol_type = other RNA
gagatcaagcagaaaattgacagctac

SEQ ID NO: 73127 - RNA, 30 nt, synthetic construct
  misc_feature 1..30: note = Heterogeneous nuclear ribonucleoprotein Q (352-361)
  source 1..30: mol_type = other RNA
gagatcctggaaaaggccttcagccagttt

SEQ ID NO: 73128 - RNA, 30 nt, synthetic construct
  misc_feature 1..30: note = Heterogeneous nuclear ribonucleoprotein R (257-266)
  source 1..30: mol_type = other RNA
gagatcctggaaaagagcttctccgagttt

SEQ ID NO: 73129 - RNA, 36 nt, synthetic construct
  misc_feature 1..36: note = MRG/MORF4L-binding protein (94-105)
  source 1..36: mol_type = other RNA
gagatcctgcccttccctaacccagaaagaaatttt

SEQ ID NO: 73130 - RNA, 30 nt, synthetic construct
  misc_feature 1..30: note = Vacuolar protein sorting-associated protein 13A (700-709)
  source 1..30: mol_type = other RNA
gagatcatggacagagcctacgatagcttc

SEQ ID NO: 73131 - RNA, 30 nt, synthetic construct
  misc_feature 1..30: note = Structural maintenance of chromosomes protein 6 (921-930)
  source 1..30: mol_type = other RNA
gagatcatggaacacagattcaagacctac

SEQ ID NO: 73132 - RNA, 33 nt, synthetic construct
  misc_feature 1..33: note = Tyrosine-protein phosphatase non-receptor type 3 (704-714)
  source 1..33: mol_type = other RNA
gagatccccgccgctaacctggtgaataagtac

SEQ ID NO: 73133 - RNA, 36 nt, synthetic construct
  misc_feature 1..36: note = Transmembrane emp24 domain-containing protein 4 (45-56)
  source 1..36: mol_type = other RNA
gagatccccgacgaaaccatggtgattggcaactac

SEQ ID NO: 73134 - RNA, 30 nt, synthetic construct
  misc_feature 1..30: note = Prostacyclin synthase (472-481)
  source 1..30: mol_type = other RNA
gagatccccgaattcgacctgagcagatac

SEQ ID NO: 73135 - RNA, 27 nt, synthetic construct
  misc_feature 1..27: note = 5,6-dihydroxyindole-2-carboxylic acid oxidase (465-473)
  source 1..27: mol_type = other RNA
gagatccagtggcccagcagagaattc

SEQ ID NO: 73136 - RNA, 33 nt, synthetic construct
  misc_feature 1..33: note = Fibronectin type III domain-containing protein 3B (823-833)
  source 1..33: mol_type = other RNA
gagatcagagacctgctccccgccgctcagtac

SEQ ID NO: 73137 - RNA, 27 nt, synthetic construct
  misc_feature 1..27: note = Elongation factor Tu, mitochondrial (198-206)
  source 1..27: mol_type = other RNA
gagatcagagaactgctcaccgagttc

SEQ ID NO: 73138 - RNA, 30 nt, synthetic construct
  misc_feature 1..30: note = Protein FAM46D (230-239)
  source 1..30: mol_type = other RNA
gagatcagaggcgggggactgctcaagtac

SEQ ID NO: 73139 - RNA, 30 nt, synthetic construct
  misc_feature 1..30: note = Transcriptional repressor NF-X1 (64-73)
  source 1..30: mol_type = other RNA
gagatcagcgccgtgcaccagcattcctac

SEQ ID NO: 73140 - RNA, 27 nt, synthetic construct
  misc_feature 1..27: note = DNA replication licensing factor MCM3 (496-504)
  source 1..27: mol_type = other RNA
gagatcagcgaccacgtgctgagaatg

SEQ ID NO: 73141 - RNA, 27 nt, synthetic construct
  misc_feature 1..27: note = Phospholipase D2 (660-668)
  source 1..27: mol_type = other RNA
gagatcgtggacagaattctgaaggcc

SEQ ID NO: 73142 - RNA, 27 nt, synthetic construct
  misc_feature 1..27: note = DNA-directed RNA polymerase III subunit RPC3 (19-27)
  source 1..27: mol_type = other RNA
gagatcgtggaaaagattggcgtccac

SEQ ID NO: 73143 - RNA, 30 nt, synthetic construct
  misc_feature 1..30: note = BRCA1-associated protein (136-145)
  source 1..30: mol_type = other RNA
gagatcgtgcacggcattatgcatctgtac

SEQ ID NO: 73144 - RNA, 27 nt, synthetic construct
  misc_feature 1..27: note = DNA mismatch repair protein Msh2 (580-588)
  source 1..27: mol_type = other RNA
gagatcgtgaacattagctccggctac

SEQ ID NO: 73145 - RNA, 27 nt, synthetic construct
  misc_feature 1..27: note = DNA-directed RNA polymerase III subunit RPC3 (265-273)
  source 1..27: mol_type = other RNA
gagatcgtgagaaccatgctgaggatg

SEQ ID NO: 73146 - RNA, 30 nt, synthetic construct
  misc_feature 1..30: note = Nuclear pore complex protein Nup160 (917-926)
  source 1..30: mol_type = other RNA
gagatcgtgagcacccccagactgcagtac

SEQ ID NO: 73147 - RNA, 30 nt, synthetic construct
  misc_feature 1..30: note = Alpha-soluble NSF attachment protein (43-52)
  source 1..30: mol_type = other RNA
gagatctacgccagagctgcaaacatgttc

SEQ ID NO: 73148 - RNA, 30 nt, synthetic construct
  misc_feature 1..30: note = Isocitrate dehydrogenase (NADP) cytoplasmic (130-139)
  source 1..30: mol_type = other RNA
gagatctacgacaagcagtataaaagccaa

SEQ ID NO: 73149 - RNA, 30 nt, synthetic construct
  misc_feature 1..30: note = Oligodendrocyte transcription factor 2 (209-218)
  source 1..30: mol_type = other RNA
gagatctacggcgggcaccatgccggattc

SEQ ID NO: 73150 - RNA, 39 nt, synthetic construct
  misc_feature 1..39: note = Splicing factor 3B subunit 1 (42-54)
  source 1..39: mol_type = other RNA
gagatctacggcgggagcgactccagattcgccggatat

SEQ ID NO: 73151 - RNA, 27 nt, synthetic construct
  misc_feature 1..27: note = Plexin-C1 (1523-1531)
  source 1..27: mol_type = other RNA
gagatctacaagtatattgtgaaatac

SEQ ID NO: 73152 - RNA, 30 nt, synthetic construct; identical to SEQ ID NO: 48925
  misc_feature 1..30: note = Kinesin-like protein KIF2C (403-412)
  source 1..30: mol_type = other RNA

SEQ ID NO: 73153 - RNA, 30 nt, synthetic construct
  misc_feature 1..30: note = Cyclin E variant ex7del (18-27)
  source 1..30: mol_type = other RNA
gagatctacccccctaagctgcaccagttc

SEQ ID NO: 73154 - RNA, 27 nt, synthetic construct
  misc_feature 1..27: note = Coatomer subunit beta' (352-360)
  source 1..27: mol_type = other RNA
gagatctacccccagaccattcaacac

SEQ ID NO: 73155 - RNA, 27 nt, synthetic construct
  misc_feature 1..27: note = Replication factor C subunit 2 (159-167)
  source 1..27: mol_type = other RNA
gagatctacagcaagaccacaagattc

SEQ ID NO: 73156 - RNA, 27 nt, synthetic construct
  misc_feature 1..27: note = Alpha-soluble NSF attachment protein (109-117)
  source 1..27: mol_type = other RNA
gagatctacaccgacatgggcagattc

SEQ ID NO: 73157 - RNA, 27 nt, synthetic construct
  misc_feature 1..27: note = FYVE and coiled-coil domain-containing protein 1 (1096-1104)
  source 1..27: mol_type = other RNA
gagaaggccaccacaaaaatccaggaa

SEQ ID NO: 73158 - RNA, 27 nt, synthetic construct
  misc_feature 1..27: note = Tripartite motif-containing protein 42 (167-175)
  source 1..27: mol_type = other RNA
gagaagtgcctgagacagctccaaaaa

SEQ ID NO: 73159 - RNA, 30 nt, synthetic construct
  misc_feature 1..30: note = Protein Mis18-beta (196-205)
  source 1..30: mol_type = other RNA
gagaagatcgccgaactgaaagagaagatt

SEQ ID NO: 73160 - RNA, 30 nt, synthetic construct
  misc_feature 1..30: note = E3 ubiquitin-protein ligase TRIM13 (190-199)
  source 1..30: mol_type = other RNA
gagaagctgcagcacaccctcgaccaaaaa

SEQ ID NO: 73161 - RNA, 27 nt, synthetic construct
  misc_feature 1..27: note = AP-2 complex subunit alpha-1 (36-44)
  source 1..27: mol_type = other RNA
gagctggccaacatcagaagcaagttc

SEQ ID NO: 73162 - RNA, 33 nt, synthetic construct
  misc_feature 1..33: note = L-dopachrome tautomerase (109-119)
  source 1..33: mol_type = other RNA
gagctggcccccatcggccacaacagaatgtac

SEQ ID NO: 73163 - RNA, 27 nt, synthetic construct
  misc_feature 1..27: note = Prelamin-A/C (122-130)
  source 1..27: mol_type = other RNA
gagctggacttccagaagaacatctac

SEQ ID NO: 73164 - RNA, 33 nt, synthetic construct
  misc_feature 1..33: note = Unconventional myosin-Va (1068-1078)
  source 1..33: mol_type = other RNA
gagctggacctcaacgatgaaagacttaggtac

SEQ ID NO: 73165 - RNA, 30 nt, synthetic construct
  misc_feature 1..30: note = Centrosomal protein of 112 kDa (922-931)
  source 1..30: mol_type = other RNA
gagctggaagacaccatcagctccctcaag

SEQ ID NO: 73166 - RNA, 30 nt, synthetic construct
  misc_feature 1..30: note = Coatomer subunit epsilon (18-27)
  source 1..30: mol_type = other RNA
gagctgttcgacgtgaagaacgccttttac

SEQ ID NO: 73167 - RNA, 30 nt, synthetic construct
  misc_feature 1..30: note = Histone H2A deubiquitinase MYSM1 (25-34)
  source 1..30: mol_type = other RNA
gagctgttcgaacagggcctcgccaagttt

SEQ ID NO: 73168 - RNA, 30 nt, synthetic construct
  misc_feature 1..30: note = General transcription factor II-I (326-335)
  source 1..30: mol_type = other RNA
gagctgttcgaaagaaagtacgcccaggct

SEQ ID NO: 73169 - RNA, 30 nt, synthetic construct
  misc_feature 1..30: note = Vacuolar protein sorting-associated protein 13A (890-899)
  source 1..30: mol_type = other RNA
gagctgttccacaaggacatcgaagccttt

SEQ ID NO: 73170 - RNA, 36 nt, synthetic construct
  misc_feature 1..36: note = THO complex subunit 3 (40-51)
  source 1..36: mol_type = other RNA
gagctgttcagaggccacagcaagaccagggaattt

SEQ ID NO: 73171 - RNA, 27 nt, synthetic construct
  misc_feature 1..27: note = Integrator complex subunit 8 (283-291)
  source 1..27: mol_type = other RNA
gagctgatcgccgaaattggcagcctc

SEQ ID NO: 73172 - RNA, 33 nt, synthetic construct
  misc_feature 1..33: note = Influenza virus NS1A-binding protein (345-355)
  source 1..33: mol_type = other RNA
gagctgatcgaaaagcccatgagccctatgcag

SEQ ID NO: 73173 - RNA, 33 nt, synthetic construct
  misc_feature 1..33: note = Switch-associated protein 70 (177-187)
  source 1..33: mol_type = other RNA
gagctgatcgaactcattggcaacgggcagttc

SEQ ID NO: 73174 - RNA, 27 nt, synthetic construct
  misc_feature 1..27: note = Uncharacterized protein C20orf96 (128-136)
  source 1..27: mol_type = other RNA
gagctgatcgaaaccattcaggagatg

SEQ ID NO: 73175 - RNA, 33 nt, synthetic construct
  misc_feature 1..33: note = Derlin-1 (173-183)
  source 1..33: mol_type = other RNA
gagctgatcggcaacctcgtggggcacctttac

SEQ ID NO: 73176 - RNA, 33 nt, synthetic construct
  misc_feature 1..33: note = Endoplasmin (169-179)
  source 1..33: mol_type = other RNA
gagctgatcggccagttcggggtgggattttac

SEQ ID NO: 73177 - RNA, 30 nt, synthetic construct
  misc_feature 1..30: note = High affinity cationic amino acid transporter 1 (138-147)
  source 1..30: mol_type = other RNA
gagctgatcggcagacccattggggaattc

SEQ ID NO: 73178 - RNA, 27 nt, synthetic construct
  misc_feature 1..27: note = F-BAR domain only protein 2 (94-102)
  source 1..27: mol_type = other RNA
gagctgatcaaggaagtgcagaaatac

SEQ ID NO: 73179 - RNA, 27 nt, synthetic construct
  misc_feature 1..27: note = Regulatory-associated protein of mTOR (80-88)
  source 1..27: mol_type = other RNA
gagctgatcaacaatattaagtactat

SEQ ID NO: 73180 - RNA, 27 nt, synthetic construct
  misc_feature 1..27: note = Heat shock protein HSP 90-alpha (498-506)
  source 1..27: mol_type = other RNA
gagctgatccccgaatacctcaacttc

SEQ ID NO: 73181 - RNA, 24 nt, synthetic construct
  misc_feature 1..24: note = ATP-dependent DNA helicase Q1 (34-41)
  source 1..24: mol_type = other RNA
gagctgatccagaagaaaaaggtg

SEQ ID NO: 73182 - RNA, 27 nt, synthetic construct
  misc_feature 1..27: note = LisH domain-containing protein FOPNL (55-63)
  source 1..27: mol_type = other RNA
gagctgatcagagaatacctcgagttc

SEQ ID NO: 73183 - RNA, 27 nt, synthetic construct
  misc_feature 1..27: note = Condensin complex subunit 1 (994-1002)
  source 1..27: mol_type = other RNA
gagctgatcagaggcatttgcgaaatg

SEQ ID NO: 73184 - RNA, 27 nt, synthetic construct
  misc_feature 1..27: note = Inositol-tetrakisphosphate 1-kinase (111-119)
  source 1..27: mol_type = other RNA
gagctgatcagaaagattgaagcctac

SEQ ID NO: 73185 - RNA, 27 nt, synthetic construct
  misc_feature 1..27: note = Probable ubiquitin carboxyl-terminal hydrolase FAF-X (1964-1972)
  source 1..27: mol_type = other RNA
gagctgatcagatacattagcgaactc

SEQ ID NO: 73186 - RNA, 27 nt, synthetic construct
  misc_feature 1..27: note = Cyclin-dependent kinase 17 (448-456)
  source 1..27: mol_type = other RNA
gagctgatcaccaagttcctccagtac

SEQ ID NO: 73187 - RNA, 33 nt, synthetic construct
  misc_feature 1..33: note = AP-1 complex subunit sigma-1A (76-86)
  source 1..33: mol_type = other RNA
gagctgatcaccctcgaacttattcacagatac

SEQ ID NO: 73188 - RNA, 27 nt, synthetic construct
  misc_feature 1..27: note = Ras GTPase-activating protein-binding protein 1 (355-363)
  source 1..27: mol_type = other RNA
gagctgaaggacttctttcagagctac

SEQ ID NO: 73189 - RNA, 27 nt, synthetic construct
  misc_feature 1..27: note = Polypeptide N-acetylgalactosaminyltransferase 18 (200-208)
  source 1..27: mol_type = other RNA
gagctgaaggaaaaactcaccgagtac

SEQ ID NO: 73190 - RNA, 27 nt, synthetic construct
  misc_feature 1..27: note = Zinc finger CCCH domain-containing protein 13 (909-917)
  source 1..27: mol_type = other RNA
gagctgaaggaaaaagtgagctccgtc

SEQ ID NO: 73191 - RNA, 27 nt, synthetic construct
  misc_feature 1..27: note = Ankyrin repeat and LEM domain-containing protein 2 (463-471)
  source 1..27: mol_type = other RNA
gagctgaaggaaagaatcagggagtac

SEQ ID NO: 73192 - RNA, 27 nt, synthetic construct
  misc_feature 1..27: note = Histone-lysine N-methyltransferase SUV420H1 (136-144)
  source 1..27: mol_type = other RNA
gagctgaaggaagtgatcgagagattc

SEQ ID NO: 73193 - RNA, 27 nt, synthetic construct
  misc_feature 1..27: note = Glyceraldehyde-3-phosphate dehydrogenase, testis-specific (295-303)
  source 1..27: mol_type = other RNA
gagctgaagggcaaactcaccgggatg

SEQ ID NO: 73194 - RNA, 27 nt, synthetic construct
  misc_feature 1..27: note = Periphilin-1 (355-363)
  source 1..27: mol_type = other RNA
gagctgaagcacttcatcgccgaatac

SEQ ID NO: 73195 - RNA, 27 nt, synthetic construct
  misc_feature 1..27: note = Probable ATP-dependent RNA helicase DDX46 (184-192)
  source 1..27: mol_type = other RNA
gagctgaagaaagaaatcgaggaaatg

SEQ ID NO: 73196 - RNA, 27 nt, synthetic construct
  misc_feature 1..27: note = Serine/threonine-protein kinase Nek2 (90-98)
  source 1..27: mol_type = other RNA
gagctgaagctcaaagaaatccagctt

SEQ ID NO: 73197 - RNA, 27 nt, synthetic construct
  misc_feature 1..27: note = Golgin subfamily A member 4 (1075-1083)
  source 1..27: mol_type = other RNA
gagctgaagcagaaaatcctccttttc

SEQ ID NO: 73198 - RNA, 27 nt, synthetic construct
  misc_feature 1..27: note = CAP-Gly domain-containing linker protein 1 (612-620)
  source 1..27: mol_type = other RNA
gagctgaagacccagatcgaaaaaatg

SEQ ID NO: 73199 - RNA, 36 nt, synthetic construct
  misc_feature 1..36: note = Stromal cell-derived factor 2 (200-211)
  source 1..36: mol_type = other RNA
gagctgctcaaggccgaagctcaccatgcagagctt

SEQ ID NO: 73200 - RNA, 24 nt, synthetic construct
  misc_feature 1..24: note = Heat shock protein 105 kDa (312-319)
  source 1..24: mol_type = other RNA
gagctgctccagaagatcgaagtg

SEQ ID NO: 73201 - RNA, 33 nt, synthetic construct
  misc_feature 1..33: note = 26S proteasome non-ATPase regulatory subunit 6 (212-222)
  source 1..33: mol_type = other RNA
gagctgatggactacaagaccttcgtgacatat

SEQ ID NO: 73202 - RNA, 30 nt, synthetic construct; identical to SEQ ID NO: 48975
  misc_feature 1..30: note = Centrosomal protein CEP57L1 (4-13)
  source 1..30: mol_type = other RNA

SEQ ID NO: 73203 - RNA, 30 nt, synthetic construct
  misc_feature 1..30: note = ATP-dependent RNA helicase DDX18 (213-222)
  source 1..30: mol_type = other RNA
gagctgatgacccaccatgtgcacacatac

SEQ ID NO: 73204 - RNA, 30 nt, synthetic construct
  misc_feature 1..30: note = Puromycin-sensitive aminopeptidase (151-160)
  source 1..30: mol_type = other RNA
gagctgaacgacaagatgaaaggcttctac

SEQ ID NO: 73205 - RNA, 27 nt, synthetic construct
  misc_feature 1..27: note = Vimentin (109-117)
  source 1..27: mol_type = other RNA
gagctgaacgacagattcgccaattac

SEQ ID NO: 73206 - RNA, 27 nt, synthetic construct
  misc_feature 1..27: note = Serine/threonine-protein kinase Nek2 (28-36)
  source 1..27: mol_type = other RNA
gagctgaacgaaatcattaccagaatg

SEQ ID NO: 73207 - RNA, 27 nt, synthetic construct
  misc_feature 1..27: note = Semaphorin-4C (385-393)
  source 1..27: mol_type = other RNA
gagctgcccgacaacatcctcaatttc

SEQ ID NO: 73208 - RNA, 27 nt, synthetic construct
  misc_feature 1..27: note = RNA polymerase II elongation factor ELL2 (524-532)
  source 1..27: mol_type = other RNA
gagctgcccgactacctcatcaagtat

SEQ ID NO: 73209 - RNA, 24 nt, synthetic construct
  misc_feature 1..24: note = Zinc finger CCCH domain-containing protein 4 (417-424)
  source 1..24: mol_type = other RNA
gagctgcccaagaaaagagaactc

SEQ ID NO: 73210 - RNA, 27 nt, synthetic construct
  misc_feature 1..27: note = Nuclear pore complex protein Nup205 (523-531)
  source 1..27: mol_type = other RNA
gagctgcagggccacatcgggagattc

SEQ ID NO: 73211 - RNA, 30 nt, synthetic construct
  misc_feature 1..30: note = Alpha-enolase (15-24)
  source 1..30: mol_type = other RNA
gagctgagagacaacgataagaccaggtac

SEQ ID NO: 73212 - RNA, 27 nt, synthetic construct
  misc_feature 1..27: note = TAR DNA-binding protein 43 (206-214)
  source 1..27: mol_type = other RNA
gagctgagagaattctttagccagtac

SEQ ID NO: 73213 - RNA, 27 nt, synthetic construct
  misc_feature 1..27: note = Serine/threonine-protein kinase TAO3 (456-464)
  source 1..27: mol_type = other RNA
gagctgagagaacagatgagcggctac

SEQ ID NO: 73214 - RNA, 27 nt, synthetic construct
  misc_feature 1..27: note = Rho guanine nucleotide exchange factor 2 (258-266)
  source 1..27: mol_type = other RNA
gagctgagcgacatccacaccagattc

SEQ ID NO: 73215 - RNA, 27 nt, synthetic construct
  misc_feature 1..27: note = dCTP pyrophosphatase 1 (95-103)
  source 1..27: mol_type = other RNA
gagctgagcgacgtgctcatctacctt

SEQ ID NO: 73216 - RNA, 27 nt, synthetic construct
  misc_feature 1..27: note = Protein phosphatase 1 regulatory subunit 12A (956-964)
  source 1..27: mol_type = other RNA
gagctgaccgacctcaagcttcagctg

SEQ ID NO: 73217 - RNA, 33 nt, synthetic construct
  misc_feature 1..33: note = Clustered mitochondria protein homolog (607-617)
  source 1..33: mol_type = other RNA
gagctggtggacgccttcgtcgaacacagatac

SEQ ID NO: 73218 - RNA, 27 nt, synthetic construct
  misc_feature 1..27: note = Splicing factor 3B subunit 2 (26-34)
  source 1..27: mol_type = other RNA
gagctggtggaaagactccagagctac

SEQ ID NO: 73219 - RNA, 36 nt, synthetic construct; identical to SEQ ID NO: 48992
  misc_feature 1..36: note = F-box only protein 34 (410-421)
  source 1..36: mol_type = other RNA

SEQ ID NO: 73220 - RNA, 27 nt, synthetic construct
  misc_feature 1..27: note = Inositol-tetrakisphosphate 1-kinase (76-84)
  source 1..27: mol_type = other RNA
gagctggtgcacagattccaggaatac

SEQ ID NO: 73221 - RNA, 27 nt, synthetic construct
  misc_feature 1..27: note = Protein DEK (174-182)
  source 1..27: mol_type = other RNA
gagctggtgaagagaatcctcaacttc

SEQ ID NO: 73222 - RNA, 30 nt, synthetic construct
  misc_feature 1..30: note = Sorting nexin-4 (344-353)
  source 1..30: mol_type = other RNA
gagctggtgaccggcacagtcagaactttc

SEQ ID NO: 73223 - RNA, 27 nt, synthetic construct
  misc_feature 1..27: note = DNA replication complex GINS protein PSF2 (13-21)
  source 1..27: mol_type = other RNA
gagctggtgaccatcattcccaacttc

SEQ ID NO: 73224 - RNA, 30 nt, synthetic construct
  misc_feature 1..30: note = U3 small nucleolar RNA-associated protein 15 homolog (362-371)
  source 1..30: mol_type = other RNA
gagctgtacgacagagatctcaagcacttc

SEQ ID NO: 73225 - RNA, 30 nt, synthetic construct
  misc_feature 1..30: note = Pumilio homolog 3 (274-283)
  source 1..30: mol_type = other RNA
gagctgtacggcaacaccttccagctctat

SEQ ID NO: 73226 - RNA, 27 nt, synthetic construct
  misc_feature 1..27: note = TELO2-interacting protein 1 homolog (510-518)
  source 1..27: mol_type = other RNA
gagctgtaccaccagagcgtggtctat

SEQ ID NO: 73227 - RNA, 30 nt, synthetic construct
  misc_feature 1..30: note = Protein RRP5 homolog (1712-1721)
  source 1..30: mol_type = other RNA
gagctgtacaacagaatgctcaagaggttc

SEQ ID NO: 73228 - RNA, 30 nt, synthetic construct
  misc_feature 1..30: note = Tetratricopeptide repeat protein 37 (950-959)
  source 1..30: mol_type = other RNA
gagctgtaccagtataacatcctccaaatg

SEQ ID NO: 73229 - RNA, 27 nt, synthetic construct
  misc_feature 1..27: note = Vacuolar fusion protein CCZ1 homolog (448-456)
  source 1..27: mol_type = other RNA
gagctgtacgtgatcctcaaccagaag

SEQ ID NO: 73230 - RNA, 30 nt, synthetic construct
  misc_feature 1..30: note = Clathrin heavy chain 1 (1402-1411)
  source 1..30: mol_type = other RNA
gagctgtactatagagccatccagttctac

SEQ ID NO: 73231 - RNA, 27 nt, synthetic construct
  misc_feature 1..27: note = Dedicator of cytokinesis protein 7 (167-175)
  source 1..27: mol_type = other RNA
gagatgaaggacagaatcacctacttc

SEQ ID NO: 73232 - RNA, 27 nt, synthetic construct
  misc_feature 1..27: note = Kinetochore-associated protein DSN1 homolog (194-202)
  source 1..27: mol_type = other RNA
gagatgaaggaatacatcaccaaattc

SEQ ID NO: 73233 - RNA, 27 nt, synthetic construct
  misc_feature 1..27: note = Actin-related protein 5 (513-521)
  source 1..27: mol_type = other RNA
gagatgagacccttcaggagctccttt

SEQ ID NO: 73234 - RNA, 33 nt, synthetic construct
  misc_feature 1..33: note = 5,6-dihydroxyindole-2-carboxylic acid oxidase (428-438)
  source 1..33: mol_type = other RNA
gagaacgcccccatcggccacaatagacagtac

SEQ ID NO: 73235 - RNA, 33 nt, synthetic construct
  misc_feature 1..33: note = Eukaryotic translation initiation factor 3 subunit L (295-305)
  source 1..33: mol_type = other RNA
gagaacatcgaactgaataagaaaagcatgtac

SEQ ID NO: 73236 - RNA, 27 nt, synthetic construct
  misc_feature 1..27: note = Inositol-3-phosphate synthase 1 (246-254)
  source 1..27: mol_type = other RNA
gagaacctgctcagaaccatcgaactt

SEQ ID NO: 73237 - RNA, 27 nt, synthetic construct
  misc_feature 1..27: note = 15-hydroxyprostaglandin dehydrogenase (NAD(+)) (198-206)
  source 1..27: mol_type = other RNA
gagaacatgggccagtacatcgaatat

SEQ ID NO: 73238 - RNA, 27 nt, synthetic construct
  misc_feature 1..27: note = Mitogen-activated protein kinase 8 (261-269)
  source 1..27: mol_type = other RNA
gagaacagacccaagtacgccggctat

SEQ ID NO: 73239 - RNA, 27 nt, synthetic construct
  misc_feature 1..27: note = THO complex subunit 1 (70-78)
  source 1..27: mol_type = other RNA
gagaacgtgctggccatcattagcctc

SEQ ID NO: 73240 - RNA, 30 nt, synthetic construct
  misc_feature 1..30: note = Protein-methionine sulfoxide oxidase MICAL1 (261-270)
  source 1..30: mol_type = other RNA
gagcagcaccccggcgacgggcatttctac

SEQ ID NO: 73241 - RNA, 27 nt, synthetic construct
  misc_feature 1..27: note = Gamma-tubulin complex component 2 (486-494)
  source 1..27: mol_type = other RNA
gagcagatcgaaaaggccttcaactac

SEQ ID NO: 73242 - RNA, 27 nt, synthetic construct
  misc_feature 1..27: note = Dual specificity protein phosphatase 19 (169-177)
  source 1..27: mol_type = other RNA
gagcagaccagcttcacatccgccttt

SEQ ID NO: 73243 - RNA, 27 nt, synthetic construct
  misc_feature 1..27: note = Semaphorin-4C (402-410)
  source 1..27: mol_type = other RNA
gagcaggtgggccccagatggagcagg

SEQ ID NO: 73244 - RNA, 27 nt, synthetic construct
  misc_feature 1..27: note = Eukaryotic translation initiation factor 3 subunit A (577-585)
  source 1..27: mol_type = other RNA
gagagaaaggaaaggctggagagcctc

SEQ ID NO: 73245 - RNA, 27 nt, synthetic construct
  misc_feature 1..27: note = Protein enabled homolog (159-167)
  source 1..27: mol_type = other RNA
gagagactggaaaggcaggagcggctc

SEQ ID NO: 73246 - RNA, 24 nt, synthetic construct
  misc_feature 1..24: note = Endoplasmin (719-726)
  source 1..24: mol_type = other RNA
gagagaatgctgaggctcagcctt

SEQ ID NO: 73247 - RNA, 27 nt, synthetic construct
  misc_feature 1..27: note = Nuclear factor NF-kappa-B p100 subunit (588-596)
  source 1..27: mol_type = other RNA
gagagacagggcgggaggaccgccctg

SEQ ID NO: 73248 - RNA, 27 nt, synthetic construct
  misc_feature 1..27: note = Dual specificity protein phosphatase 4 (110-118)
  source 1..27: mol_type = other RNA
gagagaagccccagggccgaatccctg

SEQ ID NO: 73249 - RNA, 27 nt, synthetic construct
  misc_feature 1..27: note = Zinc finger protein 264 (382-390)
  source 1..27: mol_type = other RNA
gagagcgccgctctgatccaccattac

SEQ ID NO: 73250 - RNA, 27 nt, synthetic construct
  misc_feature 1..27: note = Histone acetyltransferase p300 (621-629)
  source 1..27: mol_type = other RNA
gagagcgccaacaatagagctgaatac

SEQ ID NO: 73251 - RNA, 33 nt, synthetic construct
  misc_feature 1..33: note = Glutamine and serine-rich protein 1 (139-149)
  source 1..33: mol_type = other RNA
gagagcgccccccacctgctccagcctcaattc

SEQ ID NO: 73252 - RNA, 30 nt, synthetic construct
  misc_feature 1..30: note = Chromodomain-helicase-DNA-binding protein 9 (1356-1365)
  source 1..30: mol_type = other RNA
gagagcgcctacatcctgcagggcgggtat

SEQ ID NO: 73253 - RNA, 30 nt, synthetic construct
  misc_feature 1..30: note = Protein fem-1 homolog B (29-38)
  source 1..30: mol_type = other RNA
gagagcgacatcagatacctgctcggctat

SEQ ID NO: 73254 - RNA, 33 nt, synthetic construct
  misc_feature 1..33: note = ER membrane protein complex subunit 1 (169-179)
  source 1..33: mol_type = other RNA
gagagcgactccatccactaccagatggtgtat

SEQ ID NO: 73255 - RNA, 30 nt, synthetic construct
  misc_feature 1..30: note = Prolyl endopeptidase FAP (88-97)
  source 1..30: mol_type = other RNA
gagagcgactactccaagctgtggagatat

SEQ ID NO: 73256 - RNA, 30 nt, synthetic construct
  misc_feature 1..30: note = 28S ribosomal protein S18b, mitochondrial (60-69)
  source 1..30: mol_type = other RNA
gagagcgaagagtaccaggaaagatatggc

SEQ ID NO: 73257 - RNA, 36 nt, synthetic construct
  misc_feature 1..36: note = CD109 antigen (1076-1087)
  source 1..36: mol_type = other RNA
gagagcgaattctccagaggcatctctgacaactac

SEQ ID NO: 73258 - RNA, 24 nt, synthetic construct
  misc_feature 1..24: note = Asparagine synthetase (glutamine-hydrolyzing) (389-396)
  source 1..24: mol_type = other RNA
gagagcgaaagactgctcagggag

SEQ ID NO: 73259 - RNA, 30 nt, synthetic construct
  misc_feature 1..30: note = Serine/threonine-protein kinase Nek3 (67-76)
  source 1..30: mol_type = other RNA
gagagcttcgaagccgagggccacctgtac

SEQ ID NO: 73260 - RNA, 27 nt, synthetic construct
  misc_feature 1..27: note = Sestrin-3 (9-17)
  source 1..27: mol_type = other RNA
gagagcttcctgagatcccagttttac

SEQ ID NO: 73261 - RNA, 33 nt, synthetic construct
  misc_feature 1..33: note = Torsin-1A-interacting protein 2 (368-378)
  source 1..33: mol_type = other RNA
gagagcttccccgccggctccaccctgatcttt

SEQ ID NO: 73262 - RNA, 36 nt, synthetic construct
  misc_feature 1..36: note = Torsin-1A-interacting protein 2 (368-379)
  source 1..36: mol_type = other RNA
gagagcttccccgccggctccaccctgatcttttac

SEQ ID NO: 73263 - RNA, 30 nt, synthetic construct
  misc_feature 1..30: note = Cell division cycle-associated protein 7 (137-146)
  source 1..30: mol_type = other RNA
gagagcttccccggctcctttagagggagg

SEQ ID NO: 73264 - RNA, 36 nt, synthetic construct
  misc_feature 1..36: note = Putative elongation factor 1-alpha-like 3 (413-424)
  source 1..36: mol_type = other RNA
gagagcttctccgactacccccctctgggcagattt

SEQ ID NO: 73265 - RNA, 30 nt, synthetic construct
  misc_feature 1..30: note = Dual specificity protein kinase TTK (197-206)
  source 1..30: mol_type = other RNA
gagagcttctccggctctctggggcacctc

SEQ ID NO: 73266 - RNA, 27 nt, synthetic construct
  misc_feature 1..27: note = ER degradation-enhancing alpha-mannosidase-like protein 2 (361-369)
  source 1..27: mol_type = other RNA
gagagcatcgaaaagatttccaaagtg

SEQ ID NO: 73267 - RNA, 33 nt, synthetic construct
  misc_feature 1..33: note = E3 ubiquitin-protein ligase HECTD1 (531-541)
  source 1..33: mol_type = other RNA
gagagcatcgaaagactgcccctccacctttac

SEQ ID NO: 73268 - RNA, 27 nt, synthetic construct
  misc_feature 1..27: note = Zinc-binding alcohol dehydrogenase domain-containing protein 2 (347-355)
  source 1..27: mol_type = other RNA
gagagcatcttcagagccgtgaactac

SEQ ID NO: 73269 - RNA, 30 nt, synthetic construct
  misc_feature 1..30: note = GATA zinc finger domain-containing protein 1 (140-149)
  source 1..30: mol_type = other RNA
gagagcatcttctacaagggcgtgtattac

SEQ ID NO: 73270 - RNA, 27 nt, synthetic construct
  misc_feature 1..27: note = Abnormal spindle-like microcephaly-associated protein (62-70)
  source 1..27: mol_type = other RNA
gagagcatcctgaccattcagaagtac

SEQ ID NO: 73271 - RNA, 39 nt, synthetic construct
  misc_feature 1..39: note = Ceramide synthase 4 (291-303)
  source 1..39: mol_type = other RNA
gagagcatctccaacagaggccccttctttgggtactat

SEQ ID NO: 73272 - RNA, 39 nt, synthetic construct
  misc_feature 1..39: note = Leucine-rich repeat-containing protein 9 (566-578)
  source 1..39: mol_type = other RNA
gagagcatctcccagtctaactaccccatggtgaattca

SEQ ID NO: 73273 - RNA, 30 nt, synthetic construct
  misc_feature 1..30: note = Cytochrome b5 domain-containing protein 1 (157-166)
  source 1..30: mol_type = other RNA
gagagcatctgggaaattctgcacagatac

SEQ ID NO: 73274 - RNA, 27 nt, synthetic construct
  misc_feature 1..27: note = Poly (ADP-ribose) polymerase 9 (164-172)
  source 1..27: mol_type = other RNA
gagagcaagcagttcgtggccagatac

SEQ ID NO: 73275 - RNA, 27 nt, synthetic construct
  misc_feature 1..27: note = Coiled-coil domain-containing protein 158 (458-466)
  source 1..27: mol_type = other RNA
gagagcctggaaaaggtgtcctctctc

SEQ ID NO: 73276 - RNA, 33 nt, synthetic construct
  misc_feature 1..33: note = Leucine-rich repeat-containing protein 57 (51-61)
  source 1..33: mol_type = other RNA
gagagcctgccccctctccttatcggcaagttc

SEQ ID NO: 73277 - RNA, 30 nt, synthetic construct
  misc_feature 1..30: note = N-acetylglucosamine-1-phosphotransferase subunits alpha/beta (1173-1182)
  source 1..30: mol_type = other RNA
gagagcatgttccccatcccttcccagttt

SEQ ID NO: 73278 - RNA, 33 nt, synthetic construct
  misc_feature 1..33: note = Protein disulfide-isomerase A3 (36-46)
  source 1..33: mol_type = other RNA
gagagcagaatctccgacaccggctctgccggg

SEQ ID NO: 73279 - RNA, 27 nt, synthetic construct
  misc_feature 1..27: note = BRCA1-A complex subunit BRE (134-142)
  source 1..27: mol_type = other RNA
gagagctccagactgatgttcgaatac

SEQ ID NO: 73280 - RNA, 27 nt, synthetic construct
  misc_feature 1..27: note = Protein FAM135A (825-833)
  source 1..27: mol_type = other RNA
gagagcacctccgccatctctgaaatt

SEQ ID NO: 73281 - RNA, 27 nt, synthetic construct
  misc_feature 1..27: note = Transcriptional enhancer factor TEF-1 (240-248)
  source 1..27: mol_type = other RNA
gagagcgtggacatcagacagatttac

SEQ ID NO: 73282 - RNA, 30 nt, synthetic construct
  misc_feature 1..30: note = OTU domain-containing protein 7B (579-588)
  source 1..30: mol_type = other RNA
gagagcgtgggcaacgggggatccaagtac

SEQ ID NO: 73283 - RNA, 27 nt, synthetic construct
  misc_feature 1..27: note = Scm-like with four MBT domains protein 1 (492-500)
  source 1..27: mol_type = other RNA
gagagcgtgatgatcaacggcaagtac

SEQ ID NO: 73284 - RNA, 27 nt, synthetic construct
  misc_feature 1..27: note = Tensin-1 (839-847)
  source 1..27: mol_type = other RNA
gagagcgtgccccctggcagatcctac

SEQ ID NO: 73285 - RNA, 30 nt, synthetic construct
  misc_feature 1..30: note = Zinc transporter ZIP6 (242-251)
  source 1..30: mol_type = other RNA
gagagcgtgtccgaacccagaaagggcttc

SEQ ID NO: 73286 - RNA, 30 nt, synthetic construct
  misc_feature 1..30: note = 26S proteasome non-ATPase regulatory subunit 6 (309-318)
  source 1..30: mol_type = other RNA
gagagctacagatccctgaccctcggctat

SEQ ID NO: 73287 - RNA, 30 nt, synthetic construct
  misc_feature 1..30: note = Exonuclease 1 (584-593)
  source 1..30: mol_type = other RNA
gagagctactccttcgaatcttcaaagttt

SEQ ID NO: 73288 - RNA, 24 nt, synthetic construct
  misc_feature 1..24: note = Lactosylceramide alpha-2,3-sialyltransferase (260-267)
  source 1..24: mol_type = other RNA
gagaccgccttcgacatcctgcag

SEQ ID NO: 73289 - RNA, 33 nt, synthetic construct
  misc_feature 1..33: note = Transcription factor SOX-10 (359-369)
  source 1..33: mol_type = other RNA
gagaccgccggcccccaggggcctccacactac

SEQ ID NO: 73290 - RNA, 27 nt, synthetic construct
  misc_feature 1..27: note = DNA-directed RNA polymerases I, II, and III subunit RPABC1 (198-206)
  source 1..27: mol_type = other RNA
gagaccgccggcagatacatcacatat

SEQ ID NO: 73291 - RNA, 36 nt, synthetic construct
  misc_feature 1..36: note = HLA class I histocompatibility antigen, A-66 alpha chain (147-158)
  source 1..36: mol_type = other RNA
gagaccgcccacgaagctgagcagtggagagcatac

SEQ ID NO: 73292 - RNA, 30 nt, synthetic construct
  misc_feature 1..30: note = Actin-related protein 3 (171-180)
  source 1..30: mol_type = other RNA
gagaccgccaaggctgtgaaagaaagatac

SEQ ID NO: 73293 - RNA, 33 nt, synthetic construct
  misc_feature 1..33: note = Protein S100-A1 (6-16)
  source 1..33: mol_type = other RNA
gagaccgccatggaaacactgatcaacgtgttc

SEQ ID NO: 73294 - RNA, 33 nt, synthetic construct
  misc_feature 1..33: note = ATP-binding cassette sub-family E member 1 (335-345)
  source 1..33: mol_type = other RNA
gagaccgccaacgaagaggaagtgaagaaaatg

SEQ ID NO: 73295 - RNA, 30 nt, synthetic construct
  misc_feature 1..30: note = YLP motif-containing protein 1 (228-237)
  source 1..30: mol_type = other RNA
gagaccgcccccagacacatgatgaggctg

SEQ ID NO: 73296 - RNA, 33 nt, synthetic construct
  misc_feature 1..33: note = Ataxin-10 (40-50)
  source 1..33: mol_type = other RNA
gagaccgcccccagaacaatcttccagagggtg

SEQ ID NO: 73297 - RNA, 27 nt, synthetic construct
  misc_feature 1..27: note = Protein cordon-bleu (683-691)
  source 1..27: mol_type = other RNA
gagaccgcccccagagtgacaagcttc

SEQ ID NO: 73298 - RNA, 27 nt, synthetic construct
  misc_feature 1..27: note = Alpha-1,3-mannosyl-glycoprotein 2-beta-N-acetylglucosaminyltransferase (147-155)
  source 1..27: mol_type = other RNA
gagaccgcccaggctatcgcaagctac

SEQ ID NO: 73299 - RNA, 27 nt, synthetic construct
  misc_feature 1..27: note = Exocyst complex component 8 (72-80)
  source 1..27: mol_type = other RNA
gagaccgccagagaaatcagctacctg

SEQ ID NO: 73300 - RNA, 27 nt, synthetic construct
  misc_feature 1..27: note = Tudor domain-containing protein 7 (5-13)
  source 1..27: mol_type = other RNA
gagaccgccagaatcgctcagctggtg

SEQ ID NO: 73301 - RNA, 30 nt, synthetic construct
  misc_feature 1..30: note = Spectrin beta chain, non-erythrocytic 1 (1262-1271)
  source 1..30: mol_type = other RNA
gagaccgccagcgaactgctcatgagactt

SEQ ID NO: 73302 - RNA, 30 nt, synthetic construct
  misc_feature 1..30: note = E3 ubiquitin-protein ligase RNF213 (3983-3992)
  source 1..30: mol_type = other RNA
gagaccgccagcaagacactgtccagattc

SEQ ID NO: 73303 - RNA, 33 nt, synthetic construct
  misc_feature 1..33: note = Kinesin-like protein KIF2C (317-327)
  source 1..33: mol_type = other RNA
gagaccgccagcaacgaagtggtctacagattc

SEQ ID NO: 73304 - RNA, 27 nt, synthetic construct
  misc_feature 1..27: note = Protein furry homolog-like (371-379)
  source 1..27: mol_type = other RNA
gagaccgccagcagaatcgctaaggtg

SEQ ID NO: 73305 - RNA, 27 nt, synthetic construct
  misc_feature 1..27: note = Endoplasmin (698-706)
  source 1..27: mol_type = other RNA
gagaccgccacactgagaagcggctac

SEQ ID NO: 73306 - RNA, 33 nt, synthetic construct
  misc_feature 1..33: note = 2'-5'-oligoadenylate synthase 1 (355-365)
  source 1..33: mol_type = other RNA
gagaccgacgatcccagaaggtaccagaagtat

SEQ ID NO: 73307 - RNA, 27 nt, synthetic construct
  misc_feature 1..27: note = Putative pre-mRNA-splicing factor ATP-dependent RNA helicase DHX32 (324-332)
  source 1..27: mol_type = other RNA
gagaccgaaaagagatgccaggtgtac

SEQ ID NO: 73308 - RNA, 42 nt, synthetic construct
  misc_feature 1..42: note = Sorting nexin-17 (7-20)
  source 1..42: mol_type = other RNA
gagaccgaaagcagatccggcgactctgggggatcagcctac

SEQ ID NO: 73309 - RNA, 33 nt, synthetic construct
  misc_feature 1..33: note = Caldesmon (164-174)
  source 1..33: mol_type = other RNA
gagaccgaaacagtgactaagagctaccagaaa

SEQ ID NO: 73310 - RNA, 30 nt, synthetic construct
  misc_feature 1..30: note = Deoxyhypusine synthase (353-362)
  source 1..30: mol_type = other RNA
gagaccttcgcccagaagatggacgctttt

SEQ ID NO: 73311 - RNA, 30 nt, synthetic construct
  misc_feature 1..30: note = Cytoplasmic dynein 1 heavy chain 1 (1934-1943)
  source 1..30: mol_type = other RNA
gagaccttcgactttcaggccatgggcaga

SEQ ID NO: 73312 - RNA, 33 nt, synthetic construct
  misc_feature 1..33: note = Protein FAM127B (29-39)
  source 1..33: mol_type = other RNA
gagaccttcgacggcgatacagacagactgccc

SEQ ID NO: 73313 - RNA, 39 nt, synthetic construct
  misc_feature 1..39: note = Nicastrin (333-345)
  source 1..39: mol_type = other RNA
gagaccttcgactacatcggcagctccagaatggtgtat

SEQ ID NO: 73314 - RNA, 27 nt, synthetic construct
  misc_feature 1..27: note = CAAX prenyl protease 1 homolog (62-70)
  source 1..27: mol_type = other RNA
gagaccttcgaaaagagcagactgtac

SEQ ID NO: 73315 - RNA, 33 nt, synthetic construct
  misc_feature 1..33: note = Ceramide glucosyltransferase (71-81)
  source 1..33: mol_type = other RNA
gagaccttctttgaactggactaccccaagtat

SEQ ID NO: 73316 - RNA, 30 nt, synthetic construct
  misc_feature 1..30: note = Mediator of RNA polymerase II transcription subunit 13-like (1814-1823)
  source 1..30: mol_type = other RNA
gagaccttcggcgaagccagccagaagtac

SEQ ID NO: 73317 - RNA, 27 nt, synthetic construct
  misc_feature 1..27: note = Eukaryotic peptide chain release factor GTP-binding subunit ERF3A (465-473)
  source 1..27: mol_type = other RNA
gagaccttcaaggactttccccagatg

SEQ ID NO: 73318 - RNA, 36 nt, synthetic construct
  misc_feature 1..36: note = Eukaryotic peptide chain release factor GTP-binding subunit ERF3A (465-476)
  source 1..36: mol_type = other RNA
gagaccttcaaggactttccccagatgggcagattc

SEQ ID NO: 73319 - RNA, 30 nt, synthetic construct
  misc_feature 1..30: note = Kv channel-interacting protein 4 isoform 5 (81-90)
  source 1..30: mol_type = other RNA
gagaccttcaaggaaatctacagccagttt

SEQ ID NO: 73320 - RNA, 30 nt, synthetic construct
  misc_feature 1..30: note = Dephospho-CoA kinase domain-containing protein (98-107)
  source 1..30: mol_type = other RNA
gagaccttcaagtactttctgagaggctat

SEQ ID NO: 73321 - RNA, 33 nt, synthetic construct; identical to SEQ ID NO: 49094
  misc_feature 1..33: note = Proteasome-associated protein ECM29 homolog (349-359)
  source 1..33: mol_type = other RNA

SEQ ID NO: 73322 - RNA, 30 nt, synthetic construct
  misc_feature 1..30: note = Telomeric repeat-binding factor 2 (175-184)
  source 1..30: mol_type = other RNA
gagaccttccagcaaaagatgctgagattt

SEQ ID NO: 73323 - RNA, 27 nt, synthetic construct
  misc_feature 1..27: note = E3 ubiquitin-protein ligase RNF213 (2162-2170)
  source 1..27: mol_type = other RNA
gagaccttccagagaccctaccaatat

SEQ ID NO: 73324 - RNA, 30 nt, synthetic construct
  misc_feature 1..30: note = Uncharacterized protein C7orf43 (200-209)
  source 1..30: mol_type = other RNA
gagaccttcagaggcgaacagagcgccttt

SEQ ID NO: 73325 - RNA, 30 nt, synthetic construct
  misc_feature 1..30: note = 40S ribosomal protein S7 (169-178)
  source 1..30: mol_type = other RNA
gagaccttcagcggcgtgtacaagaaactg

SEQ ID NO: 73326 - RNA, 27 nt, synthetic construct
  misc_feature 1..27: note = Protein SGT1 homolog (78-86)
  source 1..27: mol_type = other RNA
gagaccttcacagaaggccagaagctg

SEQ ID NO: 73327 - RNA, 27 nt, synthetic construct
  misc_feature 1..27: note = Mitotic spindle assembly checkpoint protein MAD2A (41-49)
  source 1..27: mol_type = other RNA
gagaccttcacaagagtgcagaagtac

SEQ ID NO: 73328 - RNA, 30 nt, synthetic construct; identical to SEQ ID NO: 49101
  misc_feature 1..30: note = Src substrate cortactin (75-84)
  source 1..30: mol_type = other RNA

SEQ ID NO: 73329 - RNA, 33 nt, synthetic construct
  misc_feature 1..33: note = Tetratricopeptide repeat protein 17 (861-871)
  source 1..33: mol_type = other RNA
gagaccggccagatcgaaaacgggcacagatac

SEQ ID NO: 73330 - RNA, 27 nt, synthetic construct
  misc_feature 1..27: note = Inositol 1,4,5-trisphosphate receptor type 2 (1301-1309)
  source 1..27: mol_type = other RNA
gagacccacggcagacatgtggaatac

SEQ ID NO: 73331 - RNA, 27 nt, synthetic construct
  misc_feature 1..27: note = L-dopachrome tautomerase (196-204)
  source 1..27: mol_type = other RNA
gagacccacctgagctccaagagatac

SEQ ID NO: 73332 - RNA, 33 nt, synthetic construct
  misc_feature 1..33: note = Nucleoside diphosphate kinase homolog 5 (107-117)
  source 1..33: mol_type = other RNA
gagacccaccccgacagcctgagagccatctac

SEQ ID NO: 73333 - RNA, 30 nt, synthetic construct
  misc_feature 1..30: note = Conserved oligomeric Golgi complex subunit 4 (61-70)
  source 1..30: mol_type = other RNA
gagacccaccagcccatcgtggaaacatac

SEQ ID NO: 73334 - RNA, 30 nt, synthetic construct
  misc_feature 1..30: note = Nuclear autoantigenic sperm protein (246-255)
  source 1..30: mol_type = other RNA
gagacccactaccagctgggcctcgcctat

SEQ ID NO: 73335 - RNA, 27 nt, synthetic construct
  misc_feature 1..27: note = Glutamine-fructose-6-phosphate aminotransferase (isomerizing) 1 (27-35)
  source 1..27: mol_type = other RNA
gagaccatcgccaagctggtgaaatac

SEQ ID NO: 73336 - RNA, 36 nt, synthetic construct
  misc_feature 1..36: note = Splicing factor 3A subunit 2 (36-47)
  source 1..36: mol_type = other RNA
gagaccatcgacattaacaaggatccctacttcatg

SEQ ID NO: 73337 - RNA, 27 nt, synthetic construct
  misc_feature 1..27: note = Alpha-aminoadipic semialdehyde synthase, mitochondrial (614-622)
  source 1..27: mol_type = other RNA
gagaccatcgacaaggccaaagaagtg

SEQ ID NO: 73338 - RNA, 30 nt, synthetic construct
  misc_feature 1..30: note = HEAT repeat-containing protein 5B (1515-1524)
  source 1..30: mol_type = other RNA
gagaccatcgacacagccagactgcactac

SEQ ID NO: 73339 - RNA, 33 nt, synthetic construct
  misc_feature 1..33: note = Methylsterol monooxygenase 1 (92-102)
  source 1..33: mol_type = other RNA
gagaccatcgacgtgcacagcggctacgatatt

SEQ ID NO: 73340 - RNA, 27 nt, synthetic construct
  misc_feature 1..27: note = Threonine-tRNA ligase, cytoplasmic (692-700)
  source 1..27: mol_type = other RNA
gagaccatcgaaagactgcagcaactc

SEQ ID NO: 73341 - RNA, 27 nt, synthetic construct
  misc_feature 1..27: note = TBC1 domain family member 10A (329-337)
  source 1..27: mol_type = other RNA
gagaccatcgaaagactgaggagcctc

SEQ ID NO: 73342 - RNA, 39 nt, synthetic construct
  misc_feature 1..39: note = GRIP and coiled-coil domain-containing protein 1 (19-31)
  source 1..39: mol_type = other RNA
gagaccatcgaaacacagaagaaacaactgctccagtac

SEQ ID NO: 73343 - RNA, 27 nt, synthetic construct
  misc_feature 1..27: note = DNA-directed RNA polymerase III subunit RPC3 (517-525)
  source 1..27: mol_type = other RNA
gagaccatcttcctgctcgaaagctac

SEQ ID NO: 73344 - RNA, 27 nt, synthetic construct
  misc_feature 1..27: note = Dynamin-like 120 kDa protein, mitochondrial (435-443)
  source 1..27: mol_type = other RNA
gagaccatcttcagcatttccaaggcc

SEQ ID NO: 73345 - RNA, 33 nt, synthetic construct
  misc_feature 1..33: note = Regulatory-associated protein of mTOR (100-110)
  source 1..33: mol_type = other RNA
gagaccatcggcgccaacctgcagaagcaatac

SEQ ID NO: 73346 - RNA, 27 nt, synthetic construct
  misc_feature 1..27: note = Heterogeneous nuclear ribonucleoprotein K (95-103)
  source 1..27: mol_type = other RNA
gagaccatcggcgaaattctgaagaaa

SEQ ID NO: 73347 - RNA, 27 nt, synthetic construct
  misc_feature 1..27: note = X-ray repair cross-complementing protein 5 (17-25)
  source 1..27: mol_type = other RNA
gagaccatcggcaagaaattcgaaaag

SEQ ID NO: 73348 - RNA, 36 nt, synthetic construct
  misc_feature 1..36: note = Superkiller viralicidic activity 2-like 2 (269-280)
  source 1..36: mol_type = other RNA
gagaccatcattctgctccccgacaacgtgcactac

SEQ ID NO: 73349 - RNA, 33 nt, synthetic construct
  misc_feature 1..33: note = Golgi-specific brefeldin A-resistance guanine nucleotide exchange factor 1 (948-958)
  source 1..33: mol_type = other RNA
gagaccatcattcagaaggccataagcggcttc

SEQ ID NO: 73350 - RNA, 30 nt, synthetic construct
  misc_feature 1..30: note = Inositol polyphosphate multikinase (205-214)
  source 1..30: mol_type = other RNA
gagaccatcaaggacggcgtgagcagattc

SEQ ID NO: 73351 - RNA, 30 nt, synthetic construct
  misc_feature 1..30: note = Cyclin-dependent kinase 4 (41-50)
  source 1..30: mol_type = other RNA
gagaccatcaaggacctgatgagacagttc

SEQ ID NO: 73352 - RNA, 36 nt, synthetic construct
  misc_feature 1..36: note = Ral GTPase-activating protein subunit beta (590-601)
  source 1..36: mol_type = other RNA
gagaccatcctgcccgacagagaactcagcaagttc

SEQ ID NO: 73353 - RNA, 30 nt, synthetic construct
  misc_feature 1..30: note = Mitochondrial Rho GTPase 1 (129-138)
  source 1..30: mol_type = other RNA
gagaccatcctgcccattatgaaccagtac

SEQ ID NO: 73354 - RNA, 27 nt, synthetic construct
  misc_feature 1..27: note = Sodium-dependent neutral amino acid transporter B(0)AT2 (81-89)
  source 1..27: mol_type = other RNA
gagaccatcatgaagttcctgaaaatg

SEQ ID NO: 73355 - RNA, 27 nt, synthetic construct
  misc_feature 1..27: note = Rab GDP dissociation inhibitor beta (124-132)
  source 1..27: mol_type = other RNA
gagaccatcaacagaattaagctgtac

SEQ ID NO: 73356 - RNA, 27 nt, synthetic construct
  misc_feature 1..27: note = cAMP-specific 3',5'-cyclic phosphodiesterase 4B (104-112)
  source 1..27: mol_type = other RNA
gagaccatccagacatacagaagcgtg

SEQ ID NO: 73357 - RNA, 30 nt, synthetic construct; identical to SEQ ID NO: 49130
  misc_feature 1..30: note = Platelet-derived growth factor D (54-63)
  source 1..30: mol_type = other RNA

SEQ ID NO: 73358 - RNA, 27 nt, synthetic construct
  misc_feature 1..27: note = Vacuolar protein-sorting-associated protein 36 (204-212)
  source 1..27: mol_type = other RNA
gagaccatcagattcaagagctacctg

SEQ ID NO: 73359 - RNA, 27 nt, synthetic construct
  misc_feature 1..27: note = Transmembrane protein 260 (666-674)
  source 1..27: mol_type = other RNA
gagaccatcagacacttcaggctgtac

SEQ ID NO: 73360 - RNA, 30 nt, synthetic construct
  misc_feature 1..30: note = Probable ATP-dependent RNA helicase DDX41 (307-316)
  source 1..30: mol_type = other RNA
gagaccatcagacacggcgtgcatatgatg

SEQ ID NO: 73361 - RNA, 27 nt, synthetic construct
  misc_feature 1..27: note = Lysophospholipid acyltransferase 7 (297-305)
  source 1..27: mol_type = other RNA
gagaccatcagaaacattgactgctac

SEQ ID NO: 73362 - RNA, 27 nt, synthetic construct
  misc_feature 1..27: note = HAUS augmin-like complex subunit 2 (20-28)
  source 1..27: mol_type = other RNA
gagaccatcagaaacattccccacctg

SEQ ID NO: 73363 - RNA, 30 nt, synthetic construct
  misc_feature 1..30: note = Dynamin-2 (654-663)
  source 1..30: mol_type = other RNA
gagaccatcagaaacctggtggacagctac

SEQ ID NO: 73364 - RNA, 27 nt, synthetic construct
  misc_feature 1..27: note = Basic leucine zipper and W2 domain-containing protein 2 (106-114)
  source 1..27: mol_type = other RNA
gagaccatcagaaactacgcccaggtg

SEQ ID NO: 73365 - RNA, 27 nt, synthetic construct
  misc_feature 1..27: note = T-complex protein 1 subunit alpha (15-23)
  source 1..27: mol_type = other RNA
gagaccatcagaagccagaacgtgatg

SEQ ID NO: 73366 - RNA, 27 nt, synthetic construct
  misc_feature 1..27: note = Zinc finger FYVE domain-containing protein 16 (802-810)
  source 1..27: mol_type = other RNA
gagaccatcagcaaggcccaggctttc

SEQ ID NO: 73367 - RNA, 27 nt, synthetic construct
  misc_feature 1..27: note = dTDP-D-glucose 4,6-dehydratase (30-38)
  source 1..27: mol_type = other RNA
gagaccatcagcaacaagcagaattac

SEQ ID NO: 73368 - RNA, 36 nt, synthetic construct
  misc_feature 1..36: note = Lysosomal glucocerebrosidase (500-511)
  source 1..36: mol_type = other RNA
gagaccatcagccccggctactccattcacacatat

SEQ ID NO: 73369 - RNA, 27 nt, synthetic construct
  misc_feature 1..27: note = Delta(14)-sterol reductase (327-335)
  source 1..27: mol_type = other RNA
gagaccatcagcacagccactggcaga

SEQ ID NO: 73370 - RNA, 33 nt, synthetic construct
  misc_feature 1..33: note = UDP-N-acetylhexosamine pyrophosphorylase (460-470)
  source 1..33: mol_type = other RNA
gagaccatcacagccgacgtgaaccacaatctg

SEQ ID NO: 73371 - RNA, 27 nt, synthetic construct
  misc_feature 1..27: note = THO complex subunit 2 (857-865)
  source 1..27: mol_type = other RNA
gagaccatcacaaagttcctgcagctc

SEQ ID NO: 73372 - RNA, 33 nt, synthetic construct
  misc_feature 1..33: note = S-phase kinase-associated protein 2 (283-293)
  source 1..33: mol_type = other RNA
gagaccatcacacagctgaacctcagcggctac

SEQ ID NO: 73373 - RNA, 33 nt, synthetic construct
  misc_feature 1..33: note = Minor histocompatibility antigen H13 (68-78)
  source 1..33: mol_type = other RNA
gagaccatcacaagcagagacgccgctaggttc

SEQ ID NO: 73374 - RNA, 27 nt, synthetic construct
  misc_feature 1..27: note = DNA repair protein complementing XP-A cells (180-188)
  source 1..27: mol_type = other RNA
gagaccatcgtgcaccagcatgaatac

SEQ ID NO: 73375 - RNA, 27 nt, synthetic construct
  misc_feature 1..27: note = Disco-interacting protein 2 homolog B (143-151)
  source 1..27: mol_type = other RNA
gagaccatcgtgaacgtcctggacttc

SEQ ID NO: 73376 - RNA, 30 nt, synthetic construct
  misc_feature 1..30: note = Tumor suppressor candidate 2 (66-75)
  source 1..30: mol_type = other RNA
gagaccatcgtgacaaagaacggccagaaa

SEQ ID NO: 73377 - RNA, 30 nt, synthetic construct
  misc_feature 1..30: note = RuvB-like 2 (169-178)
  source 1..30: mol_type = other RNA
gagaccatctacgacctgggcacaaagatg

SEQ ID NO: 73378 - RNA, 33 nt, synthetic construct
  misc_feature 1..33: note = Mediator of RNA polymerase II transcription subunit 23 (553-563)
  source 1..33: mol_type = other RNA
gagaccatctacggcaacgggattatgagaata

SEQ ID NO: 73379 - RNA, 27 nt, synthetic construct
  misc_feature 1..27: note = Peroxisome biogenesis factor 1 (491-499)
  source 1..27: mol_type = other RNA
gagaccaaggacggcctgaaagaattc

SEQ ID NO: 73380 - RNA, 27 nt, synthetic construct
  misc_feature 1..27: note = F-box only protein 38 (25-33)
  source 1..27: mol_type = other RNA
gagaccaaggactacatgaaccagctg

SEQ ID NO: 73381 - RNA, 33 nt, synthetic construct
  misc_feature 1..33: note = Destrin (90-100)
  source 1..33: mol_type = other RNA
gagaccaaggaaagcagaaaagaggaactgatg

SEQ ID NO: 73382 - RNA, 27 nt, synthetic construct
  misc_feature 1..27: note = Dynein light chain 1, cytoplasmic (69-77)
  source 1..27: mol_type = other RNA
gagaccaagcacttcatctacttttat

SEQ ID NO: 73383 - RNA, 27 nt, synthetic construct
  misc_feature 1..27: note = ATP-dependent RNA helicase DDX50 (83-91)
  source 1..27: mol_type = other RNA
gagaccaagaaaaacgtgacagaaatg

SEQ ID NO: 73384 - RNA, 27 nt, synthetic construct
  misc_feature 1..27: note = Protein LTV1 homolog (235-243)
  source 1..27: mol_type = other RNA
gagaccaagagcagattcacagaatac

SEQ ID NO: 73385 - RNA, 27 nt, synthetic construct
  misc_feature 1..27: note = UPF0462 protein C4orf33 (111-119)
  source 1..27: mol_type = other RNA
gagaccaagtgggaaggcaaagcctac

SEQ ID NO: 73386 - RNA, 30 nt, synthetic construct
  misc_feature 1..30: note = Alpha-centractin (232-241)
  source 1..30: mol_type = other RNA
gagaccctggaaacagagaaggcccagtac

SEQ ID NO: 73387 - RNA, 33 nt, synthetic construct
  misc_feature 1..33: note = Alpha-centractin (232-242)
  source 1..33: mol_type = other RNA
gagaccctggaaacagagaaggcccagtactat

SEQ ID NO: 73388 - RNA, 27 nt, synthetic construct
  misc_feature 1..27: note = Heterogeneous nuclear ribonucleoprotein L (557-565)
  source 1..27: mol_type = other RNA
gagaccctgggcttcctcaaccactac

SEQ ID NO: 73389 - RNA, 30 nt, synthetic construct
  misc_feature 1..30: note = Truncated extracellular matrix protein 1 (208-217)
  source 1..30: mol_type = other RNA
gagaccctgaacttcctcgaaatcggctac

SEQ ID NO: 73390 - RNA, 33 nt, synthetic construct
  misc_feature 1..33: note = HEAT repeat-containing protein 1 (1769-1779)
  source 1..33: mol_type = other RNA
gagaccctgccccacttcatcagcccttacctc

SEQ ID NO: 73391 - RNA, 27 nt, synthetic construct
  misc_feature 1..27: note = Neuron navigator 2 (931-939)
  source 1..27: mol_type = other RNA
gagaccctgcagagaaacacaagcctc

SEQ ID NO: 73392 - RNA, 30 nt, synthetic construct
  misc_feature 1..30: note = LIM domain-binding protein 3 (205-214)
  source 1..30: mol_type = other RNA
gagaccctgagagaaatggcccagatgtac

SEQ ID NO: 73393 - RNA, 30 nt, synthetic construct
  misc_feature 1..30: note = Transient receptor potential cation channel subfamily M member 7 (239-248)
  source 1..30: mol_type = other RNA
gagaccatggccatgaagctgctcacatac

SEQ ID NO: 73394 - RNA, 39 nt, synthetic construct
  misc_feature 1..39: note = Nucleoporin NUP188 homolog (30-42)
  source 1..39: mol_type = other RNA
gagaccatggaccccttcgtggatagaatcggctacttt

SEQ ID NO: 73395 - RNA, 39 nt, synthetic construct
  misc_feature 1..39: note = Aldehyde dehydrogenase family 1 member A3 (118-130)
  source 1..39: mol_type = other RNA
gagaccatggacacaggcaagcccttcctgcacgccttt

SEQ ID NO: 73396 - RNA, 33 nt, synthetic construct
  misc_feature 1..33: note = Myosin-10 (328-338)
  source 1..33: mol_type = other RNA
gagaccatggaagccatgcacatcatgggcttc

SEQ ID NO: 73397 - RNA, 30 nt, synthetic construct
  misc_feature 1..30: note = Heterogeneous nuclear ribonucleoprotein H (76-85)
  source 1..30: mol_type = other RNA
gagaccatgggccacagatacgtggaagtc

SEQ ID NO: 73398 - RNA, 27 nt, synthetic construct
  misc_feature 1..27: note = ETS-related transcription factor Elf-2 (173-181)
  source 1..27: mol_type = other RNA
gagaccatgggcagagccctgaggtac

SEQ ID NO: 73399 - RNA, 27 nt, synthetic construct
  misc_feature 1..27: note = Serine/threonine-protein phosphatase 4 regulatory subunit 2 (37-45)
  source 1..27: mol_type = other RNA
gagaccatgatccagtggagccaattc

SEQ ID NO: 73400 - RNA, 27 nt, synthetic construct
  misc_feature 1..27: note = Apolipoprotein E (84-92)
  source 1..27: mol_type = other RNA
gagaccatgaaggaactgaaagcctac

SEQ ID NO: 73401 - RNA, 27 nt, synthetic construct
  misc_feature 1..27: note = Ribosome-recycling factor, mitochondrial (153-161)
  source 1..27: mol_type = other RNA
gagaccatgaagcagatcaaacaatac

SEQ ID NO: 73402 - RNA, 30 nt, synthetic construct
  misc_feature 1..30: note = Interferon-induced protein with tetratricopeptide repeats 1 (375-384)
  source 1..30: mol_type = other RNA
gagaccatgcaggacatccacttccattac

SEQ ID NO: 73403 - RNA, 33 nt, synthetic construct
  misc_feature 1..33: note = Inositol 1,4,5-trisphosphate receptor type 3 (1262-1272)
  source 1..33: mol_type = other RNA
gagaccatgcagcacatcttcctgaacaattac

SEQ ID NO: 73404 - RNA, 30 nt, synthetic construct
  misc_feature 1..30: note = TRPM8 channel-associated factor 1 (132-141)
  source 1..30: mol_type = other RNA
gagaccatgacagaaaagctggtgaaattc

SEQ ID NO: 73405 - RNA, 30 nt, synthetic construct
  misc_feature 1..30: note = Carnitine O-acetyltransferase (515-524)
  source 1..30: mol_type = other RNA
gagaccaacgccgctagactggcacactac

SEQ ID NO: 73406 - RNA, 27 nt, synthetic construct
  misc_feature 1..27: note = Trafficking kinesin-binding protein 2 (258-266)
  source 1..27: mol_type = other RNA
gagaccaacgcccagatgagcagaatg

SEQ ID NO: 73407 - RNA, 27 nt, synthetic construct
  misc_feature 1..27: note = BTB/POZ domain-containing protein 3 (304-312)
  source 1..27: mol_type = other RNA
gagaccaacgacatcttcctgtggtac

SEQ ID NO: 73408 - RNA, 27 nt, synthetic construct
  misc_feature 1..27: note = Myotubularin (266-274)
  source 1..27: mol_type = other RNA
gagaccaacaagcagatcagcaaactg

SEQ ID NO: 73409 - RNA, 36 nt, synthetic construct
  misc_feature 1..36: note = Serine-tRNA ligase, mitochondrial (334-345)
  source 1..36: mol_type = other RNA
gagaccaacacaggccaggaacccagagggctgtac

SEQ ID NO: 73410 - RNA, 27 nt, synthetic construct
  misc_feature 1..27: note = E3 ubiquitin-protein ligase RFWD3 (353-361)
  source 1..27: mol_type = other RNA
gagaccaacacagtggtccagacttac

SEQ ID NO: 73411 - RNA, 30 nt, synthetic construct
  misc_feature 1..30: note = Protein bicaudal D homolog 2 (309-318)
  source 1..30: mol_type = other RNA
gagacccccaacagagtgatgctggactac

SEQ ID NO: 73412 - RNA, 27 nt, synthetic construct
  misc_feature 1..27: note = Splicing factor, proline- and glutamine-rich (475-483)
  source 1..27: mol_type = other RNA
gagaccccccctagattcgcccagcac

SEQ ID NO: 73413 - RNA, 30 nt, synthetic construct; identical to SEQ ID NO: 49186
  misc_feature 1..30: note = Histone-lysine N-methyltransferase 2C (4271-4280)
  source 1..30: mol_type = other RNA

SEQ ID NO: 73414 - RNA, 33 nt, synthetic construct
  misc_feature 1..33: note = Tetratricopeptide repeat protein 4 (310-320)
  source 1..33: mol_type = other RNA
gagacccccagctgggacctggaacagaagtac

SEQ ID NO: 73415 - RNA, 27 nt, synthetic construct
  misc_feature 1..27: note = T-complex protein 1 subunit eta (146-154)
  source 1..27: mol_type = other RNA
gagacccagatcggcggggaaagatac

SEQ ID NO: 73416 - RNA, 27 nt, synthetic construct
  misc_feature 1..27: note = Proteasome subunit alpha type-5 (37-45)
  source 1..27: mol_type = other RNA
gagacccagaaccactggttcacatac

SEQ ID NO: 73417 - RNA, 30 nt, synthetic construct
  misc_feature 1..30: note = Zinc finger MIZ domain-containing protein 1 (308-317)
  source 1..30: mol_type = other RNA
gagacccagaacaaggacatcaatcaatac

SEQ ID NO: 73418 - RNA, 27 nt, synthetic construct
  misc_feature 1..27: note = Histone-lysine N-methyltransferase NSD3 (50-58)
  source 1..27: mol_type = other RNA
gagacccagacaaagtaccaaagctat

SEQ ID NO: 73419 - RNA, 27 nt, synthetic construct
  misc_feature 1..27: note = Elongation factor 1-gamma (326-334)
  source 1..27: mol_type = other RNA
gagacccagacactggtgagagaatac

SEQ ID NO: 73420 - RNA, 30 nt, synthetic construct
  misc_feature 1..30: note = Calcipressin-1 (27-36)
  source 1..30: mol_type = other RNA
gagaccagagccaagttcgaaagcctgttt

SEQ ID NO: 73421 - RNA, 27 nt, synthetic construct
  misc_feature 1..27: note = Protein FAM184A (53-61)
  source 1..27: mol_type = other RNA
gagaccagagaaaagatcctgcagtac

SEQ ID NO: 73422 - RNA, 33 nt, synthetic construct
  misc_feature 1..33: note = Zinc finger protein 428 (46-56)
  source 1..33: mol_type = other RNA
gagaccagagaacccgccgagacaggcgggtac

SEQ ID NO: 73423 - RNA, 33 nt, synthetic construct
  misc_feature 1..33: note = Rho GTPase-activating protein 26 (401-411)
  source 1..33: mol_type = other RNA
gagaccagaggcatcaacgaacaggggctgtac

SEQ ID NO: 73424 - RNA, 36 nt, synthetic construct
  misc_feature 1..36: note = A-kinase anchor protein 2 (904-915)
  source 1..36: mol_type = other RNA
gagaccagacccgaaggcagctacttctccaagtat

SEQ ID NO: 73425 - RNA, 27 nt, synthetic construct
  misc_feature 1..27: note = Pre-mRNA-splicing regulator WTAP (228-236)
  source 1..27: mol_type = other RNA
gagaccagacagcaactggcccagtac

SEQ ID NO: 73426 - RNA, 27 nt, synthetic construct
  misc_feature 1..27: note = F-box/WD repeat-containing protein 11 (431-439)
  source 1..27: mol_type = other RNA
gagaccagaagcccctccaggacatac

SEQ ID NO: 73427 - RNA, 33 nt, synthetic construct
  misc_feature 1..33: note = F-box/WD repeat-containing protein 11 (431-441)
  source 1..33: mol_type = other RNA
gagaccagaagcccctccaggacatacacttat

SEQ ID NO: 73428 - RNA, 27 nt, synthetic construct
  misc_feature 1..27: note = Zinc finger CCCH domain-containing protein 13 (597-605)
  source 1..27: mol_type = other RNA
gagaccagaagctcctaccccgaaagg

SEQ ID NO: 73429 - RNA, 36 nt, synthetic construct
  misc_feature 1..36: note = Zinc finger CCCH domain-containing protein 13 (597-608)
  source 1..36: mol_type = other RNA
gagaccagaagctcctaccccgaaagggaccggtat

SEQ ID NO: 73430 - RNA, 27 nt, synthetic construct
  misc_feature 1..27: note = Serine/threonine-protein kinase TBK1 (301-309)
  source 1..27: mol_type = other RNA
gagaccagcgacatcctgcacagaatg

SEQ ID NO: 73431 - RNA, 30 nt, synthetic construct
  misc_feature 1..30: note = Vimentin (457-466)
  source 1..30: mol_type = other RNA
gagaccagccagcaccatgacgatctggaa

SEQ ID NO: 73432 - RNA, 27 nt, synthetic construct
  misc_feature 1..27: note = Centromere protein F (880-888)
  source 1..27: mol_type = other RNA
gagaccagccagagaatctccaagctg

SEQ ID NO: 73433 - RNA, 33 nt, synthetic construct
  misc_feature 1..33: note = Peptidyl-glycine alpha-amidating monooxygenase (904-914)
  source 1..33: mol_type = other RNA
gagaccagctccggcagagtgctggggaggttc

SEQ ID NO: 73434 - RNA, 33 nt, synthetic construct
  misc_feature 1..33: note = Heterogeneous nuclear ribonucleoprotein A1 (24-34)
  source 1..33: mol_type = other RNA
gagaccacagacgaaagcctgagatcccacttc

SEQ ID NO: 73435 - RNA, 27 nt, synthetic construct
  misc_feature 1..27: note = Exportin-7 (20-28)
  source 1..27: mol_type = other RNA
gagaccacagacactacgaccagactg

SEQ ID NO: 73436 - RNA, 27 nt, synthetic construct
  misc_feature 1..27: note = Poly (ADP-ribose) polymerase 4 (422-430)
  source 1..27: mol_type = other RNA
gagaccacagaattcctgagcaagctc

SEQ ID NO: 73437 - RNA, 30 nt, synthetic construct
  misc_feature 1..30: note = Flap endonuclease 1 (59-68)
  source 1..30: mol_type = other RNA
gagaccacaagccacctgatgggcatgttc

SEQ ID NO: 73438 - RNA, 33 nt, synthetic construct
  misc_feature 1..33: note = Flap endonuclease 1 (59-69)
  source 1..33: mol_type = other RNA
gagaccacaagccacctgatgggcatgttctac

SEQ ID NO: 73439 - RNA, 27 nt, synthetic construct
  misc_feature 1..27: note = Zinc finger MYM-type protein 3 (161-169)
  source 1..27: mol_type = other RNA
gagaccacaagcatcgccactgctaga

SEQ ID NO: 73440 - RNA, 27 nt, synthetic construct
  misc_feature 1..27: note = Transcription initiation factor TFIID subunit 4B (139-147)
  source 1..27: mol_type = other RNA
gagaccacaagcaacatcacttccaga

SEQ ID NO: 73441 - RNA, 27 nt, synthetic construct
  misc_feature 1..27: note = Uncharacterized protein C1orf112 (237-245)
  source 1..27: mol_type = other RNA
gagaccacaactagaatcagcctgctc

SEQ ID NO: 73442 - RNA, 27 nt, synthetic construct
  misc_feature 1..27: note = TM2 domain-containing protein 2 isoform b (68-76)
  source 1..27: mol_type = other RNA
gagaccacaacttgggaaagaaagtac

SEQ ID NO: 73443 - RNA, 27 nt, synthetic construct
  misc_feature 1..27: note = Ubiquitin-like protein FUBI (19-27)
  source 1..27: mol_type = other RNA
gagaccgtggcccagatcaaggctcac

SEQ ID NO: 73444 - RNA, 27 nt, synthetic construct
  misc_feature 1..27: note = Dynactin subunit 1 (38-46)
  source 1..27: mol_type = other RNA
gagaccgtgggcgacctggaagccatg

SEQ ID NO: 73445 - RNA, 33 nt, synthetic construct
  misc_feature 1..33: note = Interferon-induced GTP-binding protein Mx1 (394-404)
  source 1..33: mol_type = other RNA
gagaccgtgggcgaagaggacatcagactgttc

SEQ ID NO: 73446 - RNA, 27 nt, synthetic construct
  misc_feature 1..27: note = Glycerol-3-phosphate acyltransferase 1, mitochondrial (479-487)
  source 1..27: mol_type = other RNA
gagaccgtgggcaagttcatccagtac

SEQ ID NO: 73447 - RNA, 27 nt, synthetic construct
  misc_feature 1..27: note = 28S ribosomal protein S23, mitochondrial (7-15)
  source 1..27: mol_type = other RNA
gagaccgtgggcagcatcttctccaga

SEQ ID NO: 73448 - RNA, 30 nt, synthetic construct
  misc_feature 1..30: note = Structural maintenance of chromosomes flexible hinge domain-containing protein 1 (89-98)
  source 1..30: mol_type = other RNA
gagaccgtgaaggacggcgtcacactgtac

SEQ ID NO: 73449 - RNA, 27 nt, synthetic construct
  misc_feature 1..27: note = Phosphoprotein associated withosphingolipid-enriched microdomains 1 (182-190)
  source 1..27: mol_type = other RNA
gagaccgtgaaggaaatcaaagaggtc

SEQ ID NO: 73450 - RNA, 30 nt, synthetic construct
  misc_feature 1..30: note = Developmentally-regulated GTP-binding protein 1 (203-212)
  source 1..30: mol_type = other RNA
gagaccgtgaagagcatcctggccgaatac

SEQ ID NO: 73451 - RNA, 27 nt, synthetic construct
  misc_feature 1..27: note = Ribosomal RNA small subunit methyltransferase NEP1 (48-56)
  source 1..27: mol_type = other RNA
gagaccgtgaaggtcggcaaaacatac

SEQ ID NO: 73452 - RNA, 27 nt, synthetic construct
  misc_feature 1..27: note = ADP-ribosylation factor GTPase-activating protein 3 (388-396)
  source 1..27: mol_type = other RNA
gagaccgtgctgaagacaactggctac

SEQ ID NO: 73453 - RNA, 30 nt, synthetic construct
  misc_feature 1..30: note = Zinc finger protein 574 (7-16)
  source 1..30: mol_type = other RNA
gagaccgtgctgtacatcgaacacagatat

SEQ ID NO: 73454 - RNA, 33 nt, synthetic construct
  misc_feature 1..33: note = Ankyrin repeat and LEM domain-containing protein 2 (291-301)
  source 1..33: mol_type = other RNA
gagaccgtgaacaaggaaagagccaatagctac

SEQ ID NO: 73455 - RNA, 30 nt, synthetic construct
  misc_feature 1..30: note = Absent in melanoma 1 protein (1522-1531)
  source 1..30: mol_type = other RNA
gagaccgtgaacctgagaagcctcggcttc

SEQ ID NO: 73456 - RNA, 27 nt, synthetic construct
  misc_feature 1..27: note = Rab GDP dissociation inhibitor alpha (74-82)
  source 1..27: mol_type = other RNA
gagaccgtgaacagaatcaagctgtac

SEQ ID NO: 73457 - RNA, 27 nt, synthetic construct
  misc_feature 1..27: note = Tumor susceptibility gene 101 protein (24-32)
  source 1..27: mol_type = other RNA
gagaccgtgaacgtcatcacactgtac

SEQ ID NO: 73458 - RNA, 27 nt, synthetic construct
  misc_feature 1..27: note = Peroxisome proliferator-activated receptor delta (255-263)
  source 1..27: mol_type = other RNA
gagaccgtgagagaactgacagagttc

SEQ ID NO: 73459 - RNA, 27 nt, synthetic construct
  misc_feature 1..27: note = Trafficking kinesin-binding protein 1 (346-354)
  source 1..27: mol_type = other RNA
gagaccgtgagaaacatcaatcaggtc

SEQ ID NO: 73460 - RNA, 27 nt, synthetic construct
  misc_feature 1..27: note = T-complex protein 1 subunit delta (524-532)
  source 1..27: mol_type = other RNA
gagaccgtgagaagcatcctgaagatt

SEQ ID NO: 73461 - RNA, 30 nt, synthetic construct
  misc_feature 1..30: note = Golgin subfamily A member 7 (45-54)
  source 1..30: mol_type = other RNA
gagaccgtgagaacactgaacaatctctac

SEQ ID NO: 73462 - RNA, 27 nt, synthetic construct
  misc_feature 1..27: note = Nuclear receptor 2C2-associated protein (9-17)
  source 1..27: mol_type = other RNA
gagaccgtgagcagagtctcctctgtt

SEQ ID NO: 73463 - RNA, 27 nt, synthetic construct
  misc_feature 1..27: note = Transitional endoplasmic reticulum ATPase (94-102)
  source 1..27: mol_type = other RNA
gagaccgtggtcgaagttccccaggtg

SEQ ID NO: 73464 - RNA, 27 nt, synthetic construct
  misc_feature 1..27: note = Exportin-T (504-512)
  source 1..27: mol_type = other RNA
gagaccgtggtcagatacgaaaagttc

SEQ ID NO: 73465 - RNA, 27 nt, synthetic construct
  misc_feature 1..27: note = HLA class II histocompatibility antigen, DP alpha 1 chain (71-79)
  source 1..27: mol_type = other RNA
gagaccgtgtggcacctggaagagttc

SEQ ID NO: 73466 - RNA, 36 nt, synthetic construct
  misc_feature 1..36: note = 28S ribosomal protein S33, mitochondrial (47-58)
  source 1..36: mol_type = other RNA
gagacctacgactggtatcccaaccaccatacatac

SEQ ID NO: 73467 - RNA, 30 nt, synthetic construct
  misc_feature 1..30: note = Dedicator of cytokinesis protein 1 (40-49)
  source 1..30: mol_type = other RNA
gagacctacgaaggctggtatagagggtac

SEQ ID NO: 73468 - RNA, 27 nt, synthetic construct
  misc_feature 1..27: note = Pre-mRNA-processing factor 6 (444-452)
  source 1..27: mol_type = other RNA
gagacctacgaaaacgccagaaaggtg

SEQ ID NO: 73469 - RNA, 27 nt, synthetic construct
  misc_feature 1..27: note = Transcription elongation factor SPT6 (938-946)
  source 1..27: mol_type = other RNA
gagacctacgaatgggccagaaagatg

SEQ ID NO: 73470 - RNA, 30 nt, synthetic construct
  misc_feature 1..30: note = Exocyst complex component 7 (575-584)
  source 1..30: mol_type = other RNA
gagacctacggcgccttcctgcagaagttt

SEQ ID NO: 73471 - RNA, 27 nt, synthetic construct
  misc_feature 1..27: note = C-C motif chemokine 28 (119-127)
  source 1..27: mol_type = other RNA
gagacctacggccacaagacaccctat

SEQ ID NO: 73472 - RNA, 27 nt, synthetic construct
  misc_feature 1..27: note = Myotonin-protein kinase (311-319)
  source 1..27: mol_type = other RNA
gagacctacggcaagatcgtgcactat

SEQ ID NO: 73473 - RNA, 27 nt, synthetic construct
  misc_feature 1..27: note = Quinone oxidoreductase (51-59)
  source 1..27: mol_type = other RNA
gagacctacatcagaagcggcacatat

SEQ ID NO: 73474 - RNA, 30 nt, synthetic construct
  misc_feature 1..30: note = RNA-binding protein 8A (106-115)
  source 1..30: mol_type = other RNA
gagacctacaaggaagcccaggctgcaatg

SEQ ID NO: 73475 - RNA, 27 nt, synthetic construct
  misc_feature 1..27: note = Aurora kinase A (336-344)
  source 1..27: mol_type = other RNA
gagacctacaagagaatcagcagggtg

SEQ ID NO: 73476 - RNA, 27 nt, synthetic construct
  misc_feature 1..27: note = 60 kDa SS-A/Ro ribonucleoprotein (329-337)
  source 1..27: mol_type = other RNA
gagacctacaagacaggccacgggctg

SEQ ID NO: 73477 - RNA, 30 nt, synthetic construct; identical to SEQ ID NO: 49250
  misc_feature 1..30: note = U6 snRNA-associated Sm-like protein LSm4 (23-32)
  source 1..30: mol_type = other RNA

SEQ ID NO: 73478 - RNA, 30 nt, synthetic construct; identical to SEQ ID NO: 49251
  misc_feature 1..30: note = Centromere protein J (230-239)
  source 1..30: mol_type = other RNA

SEQ ID NO: 73479 - RNA, 30 nt, synthetic construct
  misc_feature 1..30: note = Arf-GAP with coiled-coil, ANK repeat and PH domain-containing protein 2 (748-757)
  source 1..30: mol_type = other RNA
gagacctaccaggacatcttcagagatttt

SEQ ID NO: 73480 - RNA, 27 nt, synthetic construct
  misc_feature 1..27: note = Bifunctional coenzyme A synthase (290-298)
  source 1..27: mol_type = other RNA
gagacctacagaggcgggatggccatc

SEQ ID NO: 73481 - RNA, 36 nt, synthetic construct
  misc_feature 1..36: note = Vacuolar protein sorting-associated protein 13B (522-533)
  source 1..36: mol_type = other RNA
gagacctacacagaaatcgccggcatgcagagattc

SEQ ID NO: 73482 - RNA, 27 nt, synthetic construct
  misc_feature 1..27: note = CD81 antigen (34-42)
  source 1..27: mol_type = other RNA
gaggtggccgctggcatctgggggttc

SEQ ID NO: 73483 - RNA, 36 nt, synthetic construct
  misc_feature 1..36: note = Transforming acidic coiled-coil-containing protein 3 (321-332)
  source 1..36: mol_type = other RNA
gaggtggccgctggccagatggcaagctcctctaga

SEQ ID NO: 73484 - RNA, 33 nt, synthetic construct
  misc_feature 1..33: note = Condensin complex subunit 2 (680-690)
  source 1..33: mol_type = other RNA
gaggtggccgacgaaaagatgctgagcggcctc

SEQ ID NO: 73485 - RNA, 30 nt, synthetic construct
  misc_feature 1..30: note = Rootletin (1797-1806)
  source 1..30: mol_type = other RNA
gaggtggccgacctggaactccagagagtc

SEQ ID NO: 73486 - RNA, 27 nt, synthetic construct
  misc_feature 1..27: note = KN motif and ankyrin repeat domain-containing protein 2 (488-496)
  source 1..27: mol_type = other RNA
gaggtggccgaccccaccgctcacaga

SEQ ID NO: 73487 - RNA, 27 nt, synthetic construct
  misc_feature 1..27: note = Protein phosphatase 1H (361-369)
  source 1..27: mol_type = other RNA
gaggtggccgaagctatcacccagttc

SEQ ID NO: 73488 - RNA, 27 nt, synthetic construct
  misc_feature 1..27: note = Geminin (143-151)
  source 1..27: mol_type = other RNA
gaggtggccgaacacgtccagtacatg

SEQ ID NO: 73489 - RNA, 27 nt, synthetic construct
  misc_feature 1..27: note = Tankyrase-2 (672-680)
  source 1..27: mol_type = other RNA
gaggtggccgaactgctcgtcaagcac

SEQ ID NO: 73490 - RNA, 30 nt, synthetic construct
  misc_feature 1..30: note = Abnormal spindle-like microcephaly-associated protein (73-82)
  source 1..30: mol_type = other RNA
gaggtggccgaagtcaagatcagccacttc

SEQ ID NO: 73491 - RNA, 27 nt, synthetic construct
  misc_feature 1..27: note = Tankyrase-1 (618-626)
  source 1..27: mol_type = other RNA
gaggtggccgaatacctgctcgagcac

SEQ ID NO: 73492 - RNA, 33 nt, synthetic construct
  misc_feature 1..33: note = HRAS-like suppressor 3 (72-82)
  source 1..33: mol_type = other RNA
gaggtggccggcgctggggcagccagcgtcatg

SEQ ID NO: 73493 - RNA, 27 nt, synthetic construct
  misc_feature 1..27: note = CAD protein (1287-1295)
  source 1..27: mol_type = other RNA
gaggtggccggcttcggggaaagcaga

SEQ ID NO: 73494 - RNA, 27 nt, synthetic construct
  misc_feature 1..27: note = 5'-nucleotidase (100-108)
  source 1..27: mol_type = other RNA
gaggtggcccacttcatgaacgctctg

SEQ ID NO: 73495 - RNA, 33 nt, synthetic construct
  misc_feature 1..33: note = 5'-nucleotidase (100-110)
  source 1..33: mol_type = other RNA
gaggtggcccacttcatgaacgctctgagatac

SEQ ID NO: 73496 - RNA, 27 nt, synthetic construct
  misc_feature 1..27: note = Protein disulfide-isomerase A4 (440-448)
  source 1..27: mol_type = other RNA
gaggtggccaaggacttccccgaatac

SEQ ID NO: 73497 - RNA, 33 nt, synthetic construct
  misc_feature 1..33: note = Eukaryotic translation initiation factor 2-alpha kinase 1 (153-163)
  source 1..33: mol_type = other RNA
gaggtggccctggaagctcagaccagcagatac

SEQ ID NO: 73498 - RNA, 27 nt, synthetic construct
  misc_feature 1..27: note = Amyloid protein-binding protein 2 (469-477)
  source 1..27: mol_type = other RNA
gaggtggccctgagcgtcggccacctc

SEQ ID NO: 73499 - RNA, 33 nt, synthetic construct
  misc_feature 1..33: note = Microtubule-associated protein 4 (341-351)
  source 1..33: mol_type = other RNA
gaggtggcccccgctaaggacgtcaccctgctc

SEQ ID NO: 73500 - RNA, 27 nt, synthetic construct
  misc_feature 1..27: note = Striatin (575-583)
  source 1..27: mol_type = other RNA
gaggtggcccccgctctgagcgtcttc

SEQ ID NO: 73501 - RNA, 33 nt, synthetic construct
  misc_feature 1..33: note = cDNA FLJ60317, highly similar to Aminoacylase-1 (EC 3.5.1.14) (143-153)
  source 1..33: mol_type = other RNA
gaggtggcccccggctacgtcgttaccgtgctg

SEQ ID NO: 73502 - RNA, 27 nt, synthetic construct
  misc_feature 1..27: note = E3 ubiquitin-protein ligase TRIM63 (155-163)
  source 1..27: mol_type = other RNA
gaggtggcccccctgcagagcgtcttc

SEQ ID NO: 73503 - RNA, 33 nt, synthetic construct
  misc_feature 1..33: note = Kelch-like protein 21 (364-374)
  source 1..33: mol_type = other RNA
gaggtggcccccatgctgaaggctagagaatac

SEQ ID NO: 73504 - RNA, 30 nt, synthetic construct
  misc_feature 1..30: note = Endophilin-B2 (59-68)
  source 1..30: mol_type = other RNA
gaggtggccccccctgctagcggcaccaga

SEQ ID NO: 73505 - RNA, 33 nt, synthetic construct
  misc_feature 1..33: note = Niemann-Pick C1 protein (730-740)
  source 1..33: mol_type = other RNA
gaggtggcccccagcatgttcctgtcctctttt

SEQ ID NO: 73506 - RNA, 27 nt, synthetic construct
  misc_feature 1..27: note = E3 ubiquitin-protein ligase Topors (578-586)
  source 1..27: mol_type = other RNA
gaggtggcccagcccagcagagaattc

SEQ ID NO: 73507 - RNA, 33 nt, synthetic construct
  misc_feature 1..33: note = Zinc finger protein 131 (41-51)
  source 1..33: mol_type = other RNA
gaggtggccagcgctaagcagtccgtcaaatac

SEQ ID NO: 73508 - RNA, 27 nt, synthetic construct
  misc_feature 1..27: note = Autophagy-related protein 9A (160-168)
  source 1..27: mol_type = other RNA
gaggtggccagcgctctgagatccttc

SEQ ID NO: 73509 - RNA, 27 nt, synthetic construct
  misc_feature 1..27: note = Methyltransferase-like protein 13 (163-171)
  source 1..27: mol_type = other RNA
gaggtggccacccagtggttcggcttt

SEQ ID NO: 73510 - RNA, 27 nt, synthetic construct
  misc_feature 1..27: note = D-3-phosphoglycerate dehydrogenase (159-167)
  source 1..27: mol_type = other RNA
gaggtggccaccagaatgcagagcttc

SEQ ID NO: 73511 - RNA, 27 nt, synthetic construct
  misc_feature 1..27: note = DNA-dependent protein kinase catalytic subunit (713-721)
  source 1..27: mol_type = other RNA
gaggtggccgtcaagatgaaacagtac

SEQ ID NO: 73512 - RNA, 33 nt, synthetic construct
  misc_feature 1..33: note = Ribonuclease H2 subunit C (72-82)
  source 1..33: mol_type = other RNA
gaggtggccgtcccccctggcctggttgggtac

SEQ ID NO: 73513 - RNA, 33 nt, synthetic construct
  misc_feature 1..33: note = Endoplasmic reticulum lectin 1 (124-134)
  source 1..33: mol_type = other RNA
gaggtgtgccacggcaagcatatcagacagtac

SEQ ID NO: 73514 - RNA, 27 nt, synthetic construct
  misc_feature 1..27: note = Serine/threonine-protein phosphatase 4 regulatory subunit 2 (20-28)
  source 1..27: mol_type = other RNA
gaggtgtgccccgtcctggaccagttc

SEQ ID NO: 73515 - RNA, 27 nt, synthetic construct
  misc_feature 1..27: note = FRAS1-related extracellular matrix protein 1 (1345-1353)
  source 1..27: mol_type = other RNA
gaggtggacctgaacctccttagatac

SEQ ID NO: 73516 - RNA, 33 nt, synthetic construct
  misc_feature 1..33: note = Melanoma-associated antigen 3 (168-178)
  source 1..33: mol_type = other RNA
gaggtggaccccatcggccacctgtacattttc

SEQ ID NO: 73517 - RNA, 27 nt, synthetic construct
  misc_feature 1..27: note = SET domain-containing protein 5 (26-34)
  source 1..27: mol_type = other RNA
gaggtggaagccccctacctgagcaga

SEQ ID NO: 73518 - RNA, 30 nt, synthetic construct
  misc_feature 1..30: note = DENN domain-containing protein 5A (179-188)
  source 1..30: mol_type = other RNA
gaggtgttcgccaacagatttacccagatg

SEQ ID NO: 73519 - RNA, 30 nt, synthetic construct
  misc_feature 1..30: note = Nck-associated protein 1 (479-488)
  source 1..30: mol_type = other RNA
gaggtgttcgactttagaggcatgaggctg

SEQ ID NO: 73520 - RNA, 30 nt, synthetic construct
  misc_feature 1..30: note = Probable ubiquitin carboxyl-terminal hydrolase FAF-X (1928-1937)
  source 1..30: mol_type = other RNA
gaggtgttcgaccacatgatgaagagaatg

SEQ ID NO: 73521 - RNA, 30 nt, synthetic construct
  misc_feature 1..30: note = Disheveled-associated activator of morphogenesis 2 (1033-1042)
  source 1..30: mol_type = other RNA
gaggtgttcgacaaggatctgtgcaaactc

SEQ ID NO: 73522 - RNA, 30 nt, synthetic construct
  misc_feature 1..30: note = Ribosomal RNA processing protein 36 homolog (132-141)
  source 1..30: mol_type = other RNA
gaggtgttcgacaagacctaccagtttctg

SEQ ID NO: 73523 - RNA, 36 nt, synthetic construct
  misc_feature 1..36: note = FAST kinase domain-containing protein 5 (107-118)
  source 1..36: mol_type = other RNA
gaggtgttcgacagctttgaaaacatgagagtcttc

SEQ ID NO: 73524 - RNA, 33 nt, synthetic construct
  misc_feature 1..33: note = Melanoma-associated antigen 2 (229-239)
  source 1..33: mol_type = other RNA
gaggtgttcgaaggcagagaggacagcgtcttt

SEQ ID NO: 73525 - RNA, 30 nt, synthetic construct
  misc_feature 1..30: note = Protein arginine N-methyltransferase 5 (308-317)
  source 1..30: mol_type = other RNA
gaggtgttcgaaaaggaccccatcaaatac

SEQ ID NO: 73526 - RNA, 30 nt, synthetic construct
  misc_feature 1..30: note = Presenilin-2 (337-346)
  source 1..30: mol_type = other RNA
gaggtgttcgaaccccctctgaccggctac

SEQ ID NO: 73527 - RNA, 30 nt, synthetic construct
  misc_feature 1..30: note = GMP reductase 1 (254-263)
  source 1..30: mol_type = other RNA
gaggtgttcgaaagaaacggcaggaagctg

SEQ ID NO: 73528 - RNA, 27 nt, synthetic construct
  misc_feature 1..27: note = Lanosterol synthase (479-487)
  source 1..27: mol_type = other RNA
gaggtgttcggcgacatcatgattgat

SEQ ID NO: 73529 - RNA, 30 nt, synthetic construct
  misc_feature 1..30: note = Monocarboxylate transporter 7 (340-349)
  source 1..30: mol_type = other RNA
gaggtgttcggcagaatcggggccggattt

SEQ ID NO: 73530 - RNA, 27 nt, synthetic construct
  misc_feature 1..27: note = Zinc finger protein ZIC 2 (187-195)
  source 1..27: mol_type = other RNA
gaggtgttcggcagaagcgaacagtac

SEQ ID NO: 73531 - RNA, 27 nt, synthetic construct
  misc_feature 1..27: note = Nesprin-2 (6334-6342)
  source 1..27: mol_type = other RNA
gaggtgttcggcagagtcagcaggttt

SEQ ID NO: 73532 - RNA, 27 nt, synthetic construct
  misc_feature 1..27: note = Trifunctional purine biosynthetic protein adenosine-3 (10-18)
  source 1..27: mol_type = other RNA
gaggtgttccacgccggcaccgctctg

SEQ ID NO: 73533 - RNA, 30 nt, synthetic construct
  misc_feature 1..30: note = Ribosomal protein S6 kinase alpha-5 (267-276)
  source 1..30: mol_type = other RNA
gaggtgttccacgaccagctgcataccttt

SEQ ID NO: 73534 - RNA, 30 nt, synthetic construct
  misc_feature 1..30: note = Non-POU domain-containing octamer-binding protein (13-22)
  source 1..30: mol_type = other RNA
gaggtgttcatccacaaggacaaaggcttt

SEQ ID NO: 73535 - RNA, 27 nt, synthetic construct
  misc_feature 1..27: note = DNA-directed RNA polymerase II subunit RPB4 (59-67)
  source 1..27: mol_type = other RNA
gaggtgttcatgaagaccctgaactac

SEQ ID NO: 73536 - RNA, 30 nt, synthetic construct
  misc_feature 1..30: note = Quinone oxidoreductase (196-205)
  source 1..30: mol_type = other RNA
gaggtgttcaaccacagagaagtcaattac

SEQ ID NO: 73537 - RNA, 30 nt, synthetic construct
  misc_feature 1..30: note = FACT complex subunit SPT16 (192-201)
  source 1..30: mol_type = other RNA
gaggtgttcaacaagtttttcaaagaaaga

SEQ ID NO: 73538 - RNA, 30 nt, synthetic construct
  misc_feature 1..30: note = UDP-N-acetylglucosamine-peptide N-acetylglucosaminyltransferase 110 kDa subunit (229-238)
  source 1..30: mol_type = other RNA
gaggtgttccccgaatttgccgctgcacac

SEQ ID NO: 73539 - RNA, 30 nt, synthetic construct
  misc_feature 1..30: note = Serine/threonine-protein kinase LATS2 (719-728)
  source 1..30: mol_type = other RNA
gaggtgttccccgaacacctggccagattt

SEQ ID NO: 73540 - RNA, 33 nt, synthetic construct
  misc_feature 1..33: note = Serine/threonine-protein phosphatase 6 regulatory ankyrin repeat subunit A (779-789)
  source 1..33: mol_type = other RNA
gaggtgttccagaagaccgaaggcaacgccttt

SEQ ID NO: 73541 - RNA, 33 nt, synthetic construct
  misc_feature 1..33: note = Replication protein A 70 kDa DNA-binding subunit (560-570)
  source 1..33: mol_type = other RNA
gaggtgttccagaacgccaattttagaagcttc

SEQ ID NO: 73542 - RNA, 30 nt, synthetic construct
  misc_feature 1..30: note = F-box/LRR-repeat protein 5 (115-124)
  source 1..30: mol_type = other RNA
gaggtgttccagcccatgctgatggaatac

SEQ ID NO: 73543 - RNA, 30 nt, synthetic construct
  misc_feature 1..30: note = Histone-lysine N-methyltransferase SETD2 (2472-2481)
  source 1..30: mol_type = other RNA
gaggtgttcagaaaggaaatgagccagttt

SEQ ID NO: 73544 - RNA, 30 nt, synthetic construct
  misc_feature 1..30: note = Zinc finger and SCAN domain-containing protein 30 (45-54)
  source 1..30: mol_type = other RNA
gaggtgttcagacagaagtttaggcaattc

SEQ ID NO: 73545 - RNA, 30 nt, synthetic construct
  misc_feature 1..30: note = WD repeat and FYVE domain-containing protein 3 (667-676)
  source 1..30: mol_type = other RNA
gaggtgttcagcggcgacgggagaaactac

SEQ ID NO: 73546 - RNA, 30 nt, synthetic construct
  misc_feature 1..30: note = Coiled-coil domain-containing protein 136 (105-114)
  source 1..30: mol_type = other RNA
gaggtgttcaccaagcagatccaacagctg

SEQ ID NO: 73547 - RNA, 30 nt, synthetic construct; identical to SEQ ID NO: 49320
  misc_feature 1..30: note = RCC1 and BTB domain-containing protein 2 (124-133)
  source 1..30: mol_type = other RNA

SEQ ID NO: 73548 - RNA, 33 nt, synthetic construct
  misc_feature 1..33: note = Pre-mRNA-splicing factor ATP-dependent RNA helicase DHX15 (379-389)
  source 1..33: mol_type = other RNA
gaggtgggcgacatcaagattatacccctgtac

SEQ ID NO: 73549 - RNA, 27 nt, synthetic construct
  misc_feature 1..27: note = Protein AAR2 homolog (40-48)
  source 1..27: mol_type = other RNA
gaggtgggccccaagttcagaggggtc

SEQ ID NO: 73550 - RNA, 30 nt, synthetic construct
  misc_feature 1..30: note = Adipocyte plasma membrane-associated protein (403-412)
  source 1..30: mol_type = other RNA
gaggtgcacgaacatgacggccacctgtac

SEQ ID NO: 73551 - RNA, 33 nt, synthetic construct
  misc_feature 1..33: note = Adipocyte plasma membrane-associated protein (403-413)
  source 1..33: mol_type = other RNA
gaggtgcacgaacatgacggccacctgtacctc

SEQ ID NO: 73552 - RNA, 36 nt, synthetic construct
  misc_feature 1..36: note = Phosphatase and actin regulator 1 (636-647)
  source 1..36: mol_type = other RNA
gaggtgcacgaactgagcagacatctcaccaggttc

SEQ ID NO: 73553 - RNA, 30 nt, synthetic construct
  misc_feature 1..30: note = GPI transamidase component PIG-T (291-300)
  source 1..30: mol_type = other RNA
gaggtgcacccccctccaaccacaacttac

SEQ ID NO: 73554 - RNA, 33 nt, synthetic construct
  misc_feature 1..33: note = Aryl hydrocarbon receptor nuclear translocator 2 (438-448)
  source 1..33: mol_type = other RNA
gaggtgcaccagagagacggcctgagctcctac

SEQ ID NO: 73555 - RNA, 30 nt, synthetic construct
  misc_feature 1..30: note = Uncharacterized protein C1orf131 (173-182)
  source 1..30: mol_type = other RNA
gaggtgcacagattcggcatcaccgggtac

SEQ ID NO: 73556 - RNA, 36 nt, synthetic construct
  misc_feature 1..36: note = 2-methoxy-6-polyprenyl-1,4-benzoquinol methylase, mitochondrial (272-283)
  source 1..36: mol_type = other RNA
gaggtgatcgccggcgactggaagagctaccagtat

SEQ ID NO: 73557 - RNA, 27 nt, synthetic construct
  misc_feature 1..27: note = DNA mismatch repair protein Msh2 (914-922)
  source 1..27: mol_type = other RNA
gaggtgatcgccaagaacaatagcttc

SEQ ID NO: 73558 - RNA, 36 nt, synthetic construct
  misc_feature 1..36: note = Protein CutA (104-115)
  source 1..36: mol_type = other RNA
gaggtgatcgccctgcccgtcgaacagggcaacttc

SEQ ID NO: 73559 - RNA, 33 nt, synthetic construct
  misc_feature 1..33: note = Drebrin-like protein (403-413)
  source 1..33: mol_type = other RNA
gaggtgatcgacgaaggctggtggagagggtac

SEQ ID NO: 73560 - RNA, 33 nt, synthetic construct; identical to SEQ ID NO: 49333
  misc_feature 1..33: note = Alpha/beta hydrolase domain-containing protein 17B (236-246)
  source 1..33: mol_type = other RNA

SEQ ID NO: 73561 - RNA, 36 nt, synthetic construct; identical to SEQ ID NO: 49334
  misc_feature 1..36: note = Alpha/beta hydrolase domain-containing protein 17A (256-267)
  source 1..36: mol_type = other RNA

SEQ ID NO: 73562 - RNA, 33 nt, synthetic construct; identical to SEQ ID NO: 49335
  misc_feature 1..33: note = Alpha/beta hydrolase domain-containing protein 17C (277-287)
  source 1..33: mol_type = other RNA

SEQ ID NO: 73563 - RNA, 36 nt, synthetic construct; identical to SEQ ID NO: 49336
  misc_feature 1..36: note = Alpha/beta hydrolase domain-containing protein 17C (277-288)
  source 1..36: mol_type = other RNA

SEQ ID NO: 73564 - RNA, 36 nt, synthetic construct; identical to SEQ ID NO: 49337
  misc_feature 1..36: note = SH3 and PX domain-containing protein 2A (332-343)
  source 1..36: mol_type = other RNA

SEQ ID NO: 73565 - RNA, 27 nt, synthetic construct
  misc_feature 1..27: note = XK-related protein 9 (123-131)
  source 1..27: mol_type = other RNA
gaggtgatcgacagagtcaccgatctg

SEQ ID NO: 73566 - RNA, 30 nt, synthetic construct
  misc_feature 1..30: note = Histidine-tRNA ligase, cytoplasmic (90-99)
  source 1..30: mol_type = other RNA
gaggtgatcgacacccccgtcttcgaactg

SEQ ID NO: 73567 - RNA, 27 nt, synthetic construct
  misc_feature 1..27: note = SNF-related serine/threonine-protein kinase (80-88)
  source 1..27: mol_type = other RNA
gaggtgatcgacacccagacaaagctg

SEQ ID NO: 73568 - RNA, 27 nt, synthetic construct
  misc_feature 1..27: note = Mitochondrial ribonuclease P protein 3 (193-201)
  source 1..27: mol_type = other RNA
gaggtgatcgacgtcttcgaaattatg

SEQ ID NO: 73569 - RNA, 33 nt, synthetic construct
  misc_feature 1..33: note = Mitochondrial ribonuclease P protein 3 (193-203)
  source 1..33: mol_type = other RNA
gaggtgatcgacgtcttcgaaattatgaaggcc

SEQ ID NO: 73570 - RNA, 30 nt, synthetic construct
  misc_feature 1..30: note = N-terminal Xaa-Pro-Lys N-methyltransferase 1 (4-13)
  source 1..30: mol_type = other RNA
gaggtgatcgaagacgagaagcagttctac

SEQ ID NO: 73571 - RNA, 27 nt, synthetic construct
  misc_feature 1..27: note = T-complex protein 1 subunit theta (127-135)
  source 1..27: mol_type = other RNA
gaggtgatcgaaggctacgagattgcc

SEQ ID NO: 73572 - RNA, 30 nt, synthetic construct
  misc_feature 1..30: note = Phosphatidate phosphatase LPIN1 (766-775)
  source 1..30: mol_type = other RNA
gaggtgatcgaaaagaaacccgagaagttc

SEQ ID NO: 73573 - RNA, 30 nt, synthetic construct
  misc_feature 1..30: note = SH3 and PX domain-containing protein 2B (396-405)
  source 1..30: mol_type = other RNA
gaggtgatcgaaaagaacctgagcggctgg

SEQ ID NO: 73574 - RNA, 30 nt, synthetic construct
  misc_feature 1..30: note = Dynamin-1-like protein (634-643)
  source 1..30: mol_type = other RNA
gaggtgatcgaaagactgattaagagctac

SEQ ID NO: 73575 - RNA, 27 nt, synthetic construct
  misc_feature 1..27: note = Asparagine synthetase (glutamine-hydrolyzing) (326-334)
  source 1..27: mol_type = other RNA
gaggtgatcttcagcctggaaacctac

SEQ ID NO: 73576 - RNA, 30 nt, synthetic construct
  misc_feature 1..30: note = Dynamin-like 120 kDa protein, mitochondrial (156-165)
  source 1..30: mol_type = other RNA
gaggtgatcggcgccagcgacctgctcctt

SEQ ID NO: 73577 - RNA, 33 nt, synthetic construct
  misc_feature 1..33: note = Dynamin-like 120 kDa protein, mitochondrial (156-166)
  source 1..33: mol_type = other RNA
gaggtgatcggcgccagcgacctgctccttctg

SEQ ID NO: 73578 - RNA, 27 nt, synthetic construct
  misc_feature 1..27: note = Protein phosphatase 1 regulatory subunit 37 (75-83)
  source 1..27: mol_type = other RNA
gaggtgatcggcgcctacaagcaggct

SEQ ID NO: 73579 - RNA, 33 nt, synthetic construct; identical to SEQ ID NO: 49352
  misc_feature 1..33: note = Protein TMEPAI (199-209)
  source 1..33: mol_type = other RNA

SEQ ID NO: 73580 - RNA, 36 nt, synthetic construct
  misc_feature 1..36: note = Mitogen-activated protein kinase kinase kinase 11 (121-132)
  source 1..36: mol_type = other RNA
gaggtgatcggcattgggggattcggtaaggtctac

SEQ ID NO: 73581 - RNA, 33 nt, synthetic construct
  misc_feature 1..33: note = Ropporin-1B (190-200)
  source 1..33: mol_type = other RNA
gaggtgatcggccccgacgggctgattaccgtc

SEQ ID NO: 73582 - RNA, 36 nt, synthetic construct
  misc_feature 1..36: note = Hepatocyte growth factor receptor (215-226)
  source 1..36: mol_type = other RNA
gaggtgatcggcagagggcacttcggatgcgtctac

SEQ ID NO: 73583 - RNA, 33 nt, synthetic construct
  misc_feature 1..33: note = Inositol-trisphosphate 3-kinase B (875-885)
  source 1..33: mol_type = other RNA
gaggtgatcggcagctccctgctcttcattcac

SEQ ID NO: 73584 - RNA, 33 nt, synthetic construct; identical to SEQ ID NO: 49357
  misc_feature 1..33: note = Protein furry homolog-like (141-151)
  source 1..33: mol_type = other RNA

SEQ ID NO: 73585 - RNA, 30 nt, synthetic construct
  misc_feature 1..30: note = Transportin-3 (359-368)
  source 1..30: mol_type = other RNA
gaggtgatccacggcattttcaaggcctac

SEQ ID NO: 73586 - RNA, 27 nt, synthetic construct
  misc_feature 1..27: note = ELAV-like protein 1 (101-109)
  source 1..27: mol_type = other RNA
gaggtgatcaaggacgccaacctgtac

SEQ ID NO: 73587 - RNA, 36 nt, synthetic construct
  misc_feature 1..36: note = Exocyst complex component 3 (390-401)
  source 1..36: mol_type = other RNA
gaggtgatcaagctgaccgaccccagcctcctttac

SEQ ID NO: 73588 - RNA, 30 nt, synthetic construct
  misc_feature 1..30: note = Eukaryotic translation initiation factor 3 subunit L (50-59)
  source 1..30: mol_type = other RNA
gaggtgatcaagaacttcattcagtacttt

SEQ ID NO: 73589 - RNA, 30 nt, synthetic construct
  misc_feature 1..30: note = Ribosome maturation protein SBDS (156-165)
  source 1..30: mol_type = other RNA
gaggtgatcaagcagctgaaagaaaagatg

SEQ ID NO: 73590 - RNA, 27 nt, synthetic construct
  misc_feature 1..27: note = Myosin-10 (1642-1650)
  source 1..27: mol_type = other RNA
gaggtgatcaagcagctgagaaaactc

SEQ ID NO: 73591 - RNA, 27 nt, synthetic construct
  misc_feature 1..27: note = Exosome complex component RRP43 (268-276)
  source 1..27: mol_type = other RNA
gaggtgatcaagagcatgaaacccaag

SEQ ID NO: 73592 - RNA, 27 nt, synthetic construct
  misc_feature 1..27: note = Cofilin-2 (10-18)
  source 1..27: mol_type = other RNA
gaggtgatcaaggtcttcaacgacatg

SEQ ID NO: 73593 - RNA, 27 nt, synthetic construct
  misc_feature 1..27: note = T-complex protein 1 subunit beta (512-520)
  source 1..27: mol_type = other RNA
gaggtgatcctgagagtcgacaacatt

SEQ ID NO: 73594 - RNA, 30 nt, synthetic construct
  misc_feature 1..30: note = E3 ubiquitin-protein ligase TRIM63 (81-90)
  source 1..30: mol_type = other RNA
gaggtgatcatggacagacacggcgtctac

SEQ ID NO: 73595 - RNA, 33 nt, synthetic construct
  misc_feature 1..33: note = Nucleosome-remodeling factor subunit BPTF (564-574)
  source 1..33: mol_type = other RNA
gaggtgatcatgaagggcaacattaataactac

SEQ ID NO: 73596 - RNA, 27 nt, synthetic construct
  misc_feature 1..27: note = Gamma-interferon-inducible protein 16 (15-23)
  source 1..27: mol_type = other RNA
gaggtgatcaacgactaccacttcaga

SEQ ID NO: 73597 - RNA, 33 nt, synthetic construct
  misc_feature 1..33: note = Rho guanine nucleotide exchange factor 12 (790-800)
  source 1..33: mol_type = other RNA
gaggtgatcaacgaactgttctacaccgagaga

SEQ ID NO: 73598 - RNA, 30 nt, synthetic construct
  misc_feature 1..30: note = Eukaryotic translation initiation factor 3 subunit G (58-67)
  source 1..30: mol_type = other RNA
gaggtgatcaacggcaatattaagaccgtc

SEQ ID NO: 73599 - RNA, 27 nt, synthetic construct
  misc_feature 1..27: note = Isoleucine-tRNA ligase, cytoplasmic (989-997)
  source 1..27: mol_type = other RNA
gaggtgatcaacagaattcagaagctg

SEQ ID NO: 73600 - RNA, 27 nt, synthetic construct
  misc_feature 1..27: note = Trafficking protein particle complex subunit 9 (680-688)
  source 1..27: mol_type = other RNA
gaggtgatccccgccctgcctagactc

SEQ ID NO: 73601 - RNA, 30 nt, synthetic construct
  misc_feature 1..30: note = Dynactin subunit 6 (135-144)
  source 1..30: mol_type = other RNA
gaggtgatccccgaaaacaccgtcatttac

SEQ ID NO: 73602 - RNA, 27 nt, synthetic construct
  misc_feature 1..27: note = Transcriptional adapter 1 (289-297)
  source 1..27: mol_type = other RNA
gaggtgatccccacccacacagtctac

SEQ ID NO: 73603 - RNA, 33 nt, synthetic construct
  misc_feature 1..33: note = Heme oxygenase 1 (103-113)
  source 1..33: mol_type = other RNA
gaggtgatcccctacacccctgccatgcagaga

SEQ ID NO: 73604 - RNA, 36 nt, synthetic construct
  misc_feature 1..36: note = Heme oxygenase 1 (103-114)
  source 1..36: mol_type = other RNA
gaggtgatcccctacacccctgccatgcagagatat

SEQ ID NO: 73605 - RNA, 39 nt, synthetic construct; identical to SEQ ID NO: 49378
  misc_feature 1..39: note = MAX gene-associated protein (214-226)
  source 1..39: mol_type = other RNA

SEQ ID NO: 73606 - RNA, 36 nt, synthetic construct
  misc_feature 1..36: note = Kalirin (827-838)
  source 1..36: mol_type = other RNA
gaggtgatccagcaaggccaggacctgcaccagtac

SEQ ID NO: 73607 - RNA, 27 nt, synthetic construct
  misc_feature 1..27: note = Cyclin-I (47-55)
  source 1..27: mol_type = other RNA
gaggtgatccagtggctggccaagctc

SEQ ID NO: 73608 - RNA, 27 nt, synthetic construct
  misc_feature 1..27: note = Protein dopey-2 (236-244)
  source 1..27: mol_type = other RNA
gaggtgatcagagccttctacagctat

SEQ ID NO: 73609 - RNA, 27 nt, synthetic construct
  misc_feature 1..27: note = Inositol-tetrakisphosphate 1-kinase (260-268)
  source 1..27: mol_type = other RNA
gaggtgatcagagaactgagcagggcc

SEQ ID NO: 73610 - RNA, 30 nt, synthetic construct
  misc_feature 1..30: note = Serine/threonine-protein kinase ICK (67-76)
  source 1..30: mol_type = other RNA
gaggtgatcagagaaaacgaccacctgtac

SEQ ID NO: 73611 - RNA, 39 nt, synthetic construct
  misc_feature 1..39: note = Peptidyl-prolyl cis-trans isomerase FKBP1A (55-67)
  source 1..39: mol_type = other RNA
gaggtgatcagaggctgggaagagggggtcgcccagatg

SEQ ID NO: 73612 - RNA, 27 nt, synthetic construct
  misc_feature 1..27: note = BCL2/adenovirus E1B 19 kDa protein-interacting protein 2 (170-178)
  source 1..27: mol_type = other RNA
gaggtgatcagaaagggcagcattacc

SEQ ID NO: 73613 - RNA, 33 nt, synthetic construct
  misc_feature 1..33: note = BCL2/adenovirus E1B 19 kDa protein-interacting protein 2 (170-180)
  source 1..33: mol_type = other RNA
gaggtgatcagaaagggcagcattaccgaatac

SEQ ID NO: 73614 - RNA, 33 nt, synthetic construct
  misc_feature 1..33: note = General vesicular transport factor p115 (180-190)
  source 1..33: mol_type = other RNA
gaggtgatcagaaacgacggcgtcctgctcctt

SEQ ID NO: 73615 - RNA, 36 nt, synthetic construct
  misc_feature 1..36: note = Mitogen-activated protein kinase kinase kinase 3 (568-579)
  source 1..36: mol_type = other RNA
gaggtgatcagcggcgaagggtacggaagaaaggcc

SEQ ID NO: 73616 - RNA, 30 nt, synthetic construct
  misc_feature 1..30: note = Protein FRA10AC1 (165-174)
  source 1..30: mol_type = other RNA
gaggtgatcagcggcaaggggcagttcttt

SEQ ID NO: 73617 - RNA, 30 nt, synthetic construct
  misc_feature 1..30: note = Ectonucleoside triphosphate diphosphohydrolase 4 (216-225)
  source 1..30: mol_type = other RNA
gaggtgatcagcggcaagcaggaaggggtc

SEQ ID NO: 73618 - RNA, 33 nt, synthetic construct
  misc_feature 1..33: note = Ectonucleoside triphosphate diphosphohydrolase 4 (216-226)
  source 1..33: mol_type = other RNA
gaggtgatcagcggcaagcaggaaggggtctac

SEQ ID NO: 73619 - RNA, 36 nt, synthetic construct
  misc_feature 1..36: note = Protein CIP2A (34-45)
  source 1..36: mol_type = other RNA
gaggtgatcagcggccagaagctgaccagactcttc

SEQ ID NO: 73620 - RNA, 27 nt, synthetic construct
  misc_feature 1..27: note = Syntaxin-18 (55-63)
  source 1..27: mol_type = other RNA
gaggtgatcagccacattggcaagctg

SEQ ID NO: 73621 - RNA, 27 nt, synthetic construct
  misc_feature 1..27: note = CREB3 regulatory factor (131-139)
  source 1..27: mol_type = other RNA
gaggtgatcagcaagacccccacactg

SEQ ID NO: 73622 - RNA, 27 nt, synthetic construct
  misc_feature 1..27: note = Cullin-9 (584-592)
  source 1..27: mol_type = other RNA
gaggtgatcagcaagtacgaaaaagcc

SEQ ID NO: 73623 - RNA, 27 nt, synthetic construct
  misc_feature 1..27: note = FAS-associated factor 2 (195-203)
  source 1..27: mol_type = other RNA
gaggtgatcagcctgattaacaccaga

SEQ ID NO: 73624 - RNA, 30 nt, synthetic construct
  misc_feature 1..30: note = Pseudopodium-enriched atypical kinase 1 (20-29)
  source 1..30: mol_type = other RNA
gaggtgatcagcaacgaaggcgggagattc

SEQ ID NO: 73625 - RNA, 30 nt, synthetic construct
  misc_feature 1..30: note = Alpha-1,3-mannosyl-glycoprotein 4-beta-N-acetylglucosaminyltransferase B (111-120)
  source 1..30: mol_type = other RNA
gaggtgatcagcccctcccctcacttctac

SEQ ID NO: 73626 - RNA, 27 nt, synthetic construct
  misc_feature 1..27: note = ATP-binding cassette sub-family A member 5 (1411-1419)
  source 1..27: mol_type = other RNA
gaggtgatcagcagaattacccacgcc

SEQ ID NO: 73627 - RNA, 36 nt, synthetic construct
  misc_feature 1..36: note = Importin subunit alpha-5 (120-131)
  source 1..36: mol_type = other RNA
gaggtgatcagcacccccggcgtcgttgccagattc

SEQ ID NO: 73628 - RNA, 27 nt, synthetic construct
  misc_feature 1..27: note = Ankycorbin (933-941)
  source 1..27: mol_type = other RNA
gaggtgatcagcgtctacagaatgcac

SEQ ID NO: 73629 - RNA, 27 nt, synthetic construct
  misc_feature 1..27: note = Ataxin-2 (291-299)
  source 1..27: mol_type = other RNA
gaggtgatcagctggggctccgggaga

SEQ ID NO: 73630 - RNA, 33 nt, synthetic construct; identical to SEQ ID NO: 49403
  misc_feature 1..33: note = Unconventional myosin-X (308-318)
  source 1..33: mol_type = other RNA

SEQ ID NO: 73631 - RNA, 33 nt, synthetic construct
  misc_feature 1..33: note = Ras GTPase-activating protein 3 (134-144)
  source 1..33: mol_type = other RNA
gaggtgatcaccgacacaggcgtcgtttgccac

SEQ ID NO: 73632 - RNA, 30 nt, synthetic construct
  misc_feature 1..30: note = Nuclear export mediator factor NEMF (306-315)
  source 1..30: mol_type = other RNA
gaggtgatcacccacgaactgcaggacttc

SEQ ID NO: 73633 - RNA, 33 nt, synthetic construct
  misc_feature 1..33: note = Phospholipid scramblase 2 (86-96)
  source 1..33: mol_type = other RNA
gaggtgatcaccctggaaagacccctcaggtgc

SEQ ID NO: 73634 - RNA, 30 nt, synthetic construct
  misc_feature 1..30: note = A-kinase anchor protein 9 (1601-1610)
  source 1..30: mol_type = other RNA
gaggtgatcaccaacagacccaagggcttc

SEQ ID NO: 73635 - RNA, 36 nt, synthetic construct
  misc_feature 1..36: note = Translation initiation factor eIF-2B subunit gamma (272-283)
  source 1..36: mol_type = other RNA
gaggtgatcgtcggcaacgaccagctgatggaaatt

SEQ ID NO: 73636 - RNA, 27 nt, synthetic construct
  misc_feature 1..27: note = Methylmalonyl-CoA mutase, mitochondrial (484-492)
  source 1..27: mol_type = other RNA
gaggtgatcgtcggcgttaacaagtac

SEQ ID NO: 73637 - RNA, 27 nt, synthetic construct
  misc_feature 1..27: note = Insulin-like growth factor 2 mRNA-binding protein 2 (555-563)
  source 1..27: mol_type = other RNA
gaggtgatcgtcagaattataggccac

SEQ ID NO: 73638 - RNA, 27 nt, synthetic construct
  misc_feature 1..27: note = Dynactin subunit 4 (424-432)
  source 1..27: mol_type = other RNA
gaggtgatctggctgacccagcacgtc

SEQ ID NO: 73639 - RNA, 33 nt, synthetic construct
  misc_feature 1..33: note = Actin-related protein 8 (209-219)
  source 1..33: mol_type = other RNA
gaggtgatctggagccacgccattcagaagtac

SEQ ID NO: 73640 - RNA, 27 nt, synthetic construct
  misc_feature 1..27: note = BTB/POZ domain-containing protein 10 (398-406)
  source 1..27: mol_type = other RNA
gaggtgatctacaactatgtccagaga

SEQ ID NO: 73641 - RNA, 27 nt, synthetic construct
  misc_feature 1..27: note = Ras GTPase-activating-like protein IQGAP1 (1602-1610)
  source 1..27: mol_type = other RNA
gaggtgaaggccaaattcatgggcgtc

SEQ ID NO: 73642 - RNA, 27 nt, synthetic construct
  misc_feature 1..27: note = E3 ubiquitin-protein ligase CBL-B (290-298)
  source 1..27: mol_type = other RNA
gaggtgaaggccagactgcagaaatac

SEQ ID NO: 73643 - RNA, 33 nt, synthetic construct
  misc_feature 1..33: note = F-box only protein 22 (380-390)
  source 1..33: mol_type = other RNA
gaggtgaaggacgatgacctgttccacagctac

SEQ ID NO: 73644 - RNA, 33 nt, synthetic construct
  misc_feature 1..33: note = Cation-independent mannose-6-phosphate receptor (1228-1238)
  source 1..33: mol_type = other RNA
gaggtgaaggaccccagacacggcaacctgtac

SEQ ID NO: 73645 - RNA, 30 nt, synthetic construct
  misc_feature 1..30: note = Centromere protein F (1197-1206)
  source 1..30: mol_type = other RNA
gaggtgaaggaaatcagcctggactcctac

SEQ ID NO: 73646 - RNA, 27 nt, synthetic construct
  misc_feature 1..27: note = Apolipoprotein E (249-257)
  source 1..27: mol_type = other RNA
gaggtgaaggaacaggtcgccgaggtt

SEQ ID NO: 73647 - RNA, 27 nt, synthetic construct
  misc_feature 1..27: note = Ras association domain-containing protein 8 (290-298)
  source 1..27: mol_type = other RNA
gaggtgaagggcaaaatcgggaaggtc

SEQ ID NO: 73648 - RNA, 30 nt, synthetic construct
  misc_feature 1..30: note = Prolyl endopeptidase-like (114-123)
  source 1..30: mol_type = other RNA
gaggtgaagcacggcgggttcgtctactat

SEQ ID NO: 73649 - RNA, 27 nt, synthetic construct
  misc_feature 1..27: note = Ras association domain-containing protein 2 (297-305)
  source 1..27: mol_type = other RNA
gaggtgaagaaactgatgagaaagtac

SEQ ID NO: 73650 - RNA, 27 nt, synthetic construct
  misc_feature 1..27: note = Ethylmalonyl-CoA decarboxylase (36-44)
  source 1..27: mol_type = other RNA
gaggtgaagaaaaccctgcagcaattc

SEQ ID NO: 73651 - RNA, 27 nt, synthetic construct
  misc_feature 1..27: note = Proteasome activator complex subunit 3 (10-18)
  source 1..27: mol_type = other RNA
gaggtgaagctgaaagtcgacagcttc

SEQ ID NO: 73652 - RNA, 27 nt, synthetic construct
  misc_feature 1..27: note = Integrator complex subunit 11 (350-358)
  source 1..27: mol_type = other RNA
gaggtgaagatgcaggtcgaatacatg

SEQ ID NO: 73653 - RNA, 27 nt, synthetic construct
  misc_feature 1..27: note = Elongator complex protein 1 (50-58)
  source 1..27: mol_type = other RNA
gaggtgaagaacgaagtcagcctggtt

SEQ ID NO: 73654 - RNA, 45 nt, synthetic construct
  misc_feature 1..45: note = Delta-1-pyrroline-5-carboxylate synthase (320-334)
  source 1..45: mol_type = other RNA
gaggtgaagcccgccggccctaccgtcgaacagcaaggggagatg

SEQ ID NO: 73655 - RNA, 48 nt, synthetic construct
  misc_feature 1..48: note = Delta-1-pyrroline-5-carboxylate synthase (320-335)
  source 1..48: mol_type = other RNA
gaggtgaagcccgccggccctaccgtcgaacagcaaggggagatggct

SEQ ID NO: 73656 - RNA, 27 nt, synthetic construct
  misc_feature 1..27: note = Ras-related GTP-binding protein D (60-68)
  source 1..27: mol_type = other RNA
gaggtgaagcccagaatcctgctcatg

SEQ ID NO: 73657 - RNA, 27 nt, synthetic construct
  misc_feature 1..27: note = Histone deacetylase 9 (142-150)
  source 1..27: mol_type = other RNA
gaggtgaagcagaaactgcaagaattc

SEQ ID NO: 73658 - RNA, 27 nt, synthetic construct
  misc_feature 1..27: note = Periodic tryptophan protein 1 homolog (31-39)
  source 1..27: mol_type = other RNA
gaggtgaagagactgatcgccgaagct

SEQ ID NO: 73659 - RNA, 27 nt, synthetic construct
  misc_feature 1..27: note = Pachytene checkpoint protein 2 homolog (146-154)
  source 1..27: mol_type = other RNA
gaggtgaagagccacctgctcgactac

SEQ ID NO: 73660 - RNA, 27 nt, synthetic construct
  misc_feature 1..27: note = Apoptosis-inducing factor 1, mitochondrial (276-284)
  source 1..27: mol_type = other RNA
gaggtgaagagcagaaccacactgttc

SEQ ID NO: 73661 - RNA, 27 nt, synthetic construct
  misc_feature 1..27: note = Chloride intracellular channel protein 4 (83-91)
  source 1..27: mol_type = other RNA
gaggtgaagaccgacgtcaacaaaatc

SEQ ID NO: 73662 - RNA, 27 nt, synthetic construct
  misc_feature 1..27: note = Kinetochore-associated protein DSN1 homolog (235-243)
  source 1..27: mol_type = other RNA
gaggtgaaggtcgaacccatgacctac

SEQ ID NO: 73663 - RNA, 27 nt, synthetic construct
  misc_feature 1..27: note = Glycerol-3-phosphate dehydrogenase, mitochondrial (410-418)
  source 1..27: mol_type = other RNA
gaggtgaagtacggcatcaaagaatat

SEQ ID NO: 73664 - RNA, 27 nt, synthetic construct
  misc_feature 1..27: note = Bifunctional coenzyme A synthase (63-71)
  source 1..27: mol_type = other RNA
gaggtgctggacttcatcacccacctc

SEQ ID NO: 73665 - RNA, 30 nt, synthetic construct
  misc_feature 1..30: note = Insulin-like growth factor 2 mRNA-binding protein 2 (95-104)
  source 1..30: mol_type = other RNA
gaggtgctggacggcctccttgcccagtac

SEQ ID NO: 73666 - RNA, 30 nt, synthetic construct
  misc_feature 1..30: note = Serine/threonine-protein kinase PRP4 homolog (170-179)
  source 1..30: mol_type = other RNA
gaggtgctggacaagagatacaacgtctat

SEQ ID NO: 73667 - RNA, 33 nt, synthetic construct
  misc_feature 1..33: note = Estradiol 17-beta-dehydrogenase 1 (203-213)
  source 1..33: mol_type = other RNA
gaggtgctggacagaaccgatatccacacattc

SEQ ID NO: 73668 - RNA, 30 nt, synthetic construct
  misc_feature 1..30: note = Receptor-type protein tyrosine phosphatase beta (1332-1341)
  source 1..30: mol_type = other RNA
gaggtgctggacagccacatccatgcctac

SEQ ID NO: 73669 - RNA, 30 nt, synthetic construct
  misc_feature 1..30: note = Insulin-like growth factor 2 mRNA-binding protein 3 (95-104)
  source 1..30: mol_type = other RNA
gaggtgctggacagcctccttgtccagtac

SEQ ID NO: 73670 - RNA, 27 nt, synthetic construct
  misc_feature 1..27: note = StAR-related lipid transfer protein 7, mitochondrial (136-144)
  source 1..27: mol_type = other RNA
gaggtgctgcactgggtcacccatttc

SEQ ID NO: 73671 - RNA, 30 nt, synthetic construct; identical to SEQ ID NO: 49444
  misc_feature 1..30: note = Ubiquitin-associated protein 1-like (34-43)
  source 1..30: mol_type = other RNA

SEQ ID NO: 73672 - RNA, 30 nt, synthetic construct
  misc_feature 1..30: note = Mitofusin-2 (308-317)
  source 1..30: mol_type = other RNA
gaggtgctgaacgccagaatccagaaggct

SEQ ID NO: 73673 - RNA, 30 nt, synthetic construct
  misc_feature 1..30: note = Exportin-6 (272-281)
  source 1..30: mol_type = other RNA
gaggtgctgaacagaatccagttcaggtac

SEQ ID NO: 73674 - RNA, 30 nt, synthetic construct
  misc_feature 1..30: note = Ancient ubiquitous protein 1 (306-315)
  source 1..30: mol_type = other RNA
gaggtgctgccccacgtccctctcggcgtt

SEQ ID NO: 73675 - RNA, 30 nt, synthetic construct
  misc_feature 1..30: note = Spectrin alpha chain, non-erythrocytic 1 (185-194)
  source 1..30: mol_type = other RNA
gaggtgctgcagaagaaattcgaagagttt

SEQ ID NO: 73676 - RNA, 27 nt, synthetic construct
  misc_feature 1..27: note = Importin-7 (378-386)
  source 1..27: mol_type = other RNA
gaggtgctgcagaagaccatgggcttc

SEQ ID NO: 73677 - RNA, 27 nt, synthetic construct
  misc_feature 1..27: note = Class E basic helix-loop-helix protein 41 (141-149)
  source 1..27: mol_type = other RNA
gaggtgctgcagtacctcagcagattc

SEQ ID NO: 73678 - RNA, 27 nt, synthetic construct
  misc_feature 1..27: note = MAGEC3 protein (192-200)
  source 1..27: mol_type = other RNA
gaggtgctgagcgccatcggcgtctgc

SEQ ID NO: 73679 - RNA, 33 nt, synthetic construct
  misc_feature 1..33: note = Serine/threonine-protein kinase Nek2 (9-19)
  source 1..33: mol_type = other RNA
gaggtgctgtacaccatcggcacagggagctat

SEQ ID NO: 73680 - RNA, 33 nt, synthetic construct
  misc_feature 1..33: note = Ly6/PLAUR domain-containing protein 1 isoform c (73-83)
  source 1..33: mol_type = other RNA
gaggtgatggaacagagcgccggcatcatgtac

SEQ ID NO: 73681 - RNA, 30 nt, synthetic construct
  misc_feature 1..30: note = Protein FAM118A (215-224)
  source 1..30: mol_type = other RNA
gaggtgatggaagtcctgcagaacctctac

SEQ ID NO: 73682 - RNA, 36 nt, synthetic construct
  misc_feature 1..36: note = Proteasome maturation protein (125-136)
  source 1..36: mol_type = other RNA
gaggtgatgggcgaaccccacctgatggtcgagtac

SEQ ID NO: 73683 - RNA, 30 nt, synthetic construct
  misc_feature 1..30: note = Isoprenoid synthase domain-containing protein isoform X7 (103-112)
  source 1..30: mol_type = other RNA
gaggtgatgaagagcatcattcagaaatac

SEQ ID NO: 73684 - RNA, 30 nt, synthetic construct; identical to SEQ ID NO: 49457
  misc_feature 1..30: note = Alkyldihydroxyacetonephosphate synthase, peroxisomal (89-98)
  source 1..30: mol_type = other RNA

SEQ ID NO: 73685 - RNA, 33 nt, synthetic construct
  misc_feature 1..33: note = Protein-L-isoaspartate(D-aspartate) O-methyltransferase (30-40)
  source 1..33: mol_type = other RNA
gaggtgatgctggccaccgacagaagccactac

SEQ ID NO: 73686 - RNA, 30 nt, synthetic construct
  misc_feature 1..30: note = Prolyl 3-hydroxylase 1 (335-344)
  source 1..30: mol_type = other RNA
gaggtgatgaaccagaatctggcctactat

SEQ ID NO: 73687 - RNA, 27 nt, synthetic construct
  misc_feature 1..27: note = tRNA-dihydrouridine(20) synthase (NAD(P)+)-like (227-235)
  source 1..27: mol_type = other RNA
gaggtgatgcagaagtacatcagatat

SEQ ID NO: 73688 - RNA, 30 nt, synthetic construct
  misc_feature 1..30: note = Actin-related protein 2/3 complex subunit 3 (127-136)
  source 1..30: mol_type = other RNA
gaggtgatgagagcctacctgcagcaactc

SEQ ID NO: 73689 - RNA, 27 nt, synthetic construct
  misc_feature 1..27: note = Transcription factor SOX-10 (284-292)
  source 1..27: mol_type = other RNA
gaggtgatgagcaacatggaaaccttc

SEQ ID NO: 73690 - RNA, 30 nt, synthetic construct; identical to SEQ ID NO: 49463
  misc_feature 1..30: note = Mitofusin-2 (23-32)
  source 1..30: mol_type = other RNA

SEQ ID NO: 73691 - RNA, 33 nt, synthetic construct
  misc_feature 1..33: note = Procollagen C-endopeptidase enhancer 2 (220-230)
  source 1..33: mol_type = other RNA
gaggtgaacgacgccagaaggatcggcaagtac

SEQ ID NO: 73692 - RNA, 27 nt, synthetic construct
  misc_feature 1..27: note = Ankycorbin (840-848)
  source 1..27: mol_type = other RNA
gaggtgaacgaactgctccagaagttc

SEQ ID NO: 73693 - RNA, 27 nt, synthetic construct
  misc_feature 1..27: note = mRNA turnover protein 4 homolog (111-119)
  source 1..27: mol_type = other RNA
gaggtgaacgaatggttcaccaagtac

SEQ ID NO: 73694 - RNA, 30 nt, synthetic construct
  misc_feature 1..30: note = Ethanolamine-phosphate cytidylyltransferase (254-263)
  source 1..30: mol_type = other RNA
gaggtgaaccactacaagggcaaaaattat

SEQ ID NO: 73695 - RNA, 27 nt, synthetic construct
  misc_feature 1..27: note = Long-chain-fatty-acid-CoA ligase 4 (89-97)
  source 1..27: mol_type = other RNA
gaggtgaacagaagggtcaataacttc

SEQ ID NO: 73696 - RNA, 27 nt, synthetic construct
  misc_feature 1..27: note = Serpin B8 (76-84)
  source 1..27: mol_type = other RNA
gaggtgaacagaaccggcacacagtac

SEQ ID NO: 73697 - RNA, 27 nt, synthetic construct
  misc_feature 1..27: note = T-complex protein 1 subunit zeta (101-109)
  source 1..27: mol_type = other RNA
gaggtgaacagcggcttcttttacaag

SEQ ID NO: 73698 - RNA, 27 nt, synthetic construct
  misc_feature 1..27: note = Sodium/potassium/calcium exchanger 5 (372-380)
  source 1..27: mol_type = other RNA
gaggtgaacagcagaggcctgacctac

SEQ ID NO: 73699 - RNA, 30 nt, synthetic construct
  misc_feature 1..30: note = Putative PIP5K1A and PSMD4-like protein (632-641)
  source 1..30: mol_type = other RNA
gaggtgaacaccgaaaagctgacagccttc

SEQ ID NO: 73700 - RNA, 33 nt, synthetic construct
  misc_feature 1..33: note = FAST kinase domain-containing protein 1 (204-214)
  source 1..33: mol_type = other RNA
gaggtgaacgtcgccaagagcatcgctaaattc

SEQ ID NO: 73701 - RNA, 27 nt, synthetic construct
  misc_feature 1..27: note = Protein NATD1 (59-67)
  source 1..27: mol_type = other RNA
gaggtgcccgacgcctacagaggcagg

SEQ ID NO: 73702 - RNA, 27 nt, synthetic construct
  misc_feature 1..27: note = Thioredoxin-like protein 4A (65-73)
  source 1..27: mol_type = other RNA
gaggtgcccgacttcaacaagatgtac

SEQ ID NO: 73703 - RNA, 36 nt, synthetic construct
  misc_feature 1..36: note = Cyclin-A2 (174-185)
  source 1..36: mol_type = other RNA
gaggtgcccgactaccacgaagatatccatacctat

SEQ ID NO: 73704 - RNA, 30 nt, synthetic construct
  misc_feature 1..30: note = Protein FAM135B (80-89)
  source 1..30: mol_type = other RNA
gaggtgcccatcaacgacgccgtcgttttc

SEQ ID NO: 73705 - RNA, 27 nt, synthetic construct
  misc_feature 1..27: note = Serine/threonine-protein kinase 36 (1232-1240)
  source 1..27: mol_type = other RNA
gaggtgccccagagactgctcgaaatg

SEQ ID NO: 73706 - RNA, 30 nt, synthetic construct
  misc_feature 1..30: note = La-related protein 1 (262-271)
  source 1..30: mol_type = other RNA
gaggtgcccagagaaaagctggccagcagg

SEQ ID NO: 73707 - RNA, 30 nt, synthetic construct
  misc_feature 1..30: note = Meckel syndrome type 1 protein (150-159)
  source 1..30: mol_type = other RNA
gaggtgcccagcttcctggtcgaaagaatg

SEQ ID NO: 73708 - RNA, 30 nt, synthetic construct; identical to SEQ ID NO: 49481
  misc_feature 1..30: note = Copine-1 (173-182)
  source 1..30: mol_type = other RNA

SEQ ID NO: 73709 - RNA, 39 nt, synthetic construct
  misc_feature 1..39: note = Macrophage-capping protein (97-109)
  source 1..39: mol_type = other RNA
gaggtgcagggcaacgaaagcgacctgttcatgtcctac

SEQ ID NO: 73710 - RNA, 27 nt, synthetic construct
  misc_feature 1..27: note = 26S protease regulatory subunit 8 (142-150)
  source 1..27: mol_type = other RNA
gaggtgcagagaaccatgctggaactc

SEQ ID NO: 73711 - RNA, 27 nt, synthetic construct
  misc_feature 1..27: note = Coatomer subunit gamma-2 (523-531)
  source 1..27: mol_type = other RNA
gaggtgagagacagggccaccttctac

SEQ ID NO: 73712 - RNA, 30 nt, synthetic construct
  misc_feature 1..30: note = Ubiquitin-protein ligase E3C (567-576)
  source 1..30: mol_type = other RNA
gaggtgagagaagagtacatcaccgccttc

SEQ ID NO: 73713 - RNA, 30 nt, synthetic construct
  misc_feature 1..30: note = Lactadherin (36-45)
  source 1..30: mol_type = other RNA
gaggtgagaggcgacgtcttccccagctac

SEQ ID NO: 73714 - RNA, 27 nt, synthetic construct
  misc_feature 1..27: note = Spindle and kinetochore-associated protein 1 (243-251)
  source 1..27: mol_type = other RNA
gaggtgagaggcgggggactgaccagg

SEQ ID NO: 73715 - RNA, 30 nt, synthetic construct
  misc_feature 1..30: note = Spindle and kinetochore-associated protein 1 (243-252)
  source 1..30: mol_type = other RNA
gaggtgagaggcgggggactgaccaggtac

SEQ ID NO: 73716 - RNA, 30 nt, synthetic construct
  misc_feature 1..30: note = GTP-binding protein 1 (445-454)
  source 1..30: mol_type = other RNA
gaggtgagaggcgggcagaccgccagcttc

SEQ ID NO: 73717 - RNA, 27 nt, synthetic construct
  misc_feature 1..27: note = Glutaredoxin-3 (140-148)
  source 1..27: mol_type = other RNA
gaggtgagacagggcctgaaggcctac

SEQ ID NO: 73718 - RNA, 30 nt, synthetic construct
  misc_feature 1..30: note = Fatty acid synthase (674-683)
  source 1..30: mol_type = other RNA
gaggtgagaaccggcgggatggccttccac

SEQ ID NO: 73719 - RNA, 27 nt, synthetic construct
  misc_feature 1..27: note = Putative butyrophilin subfamily 2 member A3 (62-70)
  source 1..27: mol_type = other RNA
gaggtgagatggttccagagccaattt

SEQ ID NO: 73720 - RNA, 27 nt, synthetic construct
  misc_feature 1..27: note = Butyrophilin subfamily 2 member A1 (63-71)
  source 1..27: mol_type = other RNA
gaggtgagatggttcaggagccagttt

SEQ ID NO: 73721 - RNA, 30 nt, synthetic construct
  misc_feature 1..30: note = Interleukin-1 receptor-associated kinase 4 (159-168)
  source 1..30: mol_type = other RNA
gaggtgagcgacaccagattccactccttt

SEQ ID NO: 73722 - RNA, 27 nt, synthetic construct
  misc_feature 1..27: note = E3 ubiquitin-protein ligase UBR5 (24-32)
  source 1..27: mol_type = other RNA
gaggtgagcgaaaagctgaacaaatac

SEQ ID NO: 73723 - RNA, 27 nt, synthetic construct
  misc_feature 1..27: note = Protein FAM111B (228-236)
  source 1..27: mol_type = other RNA
gaggtgagcggcaaggtcctggaaatg

SEQ ID NO: 73724 - RNA, 33 nt, synthetic construct
  misc_feature 1..33: note = Cytosolic carboxypeptidase 1 (764-774)
  source 1..33: mol_type = other RNA
gaggtgagcggcatgagacccggggtcgcctac

SEQ ID NO: 73725 - RNA, 27 nt, synthetic construct
  misc_feature 1..27: note = Alpha-actinin-1 (574-582)
  source 1..27: mol_type = other RNA
gaggtgagcaagatcgtccagacctac

SEQ ID NO: 73726 - RNA, 27 nt, synthetic construct
  misc_feature 1..27: note = cGMP-inhibited 3',5'-cyclic phosphodiesterase B (656-664)
  source 1..27: mol_type = other RNA
gaggtgagcctggacctcatccttgtc

SEQ ID NO: 73727 - RNA, 33 nt, synthetic construct
  misc_feature 1..33: note = Growth hormone-inducible transmembrane protein (303-313)
  source 1..33: mol_type = other RNA
gaggtgagccccatgtacggcgtccagaagtat

SEQ ID NO: 73728 - RNA, 27 nt, synthetic construct
  misc_feature 1..27: note = NADH-ubiquinone oxidoreductase 75 kDa subunit, mitochondrial (537-545)
  source 1..27: mol_type = other RNA
gaggtgagccccaacctggtcagatac

SEQ ID NO: 73729 - RNA, 30 nt, synthetic construct
  misc_feature 1..30: note = Proton myo-inositol cotransporter (179-188)
  source 1..30: mol_type = other RNA
gaggtgagcccccctaacctgagaggcagg

SEQ ID NO: 73730 - RNA, 27 nt, synthetic construct
  misc_feature 1..27: note = Abnormal spindle-like microcephaly-associated protein (322-330)
  source 1..27: mol_type = other RNA
gaggtgagccccagaatccctgaatgc

SEQ ID NO: 73731 - RNA, 30 nt, synthetic construct
  misc_feature 1..30: note = AP-1 complex subunit beta-1 (934-943)
  source 1..30: mol_type = other RNA
gaggtgagccagcacgtctaccaagcctat

SEQ ID NO: 73732 - RNA, 27 nt, synthetic construct
  misc_feature 1..27: note = Transcription factor TFIIIB component B'' homolog (1376-1384)
  source 1..27: mol_type = other RNA
gaggtgagctcccacttctctcatttt

SEQ ID NO: 73733 - RNA, 30 nt, synthetic construct
  misc_feature 1..30: note = Retinoblastoma-like protein 1 (130-139)
  source 1..30: mol_type = other RNA
gaggtgagcaccgtcatcttcaagaaatac

SEQ ID NO: 73734 - RNA, 33 nt, synthetic construct
  misc_feature 1..33: note = Xenotropic and polytropic retrovirus receptor 1 (40-50)
  source 1..33: mol_type = other RNA
gaggtgaccgacgaagatacagtcaagagatac

SEQ ID NO: 73735 - RNA, 30 nt, synthetic construct
  misc_feature 1..30: note = U3 small nucleolar ribonucleoprotein protein IMP3 (22-31)
  source 1..30: mol_type = other RNA
gaggtgaccgaccacaacctgcatgaactc

SEQ ID NO: 73736 - RNA, 27 nt, synthetic construct
  misc_feature 1..27: note = Ankyrin repeat domain-containing protein 54 (279-287)
  source 1..27: mol_type = other RNA
gaggtgaccgacctgctcgccagcttc

SEQ ID NO: 73737 - RNA, 36 nt, synthetic construct
  misc_feature 1..36: note = Protein SET (111-122)
  source 1..36: mol_type = other RNA
gaggtgaccgaattcgaggacatcaagagcggctac

SEQ ID NO: 73738 - RNA, 27 nt, synthetic construct
  misc_feature 1..27: note = Prostaglandin E synthase 2 (201-209)
  source 1..27: mol_type = other RNA
gaggtgaccgaattcggcaacaagtac

SEQ ID NO: 73739 - RNA, 27 nt, synthetic construct
  misc_feature 1..27: note = Zinc finger CCHC domain-containing protein 14 (136-144)
  source 1..27: mol_type = other RNA
gaggtgaccgaattcatcagcaagctg

SEQ ID NO: 73740 - RNA, 27 nt, synthetic construct
  misc_feature 1..27: note = Beta-parvin (274-282)
  source 1..27: mol_type = other RNA
gaggtgaccgaactggagacacagttc

SEQ ID NO: 73741 - RNA, 27 nt, synthetic construct
  misc_feature 1..27: note = Tankyrase-2 (358-366)
  source 1..27: mol_type = other RNA
gaggtgaccgaactgctcgtcaagcac

SEQ ID NO: 73742 - RNA, 27 nt, synthetic construct
  misc_feature 1..27: note = RNA-binding protein 26 (806-814)
  source 1..27: mol_type = other RNA
gaggtgaccgaactgagaaggaagtac

SEQ ID NO: 73743 - RNA, 27 nt, synthetic construct
  misc_feature 1..27: note = Ribonucleoprotein PTB-binding 2 (177-185)
  source 1..27: mol_type = other RNA
gaggtgaccggccacagcaaggggtac

SEQ ID NO: 73744 - RNA, 30 nt, synthetic construct
  misc_feature 1..30: note = Integrin alpha-X (448-457)
  source 1..30: mol_type = other RNA
gaggtgaccggcacacagatcgggagctac

SEQ ID NO: 73745 - RNA, 27 nt, synthetic construct
  misc_feature 1..27: note = Catalase (10-18)
  source 1..27: mol_type = other RNA
gaggtgacccacgacatcacaaagtac

SEQ ID NO: 73746 - RNA, 27 nt, synthetic construct
  misc_feature 1..27: note = Plectin (3906-3914)
  source 1..27: mol_type = other RNA
gaggtgaccaagaacctgcagaaattc

SEQ ID NO: 73747 - RNA, 27 nt, synthetic construct
  misc_feature 1..27: note = EH domain-binding protein 1 (186-194)
  source 1..27: mol_type = other RNA
gaggtgaccaagaactacagaggcgtc

SEQ ID NO: 73748 - RNA, 27 nt, synthetic construct
  misc_feature 1..27: note = Apoptosis-inducing factor 2 (169-177)
  source 1..27: mol_type = other RNA
gaggtgaccctgatccacagccaggtc

SEQ ID NO: 73749 - RNA, 33 nt, synthetic construct
  misc_feature 1..33: note = Ankyrin repeat and KH domain-containing protein 1 (1670-1680)
  source 1..33: mol_type = other RNA
gaggtgacccccaacagcctgtccacatcttac

SEQ ID NO: 73750 - RNA, 30 nt, synthetic construct
  misc_feature 1..30: note = Teneurin-4 (87-96)
  source 1..30: mol_type = other RNA
gaggtgaccccccctcacggcacactgtac

SEQ ID NO: 73751 - RNA, 27 nt, synthetic construct
  misc_feature 1..27: note = Translocon-associated protein subunit gamma (99-107)
  source 1..27: mol_type = other RNA
gaggtgaccagaaagctgagcgaagcc

SEQ ID NO: 73752 - RNA, 27 nt, synthetic construct
  misc_feature 1..27: note = FAD synthase (63-71)
  source 1..27: mol_type = other RNA
gaggtgaccagcttctccaacagattt

SEQ ID NO: 73753 - RNA, 27 nt, synthetic construct
  misc_feature 1..27: note = Probable ATP-dependent RNA helicase DDX5 (30-38)
  source 1..27: mol_type = other RNA
gaggtgaccacagccagaagccagttc

SEQ ID NO: 73754 - RNA, 27 nt, synthetic construct
  misc_feature 1..27: note = EH domain-binding protein 1-like protein 1 (1049-1057)
  source 1..27: mol_type = other RNA
gaggtgaccacaggctacagaggggtc

SEQ ID NO: 73755 - RNA, 27 nt, synthetic construct
  misc_feature 1..27: note = Formin-binding protein 4 (242-250)
  source 1..27: mol_type = other RNA
gaggtgacctgggaactgccccagtac

SEQ ID NO: 73756 - RNA, 27 nt, synthetic construct
  misc_feature 1..27: note = NGFI-A-binding protein 1 (307-315)
  source 1..27: mol_type = other RNA
gaggtgacctacaagtatacatacaga

SEQ ID NO: 73757 - RNA, 30 nt, synthetic construct
  misc_feature 1..30: note = Serine/threonine-protein kinase TAO2 (52-61)
  source 1..30: mol_type = other RNA
gaggtggtcgccatcaagaaaatgagctac

SEQ ID NO: 73758 - RNA, 30 nt, synthetic construct
  misc_feature 1..30: note = Phosphatidate phosphatase LPIN1 (844-853)
  source 1..30: mol_type = other RNA
gaggtggtcgaccacgttttccccctgctc

SEQ ID NO: 73759 - RNA, 27 nt, synthetic construct
  misc_feature 1..27: note = Glutamate decarboxylase 1 (118-126)
  source 1..27: mol_type = other RNA
gaggtggtcgacatcctgctcaactac

SEQ ID NO: 73760 - RNA, 30 nt, synthetic construct
  misc_feature 1..30: note = Nardilysin (988-997)
  source 1..30: mol_type = other RNA
gaggtggtcgacaagaaaatcgaagagttc

SEQ ID NO: 73761 - RNA, 27 nt, synthetic construct
  misc_feature 1..27: note = Lethal(3)malignant brain tumor-like protein 3 (457-465)
  source 1..27: mol_type = other RNA
gaggtggtcgacaagagaaaccccatg

SEQ ID NO: 73762 - RNA, 39 nt, synthetic construct
  misc_feature 1..39: note = Contactin-associated protein-like 4 (182-194)
  source 1..39: mol_type = other RNA
gaggtggtcgacctggatggcaagagctccctcctttac

SEQ ID NO: 73763 - RNA, 27 nt, synthetic construct
  misc_feature 1..27: note = Translation initiation factor eIF-2B subunit gamma (116-124)
  source 1..27: mol_type = other RNA
gaggtggtcgacctgttcagagcctac

SEQ ID NO: 73764 - RNA, 33 nt, synthetic construct
  misc_feature 1..33: note = Translation initiation factor eIF-2B subunit gamma (116-126)
  source 1..33: mol_type = other RNA
gaggtggtcgacctgttcagagcctacgatgct

SEQ ID NO: 73765 - RNA, 27 nt, synthetic construct
  misc_feature 1..27: note = Collagen triple helix repeat-containing protein 1 (46-54)
  source 1..27: mol_type = other RNA
gaggtggtcgacctgtacaacggcatg

SEQ ID NO: 73766 - RNA, 33 nt, synthetic construct
  misc_feature 1..33: note = Unconventional myosin-X (2025-2035)
  source 1..33: mol_type = other RNA
gaggtggtcgacgttgccaagctgatgaaagct

SEQ ID NO: 73767 - RNA, 36 nt, synthetic construct
  misc_feature 1..36: note = Unconventional myosin-X (2025-2036)
  source 1..36: mol_type = other RNA
gaggtggtcgacgttgccaagctgatgaaagcttac

SEQ ID NO: 73768 - RNA, 33 nt, synthetic construct
  misc_feature 1..33: note = Gephyrin (726-736)
  source 1..33: mol_type = other RNA
gaggtggtcgacgttatggtgatcggcagactg

SEQ ID NO: 73769 - RNA, 27 nt, synthetic construct
  misc_feature 1..27: note = Guanine nucleotide-binding protein-like 3-like protein (181-189)
  source 1..27: mol_type = other RNA
gaggtggtcgaaaagtggctggactac

SEQ ID NO: 73770 - RNA, 27 nt, synthetic construct
  misc_feature 1..27: note = Kinetochore protein Nuf2 (271-279)
  source 1..27: mol_type = other RNA
gaggtggtcgaaaagtacgagatctat

SEQ ID NO: 73771 - RNA, 27 nt, synthetic construct
  misc_feature 1..27: note = TBC1 domain family member 13 (209-217)
  source 1..27: mol_type = other RNA
gaggtggtcgaaagaatcctgttcatt

SEQ ID NO: 73772 - RNA, 33 nt, synthetic construct
  misc_feature 1..33: note = Putative ATP-dependent RNA helicase TDRD9 (906-916)
  source 1..33: mol_type = other RNA
gaggtggtcgaagttggccacttctgggggtac

SEQ ID NO: 73773 - RNA, 30 nt, synthetic construct
  misc_feature 1..30: note = Cytosolic non-specific dipeptidase (351-360)
  source 1..30: mol_type = other RNA
gaggtggtcggcgaacaggttaccagctac

SEQ ID NO: 73774 - RNA, 27 nt, synthetic construct
  misc_feature 1..27: note = Nuclear pore complex protein Nup160 (1025-1033)
  source 1..27: mol_type = other RNA
gaggtggtcggcatcattgaaagcaga

SEQ ID NO: 73775 - RNA, 27 nt, synthetic construct
  misc_feature 1..27: note = Pseudopodium-enriched atypical kinase 1 (303-311)
  source 1..27: mol_type = other RNA
gaggtggtcggcaagatcagaagcctg

SEQ ID NO: 73776 - RNA, 33 nt, synthetic construct
  misc_feature 1..33: note = DCN1-like protein 5 (65-75)
  source 1..33: mol_type = other RNA
gaggtggtcggccccgaagggatggagaagttc

SEQ ID NO: 73777 - RNA, 30 nt, synthetic construct; identical to SEQ ID NO: 49550
  misc_feature 1..30: note = 3 beta-hydroxysteroid dehydrogenase type 7 (131-140)
  source 1..30: mol_type = other RNA

SEQ ID NO: 73778 - RNA, 27 nt, synthetic construct
  misc_feature 1..27: note = Tetratricopeptide repeat protein 5 (59-67)
  source 1..27: mol_type = other RNA
gaggtggtcggcagcgttcaggggaag

SEQ ID NO: 73779 - RNA, 33 nt, synthetic construct
  misc_feature 1..33: note = Diacylglycerol kinase theta (848-858)
  source 1..33: mol_type = other RNA
gaggtggtcggcgttaccggggtggtacacatg

SEQ ID NO: 73780 - RNA, 27 nt, synthetic construct
  misc_feature 1..27: note = WD repeat-containing protein 35 (735-743)
  source 1..27: mol_type = other RNA
gaggtggtcggctacttcgggagattt

SEQ ID NO: 73781 - RNA, 27 nt, synthetic construct
  misc_feature 1..27: note = Signal transducer and activator of transcription 1-alpha/beta (212-220)
  source 1..27: mol_type = other RNA
gaggtggtccacaagatcattgaactg

SEQ ID NO: 73782 - RNA, 27 nt, synthetic construct
  misc_feature 1..27: note = Hemicentin-1 (5-13)
  source 1..27: mol_type = other RNA
gaggtggtccacaccgttttcctgttt

SEQ ID NO: 73783 - RNA, 36 nt, synthetic construct
  misc_feature 1..36: note = Midasin (1181-1192)
  source 1..36: mol_type = other RNA
gaggtggtcaaggcccaccccagattcatgctgttt

SEQ ID NO: 73784 - RNA, 27 nt, synthetic construct
  misc_feature 1..27: note = Heat shock protein HSP 90-beta (126-134)
  source 1..27: mol_type = other RNA
gaggtggtcaagaaacacagccagttc

SEQ ID NO: 73785 - RNA, 27 nt, synthetic construct
  misc_feature 1..27: note = Peroxisomal multifunctional enzyme type 2 (641-649)
  source 1..27: mol_type = other RNA
gaggtggtcaagaaagttaacgccgtg

SEQ ID NO: 73786 - RNA, 27 nt, synthetic construct
  misc_feature 1..27: note = 39S ribosomal protein L21, mitochondrial (78-86)
  source 1..27: mol_type = other RNA
gaggtggtcaagaaagttaacgaaatg

SEQ ID NO: 73787 - RNA, 27 nt, synthetic construct
  misc_feature 1..27: note = Non-canonical poly(A) RNA polymerase PAPD7 (53-61)
  source 1..27: mol_type = other RNA
gaggtggtcaagagaatcgaaaccgtt

SEQ ID NO: 73788 - RNA, 39 nt, synthetic construct
  misc_feature 1..39: note = Radial spoke head 10 homolog B2 (158-170)
  source 1..39: mol_type = other RNA
gaggtggtcaacggcatgagaaatgggttcggaatgttt

SEQ ID NO: 73789 - RNA, 33 nt, synthetic construct
  misc_feature 1..33: note = DNA replication licensing factor MCM7 (92-102)
  source 1..33: mol_type = other RNA
gaggtggtcaacaaggacgttctggatgtgtac

SEQ ID NO: 73790 - RNA, 27 nt, synthetic construct
  misc_feature 1..27: note = Unconventional myosin-Ib (290-298)
  source 1..27: mol_type = other RNA
gaggtggtcaacaagatcaatagagcc

SEQ ID NO: 73791 - RNA, 42 nt, synthetic construct
  misc_feature 1..42: note = Protein ELYS (55-68)
  source 1..42: mol_type = other RNA
gaggtggtcaacagcatcaccggcgaaagactgtccgcctac

SEQ ID NO: 73792 - RNA, 27 nt, synthetic construct
  misc_feature 1..27: note = Transcription factor SOX-13 (110-118)
  source 1..27: mol_type = other RNA
gaggtggtccccgccatcgaaaagctg

SEQ ID NO: 73793 - RNA, 27 nt, synthetic construct
  misc_feature 1..27: note = Cathepsin K (85-93)
  source 1..27: mol_type = other RNA
gaggtggtccagaagatgaccggcctg

SEQ ID NO: 73794 - RNA, 27 nt, synthetic construct
  misc_feature 1..27: note = Protein C12orf4 (366-374)
  source 1..27: mol_type = other RNA
gaggtggtccagcaagttgtgctgtac

SEQ ID NO: 73795 - RNA, 27 nt, synthetic construct
  misc_feature 1..27: note = Peptidylprolyl isomerase domain and WD repeat-containing protein 1 (616-624)
  source 1..27: mol_type = other RNA
gaggtggtccagagaatcagcaacgtt

SEQ ID NO: 73796 - RNA, 45 nt, synthetic construct
  misc_feature 1..45: note = Proteasome subunit alpha type-7 (197-211)
  source 1..45: mol_type = other RNA
gaggtggtccagagcggcgggaagaacatcgaactggccgttatg

SEQ ID NO: 73797 - RNA, 27 nt, synthetic construct
  misc_feature 1..27: note = E3 ubiquitin-protein ligase BRE1B (40-48)
  source 1..27: mol_type = other RNA
gaggtggtcagagaaaccggcgagtac

SEQ ID NO: 73798 - RNA, 27 nt, synthetic construct
  misc_feature 1..27: note = Melanoma-associated antigen 12 (168-176)
  source 1..27: mol_type = other RNA
gaggtggtcagaatcggccacctgtac

SEQ ID NO: 73799 - RNA, 27 nt, synthetic construct
  misc_feature 1..27: note = Unconventional myosin-IXb (955-963)
  source 1..27: mol_type = other RNA
gaggtggtcagaaagatcctgctcctt

SEQ ID NO: 73800 - RNA, 30 nt, synthetic construct
  misc_feature 1..30: note = Cytoskeleton-associated protein 5 (88-97)
  source 1..30: mol_type = other RNA
gaggtggtcagcggcgttgtgtccaaggta

SEQ ID NO: 73801 - RNA, 27 nt, synthetic construct
  misc_feature 1..27: note = Ubiquitin-conjugating enzyme E2 variant 3 (232-240)
  source 1..27: mol_type = other RNA
gaggtggtcagccacacctcccaggtt

SEQ ID NO: 73802 - RNA, 33 nt, synthetic construct
  misc_feature 1..33: note = RNA demethylase ALKBH5 (109-119)
  source 1..33: mol_type = other RNA
gaggtggtcagcagagccgaaaagggcctgtac

SEQ ID NO: 73803 - RNA, 30 nt, synthetic construct
  misc_feature 1..30: note = Integrator complex subunit 1 (1714-1723)
  source 1..30: mol_type = other RNA
gaggtggtcagctccaccgttagagccgtg

SEQ ID NO: 73804 - RNA, 33 nt, synthetic construct
  misc_feature 1..33: note = Cullin-3 (55-65)
  source 1..33: mol_type = other RNA
gaggtggtcaccgaacacctgatcaacaaggtt

SEQ ID NO: 73805 - RNA, 33 nt, synthetic construct
  misc_feature 1..33: note = Ankyrin repeat and zinc finger domain-containing protein 1 (16-26)
  source 1..33: mol_type = other RNA
gaggtggtcacccacaagacattccatagatac

SEQ ID NO: 73806 - RNA, 30 nt, synthetic construct
  misc_feature 1..30: note = Cyclin-dependent kinase 2 (224-233)
  source 1..30: mol_type = other RNA
gaggtggtctggcccggcgttaccagcatg

SEQ ID NO: 73807 - RNA, 39 nt, synthetic construct
  misc_feature 1..39: note = Contactin-associated protein-like 3B (182-194)
  source 1..39: mol_type = other RNA
gaggtggtctacttcgacggccagagcgccctgctctat

SEQ ID NO: 73808 - RNA, 27 nt, synthetic construct
  misc_feature 1..27: note = DDB1- and CUL4-associated factor 7 (176-184)
  source 1..27: mol_type = other RNA
gaggtgtacgacatcgccttcagcaga

SEQ ID NO: 73809 - RNA, 30 nt, synthetic construct
  misc_feature 1..30: note = DDB1- and CUL4-associated factor 7 (176-185)
  source 1..30: mol_type = other RNA
gaggtgtacgacatcgccttcagcagagct

SEQ ID NO: 73810 - RNA, 36 nt, synthetic construct
  misc_feature 1..36: note = Melanotransferrin (97-108)
  source 1..36: mol_type = other RNA
gaggtgtacgaccaggaagtcggcaccagctattac

SEQ ID NO: 73811 - RNA, 30 nt, synthetic construct
  misc_feature 1..30: note = Nuclear pore complex protein Nup155 (1301-1310)
  source 1..30: mol_type = other RNA
gaggtgtacgaccagctgttcaagagcaga

SEQ ID NO: 73812 - RNA, 27 nt, synthetic construct
  misc_feature 1..27: note = Protein polybromo-1 (670-678)
  source 1..27: mol_type = other RNA
gaggtgtacgaagccgtcaagaactat

SEQ ID NO: 73813 - RNA, 30 nt, synthetic construct
  misc_feature 1..30: note = DNA-directed RNA polymerase, mitochondrial (459-468)
  source 1..30: mol_type = other RNA
gaggtgtacgaaggcagattcagcctgtat

SEQ ID NO: 73814 - RNA, 33 nt, synthetic construct
  misc_feature 1..33: note = DNA-directed RNA polymerase, mitochondrial (459-469)
  source 1..33: mol_type = other RNA
gaggtgtacgaaggcagattcagcctgtatccc

SEQ ID NO: 73815 - RNA, 30 nt, synthetic construct
  misc_feature 1..30: note = Tyrosine-protein kinase ABL1 (255-264)
  source 1..30: mol_type = other RNA
gaggtgtacgaaggcgtctggaagaaatat

SEQ ID NO: 73816 - RNA, 30 nt, synthetic construct
  misc_feature 1..30: note = Protein lin-7 homolog C (52-61)
  source 1..30: mol_type = other RNA
gaggtgtacgaacacgtctatgagaccgtt

SEQ ID NO: 73817 - RNA, 27 nt, synthetic construct
  misc_feature 1..27: note = Zinc finger protein 292 (337-345)
  source 1..27: mol_type = other RNA
gaggtgtacgaaaaggtcgttgactat

SEQ ID NO: 73818 - RNA, 33 nt, synthetic construct
  misc_feature 1..33: note = Muscular LMNA-interacting protein (350-360)
  source 1..33: mol_type = other RNA
gaggtgtacgaacccaaccctttcagcaagtat

SEQ ID NO: 73819 - RNA, 27 nt, synthetic construct
  misc_feature 1..27: note = rRNA methyltransferase 2, mitochondrial (229-237)
  source 1..27: mol_type = other RNA
gaggtgtacttcctggccacccagtat

SEQ ID NO: 73820 - RNA, 30 nt, synthetic construct; identical to SEQ ID NO: 49593
  misc_feature 1..30: note = Large neutral amino acids transporter small subunit 1 (122-131)
  source 1..30: mol_type = other RNA

SEQ ID NO: 73821 - RNA, 36 nt, synthetic construct
  misc_feature 1..36: note = Procollagen-lysine,2-oxoglutarate 5-dioxygenase 2 (336-347)
  source 1..36: mol_type = other RNA
gaggtgtaccacgaaaaggacatcaaagtcttcttt

SEQ ID NO: 73822 - RNA, 30 nt, synthetic construct
  misc_feature 1..30: note = Nucleoside diphosphate kinase 7 (250-259)
  source 1..30: mol_type = other RNA
gaggtgtacaagggcgtcgttaccgaatat

SEQ ID NO: 73823 - RNA, 33 nt, synthetic construct
  misc_feature 1..33: note = Ras GTPase-activating-like protein IQGAP3 (1166-1176)
  source 1..33: mol_type = other RNA
gaggtgtacaaggtcgttggcaacctgctctat

SEQ ID NO: 73824 - RNA, 30 nt, synthetic construct
  misc_feature 1..30: note = Kinesin-like protein KIF14 (5-14)
  source 1..30: mol_type = other RNA
gaggtgtacaacgaaaagatccacgacctg

SEQ ID NO: 73825 - RNA, 30 nt, synthetic construct
  misc_feature 1..30: note = Kinesin-like protein KIF18B (166-175)
  source 1..30: mol_type = other RNA
gaggtgtacaacgaacagatccacgacctg

SEQ ID NO: 73826 - RNA, 30 nt, synthetic construct
  misc_feature 1..30: note = Kinesin-like protein KIF18A (161-170)
  source 1..30: mol_type = other RNA
gaggtgtacaacgaacagatcagagacctg

SEQ ID NO: 73827 - RNA, 27 nt, synthetic construct
  misc_feature 1..27: note = F-box only protein 32 (44-52)
  source 1..27: mol_type = other RNA
gaggtgtacaacaaggaaaatctgttc

SEQ ID NO: 73828 - RNA, 39 nt, synthetic construct
  misc_feature 1..39: note = Tyrosinase (409-421)
  source 1..39: mol_type = other RNA
gaggtgtaccccgaagccaacgctcctatcggccacaat

SEQ ID NO: 73829 - RNA, 36 nt, synthetic construct
  misc_feature 1..36: note = Ubiquitin carboxyl-terminal hydrolase 11 (150-161)
  source 1..36: mol_type = other RNA
gaggtgtaccccgtcgaactgctccttgttagacac

SEQ ID NO: 73830 - RNA, 27 nt, synthetic construct
  misc_feature 1..27: note = E3 ubiquitin-protein ligase UBR2 (37-45)
  source 1..27: mol_type = other RNA
gaggtgtaccagcacctggcccattat

SEQ ID NO: 73831 - RNA, 30 nt, synthetic construct
  misc_feature 1..30: note = Small nuclear ribonucleoprotein Sm D3 (26-35)
  source 1..30: mol_type = other RNA
gaggtgtacagaggcaagctgatcgaagcc

SEQ ID NO: 73832 - RNA, 30 nt, synthetic construct
  misc_feature 1..30: note = Transmembrane protein 201 (151-160)
  source 1..30: mol_type = other RNA
gaggtgtacagacaccatctggaacagatg

SEQ ID NO: 73833 - RNA, 33 nt, synthetic construct
  misc_feature 1..33: note = Pre-mRNA-processing-splicing factor 8 (2324-2334)
  source 1..33: mol_type = other RNA
gaggtgtacagcgccgacagagaagatctgtat

SEQ ID NO: 73834 - RNA, 33 nt, synthetic construct
  misc_feature 1..33: note = Semaphorin-7A (114-124)
  source 1..33: mol_type = other RNA
gaggtgtacagcaccatcagaaagcaggaatat

SEQ ID NO: 73835 - RNA, 33 nt, synthetic construct
  misc_feature 1..33: note = cAMP-dependent protein kinase type I-alpha regulatory subunit (103-113)
  source 1..33: mol_type = other RNA
gaggtgtacaccgaagaggacgccgctagctat

SEQ ID NO: 73836 - RNA, 30 nt, synthetic construct
  misc_feature 1..30: note = Arf-GAP with Rho-GAP domain, ANK repeat and PH domain-containing protein 1 (574-583)
  source 1..30: mol_type = other RNA
gaggtgtacaccgaaggcgagagactgtat

SEQ ID NO: 73837 - RNA, 30 nt, synthetic construct; identical to SEQ ID NO: 49610
  misc_feature 1..30: note = DNA repair endonuclease XPF (99-108)
  source 1..30: mol_type = other RNA

SEQ ID NO: 73838 - RNA, 30 nt, synthetic construct
  misc_feature 1..30: note = Signal transducer and activator of transcription 2 (831-840)
  source 1..30: mol_type = other RNA
gaggtgtacgtcagcagaccctcccacttc

SEQ ID NO: 73839 - RNA, 33 nt, synthetic construct
  misc_feature 1..33: note = Signal transducer and activator of transcription 2 (831-841)
  source 1..33: mol_type = other RNA
gaggtgtacgtcagcagaccctcccacttctat

SEQ ID NO: 73840 - RNA, 27 nt, synthetic construct
  misc_feature 1..27: note = Phospholipase A-2-activating protein (168-176)
  source 1..27: mol_type = other RNA
gaggtgtactatggccacaccaactac

SEQ ID NO: 73841 - RNA, 33 nt, synthetic construct
  misc_feature 1..33: note = Phospholipase A-2-activating protein (168-178)
  source 1..33: mol_type = other RNA
gaggtgtactatggccacaccaactacatctat

SEQ ID NO: 73842 - RNA, 27 nt, synthetic construct
  misc_feature 1..27: note = Protein virilizer homolog (485-493)
  source 1..27: mol_type = other RNA
ttcgccgaccacgtgagctcctctctg

SEQ ID NO: 73843 - RNA, 27 nt, synthetic construct
  misc_feature 1..27: note = CLIP-associating protein 1 (877-885)
  source 1..27: mol_type = other RNA
ttcgccgacccccacagcaagagagtg

SEQ ID NO: 73844 - RNA, 30 nt, synthetic construct
  misc_feature 1..30: note = CLIP-associating protein 1 (877-886)
  source 1..30: mol_type = other RNA
ttcgccgacccccacagcaagagagtgttt

SEQ ID NO: 73845 - RNA, 27 nt, synthetic construct
  misc_feature 1..27: note = Calmodulin-regulated spectrin-associated protein 2 (673-681)
  source 1..27: mol_type = other RNA
ttcgccgagcagaagtttagaaaactg

SEQ ID NO: 73846 - RNA, 30 nt, synthetic construct
  misc_feature 1..30: note = Sorting nexin-17 (460-469)
  source 1..30: mol_type = other RNA
ttcgcctttgagggcatcggggacgaagat

SEQ ID NO: 73847 - RNA, 27 nt, synthetic construct
  misc_feature 1..27: note = Melanoma-associated antigen C1 (1035-1043)
  source 1..27: mol_type = other RNA
ttcgcctttggcgagcccagagaactg

SEQ ID NO: 73848 - RNA, 48 nt, synthetic construct
  misc_feature 1..48: note = POTE ankyrin domain family member F (721-736)
  source 1..48: mol_type = other RNA
ttcgccggcgacgatgctcccagagcagtgtttcctagcatcgtcggg

SEQ ID NO: 73849 - RNA, 33 nt, synthetic construct
  misc_feature 1..33: note = Up-regulator of cell proliferation (600-610)
  source 1..33: mol_type = other RNA
ttcgcccactttcccggcctggctagcgagctc

SEQ ID NO: 73850 - RNA, 27 nt, synthetic construct
  misc_feature 1..27: note = Glycerol-3-phosphate dehydrogenase, mitochondrial (27-35)
  source 1..27: mol_type = other RNA
ttcgcccactacagaaggaagcagatg

SEQ ID NO: 73851 - RNA, 24 nt, synthetic construct
  misc_feature 1..24: note = Alpha-catulin (24-31)
  source 1..24: mol_type = other RNA
ttcgccctggacagcggcctcgag

SEQ ID NO: 73852 - RNA, 33 nt, synthetic construct; identical to SEQ ID NO: 49625
  misc_feature 1..33: note = Melanocyte protein PMEL (247-257)
  source 1..33: mol_type = other RNA

SEQ ID NO: 73853 - RNA, 30 nt, synthetic construct
  misc_feature 1..30: note = Eukaryotic translation initiation factor 3 subunit E (53-62)
  source 1..30: mol_type = other RNA
ttcgccatggacgtgtacaagaacctgtat

SEQ ID NO: 73854 - RNA, 27 nt, synthetic construct
  misc_feature 1..27: note = NHL repeat-containing protein 2 (407-415)
  source 1..27: mol_type = other RNA
ttcgcccagcccagcggcctgtccctc

SEQ ID NO: 73855 - RNA, 27 nt, synthetic construct
  misc_feature 1..27: note = Dynactin subunit 1 (1206-1214)
  source 1..27: mol_type = other RNA
ttcgccacctttcccagctccgctttc

SEQ ID NO: 73856 - RNA, 24 nt, synthetic construct
  misc_feature 1..24: note = Translocon-associated protein subunit gamma (75-82)
  source 1..24: mol_type = other RNA
ttcgcctacaagaacgtgaaattt

SEQ ID NO: 73857 - RNA, 36 nt, synthetic construct
  misc_feature 1..36: note = Protein disulfide-isomerase A3 (160-171)
  source 1..36: mol_type = other RNA
ttcgacgatagcttttccgaggcccactctgaattc

SEQ ID NO: 73858 - RNA, 27 nt, synthetic construct
  misc_feature 1..27: note = Phosphatidylinositol 3,4,5-trisphosphate 3-phosphatase and dual-specificity protein phosphatase PTEN (90-98)
  source 1..27: mol_type = other RNA
ttcgaggaccacaacccccctcagctg

SEQ ID NO: 73859 - RNA, 45 nt, synthetic construct
  misc_feature 1..45: note = Keratin, type I cytoskeletal 9 (465-479)
  source 1..45: mol_type = other RNA
ttcgagagctccggcgccgggaagatcggactgggtggcagaggg

SEQ ID NO: 73860 - RNA, 48 nt, synthetic construct
  misc_feature 1..48: note = Keratin, type I cytoskeletal 9 (465-480)
  source 1..48: mol_type = other RNA
ttcgagagctccggcgccgggaagatcggactgggtggcagaggggga

SEQ ID NO: 73861 - RNA, 36 nt, synthetic construct
  misc_feature 1..36: note = Interleukin enhancer-binding factor 3 (693-704)
  source 1..36: mol_type = other RNA
ttctttaccgactgctacggctatcacgatttcggg

SEQ ID NO: 73862 - RNA, 42 nt, synthetic construct
  misc_feature 1..42: note = Interleukin enhancer-binding factor 3 (693-706)
  source 1..42: mol_type = other RNA
ttctttaccgactgctacggctatcacgatttcgggagctcc

SEQ ID NO: 73863 - RNA, 30 nt, synthetic construct
  misc_feature 1..30: note = Apolipoprotein B-100 (2396-2405)
  source 1..30: mol_type = other RNA
ttcatcgacgatgccgtgaagaaactgaac

SEQ ID NO: 73864 - RNA, 27 nt, synthetic construct
  misc_feature 1..27: note = Probable tRNA (uracil-O(2)-)-methyltransferase (608-616)
  source 1..27: mol_type = other RNA
ttcatcgaccaggtggtcctgcaagtt

SEQ ID NO: 73865 - RNA, 33 nt, synthetic construct
  misc_feature 1..33: note = Plexin-A2 (789-799)
  source 1..33: mol_type = other RNA
ttcatcattgacaacccccaggatctgaaggtg

SEQ ID NO: 73866 - RNA, 39 nt, synthetic construct
  misc_feature 1..39: note = Filamin-A (2041-2053)
  source 1..39: mol_type = other RNA
ttcatcattgacaccagagatgccggctacgggggactg

SEQ ID NO: 73867 - RNA, 45 nt, synthetic construct
  misc_feature 1..45: note = Filamin-A (2041-2055)
  source 1..45: mol_type = other RNA
ttcatcattgacaccagagatgccggctacgggggactgagcctc

SEQ ID NO: 73868 - RNA, 27 nt, synthetic construct
  misc_feature 1..27: note = Uncharacterized protein CXorf57 (552-560)
  source 1..27: mol_type = other RNA
ttcatcctgtttttctacggcagcgac

SEQ ID NO: 73869 - RNA, 33 nt, synthetic construct
  misc_feature 1..33: note = Sorting nexin-14 (234-244)
  source 1..33: mol_type = other RNA
ttcctggccgaccccgataccgtgaaccacctc

SEQ ID NO: 73870 - RNA, 36 nt, synthetic construct
  misc_feature 1..36: note = Protein YIF1B (69-80)
  source 1..36: mol_type = other RNA
ttcctggccgaccccgtgagcaacatggctatggca

SEQ ID NO: 73871 - RNA, 30 nt, synthetic construct
  misc_feature 1..30: note = Class E basic helix-loop-helix protein 41 (366-375)
  source 1..30: mol_type = other RNA
ttcctggacaagagcggcctcgagaaatac

SEQ ID NO: 73872 - RNA, 36 nt, synthetic construct
  misc_feature 1..36: note = Class E basic helix-loop-helix protein 41 (366-377)
  source 1..36: mol_type = other RNA
ttcctggacaagagcggcctcgagaaatacctttat

SEQ ID NO: 73873 - RNA, 30 nt, synthetic construct
  misc_feature 1..30: note = Ceramide synthase 1 (207-216)
  source 1..30: mol_type = other RNA
ttcctgcacgacatcagcgatgtgcagctc

SEQ ID NO: 73874 - RNA, 27 nt, synthetic construct
  misc_feature 1..27: note = Exostosin-2 (253-261)
  source 1..27: mol_type = other RNA
ttcctgctcagctcccaggtgggcctt

SEQ ID NO: 73875 - RNA, 33 nt, synthetic construct
  misc_feature 1..33: note = Uncharacterized protein C15orf61 (147-157)
  source 1..33: mol_type = other RNA
ttcctgaacaaggaggacgaaggcgccatgtac

SEQ ID NO: 73876 - RNA, 27 nt, synthetic construct
  misc_feature 1..27: note = Spatacsin (617-625)
  source 1..27: mol_type = other RNA
ttcctgaacaatcagatcaaggagctc

SEQ ID NO: 73877 - RNA, 27 nt, synthetic construct
  misc_feature 1..27: note = 2',3'-cyclic-nucleotide 3'-phosphodiesterase (12-20)
  source 1..27: mol_type = other RNA
ttcctgcccaagatctttttcagaaaa

SEQ ID NO: 73878 - RNA, 33 nt, synthetic construct
  misc_feature 1..33: note = Polyphosphoinositide phosphatase (404-414)
  source 1..33: mol_type = other RNA
ttcctgccccctgagcacaccatcgtgtacatt

SEQ ID NO: 73879 - RNA, 30 nt, synthetic construct
  misc_feature 1..30: note = Alpha/beta hydrolase domain-containing protein 17C (35-44)
  source 1..30: mol_type = other RNA
ttcctgccccctgagccaacctacacagtg

SEQ ID NO: 73880 - RNA, 33 nt, synthetic construct
  misc_feature 1..33: note = Zinc finger protein with KRAB and SCAN domains 1 (104-114)
  source 1..33: mol_type = other RNA
ttcctgagcatcctccccaaggagcttcaggtg

SEQ ID NO: 73881 - RNA, 30 nt, synthetic construct; identical to SEQ ID NO: 49654
  misc_feature 1..30: note = Presenilin-2 (437-446)
  source 1..30: mol_type = other RNA

SEQ ID NO: 73882 - RNA, 33 nt, synthetic construct; identical to SEQ ID NO: 49655
  misc_feature 1..33: note = Presenilin-2 (437-447)
  source 1..33: mol_type = other RNA

SEQ ID NO: 73883 - RNA, 36 nt, synthetic construct; identical to SEQ ID NO: 49656
  misc_feature 1..36: note = Presenilin-2 (437-448)
  source 1..36: mol_type = other RNA

SEQ ID NO: 73884 - RNA, 33 nt, synthetic construct
  misc_feature 1..33: note = Protein tyrosine phosphatase type IVA 1 (23-33)
  source 1..33: mol_type = other RNA
ttcatggagtttctgaagggcagcggggactac

SEQ ID NO: 73885 - RNA, 27 nt, synthetic construct
  misc_feature 1..27: note = SHC-transforming protein 4 (33-41)
  source 1..27: mol_type = other RNA
ttcagaaacgagagcatcacctccctg

SEQ ID NO: 73886 - RNA, 30 nt, synthetic construct
  misc_feature 1..30: note = Caprin-1 (656-665)
  source 1..30: mol_type = other RNA
ttcagcgcccccagagactactccggctat

SEQ ID NO: 73887 - RNA, 27 nt, synthetic construct
  misc_feature 1..27: note = Uncharacterized protein CXorf23 (6-14)
  source 1..27: mol_type = other RNA
ttcagcgacggcagaacccagaagtac

SEQ ID NO: 73888 - RNA, 36 nt, synthetic construct
  misc_feature 1..36: note = DNA-directed RNA polymerase I subunit RPA2 (493-504)
  source 1..36: mol_type = other RNA
ttcagcgaccacaaccagtcccccagaaatatgtac

SEQ ID NO: 73889 - RNA, 33 nt, synthetic construct
  misc_feature 1..33: note = Serine/threonine-protein kinase RIO2 (416-426)
  source 1..33: mol_type = other RNA
ttcagcgaggaaaagaacagaaccgagaattac

SEQ ID NO: 73890 - RNA, 30 nt, synthetic construct; identical to SEQ ID NO: 49663
  misc_feature 1..30: note = Tubulin alpha-1C chain (18-27)
  source 1..30: mol_type = other RNA

SEQ ID NO: 73891 - RNA, 24 nt, synthetic construct
  misc_feature 1..24: note = Nucleosome assembly protein 1-like 1 (245-252)
  source 1..24: mol_type = other RNA
ttcagctttgacggccccgagatc

SEQ ID NO: 73892 - RNA, 30 nt, synthetic construct
  misc_feature 1..30: note = RNA-binding protein EWS (285-294)
  source 1..30: mol_type = other RNA
ttcagcggccccggggagaacagatccatg

SEQ ID NO: 73893 - RNA, 27 nt, synthetic construct
  misc_feature 1..27: note = 40S ribosomal protein S27 (111-119)
  source 1..27: mol_type = other RNA
ttcagccacgcccagaccgtggtcctg

SEQ ID NO: 73894 - RNA, 27 nt, synthetic construct
  misc_feature 1..27: note = ADP-ribose pyrophosphatase, mitochondrial (257-265)
  source 1..27: mol_type = other RNA
ttcagccaggaccacctggtgatctac

SEQ ID NO: 73895 - RNA, 51 nt, synthetic construct
  misc_feature 1..51: note = PERQ amino acid-rich with GYF domain-containing protein 2 (1273-1289)
  source 1..51: mol_type = other RNA
ttcagcgtgaacgcctcctctgagagactgaatatgggcgaaatcgagacc

SEQ ID NO: 73896 - RNA, 33 nt, synthetic construct
  misc_feature 1..33: note = Serine/threonine-protein kinase Sgk1 (516-526)
  source 1..33: mol_type = other RNA
ttcagctacgccccccctaccgactcctttctg

SEQ ID NO: 73897 - RNA, 33 nt, synthetic construct
  misc_feature 1..33: note = Transcription factor SOX-10 (425-435)
  source 1..33: mol_type = other RNA
ttcagctacatgggcccctcccagagacctctg

SEQ ID NO: 73898 - RNA, 33 nt, synthetic construct
  misc_feature 1..33: note = Protein argonaute-3 (775-785)
  source 1..33: mol_type = other RNA
ttcaccgccgacgagctgcagctccttacatac

SEQ ID NO: 73899 - RNA, 27 nt, synthetic construct
  misc_feature 1..27: note = Protein FAM102B (9-17)
  source 1..27: mol_type = other RNA
ttcaccgccgagagctccagagaagtg

SEQ ID NO: 73900 - RNA, 27 nt, synthetic construct
  misc_feature 1..27: note = Dipeptidyl peptidase 2 (373-381)
  source 1..27: mol_type = other RNA
ttcaccgacgagctgagacagaggtac

SEQ ID NO: 73901 - RNA, 27 nt, synthetic construct
  misc_feature 1..27: note = Membrane-associated transporter protein (338-346)
  source 1..27: mol_type = other RNA
ttcaccgactttatgggccagatcgtg

SEQ ID NO: 73902 - RNA, 30 nt, synthetic construct
  misc_feature 1..30: note = Membrane-associated transporter protein (338-347)
  source 1..30: mol_type = other RNA
ttcaccgactttatgggccagatcgtgtac

SEQ ID NO: 73903 - RNA, 24 nt, synthetic construct
  misc_feature 1..24: note = Probable guanine nucleotide exchange factor MCF2L2 (62-69)
  source 1..24: mol_type = other RNA
ttcaccgacatcggcattaagtac

SEQ ID NO: 73904 - RNA, 30 nt, synthetic construct
  misc_feature 1..30: note = Testis-expressed sequence 10 protein (107-116)
  source 1..30: mol_type = other RNA
ttcaccgacaaggatgccaacgtgagactg

SEQ ID NO: 73905 - RNA, 27 nt, synthetic construct
  misc_feature 1..27: note = Semaphorin-5A (1065-1073)
  source 1..27: mol_type = other RNA
ttcaccgacctgaacaattacgatgag

SEQ ID NO: 73906 - RNA, 30 nt, synthetic construct
  misc_feature 1..30: note = Semaphorin-5A (1065-1074)
  source 1..30: mol_type = other RNA
ttcaccgacctgaacaattacgatgagtat

SEQ ID NO: 73907 - RNA, 27 nt, synthetic construct
  misc_feature 1..27: note = Tubulin polyglutamylase complex subunit 1 (17-25)
  source 1..27: mol_type = other RNA
ttcaccgacagcggcagacagtccgtg

SEQ ID NO: 73908 - RNA, 33 nt, synthetic construct
  misc_feature 1..33: note = Leucine-rich repeat-containing protein 42 (128-138)
  source 1..33: mol_type = other RNA
ttcaccgagcccggcgccgggctgagagctctc

SEQ ID NO: 73909 - RNA, 27 nt, synthetic construct
  misc_feature 1..27: note = AF4/FMR2 family member 1 (3-11)
  source 1..27: mol_type = other RNA
ttcaccgagagagtgaacagctccggc

SEQ ID NO: 73910 - RNA, 21 nt, synthetic construct
  misc_feature 1..21: note = von Willebrand factor A domain-containing protein 9 (129-135)
  source 1..21: mol_type = other RNA
ttcaccatcgacggccccctg

SEQ ID NO: 73911 - RNA, 27 nt, synthetic construct
  misc_feature 1..27: note = Elongator complex protein 1 (934-942)
  source 1..27: mol_type = other RNA
ttcaccatcgacaagtacctgaaaaga

SEQ ID NO: 73912 - RNA, 51 nt, synthetic construct
  misc_feature 1..51: note = Melanocyte protein PMEL (214-230)
  source 1..51: mol_type = other RNA
ttcaccatcacagaccaggtgccctttagcgtctccgtttctcaactgaga

SEQ ID NO: 73913 - RNA, 33 nt, synthetic construct
  misc_feature 1..33: note = Hypoxia-inducible factor 1-alpha (295-305)
  source 1..33: mol_type = other RNA
ttcaccaagggccaggtgacaactgggcaatac

SEQ ID NO: 73914 - RNA, 27 nt, synthetic construct
  misc_feature 1..27: note = Ropporin-1B (203-211)
  source 1..27: mol_type = other RNA
ttcacccagaaccccagagtgtggctg

SEQ ID NO: 73915 - RNA, 24 nt, synthetic construct
  misc_feature 1..24: note = Nephrocystin-4 (1264-1271)
  source 1..24: mol_type = other RNA
ttcaccagccacccccaggagctg

SEQ ID NO: 73916 - RNA, 27 nt, synthetic construct
  misc_feature 1..27: note = Very-long-chain enoyl-CoA reductase (119-127)
  source 1..27: mol_type = other RNA
ttcaccagctccagacacacagtggtc

SEQ ID NO: 73917 - RNA, 27 nt, synthetic construct
  misc_feature 1..27: note = Cytoplasmic dynein 2 heavy chain 1 (2484-2492)
  source 1..27: mol_type = other RNA
ttcaccgtggacgattacagccactat

SEQ ID NO: 73918 - RNA, 45 nt, synthetic construct
  misc_feature 1..45: note = Cleft lip and palate transmembrane protein 1-like protein (157-171)
  source 1..45: mol_type = other RNA
ttcgtgtttgacggcagctccctgcccgccgatgtccacagatac

SEQ ID NO: 73919 - RNA, 33 nt, synthetic construct
  misc_feature 1..33: note = TNF receptor-associated factor 4 (202-212)
  source 1..33: mol_type = other RNA
ttcgtgtttgacaccatccagagccaccaatac

SEQ ID NO: 73920 - RNA, 27 nt, synthetic construct
  misc_feature 1..27: note = NADH dehydrogenase (ubiquinone) 1 beta subcomplex subunit 1 (32-40)
  source 1..27: mol_type = other RNA
ttcgtgatcggctgctacctggacaga

SEQ ID NO: 73921 - RNA, 33 nt, synthetic construct
  misc_feature 1..33: note = FAD-dependent oxidoreductase domain-containing protein 2 (493-503)
  source 1..33: mol_type = other RNA
ttcgtgatcaacatggagtacggcagaaatttt

SEQ ID NO: 73922 - RNA, 27 nt, synthetic construct
  misc_feature 1..27: note = Ran GTPase-activating protein 1 (562-570)
  source 1..27: mol_type = other RNA
ttcgtgaccaagcccaacagcgccctg

SEQ ID NO: 73923 - RNA, 27 nt, synthetic construct
  misc_feature 1..27: note = Long-chain-fatty-acid-CoA ligase 3 (624-632)
  source 1..27: mol_type = other RNA
ttcgtggtccccaaccagaaggagctg

SEQ ID NO: 73924 - RNA, 30 nt, synthetic construct
  misc_feature 1..30: note = Mitochondrial folate transporter/carrier (297-306)
  source 1..30: mol_type = other RNA
ttcgtggtctacgagaacgttagccacttt

SEQ ID NO: 73925 - RNA, 30 nt, synthetic construct
  misc_feature 1..30: note = F-box only protein 21 (602-611)
  source 1..30: mol_type = other RNA
ttcgtgtacgagaccgtccagaacatctat

SEQ ID NO: 73926 - RNA, 33 nt, synthetic construct
  misc_feature 1..33: note = Transmembrane protein 181 (554-564)
  source 1..33: mol_type = other RNA
ttcgtgtacagcccctccaagaacgccctgtat

SEQ ID NO: 73927 - RNA, 27 nt, synthetic construct
  misc_feature 1..27: note = GDP-fucose protein O-fucosyltransferase 1 (2-10)
  source 1..27: mol_type = other RNA
ggcgccgctgcatgggccagacccctg

SEQ ID NO: 73928 - RNA, 27 nt, synthetic construct
  misc_feature 1..27: note = Zinc finger and BTB domain-containing protein 7A (137-145)
  source 1..27: mol_type = other RNA
ggcgccgacgctgggcagctggatctc

SEQ ID NO: 73929 - RNA, 30 nt, synthetic construct
  misc_feature 1..30: note = 3'(2'),5'-bisphosphate nucleotidase 1 (176-185)
  source 1..30: mol_type = other RNA
ggcgccttcgggtttcagctgaaggaggtg

SEQ ID NO: 73930 - RNA, 27 nt, synthetic construct
  misc_feature 1..27: note = X-ray repair cross-complementing protein 5 (469-477)
  source 1..27: mol_type = other RNA
ggcgcccacttcagcgtgtcctctctg

SEQ ID NO: 73931 - RNA, 27 nt, synthetic construct
  misc_feature 1..27: note = Replication protein A 70 kDa DNA-binding subunit (8-16)
  source 1..27: mol_type = other RNA
ggcgccatcgctgcaattatgcagaag

SEQ ID NO: 73932 - RNA, 27 nt, synthetic construct
  misc_feature 1..27: note = WD repeat-containing protein 89 (351-359)
  source 1..27: mol_type = other RNA
ggcgccatcgagaagaccttcacaaaa

SEQ ID NO: 73933 - RNA, 33 nt, synthetic construct
  misc_feature 1..33: note = Elongation factor 2 (190-200)
  source 1..33: mol_type = other RNA
ggcgccctgtgcgaggaaaacatgagaggggtg

SEQ ID NO: 73934 - RNA, 27 nt, synthetic construct
  misc_feature 1..27: note = NHP2-like protein 1 (38-46)
  source 1..27: mol_type = other RNA
ggcgccaacgaggctaccaagacactg

SEQ ID NO: 73935 - RNA, 39 nt, synthetic construct
  misc_feature 1..39: note = Nestin (515-527)
  source 1..39: mol_type = other RNA
ggcgcccccgtgcacctggggcagggacaattcctcaag

SEQ ID NO: 73936 - RNA, 51 nt, synthetic construct
  misc_feature 1..51: note = Galectin-1 (66-82)
  source 1..51: mol_type = other RNA
ggcgcctgggggaccgagcagagagaagctgtgttcccctttcaacctgga

SEQ ID NO: 73937 - RNA, 27 nt, synthetic construct
  misc_feature 1..27: note = Calcium-transporting ATPase type 2C member 1 (481-489)
  source 1..27: mol_type = other RNA
ggcgcctacgagcaggtgatcaagtat

SEQ ID NO: 73938 - RNA, 27 nt, synthetic construct
  misc_feature 1..27: note = Delta(24)-sterol reductase (349-357)
  source 1..27: mol_type = other RNA
ggcgcctacggggagcccagagtgaag

SEQ ID NO: 73939 - RNA, 27 nt, synthetic construct
  misc_feature 1..27: note = Ribosomal protein S6 kinase alpha-5 (58-66)
  source 1..27: mol_type = other RNA
ggcgcctacgggaaggtgttcctggtc

SEQ ID NO: 73940 - RNA, 45 nt, synthetic construct
  misc_feature 1..45: note = Heterogeneous nuclear ribonucleoprotein F (26-40)
  source 1..45: mol_type = other RNA
ggcgcctacagctcccaggtgatgcaagggatgggagtctctgct

SEQ ID NO: 73941 - RNA, 27 nt, synthetic construct
  misc_feature 1..27: note = Complement factor H-related protein 2 (34-42)
  source 1..27: mol_type = other RNA
ggcgacatcaccagcttcctgctctcc

SEQ ID NO: 73942 - RNA, 27 nt, synthetic construct
  misc_feature 1..27: note = Protein SMG8 (168-176)
  source 1..27: mol_type = other RNA
ggcgaggccgggggaggtctgagcctc

SEQ ID NO: 73943 - RNA, 36 nt, synthetic construct
  misc_feature 1..36: note = Cytoplasmic dynein 1 heavy chain 1 (2969-2980)
  source 1..36: mol_type = other RNA
ggcgaggacttcgatgaagacctgagaaccgtgctc

SEQ ID NO: 73944 - RNA, 30 nt, synthetic construct
  misc_feature 1..30: note = Cytoplasmic dynein 1 light intermediate chain 1 (74-83)
  source 1..30: mol_type = other RNA
ggcgaggacggggccggaaagaccagcctg

SEQ ID NO: 73945 - RNA, 27 nt, synthetic construct
  misc_feature 1..27: note = Neural cell adhesion molecule L1 (1050-1058)
  source 1..27: mol_type = other RNA
ggcgaggaaaaggggggagccagcctg

SEQ ID NO: 73946 - RNA, 27 nt, synthetic construct
  misc_feature 1..27: note = HEAT repeat-containing protein 5B (1966-1974)
  source 1..27: mol_type = other RNA
ggcgaggaacagaacagagtgcaactg

SEQ ID NO: 73947 - RNA, 33 nt, synthetic construct
  misc_feature 1..33: note = Rho guanine nucleotide exchange factor 2 (798-808)
  source 1..33: mol_type = other RNA
ggcgaggaaagagccaccgaggctgggagcctg

SEQ ID NO: 73948 - RNA, 27 nt, synthetic construct
  misc_feature 1..27: note = Chondroitin sulfate synthase 2 (169-177)
  source 1..27: mol_type = other RNA
ggcgaggaaagacccatcgggcacctg

SEQ ID NO: 73949 - RNA, 30 nt, synthetic construct
  misc_feature 1..30: note = CD276 antigen (290-299)
  source 1..30: mol_type = other RNA
ggcgagggggaaggaagcaagaccgccctg

SEQ ID NO: 73950 - RNA, 27 nt, synthetic construct
  misc_feature 1..27: note = Ras GTPase-activating-like protein IQGAP1 (1300-1308)
  source 1..27: mol_type = other RNA
ggcgagatcattaacacccacacactg

SEQ ID NO: 73951 - RNA, 27 nt, synthetic construct
  misc_feature 1..27: note = Bifunctional 3'-phosphoadenosine 5'-phosphosulfate synthase 2 (170-178)
  source 1..27: mol_type = other RNA
ggcgagatcaaggggttcaccggaatt

SEQ ID NO: 73952 - RNA, 33 nt, synthetic construct
  misc_feature 1..33: note = Serine/threonine-protein kinase TBK1 (496-506)
  source 1..33: mol_type = other RNA
ggcgagatcagcgacattcacaccaagctgctc

SEQ ID NO: 73953 - RNA, 30 nt, synthetic construct
  misc_feature 1..30: note = Leucine zipper putative tumor suppressor 2 (448-457)
  source 1..30: mol_type = other RNA
ggcgagatcagcctgctcaagcagcaactt

SEQ ID NO: 73954 - RNA, 33 nt, synthetic construct
  misc_feature 1..33: note = DNA-directed RNA polymerase III subunit RPC3 (18-28)
  source 1..33: mol_type = other RNA
ggcgagatcgtggaaaagattggggtccacctg

SEQ ID NO: 73955 - RNA, 27 nt, synthetic construct
  misc_feature 1..27: note = Coatomer subunit beta' (652-660)
  source 1..27: mol_type = other RNA
ggcgagctgaagatcgcctaccagctc

SEQ ID NO: 73956 - RNA, 27 nt, synthetic construct
  misc_feature 1..27: note = DNA topoisomerase 3-beta-1 (168-176)
  source 1..27: mol_type = other RNA
ggcgagcccgaccacaacgaagccctg

SEQ ID NO: 73957 - RNA, 36 nt, synthetic construct
  misc_feature 1..36: note = Ras-related protein Rab-5A (27-38)
  source 1..36: mol_type = other RNA
ggcgagagcgccgtggggaagtcctctctggtcctc

SEQ ID NO: 73958 - RNA, 27 nt, synthetic construct
  misc_feature 1..27: note = Hemicentin-1 (1905-1913)
  source 1..27: mol_type = other RNA
ggcgagacccagcaacacatccagctg

SEQ ID NO: 73959 - RNA, 27 nt, synthetic construct
  misc_feature 1..27: note = NF-kappa-B inhibitor beta (105-113)
  source 1..27: mol_type = other RNA
ggcgagaccagcacagtggaaaagctg

SEQ ID NO: 73960 - RNA, 27 nt, synthetic construct
  misc_feature 1..27: note = Probable N-acetyltransferase 16 (116-124)
  source 1..27: mol_type = other RNA
ggcgagaccgtgctggtcgaagggctc

SEQ ID NO: 73961 - RNA, 39 nt, synthetic construct
  misc_feature 1..39: note = 5,6-dihydroxyindole-2-carboxylic acid oxidase (209-221)
  source 1..39: mol_type = other RNA
ggcgaggtggacttcagccacgaagggcccgcctttctg

SEQ ID NO: 73962 - RNA, 33 nt, synthetic construct
  misc_feature 1..33: note = Unconventional myosin-X (1723-1733)
  source 1..33: mol_type = other RNA
ggcgaggtggtcgaaaagctgatcagagggctc

SEQ ID NO: 73963 - RNA, 30 nt, synthetic construct
  misc_feature 1..30: note = Ornithine aminotransferase, mitochondrial (121-130)
  source 1..30: mol_type = other RNA
ggcgagtacgaagagtatatcaccaagctg

SEQ ID NO: 73964 - RNA, 27 nt, synthetic construct
  misc_feature 1..27: note = Carbonic anhydrase-related protein (45-53)
  source 1..27: mol_type = other RNA
ggcgagtaccagagccccatcaacctg

SEQ ID NO: 73965 - RNA, 51 nt, synthetic construct
  misc_feature 1..51: note = Peptidyl-prolyl cis-trans isomerase A (64-80)
  source 1..51: mol_type = other RNA
ggcggggacttcaccagacacaacggaacaggtggcaagagcatctacggg

SEQ ID NO: 73966 - RNA, 42 nt, synthetic construct
  misc_feature 1..42: note = NEDD8-conjugating enzyme Ubc12 (170-183)
  source 1..42: mol_type = other RNA
ggcgggtacatcggaagcacctatttcgagagatgcctgaag

SEQ ID NO: 73967 - RNA, 30 nt, synthetic construct
  misc_feature 1..30: note = Fibrocystin-L (2531-2540)
  source 1..30: mol_type = other RNA
ggcatcgagcacgggaacattctgcagtac

SEQ ID NO: 73968 - RNA, 27 nt, synthetic construct
  misc_feature 1..27: note = Polypeptide N-acetylgalactosaminyltransferase 16 (295-303)
  source 1..27: mol_type = other RNA
ggcatcttcgtgattgacaagagctgg

SEQ ID NO: 73969 - RNA, 30 nt, synthetic construct
  misc_feature 1..30: note = 2'-5'-oligoadenylate synthase-like protein (493-502)
  source 1..30: mol_type = other RNA
ggcatccaggacagcgataccctgattctc

SEQ ID NO: 73970 - RNA, 27 nt, synthetic construct
  misc_feature 1..27: note = 60S ribosomal protein L37a (8-16)
  source 1..27: mol_type = other RNA
ggcatcgtggggaagtacggaaccaga

SEQ ID NO: 73971 - RNA, 27 nt, synthetic construct
  misc_feature 1..27: note = Intraflagellar transport protein 172 homolog (129-137)
  source 1..27: mol_type = other RNA
ggcctggccgaggggaaggtgagactc

SEQ ID NO: 73972 - RNA, 27 nt, synthetic construct
  misc_feature 1..27: note = Pre-B-cell leukemia transcription factor-interacting protein 1 (428-436)
  source 1..27: mol_type = other RNA
ggcctggccgagctcgggcacagactt

SEQ ID NO: 73973 - RNA, 27 nt, synthetic construct
  misc_feature 1..27: note = NADH dehydrogenase (ubiquinone) 1 alpha subcomplex subunit 1 (20-28)
  source 1..27: mol_type = other RNA
ggcctggccaccgcttacatccacaga

SEQ ID NO: 73974 - RNA, 27 nt, synthetic construct
  misc_feature 1..27: note = Selenocysteine insertion sequence-binding protein 2-like (751-759)
  source 1..27: mol_type = other RNA
ggcctggacgaggccctctacaacgtg

SEQ ID NO: 73975 - RNA, 27 nt, synthetic construct
  misc_feature 1..27: note = Solute carrier family 25 member 33 (93-101)
  source 1..27: mol_type = other RNA
ggcctggggcccaacctcgtgggagtc

SEQ ID NO: 73976 - RNA, 24 nt, synthetic construct
  misc_feature 1..24: note = Lysine-specific demethylase 3A (124-131)
  source 1..24: mol_type = other RNA
ggcctggggagcatcacctccgtg

SEQ ID NO: 73977 - RNA, 27 nt, synthetic construct
  misc_feature 1..27: note = Membrane-associated transporter protein (409-417)
  source 1..27: mol_type = other RNA
ggcctggggaccggattcatcggtctc

SEQ ID NO: 73978 - RNA, 27 nt, synthetic construct
  misc_feature 1..27: note = Plectin (546-554)
  source 1..27: mol_type = other RNA
ggcctgcaccagagcatcgaggaattc

SEQ ID NO: 73979 - RNA, 27 nt, synthetic construct
  misc_feature 1..27: note = Filamin-A (1300-1308)
  source 1..27: mol_type = other RNA
ggcctgcacagcgtggacgtcacctac

SEQ ID NO: 73980 - RNA, 36 nt, synthetic construct
  misc_feature 1..36: note = Ubiquitin-conjugating enzyme E2 G1 (28-39)
  source 1..36: mol_type = other RNA
ggcctgatcgacgataacgacctctacagatgggag

SEQ ID NO: 73981 - RNA, 27 nt, synthetic construct
  misc_feature 1..27: note = Dedicator of cytokinesis protein 11 (1172-1180)
  source 1..27: mol_type = other RNA
ggcctgctccttgagaacatccagaga

SEQ ID NO: 73982 - RNA, 33 nt, synthetic construct
  misc_feature 1..33: note = ATP-dependent RNA helicase DDX1 (121-131)
  source 1..33: mol_type = other RNA
ggcctgatgaaggggaaacactactatgaggtg

SEQ ID NO: 73983 - RNA, 27 nt, synthetic construct
  misc_feature 1..27: note = U7 snRNA-associated Sm-like protein LSm10 (23-31)
  source 1..27: mol_type = other RNA
ggcctgcaggggagagtgaccacagtc

SEQ ID NO: 73984 - RNA, 27 nt, synthetic construct
  misc_feature 1..27: note = Mortality factor 4-like protein 1 (100-108)
  source 1..27: mol_type = other RNA
ggcctgcagcaaaagaacgtggaggtc

SEQ ID NO: 73985 - RNA, 21 nt, synthetic construct
  misc_feature 1..21: note = Microtubule-associated protein 1B (225-231)
  source 1..21: mol_type = other RNA
ggcctgagcgagttcaccgaa

SEQ ID NO: 73986 - RNA, 27 nt, synthetic construct
  misc_feature 1..27: note = Pterin-4-alpha-carbinolamine dehydratase (12-20)
  source 1..27: mol_type = other RNA
ggcctgagcgagagagacatcaacctc

SEQ ID NO: 73987 - RNA, 27 nt, synthetic construct
  misc_feature 1..27: note = Protein-methionine sulfoxide oxidase MICAL3 (1054-1062)
  source 1..27: mol_type = other RNA
ggcctgagcgaggtgctcgtccagatc

SEQ ID NO: 73988 - RNA, 27 nt, synthetic construct
  misc_feature 1..27: note = Probable E3 ubiquitin-protein ligase HERC1 (3214-3222)
  source 1..27: mol_type = other RNA
ggcctgaccgacatcagaacactcgtg

SEQ ID NO: 73989 - RNA, 33 nt, synthetic construct
  misc_feature 1..33: note = Zinc transporter ZIP14 (20-30)
  source 1..33: mol_type = other RNA
ggcctgtggagaaccacacccgaggcccacgct

SEQ ID NO: 73990 - RNA, 33 nt, synthetic construct
  misc_feature 1..33: note = Prolyl 3-hydroxylase 2 (87-97)
  source 1..33: mol_type = other RNA
ggcctgtacgaggccatcgctgaccactatatg

SEQ ID NO: 73991 - RNA, 30 nt, synthetic construct
  misc_feature 1..30: note = Guanine nucleotide-binding protein-like 3-like protein (377-386)
  source 1..30: mol_type = other RNA
ggcctgtacagccaggagcaagccgctaag

SEQ ID NO: 73992 - RNA, 27 nt, synthetic construct
  misc_feature 1..27: note = Tuberin (1302-1310)
  source 1..27: mol_type = other RNA
ggcatggacagaaggaccgatgcctac

SEQ ID NO: 73993 - RNA, 33 nt, synthetic construct
  misc_feature 1..33: note = Unconventional myosin-Va (1628-1638)
  source 1..33: mol_type = other RNA
ggcatgctggagcacgaaaccatccagggggtg

SEQ ID NO: 73994 - RNA, 51 nt, synthetic construct
  misc_feature 1..51: note = Spectrin alpha chain, non-erythrocytic 1 (367-383)
  source 1..51: mol_type = other RNA
ggcatgatgcccagagacgagaccgatagcaagacagcctccccttggaaa

SEQ ID NO: 73995 - RNA, 27 nt, synthetic construct
  misc_feature 1..27: note = Solute carrier family 35 member E1 (21-29)
  source 1..27: mol_type = other RNA
ggcatgatgaccgccatcctgggggtg

SEQ ID NO: 73996 - RNA, 27 nt, synthetic construct
  misc_feature 1..27: note = Catenin beta-1 (106-114)
  source 1..27: mol_type = other RNA
ggcatgcagatccccagcacccaattc

SEQ ID NO: 73997 - RNA, 51 nt, synthetic construct
  misc_feature 1..51: note = Autophagy-related protein 2 homolog A (1914-1930)
  source 1..51: mol_type = other RNA
ggcatgagaaaccagatcgtgcccgacgcccacaaggatcatgctctgaaa

SEQ ID NO: 73998 - RNA, 27 nt, synthetic construct
  misc_feature 1..27: note = Synaptic vesicle membrane protein VAT-1 homolog (137-145)
  source 1..27: mol_type = other RNA
ggcatgtggcaggaggaagtgaccgtc

SEQ ID NO: 73999 - RNA, 36 nt, synthetic construct
  misc_feature 1..36: note = BMP and activin membrane-bound inhibitor homolog (249-260)
  source 1..36: mol_type = other RNA
ggcatgtacagcgggcacggaaagctggagttcgtg

SEQ ID NO: 74000 - RNA, 30 nt, synthetic construct
  misc_feature 1..30: note = Bifunctional lysine-specific demethylase and histidyl-hydroxylase MINA (93-102)
  source 1..30: mol_type = other RNA
ggcatgtactatgggagagacgtgaacgtc

SEQ ID NO: 74001 - RNA, 51 nt, synthetic construct
  misc_feature 1..51: note = Heterogeneous nuclear ribonucleoprotein A1-like 2 (126-142)
  source 1..51: mol_type = other RNA
ggcaacttcgggggaagaagctccggtccctacggcgggggaggccagtat

SEQ ID NO: 74002 - RNA, 27 nt, synthetic construct
  misc_feature 1..27: note = Uncharacterized protein KIAA1841 (80-88)
  source 1..27: mol_type = other RNA
ggcaacgtgatcagcattctgatatcc

SEQ ID NO: 74003 - RNA, 48 nt, synthetic construct
  misc_feature 1..48: note = Vimentin (17-32)
  source 1..48: mol_type = other RNA
ggccccgggaccgccagcagaccttcctcttcaaggagttacgtgaca

SEQ ID NO: 74004 - RNA, 51 nt, synthetic construct
  misc_feature 1..51: note = Vimentin (17-33)
  source 1..51: mol_type = other RNA
ggccccgggaccgccagcagaccttcctcttcaaggagttacgtgacaact

SEQ ID NO: 74005 - RNA, 42 nt, synthetic construct
  misc_feature 1..42: note = Stromal membrane-associated protein 2 (336-349)
  source 1..42: mol_type = other RNA
ggccaggccgctaaccaaaccctgagcccccagatgtggaag

SEQ ID NO: 74006 - RNA, 33 nt, synthetic construct
  misc_feature 1..33: note = Integrin beta-3 (297-307)
  source 1..33: mol_type = other RNA
ggccagtgccacgtggggagcgacaaccattac

SEQ ID NO: 74007 - RNA, 30 nt, synthetic construct
  misc_feature 1..30: note = Anaphase-promoting complex subunit 7 (149-158)
  source 1..30: mol_type = other RNA
ggccaggagagacccagcgtgacctcctac

SEQ ID NO: 74008 - RNA, 27 nt, synthetic construct
  misc_feature 1..27: note = Protein FAM98A (492-500)
  source 1..27: mol_type = other RNA
ggccagttcgagcaacactttcagcat

SEQ ID NO: 74009 - RNA, 30 nt, synthetic construct
  misc_feature 1..30: note = UPF0428 protein CXorf56 (123-132)
  source 1..30: mol_type = other RNA
ggccaggggttcggaaagaccaacatctac

SEQ ID NO: 74010 - RNA, 27 nt, synthetic construct
  misc_feature 1..27: note = Melanoma antigen preferentially expressed in tumors (89-97)
  source 1..27: mol_type = other RNA
ggccagcacctgcatctcgagaccttc

SEQ ID NO: 74011 - RNA, 27 nt, synthetic construct
  misc_feature 1..27: note = Sodium-dependent neutral amino acid transporter B(0)AT2 (281-289)
  source 1..27: mol_type = other RNA
ggccagatcacccacaacacaagcttc

SEQ ID NO: 74012 - RNA, 27 nt, synthetic construct
  misc_feature 1..27: note = Class E basic helix-loop-helix protein 41 (208-216)
  source 1..27: mol_type = other RNA
ggccagaagctggagcccctcgcctac

SEQ ID NO: 74013 - RNA, 42 nt, synthetic construct
  misc_feature 1..42: note = Heterogeneous nuclear ribonucleoprotein U (692-705)
  source 1..42: mol_type = other RNA
ggccagaagccctggagccaacactaccatcaggggtattac

SEQ ID NO: 74014 - RNA, 27 nt, synthetic construct
  misc_feature 1..27: note = CAP-Gly domain-containing linker protein 3 (317-325)
  source 1..27: mol_type = other RNA
ggccagaagcaagggatcgtgagattc

SEQ ID NO: 74015 - RNA, 30 nt, synthetic construct
  misc_feature 1..30: note = Protein SCAI (271-280)
  source 1..30: mol_type = other RNA
ggccagctgagcctcgccgacgctcttatc

SEQ ID NO: 74016 - RNA, 33 nt, synthetic construct
  misc_feature 1..33: note = Ras GTPase-activating protein-binding protein 2 (102-112)
  source 1..33: mol_type = other RNA
ggccagcccgagagaaagttcatgcaaaccttt

SEQ ID NO: 74017 - RNA, 27 nt, synthetic construct
  misc_feature 1..27: note = Clathrin heavy chain 1 (26-34)
  source 1..27: mol_type = other RNA
ggccagccccaacctgggttcggatac

SEQ ID NO: 74018 - RNA, 27 nt, synthetic construct
  misc_feature 1..27: note = Kinesin-like protein KIF3C (89-97)
  source 1..27: mol_type = other RNA
ggccagaccgggacaggaaagacttac

SEQ ID NO: 74019 - RNA, 30 nt, synthetic construct; identical to SEQ ID NO: 49792
  misc_feature 1..30: note = F-box only protein 7 (137-146)
  source 1..30: mol_type = other RNA

SEQ ID NO: 74020 - RNA, 27 nt, synthetic construct
  misc_feature 1..27: note = Protein FAM13A (81-89)
  source 1..27: mol_type = other RNA
ggcagagacaaggggctgatcaacaaa

SEQ ID NO: 74021 - RNA, 57 nt, synthetic construct
  misc_feature 1..57: note = Nucleolar and spindle-associated protein 1 (253-271)
  source 1..57: mol_type = other RNA
ggcagaagctgcgggcccgcctcccagtctaccctgggactcaagggttcacttaaa

SEQ ID NO: 74022 - RNA, 27 nt, synthetic construct
  misc_feature 1..27: note = Phosphatidylinositide phosphatase SAC2 (738-746)
  source 1..27: mol_type = other RNA
ggcagcgacctgcccatcattgagaag

SEQ ID NO: 74023 - RNA, 33 nt, synthetic construct; identical to SEQ ID NO: 49796
  misc_feature 1..33: note = Anoctamin-4 (845-855)
  source 1..33: mol_type = other RNA

SEQ ID NO: 74024 - RNA, 42 nt, synthetic construct
  misc_feature 1..42: note = Keratin, type II cytoskeletal 1 (603-616)
  source 1..42: mol_type = other RNA
ggcagcgggggaggttcctctggcgggtcaatcggaggcaga

SEQ ID NO: 74025 - RNA, 27 nt, synthetic construct
  misc_feature 1..27: note = HLA class I histocompatibility antigen, B-50 alpha chain (25-33)
  source 1..27: mol_type = other RNA
ggcagccactccatgagatacttccat

SEQ ID NO: 74026 - RNA, 27 nt, synthetic construct
  misc_feature 1..27: note = LIM and calponin homology domains-containing protein 1 (610-618)
  source 1..27: mol_type = other RNA
ggcagcatcgagattaacataaagaaa

SEQ ID NO: 74027 - RNA, 36 nt, synthetic construct
  misc_feature 1..36: note = Poly(rC)-binding protein 1 (26-37)
  source 1..36: mol_type = other RNA
ggcagcatcattgggaagaaaggagagtccgtgaag

SEQ ID NO: 74028 - RNA, 39 nt, synthetic construct
  misc_feature 1..39: note = Poly(rC)-binding protein 2 (26-38)
  source 1..39: mol_type = other RNA
ggcagcatcattgggaagaaaggagagtccgtgaagaaa

SEQ ID NO: 74029 - RNA, 27 nt, synthetic construct
  misc_feature 1..27: note = Parkinson disease 7 domain-containing protein 1 (55-63)
  source 1..27: mol_type = other RNA
ggcagcctggccagaatcctccagcac

SEQ ID NO: 74030 - RNA, 27 nt, synthetic construct
  misc_feature 1..27: note = Integrator complex subunit 4 (30-38)
  source 1..27: mol_type = other RNA
ggcagcctggagaagtccgtgaccaaa

SEQ ID NO: 74031 - RNA, 30 nt, synthetic construct
  misc_feature 1..30: note = Phytanoyl-CoA dioxygenase, peroxisomal (117-126)
  source 1..30: mol_type = other RNA
ggcagcctgaagccccacgactaccctaaa

SEQ ID NO: 74032 - RNA, 27 nt, synthetic construct
  misc_feature 1..27: note = Signal peptidase complex catalytic subunit SEC11A (55-63)
  source 1..27: mol_type = other RNA
ggcagcatggagcccgccttccacaga

SEQ ID NO: 74033 - RNA, 27 nt, synthetic construct
  misc_feature 1..27: note = ER membrane protein complex subunit 1 (351-359)
  source 1..27: mol_type = other RNA
ggcagcatggggtccttctctgagaag

SEQ ID NO: 74034 - RNA, 33 nt, synthetic construct
  misc_feature 1..33: note = SLAIN motif-containing protein 2 (286-296)
  source 1..33: mol_type = other RNA
ggcagcatgaaggacgattcctggaaagacggg

SEQ ID NO: 74035 - RNA, 27 nt, synthetic construct
  misc_feature 1..27: note = Dynein heavy chain 14, axonemal (154-162)
  source 1..27: mol_type = other RNA
ggcagctccaagatcgccattcagaaa

SEQ ID NO: 74036 - RNA, 33 nt, synthetic construct
  misc_feature 1..33: note = Dyslexia-associated protein KIAA0319-like protein (680-690)
  source 1..33: mol_type = other RNA
ggcagcgtgcccaacgggcagacccctctgaag

SEQ ID NO: 74037 - RNA, 39 nt, synthetic construct
  misc_feature 1..39: note = 28S ribosomal protein S16, mitochondrial (52-64)
  source 1..39: mol_type = other RNA
ggcagctacgaccccctgcctaactcccacggggagaag

SEQ ID NO: 74038 - RNA, 27 nt, synthetic construct
  misc_feature 1..27: note = Transcription factor SOX-10 (199-207)
  source 1..27: mol_type = other RNA
ggcaccgccgctatccaggcacactac

SEQ ID NO: 74039 - RNA, 30 nt, synthetic construct
  misc_feature 1..30: note = 5,6-dihydroxyindole-2-carboxylic acid oxidase (495-504)
  source 1..30: mol_type = other RNA
ggcaccgccagctacctgatcagagctagg

SEQ ID NO: 74040 - RNA, 24 nt, synthetic construct
  misc_feature 1..24: note = FRAS1-related extracellular matrix protein 1 (1422-1429)
  source 1..24: mol_type = other RNA
ggcaccgacaagcccgaggaactg

SEQ ID NO: 74041 - RNA, 27 nt, synthetic construct
  misc_feature 1..27: note = Retinol dehydrogenase 8 (207-215)
  source 1..27: mol_type = other RNA
ggcaccgaccccgagacactgcactac

SEQ ID NO: 74042 - RNA, 27 nt, synthetic construct
  misc_feature 1..27: note = Receptor-type tyrosine-protein phosphatase gamma isoform X5 (1086-1094)
  source 1..27: mol_type = other RNA
ggcaccgactacatcaacgccagctat

SEQ ID NO: 74043 - RNA, 27 nt, synthetic construct
  misc_feature 1..27: note = Fibronectin (331-339)
  source 1..27: mol_type = other RNA
ggcaccgactacaagatctatctgtac

SEQ ID NO: 74044 - RNA, 27 nt, synthetic construct
  misc_feature 1..27: note = Myelin proteolipid protein (42-50)
  source 1..27: mol_type = other RNA
ggcaccgagaagctgatcgaaacatac

SEQ ID NO: 74045 - RNA, 36 nt, synthetic construct
  misc_feature 1..36: note = Fructose-bisphosphate aldolase A (48-59)
  source 1..36: mol_type = other RNA
ggcaccgagaacacagaagagaatagaaggttctac

SEQ ID NO: 74046 - RNA, 36 nt, synthetic construct
  misc_feature 1..36: note = Activating signal cointegrator 1 complex subunit 3 (1388-1399)
  source 1..36: mol_type = other RNA
ggcaccgagtactatgacgggaagacaagaaggtac

SEQ ID NO: 74047 - RNA, 30 nt, synthetic construct
  misc_feature 1..30: note = 39S ribosomal protein L41, mitochondrial (18-27)
  source 1..30: mol_type = other RNA
ggcaccttcgaccccgataacctggagaag

SEQ ID NO: 74048 - RNA, 36 nt, synthetic construct; identical to SEQ ID NO: 49821
  misc_feature 1..36: note = Fibronectin (567-578)
  source 1..36: mol_type = other RNA

SEQ ID NO: 74049 - RNA, 27 nt, synthetic construct
  misc_feature 1..27: note = NHS-like protein 1 (375-383)
  source 1..27: mol_type = other RNA
ggcaccgggacactgctcagacccaag

SEQ ID NO: 74050 - RNA, 30 nt, synthetic construct
  misc_feature 1..30: note = Receptor-interacting serine/threonine-protein kinase 4 (183-192)
  source 1..30: mol_type = other RNA
ggcaccatcgcctacctgccccctgagaga

SEQ ID NO: 74051 - RNA, 30 nt, synthetic construct
  misc_feature 1..30: note = Centromere protein F (3155-3164)
  source 1..30: mol_type = other RNA
ggcaccatcctgagagagcccacaactaag

SEQ ID NO: 74052 - RNA, 27 nt, synthetic construct
  misc_feature 1..27: note = SWI/SNF-related matrix-associated actin-dependent regulator of chromatin subfamily E member 1-related (80-88)
  source 1..27: mol_type = other RNA
ggcaccctggacttctacatggccaga

SEQ ID NO: 74053 - RNA, 36 nt, synthetic construct
  misc_feature 1..36: note = Translocating chain-associated membrane protein 1 (356-367)
  source 1..36: mol_type = other RNA
ggcaccctgacaagcaacgtggccgactcccccaga

SEQ ID NO: 74054 - RNA, 30 nt, synthetic construct
  misc_feature 1..30: note = Anaphase-promoting complex subunit 1 (1218-1227)
  source 1..30: mol_type = other RNA
ggcaccatggacatgagcatcacaagactg

SEQ ID NO: 74055 - RNA, 33 nt, synthetic construct
  misc_feature 1..33: note = F-actin-capping protein subunit beta (211-221)
  source 1..33: mol_type = other RNA
ggcaccatgaacctggggggaagcctcacaaga

SEQ ID NO: 74056 - RNA, 30 nt, synthetic construct
  misc_feature 1..30: note = Mitochondrial intermediate peptidase (222-231)
  source 1..30: mol_type = other RNA
ggcaccaacttccccaataagatcgagaaa

SEQ ID NO: 74057 - RNA, 27 nt, synthetic construct
  misc_feature 1..27: note = Synaptobrevin homolog YKT6 (178-186)
  source 1..27: mol_type = other RNA
ggcacccagagcaaggccttctacaaa

SEQ ID NO: 74058 - RNA, 27 nt, synthetic construct
  misc_feature 1..27: note = Protein FAM83D (419-427)
  source 1..27: mol_type = other RNA
ggcacccagacagccgtgatcactaga

SEQ ID NO: 74059 - RNA, 27 nt, synthetic construct
  misc_feature 1..27: note = Neuron navigator 2 (769-777)
  source 1..27: mol_type = other RNA
ggcacccaggtgacacacagcactctg

SEQ ID NO: 74060 - RNA, 27 nt, synthetic construct
  misc_feature 1..27: note = MpV17 transgene, murine homolog, glomerulosclerosis, isoform CRA_f (79-87)
  source 1..27: mol_type = other RNA
ggcaccacaaaggtggacgccctgaaa

SEQ ID NO: 74061 - RNA, 30 nt, synthetic construct
  misc_feature 1..30: note = Sorcin (118-127)
  source 1..30: mol_type = other RNA
ggcaccgtggacccccaggagctgcaaaag

SEQ ID NO: 74062 - RNA, 36 nt, synthetic construct
  misc_feature 1..36: note = Galectin-3 (136-147)
  source 1..36: mol_type = other RNA
ggcaccgtgaagcccaacgccaatagaatcgctctg

SEQ ID NO: 74063 - RNA, 33 nt, synthetic construct
  misc_feature 1..33: note = Putative germ cell-less protein-like 1-like (82-92)
  source 1..33: mol_type = other RNA
ggcacctacgggctggacagcgtgaagaaaaag

SEQ ID NO: 74064 - RNA, 48 nt, synthetic construct
  misc_feature 1..48: note = Chromobox protein homolog 6 (397-412)
  source 1..48: mol_type = other RNA
ggcgtggccggggctgcaggaggtggcgggagcatcggagcctccaag

SEQ ID NO: 74065 - RNA, 27 nt, synthetic construct
  misc_feature 1..27: note = WD repeat-containing protein 1 (324-332)
  source 1..27: mol_type = other RNA
ggcgtggacgggaacgtcagactgtac

SEQ ID NO: 74066 - RNA, 27 nt, synthetic construct
  misc_feature 1..27: note = Zinc finger protein 106 (750-758)
  source 1..27: mol_type = other RNA
ggcgtgttcgaggggcacaccagcaag

SEQ ID NO: 74067 - RNA, 30 nt, synthetic construct
  misc_feature 1..30: note = Scavenger receptor class B member 1 (291-300)
  source 1..30: mol_type = other RNA
ggcgtgttcgaggggatccccacctacaga

SEQ ID NO: 74068 - RNA, 30 nt, synthetic construct
  misc_feature 1..30: note = Vacuolar-sorting protein SNF8 (5-14)
  source 1..30: mol_type = other RNA
ggcgtgggggccggagctatcgcaaagaaa

SEQ ID NO: 74069 - RNA, 42 nt, synthetic construct
  misc_feature 1..42: note = Dedicator of cytokinesis protein 4 (591-604)
  source 1..42: mol_type = other RNA
ggcgtgatcgacgccgctgtcaacgggggagttagcagatac

SEQ ID NO: 74070 - RNA, 27 nt, synthetic construct
  misc_feature 1..27: note = Ribosomal protein S6 kinase delta-1 (332-340)
  source 1..27: mol_type = other RNA
ggcgtgatcgacaaggtcctgctcgtt

SEQ ID NO: 74071 - RNA, 27 nt, synthetic construct
  misc_feature 1..27: note = Disabled homolog 2 (110-118)
  source 1..27: mol_type = other RNA
ggcgtgatcgagcacgaacatcccgtc

SEQ ID NO: 74072 - RNA, 33 nt, synthetic construct
  misc_feature 1..33: note = Probable ATP-dependent RNA helicase DDX58 (746-756)
  source 1..33: mol_type = other RNA
ggcgtgatcgagaaggaacagattaacatgtac

SEQ ID NO: 74073 - RNA, 33 nt, synthetic construct
  misc_feature 1..33: note = Regulator of chromosome condensation (182-192)
  source 1..33: mol_type = other RNA
ggcgtgatcgggctgctcgagcccatgaagaaa

SEQ ID NO: 74074 - RNA, 30 nt, synthetic construct
  misc_feature 1..30: note = Interleukin enhancer-binding factor 3 (91-100)
  source 1..30: mol_type = other RNA
ggcgtgatgagagtcgggctggttgccaag

SEQ ID NO: 74075 - RNA, 27 nt, synthetic construct
  misc_feature 1..27: note = Chromodomain-helicase-DNA-binding protein 4 (1522-1530)
  source 1..27: mol_type = other RNA
ggcgtgatgagcctgatcagaaagaaa

SEQ ID NO: 74076 - RNA, 27 nt, synthetic construct
  misc_feature 1..27: note = Non-structural maintenance of chromosomes element 1 homolog (3-11)
  source 1..27: mol_type = other RNA
ggcgtgatgaccgacgtccacagaagg

SEQ ID NO: 74077 - RNA, 36 nt, synthetic construct
  misc_feature 1..36: note = POTE ankyrin domain family member I (75-86)
  source 1..36: mol_type = other RNA
ggcgtgacccacacagtccccatctacgaggggtat

SEQ ID NO: 74078 - RNA, 30 nt, synthetic construct
  misc_feature 1..30: note = Protein-glutamine gamma-glutamyltransferase 6 (232-241)
  source 1..30: mol_type = other RNA
ggcgtggtccaggggcaatggcagggaaag

SEQ ID NO: 74079 - RNA, 36 nt, synthetic construct
  misc_feature 1..36: note = Copine-3 (78-89)
  source 1..36: mol_type = other RNA
ggcgtgtacgacatcgataacaagaccattgagctg

SEQ ID NO: 74080 - RNA, 30 nt, synthetic construct; identical to SEQ ID NO: 49853
  misc_feature 1..30: note = Hyccin (107-116)
  source 1..30: mol_type = other RNA

SEQ ID NO: 74081 - RNA, 33 nt, synthetic construct
  misc_feature 1..33: note = Alpha-actinin-4 (5-15)
  source 1..33: mol_type = other RNA
cacgccgctaaccagagctaccaatatggcccc

SEQ ID NO: 74082 - RNA, 48 nt, synthetic construct
  misc_feature 1..48: note = Alpha-actinin-4 (5-20)
  source 1..48: mol_type = other RNA
cacgccgctaaccagagctaccaatatggcccctcctctgcagggaat

SEQ ID NO: 74083 - RNA, 27 nt, synthetic construct
  misc_feature 1..27: note = Transforming growth factor-beta receptor-associated protein 1 (725-733)
  source 1..27: mol_type = other RNA
cacgccggccccaccgctcatgagctg

SEQ ID NO: 74084 - RNA, 30 nt, synthetic construct
  misc_feature 1..30: note = Leucine-rich repeat-containing protein 1 (515-524)
  source 1..30: mol_type = other RNA
cacgccatcgacagagtgaccacaagcgtc

SEQ ID NO: 74085 - RNA, 27 nt, synthetic construct
  misc_feature 1..27: note = Coatomer subunit beta (447-455)
  source 1..27: mol_type = other RNA
cacgccatcaagagcgtgaaaatttac

SEQ ID NO: 74086 - RNA, 27 nt, synthetic construct
  misc_feature 1..27: note = G-protein coupled receptor 143 (190-198)
  source 1..27: mol_type = other RNA
cacgccatcccccattacgtgaccatg

SEQ ID NO: 74087 - RNA, 27 nt, synthetic construct
  misc_feature 1..27: note = ATP-dependent RNA helicase DDX3X (209-217)
  source 1..27: mol_type = other RNA
cacgccatccccattataaaggagaaa

SEQ ID NO: 74088 - RNA, 27 nt, synthetic construct
  misc_feature 1..27: note = Protein Smaug homolog 2 (682-690)
  source 1..27: mol_type = other RNA
cacgccctgggcggggagcatttcctc

SEQ ID NO: 74089 - RNA, 27 nt, synthetic construct
  misc_feature 1..27: note = Protein GREB1 (566-574)
  source 1..27: mol_type = other RNA
cacgccatggacggcgctagccatctg

SEQ ID NO: 74090 - RNA, 27 nt, synthetic construct
  misc_feature 1..27: note = Mothers against decapentaplegic homolog 4 (405-413)
  source 1..27: mol_type = other RNA
cacgccgtgttcgtccagagctactat

SEQ ID NO: 74091 - RNA, 27 nt, synthetic construct
  misc_feature 1..27: note = U4/U6.U5 tri-snRNP-associated protein 2 (151-159)
  source 1..27: mol_type = other RNA
cacgcctacatccatagcgtgcagttc

SEQ ID NO: 74092 - RNA, 27 nt, synthetic construct
  misc_feature 1..27: note = Helicase SRCAP (102-110)
  source 1..27: mol_type = other RNA
cacgaggccgaaatcgagaccagaatt

SEQ ID NO: 74093 - RNA, 30 nt, synthetic construct
  misc_feature 1..30: note = Zinc finger FYVE domain-containing protein 16 (414-423)
  source 1..30: mol_type = other RNA
cacgaggaaatccagaacagcgtggtcctg

SEQ ID NO: 74094 - RNA, 45 nt, synthetic construct
  misc_feature 1..45: note = Phospholipid hydroperoxide glutathione peroxidase, mitochondrial (42-56)
  source 1..45: mol_type = other RNA
cacgagttcagcgccaaggacatcgatggccatatggtgaacctg

SEQ ID NO: 74095 - RNA, 30 nt, synthetic construct
  misc_feature 1..30: note = Activin receptor type-1B isoform X3 (285-294)
  source 1..30: mol_type = other RNA
cacgagcatggcagcctgttcgactacctc

SEQ ID NO: 74096 - RNA, 27 nt, synthetic construct
  misc_feature 1..27: note = Sex comb on midleg-like protein 4 (131-139)
  source 1..27: mol_type = other RNA
cacgagatcgacggcaacgccctgctc

SEQ ID NO: 74097 - RNA, 39 nt, synthetic construct
  misc_feature 1..39: note = Insulin-like growth factor-binding protein 7 (270-282)
  source 1..39: mol_type = other RNA
cacgagatccccgtgaagaaaggcgaaggggccgagctg

SEQ ID NO: 74098 - RNA, 27 nt, synthetic construct
  misc_feature 1..27: note = Major facilitator superfamily domain-containing protein 12 (161-169)
  source 1..27: mol_type = other RNA
cacgagaaggtggaactgaccgccctc

SEQ ID NO: 74099 - RNA, 30 nt, synthetic construct
  misc_feature 1..30: note = Putative RNA-binding protein Luc7-like 1 (110-119)
  source 1..30: mol_type = other RNA
cacgagctgaacgaagagatcggcaagctc

SEQ ID NO: 74100 - RNA, 27 nt, synthetic construct
  misc_feature 1..27: note = Alpha-parvin (245-253)
  source 1..27: mol_type = other RNA
cacgagagagacgccttcgataccctg

SEQ ID NO: 74101 - RNA, 24 nt, synthetic construct
  misc_feature 1..24: note = Monocarboxylate transporter 5 (168-175)
  source 1..24: mol_type = other RNA
cacgagaccgaagagagcacaatc

SEQ ID NO: 74102 - RNA, 30 nt, synthetic construct
  misc_feature 1..30: note = Cadherin-19 (309-318)
  source 1..30: mol_type = other RNA
cacgagacccaggaaggcatcgtgattctg

SEQ ID NO: 74103 - RNA, 30 nt, synthetic construct
  misc_feature 1..30: note = Liprin-alpha-1 (69-78)
  source 1..30: mol_type = other RNA
cacgaggtgggccatgaaagagacagcctg

SEQ ID NO: 74104 - RNA, 30 nt, synthetic construct
  misc_feature 1..30: note = 60S ribosomal protein L36a-like (90-99)
  source 1..30: mol_type = other RNA
cacttcgagctgggcggggacaagaaaaga

SEQ ID NO: 74105 - RNA, 36 nt, synthetic construct
  misc_feature 1..36: note = 60S ribosomal protein L36a-like (90-101)
  source 1..36: mol_type = other RNA
cacttcgagctgggcggggacaagaaaagaaaggga

SEQ ID NO: 74106 - RNA, 39 nt, synthetic construct
  misc_feature 1..39: note = 60S ribosomal protein L36a-like (90-102)
  source 1..39: mol_type = other RNA
cacttcgagctgggcggggacaagaaaagaaagggacag

SEQ ID NO: 74107 - RNA, 51 nt, synthetic construct
  misc_feature 1..51: note = 60S ribosomal protein L36a-like (90-106)
  source 1..51: mol_type = other RNA
cacttcgagctgggcggggacaagaaaagaaagggacaggtgatccaattt

SEQ ID NO: 74108 - RNA, 39 nt, synthetic construct
  misc_feature 1..39: note = Interleukin enhancer-binding factor 3 (666-678)
  source 1..39: mol_type = other RNA
cacggcgggtacatgaacgccggagctggttatggcagc

SEQ ID NO: 74109 - RNA, 27 nt, synthetic construct
  misc_feature 1..27: note = Tubulin beta-2A chain (21-29)
  source 1..27: mol_type = other RNA
cacggcatcgaccccaccgggagctac

SEQ ID NO: 74110 - RNA, 39 nt, synthetic construct
  misc_feature 1..39: note = Dyslexia-associated protein KIAA0319-like protein (676-688)
  source 1..39: mol_type = other RNA
cacggccagaacgggagcgtgcccaatggacaaacccct

SEQ ID NO: 74111 - RNA, 30 nt, synthetic construct
  misc_feature 1..30: note = Putative heat shock protein HSP 90-beta-3 (6-15)
  source 1..30: mol_type = other RNA
caccatggcgaggaagaggtggaaaccttc

SEQ ID NO: 74112 - RNA, 48 nt, synthetic construct
  misc_feature 1..48: note = G protein-coupled receptor kinase 5 (575-590)
  source 1..48: mol_type = other RNA
caccatatcaacagcaatcacgtgtcctctaactcaaccggcagtagc

SEQ ID NO: 74113 - RNA, 51 nt, synthetic construct
  misc_feature 1..51: note = Non-POU domain-containing octamer-binding protein (28-44)
  source 1..51: mol_type = other RNA
caccatcagcaacagcagcagcaaccccctccaccgcccatccctgccaac

SEQ ID NO: 74114 - RNA, 27 nt, synthetic construct
  misc_feature 1..27: note = F-box/WD repeat-containing protein 11 (32-40)
  source 1..27: mol_type = other RNA
cacatcgccgagaacattctgagctac

SEQ ID NO: 74115 - RNA, 27 nt, synthetic construct
  misc_feature 1..27: note = 60S ribosomal protein L8 (172-180)
  source 1..27: mol_type = other RNA
cacatcggcaagcccagcaccattaga

SEQ ID NO: 74116 - RNA, 27 nt, synthetic construct
  misc_feature 1..27: note = Retinol dehydrogenase 14 (257-265)
  source 1..27: mol_type = other RNA
cacatccatattcccctgctcgtgaag

SEQ ID NO: 74117 - RNA, 27 nt, synthetic construct
  misc_feature 1..27: note = HMG box-containing protein 1 (138-146)
  source 1..27: mol_type = other RNA
cacatcattgccaccagcaagtccctg

SEQ ID NO: 74118 - RNA, 30 nt, synthetic construct
  misc_feature 1..30: note = NADH-ubiquinone oxidoreductase chain 5 (394-403)
  source 1..30: mol_type = other RNA
cacatcattgagaccgccaacatgagctac

SEQ ID NO: 74119 - RNA, 27 nt, synthetic construct
  misc_feature 1..27: note = UBX domain-containing protein 2A (198-206)
  source 1..27: mol_type = other RNA
cacatcaaggacttcattgagaaatac

SEQ ID NO: 74120 - RNA, 30 nt, synthetic construct
  misc_feature 1..30: note = Tyrosine-protein kinase JAK1 (584-593)
  source 1..30: mol_type = other RNA
cacatctacagcggcaccctgatggactat

SEQ ID NO: 74121 - RNA, 30 nt, synthetic construct
  misc_feature 1..30: note = Disintegrin and metalloproteinase domain-containing protein 10 (101-110)
  source 1..30: mol_type = other RNA
cacatctacaccggccatatttatgactac

SEQ ID NO: 74122 - RNA, 27 nt, synthetic construct
  misc_feature 1..27: note = Cyclin-L2 (129-137)
  source 1..27: mol_type = other RNA
cacctggccagcaagatcgaggaagct

SEQ ID NO: 74123 - RNA, 27 nt, synthetic construct
  misc_feature 1..27: note = Nesprin-1 (1108-1116)
  source 1..27: mol_type = other RNA
cacctggacgaggatcagcaagaactc

SEQ ID NO: 74124 - RNA, 21 nt, synthetic construct
  misc_feature 1..21: note = UDP-N-acetylglucosamine-dolichyl-phosphate N-acetylglucosaminephosphotransferase (55-61)
  source 1..21: mol_type = other RNA
cacctggacctcggcatcctt

SEQ ID NO: 74125 - RNA, 24 nt, synthetic construct
  misc_feature 1..24: note = UDP-N-acetylglucosamine-dolichyl-phosphate N-acetylglucosaminephosphotransferase (55-62)
  source 1..24: mol_type = other RNA
cacctggacctcggcatcctttac

SEQ ID NO: 74126 - RNA, 24 nt, synthetic construct
  misc_feature 1..24: note = Histone H3-like centromeric protein A (104-111)
  source 1..24: mol_type = other RNA
cacctgttcgaggacgcctacctc

SEQ ID NO: 74127 - RNA, 27 nt, synthetic construct
  misc_feature 1..27: note = Histone H3-like centromeric protein A (104-112)
  source 1..27: mol_type = other RNA
cacctgttcgaggacgcctacctcctt

SEQ ID NO: 74128 - RNA, 30 nt, synthetic construct
  misc_feature 1..30: note = WD repeat-containing protein 43 (142-151)
  source 1..30: mol_type = other RNA
cacctgttcgagcatatcctcaacggctac

SEQ ID NO: 74129 - RNA, 27 nt, synthetic construct
  misc_feature 1..27: note = UPF0536 protein C12orf66 (239-247)
  source 1..27: mol_type = other RNA
cacctgttcggcgggcagagccaaaag

SEQ ID NO: 74130 - RNA, 30 nt, synthetic construct
  misc_feature 1..30: note = Protein Shroom4 (1371-1380)
  source 1..30: mol_type = other RNA
cacctgttcgtgggcgacctcgataaggtc

SEQ ID NO: 74131 - RNA, 30 nt, synthetic construct; identical to SEQ ID NO: 49904
  misc_feature 1..30: note = cDNA FLJ60317, highly similar to Aminoacylase-1 (EC 3.5.1.14) (332-341)
  source 1..30: mol_type = other RNA

SEQ ID NO: 74132 - RNA, 33 nt, synthetic construct
  misc_feature 1..33: note = Homeodomain-interacting protein kinase 2 (531-541)
  source 1..33: mol_type = other RNA
cacctgctcgacttcccccatagcacccacgtg

SEQ ID NO: 74133 - RNA, 27 nt, synthetic construct
  misc_feature 1..27: note = Pre-mRNA-processing-splicing factor 8 (1875-1883)
  source 1..27: mol_type = other RNA
cacctgctcgacttccccaacatcgtg

SEQ ID NO: 74134 - RNA, 33 nt, synthetic construct
  misc_feature 1..33: note = Adenylosuccinate lyase (442-452)
  source 1..33: mol_type = other RNA
cacctgctcgaccccagctccttcaccggcaga

SEQ ID NO: 74135 - RNA, 33 nt, synthetic construct
  misc_feature 1..33: note = Mitotic checkpoint serine/threonine-protein kinase BUB1 (791-801)
  source 1..33: mol_type = other RNA
cacctgctcggcgagggggccttcgctcaggtg

SEQ ID NO: 74136 - RNA, 27 nt, synthetic construct
  misc_feature 1..27: note = Superkiller viralicidic activity 2-like 2 (735-743)
  source 1..27: mol_type = other RNA
cacctgctcagcgccatctcctctgtg

SEQ ID NO: 74137 - RNA, 27 nt, synthetic construct
  misc_feature 1..27: note = Glutamine synthetase (8-16)
  source 1..27: mol_type = other RNA
cacctgaacaagggcatcaaacaggtg

SEQ ID NO: 74138 - RNA, 27 nt, synthetic construct
  misc_feature 1..27: note = Integrator complex subunit 11 (516-524)
  source 1..27: mol_type = other RNA
cacctgcccgacggcagcgtgaccgtc

SEQ ID NO: 74139 - RNA, 27 nt, synthetic construct
  misc_feature 1..27: note = Putative ATP-dependent RNA helicase TDRD12 (984-992)
  source 1..27: mol_type = other RNA
cacctgcccgagcatttccacaccctc

SEQ ID NO: 74140 - RNA, 27 nt, synthetic construct
  misc_feature 1..27: note = Unconventional myosin-Id (220-228)
  source 1..27: mol_type = other RNA
cacctgcagaagagcctctcctcttac

SEQ ID NO: 74141 - RNA, 27 nt, synthetic construct
  misc_feature 1..27: note = Testis-expressed sequence 10 protein (95-103)
  source 1..27: mol_type = other RNA
cacctgagcaacatcctctccgaggtg

SEQ ID NO: 74142 - RNA, 27 nt, synthetic construct
  misc_feature 1..27: note = NADH-ubiquinone oxidoreductase chain 4 (83-91)
  source 1..27: mol_type = other RNA
cacctgagctccgagcccctctctaga

SEQ ID NO: 74143 - RNA, 27 nt, synthetic construct
  misc_feature 1..27: note = RAD50-interacting protein 1 (429-437)
  source 1..27: mol_type = other RNA
cacctggtggacgaggtcctccttttc

SEQ ID NO: 74144 - RNA, 27 nt, synthetic construct
  misc_feature 1..27: note = Thiamin pyrophosphokinase 1 (34-42)
  source 1..27: mol_type = other RNA
cacctgtggaacaaggccctccttaga

SEQ ID NO: 74145 - RNA, 30 nt, synthetic construct
  misc_feature 1..30: note = Proline-rich nuclear receptor coactivator 1 (204-213)
  source 1..30: mol_type = other RNA
cacctgtacgagcagcccaagatcaacaga

SEQ ID NO: 74146 - RNA, 27 nt, synthetic construct
  misc_feature 1..27: note = 60S ribosomal protein L19 (99-107)
  source 1..27: mol_type = other RNA
cacatgtaccatagcctgtatctcaag

SEQ ID NO: 74147 - RNA, 27 nt, synthetic construct
  misc_feature 1..27: note = COP9 signalosome complex subunit 8 (47-55)
  source 1..27: mol_type = other RNA
cacaacgacatgaataacgccagatac

SEQ ID NO: 74148 - RNA, 36 nt, synthetic construct
  misc_feature 1..36: note = Probable ATP-dependent RNA helicase DDX5 (585-596)
  source 1..36: mol_type = other RNA
cacaacggcatgaatcagcaagcctacgcttatccc

SEQ ID NO: 74149 - RNA, 24 nt, synthetic construct
  misc_feature 1..24: note = Ankycorbin (931-938)
  source 1..24: mol_type = other RNA
caccaggaggtgatcagcgtctac

SEQ ID NO: 74150 - RNA, 42 nt, synthetic construct
  misc_feature 1..42: note = Protein FAM98A (489-502)
  source 1..42: mol_type = other RNA
caccagggcgggcaattcgagcagcattttcagcacggaggt

SEQ ID NO: 74151 - RNA, 24 nt, synthetic construct
  misc_feature 1..24: note = WD repeat-containing protein 70 (230-237)
  source 1..24: mol_type = other RNA
caccagatcaagagcctgcaatac

SEQ ID NO: 74152 - RNA, 30 nt, synthetic construct
  misc_feature 1..30: note = Sulfotransferase 1C2 (198-207)
  source 1..30: mol_type = other RNA
caccagatcctgttcctcttttacgaggac

SEQ ID NO: 74153 - RNA, 33 nt, synthetic construct
  misc_feature 1..33: note = Melanocyte protein PMEL (562-572)
  source 1..33: mol_type = other RNA
caccagatcctgaagggcgggagcggaacctac

SEQ ID NO: 74154 - RNA, 24 nt, synthetic construct
  misc_feature 1..24: note = Kinesin-1 heavy chain (712-719)
  source 1..24: mol_type = other RNA
caccagaagcaaatcagctccctg

SEQ ID NO: 74155 - RNA, 27 nt, synthetic construct
  misc_feature 1..27: note = Zinc finger SWIM domain-containing protein 3 (499-507)
  source 1..27: mol_type = other RNA
caccagagcggctccgagctggcctac

SEQ ID NO: 74156 - RNA, 30 nt, synthetic construct
  misc_feature 1..30: note = Catenin delta-2 (274-283)
  source 1..30: mol_type = other RNA
cacagaccccctgccagcgagtacaccatg

SEQ ID NO: 74157 - RNA, 39 nt, synthetic construct
  misc_feature 1..39: note = RNMT-activating mini protein (94-106)
  source 1..39: mol_type = other RNA
cacagacaggagccctactatcctcaacagtacggccat

SEQ ID NO: 74158 - RNA, 27 nt, synthetic construct
  misc_feature 1..27: note = Biorientation of chromosomes in cell division protein 1-like 1 (75-83)
  source 1..27: mol_type = other RNA
cacagcgccctgcccaaccagtccctc

SEQ ID NO: 74159 - RNA, 30 nt, synthetic construct
  misc_feature 1..30: note = Monoacylglycerol lipase ABHD12 (365-374)
  source 1..30: mol_type = other RNA
cacagcgacctgggctacagacataagtat

SEQ ID NO: 74160 - RNA, 33 nt, synthetic construct
  misc_feature 1..33: note = Transient receptor potential cation channel subfamily A member 1 (758-768)
  source 1..33: mol_type = other RNA
cacagcgagatcctggacaccacaaactcctac

SEQ ID NO: 74161 - RNA, 27 nt, synthetic construct
  misc_feature 1..27: note = Alstrom syndrome protein 1 (958-966)
  source 1..27: mol_type = other RNA
cacagcgagaagtcctctgtgttctac

SEQ ID NO: 74162 - RNA, 27 nt, synthetic construct
  misc_feature 1..27: note = Glycine dehydrogenase (decarboxylating), mitochondrial (529-537)
  source 1..27: mol_type = other RNA
cacagcgagaccaacatcgtgagatac

SEQ ID NO: 74163 - RNA, 30 nt, synthetic construct
  misc_feature 1..30: note = Dedicator of cytokinesis protein 9 (1147-1156)
  source 1..30: mol_type = other RNA
cacagcttcgacgatagatacgcctccagg

SEQ ID NO: 74164 - RNA, 33 nt, synthetic construct
  misc_feature 1..33: note = Tubulin alpha-3C/D chain (138-148)
  source 1..33: mol_type = other RNA
cacagcttcggcgggggaaccggttccggcttt

SEQ ID NO: 74165 - RNA, 36 nt, synthetic construct
  misc_feature 1..36: note = Tubulin alpha-1C chain (104-115)
  source 1..36: mol_type = other RNA
cacagcttcggcgggggaaccggttccggctttaca

SEQ ID NO: 74166 - RNA, 24 nt, synthetic construct
  misc_feature 1..24: note = E3 ubiquitin-protein ligase TRIM33 (605-612)
  source 1..24: mol_type = other RNA
cacagcggcccccagtactccatg

SEQ ID NO: 74167 - RNA, 42 nt, synthetic construct
  misc_feature 1..42: note = Tubulin gamma-1 chain (139-152)
  source 1..42: mol_type = other RNA
cacagcatcgccggcgggaccggatccggtctgggctcttac

SEQ ID NO: 74168 - RNA, 36 nt, synthetic construct
  misc_feature 1..36: note = Macrophage migration inhibitory factor (61-72)
  source 1..36: mol_type = other RNA
cacagcatcggcaagattgggggagcccagaacaga

SEQ ID NO: 74169 - RNA, 33 nt, synthetic construct
  misc_feature 1..33: note = Rho-related BTB domain-containing protein 3 (176-186)
  source 1..33: mol_type = other RNA
cacagcctggacgatttctacatcggcaagtat

SEQ ID NO: 74170 - RNA, 33 nt, synthetic construct
  misc_feature 1..33: note = Copper transport protein ATOX1 (46-56)
  source 1..33: mol_type = other RNA
cacagcatggacaccctgctcgccacacttaag

SEQ ID NO: 74171 - RNA, 24 nt, synthetic construct
  misc_feature 1..24: note = 40S ribosomal protein S20 (92-99)
  source 1..24: mol_type = other RNA
cacagcccctccgagatcgtgaag

SEQ ID NO: 74172 - RNA, 36 nt, synthetic construct
  misc_feature 1..36: note = Transcriptional regulator Kaiso (573-584)
  source 1..36: mol_type = other RNA
cacagccaggacccctccggcgattctaagctgtac

SEQ ID NO: 74173 - RNA, 30 nt, synthetic construct
  misc_feature 1..30: note = FERM domain-containing protein 4A (823-832)
  source 1..30: mol_type = other RNA
cacagccagtcccaaccctcttcacagtac

SEQ ID NO: 74174 - RNA, 27 nt, synthetic construct
  misc_feature 1..27: note = Nipped-B-like protein (134-142)
  source 1..27: mol_type = other RNA
cacagctcccccgcctcttcaaactac

SEQ ID NO: 74175 - RNA, 30 nt, synthetic construct
  misc_feature 1..30: note = Melanocyte protein PMEL (639-648)
  source 1..30: mol_type = other RNA
cacagctcctctcattggctgagactcccc

SEQ ID NO: 74176 - RNA, 27 nt, synthetic construct
  misc_feature 1..27: note = Transformation/transcription domain-associated protein (3009-3017)
  source 1..27: mol_type = other RNA
cacagctcctctatcgtgaccgcctac

SEQ ID NO: 74177 - RNA, 33 nt, synthetic construct
  misc_feature 1..33: note = PERQ amino acid-rich with GYF domain-containing protein 2 (1230-1240)
  source 1..33: mol_type = other RNA
cacagcaccctgcattccgtgttccagacaaac

SEQ ID NO: 74178 - RNA, 45 nt, synthetic construct
  misc_feature 1..45: note = PERQ amino acid-rich with GYF domain-containing protein 2 (1230-1244)
  source 1..45: mol_type = other RNA
cacagcaccctgcattccgtgttccagacaaaccaatctaataac

SEQ ID NO: 74179 - RNA, 27 nt, synthetic construct
  misc_feature 1..27: note = Ribosome maturation protein SBDS (54-62)
  source 1..27: mol_type = other RNA
cacagcgtgttcgtcaacgtttccaag

SEQ ID NO: 74180 - RNA, 24 nt, synthetic construct
  misc_feature 1..24: note = Proteasome assembly chaperone 2 (85-92)
  source 1..24: mol_type = other RNA
cacagctaccagagaaacgacctg

SEQ ID NO: 74181 - RNA, 27 nt, synthetic construct
  misc_feature 1..27: note = Adenine DNAosylase (479-487)
  source 1..27: mol_type = other RNA
cacaccgccgctgtgagcacagcaatg

SEQ ID NO: 74182 - RNA, 27 nt, synthetic construct
  misc_feature 1..27: note = Protein archease (38-46)
  source 1..27: mol_type = other RNA
cacaccgccgacgtgcatggcctgtac

SEQ ID NO: 74183 - RNA, 30 nt, synthetic construct
  misc_feature 1..30: note = Protein archease (38-47)
  source 1..30: mol_type = other RNA
cacaccgccgacgtgcatggcctgtactat

SEQ ID NO: 74184 - RNA, 30 nt, synthetic construct
  misc_feature 1..30: note = Protein O-linked-mannose beta-1,2-N-acetylglucosaminyltransferase 1 (410-419)
  source 1..30: mol_type = other RNA
cacaccgccgaggaccccgctctgctctac

SEQ ID NO: 74185 - RNA, 27 nt, synthetic construct
  misc_feature 1..27: note = Proton myo-inositol cotransporter (546-554)
  source 1..27: mol_type = other RNA
cacaccgccgagtacctgacatattac

SEQ ID NO: 74186 - RNA, 27 nt, synthetic construct
  misc_feature 1..27: note = Hydroxyacylglutathione hydrolase-like protein (110-118)
  source 1..27: mol_type = other RNA
cacaccgccggccatatgagctacttc

SEQ ID NO: 74187 - RNA, 27 nt, synthetic construct
  misc_feature 1..27: note = Tensin-1 (628-636)
  source 1..27: mol_type = other RNA
cacaccgcccccatgagacctagctac

SEQ ID NO: 74188 - RNA, 27 nt, synthetic construct
  misc_feature 1..27: note = CD63 antigen (131-139)
  source 1..27: mol_type = other RNA
cacaccgccagcatcctggacagaatg

SEQ ID NO: 74189 - RNA, 27 nt, synthetic construct
  misc_feature 1..27: note = Alanine-tRNA ligase, cytoplasmic (605-613)
  source 1..27: mol_type = other RNA
cacaccgccacacatatcctgaacttc

SEQ ID NO: 74190 - RNA, 24 nt, synthetic construct
  misc_feature 1..24: note = U3 small nucleolar RNA-associated protein 6 homolog (267-274)
  source 1..24: mol_type = other RNA
cacaccgacgatcccctgacatgg

SEQ ID NO: 74191 - RNA, 24 nt, synthetic construct
  misc_feature 1..24: note = Mitochondrial enolase superfamily member 1 (29-36)
  source 1..24: mol_type = other RNA
cacaccgaccccgattacagcgcc

SEQ ID NO: 74192 - RNA, 30 nt, synthetic construct
  misc_feature 1..30: note = Ras GTPase-activating protein 3 (501-510)
  source 1..30: mol_type = other RNA
cacaccgacccccagacaagcagaactctg

SEQ ID NO: 74193 - RNA, 30 nt, synthetic construct
  misc_feature 1..30: note = Zinc finger protein DZIP1 (221-230)
  source 1..30: mol_type = other RNA
cacaccgaggaaaacagccatttcgagtac

SEQ ID NO: 74194 - RNA, 27 nt, synthetic construct
  misc_feature 1..27: note = Protein FAM214A (1013-1021)
  source 1..27: mol_type = other RNA
cacaccgaggaaagactgctcaggtac

SEQ ID NO: 74195 - RNA, 36 nt, synthetic construct
  misc_feature 1..36: note = Melanophilin (469-480)
  source 1..36: mol_type = other RNA
cacaccttcgccaagcccgtggtcgctcatcagagc

SEQ ID NO: 74196 - RNA, 33 nt, synthetic construct
  misc_feature 1..33: note = Cytochrome c oxidase subunit 1 (503-513)
  source 1..33: mol_type = other RNA
cacaccttcgaggaacccgtgtacatgaagagc

SEQ ID NO: 74197 - RNA, 39 nt, synthetic construct
  misc_feature 1..39: note = Protein tyrosine phosphatase type IVA 1 (21-33)
  source 1..39: mol_type = other RNA
cacaccttcatggagtttctgaagggcagcggggactac

SEQ ID NO: 74198 - RNA, 30 nt, synthetic construct
  misc_feature 1..30: note = GRB2-associated-binding protein 2 (554-563)
  source 1..30: mol_type = other RNA
cacaccttcaacagctcctcttcacagtac

SEQ ID NO: 74199 - RNA, 27 nt, synthetic construct
  misc_feature 1..27: note = Discoidin, CUB and LCCL domain-containing protein 1 (613-621)
  source 1..27: mol_type = other RNA
cacaccttcagcgcccagtccggctac

SEQ ID NO: 74200 - RNA, 27 nt, synthetic construct
  misc_feature 1..27: note = Importin-8 (408-416)
  source 1..27: mol_type = other RNA
cacaccatcgacacaattctgactgtg

SEQ ID NO: 74201 - RNA, 33 nt, synthetic construct
  misc_feature 1..33: note = Protein pelota homolog (100-110)
  source 1..33: mol_type = other RNA
cacaccatcgagctggaacccaacagacagttc

SEQ ID NO: 74202 - RNA, 27 nt, synthetic construct
  misc_feature 1..27: note = Tubulin polyglutamylase TTLL5 (968-976)
  source 1..27: mol_type = other RNA
cacaccatcggccccttcagctccttt

SEQ ID NO: 74203 - RNA, 30 nt, synthetic construct
  misc_feature 1..30: note = Nuclear pore complex protein Nup107 (862-871)
  source 1..30: mol_type = other RNA
cacaccatcctgcatagcacaggccagtac

SEQ ID NO: 74204 - RNA, 30 nt, synthetic construct; identical to SEQ ID NO: 49977
  misc_feature 1..30: note = S-methyl-5'-thioadenosine phosphorylase (65-74)
  source 1..30: mol_type = other RNA

SEQ ID NO: 74205 - RNA, 27 nt, synthetic construct
  misc_feature 1..27: note = Serologically defined colon cancer antigen 8 (120-128)
  source 1..27: mol_type = other RNA
cacaccatcaacgaccagagccaatac

SEQ ID NO: 74206 - RNA, 27 nt, synthetic construct
  misc_feature 1..27: note = Minor histocompatibility antigen H13 (119-127)
  source 1..27: mol_type = other RNA
cacaccatcagccccttcatgaacaag

SEQ ID NO: 74207 - RNA, 42 nt, synthetic construct
  misc_feature 1..42: note = Tyrosinase (143-156)
  source 1..42: mol_type = other RNA
cacaccatcagctccgactacgtgattcccataggcacatat

SEQ ID NO: 74208 - RNA, 27 nt, synthetic construct
  misc_feature 1..27: note = Cytoskeleton-associated protein 2 (499-507)
  source 1..27: mol_type = other RNA
cacaccatcgtggacattctgacaatg

SEQ ID NO: 74209 - RNA, 30 nt, synthetic construct
  misc_feature 1..30: note = Cytoplasmic protein NCK2 (351-360)
  source 1..30: mol_type = other RNA
cacaccatggacgagctggtggaacattac

SEQ ID NO: 74210 - RNA, 36 nt, synthetic construct
  misc_feature 1..36: note = U3 small nucleolar RNA-associated protein 18 homolog (362-373)
  source 1..36: mol_type = other RNA
cacaccatggacttcagccccagatccggctacttt

SEQ ID NO: 74211 - RNA, 33 nt, synthetic construct; identical to SEQ ID NO: 49984
  misc_feature 1..33: note = Queuine tRNA-ribosyltransferase subunit QTRTD1 (26-36)
  source 1..33: mol_type = other RNA

SEQ ID NO: 74212 - RNA, 27 nt, synthetic construct
  misc_feature 1..27: note = Syntaxin-18 (80-88)
  source 1..27: mol_type = other RNA
cacaccatgagcgagtacggcagaatg

SEQ ID NO: 74213 - RNA, 30 nt, synthetic construct
  misc_feature 1..30: note = Histone-lysine N-methyltransferase setd3 (279-288)
  source 1..30: mol_type = other RNA
cacaccaacggcctgatcacaactgggtac

SEQ ID NO: 74214 - RNA, 33 nt, synthetic construct
  misc_feature 1..33: note = Alpha-adducin (241-251)
  source 1..33: mol_type = other RNA
cacacccccgccggcgctgcagtgagcgccatg

SEQ ID NO: 74215 - RNA, 30 nt, synthetic construct
  misc_feature 1..30: note = Alpha-1,6-mannosylglycoprotein 6-beta-N-acetylglucosaminyltransferase B (424-433)
  source 1..30: mol_type = other RNA
cacacccccgacaacagcttcatgggcttt

SEQ ID NO: 74216 - RNA, 30 nt, synthetic construct
  misc_feature 1..30: note = Lanosterol 14-alpha demethylase (489-498)
  source 1..30: mol_type = other RNA
cacacccccgagaaccctgtgatcagatac

SEQ ID NO: 74217 - RNA, 33 nt, synthetic construct
  misc_feature 1..33: note = Iroquois-class homeodomain protein IRX-5 (89-99)
  source 1..33: mol_type = other RNA
cacacccccggcatggccgggagcctgggatac

SEQ ID NO: 74218 - RNA, 27 nt, synthetic construct
  misc_feature 1..27: note = Ligand of Numb protein X 2 (443-451)
  source 1..27: mol_type = other RNA
cacaccccccctccatactatagcaga

SEQ ID NO: 74219 - RNA, 33 nt, synthetic construct; identical to SEQ ID NO: 49992
  misc_feature 1..33: note = Tensin-1 (410-420)
  source 1..33: mol_type = other RNA

SEQ ID NO: 74220 - RNA, 30 nt, synthetic construct
  misc_feature 1..30: note = Succinate dehydrogenase (ubiquinone) flavoprotein subunit, mitochondrial (270-279)
  source 1..30: mol_type = other RNA
cacaccagcacaggcgacgggactgccatg

SEQ ID NO: 74221 - RNA, 27 nt, synthetic construct
  misc_feature 1..27: note = Very-long-chain (3R)-3-hydroxyacyl-CoA dehydratase 3 (185-193)
  source 1..27: mol_type = other RNA
cacaccgtggccgacatgatgtacttc

SEQ ID NO: 74222 - RNA, 27 nt, synthetic construct
  misc_feature 1..27: note = Tetratricopeptide repeat protein 38 (218-226)
  source 1..27: mol_type = other RNA
cacaccgtggcccatatccacgagatg

SEQ ID NO: 74223 - RNA, 30 nt, synthetic construct
  misc_feature 1..30: note = U3 small nucleolar RNA-associated protein 15 homolog (126-135)
  source 1..30: mol_type = other RNA
cacaccgtggacttcacagccgataagtac

SEQ ID NO: 74224 - RNA, 33 nt, synthetic construct
  misc_feature 1..33: note = Aprataxin (170-180)
  source 1..33: mol_type = other RNA
cacaccgtgggcgagaaggtcatcgttgacttc

SEQ ID NO: 74225 - RNA, 30 nt, synthetic construct
  misc_feature 1..30: note = Sodium-dependent phosphate transporter 1 (379-388)
  source 1..30: mol_type = other RNA
cacaccgtgcataaggacagcggcctgtac

SEQ ID NO: 74226 - RNA, 30 nt, synthetic construct
  misc_feature 1..30: note = Heterogeneous nuclear ribonucleoprotein A1-like 2 (15-24)
  source 1..30: mol_type = other RNA
cacaccgtgaacggccataattgcgaggtc

SEQ ID NO: 74227 - RNA, 36 nt, synthetic construct
  misc_feature 1..36: note = Melanocyte protein PMEL (285-296)
  source 1..36: mol_type = other RNA
cacacctacctggagcccggccctgtgacagcccag

SEQ ID NO: 74228 - RNA, 30 nt, synthetic construct
  misc_feature 1..30: note = Oxidoreductase-like domain-containing protein 1 (115-124)
  source 1..30: mol_type = other RNA
cacgtggccgacgagaacctgaaggctttc

SEQ ID NO: 74229 - RNA, 30 nt, synthetic construct
  misc_feature 1..30: note = Condensin complex subunit 2 (196-205)
  source 1..30: mol_type = other RNA
cacgtggccgacggcagcgctaccgagatg

SEQ ID NO: 74230 - RNA, 30 nt, synthetic construct
  misc_feature 1..30: note = 1-phosphatidylinositol 4,5-bisphosphate phosphodiesterase beta-4 (428-437)
  source 1..30: mol_type = other RNA
cacgtggccgaggaaagaaacatccattac

SEQ ID NO: 74231 - RNA, 30 nt, synthetic construct
  misc_feature 1..30: note = Protein FAN (292-301)
  source 1..30: mol_type = other RNA
cacgtggccgagcataccgctgaaagctac

SEQ ID NO: 74232 - RNA, 27 nt, synthetic construct
  misc_feature 1..27: note = GPI-anchor transamidase (62-70)
  source 1..27: mol_type = other RNA
cacgtggccaacaccctgagcgtctac

SEQ ID NO: 74233 - RNA, 30 nt, synthetic construct; identical to SEQ ID NO: 50006
  misc_feature 1..30: note = RNA polymerase-associated protein CTR9 homolog (745-754)
  source 1..30: mol_type = other RNA

SEQ ID NO: 74234 - RNA, 33 nt, synthetic construct; identical to SEQ ID NO: 50007
  misc_feature 1..33: note = RNA polymerase-associated protein CTR9 homolog (745-755)
  source 1..33: mol_type = other RNA

SEQ ID NO: 74235 - RNA, 27 nt, synthetic construct
  misc_feature 1..27: note = 40S ribosomal protein S16 (76-84)
  source 1..27: mol_type = other RNA
cacgtggcccagatctacgctattaga

SEQ ID NO: 74236 - RNA, 27 nt, synthetic construct
  misc_feature 1..27: note = F-box only protein 31 (181-189)
  source 1..27: mol_type = other RNA
cacgtggacgatcccatgagattcaag

SEQ ID NO: 74237 - RNA, 27 nt, synthetic construct
  misc_feature 1..27: note = tRNA wybutosine-synthesizing protein 2 homolog (192-200)
  source 1..27: mol_type = other RNA
cacgtggacaacggcatcagatacaag

SEQ ID NO: 74238 - RNA, 24 nt, synthetic construct
  misc_feature 1..24: note = P protein (222-229)
  source 1..24: mol_type = other RNA
cacgtggacagcaccctgctccag

SEQ ID NO: 74239 - RNA, 27 nt, synthetic construct
  misc_feature 1..27: note = P protein (222-230)
  source 1..27: mol_type = other RNA
cacgtggacagcaccctgctccaggtc

SEQ ID NO: 74240 - RNA, 30 nt, synthetic construct
  misc_feature 1..30: note = PRELI domain containing protein 3B (8-17)
  source 1..30: mol_type = other RNA
cacgtgttcgaccatccctgggagaccgtc

SEQ ID NO: 74241 - RNA, 30 nt, synthetic construct
  misc_feature 1..30: note = RNA polymerase II subunit A C-terminal domain phosphatase (243-252)
  source 1..30: mol_type = other RNA
cacgtgttcacctttggcagcagactgtac

SEQ ID NO: 74242 - RNA, 27 nt, synthetic construct
  misc_feature 1..27: note = Neuropilin-2 (221-229)
  source 1..27: mol_type = other RNA
cacgtgggccccctgatcgggaagtac

SEQ ID NO: 74243 - RNA, 27 nt, synthetic construct
  misc_feature 1..27: note = Filamin-A (138-146)
  source 1..27: mol_type = other RNA
cacgtgggcagcagactgtactccgtc

SEQ ID NO: 74244 - RNA, 27 nt, synthetic construct
  misc_feature 1..27: note = Endoribonuclease Dicer (1769-1777)
  source 1..27: mol_type = other RNA
cacgtgatcgacgatttcgtccagttt

SEQ ID NO: 74245 - RNA, 33 nt, synthetic construct
  misc_feature 1..33: note = TRAF2 and NCK-interacting protein kinase (370-380)
  source 1..33: mol_type = other RNA
cacgtgatcgacgtcgatagcggcaactcctac

SEQ ID NO: 74246 - RNA, 33 nt, synthetic construct
  misc_feature 1..33: note = Activity-dependent neuroprotector homeobox protein (210-220)
  source 1..33: mol_type = other RNA
cacgtgatcgaggaccatgaaagaattggctac

SEQ ID NO: 74247 - RNA, 27 nt, synthetic construct
  misc_feature 1..27: note = Interferon-induced helicase C domain-containing protein 1 (921-929)
  source 1..27: mol_type = other RNA
cacgtgatcgagaagatgcatcacgtc

SEQ ID NO: 74248 - RNA, 33 nt, synthetic construct
  misc_feature 1..33: note = Cytochrome b-c1 complex subunit 2, mitochondrial (172-182)
  source 1..33: mol_type = other RNA
cacgtgatcgagaacctgcatgccgctgcatac

SEQ ID NO: 74249 - RNA, 27 nt, synthetic construct
  misc_feature 1..27: note = Myomegalin (2179-2187)
  source 1..27: mol_type = other RNA
cacgtgatcggccatattgacgattac

SEQ ID NO: 74250 - RNA, 33 nt, synthetic construct
  misc_feature 1..33: note = Protein bicaudal C homolog 1 (746-756)
  source 1..33: mol_type = other RNA
cacgtgatcggcaaggggggaaacaatattaaa

SEQ ID NO: 74251 - RNA, 30 nt, synthetic construct; identical to SEQ ID NO: 50024
  misc_feature 1..30: note = 116 kDa U5 small nuclear ribonucleoprotein component (627-636)
  source 1..30: mol_type = other RNA

SEQ ID NO: 74252 - RNA, 30 nt, synthetic construct; identical to SEQ ID NO: 50025
  misc_feature 1..30: note = Voltage-gated potassium channel subunit beta-1 (216-225)
  source 1..30: mol_type = other RNA

SEQ ID NO: 74253 - RNA, 27 nt, synthetic construct
  misc_feature 1..27: note = Regulator of telomere elongation helicase 1 (740-748)
  source 1..27: mol_type = other RNA
cacgtgatcagagacgtcgcccagttc

SEQ ID NO: 74254 - RNA, 30 nt, synthetic construct
  misc_feature 1..30: note = BTB/POZ domain-containing protein KCTD1 (197-206)
  source 1..30: mol_type = other RNA
cacgtgatcagattccccctgaacggctac

SEQ ID NO: 74255 - RNA, 36 nt, synthetic construct
  misc_feature 1..36: note = DNA-directed RNA polymerase II subunit RPB1 (1384-1395)
  source 1..36: mol_type = other RNA
cacgtgatcagcttcgacggctcctacgtcaactat

SEQ ID NO: 74256 - RNA, 30 nt, synthetic construct
  misc_feature 1..30: note = Disco-interacting protein 2 homolog C (561-570)
  source 1..30: mol_type = other RNA
cacgtgatcagcattccctactccctgatg

SEQ ID NO: 74257 - RNA, 27 nt, synthetic construct
  misc_feature 1..27: note = E3 SUMO-protein ligase RanBP2 (2985-2993)
  source 1..27: mol_type = other RNA
cacgtgatcaccaagacaatggagctg

SEQ ID NO: 74258 - RNA, 30 nt, synthetic construct
  misc_feature 1..30: note = 40S ribosomal protein S4, Y isoform 1 (208-217)
  source 1..30: mol_type = other RNA
cacgtgaaggacgccaacggcaatagcttc

SEQ ID NO: 74259 - RNA, 30 nt, synthetic construct
  misc_feature 1..30: note = Nodal modulator 3 (252-261)
  source 1..30: mol_type = other RNA
cacgtgctgggcaccatcacaactgacaag

SEQ ID NO: 74260 - RNA, 30 nt, synthetic construct
  misc_feature 1..30: note = Pecanex-like protein 1 (113-122)
  source 1..30: mol_type = other RNA
cacgtgatggacgatggcaccaacgagtac

SEQ ID NO: 74261 - RNA, 30 nt, synthetic construct
  misc_feature 1..30: note = Pleckstrin homology domain-containing family G member 3 (497-506)
  source 1..30: mol_type = other RNA
cacgtgatggacagccatgtctccgagaga

SEQ ID NO: 74262 - RNA, 33 nt, synthetic construct
  misc_feature 1..33: note = Elongation factor G, mitochondrial (445-455)
  source 1..33: mol_type = other RNA
cacgtgcccgaccctgtcatcagcattgccatg

SEQ ID NO: 74263 - RNA, 27 nt, synthetic construct
  misc_feature 1..27: note = Probable phospholipid-transporting ATPase IIB (501-509)
  source 1..27: mol_type = other RNA
cacgtgagagacagctactcccagatg

SEQ ID NO: 74264 - RNA, 27 nt, synthetic construct
  misc_feature 1..27: note = Sideroflexin-1 (171-179)
  source 1..27: mol_type = other RNA
cacgtgagccccctgatcggcagattc

SEQ ID NO: 74265 - RNA, 27 nt, synthetic construct
  misc_feature 1..27: note = Long-chain-fatty-acid-CoA ligase 3 (4-12)
  source 1..27: mol_type = other RNA
cacgtgagctccaagccctctaccatg

SEQ ID NO: 74266 - RNA, 33 nt, synthetic construct
  misc_feature 1..33: note = Zinc finger protein 451 (549-559)
  source 1..33: mol_type = other RNA
cacgtgaccgagttccataacggccacagatac

SEQ ID NO: 74267 - RNA, 27 nt, synthetic construct
  misc_feature 1..27: note = Deoxyribose-phosphate aldolase (322-330)
  source 1..27: mol_type = other RNA
cacgtgaccggcagatacgccgcttat

SEQ ID NO: 74268 - RNA, 27 nt, synthetic construct
  misc_feature 1..27: note = Phosphoribosylformylglycinamidine synthase (342-350)
  source 1..27: mol_type = other RNA
cacgtggtcgccggcaccgctgggtac

SEQ ID NO: 74269 - RNA, 30 nt, synthetic construct
  misc_feature 1..30: note = Jouberin (369-378)
  source 1..30: mol_type = other RNA
cacgtggtcgacgagcataccggccagtac

SEQ ID NO: 74270 - RNA, 27 nt, synthetic construct
  misc_feature 1..27: note = Nephrocystin-4 (1128-1136)
  source 1..27: mol_type = other RNA
cacgtggtcgaccaggttttcagattt

SEQ ID NO: 74271 - RNA, 33 nt, synthetic construct
  misc_feature 1..33: note = Tetratricopeptide repeat protein 39B (542-552)
  source 1..33: mol_type = other RNA
cacgtggtcgagagcgaaaagctgctcaaatac

SEQ ID NO: 74272 - RNA, 30 nt, synthetic construct
  misc_feature 1..30: note = Dedicator of cytokinesis protein 10 (121-130)
  source 1..30: mol_type = other RNA
cacgtggtcaactacaagtatgagcagtac

SEQ ID NO: 74273 - RNA, 27 nt, synthetic construct
  misc_feature 1..27: note = Large proline-rich protein BAG6 (350-358)
  source 1..27: mol_type = other RNA
cacgtggtcagacccatgagccattac

SEQ ID NO: 74274 - RNA, 27 nt, synthetic construct
  misc_feature 1..27: note = HEAT repeat-containing protein 5A (373-381)
  source 1..27: mol_type = other RNA
cacgtggtcagctccgtttcttcattc

SEQ ID NO: 74275 - RNA, 36 nt, synthetic construct
  misc_feature 1..36: note = WD repeat-containing protein 74 (10-21)
  source 1..36: mol_type = other RNA
cacgtgtgggtcggcaccgagacagggatcctgaag

SEQ ID NO: 74276 - RNA, 33 nt, synthetic construct
  misc_feature 1..33: note = Vesicle-associated membrane protein 7 (159-169)
  source 1..33: mol_type = other RNA
cacgtgtacgaggaaccccaggcccattattac

SEQ ID NO: 74277 - RNA, 30 nt, synthetic construct
  misc_feature 1..30: note = Regulator of chromosome condensation (291-300)
  source 1..30: mol_type = other RNA
cacgtgtacggcttcgggctgagcaactat

SEQ ID NO: 74278 - RNA, 27 nt, synthetic construct
  misc_feature 1..27: note = Transmembrane protein 209 (513-521)
  source 1..27: mol_type = other RNA
cacgtgtacaacctgcccaagggcaga

SEQ ID NO: 74279 - RNA, 30 nt, synthetic construct
  misc_feature 1..30: note = Bcl-2 homologous antagonist/killer (141-150)
  source 1..30: mol_type = other RNA
cacgtgtaccagcatggcctgaccgggttc

SEQ ID NO: 74280 - RNA, 27 nt, synthetic construct
  misc_feature 1..27: note = Little elongation complex subunit 1 (1936-1944)
  source 1..27: mol_type = other RNA
cacgtgtacgtcggcaacatcagcaag

SEQ ID NO: 74281 - RNA, 30 nt, synthetic construct
  misc_feature 1..30: note = Neutral amino acid transporter B(0) (523-532)
  source 1..30: mol_type = other RNA
cactacagaggccccgccggggacgctacc

SEQ ID NO: 74282 - RNA, 30 nt, synthetic construct
  misc_feature 1..30: note = UPF0568 protein C14orf166 (230-239)
  source 1..30: mol_type = other RNA
atcgccgaccccaagaccgatcacagactg

SEQ ID NO: 74283 - RNA, 27 nt, synthetic construct
  misc_feature 1..27: note = Endoplasmin (212-220)
  source 1..27: mol_type = other RNA
atcgccgaccccagaggcaacaccctg

SEQ ID NO: 74284 - RNA, 36 nt, synthetic construct
  misc_feature 1..36: note = 40S ribosomal protein S19 (134-145)
  source 1..36: mol_type = other RNA
atcgccggccaggtggctgcagccaacaagaaacac

SEQ ID NO: 74285 - RNA, 27 nt, synthetic construct
  misc_feature 1..27: note = Tensin-1 (1325-1333)
  source 1..27: mol_type = other RNA
atcgccagccccggctccccttctctg

SEQ ID NO: 74286 - RNA, 27 nt, synthetic construct
  misc_feature 1..27: note = Hemicentin-1 (4090-4098)
  source 1..27: mol_type = other RNA
atcgccgtggacaagcccattaccctg

SEQ ID NO: 74287 - RNA, 27 nt, synthetic construct
  misc_feature 1..27: note = Uncharacterized protein KIAA1210 (412-420)
  source 1..27: mol_type = other RNA
atcgccgtggagagagtcattagcgtt

SEQ ID NO: 74288 - RNA, 27 nt, synthetic construct
  misc_feature 1..27: note = Protein SDE2 homolog (286-294)
  source 1..27: mol_type = other RNA
atcgacaaggagaccattgatctgctc

SEQ ID NO: 74289 - RNA, 39 nt, synthetic construct
  misc_feature 1..39: note = Syndecan-3 (293-305)
  source 1..39: mol_type = other RNA
atcgacagcggctcctctgccgctcagctgccccaaaag

SEQ ID NO: 74290 - RNA, 30 nt, synthetic construct
  misc_feature 1..30: note = Cullin-3 (721-730)
  source 1..30: mol_type = other RNA
atcgagggcctgattgaaagagagtacctc

SEQ ID NO: 74291 - RNA, 24 nt, synthetic construct
  misc_feature 1..24: note Dolichyl-diphosphooligosaccharide-proteinosyltransferase subunit 1 (381-388)
  source 1..24: mol_type = other RNA
atcgagattgacagcccctacgaa

SEQ ID NO: 74292 - RNA, 33 nt, synthetic construct
  misc_feature 1..33: note = Complex I assembly factor TMEM126B, mitochondrial (24-34)
  source 1..33: mol_type = other RNA
atcgagattatagaaaagaacttcgactacctg

SEQ ID NO: 74293 - RNA, 30 nt, synthetic construct
  misc_feature 1..30: note = Copper transport protein ATOX1 (42-51)
  source 1..30: mol_type = other RNA
atcgagagcgaacactccatggacaccctg

SEQ ID NO: 74294 - RNA, 33 nt, synthetic construct
  misc_feature 1..33: note = Copper transport protein ATOX1 (42-52)
  source 1..33: mol_type = other RNA
atcgagagcgaacactccatggacaccctgctc

SEQ ID NO: 74295 - RNA, 24 nt, synthetic construct
  misc_feature 1..24: note = N-acyl-aromatic-L-amino acid amidohydrolase (carboxylate-forming) (191-198)
  source 1..24: mol_type = other RNA
atcttcagcagaatgaggaccctg

SEQ ID NO: 74296 - RNA, 30 nt, synthetic construct
  misc_feature 1..30: note = Cadherin-19 (91-100)
  source 1..30: mol_type = other RNA
atcattgacgagagaaccggcgatatatac

SEQ ID NO: 74297 - RNA, 27 nt, synthetic construct
  misc_feature 1..27: note = 40S ribosomal protein S17 (95-103)
  source 1..27: mol_type = other RNA
atcattgaggtggaccccgataccaag

SEQ ID NO: 74298 - RNA, 30 nt, synthetic construct
  misc_feature 1..30: note = FACT complex subunit SSRP1 (30-39)
  source 1..30: mol_type = other RNA
atcattttcaagaacagcaaaaccggcaag

SEQ ID NO: 74299 - RNA, 27 nt, synthetic construct
  misc_feature 1..27: note = Neuron navigator 2 (2224-2232)
  source 1..27: mol_type = other RNA
atcattctggacaacctccaccatgtg

SEQ ID NO: 74300 - RNA, 42 nt, synthetic construct
  misc_feature 1..42: note = Putative heat shock 70 kDa protein 7 (30-43)
  source 1..42: mol_type = other RNA
atcctggccaacgaccagggcaatagaaccacacccagctac

SEQ ID NO: 74301 - RNA, 30 nt, synthetic construct
  misc_feature 1..30: note = Fer-1-like protein 5 (1201-1210)
  source 1..30: mol_type = other RNA
atcctggccagctgcgagctcattcttcag

SEQ ID NO: 74302 - RNA, 30 nt, synthetic construct
  misc_feature 1..30: note = U6 snRNA-associated Sm-like protein LSm8 (16-25)
  source 1..30: mol_type = other RNA
atcctggacgagagccacgaaagagtgttc

SEQ ID NO: 74303 - RNA, 30 nt, synthetic construct
  misc_feature 1..30: note = Cleft lip and palate transmembrane protein 1 (410-419)
  source 1..30: mol_type = other RNA
atcctggacaacgagaccaatttcgtggtc

SEQ ID NO: 74304 - RNA, 27 nt, synthetic construct
  misc_feature 1..27: note = Vesicle transport protein USE1 (249-257)
  source 1..27: mol_type = other RNA
atcctgttcattagaataatgcccaag

SEQ ID NO: 74305 - RNA, 30 nt, synthetic construct
  misc_feature 1..30: note = TELO2-interacting protein 1 homolog (52-61)
  source 1..30: mol_type = other RNA
atcctgttccccctcagatttacccttaag

SEQ ID NO: 74306 - RNA, 51 nt, synthetic construct
  misc_feature 1..51: note = Transforming growth factor beta receptor type 3 (374-390)
  source 1..51: mol_type = other RNA
atcctgctcgaccccggcgcccttcctgctctgcagaacccaccgattaga

SEQ ID NO: 74307 - RNA, 33 nt, synthetic construct
  misc_feature 1..33: note = Serine/threonine-protein kinase Sgk1 (323-333)
  source 1..33: mol_type = other RNA
atcctgctcgacagccagggccacattgtgctt

SEQ ID NO: 74308 - RNA, 33 nt, synthetic construct
  misc_feature 1..33: note = Eukaryotic translation initiation factor 3 subunit A (542-552)
  source 1..33: mol_type = other RNA
atcctgcaggagaaggaagagcaacaccagctc

SEQ ID NO: 74309 - RNA, 27 nt, synthetic construct
  misc_feature 1..27: note = Inositol-trisphosphate 3-kinase B (133-141)
  source 1..27: mol_type = other RNA
atcctgcagagagagctccaaaacgtg

SEQ ID NO: 74310 - RNA, 30 nt, synthetic construct
  misc_feature 1..30: note = Myotubularin-related protein 6 isoform X4 (104-113)
  source 1..30: mol_type = other RNA
atcctgaccaaggagctccttcacagcgtg

SEQ ID NO: 74311 - RNA, 39 nt, synthetic construct
  misc_feature 1..39: note = Sodium/potassium/calcium exchanger 5 (18-30)
  source 1..39: mol_type = other RNA
atcctgtgggccaccgctcacctcccccttagcggcaca

SEQ ID NO: 74312 - RNA, 33 nt, synthetic construct
  misc_feature 1..33: note = Chromosome transmission fidelity protein 8 homolog (58-68)
  source 1..33: mol_type = other RNA
atcctgtacggcaagattatacacctcgagaaa

SEQ ID NO: 74313 - RNA, 30 nt, synthetic construct
  misc_feature 1..30: note = 40S ribosomal protein S3 (188-197)
  source 1..30: mol_type = other RNA
atcatgctgccctgggaccctaccggcaag

SEQ ID NO: 74314 - RNA, 24 nt, synthetic construct
  misc_feature 1..24: note = Vimentin (182-189)
  source 1..24: mol_type = other RNA
atcatgagactgagggagaagctc

SEQ ID NO: 74315 - RNA, 36 nt, synthetic construct
  misc_feature 1..36: note = MAGUK p55 subfamily member 2 (395-406)
  source 1..36: mol_type = other RNA
atcatgtgggaccccgatagatacggcaccacagtg

SEQ ID NO: 74316 - RNA, 27 nt, synthetic construct
  misc_feature 1..27: note = Bromodomain adjacent to zinc finger domain protein 1A (730-738)
  source 1..27: mol_type = other RNA
atcaactgcgtgaccagagagcccctg

SEQ ID NO: 74317 - RNA, 27 nt, synthetic construct
  misc_feature 1..27: note = Sarcospan (117-125)
  source 1..27: mol_type = other RNA
atccagttcagcatgaagctgctctac

SEQ ID NO: 74318 - RNA, 30 nt, synthetic construct
  misc_feature 1..30: note = Catalase (347-356)
  source 1..30: mol_type = other RNA
atccagtacagcggcgaggtgagaaggttc

SEQ ID NO: 74319 - RNA, 51 nt, synthetic construct
  misc_feature 1..51: note = Calmodulin (126-142)
  source 1..51: mol_type = other RNA
atcagagaggccgacattgatggcgacgggcaggtgaactacgaagagttc

SEQ ID NO: 74320 - RNA, 27 nt, synthetic construct
  misc_feature 1..27: note = 60S ribosomal protein L32 (21-29)
  source 1..27: mol_type = other RNA
atcagacaccagagcgacaggtacgtg

SEQ ID NO: 74321 - RNA, 27 nt, synthetic construct
  misc_feature 1..27: note = ATP-citrate synthase (6-14)
  source 1..27: mol_type = other RNA
atcagcgagcagaccggcaaggaactg

SEQ ID NO: 74322 - RNA, 27 nt, synthetic construct
  misc_feature 1..27: note = XAGE1D protein (105-113)
  source 1..27: mol_type = other RNA
atcagccagacccccggcattaacctg

SEQ ID NO: 74323 - RNA, 24 nt, synthetic construct
  misc_feature 1..24: note = Metalloproteinase inhibitor 4 (52-59)
  source 1..24: mol_type = other RNA
atcagctccgagaaggtggtcccc

SEQ ID NO: 74324 - RNA, 36 nt, synthetic construct
  misc_feature 1..36: note = Transmembraneoprotein NMB (483-494)
  source 1..36: mol_type = other RNA
atcagcgtgcccgacagagatcctgcctccccactg

SEQ ID NO: 74325 - RNA, 33 nt, synthetic construct
  misc_feature 1..33: note = 40S ribosomal protein S18 (30-40)
  source 1..33: mol_type = other RNA
atcaccgccattaagggcgtggggagaaggtac

SEQ ID NO: 74326 - RNA, 27 nt, synthetic construct
  misc_feature 1..27: note = Melanoma-associated antigen D4 (549-557)
  source 1..27: mol_type = other RNA
atcaccgacgatttcgtgaagcagaaa

SEQ ID NO: 74327 - RNA, 45 nt, synthetic construct
  misc_feature 1..45: note = Melanocyte protein PMEL (216-230)
  source 1..45: mol_type = other RNA
atcaccgaccaggtgcccttcagcgtctccgtttctcaactgaga

SEQ ID NO: 74328 - RNA, 33 nt, synthetic construct
  misc_feature 1..33: note = Voltage-dependent L-type calcium channel subunit alpha-1C (1300-1310)
  source 1..33: mol_type = other RNA
atcaccgagaacgccgaagagaatagcagaatt

SEQ ID NO: 74329 - RNA, 30 nt, synthetic construct
  misc_feature 1..30: note = Beta-adrenergic receptor kinase 2 (53-62)
  source 1..30: mol_type = other RNA
atcaccttcgacaagatttttaaccagaaa

SEQ ID NO: 74330 - RNA, 39 nt, synthetic construct
  misc_feature 1..39: note = Galectin-3 (132-144)
  source 1..39: mol_type = other RNA
atcaccattctgggcacagtgaagcccaacgccaataga

SEQ ID NO: 74331 - RNA, 45 nt, synthetic construct
  misc_feature 1..45: note = Galectin-3 (132-146)
  source 1..45: mol_type = other RNA
atcaccattctgggcacagtgaagcccaacgccaatagaatagct

SEQ ID NO: 74332 - RNA, 27 nt, synthetic construct
  misc_feature 1..27: note = Catalase (42-50)
  source 1..27: mol_type = other RNA
atcaccgtgggccccagagggcctctg

SEQ ID NO: 74333 - RNA, 27 nt, synthetic construct
  misc_feature 1..27: note = Dipeptidyl peptidase 4 (185-193)
  source 1..27: mol_type = other RNA
atcacctggacaggcaaggaggacatt

SEQ ID NO: 74334 - RNA, 33 nt, synthetic construct
  misc_feature 1..33: note = Galectin-8 (91-101)
  source 1..33: mol_type = other RNA
atcacctacgacacacccttcaagagagagaaa

SEQ ID NO: 74335 - RNA, 36 nt, synthetic construct
  misc_feature 1..36: note = Proteasome subunit alpha type-7 (133-144)
  source 1..36: mol_type = other RNA
atcgtgggcttcgactttgatgggacccccagactg

SEQ ID NO: 74336 - RNA, 27 nt, synthetic construct
  misc_feature 1..27: note = F-box only protein 11 (19-27)
  source 1..27: mol_type = other RNA
atcgtgcacaccaacttcgtcgagaag

SEQ ID NO: 74337 - RNA, 27 nt, synthetic construct
  misc_feature 1..27: note = Protein SMG5 (881-889)
  source 1..27: mol_type = other RNA
atcgtgattatacccagaaccgtcatc

SEQ ID NO: 74338 - RNA, 39 nt, synthetic construct
  misc_feature 1..39: note = Zinc finger CCHC domain-containing protein 10 (33-45)
  source 1..39: mol_type = other RNA
atcgtgattagagacagcgtcgcccaggctggcctgaag

SEQ ID NO: 74339 - RNA, 30 nt, synthetic construct
  misc_feature 1..30: note = Teneurin-4 (347-356)
  source 1..30: mol_type = other RNA
atcgtgattagcgccaccctggtcatactc

SEQ ID NO: 74340 - RNA, 27 nt, synthetic construct
  misc_feature 1..27: note = U4/U6 small nuclear ribonucleoprotein Prp31 (462-470)
  source 1..27: mol_type = other RNA
atcgtgaacccccaggccgctgagaag

SEQ ID NO: 74341 - RNA, 27 nt, synthetic construct
  misc_feature 1..27: note = P antigen family member 5 (47-55)
  source 1..27: mol_type = other RNA
atcgtgcagcaacccaccgaggaaaag

SEQ ID NO: 74342 - RNA, 30 nt, synthetic construct
  misc_feature 1..30: note = Carbohydrate sulfotransferase 9 (266-275)
  source 1..30: mol_type = other RNA
atctacaccagactgaacacatatactaag

SEQ ID NO: 74343 - RNA, 39 nt, synthetic construct
  misc_feature 1..39: note = Cap-specific mRNAucleoside-2'-O-)-methyltransferase 1 (72-84)
  source 1..39: mol_type = other RNA
aaggccgacagcctggtggagggcacctcctctagatac

SEQ ID NO: 74344 - RNA, 27 nt, synthetic construct
  misc_feature 1..27: note = Antigen KI-67 (793-801)
  source 1..27: mol_type = other RNA
aaggccgacgtggaggaagagttcctg

SEQ ID NO: 74345 - RNA, 30 nt, synthetic construct
  misc_feature 1..30: note = Coatomer subunit zeta-1 (19-28)
  source 1..30: mol_type = other RNA
aaggccttcgagaaaaacatctttaataag

SEQ ID NO: 74346 - RNA, 33 nt, synthetic construct
  misc_feature 1..33: note = Zinc finger and SCAN domain-containing protein 21 (278-288)
  source 1..33: mol_type = other RNA
aaggccttcggccagagctccgacctgctcaaa

SEQ ID NO: 74347 - RNA, 27 nt, synthetic construct
  misc_feature 1..27: note = Estradiol 17-beta-dehydrogenase 11 (153-161)
  source 1..27: mol_type = other RNA
aaggccttcctgcccgctatgaccaaa

SEQ ID NO: 74348 - RNA, 30 nt, synthetic construct
  misc_feature 1..30: note = Antigen KI-67 (828-837)
  source 1..30: mol_type = other RNA
aaggccttcatgggcacccccgtgcagaaa

SEQ ID NO: 74349 - RNA, 27 nt, synthetic construct
  misc_feature 1..27: note = Zinc finger protein 7 (98-106)
  source 1..27: mol_type = other RNA
aaggccttcagccagtcctcttcactg

SEQ ID NO: 74350 - RNA, 33 nt, synthetic construct
  misc_feature 1..33: note = Zinc finger protein 430 (519-529)
  source 1..33: mol_type = other RNA
aaggccttcagccagtcctctaccctgacaaaa

SEQ ID NO: 74351 - RNA, 30 nt, synthetic construct
  misc_feature 1..30: note = Xaa-Pro dipeptidase (484-493)
  source 1..30: mol_type = other RNA
aaggccttcaccccctttagcggccctaaa

SEQ ID NO: 74352 - RNA, 33 nt, synthetic construct
  misc_feature 1..33: note = Zinc finger protein 721 (184-194)
  source 1..33: mol_type = other RNA
aaggccttcaccagctccacaactctgacgaaa

SEQ ID NO: 74353 - RNA, 27 nt, synthetic construct
  misc_feature 1..27: note = Dynactin subunit 1 (141-149)
  source 1..27: mol_type = other RNA
aaggcccacgctaaagcaatcgagatg

SEQ ID NO: 74354 - RNA, 27 nt, synthetic construct
  misc_feature 1..27: note = Histone-binding protein RBBP7 (263-271)
  source 1..27: mol_type = other RNA
aaggccatcttcaccggccacagcgct

SEQ ID NO: 74355 - RNA, 27 nt, synthetic construct
  misc_feature 1..27: note = Protein ECT2 (595-603)
  source 1..27: mol_type = other RNA
aaggccatcggcagcctgaaagaggtg

SEQ ID NO: 74356 - RNA, 27 nt, synthetic construct
  misc_feature 1..27: note = Nitrogen permease regulator 3-like protein (253-261)
  source 1..27: mol_type = other RNA
aaggccatcagaccctaccacgctctg

SEQ ID NO: 74357 - RNA, 27 nt, synthetic construct
  misc_feature 1..27: note = Elongation factor 1-gamma (193-201)
  source 1..27: mol_type = other RNA
aaggccaaagaccccttcgctcacctg

SEQ ID NO: 74358 - RNA, 33 nt, synthetic construct
  misc_feature 1..33: note = Dynamin-like 120 kDa protein, mitochondrial (154-164)
  source 1..33: mol_type = other RNA
aaggccctgcccagctccgaggacctcgtgaaa

SEQ ID NO: 74359 - RNA, 30 nt, synthetic construct
  misc_feature 1..30: note = Annexin A1 (98-107)
  source 1..30: mol_type = other RNA
aaggccctgaccggccacctcgaggaagtg

SEQ ID NO: 74360 - RNA, 27 nt, synthetic construct
  misc_feature 1..27: note = Phosphoinositide 3-kinase regulatory subunit 4 (572-580)
  source 1..27: mol_type = other RNA
aaggccaacgacgtgctgctcagccac

SEQ ID NO: 74361 - RNA, 27 nt, synthetic construct
  misc_feature 1..27: note = UDP-glucose:glycoprotein glucosyltransferase 2 (1135-1143)
  source 1..27: mol_type = other RNA
aaggccaaccccggcgcttggatcctg

SEQ ID NO: 74362 - RNA, 27 nt, synthetic construct
  misc_feature 1..27: note = Importin subunit alpha-1 (486-494)
  source 1..27: mol_type = other RNA
aaggccagcctgtccctcatcgagaaa

SEQ ID NO: 74363 - RNA, 27 nt, synthetic construct
  misc_feature 1..27: note = Ectonucleoside triphosphate diphosphohydrolase 6 (156-164)
  source 1..27: mol_type = other RNA
aaggccacccccctggtgctcaaagct

SEQ ID NO: 74364 - RNA, 27 nt, synthetic construct
  misc_feature 1..27: note = Protein FAM161A (564-572)
  source 1..27: mol_type = other RNA
aaggcctacgacagccaccagtccctg

SEQ ID NO: 74365 - RNA, 33 nt, synthetic construct
  misc_feature 1..33: note = Gamma-soluble NSF attachment protein (76-86)
  source 1..33: mol_type = other RNA
aaggcctacgagcaggctggcatgatgctgaaa

SEQ ID NO: 74366 - RNA, 27 nt, synthetic construct
  misc_feature 1..27: note = Cell division cycle protein 23 homolog (85-93)
  source 1..27: mol_type = other RNA
aaggcctacttcgacgtgaaagagtat

SEQ ID NO: 74367 - RNA, 33 nt, synthetic construct
  misc_feature 1..33: note = 28S ribosomal protein S29, mitochondrial (321-331)
  source 1..33: mol_type = other RNA
aaggcctacctgccccaggagctccttggcaaa

SEQ ID NO: 74368 - RNA, 27 nt, synthetic construct
  misc_feature 1..27: note = NF-kappa-B inhibitor zeta (545-553)
  source 1..27: mol_type = other RNA
aaggcctacaacggcaataccgctctg

SEQ ID NO: 74369 - RNA, 27 nt, synthetic construct
  misc_feature 1..27: note = Protein phosphatase Slingshot homolog 1 (418-426)
  source 1..27: mol_type = other RNA
aaggcctacaactatgtgaaacagaag

SEQ ID NO: 74370 - RNA, 27 nt, synthetic construct
  misc_feature 1..27: note = Integrator complex subunit 11 (122-130)
  source 1..27: mol_type = other RNA
aaggcctactatgctggccacgtgctg

SEQ ID NO: 74371 - RNA, 27 nt, synthetic construct
  misc_feature 1..27: note = Switch-associated protein 70 (278-286)
  source 1..27: mol_type = other RNA
aagtgcttcgacaaaacctttgagatc

SEQ ID NO: 74372 - RNA, 30 nt, synthetic construct
  misc_feature 1..30: note = Zinc finger protein 860 (39-48)
  source 1..30: mol_type = other RNA
aagtgcctggaccccacccagagagccctc

SEQ ID NO: 74373 - RNA, 30 nt, synthetic construct
  misc_feature 1..30: note = Keratin, type II cytoskeletal 1 (289-298)
  source 1..30: mol_type = other RNA
aaggacgtggatggcgcctacatgaccaaa

SEQ ID NO: 74374 - RNA, 30 nt, synthetic construct
  misc_feature 1..30: note = Little elongation complex subunit 1 (521-530)
  source 1..30: mol_type = other RNA
aaggaggccgctcccggcaaaagcgaactg

SEQ ID NO: 74375 - RNA, 30 nt, synthetic construct
  misc_feature 1..30: note = Rho guanine nucleotide exchange factor 40 (405-414)
  source 1..30: mol_type = other RNA
aaggaggacgccagccaccaggaagctctg

SEQ ID NO: 74376 - RNA, 27 nt, synthetic construct
  misc_feature 1..27: note = Ras-related protein Ral-A (118-126)
  source 1..27: mol_type = other RNA
aaggaggacgaaaacgtgcccttcctg

SEQ ID NO: 74377 - RNA, 27 nt, synthetic construct
  misc_feature 1..27: note = DNA ligase 3 (389-397)
  source 1..27: mol_type = other RNA
aaggaggacgaacagcaacaggccctg

SEQ ID NO: 74378 - RNA, 27 nt, synthetic construct
  misc_feature 1..27: note = Protein SOGA1 (625-633)
  source 1..27: mol_type = other RNA
aaggaggaccagcaaagagccctgctc

SEQ ID NO: 74379 - RNA, 27 nt, synthetic construct
  misc_feature 1..27: note Dolichyl-diphosphooligosaccharide-proteinosyltransferase subunit 2 (229-237)
  source 1..27: mol_type = other RNA
aaggaggaccaggtgatccaactgatg

SEQ ID NO: 74380 - RNA, 30 nt, synthetic construct
  misc_feature 1..30: note = DNA replication licensing factor MCM7 (259-268)
  source 1..30: mol_type = other RNA
aaggaggacgtgaacgaagccatcagactg

SEQ ID NO: 74381 - RNA, 30 nt, synthetic construct
  misc_feature 1..30: note = Spermine synthase (169-178)
  source 1..30: mol_type = other RNA
aaggaggactacaccggcaaagatgtgctg

SEQ ID NO: 74382 - RNA, 27 nt, synthetic construct
  misc_feature 1..27: note = Integrin alpha-7 (1092-1100)
  source 1..27: mol_type = other RNA
aaggaggaaaaaaccggcacaatcctg

SEQ ID NO: 74383 - RNA, 27 nt, synthetic construct
  misc_feature 1..27: note = Eukaryotic translation initiation factor 3 subunit A (105-113)
  source 1..27: mol_type = other RNA
aaggaggaaagccagcaaatggtgctg

SEQ ID NO: 74384 - RNA, 39 nt, synthetic construct
  misc_feature 1..39: note = Solute carrier family 43 member 3 (268-280)
  source 1..39: mol_type = other RNA
aaggaggaaacccccggcgccgggcagaaacaagagctg

SEQ ID NO: 74385 - RNA, 27 nt, synthetic construct
  misc_feature 1..27: note = Ras-related protein Rab-17 (148-156)
  source 1..27: mol_type = other RNA
aaggagttcgccgacagccagaaactg

SEQ ID NO: 74386 - RNA, 36 nt, synthetic construct
  misc_feature 1..36: note = Exportin-1 (1023-1034)
  source 1..36: mol_type = other RNA
aaggagttcgccggcgaagacaccagcgatctgttt

SEQ ID NO: 74387 - RNA, 24 nt, synthetic construct
  misc_feature 1..24: note = Heat shock protein HSP 90-alpha (656-663)
  source 1..24: mol_type = other RNA
aaggagttcgaaggcaaaaccctg

SEQ ID NO: 74388 - RNA, 27 nt, synthetic construct
  misc_feature 1..27: note = Protein phosphatase Slingshot homolog 1 (292-300)
  source 1..27: mol_type = other RNA
aaggagttcatcgacaacgaaatgctg

SEQ ID NO: 74389 - RNA, 30 nt, synthetic construct
  misc_feature 1..30: note = Oxidative stress-induced growth inhibitor 1 (196-205)
  source 1..30: mol_type = other RNA
aaggagcacgccatcccccatgtggtcctg

SEQ ID NO: 74390 - RNA, 27 nt, synthetic construct
  misc_feature 1..27: note = Trophinin (105-113)
  source 1..27: mol_type = other RNA
aaggagatcgacaaacagagctccctg

SEQ ID NO: 74391 - RNA, 30 nt, synthetic construct
  misc_feature 1..30: note = Heat shock 70 kDa protein 4 (766-775)
  source 1..30: mol_type = other RNA
aaggagatcgaagccaaaattaaggagctg

SEQ ID NO: 74392 - RNA, 27 nt, synthetic construct
  misc_feature 1..27: note = WASH complex subunit 7 (678-686)
  source 1..27: mol_type = other RNA
aaggagatcgaaaaagacctgagactc

SEQ ID NO: 74393 - RNA, 30 nt, synthetic construct
  misc_feature 1..30: note = THO complex subunit 5 homolog (217-226)
  source 1..30: mol_type = other RNA
aaggagatcgaagtgaaaaaggagtacctg

SEQ ID NO: 74394 - RNA, 30 nt, synthetic construct
  misc_feature 1..30: note = Calcium/calmodulin-dependent protein kinase type IV (135-144)
  source 1..30: mol_type = other RNA
aaggagatcttcgaaacccccacagagatt

SEQ ID NO: 74395 - RNA, 33 nt, synthetic construct
  misc_feature 1..33: note = Kinesin-like protein KIF2C (653-663)
  source 1..33: mol_type = other RNA
aaggagatcattcagcaaggccccgactggctg

SEQ ID NO: 74396 - RNA, 30 nt, synthetic construct
  misc_feature 1..30: note = Spectrin beta chain, non-erythrocytic 1 (924-933)
  source 1..30: mol_type = other RNA
aaggagatcaaagcccagcaagacaagctg

SEQ ID NO: 74397 - RNA, 27 nt, synthetic construct
  misc_feature 1..27: note = Eukaryotic translation initiation factor 3 subunit E (29-37)
  source 1..27: mol_type = other RNA
aaggagatctacaacgaaaaagagctg

SEQ ID NO: 74398 - RNA, 27 nt, synthetic construct
  misc_feature 1..27: note = Telomere-associated protein RIF1 (519-527)
  source 1..27: mol_type = other RNA
aaggagaaacccggcagcgaagtgctg

SEQ ID NO: 74399 - RNA, 30 nt, synthetic construct
  misc_feature 1..30: note = Beclin-1 (185-194)
  source 1..30: mol_type = other RNA
aaggagctggccctcgaagaggaaagactt

SEQ ID NO: 74400 - RNA, 27 nt, synthetic construct
  misc_feature 1..27: note = Ras and Rab interactor 1 (172-180)
  source 1..27: mol_type = other RNA
aaggagctggaagccatcagccacctc

SEQ ID NO: 74401 - RNA, 27 nt, synthetic construct
  misc_feature 1..27: note = Liprin-beta-1 (682-690)
  source 1..27: mol_type = other RNA
aaggagctgggcatcaaacacagcctc
